United States Patent Application Publication US 2020/0095579 A1 - sequence listing, part 21

SEQ ID NO: 331825 - DNA, 20 bp, Artificial Sequence
  Description of Artificial Sequence: Synthetic oligonucleotide
  Target: LAMA2; (+) strand; PAM type: YTN; PAM sequence: TTT
tatttacctgtagtgttttc

SEQ ID NO: 331826 - DNA, 20 bp, Artificial Sequence
  Description of Artificial Sequence: Synthetic oligonucleotide
  Target: LAMA2; (+) strand; PAM type: YTN; PAM sequence: TTT
atttacctgtagtgttttct

SEQ ID NO: 331827 - DNA, 20 bp, Artificial Sequence
  Description of Artificial Sequence: Synthetic oligonucleotide
  Target: LAMA2; (+) strand; PAM type: YTN; PAM sequence: TTA
tttacctgtagtgttttcta

SEQ ID NO: 331828 - DNA, 20 bp, Artificial Sequence
  Description of Artificial Sequence: Synthetic oligonucleotide
  Target: LAMA2; (+) strand; PAM type: YTN; PAM sequence: TTT
acctgtagtgttttctaaac

SEQ ID NO: 331829 - DNA, 20 bp, Artificial Sequence
  Description of Artificial Sequence: Synthetic oligonucleotide
  Target: LAMA2; (+) strand; PAM type: YTN; PAM sequence: TTA
cctgtagtgttttctaaacc

SEQ ID NO: 331830 - DNA, 20 bp, Artificial Sequence
  Description of Artificial Sequence: Synthetic oligonucleotide
  Target: LAMA2; (+) strand; PAM type: YTN; PAM sequence: CTG
tagtgttttctaaaccagtc

SEQ ID NO: 331831 - DNA, 20 bp, Artificial Sequence
  Description of Artificial Sequence: Synthetic oligonucleotide
  Target: LAMA2; (+) strand; PAM type: YTN; PAM sequence: TTT
tctaaaccagtcacagtctg

SEQ ID NO: 331832 - DNA, 20 bp, Artificial Sequence
  Description of Artificial Sequence: Synthetic oligonucleotide
  Target: LAMA2; (+) strand; PAM type: YTN; PAM sequence: TTT
ctaaaccagtcacagtctgg

SEQ ID NO: 331833 - DNA, 20 bp, Artificial Sequence
  Description of Artificial Sequence: Synthetic oligonucleotide
  Target: LAMA2; (+) strand; PAM type: YTN; PAM sequence: TTC
taaaccagtcacagtctgga

SEQ ID NO: 331834 - DNA, 20 bp, Artificial Sequence
  Description of Artificial Sequence: Synthetic oligonucleotide
  Target: LAMA2; (+) strand; PAM type: YTN; PAM sequence: CTA
aaccagtcacagtctggatt

SEQ ID NO: 331835 - DNA, 20 bp, Artificial Sequence
  Description of Artificial Sequence: Synthetic oligonucleotide
  Target: LAMA2; (+) strand; PAM type: YTN; PAM sequence: CTG
gatttactttacattattat

SEQ ID NO: 331836 - DNA, 20 bp, Artificial Sequence
  Description of Artificial Sequence: Synthetic oligonucleotide
  Target: LAMA2; (+) strand; PAM type: YTN; PAM sequence: TTT
actttacattattattattt

SEQ ID NO: 331837 - DNA, 20 bp, Artificial Sequence
  Description of Artificial Sequence: Synthetic oligonucleotide
  Target: LAMA2; (+) strand; PAM type: YTN; PAM sequence: TTA
ctttacattattattattta

SEQ ID NO: 331838 - DNA, 20 bp, Artificial Sequence
  Description of Artificial Sequence: Synthetic oligonucleotide
  Target: LAMA2; (+) strand; PAM type: YTN; PAM sequence: CTT
tacattattattatttatta

SEQ ID NO: 331839 - DNA, 20 bp, Artificial Sequence
  Description of Artificial Sequence: Synthetic oligonucleotide
  Target: LAMA2; (+) strand; PAM type: YTN; PAM sequence: TTT
acattattattatttattat

SEQ ID NO: 331840 - DNA, 20 bp, Artificial Sequence
  Description of Artificial Sequence: Synthetic oligonucleotide
  Target: LAMA2; (+) strand; PAM type: YTN; PAM sequence: TTA
cattattattatttattatt

SEQ ID NO: 331841 - DNA, 20 bp, Artificial Sequence
  Description of Artificial Sequence: Synthetic oligonucleotide
  Target: LAMA2; (+) strand; PAM type: YTN; PAM sequence: TTA
ttattatttattattattat

SEQ ID NO: 331842 - DNA, 20 bp, Artificial Sequence
  Description of Artificial Sequence: Synthetic oligonucleotide
  Target: LAMA2; (+) strand; PAM type: YTN; PAM sequence: TTA
ttatttattattattattat

SEQ ID NO: 331843 - DNA, 20 bp, Artificial Sequence
  Description of Artificial Sequence: Synthetic oligonucleotide
  Target: LAMA2; (+) strand; PAM type: YTN; PAM sequence: TTA
tttattattattattattat

SEQ ID NO: 331844 - DNA, 20 bp, Artificial Sequence
  Description of Artificial Sequence: Synthetic oligonucleotide
  Target: LAMA2; (+) strand; PAM type: YTN; PAM sequence: TTT
attattattattattattat

SEQ ID NO: 331845 - DNA, 20 bp, Artificial Sequence
  Description of Artificial Sequence: Synthetic oligonucleotide
  Target: LAMA2; (+) strand; PAM type: YTN; PAM sequence: TTA
ttattattattattattatt

SEQ ID NO: 331846 - DNA, 20 bp, Artificial Sequence
  Description of Artificial Sequence: Synthetic oligonucleotide
  Target: LAMA2; (+) strand; PAM type: YTN; PAM sequence: TTA
ttattattattattattatt

SEQ ID NO: 331847 - DNA, 20 bp, Artificial Sequence
  Description of Artificial Sequence: Synthetic oligonucleotide
  Target: LAMA2; (+) strand; PAM type: YTN; PAM sequence: TTA
ttattattattattattatt

SEQ ID NO: 331848 - DNA, 20 bp, Artificial Sequence
  Description of Artificial Sequence: Synthetic oligonucleotide
  Target: LAMA2; (+) strand; PAM type: YTN; PAM sequence: TTA
ttattattattattattatt

SEQ ID NO: 331849 - DNA, 20 bp, Artificial Sequence
  Description of Artificial Sequence: Synthetic oligonucleotide
  Target: LAMA2; (+) strand; PAM type: YTN; PAM sequence: TTA
ttattattattattatttga

SEQ ID NO: 331850 - DNA, 20 bp, Artificial Sequence
  Description of Artificial Sequence: Synthetic oligonucleotide
  Target: LAMA2; (+) strand; PAM type: YTN; PAM sequence: TTA
ttattattattatttgagat

SEQ ID NO: 331851 - DNA, 20 bp, Artificial Sequence
  Description of Artificial Sequence: Synthetic oligonucleotide
  Target: LAMA2; (+) strand; PAM type: YTN; PAM sequence: TTA
ttattattatttgagatgga

SEQ ID NO: 331852 - DNA, 20 bp, Artificial Sequence
  Description of Artificial Sequence: Synthetic oligonucleotide
  Target: LAMA2; (+) strand; PAM type: YTN; PAM sequence: TTA
ttattatttgagatggagtc

SEQ ID NO: 331853 - DNA, 20 bp, Artificial Sequence
  Description of Artificial Sequence: Synthetic oligonucleotide
  Target: LAMA2; (+) strand; PAM type: YTN; PAM sequence: TTA
ttatttgagatggagtctca

SEQ ID NO: 331854 - DNA, 20 bp, Artificial Sequence
  Description of Artificial Sequence: Synthetic oligonucleotide
  Target: LAMA2; (+) strand; PAM type: YTN; PAM sequence: TTA
tttgagatggagtctcactc

SEQ ID NO: 331855 - DNA, 20 bp, Artificial Sequence
  Description of Artificial Sequence: Synthetic oligonucleotide
  Target: LAMA2; (+) strand; PAM type: YTN; PAM sequence: TTT
gagatggagtctcactctgt

SEQ ID NO: 331856 - DNA, 20 bp, Artificial Sequence
  Description of Artificial Sequence: Synthetic oligonucleotide
  Target: LAMA2; (+) strand; PAM type: YTN; PAM sequence: TTG
agatggagtctcactctgtc

SEQ ID NO: 331857 - DNA, 20 bp, Artificial Sequence
  Description of Artificial Sequence: Synthetic oligonucleotide
  Target: LAMA2; (+) strand; PAM type: YTN; PAM sequence: CTC
actctgtcacccgggctgga

SEQ ID NO: 331858 - DNA, 20 bp, Artificial Sequence
  Description of Artificial Sequence: Synthetic oligonucleotide
  Target: LAMA2; (+) strand; PAM type: YTN; PAM sequence: CTC
tgtcacccgggctggagtgc

SEQ ID NO: 331859 - DNA, 20 bp, Artificial Sequence
  Description of Artificial Sequence: Synthetic oligonucleotide
  Target: LAMA2; (+) strand; PAM type: YTN; PAM sequence: CTG
tcacccgggctggagtgcag

SEQ ID NO: 331860 - DNA, 20 bp, Artificial Sequence
  Description of Artificial Sequence: Synthetic oligonucleotide
  Target: LAMA2; (+) strand; PAM type: YTN; PAM sequence: CTG
gagtgcagtggcacaatctt

SEQ ID NO: 331861 - DNA, 20 bp, Artificial Sequence
  Description of Artificial Sequence: Synthetic oligonucleotide
  Target: LAMA2; (+) strand; PAM type: YTN; PAM sequence: CTT
ggctcactgcaaccttcgcc

SEQ ID NO: 331862 - DNA, 20 bp, Artificial Sequence
  Description of Artificial Sequence: Synthetic oligonucleotide
  Target: LAMA2; (+) strand; PAM type: YTN; PAM sequence: TTG
gctcactgcaaccttcgcct

SEQ ID NO: 331863 - DNA, 20 bp, Artificial Sequence
  Description of Artificial Sequence: Synthetic oligonucleotide
  Target: LAMA2; (+) strand; PAM type: YTN; PAM sequence: CTC
actgcaaccttcgcctccca

SEQ ID NO: 331864 - DNA, 20 bp, Artificial Sequence
  Description of Artificial Sequence: Synthetic oligonucleotide
  Target: LAMA2; (+) strand; PAM type: YTN; PAM sequence: CTG
caaccttcgcctcccaggtt

SEQ ID NO: 331865 - DNA, 20 bp, Artificial Sequence
  Description of Artificial Sequence: Synthetic oligonucleotide
  Target: LAMA2; (+) strand; PAM type: YTN; PAM sequence: CTT
cgcctcccaggttcaagcga

SEQ ID NO: 331866 - DNA, 20 bp, Artificial Sequence
  Description of Artificial Sequence: Synthetic oligonucleotide
  Target: LAMA2; (+) strand; PAM type: YTN; PAM sequence: TTC
gcctcccaggttcaagcgat

SEQ ID NO: 331867 - DNA, 20 bp, Artificial Sequence
  Description of Artificial Sequence: Synthetic oligonucleotide
  Target: LAMA2; (+) strand; PAM type: YTN; PAM sequence: CTC
ccaggttcaagcgattctca

SEQ ID NO: 331868 - DNA, 20 bp, Artificial Sequence
  Description of Artificial Sequence: Synthetic oligonucleotide
  Target: LAMA2; (+) strand; PAM type: YTN; PAM sequence: TTC
aagcgattctcaagcctcag

SEQ ID NO: 331869 - DNA, 20 bp, Artificial Sequence
  Description of Artificial Sequence: Synthetic oligonucleotide
  Target: LAMA2; (+) strand; PAM type: YTN; PAM sequence: TTC
tcaagcctcagcctcctgag

SEQ ID NO: 331870 - DNA, 20 bp, Artificial Sequence
  Description of Artificial Sequence: Synthetic oligonucleotide
  Target: LAMA2; (+) strand; PAM type: YTN; PAM sequence: CTC
aagcctcagcctcctgagta

SEQ ID NO: 331871 - DNA, 20 bp, Artificial Sequence
  Description of Artificial Sequence: Synthetic oligonucleotide
  Target: LAMA2; (+) strand; PAM type: YTN; PAM sequence: CTC
agcctcctgagtagctggga

SEQ ID NO: 331872 - DNA, 20 bp, Artificial Sequence
  Description of Artificial Sequence: Synthetic oligonucleotide
  Target: LAMA2; (+) strand; PAM type: YTN; PAM sequence: CTC
ctgagtagctgggactacac

SEQ ID NO: 331873 - DNA, 20 bp, Artificial Sequence
  Description of Artificial Sequence: Synthetic oligonucleotide
  Target: LAMA2; (+) strand; PAM type: YTN; PAM sequence: CTG
agtagctgggactacacgcg

SEQ ID NO: 331874 - DNA, 20 bp, Artificial Sequence
  Description of Artificial Sequence: Synthetic oligonucleotide
  Target: LAMA2; (+) strand; PAM type: YTN; PAM sequence: CTG
ggactacacgcgtgtgccac

SEQ ID NO: 331875 - DNA, 20 bp, Artificial Sequence
  Description of Artificial Sequence: Synthetic oligonucleotide
  Target: LAMA2; (+) strand; PAM type: YTN; PAM sequence: CTA
cacgcgtgtgccactgcgtc

SEQ ID NO: 331876 - DNA, 20 bp, Artificial Sequence
  Description of Artificial Sequence: Synthetic oligonucleotide
  Target: LAMA2; (+) strand; PAM type: YTN; PAM sequence: CTG
cgtctggctaatttttttgt

SEQ ID NO: 331877 - DNA, 20 bp, Artificial Sequence
  Description of Artificial Sequence: Synthetic oligonucleotide
  Target: LAMA2; (+) strand; PAM type: YTN; PAM sequence: CTG
gctaatttttttgtattttt

SEQ ID NO: 331878 - DNA, 20 bp, Artificial Sequence
  Description of Artificial Sequence: Synthetic oligonucleotide
  Target: LAMA2; (+) strand; PAM type: YTN; PAM sequence: CTA
atttttttgtatttttagta

SEQ ID NO: 331879 - DNA, 20 bp, Artificial Sequence
  Description of Artificial Sequence: Synthetic oligonucleotide
  Target: LAMA2; (+) strand; PAM type: YTN; PAM sequence: TTT
ttttgtatttttagtagaga

SEQ ID NO: 331880 - DNA, 20 bp, Artificial Sequence
  Description of Artificial Sequence: Synthetic oligonucleotide
  Target: LAMA2; (+) strand; PAM type: YTN; PAM sequence: TTT
tttgtatttttagtagagat

SEQ ID NO: 331881 - DNA, 20 bp, Artificial Sequence
  Description of Artificial Sequence: Synthetic oligonucleotide
  Target: LAMA2; (+) strand; PAM type: YTN; PAM sequence: TTT
ttgtatttttagtagagatg

SEQ ID NO: 331882 - DNA, 20 bp, Artificial Sequence
  Description of Artificial Sequence: Synthetic oligonucleotide
  Target: LAMA2; (+) strand; PAM type: YTN; PAM sequence: TTT
tgtatttttagtagagatgg

SEQ ID NO: 331883 - DNA, 20 bp, Artificial Sequence
  Description of Artificial Sequence: Synthetic oligonucleotide
  Target: LAMA2; (+) strand; PAM type: YTN; PAM sequence: TTT
gtatttttagtagagatgga

SEQ ID NO: 331884 - DNA, 20 bp, Artificial Sequence
  Description of Artificial Sequence: Synthetic oligonucleotide
  Target: LAMA2; (+) strand; PAM type: YTN; PAM sequence: TTG
tatttttagtagagatggag

SEQ ID NO: 331885 - DNA, 20 bp, Artificial Sequence
  Description of Artificial Sequence: Synthetic oligonucleotide
  Target: LAMA2; (+) strand; PAM type: YTN; PAM sequence: TTT
ttagtagagatggagtttca

SEQ ID NO: 331886 - DNA, 20 bp, Artificial Sequence
  Description of Artificial Sequence: Synthetic oligonucleotide
  Target: LAMA2; (+) strand; PAM type: YTN; PAM sequence: TTT
tagtagagatggagtttcac

SEQ ID NO: 331887 - DNA, 20 bp, Artificial Sequence
  Description of Artificial Sequence: Synthetic oligonucleotide
  Target: LAMA2; (+) strand; PAM type: YTN; PAM sequence: TTT
agtagagatggagtttcacc

SEQ ID NO: 331888 - DNA, 20 bp, Artificial Sequence
  Description of Artificial Sequence: Synthetic oligonucleotide
  Target: LAMA2; (+) strand; PAM type: YTN; PAM sequence: TTA
gtagagatggagtttcaccg

SEQ ID NO: 331889 - DNA, 20 bp, Artificial Sequence
  Description of Artificial Sequence: Synthetic oligonucleotide
  Target: LAMA2; (+) strand; PAM type: YTN; PAM sequence: TTT
caccgtgttggccaggctgg

SEQ ID NO: 331890 - DNA, 20 bp, Artificial Sequence
  Description of Artificial Sequence: Synthetic oligonucleotide
  Target: LAMA2; (+) strand; PAM type: YTN; PAM sequence: TTC
accgtgttggccaggctggt

SEQ ID NO: 331891 - DNA, 20 bp, Artificial Sequence
  Description of Artificial Sequence: Synthetic oligonucleotide
  Target: LAMA2; (+) strand; PAM type: YTN; PAM sequence: TTG
gccaggctggtcttgaactc

SEQ ID NO: 331892 - DNA, 20 bp, Artificial Sequence
  Description of Artificial Sequence: Synthetic oligonucleotide
  Target: LAMA2; (+) strand; PAM type: YTN; PAM sequence: CTG
gtcttgaactctcgacttca

SEQ ID NO: 331893 - DNA, 20 bp, Artificial Sequence
  Description of Artificial Sequence: Synthetic oligonucleotide
  Target: LAMA2; (+) strand; PAM type: YTN; PAM sequence: CTT
gaactctcgacttcacatga

SEQ ID NO: 331894 - DNA, 20 bp, Artificial Sequence
  Description of Artificial Sequence: Synthetic oligonucleotide
  Target: LAMA2; (+) strand; PAM type: YTN; PAM sequence: TTG
aactctcgacttcacatgat

SEQ ID NO: 331895 - DNA, 20 bp, Artificial Sequence
  Description of Artificial Sequence: Synthetic oligonucleotide
  Target: LAMA2; (+) strand; PAM type: YTN; PAM sequence: CTC
tcgacttcacatgatctacc

SEQ ID NO: 331896 - DNA, 20 bp, Artificial Sequence
  Description of Artificial Sequence: Synthetic oligonucleotide
  Target: LAMA2; (+) strand; PAM type: YTN; PAM sequence: CTC
gacttcacatgatctacctg

SEQ ID NO: 331897 - DNA, 20 bp, Artificial Sequence
  Description of Artificial Sequence: Synthetic oligonucleotide
  Target: LAMA2; (+) strand; PAM type: YTN; PAM sequence: CTT
cacatgatctacctgccttg

SEQ ID NO: 331898 - DNA, 20 bp, Artificial Sequence
  Description of Artificial Sequence: Synthetic oligonucleotide
  Target: LAMA2; (+) strand; PAM type: YTN; PAM sequence: TTC
acatgatctacctgccttgg

SEQ ID NO: 331899 - DNA, 20 bp, Artificial Sequence
  Description of Artificial Sequence: Synthetic oligonucleotide
  Target: LAMA2; (+) strand; PAM type: YTN; PAM sequence: CTA
cctgccttggcctcccaaag

SEQ ID NO: 331900 - DNA, 20 bp, Artificial Sequence
  Description of Artificial Sequence: Synthetic oligonucleotide
  Target: LAMA2; (+) strand; PAM type: YTN; PAM sequence: CTG
ccttggcctcccaaagtgct

SEQ ID NO: 331901 - DNA, 20 bp, Artificial Sequence
  Description of Artificial Sequence: Synthetic oligonucleotide
  Target: LAMA2; (+) strand; PAM type: YTN; PAM sequence: CTT
ggcctcccaaagtgctggga

SEQ ID NO: 331902 - DNA, 20 bp, Artificial Sequence
  Description of Artificial Sequence: Synthetic oligonucleotide
  Target: LAMA2; (+) strand; PAM type: YTN; PAM sequence: TTG
gcctcccaaagtgctgggat

SEQ ID NO: 331903 - DNA, 20 bp, Artificial Sequence
  Description of Artificial Sequence: Synthetic oligonucleotide
  Target: LAMA2; (+) strand; PAM type: YTN; PAM sequence: CTC
ccaaagtgctgggattacag

SEQ ID NO: 331904 - DNA, 20 bp, Artificial Sequence
  Description of Artificial Sequence: Synthetic oligonucleotide
  Target: LAMA2; (+) strand; PAM type: YTN; PAM sequence: CTG
ggattacaggtgtgagccac

SEQ ID NO: 331905 - DNA, 20 bp, Artificial Sequence
  Description of Artificial Sequence: Synthetic oligonucleotide
  Target: LAMA2; (+) strand; PAM type: YTN; PAM sequence: TTA
caggtgtgagccaccgcgcc

SEQ ID NO: 331906 - DNA, 20 bp, Artificial Sequence
  Description of Artificial Sequence: Synthetic oligonucleotide
  Target: LAMA2; (+) strand; PAM type: YTN; PAM sequence: CTG
gcctgcatgattatttttaa

SEQ ID NO: 331907 - DNA, 20 bp, Artificial Sequence
  Description of Artificial Sequence: Synthetic oligonucleotide
  Target: LAMA2; (+) strand; PAM type: YTN; PAM sequence: CTG
catgattatttttaaatgac

SEQ ID NO: 331908 - DNA, 20 bp, Artificial Sequence
  Description of Artificial Sequence: Synthetic oligonucleotide
  Target: LAMA2; (+) strand; PAM type: YTN; PAM sequence: TTA
tttttaaatgaccagattca

SEQ ID NO: 331909 - DNA, 20 bp, Artificial Sequence
  Description of Artificial Sequence: Synthetic oligonucleotide
  Target: LAMA2; (+) strand; PAM type: YTN; PAM sequence: TTT
ttaaatgaccagattcattc

SEQ ID NO: 331910 - DNA, 20 bp, Artificial Sequence
  Description of Artificial Sequence: Synthetic oligonucleotide
  Target: LAMA2; (+) strand; PAM type: YTN; PAM sequence: TTT
taaatgaccagattcattcc

SEQ ID NO: 331911 - DNA, 20 bp, Artificial Sequence
  Description of Artificial Sequence: Synthetic oligonucleotide
  Target: LAMA2; (+) strand; PAM type: YTN; PAM sequence: TTT
aaatgaccagattcattcca

SEQ ID NO: 331912 - DNA, 20 bp, Artificial Sequence
  Description of Artificial Sequence: Synthetic oligonucleotide
  Target: LAMA2; (+) strand; PAM type: YTN; PAM sequence: TTA
aatgaccagattcattccac

SEQ ID NO: 331913 - DNA, 20 bp, Artificial Sequence
  Description of Artificial Sequence: Synthetic oligonucleotide
  Target: LAMA2; (+) strand; PAM type: YTN; PAM sequence: TTC
attccacatttccagattat

SEQ ID NO: 331914 - DNA, 20 bp, Artificial Sequence
  Description of Artificial Sequence: Synthetic oligonucleotide
  Target: LAMA2; (+) strand; PAM type: YTN; PAM sequence: TTC
cacatttccagattatgctt

SEQ ID NO: 331915 - DNA, 20 bp, Artificial Sequence
  Description of Artificial Sequence: Synthetic oligonucleotide
  Target: LAMA2; (+) strand; PAM type: YTN; PAM sequence: TTT
ccagattatgctttgatact

SEQ ID NO: 331916 - DNA, 20 bp, Artificial Sequence
  Description of Artificial Sequence: Synthetic oligonucleotide
  Target: LAMA2; (+) strand; PAM type: YTN; PAM sequence: TTC
cagattatgctttgatacta

SEQ ID NO: 331917 - DNA, 20 bp, Artificial Sequence
  Description of Artificial Sequence: Synthetic oligonucleotide
  Target: LAMA2; (+) strand; PAM type: YTN; PAM sequence: TTA
tgctttgatactagaaattt

SEQ ID NO: 331918 - DNA, 20 bp, Artificial Sequence
  Description of Artificial Sequence: Synthetic oligonucleotide
  Target: LAMA2; (+) strand; PAM type: YTN; PAM sequence: CTT
tgatactagaaatttagaaa

SEQ ID NO: 331919 - DNA, 20 bp, Artificial Sequence
  Description of Artificial Sequence: Synthetic oligonucleotide
  Target: LAMA2; (+) strand; PAM type: YTN; PAM sequence: TTT
gatactagaaatttagaaag

SEQ ID NO: 331920 - DNA, 20 bp, Artificial Sequence
  Description of Artificial Sequence: Synthetic oligonucleotide
  Target: LAMA2; (+) strand; PAM type: YTN; PAM sequence: TTG
atactagaaatttagaaaga

SEQ ID NO: 331921 - DNA, 20 bp, Artificial Sequence
  Description of Artificial Sequence: Synthetic oligonucleotide
  Target: LAMA2; (+) strand; PAM type: YTN; PAM sequence: CTA
gaaatttagaaagaataaaa

SEQ ID NO: 331922 - DNA, 20 bp, Artificial Sequence
  Description of Artificial Sequence: Synthetic oligonucleotide
  Target: LAMA2; (+) strand; PAM type: YTN; PAM sequence: TTT
agaaagaataaaaccccaca

SEQ ID NO: 331923 - DNA, 20 bp, Artificial Sequence
  Description of Artificial Sequence: Synthetic oligonucleotide
  Target: LAMA2; (+) strand; PAM type: YTN; PAM sequence: TTA
gaaagaataaaaccccacaa

SEQ ID NO: 331924 - DNA, 20 bp, Artificial Sequence
  Description of Artificial Sequence: Synthetic oligonucleotide
  Target: LAMA2; (+) strand; PAM type: YTN; PAM sequence: CTA
gcaatcaactgcatgaatat

SEQ ID NO: 331925 - DNA, 20 bp, Artificial Sequence
  Description of Artificial Sequence: Synthetic oligonucleotide
  Target: LAMA2; (+) strand; PAM type: YTN; PAM sequence: CTG
catgaatatattttagtaaa

SEQ ID NO: 331926 - DNA, 20 bp, Artificial Sequence
  Description of Artificial Sequence: Synthetic oligonucleotide
  Target: LAMA2; (+) strand; PAM type: YTN; PAM sequence: TTT
tagtaaaagttggagcaaca

SEQ ID NO: 331927 - DNA, 20 bp, Artificial Sequence
  Description of Artificial Sequence: Synthetic oligonucleotide
  Target: LAMA2; (+) strand; PAM type: YTN; PAM sequence: TTT
agtaaaagttggagcaacag

SEQ ID NO: 331928 - DNA, 20 bp, Artificial Sequence
  Description of Artificial Sequence: Synthetic oligonucleotide
  Target: LAMA2; (+) strand; PAM type: YTN; PAM sequence: TTA
gtaaaagttggagcaacaga

SEQ ID NO: 331929 - DNA, 20 bp, Artificial Sequence
  Description of Artificial Sequence: Synthetic oligonucleotide
  Target: LAMA2; (+) strand; PAM type: YTN; PAM sequence: TTG
gagcaacagatgataaaatt

SEQ ID NO: 331930 - DNA, 20 bp, Artificial Sequence
  Description of Artificial Sequence: Synthetic oligonucleotide
  Target: LAMA2; (+) strand; PAM type: YTN; PAM sequence: TTC
cacaaattcagtgaactctg

SEQ ID NO: 331931 - DNA, 20 bp, Artificial Sequence
  Description of Artificial Sequence: Synthetic oligonucleotide
  Target: LAMA2; (+) strand; PAM type: YTN; PAM sequence: TTC
agtgaactctgagaataaat

SEQ ID NO: 331932 - DNA, 20 bp, Artificial Sequence
  Description of Artificial Sequence: Synthetic oligonucleotide
  Target: LAMA2; (+) strand; PAM type: YTN; PAM sequence: CTC
tgagaataaatatggaaggt

SEQ ID NO: 331933 - DNA, 20 bp, Artificial Sequence
  Description of Artificial Sequence: Synthetic oligonucleotide
  Target: LAMA2; (+) strand; PAM type: YTN; PAM sequence: CTG
agaataaatatggaaggtcc

SEQ ID NO: 331934 - DNA, 20 bp, Artificial Sequence
  Description of Artificial Sequence: Synthetic oligonucleotide
  Target: LAMA2; (+) strand; PAM type: YTN; PAM sequence: TTA
attatcctgcaaagaaaacg

SEQ ID NO: 331935 - DNA, 20 bp, Artificial Sequence
  Description of Artificial Sequence: Synthetic oligonucleotide
  Target: LAMA2; (+) strand; PAM type: YTN; PAM sequence: TTA
tcctgcaaagaaaacgaacc

SEQ ID NO: 331936 - DNA, 20 bp, Artificial Sequence
  Description of Artificial Sequence: Synthetic oligonucleotide
  Target: LAMA2; (+) strand; PAM type: YTN; PAM sequence: CTG
caaagaaaacgaaccttgaa

SEQ ID NO: 331937 - DNA, 20 bp, Artificial Sequence
  Description of Artificial Sequence: Synthetic oligonucleotide
  Target: LAMA2; (+) strand; PAM type: YTN; PAM sequence: CTT
gaactttctgttaatagact

SEQ ID NO: 331938 - DNA, 20 bp, Artificial Sequence
  Description of Artificial Sequence: Synthetic oligonucleotide
  Target: LAMA2; (+) strand; PAM type: YTN; PAM sequence: TTG
aactttctgttaatagactt

SEQ ID NO: 331939 - DNA, 20 bp, Artificial Sequence
  Description of Artificial Sequence: Synthetic oligonucleotide
  Target: LAMA2; (+) strand; PAM type: YTN; PAM sequence: CTT
tctgttaatagactttgctt

SEQ ID NO: 331940 - DNA, 20 bp, Artificial Sequence
  Description of Artificial Sequence: Synthetic oligonucleotide
  Target: LAMA2; (+) strand; PAM type: YTN; PAM sequence: TTT
ctgttaatagactttgcttc

SEQ ID NO: 331941 - DNA, 20 bp, Artificial Sequence
  Description of Artificial Sequence: Synthetic oligonucleotide
  Target: LAMA2; (+) strand; PAM type: YTN; PAM sequence: TTC
tgttaatagactttgcttcc

SEQ ID NO: 331942 - DNA, 20 bp, Artificial Sequence
  Description of Artificial Sequence: Synthetic oligonucleotide
  Target: LAMA2; (+) strand; PAM type: YTN; PAM sequence: CTG
ttaatagactttgcttccca

SEQ ID NO: 331943 - DNA, 20 bp, Artificial Sequence
  Description of Artificial Sequence: Synthetic oligonucleotide
  Target: LAMA2; (+) strand; PAM type: YTN; PAM sequence: TTA
atagactttgcttcccaatt

SEQ ID NO: 331944 - DNA, 20 bp, Artificial Sequence
  Description of Artificial Sequence: Synthetic oligonucleotide
  Target: LAMA2; (+) strand; PAM type: YTN; PAM sequence: CTT
tgcttcccaattaaaagcta

SEQ ID NO: 331945 - DNA, 20 bp, Artificial Sequence
  Description of Artificial Sequence: Synthetic oligonucleotide
  Target: LAMA2; (+) strand; PAM type: YTN; PAM sequence: TTT
gcttcccaattaaaagctag

SEQ ID NO: 331946 - DNA, 20 bp, Artificial Sequence
  Description of Artificial Sequence: Synthetic oligonucleotide
  Target: LAMA2; (+) strand; PAM type: YTN; PAM sequence: TTG
cttcccaattaaaagctagc

SEQ ID NO: 331947 - DNA, 20 bp, Artificial Sequence
  Description of Artificial Sequence: Synthetic oligonucleotide
  Target: LAMA2; (+) strand; PAM type: YTN; PAM sequence: CTT
cccaattaaaagctagcagt

SEQ ID NO: 331948 - DNA, 20 bp, Artificial Sequence
  Description of Artificial Sequence: Synthetic oligonucleotide
  Target: LAMA2; (+) strand; PAM type: YTN; PAM sequence: TTC
ccaattaaaagctagcagtt

SEQ ID NO: 331949 - DNA, 20 bp, Artificial Sequence
  Description of Artificial Sequence: Synthetic oligonucleotide
  Target: LAMA2; (+) strand; PAM type: YTN; PAM sequence: TTA
aaagctagcagtttgaaagg

SEQ ID NO: 331950 - DNA, 20 bp, Artificial Sequence
  Description of Artificial Sequence: Synthetic oligonucleotide
  Target: LAMA2; (+) strand; PAM type: YTN; PAM sequence: CTA
gcagtttgaaaggtttacct

SEQ ID NO: 331951 - DNA, 20 bp, Artificial Sequence
  Description of Artificial Sequence: Synthetic oligonucleotide
  Target: LAMA2; (+) strand; PAM type: YTN; PAM sequence: TTT
gaaaggtttacctcatcagc

SEQ ID NO: 331952 - DNA, 20 bp, Artificial Sequence
  Description of Artificial Sequence: Synthetic oligonucleotide
  Target: LAMA2; (+) strand; PAM type: YTN; PAM sequence: TTG
aaaggtttacctcatcagcg

SEQ ID NO: 331953 - DNA, 20 bp, Artificial Sequence
  Description of Artificial Sequence: Synthetic oligonucleotide
  Target: LAMA2; (+) strand; PAM type: YTN; PAM sequence: TTT
acctcatcagcgattcccta

SEQ ID NO: 331954 - DNA, 20 bp, Artificial Sequence
  Description of Artificial Sequence: Synthetic oligonucleotide
  Target: LAMA2; (+) strand; PAM type: YTN; PAM sequence: TTA
cctcatcagcgattccctat

SEQ ID NO: 331955 - DNA, 20 bp, Artificial Sequence
  Description of Artificial Sequence: Synthetic oligonucleotide
  Target: LAMA2; (+) strand; PAM type: YTN; PAM sequence: CTC
atcagcgattccctatccag

SEQ ID NO: 331956 - DNA, 20 bp, Artificial Sequence
  Description of Artificial Sequence: Synthetic oligonucleotide
  Target: LAMA2; (+) strand; PAM type: YTN; PAM sequence: TTC
cctatccagttttcagatgc

SEQ ID NO: 331957 - DNA, 20 bp, Artificial Sequence
  Description of Artificial Sequence: Synthetic oligonucleotide
  Target: LAMA2; (+) strand; PAM type: YTN; PAM sequence: CTA
tccagttttcagatgcagtt

SEQ ID NO: 331958 - DNA, 20 bp, Artificial Sequence
  Description of Artificial Sequence: Synthetic oligonucleotide
  Target: LAMA2; (+) strand; PAM type: YTN; PAM sequence: TTT
tcagatgcagttagcccttg

SEQ ID NO: 331959 - DNA, 20 bp, Artificial Sequence
  Description of Artificial Sequence: Synthetic oligonucleotide
  Target: LAMA2; (+) strand; PAM type: YTN; PAM sequence: TTT
cagatgcagttagcccttgg

SEQ ID NO: 331960 - DNA, 20 bp, Artificial Sequence
  Description of Artificial Sequence: Synthetic oligonucleotide
  Target: LAMA2; (+) strand; PAM type: YTN; PAM sequence: TTC
agatgcagttagcccttgga

SEQ ID NO: 331961 - DNA, 20 bp, Artificial Sequence
  Description of Artificial Sequence: Synthetic oligonucleotide
  Target: LAMA2; (+) strand; PAM type: YTN; PAM sequence: TTA
gcccttggattgacttgcat

SEQ ID NO: 331962 - DNA, 20 bp, Artificial Sequence
  Description of Artificial Sequence: Synthetic oligonucleotide
  Target: LAMA2; (+) strand; PAM type: YTN; PAM sequence: CTT
ggattgacttgcatatttat

SEQ ID NO: 331963 - DNA, 20 bp, Artificial Sequence
  Description of Artificial Sequence: Synthetic oligonucleotide
  Target: LAMA2; (+) strand; PAM type: YTN; PAM sequence: TTG
gattgacttgcatatttatc

SEQ ID NO: 331964 - DNA, 20 bp, Artificial Sequence
  Description of Artificial Sequence: Synthetic oligonucleotide
  Target: LAMA2; (+) strand; PAM type: YTN; PAM sequence: TTG
acttgcatatttatccctgt

SEQ ID NO: 331965 - DNA, 20 bp, Artificial Sequence
  Description of Artificial Sequence: Synthetic oligonucleotide
  Target: LAMA2; (+) strand; PAM type: YTN; PAM sequence: CTT
gcatatttatccctgttgag

SEQ ID NO: 331966 - DNA, 20 bp, Artificial Sequence
  Description of Artificial Sequence: Synthetic oligonucleotide
  Target: LAMA2; (+) strand; PAM type: YTN; PAM sequence: TTG
catatttatccctgttgagg

SEQ ID NO: 331967 - DNA, 20 bp, Artificial Sequence
  Description of Artificial Sequence: Synthetic oligonucleotide
  Target: LAMA2; (+) strand; PAM type: YTN; PAM sequence: TTT
atccctgttgaggatgttat

SEQ ID NO: 331968 - DNA, 20 bp, Artificial Sequence
  Description of Artificial Sequence: Synthetic oligonucleotide
  Target: LAMA2; (+) strand; PAM type: YTN; PAM sequence: TTA
tccctgttgaggatgttata

SEQ ID NO: 331969 - DNA, 20 bp, Artificial Sequence
  Description of Artificial Sequence: Synthetic oligonucleotide
  Target: LAMA2; (+) strand; PAM type: YTN; PAM sequence: CTG
ttgaggatgttatacgtttc

SEQ ID NO: 331970 - DNA, 20 bp, Artificial Sequence
  Description of Artificial Sequence: Synthetic oligonucleotide
  Target: LAMA2; (+) strand; PAM type: YTN; PAM sequence: TTG
aggatgttatacgtttctat

SEQ ID NO: 331971 - DNA, 20 bp, Artificial Sequence
  Description of Artificial Sequence: Synthetic oligonucleotide
  Target: LAMA2; (+) strand; PAM type: YTN; PAM sequence: TTA
tacgtttctatctcctttta

SEQ ID NO: 331972 - DNA, 20 bp, Artificial Sequence
  Description of Artificial Sequence: Synthetic oligonucleotide
  Target: LAMA2; (+) strand; PAM type: YTN; PAM sequence: TTT
ctatctccttttaaataagg

SEQ ID NO: 331973 - DNA, 20 bp, Artificial Sequence
  Description of Artificial Sequence: Synthetic oligonucleotide
  Target: LAMA2; (+) strand; PAM type: YTN; PAM sequence: TTC
tatctccttttaaataaggg

SEQ ID NO: 331974 - DNA, 20 bp, Artificial Sequence
  Description of Artificial Sequence: Synthetic oligonucleotide
  Target: LAMA2; (+) strand; PAM type: YTN; PAM sequence: CTA
tctccttttaaataagggaa

SEQ ID NO: 331975 - DNA, 20 bp, Artificial Sequence
  Description of Artificial Sequence: Synthetic oligonucleotide
  Target: LAMA2; (+) strand; PAM type: YTN; PAM sequence: CTC
cttttaaataagggaacttt

SEQ ID NO: 331976 - DNA, 20 bp, Artificial Sequence
  Description of Artificial Sequence: Synthetic oligonucleotide
  Target: LAMA2; (+) strand; PAM type: YTN; PAM sequence: CTT
ttaaataagggaactttgcc

SEQ ID NO: 331977 - DNA, 20 bp, Artificial Sequence
  Description of Artificial Sequence: Synthetic oligonucleotide
  Target: LAMA2; (+) strand; PAM type: YTN; PAM sequence: TTT
taaataagggaactttgcca

SEQ ID NO: 331978 - DNA, 20 bp, Artificial Sequence
  Description of Artificial Sequence: Synthetic oligonucleotide
  Target: LAMA2; (+) strand; PAM type: YTN; PAM sequence: TTT
aaataagggaactttgccaa

SEQ ID NO: 331979 - DNA, 20 bp, Artificial Sequence
  Description of Artificial Sequence: Synthetic oligonucleotide
  Target: LAMA2; (+) strand; PAM type: YTN; PAM sequence: TTA
aataagggaactttgccaac

SEQ ID NO: 331980 - DNA, 20 bp, Artificial Sequence
  Description of Artificial Sequence: Synthetic oligonucleotide
  Target: LAMA2; (+) strand; PAM type: YTN; PAM sequence: CTT
tgccaacaattcgtcagtat

SEQ ID NO: 331981 - DNA, 20 bp, Artificial Sequence
  Description of Artificial Sequence: Synthetic oligonucleotide
  Target: LAMA2; (+) strand; PAM type: YTN; PAM sequence: TTT
gccaacaattcgtcagtatt

SEQ ID NO: 331982 - DNA, 20 bp, Artificial Sequence
  Description of Artificial Sequence: Synthetic oligonucleotide
  Target: LAMA2; (+) strand; PAM type: YTN; PAM sequence: TTG
ccaacaattcgtcagtattt

SEQ ID NO: 331983 - DNA, 20 bp, Artificial Sequence
  Description of Artificial Sequence: Synthetic oligonucleotide
  Target: LAMA2; (+) strand; PAM type: YTN; PAM sequence: TTC
gtcagtatttgcaaattaat

SEQ ID NO: 331984 - DNA, 20 bp, Artificial Sequence
  Description of Artificial Sequence: Synthetic oligonucleotide
  Target: LAMA2; (+) strand; PAM type: YTN; PAM sequence: TTT
gcaaattaattatgattaaa

SEQ ID NO: 331985 - DNA, 20 bp, Artificial Sequence
  Description of Artificial Sequence: Synthetic oligonucleotide
  Target: LAMA2; (+) strand; PAM type: YTN; PAM sequence: TTG
caaattaattatgattaaac

SEQ ID NO: 331986 - DNA, 20 bp, Artificial Sequence
  Description of Artificial Sequence: Synthetic oligonucleotide
  Target: LAMA2; (+) strand; PAM type: YTN; PAM sequence: TTA
attatgattaaactttcata

SEQ ID NO: 331987 - DNA, 20 bp, Artificial Sequence
  Description of Artificial Sequence: Synthetic oligonucleotide
  Target: LAMA2; (+) strand; PAM type: YTN; PAM sequence: TTA
tgattaaactttcataatag

SEQ ID NO: 331988 - DNA, 20 bp, Artificial Sequence
  Description of Artificial Sequence: Synthetic oligonucleotide
  Target: LAMA2; (+) strand; PAM type: YTN; PAM sequence: TTA
aactttcataatagggatta

SEQ ID NO: 331989 - DNA, 20 bp, Artificial Sequence
  Description of Artificial Sequence: Synthetic oligonucleotide
  Target: LAMA2; (+) strand; PAM type: YTN; PAM sequence: CTT
tcataatagggattatggtt

SEQ ID NO: 331990 - DNA, 20 bp, Artificial Sequence
  Description of Artificial Sequence: Synthetic oligonucleotide
  Target: LAMA2; (+) strand; PAM type: YTN; PAM sequence: TTT
cataatagggattatggtta

SEQ ID NO: 331991 - DNA, 20 bp, Artificial Sequence
  Description of Artificial Sequence: Synthetic oligonucleotide
  Target: LAMA2; (+) strand; PAM type: YTN; PAM sequence: TTC
ataatagggattatggttaa

SEQ ID NO: 331992 - DNA, 20 bp, Artificial Sequence
  Description of Artificial Sequence: Synthetic oligonucleotide
  Target: LAMA2; (+) strand; PAM type: YTN; PAM sequence: TTA
tggttaattgttgattcatc

SEQ ID NO: 331993 - DNA, 20 bp, Artificial Sequence
  Description of Artificial Sequence: Synthetic oligonucleotide
  Target: LAMA2; (+) strand; PAM type: YTN; PAM sequence: TTA
attgttgattcatctcccag

SEQ ID NO: 331994 - DNA, 20 bp, Artificial Sequence
  Description of Artificial Sequence: Synthetic oligonucleotide
  Target: LAMA2; (+) strand; PAM type: YTN; PAM sequence: TTG
ttgattcatctcccagtcct

SEQ ID NO: 331995 - DNA, 20 bp, Artificial Sequence
  Description of Artificial Sequence: Synthetic oligonucleotide
  Target: LAMA2; (+) strand; PAM type: YTN; PAM sequence: TTG
attcatctcccagtcctcct

SEQ ID NO: 331996 - DNA, 20 bp, Artificial Sequence
  Description of Artificial Sequence: Synthetic oligonucleotide
  Target: LAMA2; (+) strand; PAM type: YTN; PAM sequence: TTC
atctcccagtcctccttttt

SEQ ID NO: 331997 - DNA, 20 bp, Artificial Sequence
  Description of Artificial Sequence: Synthetic oligonucleotide
  Target: LAMA2; (+) strand; PAM type: YTN; PAM sequence: CTC
ccagtcctcctttttgtgac

SEQ ID NO: 331998 - DNA, 20 bp, Artificial Sequence
  Description of Artificial Sequence: Synthetic oligonucleotide
  Target: LAMA2; (+) strand; PAM type: YTN; PAM sequence: CTC
ctttttgtgactaattctct

SEQ ID NO: 331999 - DNA, 20 bp, Artificial Sequence
  Description of Artificial Sequence: Synthetic oligonucleotide
  Target: LAMA2; (+) strand; PAM type: YTN; PAM sequence: CTT
tttgtgactaattctcttat

SEQ ID NO: 332000 - DNA, 20 bp, Artificial Sequence
  Description of Artificial Sequence: Synthetic oligonucleotide
  Target: LAMA2; (+) strand; PAM type: YTN; PAM sequence: TTT
ttgtgactaattctcttatc

SEQ ID NO: 332001 - DNA, 20 bp, Artificial Sequence
  Description of Artificial Sequence: Synthetic oligonucleotide
  Target: LAMA2; (+) strand; PAM type: YTN; PAM sequence: TTT
tgtgactaattctcttatca

SEQ ID NO: 332002 - DNA, 20 bp, Artificial Sequence
  Description of Artificial Sequence: Synthetic oligonucleotide
  Target: LAMA2; (+) strand; PAM type: YTN; PAM sequence: TTT
gtgactaattctcttatcag

SEQ ID NO: 332003 - DNA, 20 bp, Artificial Sequence
  Description of Artificial Sequence: Synthetic oligonucleotide
  Target: LAMA2; (+) strand; PAM type: YTN; PAM sequence: TTG
tgactaattctcttatcagt

SEQ ID NO: 332004 - DNA, 20 bp, Artificial Sequence
  Description of Artificial Sequence: Synthetic oligonucleotide
  Target: LAMA2; (+) strand; PAM type: YTN; PAM sequence: CTA
attctcttatcagtttgacc

SEQ ID NO: 332005 - DNA, 20 bp, Artificial Sequence
  Description of Artificial Sequence: Synthetic oligonucleotide
  Target: LAMA2; (+) strand; PAM type: YTN; PAM sequence: TTC
tcttatcagtttgacctgag

SEQ ID NO: 332006 - DNA, 20 bp, Artificial Sequence
  Description of Artificial Sequence: Synthetic oligonucleotide
  Target: LAMA2; (+) strand; PAM type: YTN; PAM sequence: CTC
ttatcagtttgacctgaggt

SEQ ID NO: 332007 - DNA, 20 bp, Artificial Sequence
  Description of Artificial Sequence: Synthetic oligonucleotide
  Target: LAMA2; (+) strand; PAM type: YTN; PAM sequence: CTT
atcagtttgacctgaggtgg

SEQ ID NO: 332008 - DNA, 20 bp, Artificial Sequence
  Description of Artificial Sequence: Synthetic oligonucleotide
  Target: LAMA2; (+) strand; PAM type: YTN; PAM sequence: TTA
tcagtttgacctgaggtggc

SEQ ID NO: 332009 - DNA, 20 bp, Artificial Sequence
  Description of Artificial Sequence: Synthetic oligonucleotide
  Target: LAMA2; (+) strand; PAM type: YTN; PAM sequence: TTT
gacctgaggtggcagatacc

SEQ ID NO: 332010 - DNA, 20 bp, Artificial Sequence
  Description of Artificial Sequence: Synthetic oligonucleotide
  Target: LAMA2; (+) strand; PAM type: YTN; PAM sequence: TTG
acctgaggtggcagatacca

SEQ ID NO: 332011 - DNA, 20 bp, Artificial Sequence
  Description of Artificial Sequence: Synthetic oligonucleotide
  Target: LAMA2; (+) strand; PAM type: YTN; PAM sequence: CTG
aggtggcagataccacaatt

SEQ ID NO: 332012 - DNA, 20 bp, Artificial Sequence
  Description of Artificial Sequence: Synthetic oligonucleotide
  Target: LAMA2; (+) strand; PAM type: YTN; PAM sequence: TTT
cctattagacaacttctctc

SEQ ID NO: 332013 - DNA, 20 bp, Artificial Sequence
  Description of Artificial Sequence: Synthetic oligonucleotide
  Target: LAMA2; (+) strand; PAM type: YTN; PAM sequence: TTC
ctattagacaacttctctca

SEQ ID NO: 332014 - DNA, 20 bp, Artificial Sequence
  Description of Artificial Sequence: Synthetic oligonucleotide
  Target: LAMA2; (+) strand; PAM type: YTN; PAM sequence: CTA
ttagacaacttctctcacaa

SEQ ID NO: 332015 - DNA, 20 bp, Artificial Sequence
  Description of Artificial Sequence: Synthetic oligonucleotide
  Target: LAMA2; (+) strand; PAM type: YTN; PAM sequence: TTA
gacaacttctctcacaatta

SEQ ID NO: 332016 - DNA, 20 bp, Artificial Sequence
  Description of Artificial Sequence: Synthetic oligonucleotide
  Target: LAMA2; (+) strand; PAM type: YTN; PAM sequence: CTT
ctctcacaattacctaagag

SEQ ID NO: 332017 - DNA, 20 bp, Artificial Sequence
  Description of Artificial Sequence: Synthetic oligonucleotide
  Target: LAMA2; (+) strand; PAM type: YTN; PAM sequence: TTC
tctcacaattacctaagagc

SEQ ID NO: 332018 - DNA, 20 bp, Artificial Sequence
  Description of Artificial Sequence: Synthetic oligonucleotide
  Target: LAMA2; (+) strand; PAM type: YTN; PAM sequence: CTC
tcacaattacctaagagcca

SEQ ID NO: 332019 - DNA, 20 bp, Artificial Sequence
  Description of Artificial Sequence: Synthetic oligonucleotide
  Target: LAMA2; (+) strand; PAM type: YTN; PAM sequence: CTC
acaattacctaagagccatg

SEQ ID NO: 332020 - DNA, 20 bp, Artificial Sequence
  Description of Artificial Sequence: Synthetic oligonucleotide
  Target: LAMA2; (+) strand; PAM type: YTN; PAM sequence: TTA
cctaagagccatgaatttga

SEQ ID NO: 332021 - DNA, 20 bp, Artificial Sequence
  Description of Artificial Sequence: Synthetic oligonucleotide
  Target: LAMA2; (+) strand; PAM type: YTN; PAM sequence: CTA
agagccatgaatttgattta

SEQ ID NO: 332022 - DNA, 20 bp, Artificial Sequence
  Description of Artificial Sequence: Synthetic oligonucleotide
  Target: LAMA2; (+) strand; PAM type: YTN; PAM sequence: TTT
gatttagaaatggggttgta

SEQ ID NO: 332023 - DNA, 20 bp, Artificial Sequence
  Description of Artificial Sequence: Synthetic oligonucleotide
  Target: LAMA2; (+) strand; PAM type: YTN; PAM sequence: TTG
atttagaaatggggttgtat

SEQ ID NO: 332024 - DNA, 20 bp, Artificial Sequence
  Description of Artificial Sequence: Synthetic oligonucleotide
  Target: LAMA2; (+) strand; PAM type: YTN; PAM sequence: TTT
agaaatggggttgtatgtgt

SEQ ID NO: 332025 - DNA, 20 bp, Artificial Sequence
  Description of Artificial Sequence: Synthetic oligonucleotide
  Target: LAMA2; (+) strand; PAM type: YTN; PAM sequence: TTA
gaaatggggttgtatgtgtg

SEQ ID NO: 332026 - DNA, 20 bp, Artificial Sequence
  Description of Artificial Sequence: Synthetic oligonucleotide
  Target: LAMA2; (+) strand; PAM type: YTN; PAM sequence: TTG
tatgtgtgtgtttttctatc

SEQ ID NO: 332027 - DNA, 20 bp, Artificial Sequence
  Description of Artificial Sequence: Synthetic oligonucleotide
  Target: LAMA2; (+) strand; PAM type: YTN; PAM sequence: TTT
ttctatcacatattaaacgc

SEQ ID NO: 332028 - DNA, 20 bp, Artificial Sequence
  Description of Artificial Sequence: Synthetic oligonucleotide
  Target: LAMA2; (+) strand; PAM type: YTN; PAM sequence: TTT
tctatcacatattaaacgca

SEQ ID NO: 332029 - DNA, 20 bp, Artificial Sequence
  Description of Artificial Sequence: Synthetic oligonucleotide
  Target: LAMA2; (+) strand; PAM type: YTN; PAM sequence: TTT
ctatcacatattaaacgcac

SEQ ID NO: 332030 - DNA, 20 bp, Artificial Sequence
  Description of Artificial Sequence: Synthetic oligonucleotide
  Target: LAMA2; (+) strand; PAM type: YTN; PAM sequence: TTC
tatcacatattaaacgcaca

SEQ ID NO: 332031 - DNA, 20 bp, Artificial Sequence
  Description of Artificial Sequence: Synthetic oligonucleotide
  Target: LAMA2; (+) strand; PAM type: YTN; PAM sequence: CTA
tcacatattaaacgcacaat

SEQ ID NO: 332032 - DNA, 20 bp, Artificial Sequence
  Description of Artificial Sequence: Synthetic oligonucleotide
  Target: LAMA2; (+) strand; PAM type: YTN; PAM sequence: TTA
aacgcacaatctgtaaaaaa

SEQ ID NO: 332033 - DNA, 20 bp, Artificial Sequence
  Description of Artificial Sequence: Synthetic oligonucleotide
  Target: LAMA2; (+) strand; PAM type: YTN; PAM sequence: CTG
taaaaaagattcaggaggat

SEQ ID NO: 332034 - DNA, 20 bp, Artificial Sequence
  Description of Artificial Sequence: Synthetic oligonucleotide
  Target: LAMA2; (+) strand; PAM type: YTN; PAM sequence: TTC
aggaggatgtttgggaaatg

SEQ ID NO: 332035 - DNA, 20 bp, Artificial Sequence
  Description of Artificial Sequence: Synthetic oligonucleotide
  Target: LAMA2; (+) strand; PAM type: YTN; PAM sequence: TTT
gggaaatgttttctgtgata

SEQ ID NO: 332036 - DNA, 20 bp, Artificial Sequence
  Description of Artificial Sequence: Synthetic oligonucleotide
  Target: LAMA2; (+) strand; PAM type: YTN; PAM sequence: TTG
ggaaatgttttctgtgatat

SEQ ID NO: 332037 - DNA, 20 bp, Artificial Sequence
  Description of Artificial Sequence: Synthetic oligonucleotide
  Target: LAMA2; (+) strand; PAM type: YTN; PAM sequence: TTT
tctgtgatatttatttttct

SEQ ID NO: 332038 - DNA, 20 bp, Artificial Sequence
  Description of Artificial Sequence: Synthetic oligonucleotide
  Target: LAMA2; (+) strand; PAM type: YTN; PAM sequence: TTT
ctgtgatatttatttttctt

SEQ ID NO: 332039 - DNA, 20 bp, Artificial Sequence
  Description of Artificial Sequence: Synthetic oligonucleotide
  Target: LAMA2; (+) strand; PAM type: YTN; PAM sequence: TTC
tgtgatatttatttttcttc

SEQ ID NO: 332040 - DNA, 20 bp, Artificial Sequence
  Description of Artificial Sequence: Synthetic oligonucleotide
  Target: LAMA2; (+) strand; PAM type: YTN; PAM sequence: CTG
tgatatttatttttcttcag

SEQ ID NO: 332041 - DNA, 20 bp, Artificial Sequence
  Description of Artificial Sequence: Synthetic oligonucleotide
  Target: LAMA2; (+) strand; PAM type: YTN; PAM sequence: TTT
atttttcttcagaagaagtg

SEQ ID NO: 332042 - DNA, 20 bp, Artificial Sequence
  Description of Artificial Sequence: Synthetic oligonucleotide
  Target: LAMA2; (+) strand; PAM type: YTN; PAM sequence: TTA
tttttcttcagaagaagtgc

SEQ ID NO: 332043 - DNA, 20 bp, Artificial Sequence
  Description of Artificial Sequence: Synthetic oligonucleotide
  Target: LAMA2; (+) strand; PAM type: YTN; PAM sequence: TTT
ttcttcagaagaagtgccaa

SEQ ID NO: 332044 - DNA, 20 bp, Artificial Sequence
  Description of Artificial Sequence: Synthetic oligonucleotide
  Target: LAMA2; (+) strand; PAM type: YTN; PAM sequence: TTT
tcttcagaagaagtgccaac

SEQ ID NO: 332045 - DNA, 20 bp, Artificial Sequence
  Description of Artificial Sequence: Synthetic oligonucleotide
  Target: LAMA2; (+) strand; PAM type: YTN; PAM sequence: TTT
cttcagaagaagtgccaaca

SEQ ID NO: 332046 - DNA, 20 bp, Artificial Sequence
  Description of Artificial Sequence: Synthetic oligonucleotide
  Target: LAMA2; (+) strand; PAM type: YTN; PAM sequence: TTC
ttcagaagaagtgccaacaa

SEQ ID NO: 332047 - DNA, 20 bp, Artificial Sequence
  Description of Artificial Sequence: Synthetic oligonucleotide
  Target: LAMA2; (+) strand; PAM type: YTN; PAM sequence: CTT
cagaagaagtgccaacaata

SEQ ID NO: 332048 - DNA, 20 bp, Artificial Sequence
  Description of Artificial Sequence: Synthetic oligonucleotide
  Target: LAMA2; (+) strand; PAM type: YTN; PAM sequence: TTC
agaagaagtgccaacaatat

SEQ ID NO: 332049 - DNA, 20 bp, Artificial Sequence
  Description of Artificial Sequence: Synthetic oligonucleotide
  Target: LAMA2; (+) strand; PAM type: YTN; PAM sequence: TTT
catttatggttttgattccc

SEQ ID NO: 332050 - DNA, 20 bp, Artificial Sequence
  Description of Artificial Sequence: Synthetic oligonucleotide
  Target: LAMA2; (+) strand; PAM type: YTN; PAM sequence: TTC
atttatggttttgattcccc

SEQ ID NO: 332051 - DNA, 20 bp, Artificial Sequence
  Description of Artificial Sequence: Synthetic oligonucleotide
  Target: LAMA2; (+) strand; PAM type: YTN; PAM sequence: TTT
atggttttgattccccatat

SEQ ID NO: 332052 - DNA, 20 bp, Artificial Sequence
  Description of Artificial Sequence: Synthetic oligonucleotide
  Target: LAMA2; (+) strand; PAM type: YTN; PAM sequence: TTA
tggttttgattccccatatg

SEQ ID NO: 332053 - DNA, 20 bp, Artificial Sequence
  Description of Artificial Sequence: Synthetic oligonucleotide
  Target: LAMA2; (+) strand; PAM type: YTN; PAM sequence: TTT
tgattccccatatgccaatt

SEQ ID NO: 332054 - DNA, 20 bp, Artificial Sequence
  Description of Artificial Sequence: Synthetic oligonucleotide
  Target: LAMA2; (+) strand; PAM type: YTN; PAM sequence: TTT
gattccccatatgccaattt

SEQ ID NO: 332055 - DNA, 20 bp, Artificial Sequence
  Description of Artificial Sequence: Synthetic oligonucleotide
  Target: LAMA2; (+) strand; PAM type: YTN; PAM sequence: TTG
attccccatatgccaatttc

SEQ ID NO: 332056 - DNA, 20 bp, Artificial Sequence
  Description of Artificial Sequence: Synthetic oligonucleotide
  Target: LAMA2; (+) strand; PAM type: YTN; PAM sequence: TTC
cccatatgccaatttcagca

SEQ ID NO: 332057 - DNA, 20 bp, Artificial Sequence
  Description of Artificial Sequence: Synthetic oligonucleotide
  Target: LAMA2; (+) strand; PAM type: YTN; PAM sequence: TTT
cagcaccctcttatttcacc

SEQ ID NO: 332058 - DNA, 20 bp, Artificial Sequence
  Description of Artificial Sequence: Synthetic oligonucleotide
  Target: LAMA2; (+) strand; PAM type: YTN; PAM sequence: TTC
agcaccctcttatttcacca

SEQ ID NO: 332059 - DNA, 20 bp, Artificial Sequence
  Description of Artificial Sequence: Synthetic oligonucleotide
  Target: LAMA2; (+) strand; PAM type: YTN; PAM sequence: CTC
ttatttcaccagggtcattt

SEQ ID NO: 332060 - DNA, 20 bp, Artificial Sequence
  Description of Artificial Sequence: Synthetic oligonucleotide
  Target: LAMA2; (+) strand; PAM type: YTN; PAM sequence: CTT
atttcaccagggtcatttat

SEQ ID NO: 332061 - DNA, 20 bp, Artificial Sequence
  Description of Artificial Sequence: Synthetic oligonucleotide
  Target: LAMA2; (+) strand; PAM type: YTN; PAM sequence: TTA
tttcaccagggtcatttatt

SEQ ID NO: 332062 - DNA, 20 bp, Artificial Sequence
  Description of Artificial Sequence: Synthetic oligonucleotide
  Target: LAMA2; (+) strand; PAM type: YTN; PAM sequence: TTT
caccagggtcatttatttgg

SEQ ID NO: 332063 - DNA, 20 bp, Artificial Sequence
  Description of Artificial Sequence: Synthetic oligonucleotide
  Target: LAMA2; (+) strand; PAM type: YTN; PAM sequence: TTC
accagggtcatttatttggt

SEQ ID NO: 332064 - DNA, 20 bp, Artificial Sequence
  Description of Artificial Sequence: Synthetic oligonucleotide
  Target: LAMA2; (+) strand; PAM type: YTN; PAM sequence: TTT
atttggtatttagttatgct

SEQ ID NO: 332065 - DNA, 20 bp, Artificial Sequence
  Description of Artificial Sequence: Synthetic oligonucleotide
  Target: LAMA2; (+) strand; PAM type: YTN; PAM sequence: TTA
tttggtatttagttatgctt

SEQ ID NO: 332066 - DNA, 20 bp, Artificial Sequence
  Description of Artificial Sequence: Synthetic oligonucleotide
  Target: LAMA2; (+) strand; PAM type: YTN; PAM sequence: TTT
ggtatttagttatgcttctg

SEQ ID NO: 332067 - DNA, 20 bp, Artificial Sequence
  Description of Artificial Sequence: Synthetic oligonucleotide
  Target: LAMA2; (+) strand; PAM type: YTN; PAM sequence: TTG
gtatttagttatgcttctga

SEQ ID NO: 332068 - DNA, 20 bp, Artificial Sequence
  Description of Artificial Sequence: Synthetic oligonucleotide
  Target: LAMA2; (+) strand; PAM type: YTN; PAM sequence: TTT
agttatgcttctgatatttg

SEQ ID NO: 332069 - DNA, 20 bp, Artificial Sequence
  Description of Artificial Sequence: Synthetic oligonucleotide
  Target: LAMA2; (+) strand; PAM type: YTN; PAM sequence: TTA
gttatgcttctgatatttgc

SEQ ID NO: 332070 - DNA, 20 bp, Artificial Sequence
  Description of Artificial Sequence: Synthetic oligonucleotide
  Target: LAMA2; (+) strand; PAM type: YTN; PAM sequence: TTA
tgcttctgatatttgctgtc

SEQ ID NO: 332071 - DNA, 20 bp, Artificial Sequence
  Description of Artificial Sequence: Synthetic oligonucleotide
  Target: LAMA2; (+) strand; PAM type: YTN; PAM sequence: CTT
ctgatatttgctgtcatcat

SEQ ID NO: 332072 - DNA, 20 bp, Artificial Sequence
  Description of Artificial Sequence: Synthetic oligonucleotide
  Target: LAMA2; (+) strand; PAM type: YTN; PAM sequence: TTC
tgatatttgctgtcatcata

SEQ ID NO: 332073 - DNA, 20 bp, Artificial Sequence
  Description of Artificial Sequence: Synthetic oligonucleotide
  Target: LAMA2; (+) strand; PAM type: YTN; PAM sequence: CTG
atatttgctgtcatcataaa

SEQ ID NO: 332074 - DNA, 20 bp, Artificial Sequence
  Description of Artificial Sequence: Synthetic oligonucleotide
  Target: LAMA2; (+) strand; PAM type: YTN; PAM sequence: TTT
gctgtcatcataaagacctg

SEQ ID NO: 332075 - DNA, 20 bp, Artificial Sequence
  Description of Artificial Sequence: Synthetic oligonucleotide
  Target: LAMA2; (+) strand; PAM type: YTN; PAM sequence: TTG
ctgtcatcataaagacctga

SEQ ID NO: 332076 - DNA, 20 bp, Artificial Sequence
  Description of Artificial Sequence: Synthetic oligonucleotide
  Target: LAMA2; (+) strand; PAM type: YTN; PAM sequence: CTG
tcatcataaagacctgacat

SEQ ID NO: 332077 - DNA, 20 bp, Artificial Sequence
  Description of Artificial Sequence: Synthetic oligonucleotide
  Target: LAMA2; (+) strand; PAM type: YTN; PAM sequence: CTG
acatcttccctagcttcaaa

SEQ ID NO: 332078 - DNA, 20 bp, Artificial Sequence
  Description of Artificial Sequence: Synthetic oligonucleotide
  Target: LAMA2; (+) strand; PAM type: YTN; PAM sequence: CTT
ccctagcttcaaaagaacaa

SEQ ID NO: 332079 - DNA, 20 bp, Artificial Sequence
  Description of Artificial Sequence: Synthetic oligonucleotide
  Target: LAMA2; (+) strand; PAM type: YTN; PAM sequence: TTC
cctagcttcaaaagaacaat

SEQ ID NO: 332080 - DNA, 20 bp, Artificial Sequence
  Description of Artificial Sequence: Synthetic oligonucleotide
  Target: LAMA2; (+) strand; PAM type: YTN; PAM sequence: CTA
gcttcaaaagaacaatttga

SEQ ID NO: 332081 - DNA, 20 bp, Artificial Sequence
  Description of Artificial Sequence: Synthetic oligonucleotide
  Target: LAMA2; (+) strand; PAM type: YTN; PAM sequence: CTT
caaaagaacaatttgactaa

SEQ ID NO: 332082 - DNA, 20 bp, Artificial Sequence
  Description of Artificial Sequence: Synthetic oligonucleotide
  Target: LAMA2; (+) strand; PAM type: YTN; PAM sequence: TTC
aaaagaacaatttgactaat

SEQ ID NO: 332083 - DNA, 20 bp, Artificial Sequence
  Description of Artificial Sequence: Synthetic oligonucleotide
  Target: LAMA2; (+) strand; PAM type: YTN; PAM sequence: TTT
gactaatgctaacatttaaa

SEQ ID NO: 332084 - DNA, 20 bp, Artificial Sequence
  Description of Artificial Sequence: Synthetic oligonucleotide
  Target: LAMA2; (+) strand; PAM type: YTN; PAM sequence: TTG
actaatgctaacatttaaat

SEQ ID NO: 332085 - DNA, 20 bp, Artificial Sequence
  Description of Artificial Sequence: Synthetic oligonucleotide
  Target: LAMA2; (+) strand; PAM type: YTN; PAM sequence: CTA
atgctaacatttaaatatat

SEQ ID NO: 332086 - DNA, 20 bp, Artificial Sequence
  Description of Artificial Sequence: Synthetic oligonucleotide
  Target: LAMA2; (+) strand; PAM type: YTN; PAM sequence: CTA
acatttaaatatattcagaa

SEQ ID NO: 332087 - DNA, 20 bp, Artificial Sequence
  Description of Artificial Sequence: Synthetic oligonucleotide
  Target: LAMA2; (+) strand; PAM type: YTN; PAM sequence: TTT
aaatatattcagaaatttta

SEQ ID NO: 332088 - DNA, 20 bp, Artificial Sequence
  Description of Artificial Sequence: Synthetic oligonucleotide
  Target: LAMA2; (+) strand; PAM type: YTN; PAM sequence: TTA
aatatattcagaaattttac

SEQ ID NO: 332089 - DNA, 20 bp, Artificial Sequence
  Description of Artificial Sequence: Synthetic oligonucleotide
  Target: LAMA2; (+) strand; PAM type: YTN; PAM sequence: TTC
agaaattttacttttcatta

SEQ ID NO: 332090 - DNA, 20 bp, Artificial Sequence
  Description of Artificial Sequence: Synthetic oligonucleotide
  Target: LAMA2; (+) strand; PAM type: YTN; PAM sequence: TTT
tacttttcattaatgagaca

SEQ ID NO: 332091 - DNA, 20 bp, Artificial Sequence
  Description of Artificial Sequence: Synthetic oligonucleotide
  Target: LAMA2; (+) strand; PAM type: YTN; PAM sequence: TTT
acttttcattaatgagacag

SEQ ID NO: 332092 - DNA, 20 bp, Artificial Sequence
  Description of Artificial Sequence: Synthetic oligonucleotide
  Target: LAMA2; (+) strand; PAM type: YTN; PAM sequence: TTA
cttttcattaatgagacagg

SEQ ID NO: 332093 - DNA, 20 bp, Artificial Sequence
  Description of Artificial Sequence: Synthetic oligonucleotide
  Target: LAMA2; (+) strand; PAM type: YTN; PAM sequence: CTT
ttcattaatgagacaggaag

SEQ ID NO: 332094 - DNA, 20 bp, Artificial Sequence
  Description of Artificial Sequence: Synthetic oligonucleotide
  Target: LAMA2; (+) strand; PAM type: YTN; PAM sequence: TTT
tcattaatgagacaggaagc

SEQ ID NO: 332095 - DNA, 20 bp, Artificial Sequence
  Description of Artificial Sequence: Synthetic oligonucleotide
  Target: LAMA2; (+) strand; PAM type: YTN; PAM sequence: TTT
cattaatgagacaggaagcc

SEQ ID NO: 332096 - DNA, 20 bp, Artificial Sequence
  Description of Artificial Sequence: Synthetic oligonucleotide
  Target: LAMA2; (+) strand; PAM type: YTN; PAM sequence: TTC
attaatgagacaggaagcct

SEQ ID NO: 332097 - DNA, 20 bp, Artificial Sequence
  Description of Artificial Sequence: Synthetic oligonucleotide
  Target: LAMA2; (+) strand; PAM type: YTN; PAM sequence: TTA
atgagacaggaagcctcatc

SEQ ID NO: 332098 - DNA, 20 bp, Artificial Sequence
  Description of Artificial Sequence: Synthetic oligonucleotide
  Target: LAMA2; (+) strand; PAM type: YTN; PAM sequence: CTC
atctctatggactgctaaca

SEQ ID NO: 332099 - DNA, 20 bp, Artificial Sequence
  Description of Artificial Sequence: Synthetic oligonucleotide
  Target: LAMA2; (+) strand; PAM type: YTN; PAM sequence: CTC
tatggactgctaacatgatg

SEQ ID NO: 332100 - DNA, 20 bp, Artificial Sequence
  Description of Artificial Sequence: Synthetic oligonucleotide
  Target: LAMA2; (+) strand; PAM type: YTN; PAM sequence: CTA
tggactgctaacatgatgat

SEQ ID NO: 332101 - DNA, 20 bp, Artificial Sequence
  Description of Artificial Sequence: Synthetic oligonucleotide
  Target: LAMA2; (+) strand; PAM type: YTN; PAM sequence: CTG
ctaacatgatgatttggtgg

SEQ ID NO: 332102 - DNA, 20 bp, Artificial Sequence
  Description of Artificial Sequence: Synthetic oligonucleotide
  Target: LAMA2; (+) strand; PAM type: YTN; PAM sequence: CTA
acatgatgatttggtggaaa

SEQ ID NO: 332103 - DNA, 20 bp, Artificial Sequence
  Description of Artificial Sequence: Synthetic oligonucleotide
  Target: LAMA2; (+) strand; PAM type: YTN; PAM sequence: TTT
ggtggaaaataaagtccagc

SEQ ID NO: 332104 - DNA, 20 bp, Artificial Sequence
  Description of Artificial Sequence: Synthetic oligonucleotide
  Target: LAMA2; (+) strand; PAM type: YTN; PAM sequence: TTG
gtggaaaataaagtccagcc

SEQ ID NO: 332105 - DNA, 20 bp, Artificial Sequence
  Description of Artificial Sequence: Synthetic oligonucleotide
  Target: LAMA2; (+) strand; PAM type: YTN; PAM sequence: CTG
ttaagttgaattaaaaaatt

SEQ ID NO: 332106 - DNA, 20 bp, Artificial Sequence
  Description of Artificial Sequence: Synthetic oligonucleotide
  Target: LAMA2; (+) strand; PAM type: YTN; PAM sequence: TTA
agttgaattaaaaaatttac

SEQ ID NO: 332107 - DNA, 20 bp, Artificial Sequence
  Description of Artificial Sequence: Synthetic oligonucleotide
  Target: LAMA2; (+) strand; PAM type: YTN; PAM sequence: TTG
aattaaaaaatttaccaata

SEQ ID NO: 332108 - DNA, 20 bp, Artificial Sequence
  Description of Artificial Sequence: Synthetic oligonucleotide
  Target: LAMA2; (+) strand; PAM type: YTN; PAM sequence: TTA
aaaaatttaccaataataat

SEQ ID NO: 332109 - DNA, 20 bp, Artificial Sequence
  Description of Artificial Sequence: Synthetic oligonucleotide
  Target: LAMA2; (+) strand; PAM type: YTN; PAM sequence: TTT
accaataataatggaatatt

SEQ ID NO: 332110 - DNA, 20 bp, Artificial Sequence
  Description of Artificial Sequence: Synthetic oligonucleotide
  Target: LAMA2; (+) strand; PAM type: YTN; PAM sequence: TTA
ccaataataatggaatattt

SEQ ID NO: 332111 - DNA, 20 bp, Artificial Sequence
  Description of Artificial Sequence: Synthetic oligonucleotide
  Target: LAMA2; (+) strand; PAM type: YTN; PAM sequence: TTT
ttgccctgtcttgtacagtc

SEQ ID NO: 332112 - DNA, 20 bp, Artificial Sequence
  Description of Artificial Sequence: Synthetic oligonucleotide
  Target: LAMA2; (+) strand; PAM type: YTN; PAM sequence: TTT
tgccctgtcttgtacagtca

SEQ ID NO: 332113 - DNA, 20 bp, Artificial Sequence
  Description of Artificial Sequence: Synthetic oligonucleotide
  Target: LAMA2; (+) strand; PAM type: YTN; PAM sequence: TTT
gccctgtcttgtacagtcat

SEQ ID NO: 332114 - DNA, 20 bp, Artificial Sequence
  Description of Artificial Sequence: Synthetic oligonucleotide
  Target: LAMA2; (+) strand; PAM type: YTN; PAM sequence: TTG
ccctgtcttgtacagtcata

SEQ ID NO: 332115 - DNA, 20 bp, Artificial Sequence
  Description of Artificial Sequence: Synthetic oligonucleotide
  Target: LAMA2; (+) strand; PAM type: YTN; PAM sequence: CTG
tcttgtacagtcatattaag

SEQ ID NO: 332116 - DNA, 20 bp, Artificial Sequence
  Description of Artificial Sequence: Synthetic oligonucleotide
  Target: LAMA2; (+) strand; PAM type: YTN; PAM sequence: CTT
gtacagtcatattaagattt

SEQ ID NO: 332117 - DNA, 20 bp, Artificial Sequence
  Description of Artificial Sequence: Synthetic oligonucleotide
  Target: LAMA2; (+) strand; PAM type: YTN; PAM sequence: TTG
tacagtcatattaagatttg

SEQ ID NO: 332118 - DNA, 20 bp, Artificial Sequence
  Description of Artificial Sequence: Synthetic oligonucleotide
  Target: LAMA2; (+) strand; PAM type: YTN; PAM sequence: TTA
agatttgcaatatgaatatc

SEQ ID NO: 332119 - DNA, 20 bp, Artificial Sequence
  Description of Artificial Sequence: Synthetic oligonucleotide
  Target: LAMA2; (+) strand; PAM type: YTN; PAM sequence: TTT
gcaatatgaatatccatatc

SEQ ID NO: 332120 - DNA, 20 bp, Artificial Sequence
  Description of Artificial Sequence: Synthetic oligonucleotide
  Target: LAMA2; (+) strand; PAM type: YTN; PAM sequence: TTG
caatatgaatatccatatct

SEQ ID NO: 332121 - DNA, 20 bp, Artificial Sequence
  Description of Artificial Sequence: Synthetic oligonucleotide
  Target: LAMA2; (+) strand; PAM type: YTN; PAM sequence: CTG
gaataggactataataccat

SEQ ID NO: 332122 - DNA, 20 bp, Artificial Sequence
  Description of Artificial Sequence: Synthetic oligonucleotide
  Target: LAMA2; (+) strand; PAM type: YTN; PAM sequence: CTA
taataccataaatagcttaa

SEQ ID NO: 332123 - DNA, 20 bp, Artificial Sequence
  Description of Artificial Sequence: Synthetic oligonucleotide
  Target: LAMA2; (+) strand; PAM type: YTN; PAM sequence: CTT
aaaacatagtcttcatgttt

SEQ ID NO: 332124 - DNA, 20 bp, Artificial Sequence
  Description of Artificial Sequence: Synthetic oligonucleotide
  Target: LAMA2; (+) strand; PAM type: YTN; PAM sequence: TTA
aaacatagtcttcatgtttt

SEQ ID NO: 332125 - DNA, 20 bp, Artificial Sequence
  Description of Artificial Sequence: Synthetic oligonucleotide
  Target: LAMA2; (+) strand; PAM type: YTN; PAM sequence: CTT
catgttttcagtaaatgtta

SEQ ID NO: 332126 - DNA, 20 bp, Artificial Sequence
  Description of Artificial Sequence: Synthetic oligonucleotide
  Target: LAMA2; (+) strand; PAM type: YTN; PAM sequence: TTC
atgttttcagtaaatgttat

SEQ ID NO: 332127 - DNA, 20 bp, Artificial Sequence
  Description of Artificial Sequence: Synthetic oligonucleotide
  Target: LAMA2; (+) strand; PAM type: YTN; PAM sequence: TTT
tcagtaaatgttatgacagt

SEQ ID NO: 332128 - DNA, 20 bp, Artificial Sequence
  Description of Artificial Sequence: Synthetic oligonucleotide
  Target: LAMA2; (+) strand; PAM type: YTN; PAM sequence: TTT
cagtaaatgttatgacagtg

SEQ ID NO: 332129 - DNA, 20 bp, Artificial Sequence
  Description of Artificial Sequence: Synthetic oligonucleotide
  Target: LAMA2; (+) strand; PAM type: YTN; PAM sequence: TTC
agtaaatgttatgacagtgt

SEQ ID NO: 332130 - DNA, 20 bp, Artificial Sequence
  Description of Artificial Sequence: Synthetic oligonucleotide
  Target: LAMA2; (+) strand; PAM type: YTN; PAM sequence: TTA
tgacagtgtattatatatta

SEQ ID NO: 332131 - DNA, 20 bp, Artificial Sequence
  Description of Artificial Sequence: Synthetic oligonucleotide
  Target: LAMA2; (+) strand; PAM type: YTN; PAM sequence: TTA
tatattaattataaattaat

SEQ ID NO: 332132 - DNA, 20 bp, Artificial Sequence
  Description of Artificial Sequence: Synthetic oligonucleotide
  Target: LAMA2; (+) strand; PAM type: YTN; PAM sequence: TTA
attataaattaatatgtaat

SEQ ID NO: 332133 - DNA, 20 bp, Artificial Sequence
  Description of Artificial Sequence: Synthetic oligonucleotide
  Target: LAMA2; (+) strand; PAM type: YTN; PAM sequence: TTA
taaattaatatgtaatacaa

SEQ ID NO: 332134 - DNA, 20 bp, Artificial Sequence
  Description of Artificial Sequence: Synthetic oligonucleotide
  Target: LAMA2; (+) strand; PAM type: YTN; PAM sequence: TTA
atatgtaatacaaatcttca

SEQ ID NO: 332135 - DNA, 20 bp, Artificial Sequence
  Description of Artificial Sequence: Synthetic oligonucleotide
  Target: LAMA2; (+) strand; PAM type: YTN; PAM sequence: CTT
cacaaatctgaaaatgccaa

SEQ ID NO: 332136 - DNA, 20 bp, Artificial Sequence
  Description of Artificial Sequence: Synthetic oligonucleotide
  Target: LAMA2; (+) strand; PAM type: YTN; PAM sequence: TTC
acaaatctgaaaatgccaaa

SEQ ID NO: 332137 - DNA, 20 bp, Artificial Sequence
  Description of Artificial Sequence: Synthetic oligonucleotide
  Target: LAMA2; (+) strand; PAM type: YTN; PAM sequence: CTG
aaaatgccaaatttagtgaa

SEQ ID NO: 332138 - DNA, 20 bp, Artificial Sequence
  Description of Artificial Sequence: Synthetic oligonucleotide
  Target: LAMA2; (+) strand; PAM type: YTN; PAM sequence: TTT
agtgaatattcagcttttta

SEQ ID NO: 332139 - DNA, 20 bp, Artificial Sequence
  Description of Artificial Sequence: Synthetic oligonucleotide
  Target: LAMA2; (+) strand; PAM type: YTN; PAM sequence: TTA
gtgaatattcagctttttaa

SEQ ID NO: 332140 - DNA, 20 bp, Artificial Sequence
  Description of Artificial Sequence: Synthetic oligonucleotide
  Target: LAMA2; (+) strand; PAM type: YTN; PAM sequence: TTC
agctttttaaattttgaaat

SEQ ID NO: 332141 - DNA, 20 bp, Artificial Sequence
  Description of Artificial Sequence: Synthetic oligonucleotide
  Target: LAMA2; (+) strand; PAM type: YTN; PAM sequence: CTT
tttaaattttgaaatggagt

SEQ ID NO: 332142 - DNA, 20 bp, Artificial Sequence
  Description of Artificial Sequence: Synthetic oligonucleotide
  Target: LAMA2; (+) strand; PAM type: YTN; PAM sequence: TTT
ttaaattttgaaatggagtc

SEQ ID NO: 332143 - DNA, 20 bp, Artificial Sequence
  Description of Artificial Sequence: Synthetic oligonucleotide
  Target: LAMA2; (+) strand; PAM type: YTN; PAM sequence: TTT
taaattttgaaatggagtct

SEQ ID NO: 332144 - DNA, 20 bp, Artificial Sequence
  Description of Artificial Sequence: Synthetic oligonucleotide
  Target: LAMA2; (+) strand; PAM type: YTN; PAM sequence: TTT
aaattttgaaatggagtctc

SEQ ID NO: 332145 - DNA, 20 bp, Artificial Sequence
  Description of Artificial Sequence: Synthetic oligonucleotide
  Target: LAMA2; (+) strand; PAM type: YTN; PAM sequence: TTA
aattttgaaatggagtctca

SEQ ID NO: 332146 - DNA, 20 bp, Artificial Sequence
  Description of Artificial Sequence: Synthetic oligonucleotide
  Target: LAMA2; (+) strand; PAM type: YTN; PAM sequence: TTT
tgaaatggagtctcactctg

SEQ ID NO: 332147 - DNA, 20 bp, Artificial Sequence
  Description of Artificial Sequence: Synthetic oligonucleotide
  Target: LAMA2; (+) strand; PAM type: YTN; PAM sequence: TTT
gaaatggagtctcactctgt

SEQ ID NO: 332148 - DNA, 20 bp, Artificial Sequence
  Description of Artificial Sequence: Synthetic oligonucleotide
  Target: LAMA2; (+) strand; PAM type: YTN; PAM sequence: TTG
aaatggagtctcactctgtc

SEQ ID NO: 332149 - DNA, 20 bp, Artificial Sequence
  Description of Artificial Sequence: Synthetic oligonucleotide
  Target: LAMA2; (+) strand; PAM type: YTN; PAM sequence: CTC
actctgtcacctaggctgga

SEQ ID NO: 332150 - DNA, 20 bp, Artificial Sequence
  Description of Artificial Sequence: Synthetic oligonucleotide
  Target: LAMA2; (+) strand; PAM type: YTN; PAM sequence: CTC
tgtcacctaggctggagtgc

SEQ ID NO: 332151 - DNA, 20 bp, Artificial Sequence
  Description of Artificial Sequence: Synthetic oligonucleotide
  Target: LAMA2; (+) strand; PAM type: YTN; PAM sequence: CTG
tcacctaggctggagtgcaa

SEQ ID NO: 332152 - DNA, 20 bp, Artificial Sequence
  Description of Artificial Sequence: Synthetic oligonucleotide
  Target: LAMA2; (+) strand; PAM type: YTN; PAM sequence: CTA
ggctggagtgcaatggcgtg

SEQ ID NO: 332153 - DNA, 20 bp, Artificial Sequence
  Description of Artificial Sequence: Synthetic oligonucleotide
  Target: LAMA2; (+) strand; PAM type: YTN; PAM sequence: CTG
gagtgcaatggcgtgatctt

SEQ ID NO: 332154 - DNA, 20 bp, Artificial Sequence
  Description of Artificial Sequence: Synthetic oligonucleotide
  Target: LAMA2; (+) strand; PAM type: YTN; PAM sequence: CTT
ggctcactgcaacctctacc

SEQ ID NO: 332155 - DNA, 20 bp, Artificial Sequence
  Description of Artificial Sequence: Synthetic oligonucleotide
  Target: LAMA2; (+) strand; PAM type: YTN; PAM sequence: TTG
gctcactgcaacctctacct

SEQ ID NO: 332156 - DNA, 20 bp, Artificial Sequence
  Description of Artificial Sequence: Synthetic oligonucleotide
  Target: LAMA2; (+) strand; PAM type: YTN; PAM sequence: CTC
actgcaacctctacctcctg

SEQ ID NO: 332157 - DNA, 20 bp, Artificial Sequence
  Description of Artificial Sequence: Synthetic oligonucleotide
  Target: LAMA2; (+) strand; PAM type: YTN; PAM sequence: CTG
caacctctacctcctgggtt

SEQ ID NO: 332158 - DNA, 20 bp, Artificial Sequence
  Description of Artificial Sequence: Synthetic oligonucleotide
  Target: LAMA2; (+) strand; PAM type: YTN; PAM sequence: CTC
tacctcctgggttcaagtga

SEQ ID NO: 332159 - DNA, 20 bp, Artificial Sequence
  Description of Artificial Sequence: Synthetic oligonucleotide
  Target: LAMA2; (+) strand; PAM type: YTN; PAM sequence: CTA
cctcctgggttcaagtgatt

SEQ ID NO: 332160 - DNA, 20 bp, Artificial Sequence
  Description of Artificial Sequence: Synthetic oligonucleotide
  Target: LAMA2; (+) strand; PAM type: YTN; PAM sequence: CTC
ctgggttcaagtgattctcc

SEQ ID NO: 332161 - DNA, 20 bp, Artificial Sequence
  Description of Artificial Sequence: Synthetic oligonucleotide
  Target: LAMA2; (+) strand; PAM type: YTN; PAM sequence: CTG
ggttcaagtgattctcctgc

SEQ ID NO: 332162 - DNA, 20 bp, Artificial Sequence
  Description of Artificial Sequence: Synthetic oligonucleotide
  Target: LAMA2; (+) strand; PAM type: YTN; PAM sequence: TTC
aagtgattctcctgcctcag

SEQ ID NO: 332163 - DNA, 20 bp, Artificial Sequence
  Description of Artificial Sequence: Synthetic oligonucleotide
  Target: LAMA2; (+) strand; PAM type: YTN; PAM sequence: TTC
tcctgcctcagcctcccaag

SEQ ID NO: 332164 - DNA, 20 bp, Artificial Sequence
  Description of Artificial Sequence: Synthetic oligonucleotide
  Target: LAMA2; (+) strand; PAM type: YTN; PAM sequence: CTC
ctgcctcagcctcccaagta

SEQ ID NO: 332165 - DNA, 20 bp, Artificial Sequence
  Description of Artificial Sequence: Synthetic oligonucleotide
  Target: LAMA2; (+) strand; PAM type: YTN; PAM sequence: CTG
cctcagcctcccaagtagct

SEQ ID NO: 332166 - DNA, 20 bp, Artificial Sequence
  Description of Artificial Sequence: Synthetic oligonucleotide
  Target: LAMA2; (+) strand; PAM type: YTN; PAM sequence: CTC
agcctcccaagtagctggga

SEQ ID NO: 332167 - DNA, 20 bp, Artificial Sequence
  Description of Artificial Sequence: Synthetic oligonucleotide
  Target: LAMA2; (+) strand; PAM type: YTN; PAM sequence: CTC
ccaagtagctgggaatacag

SEQ ID NO: 332168 - DNA, 20 bp, Artificial Sequence
  Description of Artificial Sequence: Synthetic oligonucleotide
  Target: LAMA2; (+) strand; PAM type: YTN; PAM sequence: CTG
ggaatacaggcacccgccac

SEQ ID NO: 332169 - DNA, 20 bp, Artificial Sequence
  Description of Artificial Sequence: Synthetic oligonucleotide
  Target: LAMA2; (+) strand; PAM type: YTN; PAM sequence: CTG
tgctattttttttttttttt

SEQ ID NO: 332170 - DNA, 20 bp, Artificial Sequence
  Description of Artificial Sequence: Synthetic oligonucleotide
  Target: LAMA2; (+) strand; PAM type: YTN; PAM sequence: CTA
tttttttttttttttcatag

SEQ ID NO: 332171 - DNA, 20 bp, Artificial Sequence
  Description of Artificial Sequence: Synthetic oligonucleotide
  Target: LAMA2; (+) strand; PAM type: YTN; PAM sequence: TTT
ttttttttttttcatagaga

SEQ ID NO: 332172 - DNA, 20 bp, Artificial Sequence
  Description of Artificial Sequence: Synthetic oligonucleotide
  Target: LAMA2; (+) strand; PAM type: YTN; PAM sequence: TTT
tttttttttttcatagagat

SEQ ID NO: 332173 - DNA, 20 bp, Artificial Sequence
  Description of Artificial Sequence: Synthetic oligonucleotide
  Target: LAMA2; (+) strand; PAM type: YTN; PAM sequence: TTT
ttttttttttcatagagatg

SEQ ID NO: 332174 - DNA, 20 bp, Artificial Sequence
  Description of Artificial Sequence: Synthetic oligonucleotide
  Target: LAMA2; (+) strand; PAM type: YTN; PAM sequence: TTT
tttttttttcatagagatgg

SEQ ID NO: 332175 - DNA, 20 bp, Artificial Sequence
  Description of Artificial Sequence: Synthetic oligonucleotide
  Target: LAMA2; (+) strand; PAM type: YTN; PAM sequence: TTT
ttttttttcatagagatggg

SEQ ID NO: 332176 - DNA, 20 bp, Artificial Sequence
  Description of Artificial Sequence: Synthetic oligonucleotide
  Target: LAMA2; (+) strand; PAM type: YTN; PAM sequence: TTT
tttttttcatagagatgggg

SEQ ID NO: 332177 - DNA, 20 bp, Artificial Sequence
  Description of Artificial Sequence: Synthetic oligonucleotide
  Target: LAMA2; (+) strand; PAM type: YTN; PAM sequence: TTT
ttttttcatagagatggggt

SEQ ID NO: 332178 - DNA, 20 bp, Artificial Sequence
  Description of Artificial Sequence: Synthetic oligonucleotide
  Target: LAMA2; (+) strand; PAM type: YTN; PAM sequence: TTT
tttttcatagagatggggtt

SEQ ID NO: 332179 - DNA, 20 bp, Artificial Sequence
  Description of Artificial Sequence: Synthetic oligonucleotide
  Target: LAMA2; (+) strand; PAM type: YTN; PAM sequence: TTT
ttttcatagagatggggttt

SEQ ID NO: 332180 - DNA, 20 bp, Artificial Sequence
  Description of Artificial Sequence: Synthetic oligonucleotide
  Target: LAMA2; (+) strand; PAM type: YTN; PAM sequence: TTT
tttcatagagatggggtttc

SEQ ID NO: 332181 - DNA, 20 bp, Artificial Sequence
  Description of Artificial Sequence: Synthetic oligonucleotide
  Target: LAMA2; (+) strand; PAM type: YTN; PAM sequence: TTT
ttcatagagatggggtttca

SEQ ID NO: 332182 - DNA, 20 bp, Artificial Sequence
  Description of Artificial Sequence: Synthetic oligonucleotide
  Target: LAMA2; (+) strand; PAM type: YTN; PAM sequence: TTT
tcatagagatggggtttcac

SEQ ID NO: 332183 - DNA, 20 bp, Artificial Sequence
  Description of Artificial Sequence: Synthetic oligonucleotide
  Target: LAMA2; (+) strand; PAM type: YTN; PAM sequence: TTT
catagagatggggtttcact

SEQ ID NO: 332184 - DNA, 20 bp, Artificial Sequence
  Description of Artificial Sequence: Synthetic oligonucleotide
  Target: LAMA2; (+) strand; PAM type: YTN; PAM sequence: TTC
atagagatggggtttcactg

SEQ ID NO: 332185 - DNA, 20 bp, Artificial Sequence
  Description of Artificial Sequence: Synthetic oligonucleotide
  Target: LAMA2; (+) strand; PAM type: YTN; PAM sequence: TTT
cactgtgttggccaggctgg

SEQ ID NO: 332186 - DNA, 20 bp, Artificial Sequence
  Description of Artificial Sequence: Synthetic oligonucleotide
  Target: LAMA2; (+) strand; PAM type: YTN; PAM sequence: TTC
actgtgttggccaggctggt

SEQ ID NO: 332187 - DNA, 20 bp, Artificial Sequence
  Description of Artificial Sequence: Synthetic oligonucleotide
  Target: LAMA2; (+) strand; PAM type: YTN; PAM sequence: CTG
tgttggccaggctggtcttg

SEQ ID NO: 332188 - DNA, 20 bp, Artificial Sequence
  Description of Artificial Sequence: Synthetic oligonucleotide
  Target: LAMA2; (+) strand; PAM type: YTN; PAM sequence: TTG
gccaggctggtcttgaactc

SEQ ID NO: 332189 - DNA, 20 bp, Artificial Sequence
  Description of Artificial Sequence: Synthetic oligonucleotide
  Target: LAMA2; (+) strand; PAM type: YTN; PAM sequence: CTG
gtcttgaactcctgacctca

SEQ ID NO: 332190 - DNA, 20 bp, Artificial Sequence
  Description of Artificial Sequence: Synthetic oligonucleotide
  Target: LAMA2; (+) strand; PAM type: YTN; PAM sequence: CTT
gaactcctgacctcaggtga

SEQ ID NO: 332191 - DNA, 20 bp, Artificial Sequence
  Description of Artificial Sequence: Synthetic oligonucleotide
  Target: LAMA2; (+) strand; PAM type: YTN; PAM sequence: TTG
aactcctgacctcaggtgat

SEQ ID NO: 332192 - DNA, 20 bp, Artificial Sequence
  Description of Artificial Sequence: Synthetic oligonucleotide
  Target: LAMA2; (+) strand; PAM type: YTN; PAM sequence: CTC
ctgacctcaggtgatctgcc

SEQ ID NO: 332193 - DNA, 20 bp, Artificial Sequence
  Description of Artificial Sequence: Synthetic oligonucleotide
  Target: LAMA2; (+) strand; PAM type: YTN; PAM sequence: CTG
acctcaggtgatctgcccac

SEQ ID NO: 332194 - DNA, 20 bp, Artificial Sequence
  Description of Artificial Sequence: Synthetic oligonucleotide
  Target: LAMA2; (+) strand; PAM type: YTN; PAM sequence: CTC
aggtgatctgcccacctcag

SEQ ID NO: 332195 - DNA, 20 bp, Artificial Sequence
  Description of Artificial Sequence: Synthetic oligonucleotide
  Target: LAMA2; (+) strand; PAM type: YTN; PAM sequence: CTG
cccacctcagcctcccaaag

SEQ ID NO: 332196 - DNA, 20 bp, Artificial Sequence
  Description of Artificial Sequence: Synthetic oligonucleotide
  Target: LAMA2; (+) strand; PAM type: YTN; PAM sequence: CTC
agcctcccaaagtgctggga

SEQ ID NO: 332197 - DNA, 20 bp, Artificial Sequence
  Description of Artificial Sequence: Synthetic oligonucleotide
  Target: LAMA2; (+) strand; PAM type: YTN; PAM sequence: CTC
ccaaagtgctgggattacag

SEQ ID NO: 332198 - DNA, 20 bp, Artificial Sequence
  Description of Artificial Sequence: Synthetic oligonucleotide
  Target: LAMA2; (+) strand; PAM type: YTN; PAM sequence: CTG
ggattacaggtgtgagccac

SEQ ID NO: 332199 - DNA, 20 bp, Artificial Sequence
  Description of Artificial Sequence: Synthetic oligonucleotide
  Target: LAMA2; (+) strand; PAM type: YTN; PAM sequence: TTA
caggtgtgagccactgcacc

SEQ ID NO: 332200 - DNA, 20 bp, Artificial Sequence
  Description of Artificial Sequence: Synthetic oligonucleotide
  Target: LAMA2; (+) strand; PAM type: YTN; PAM sequence: CTG
cacctggccaatattcagct

SEQ ID NO: 332201 - DNA, 20 bp, Artificial Sequence
  Description of Artificial Sequence: Synthetic oligonucleotide
  Target: LAMA2; (+) strand; PAM type: YTN; PAM sequence: CTG
gccaatattcagcttttaat

SEQ ID NO: 332202 - DNA, 20 bp, Artificial Sequence
  Description of Artificial Sequence: Synthetic oligonucleotide
  Target: LAMA2; (+) strand; PAM type: YTN; PAM sequence: TTC
agcttttaataaaatttttc

SEQ ID NO: 332203 - DNA, 20 bp, Artificial Sequence
  Description of Artificial Sequence: Synthetic oligonucleotide
  Target: LAMA2; (+) strand; PAM type: YTN; PAM sequence: CTT
ttaataaaatttttctttta

SEQ ID NO: 332204 - DNA, 20 bp, Artificial Sequence
  Description of Artificial Sequence: Synthetic oligonucleotide
  Target: LAMA2; (+) strand; PAM type: YTN; PAM sequence: TTT
taataaaatttttcttttaa

SEQ ID NO: 332205 - DNA, 20 bp, Artificial Sequence
  Description of Artificial Sequence: Synthetic oligonucleotide
  Target: LAMA2; (+) strand; PAM type: YTN; PAM sequence: TTT
aataaaatttttcttttaaa

SEQ ID NO: 332206 - DNA, 20 bp, Artificial Sequence
  Description of Artificial Sequence: Synthetic oligonucleotide
  Target: LAMA2; (+) strand; PAM type: YTN; PAM sequence: TTA
ataaaatttttcttttaaag

SEQ ID NO: 332207 - DNA, 20 bp, Artificial Sequence
  Description of Artificial Sequence: Synthetic oligonucleotide
  Target: LAMA2; (+) strand; PAM type: YTN; PAM sequence: TTT
ttcttttaaagatgatttta

SEQ ID NO: 332208 - DNA, 20 bp, Artificial Sequence
  Description of Artificial Sequence: Synthetic oligonucleotide
  Target: LAMA2; (+) strand; PAM type: YTN; PAM sequence: TTT
tcttttaaagatgattttac

SEQ ID NO: 332209 - DNA, 20 bp, Artificial Sequence
  Description of Artificial Sequence: Synthetic oligonucleotide
  Target: LAMA2; (+) strand; PAM type: YTN; PAM sequence: TTT
cttttaaagatgattttact

SEQ ID NO: 332210 - DNA, 20 bp, Artificial Sequence
  Description of Artificial Sequence: Synthetic oligonucleotide
  Target: LAMA2; (+) strand; PAM type: YTN; PAM sequence: TTC
ttttaaagatgattttactt

SEQ ID NO: 332211 - DNA, 20 bp, Artificial Sequence
  Description of Artificial Sequence: Synthetic oligonucleotide
  Target: LAMA2; (+) strand; PAM type: YTN; PAM sequence: CTT
ttaaagatgattttactttc

SEQ ID NO: 332212 - DNA, 20 bp, Artificial Sequence
  Description of Artificial Sequence: Synthetic oligonucleotide
  Target: LAMA2; (+) strand; PAM type: YTN; PAM sequence: TTT
taaagatgattttactttct

SEQ ID NO: 332213 - DNA, 20 bp, Artificial Sequence
  Description of Artificial Sequence: Synthetic oligonucleotide
  Target: LAMA2; (+) strand; PAM type: YTN; PAM sequence: TTT
aaagatgattttactttcta

SEQ ID NO: 332214 - DNA, 20 bp, Artificial Sequence
  Description of Artificial Sequence: Synthetic oligonucleotide
  Target: LAMA2; (+) strand; PAM type: YTN; PAM sequence: TTA
aagatgattttactttctat

SEQ ID NO: 332215 - DNA, 20 bp, Artificial Sequence
  Description of Artificial Sequence: Synthetic oligonucleotide
  Target: LAMA2; (+) strand; PAM type: YTN; PAM sequence: TTT
tactttctatcagattccta

SEQ ID NO: 332216 - DNA, 20 bp, Artificial Sequence
  Description of Artificial Sequence: Synthetic oligonucleotide
  Target: LAMA2; (+) strand; PAM type: YTN; PAM sequence: TTT
actttctatcagattcctat

SEQ ID NO: 332217 - DNA, 20 bp, Artificial Sequence
  Description of Artificial Sequence: Synthetic oligonucleotide
  Target: LAMA2; (+) strand; PAM type: YTN; PAM sequence: TTA
ctttctatcagattcctatt

SEQ ID NO: 332218 - DNA, 20 bp, Artificial Sequence
  Description of Artificial Sequence: Synthetic oligonucleotide
  Target: LAMA2; (+) strand; PAM type: YTN; PAM sequence: CTT
tctatcagattcctattgca

SEQ ID NO: 332219 - DNA, 20 bp, Artificial Sequence
  Description of Artificial Sequence: Synthetic oligonucleotide
  Target: LAMA2; (+) strand; PAM type: YTN; PAM sequence: TTT
ctatcagattcctattgcat

SEQ ID NO: 332220 - DNA, 20 bp, Artificial Sequence
  Description of Artificial Sequence: Synthetic oligonucleotide
  Target: LAMA2; (+) strand; PAM type: YTN; PAM sequence: TTC
tatcagattcctattgcatt

SEQ ID NO: 332221 - DNA, 20 bp, Artificial Sequence
  Description of Artificial Sequence: Synthetic oligonucleotide
  Target: LAMA2; (+) strand; PAM type: YTN; PAM sequence: CTA
tcagattcctattgcattga

SEQ ID NO: 332222 - DNA, 20 bp, Artificial Sequence
  Description of Artificial Sequence: Synthetic oligonucleotide
  Target: LAMA2; (+) strand; PAM type: YTN; PAM sequence: TTC
ctattgcattgaggacttag

SEQ ID NO: 332223 - DNA, 20 bp, Artificial Sequence
  Description of Artificial Sequence: Synthetic oligonucleotide
  Target: LAMA2; (+) strand; PAM type: YTN; PAM sequence: CTA
ttgcattgaggacttagttt

SEQ ID NO: 332224 - DNA, 20 bp, Artificial Sequence
  Description of Artificial Sequence: Synthetic oligonucleotide
  Target: LAMA2; (+) strand; PAM type: YTN; PAM sequence: TTG
cattgaggacttagttttgc

SEQ ID NO: 332225 - DNA, 20 bp, Artificial Sequence
  Description of Artificial Sequence: Synthetic oligonucleotide
  Target: LAMA2; (+) strand; PAM type: YTN; PAM sequence: TTG
aggacttagttttgctttat

SEQ ID NO: 332226 - DNA, 20 bp, Artificial Sequence
  Description of Artificial Sequence: Synthetic oligonucleotide
  Target: LAMA2; (+) strand; PAM type: YTN; PAM sequence: CTT
agttttgctttatttttatt

SEQ ID NO: 332227 - DNA, 20 bp, Artificial Sequence
  Description of Artificial Sequence: Synthetic oligonucleotide
  Target: LAMA2; (+) strand; PAM type: YTN; PAM sequence: TTA
gttttgctttatttttattg

SEQ ID NO: 332228 - DNA, 20 bp, Artificial Sequence
  Description of Artificial Sequence: Synthetic oligonucleotide
  Target: LAMA2; (+) strand; PAM type: YTN; PAM sequence: TTT
tgctttatttttattgtttt

SEQ ID NO: 332229 - DNA, 20 bp, Artificial Sequence
  Description of Artificial Sequence: Synthetic oligonucleotide
  Target: LAMA2; (+) strand; PAM type: YTN; PAM sequence: TTT
gctttatttttattgttttt

SEQ ID NO: 332230 - DNA, 20 bp, Artificial Sequence
  Description of Artificial Sequence: Synthetic oligonucleotide
  Target: LAMA2; (+) strand; PAM type: YTN; PAM sequence: TTG
ctttatttttattgtttttt

SEQ ID NO: 332231 - DNA, 20 bp, Artificial Sequence
  Description of Artificial Sequence: Synthetic oligonucleotide
  Target: LAMA2; (+) strand; PAM type: YTN; PAM sequence: CTT
tatttttattgttttttcaa

SEQ ID NO: 332232 - DNA, 20 bp, Artificial Sequence
  Description of Artificial Sequence: Synthetic oligonucleotide
  Target: LAMA2; (+) strand; PAM type: YTN; PAM sequence: TTT
atttttattgttttttcaaa

SEQ ID NO: 332233 - DNA, 20 bp, Artificial Sequence
  Description of Artificial Sequence: Synthetic oligonucleotide
  Target: LAMA2; (+) strand; PAM type: YTN; PAM sequence: TTA
tttttattgttttttcaaat

SEQ ID NO: 332234 - DNA, 20 bp, Artificial Sequence
  Description of Artificial Sequence: Synthetic oligonucleotide
  Target: LAMA2; (+) strand; PAM type: YTN; PAM sequence: TTT
ttattgttttttcaaatgtt

SEQ ID NO: 332235 - DNA, 20 bp, Artificial Sequence
  Description of Artificial Sequence: Synthetic oligonucleotide
  Target: LAMA2; (+) strand; PAM type: YTN; PAM sequence: TTT
tattgttttttcaaatgttt

SEQ ID NO: 332236 - DNA, 20 bp, Artificial Sequence
  Description of Artificial Sequence: Synthetic oligonucleotide
  Target: LAMA2; (+) strand; PAM type: YTN; PAM sequence: TTT
attgttttttcaaatgtttt

SEQ ID NO: 332237 - DNA, 20 bp, Artificial Sequence
  Description of Artificial Sequence: Synthetic oligonucleotide
  Target: LAMA2; (+) strand; PAM type: YTN; PAM sequence: TTA
ttgttttttcaaatgtttta

SEQ ID NO: 332238 - DNA, 20 bp, Artificial Sequence
  Description of Artificial Sequence: Synthetic oligonucleotide
  Target: LAMA2; (+) strand; PAM type: YTN; PAM sequence: TTG
ttttttcaaatgttttacca

SEQ ID NO: 332239 - DNA, 20 bp, Artificial Sequence
  Description of Artificial Sequence: Synthetic oligonucleotide
  Target: LAMA2; (+) strand; PAM type: YTN; PAM sequence: TTT
tttcaaatgttttaccaagt

SEQ ID NO: 332240 - DNA, 20 bp, Artificial Sequence
  Description of Artificial Sequence: Synthetic oligonucleotide
  Target: LAMA2; (+) strand; PAM type: YTN; PAM sequence: TTT
ttcaaatgttttaccaagta

SEQ ID NO: 332241 - DNA, 20 bp, Artificial Sequence
  Description of Artificial Sequence: Synthetic oligonucleotide
  Target: LAMA2; (+) strand; PAM type: YTN; PAM sequence: TTT
tcaaatgttttaccaagtac

SEQ ID NO: 332242 - DNA, 20 bp, Artificial Sequence
  Description of Artificial Sequence: Synthetic oligonucleotide
  Target: LAMA2; (+) strand; PAM type: YTN; PAM sequence: TTT
caaatgttttaccaagtaca

SEQ ID NO: 332243 - DNA, 20 bp, Artificial Sequence
  Description of Artificial Sequence: Synthetic oligonucleotide
  Target: LAMA2; (+) strand; PAM type: YTN; PAM sequence: TTC
aaatgttttaccaagtacaa

SEQ ID NO: 332244 - DNA, 20 bp, Artificial Sequence
  Description of Artificial Sequence: Synthetic oligonucleotide
  Target: LAMA2; (+) strand; PAM type: YTN; PAM sequence: TTT
taccaagtacaacttgtctc

SEQ ID NO: 332245 - DNA, 20 bp, Artificial Sequence
  Description of Artificial Sequence: Synthetic oligonucleotide
  Target: LAMA2; (+) strand; PAM type: YTN; PAM sequence: TTT
accaagtacaacttgtctct

SEQ ID NO: 332246 - DNA, 20 bp, Artificial Sequence
  Description of Artificial Sequence: Synthetic oligonucleotide
  Target: LAMA2; (+) strand; PAM type: YTN; PAM sequence: TTA
ccaagtacaacttgtctcta

SEQ ID NO: 332247 - DNA, 20 bp, Artificial Sequence
  Description of Artificial Sequence: Synthetic oligonucleotide
  Target: LAMA2; (+) strand; PAM type: YTN; PAM sequence: CTT
gtctctaagattcaaaacag

SEQ ID NO: 332248 - DNA, 20 bp, Artificial Sequence
  Description of Artificial Sequence: Synthetic oligonucleotide
  Target: LAMA2; (+) strand; PAM type: YTN; PAM sequence: TTG
tctctaagattcaaaacagt

SEQ ID NO: 332249 - DNA, 20 bp, Artificial Sequence
  Description of Artificial Sequence: Synthetic oligonucleotide
  Target: LAMA2; (+) strand; PAM type: YTN; PAM sequence: CTC
taagattcaaaacagtgtac

SEQ ID NO: 332250 - DNA, 20 bp, Artificial Sequence
  Description of Artificial Sequence: Synthetic oligonucleotide
  Target: LAMA2; (+) strand; PAM type: YTN; PAM sequence: CTA
agattcaaaacagtgtacat

SEQ ID NO: 332251 - DNA, 20 bp, Artificial Sequence
  Description of Artificial Sequence: Synthetic oligonucleotide
  Target: LAMA2; (+) strand; PAM type: YTN; PAM sequence: TTC
aaaacagtgtacattttgaa

SEQ ID NO: 332252 - DNA, 20 bp, Artificial Sequence
  Description of Artificial Sequence: Synthetic oligonucleotide
  Target: LAMA2; (+) strand; PAM type: YTN; PAM sequence: TTT
tgaatagatgtatcatttat

SEQ ID NO: 332253 - DNA, 20 bp, Artificial Sequence
  Description of Artificial Sequence: Synthetic oligonucleotide
  Target: LAMA2; (+) strand; PAM type: YTN; PAM sequence: TTT
gaatagatgtatcatttatt

SEQ ID NO: 332254 - DNA, 20 bp, Artificial Sequence
  Description of Artificial Sequence: Synthetic oligonucleotide
  Target: LAMA2; (+) strand; PAM type: YTN; PAM sequence: TTG
aatagatgtatcatttattt

SEQ ID NO: 332255 - DNA, 20 bp, Artificial Sequence
  Description of Artificial Sequence: Synthetic oligonucleotide
  Target: LAMA2; (+) strand; PAM type: YTN; PAM sequence: TTT
attttatgtatatgcataat

SEQ ID NO: 332256 - DNA, 20 bp, Artificial Sequence
  Description of Artificial Sequence: Synthetic oligonucleotide
  Target: LAMA2; (+) strand; PAM type: YTN; PAM sequence: TTA
ttttatgtatatgcataata

SEQ ID NO: 332257 - DNA, 20 bp, Artificial Sequence
  Description of Artificial Sequence: Synthetic oligonucleotide
  Target: LAMA2; (+) strand; PAM type: YTN; PAM sequence: TTT
tatgtatatgcataataatg

SEQ ID NO: 332258 - DNA, 20 bp, Artificial Sequence
  Description of Artificial Sequence: Synthetic oligonucleotide
  Target: LAMA2; (+) strand; PAM type: YTN; PAM sequence: TTT
atgtatatgcataataatgg

SEQ ID NO: 332259 - DNA, 20 bp, Artificial Sequence
  Description of Artificial Sequence: Synthetic oligonucleotide
  Target: LAMA2; (+) strand; PAM type: YTN; PAM sequence: TTA
tgtatatgcataataatggt

SEQ ID NO: 332260 - DNA, 20 bp, Artificial Sequence
  Description of Artificial Sequence: Synthetic oligonucleotide
  Target: LAMA2; (+) strand; PAM type: YTN; PAM sequence: TTA
gaatgctcacagttatactg

SEQ ID NO: 332261 - DNA, 20 bp, Artificial Sequence
  Description of Artificial Sequence: Synthetic oligonucleotide
  Target: LAMA2; (+) strand; PAM type: YTN; PAM sequence: CTC
acagttatactgttcatcag

SEQ ID NO: 332262 - DNA, 20 bp, Artificial Sequence
  Description of Artificial Sequence: Synthetic oligonucleotide
  Target: LAMA2; (+) strand; PAM type: YTN; PAM sequence: TTA
tactgttcatcagtaaccct

SEQ ID NO: 332263 - DNA, 20 bp, Artificial Sequence
  Description of Artificial Sequence: Synthetic oligonucleotide
  Target: LAMA2; (+) strand; PAM type: YTN; PAM sequence: CTG
ttcatcagtaaccctgtgaa

SEQ ID NO: 332264 - DNA, 20 bp, Artificial Sequence
  Description of Artificial Sequence: Synthetic oligonucleotide
  Target: LAMA2; (+) strand; PAM type: YTN; PAM sequence: TTC
atcagtaaccctgtgaatac

SEQ ID NO: 332265 - DNA, 20 bp, Artificial Sequence
  Description of Artificial Sequence: Synthetic oligonucleotide
  Target: LAMA2; (+) strand; PAM type: YTN; PAM sequence: CTG
tgaatacagggttcacatcc

SEQ ID NO: 332266 - DNA, 20 bp, Artificial Sequence
  Description of Artificial Sequence: Synthetic oligonucleotide
  Target: LAMA2; (+) strand; PAM type: YTN; PAM sequence: TTC
acatccaagatgttctcact

SEQ ID NO: 332267 - DNA, 20 bp, Artificial Sequence
  Description of Artificial Sequence: Synthetic oligonucleotide
  Target: LAMA2; (+) strand; PAM type: YTN; PAM sequence: TTC
tcactggtccgtggcaaagt

SEQ ID NO: 332268 - DNA, 20 bp, Artificial Sequence
  Description of Artificial Sequence: Synthetic oligonucleotide
  Target: LAMA2; (+) strand; PAM type: YTN; PAM sequence: CTC
actggtccgtggcaaagtaa

SEQ ID NO: 332269 - DNA, 20 bp, Artificial Sequence
  Description of Artificial Sequence: Synthetic oligonucleotide
  Target: LAMA2; (+) strand; PAM type: YTN; PAM sequence: CTG
gtccgtggcaaagtaagaaa

SEQ ID NO: 332270 - DNA, 20 bp, Artificial Sequence
  Description of Artificial Sequence: Synthetic oligonucleotide
  Target: LAMA2; (+) strand; PAM type: YTN; PAM sequence: CTT
tccacatttttcataaaaat

SEQ ID NO: 332271 - DNA, 20 bp, Artificial Sequence
  Description of Artificial Sequence: Synthetic oligonucleotide
  Target: LAMA2; (+) strand; PAM type: YTN; PAM sequence: TTT
ccacatttttcataaaaata

SEQ ID NO: 332272 - DNA, 20 bp, Artificial Sequence
  Description of Artificial Sequence: Synthetic oligonucleotide
  Target: LAMA2; (+) strand; PAM type: YTN; PAM sequence: TTC
cacatttttcataaaaatag

SEQ ID NO: 332273 - DNA, 20 bp, Artificial Sequence
  Description of Artificial Sequence: Synthetic oligonucleotide
  Target: LAMA2; (+) strand; PAM type: YTN; PAM sequence: TTT
ttcataaaaatagaaaggat

SEQ ID NO: 332274 - DNA, 20 bp, Artificial Sequence
  Description of Artificial Sequence: Synthetic oligonucleotide
  Target: LAMA2; (+) strand; PAM type: YTN; PAM sequence: TTT
tcataaaaatagaaaggata

SEQ ID NO: 332275 - DNA, 20 bp, Artificial Sequence
  Description of Artificial Sequence: Synthetic oligonucleotide
  Target: LAMA2; (+) strand; PAM type: YTN; PAM sequence: TTT
cataaaaatagaaaggatac

SEQ ID NO: 332276 - DNA, 20 bp, Artificial Sequence
  Description of Artificial Sequence: Synthetic oligonucleotide
  Target: LAMA2; (+) strand; PAM type: YTN; PAM sequence: TTC
ataaaaatagaaaggataca

SEQ ID NO: 332277 - DNA, 20 bp, Artificial Sequence
  Description of Artificial Sequence: Synthetic oligonucleotide
  Target: LAMA2; (+) strand; PAM type: YTN; PAM sequence: TTT
aaataattgtcctccatttt

SEQ ID NO: 332278 - DNA, 20 bp, Artificial Sequence
  Description of Artificial Sequence: Synthetic oligonucleotide
  Target: LAMA2; (+) strand; PAM type: YTN; PAM sequence: TTA
aataattgtcctccattttg

SEQ ID NO: 332279 - DNA, 20 bp, Artificial Sequence
  Description of Artificial Sequence: Synthetic oligonucleotide
  Target: LAMA2; (+) strand; PAM type: YTN; PAM sequence: TTG
tcctccattttgatattatg

SEQ ID NO: 332280 - DNA, 20 bp, Artificial Sequence
  Description of Artificial Sequence: Synthetic oligonucleotide
  Target: LAMA2; (+) strand; PAM type: YTN; PAM sequence: CTC
cattttgatattatgggttt

SEQ ID NO: 332281 - DNA, 20 bp, Artificial Sequence
  Description of Artificial Sequence: Synthetic oligonucleotide
  Target: LAMA2; (+) strand; PAM type: YTN; PAM sequence: TTT
tgatattatgggttttaaaa

SEQ ID NO: 332282 - DNA, 20 bp, Artificial Sequence
  Description of Artificial Sequence: Synthetic oligonucleotide
  Target: LAMA2; (+) strand; PAM type: YTN; PAM sequence: TTT
gatattatgggttttaaaaa

SEQ ID NO: 332283 - DNA, 20 bp, Artificial Sequence
  Description of Artificial Sequence: Synthetic oligonucleotide
  Target: LAMA2; (+) strand; PAM type: YTN; PAM sequence: TTG
atattatgggttttaaaaac

SEQ ID NO: 332284 - DNA, 20 bp, Artificial Sequence
  Description of Artificial Sequence: Synthetic oligonucleotide
  Target: LAMA2; (+) strand; PAM type: YTN; PAM sequence: TTA
tgggttttaaaaactaatga

SEQ ID NO: 332285 - DNA, 20 bp, Artificial Sequence
  Description of Artificial Sequence: Synthetic oligonucleotide
  Target: LAMA2; (+) strand; PAM type: YTN; PAM sequence: TTT
taaaaactaatgatggtttt

SEQ ID NO: 332286 - DNA, 20 bp, Artificial Sequence
  Description of Artificial Sequence: Synthetic oligonucleotide
  Target: LAMA2; (+) strand; PAM type: YTN; PAM sequence: TTT
aaaaactaatgatggttttt

SEQ ID NO: 332287 - DNA, 20 bp, Artificial Sequence
  Description of Artificial Sequence: Synthetic oligonucleotide
  Target: LAMA2; (+) strand; PAM type: YTN; PAM sequence: TTA
aaaactaatgatggttttta

SEQ ID NO: 332288 - DNA, 20 bp, Artificial Sequence
  Description of Artificial Sequence: Synthetic oligonucleotide
  Target: LAMA2; (+) strand; PAM type: YTN; PAM sequence: CTA
atgatggtttttaaatgccc

SEQ ID NO: 332289 - DNA, 20 bp, Artificial Sequence
  Description of Artificial Sequence: Synthetic oligonucleotide
  Target: LAMA2; (+) strand; PAM type: YTN; PAM sequence: TTT
ttaaatgccctttgtttcat

SEQ ID NO: 332290 - DNA, 20 bp, Artificial Sequence
  Description of Artificial Sequence: Synthetic oligonucleotide
  Target: LAMA2; (+) strand; PAM type: YTN; PAM sequence: TTT
taaatgccctttgtttcatg

SEQ ID NO: 332291 - DNA, 20 bp, Artificial Sequence
  Description of Artificial Sequence: Synthetic oligonucleotide
  Target: LAMA2; (+) strand; PAM type: YTN; PAM sequence: TTT
aaatgccctttgtttcatga

SEQ ID NO: 332292 - DNA, 20 bp, Artificial Sequence
  Description of Artificial Sequence: Synthetic oligonucleotide
  Target: LAMA2; (+) strand; PAM type: YTN; PAM sequence: TTA
aatgccctttgtttcatgaa

SEQ ID NO: 332293 - DNA, 20 bp, Artificial Sequence
  Description of Artificial Sequence: Synthetic oligonucleotide
  Target: LAMA2; (+) strand; PAM type: YTN; PAM sequence: CTT
tgtttcatgaaataataatg

SEQ ID NO: 332294 - DNA, 20 bp, Artificial Sequence
  Description of Artificial Sequence: Synthetic oligonucleotide
  Target: LAMA2; (+) strand; PAM type: YTN; PAM sequence: TTT
gtttcatgaaataataatga

SEQ ID NO: 332295 - DNA, 20 bp, Artificial Sequence
  Description of Artificial Sequence: Synthetic oligonucleotide
  Target: LAMA2; (+) strand; PAM type: YTN; PAM sequence: TTG
tttcatgaaataataatgat

SEQ ID NO: 332296 - DNA, 20 bp, Artificial Sequence
  Description of Artificial Sequence: Synthetic oligonucleotide
  Target: LAMA2; (+) strand; PAM type: YTN; PAM sequence: TTT
catgaaataataatgatgct

SEQ ID NO: 332297 - DNA, 20 bp, Artificial Sequence
  Description of Artificial Sequence: Synthetic oligonucleotide
  Target: LAMA2; (+) strand; PAM type: YTN; PAM sequence: TTC
atgaaataataatgatgctt

SEQ ID NO: 332298 - DNA, 20 bp, Artificial Sequence
  Description of Artificial Sequence: Synthetic oligonucleotide
  Target: LAMA2; (+) strand; PAM type: YTN; PAM sequence: CTT
tattaaatgatagaaatata

SEQ ID NO: 332299 - DNA, 20 bp, Artificial Sequence
  Description of Artificial Sequence: Synthetic oligonucleotide
  Target: LAMA2; (+) strand; PAM type: YTN; PAM sequence: TTT
attaaatgatagaaatatat

SEQ ID NO: 332300 - DNA, 20 bp, Artificial Sequence
  Description of Artificial Sequence: Synthetic oligonucleotide
  Target: LAMA2; (+) strand; PAM type: YTN; PAM sequence: TTA
ttaaatgatagaaatatatt

SEQ ID NO: 332301 - DNA, 20 bp, Artificial Sequence
  Description of Artificial Sequence: Synthetic oligonucleotide
  Target: LAMA2; (+) strand; PAM type: YTN; PAM sequence: TTA
aatgatagaaatatattgga

SEQ ID NO: 332302 - DNA, 20 bp, Artificial Sequence
  Description of Artificial Sequence: Synthetic oligonucleotide
  Target: LAMA2; (+) strand; PAM type: YTN; PAM sequence: TTG
gaggttattattacttggaa

SEQ ID NO: 332303 - DNA, 20 bp, Artificial Sequence
  Description of Artificial Sequence: Synthetic oligonucleotide
  Target: LAMA2; (+) strand; PAM type: YTN; PAM sequence: TTA
ttattacttggaaaaactaa

SEQ ID NO: 332304 - DNA, 20 bp, Artificial Sequence
  Description of Artificial Sequence: Synthetic oligonucleotide
  Target: LAMA2; (+) strand; PAM type: YTN; PAM sequence: TTA
ttacttggaaaaactaagag

SEQ ID NO: 332305 - DNA, 20 bp, Artificial Sequence
  Description of Artificial Sequence: Synthetic oligonucleotide
  Target: LAMA2; (+) strand; PAM type: YTN; PAM sequence: TTA
cttggaaaaactaagagcta

SEQ ID NO: 332306 - DNA, 20 bp, Artificial Sequence
  Description of Artificial Sequence: Synthetic oligonucleotide
  Target: LAMA2; (+) strand; PAM type: YTN; PAM sequence: CTT
ggaaaaactaagagctagaa

SEQ ID NO: 332307 - DNA, 20 bp, Artificial Sequence
  Description of Artificial Sequence: Synthetic oligonucleotide
  Target: LAMA2; (+) strand; PAM type: YTN; PAM sequence: TTG
gaaaaactaagagctagaac

SEQ ID NO: 332308 - DNA, 20 bp, Artificial Sequence
  Description of Artificial Sequence: Synthetic oligonucleotide
  Target: LAMA2; (+) strand; PAM type: YTN; PAM sequence: CTA
agagctagaactcctatatc

SEQ ID NO: 332309 - DNA, 20 bp, Artificial Sequence
  Description of Artificial Sequence: Synthetic oligonucleotide
  Target: LAMA2; (+) strand; PAM type: YTN; PAM sequence: CTA
gaactcctatatcaatttca

SEQ ID NO: 332310 - DNA, 20 bp, Artificial Sequence
  Description of Artificial Sequence: Synthetic oligonucleotide
  Target: LAMA2; (+) strand; PAM type: YTN; PAM sequence: CTC
ctatatcaatttcacaaatc

SEQ ID NO: 332311 - DNA, 20 bp, Artificial Sequence
  Description of Artificial Sequence: Synthetic oligonucleotide
  Target: LAMA2; (+) strand; PAM type: YTN; PAM sequence: CTA
tatcaatttcacaaatcgat

SEQ ID NO: 332312 - DNA, 20 bp, Artificial Sequence
  Description of Artificial Sequence: Synthetic oligonucleotide
  Target: LAMA2; (+) strand; PAM type: YTN; PAM sequence: TTT
cacaaatcgatcacacattt

SEQ ID NO: 332313 - DNA, 20 bp, Artificial Sequence
  Description of Artificial Sequence: Synthetic oligonucleotide
  Target: LAMA2; (+) strand; PAM type: YTN; PAM sequence: TTC
acaaatcgatcacacattta

SEQ ID NO: 332314 - DNA, 20 bp, Artificial Sequence
  Description of Artificial Sequence: Synthetic oligonucleotide
  Target: LAMA2; (+) strand; PAM type: YTN; PAM sequence: TTT
atttttaatttcatattttt

SEQ ID NO: 332315 - DNA, 20 bp, Artificial Sequence
  Description of Artificial Sequence: Synthetic oligonucleotide
  Target: LAMA2; (+) strand; PAM type: YTN; PAM sequence: TTA
tttttaatttcatatttttt

SEQ ID NO: 332316 - DNA, 20 bp, Artificial Sequence
  Description of Artificial Sequence: Synthetic oligonucleotide
  Target: LAMA2; (+) strand; PAM type: YTN; PAM sequence: TTT
ttaatttcatattttttctc

SEQ ID NO: 332317 - DNA, 20 bp, Artificial Sequence
  Description of Artificial Sequence: Synthetic oligonucleotide
  Target: LAMA2; (+) strand; PAM type: YTN; PAM sequence: TTT
taatttcatattttttctct

SEQ ID NO: 332318 - DNA, 20 bp, Artificial Sequence
  Description of Artificial Sequence: Synthetic oligonucleotide
  Target: LAMA2; (+) strand; PAM type: YTN; PAM sequence: TTT
aatttcatattttttctctg

SEQ ID NO: 332319 - DNA, 20 bp, Artificial Sequence
  Description of Artificial Sequence: Synthetic oligonucleotide
  Target: LAMA2; (+) strand; PAM type: YTN; PAM sequence: TTA
atttcatattttttctctga

SEQ ID NO: 332320 - DNA, 20 bp, Artificial Sequence
  Description of Artificial Sequence: Synthetic oligonucleotide
  Target: LAMA2; (+) strand; PAM type: YTN; PAM sequence: TTT
catattttttctctgaaaat

SEQ ID NO: 332321 - DNA, 20 bp, Artificial Sequence
  Description of Artificial Sequence: Synthetic oligonucleotide
  Target: LAMA2; (+) strand; PAM type: YTN; PAM sequence: TTC
atattttttctctgaaaatt

SEQ ID NO: 332322 - DNA, 20 bp, Artificial Sequence
  Description of Artificial Sequence: Synthetic oligonucleotide
  Target: LAMA2; (+) strand; PAM type: YTN; PAM sequence: TTT
tttctctgaaaattatgaat

SEQ ID NO: 332323 - DNA, 20 bp, Artificial Sequence
  Description of Artificial Sequence: Synthetic oligonucleotide
  Target: LAMA2; (+) strand; PAM type: YTN; PAM sequence: TTT
ttctctgaaaattatgaatc

SEQ ID NO: 332324 - DNA, 20 bp, Artificial Sequence
  Description of Artificial Sequence: Synthetic oligonucleotide
  Target: LAMA2; (+) strand; PAM type: YTN; PAM sequence: TTT
tctctgaaaattatgaatct

SEQ ID NO: 332325 - DNA, 20 bp, Artificial Sequence
  Description of Artificial Sequence: Synthetic oligonucleotide
  Target: LAMA2; (+) strand; PAM type: YTN; PAM sequence: TTT
ctctgaaaattatgaatctg

SEQ ID NO: 332326 - DNA, 20 bp, Artificial Sequence
  Description of Artificial Sequence: Synthetic oligonucleotide
  Target: LAMA2; (+) strand; PAM type: YTN; PAM sequence: TTC
tctgaaaattatgaatctgg

SEQ ID NO: 332327 - DNA, 20 bp, Artificial Sequence
  Description of Artificial Sequence: Synthetic oligonucleotide
  Target: LAMA2; (+) strand; PAM type: YTN; PAM sequence: CTC
tgaaaattatgaatctggaa

SEQ ID NO: 332328 - DNA, 20 bp, Artificial Sequence
  Description of Artificial Sequence: Synthetic oligonucleotide
  Target: LAMA2; (+) strand; PAM type: YTN; PAM sequence: CTG
aaaattatgaatctggaaac

SEQ ID NO: 332329 - DNA, 20 bp, Artificial Sequence
  Description of Artificial Sequence: Synthetic oligonucleotide
  Target: LAMA2; (+) strand; PAM type: YTN; PAM sequence: TTA
tgaatctggaaaccactgct

SEQ ID NO: 332330 - DNA, 20 bp, Artificial Sequence
  Description of Artificial Sequence: Synthetic oligonucleotide
  Target: LAMA2; (+) strand; PAM type: YTN; PAM sequence: CTG
gaaaccactgctgtgagcgg

SEQ ID NO: 332331 - DNA, 20 bp, Artificial Sequence
  Description of Artificial Sequence: Synthetic oligonucleotide
  Target: LAMA2; (+) strand; PAM type: YTN; PAM sequence: CTG
ctgtgagcggaattttgtta

SEQ ID NO: 332332 - DNA, 20 bp, Artificial Sequence
  Description of Artificial Sequence: Synthetic oligonucleotide
  Target: LAMA2; (+) strand; PAM type: YTN; PAM sequence: CTG
tgagcggaattttgttattc

SEQ ID NO: 332333 - DNA, 20 bp, Artificial Sequence
  Description of Artificial Sequence: Synthetic oligonucleotide
  Target: LAMA2; (+) strand; PAM type: YTN; PAM sequence: TTT
tgttattcctagatcagaga

SEQ ID NO: 332334 - DNA, 20 bp, Artificial Sequence
  Description of Artificial Sequence: Synthetic oligonucleotide
  Target: LAMA2; (+) strand; PAM type: YTN; PAM sequence: TTT
gttattcctagatcagagat

SEQ ID NO: 332335 - DNA, 20 bp, Artificial Sequence
  Description of Artificial Sequence: Synthetic oligonucleotide
  Target: LAMA2; (+) strand; PAM type: YTN; PAM sequence: TTG
ttattcctagatcagagatg

SEQ ID NO: 332336 - DNA, 20 bp, Artificial Sequence
  Description of Artificial Sequence: Synthetic oligonucleotide
  Target: LAMA2; (+) strand; PAM type: YTN; PAM sequence: TTA
ttcctagatcagagatgaca

SEQ ID NO: 332337 - DNA, 20 bp, Artificial Sequence
  Description of Artificial Sequence: Synthetic oligonucleotide
  Target: LAMA2; (+) strand; PAM type: YTN; PAM sequence: TTC
ctagatcagagatgacacat

SEQ ID NO: 332338 - DNA, 20 bp, Artificial Sequence
  Description of Artificial Sequence: Synthetic oligonucleotide
  Target: LAMA2; (+) strand; PAM type: YTN; PAM sequence: CTA
gatcagagatgacacataat

SEQ ID NO: 332339 - DNA, 20 bp, Artificial Sequence
  Description of Artificial Sequence: Synthetic oligonucleotide
  Target: LAMA2; (+) strand; PAM type: YTN; PAM sequence: TTG
aatgatttgtctgtggtcag

SEQ ID NO: 332340 - DNA, 20 bp, Artificial Sequence
  Description of Artificial Sequence: Synthetic oligonucleotide
  Target: LAMA2; (+) strand; PAM type: YTN; PAM sequence: TTT
gtctgtggtcagttacgtac

SEQ ID NO: 332341 - DNA, 20 bp, Artificial Sequence
  Description of Artificial Sequence: Synthetic oligonucleotide
  Target: LAMA2; (+) strand; PAM type: YTN; PAM sequence: TTG
tctgtggtcagttacgtact

SEQ ID NO: 332342 - DNA, 20 bp, Artificial Sequence
  Description of Artificial Sequence: Synthetic oligonucleotide
  Target: LAMA2; (+) strand; PAM type: YTN; PAM sequence: CTG
tggtcagttacgtactaagt

SEQ ID NO: 332343 - DNA, 20 bp, Artificial Sequence
  Description of Artificial Sequence: Synthetic oligonucleotide
  Target: LAMA2; (+) strand; PAM type: YTN; PAM sequence: TTA
cgtactaagtggtggagcca

SEQ ID NO: 332344 - DNA, 20 bp, Artificial Sequence
  Description of Artificial Sequence: Synthetic oligonucleotide
  Target: LAMA2; (+) strand; PAM type: YTN; PAM sequence: CTA
agtggtggagccaggaggaa

SEQ ID NO: 332345 - DNA, 20 bp, Artificial Sequence
  Description of Artificial Sequence: Synthetic oligonucleotide
  Target: LAMA2; (+) strand; PAM type: YTN; PAM sequence: CTA
cccgtgtgccagcacctcat

SEQ ID NO: 332346 - DNA, 20 bp, Artificial Sequence
  Description of Artificial Sequence: Synthetic oligonucleotide
  Target: LAMA2; (+) strand; PAM type: YTN; PAM sequence: CTC
atggtccccctctcatcacc

SEQ ID NO: 332347 - DNA, 20 bp, Artificial Sequence
  Description of Artificial Sequence: Synthetic oligonucleotide
  Target: LAMA2; (+) strand; PAM type: YTN; PAM sequence: CTC
tcatcaccattattattaga

SEQ ID NO: 332348 - DNA, 20 bp, Artificial Sequence
  Description of Artificial Sequence: Synthetic oligonucleotide
  Target: LAMA2; (+) strand; PAM type: YTN; PAM sequence: CTC
atcaccattattattagaat

SEQ ID NO: 332349 - DNA, 20 bp, Artificial Sequence
  Description of Artificial Sequence: Synthetic oligonucleotide
  Target: LAMA2; (+) strand; PAM type: YTN; PAM sequence: TTA
ttattagaatacatggctag

SEQ ID NO: 332350 - DNA, 20 bp, Artificial Sequence
  Description of Artificial Sequence: Synthetic oligonucleotide
  Target: LAMA2; (+) strand; PAM type: YTN; PAM sequence: TTA
ttagaatacatggctagatt

SEQ ID NO: 332351 - DNA, 20 bp, Artificial Sequence
  Description of Artificial Sequence: Synthetic oligonucleotide
  Target: LAMA2; (+) strand; PAM type: YTN; PAM sequence: TTA
gaatacatggctagattgca

SEQ ID NO: 332352 - DNA, 20 bp, Artificial Sequence
  Description of Artificial Sequence: Synthetic oligonucleotide
  Target: LAMA2; (+) strand; PAM type: YTN; PAM sequence: CTA
gattgcaatattaggtaggc

SEQ ID NO: 332353 - DNA, 20 bp, Artificial Sequence
  Description of Artificial Sequence: Synthetic oligonucleotide
  Target: LAMA2; (+) strand; PAM type: YTN; PAM sequence: TTG
caatattaggtaggcaaatt

SEQ ID NO: 332354 - DNA, 20 bp, Artificial Sequence
  Description of Artificial Sequence: Synthetic oligonucleotide
  Target: LAMA2; (+) strand; PAM type: YTN; PAM sequence: TTA
ggtaggcaaattgagagtcc

SEQ ID NO: 332355 - DNA, 20 bp, Artificial Sequence
  Description of Artificial Sequence: Synthetic oligonucleotide
  Target: LAMA2; (+) strand; PAM type: YTN; PAM sequence: TTG
agagtccatgtttgttcctc

SEQ ID NO: 332356 - DNA, 20 bp, Artificial Sequence
  Description of Artificial Sequence: Synthetic oligonucleotide
  Target: LAMA2; (+) strand; PAM type: YTN; PAM sequence: TTT
gttcctcatagcaatgtgat

SEQ ID NO: 332357 - DNA, 20 bp, Artificial Sequence
  Description of Artificial Sequence: Synthetic oligonucleotide
  Target: LAMA2; (+) strand; PAM type: YTN; PAM sequence: TTG
ttcctcatagcaatgtgatt

SEQ ID NO: 332358 - DNA, 20 bp, Artificial Sequence
  Description of Artificial Sequence: Synthetic oligonucleotide
  Target: LAMA2; (+) strand; PAM type: YTN; PAM sequence: TTC
ctcatagcaatgtgatttgt

SEQ ID NO: 332359 - DNA, 20 bp, Artificial Sequence
  Description of Artificial Sequence: Synthetic oligonucleotide
  Target: LAMA2; (+) strand; PAM type: YTN; PAM sequence: CTC
atagcaatgtgatttgttcc

SEQ ID NO: 332360 - DNA, 20 bp, Artificial Sequence
  Description of Artificial Sequence: Synthetic oligonucleotide
  Target: LAMA2; (+) strand; PAM type: YTN; PAM sequence: TTT
gttccttatgtgaggtattc

SEQ ID NO: 332361 - DNA, 20 bp, Artificial Sequence
  Description of Artificial Sequence: Synthetic oligonucleotide
  Target: LAMA2; (+) strand; PAM type: YTN; PAM sequence: TTG
ttccttatgtgaggtattcc

SEQ ID NO: 332362 - DNA, 20 bp, Artificial Sequence
  Description of Artificial Sequence: Synthetic oligonucleotide
  Target: LAMA2; (+) strand; PAM type: YTN; PAM sequence: TTC
cttatgtgaggtattccttc

SEQ ID NO: 332363 - DNA, 20 bp, Artificial Sequence
  Description of Artificial Sequence: Synthetic oligonucleotide
  Target: LAMA2; (+) strand; PAM type: YTN; PAM sequence: CTT
atgtgaggtattccttcaaa

SEQ ID NO: 332364 - DNA, 20 bp, Artificial Sequence
  Description of Artificial Sequence: Synthetic oligonucleotide
  Target: LAMA2; (+) strand; PAM type: YTN; PAM sequence: TTA
tgtgaggtattccttcaaat

SEQ ID NO: 332365 - DNA, 20 bp, Artificial Sequence
  Description of Artificial Sequence: Synthetic oligonucleotide
  Target: LAMA2; (+) strand; PAM type: YTN; PAM sequence: TTC
cttcaaatttaaaaaggatt

SEQ ID NO: 332366 - DNA, 20 bp, Artificial Sequence
  Description of Artificial Sequence: Synthetic oligonucleotide
  Target: LAMA2; (+) strand; PAM type: YTN; PAM sequence: CTT
caaatttaaaaaggattgtg

SEQ ID NO: 332367 - DNA, 20 bp, Artificial Sequence
  Description of Artificial Sequence: Synthetic oligonucleotide
  Target: LAMA2; (+) strand; PAM type: YTN; PAM sequence: TTC
aaatttaaaaaggattgtgt

SEQ ID NO: 332368 - DNA, 20 bp, Artificial Sequence
  Description of Artificial Sequence: Synthetic oligonucleotide
  Target: LAMA2; (+) strand; PAM type: YTN; PAM sequence: TTT
aaaaaggattgtgttctaat

SEQ ID NO: 332369 - DNA, 20 bp, Artificial Sequence
  Description of Artificial Sequence: Synthetic oligonucleotide
  Target: LAMA2; (+) strand; PAM type: YTN; PAM sequence: TTA
aaaaggattgtgttctaatc

SEQ ID NO: 332370 - DNA, 20 bp, Artificial Sequence
  Description of Artificial Sequence: Synthetic oligonucleotide
  Target: LAMA2; (+) strand; PAM type: YTN; PAM sequence: TTG
tgttctaatctaaaaggtca

SEQ ID NO: 332371 - DNA, 20 bp, Artificial Sequence
  Description of Artificial Sequence: Synthetic oligonucleotide
  Target: LAMA2; (+) strand; PAM type: YTN; PAM sequence: TTC
taatctaaaaggtcattcat

SEQ ID NO: 332372 - DNA, 20 bp, Artificial Sequence
  Description of Artificial Sequence: Synthetic oligonucleotide
  Target: LAMA2; (+) strand; PAM type: YTN; PAM sequence: CTA
atctaaaaggtcattcataa

SEQ ID NO: 332373 - DNA, 20 bp, Artificial Sequence
  Description of Artificial Sequence: Synthetic oligonucleotide
  Target: LAMA2; (+) strand; PAM type: YTN; PAM sequence: CTA
aaaggtcattcataagccac

SEQ ID NO: 332374 - DNA, 20 bp, Artificial Sequence
  Description of Artificial Sequence: Synthetic oligonucleotide
  Target: LAMA2; (+) strand; PAM type: YTN; PAM sequence: TTC
ataagccactcattcgaaac

SEQ ID NO: 332375 - DNA, 20 bp, Artificial Sequence
  Description of Artificial Sequence: Synthetic oligonucleotide
  Target: LAMA2; (+) strand; PAM type: YTN; PAM sequence: CTC
attcgaaacatcttcccaga

SEQ ID NO: 332376 - DNA, 20 bp, Artificial Sequence
  Description of Artificial Sequence: Synthetic oligonucleotide
  Target: LAMA2; (+) strand; PAM type: YTN; PAM sequence: TTC
gaaacatcttcccagatact

SEQ ID NO: 332377 - DNA, 20 bp, Artificial Sequence
  Description of Artificial Sequence: Synthetic oligonucleotide
  Target: LAMA2; (+) strand; PAM type: YTN; PAM sequence: CTT
cccagatacttagttttatg

SEQ ID NO: 332378 - DNA, 20 bp, Artificial Sequence
  Description of Artificial Sequence: Synthetic oligonucleotide
  Target: LAMA2; (+) strand; PAM type: YTN; PAM sequence: TTC
ccagatacttagttttatga

SEQ ID NO: 332379 - DNA, 20 bp, Artificial Sequence
  Description of Artificial Sequence: Synthetic oligonucleotide
  Target: LAMA2; (+) strand; PAM type: YTN; PAM sequence: CTT
agttttatgaaattctcaag

SEQ ID NO: 332380 - DNA, 20 bp, Artificial Sequence
  Description of Artificial Sequence: Synthetic oligonucleotide
  Target: LAMA2; (+) strand; PAM type: YTN; PAM sequence: TTA
gttttatgaaattctcaaga

SEQ ID NO: 332381 - DNA, 20 bp, Artificial Sequence
  Description of Artificial Sequence: Synthetic oligonucleotide
  Target: LAMA2; (+) strand; PAM type: YTN; PAM sequence: TTT
tatgaaattctcaagactga

SEQ ID NO: 332382 - DNA, 20 bp, Artificial Sequence
  Description of Artificial Sequence: Synthetic oligonucleotide
  Target: LAMA2; (+) strand; PAM type: YTN; PAM sequence: TTT
atgaaattctcaagactgac

SEQ ID NO: 332383 - DNA, 20 bp, Artificial Sequence
  Description of Artificial Sequence: Synthetic oligonucleotide
  Target: LAMA2; (+) strand; PAM type: YTN; PAM sequence: TTA
tgaaattctcaagactgaca

SEQ ID NO: 332384 - DNA, 20 bp, Artificial Sequence
  Description of Artificial Sequence: Synthetic oligonucleotide
  Target: LAMA2; (+) strand; PAM type: YTN; PAM sequence: TTC
tcaagactgacaccccaaag

SEQ ID NO: 332385 - DNA, 20 bp, Artificial Sequence
  Description of Artificial Sequence: Synthetic oligonucleotide
  Target: LAMA2; (+) strand; PAM type: YTN; PAM sequence: CTC
aagactgacaccccaaagca

SEQ ID NO: 332386 - DNA, 20 bp, Artificial Sequence
  Description of Artificial Sequence: Synthetic oligonucleotide
  Target: LAMA2; (+) strand; PAM type: YTN; PAM sequence: CTG
acaccccaaagcatccttaa

SEQ ID NO: 332387 - DNA, 20 bp, Artificial Sequence
  Description of Artificial Sequence: Synthetic oligonucleotide
  Target: LAMA2; (+) strand; PAM type: YTN; PAM sequence: CTT
aatctataataaacacagga

SEQ ID NO: 332388 - DNA, 20 bp, Artificial Sequence
  Description of Artificial Sequence: Synthetic oligonucleotide
  Target: LAMA2; (+) strand; PAM type: YTN; PAM sequence: TTA
atctataataaacacaggag

SEQ ID NO: 332389 - DNA, 20 bp, Artificial Sequence
  Description of Artificial Sequence: Synthetic oligonucleotide
  Target: LAMA2; (+) strand; PAM type: YTN; PAM sequence: CTA
taataaacacaggagtacag

SEQ ID NO: 332390 - DNA, 20 bp, Artificial Sequence
  Description of Artificial Sequence: Synthetic oligonucleotide
  Target: LAMA2; (+) strand; PAM type: YTN; PAM sequence: CTC
acctccactttgtttacatt

SEQ ID NO: 332391 - DNA, 20 bp, Artificial Sequence
  Description of Artificial Sequence: Synthetic oligonucleotide
  Target: LAMA2; (+) strand; PAM type: YTN; PAM sequence: CTC
cactttgtttacatttctat

SEQ ID NO: 332392 - DNA, 20 bp, Artificial Sequence
  Description of Artificial Sequence: Synthetic oligonucleotide
  Target: LAMA2; (+) strand; PAM type: YTN; PAM sequence: CTT
tgtttacatttctatgggca

SEQ ID NO: 332393 - DNA, 20 bp, Artificial Sequence
  Description of Artificial Sequence: Synthetic oligonucleotide
  Target: LAMA2; (+) strand; PAM type: YTN; PAM sequence: TTT
gtttacatttctatgggcaa

SEQ ID NO: 332394 - DNA, 20 bp, Artificial Sequence
  Description of Artificial Sequence: Synthetic oligonucleotide
  Target: LAMA2; (+) strand; PAM type: YTN; PAM sequence: TTG
tttacatttctatgggcaaa

SEQ ID NO: 332395 - DNA, 20 bp, Artificial Sequence
  Description of Artificial Sequence: Synthetic oligonucleotide
  Target: LAMA2; (+) strand; PAM type: YTN; PAM sequence: TTT
acatttctatgggcaaatgt

SEQ ID NO: 332396 - DNA, 20 bp, Artificial Sequence
  Description of Artificial Sequence: Synthetic oligonucleotide
  Target: LAMA2; (+) strand; PAM type: YTN; PAM sequence: TTA
catttctatgggcaaatgtg

SEQ ID NO: 332397 - DNA, 20 bp, Artificial Sequence
  Description of Artificial Sequence: Synthetic oligonucleotide
  Target: LAMA2; (+) strand; PAM type: YTN; PAM sequence: TTT
ctatgggcaaatgtgccgac

SEQ ID NO: 332398 - DNA, 20 bp, Artificial Sequence
  Description of Artificial Sequence: Synthetic oligonucleotide
  Target: LAMA2; (+) strand; PAM type: YTN; PAM sequence: TTC
tatgggcaaatgtgccgact

SEQ ID NO: 332399 - DNA, 20 bp, Artificial Sequence
  Description of Artificial Sequence: Synthetic oligonucleotide
  Target: LAMA2; (+) strand; PAM type: YTN; PAM sequence: CTA
tgggcaaatgtgccgacttt

SEQ ID NO: 332400 - DNA, 20 bp, Artificial Sequence
  Description of Artificial Sequence: Synthetic oligonucleotide
  Target: LAMA2; (+) strand; PAM type: YTN; PAM sequence: CTT
tctagtgagatgtgaggaat

SEQ ID NO: 332401 - DNA, 20 bp, Artificial Sequence
  Description of Artificial Sequence: Synthetic oligonucleotide
  Target: LAMA2; (+) strand; PAM type: YTN; PAM sequence: TTT
ctagtgagatgtgaggaatt

SEQ ID NO: 332402 - DNA, 20 bp, Artificial Sequence
  Description of Artificial Sequence: Synthetic oligonucleotide
  Target: LAMA2; (+) strand; PAM type: YTN; PAM sequence: TTC
tagtgagatgtgaggaattt

SEQ ID NO: 332403 - DNA, 20 bp, Artificial Sequence
  Description of Artificial Sequence: Synthetic oligonucleotide
  Target: LAMA2; (+) strand; PAM type: YTN; PAM sequence: CTA
gtgagatgtgaggaatttaa

SEQ ID NO: 332404 - DNA, 20 bp, Artificial Sequence
  Description of Artificial Sequence: Synthetic oligonucleotide
  Target: LAMA2; (+) strand; PAM type: YTN; PAM sequence: TTT
aagtgcccttactgcagcct

SEQ ID NO: 332405 - DNA, 20 bp, Artificial Sequence
  Description of Artificial Sequence: Synthetic oligonucleotide
  Target: LAMA2; (+) strand; PAM type: YTN; PAM sequence: TTA
agtgcccttactgcagcctt

SEQ ID NO: 332406 - DNA, 20 bp, Artificial Sequence
  Description of Artificial Sequence: Synthetic oligonucleotide
  Target: LAMA2; (+) strand; PAM type: YTN; PAM sequence: CTT
actgcagccttgggaataga

SEQ ID NO: 332407 - DNA, 20 bp, Artificial Sequence
  Description of Artificial Sequence: Synthetic oligonucleotide
  Target: LAMA2; (+) strand; PAM type: YTN; PAM sequence: TTA
ctgcagccttgggaatagaa

SEQ ID NO: 332408 - DNA, 20 bp, Artificial Sequence
  Description of Artificial Sequence: Synthetic oligonucleotide
  Target: LAMA2; (+) strand; PAM type: YTN; PAM sequence: CTG
cagccttgggaatagaaaca

SEQ ID NO: 332409 - DNA, 20 bp, Artificial Sequence
  Description of Artificial Sequence: Synthetic oligonucleotide
  Target: LAMA2; (+) strand; PAM type: YTN; PAM sequence: CTT
gggaatagaaacaggatcat

SEQ ID NO: 332410 - DNA, 20 bp, Artificial Sequence
  Description of Artificial Sequence: Synthetic oligonucleotide
  Target: LAMA2; (+) strand; PAM type: YTN; PAM sequence: TTG
ggaatagaaacaggatcatc

SEQ ID NO: 332411 - DNA, 20 bp, Artificial Sequence
  Description of Artificial Sequence: Synthetic oligonucleotide
  Target: LAMA2; (+) strand; PAM type: YTN; PAM sequence: CTC
cactcctgccatcctcaccc

SEQ ID NO: 332412 - DNA, 20 bp, Artificial Sequence
  Description of Artificial Sequence: Synthetic oligonucleotide
  Target: LAMA2; (+) strand; PAM type: YTN; PAM sequence: CTC
ctgccatcctcacccatgca

SEQ ID NO: 332413 - DNA, 20 bp, Artificial Sequence
  Description of Artificial Sequence: Synthetic oligonucleotide
  Target: LAMA2; (+) strand; PAM type: YTN; PAM sequence: CTG
ccatcctcacccatgcatga

SEQ ID NO: 332414 - DNA, 20 bp, Artificial Sequence
  Description of Artificial Sequence: Synthetic oligonucleotide
  Target: LAMA2; (+) strand; PAM type: YTN; PAM sequence: CTC
acccatgcatgagcaaggcc

SEQ ID NO: 332415 - DNA, 20 bp, Artificial Sequence
  Description of Artificial Sequence: Synthetic oligonucleotide
  Target: LAMA2; (+) strand; PAM type: YTN; PAM sequence: CTG
tttagagagggagaaagaaa

SEQ ID NO: 332416 - DNA, 20 bp, Artificial Sequence
  Description of Artificial Sequence: Synthetic oligonucleotide
  Target: LAMA2; (+) strand; PAM type: YTN; PAM sequence: TTT
agagagggagaaagaaaaag

SEQ ID NO: 332417 - DNA, 20 bp, Artificial Sequence
  Description of Artificial Sequence: Synthetic oligonucleotide
  Target: LAMA2; (+) strand; PAM type: YTN; PAM sequence: TTA
gagagggagaaagaaaaaga

SEQ ID NO: 332418 - DNA, 20 bp, Artificial Sequence
  Description of Artificial Sequence: Synthetic oligonucleotide
  Target: LAMA2; (+) strand; PAM type: YTN; PAM sequence: CTT
atattacttggaaaatgaga

SEQ ID NO: 332419 - DNA, 20 bp, Artificial Sequence
  Description of Artificial Sequence: Synthetic oligonucleotide
  Target: LAMA2; (+) strand; PAM type: YTN; PAM sequence: TTA
tattacttggaaaatgagaa

SEQ ID NO: 332420 - DNA, 20 bp, Artificial Sequence
  Description of Artificial Sequence: Synthetic oligonucleotide
  Target: LAMA2; (+) strand; PAM type: YTN; PAM sequence: TTA
cttggaaaatgagaagcaaa

SEQ ID NO: 332421 - DNA, 20 bp, Artificial Sequence
  Description of Artificial Sequence: Synthetic oligonucleotide
  Target: LAMA2; (+) strand; PAM type: YTN; PAM sequence: CTT
ggaaaatgagaagcaaagat

SEQ ID NO: 332422 - DNA, 20 bp, Artificial Sequence
  Description of Artificial Sequence: Synthetic oligonucleotide
  Target: LAMA2; (+) strand; PAM type: YTN; PAM sequence: TTG
gaaaatgagaagcaaagatt

SEQ ID NO: 332423 - DNA, 20 bp, Artificial Sequence
  Description of Artificial Sequence: Synthetic oligonucleotide
  Target: LAMA2; (+) strand; PAM type: YTN; PAM sequence: TTT
tagacaagaaccaatgactg

SEQ ID NO: 332424 - DNA, 20 bp, Artificial Sequence
  Description of Artificial Sequence: Synthetic oligonucleotide
  Target: LAMA2; (+) strand; PAM type: YTN; PAM sequence: TTT
agacaagaaccaatgactgg

SEQ ID NO: 332425 - DNA, 20 bp, Artificial Sequence
  Description of Artificial Sequence: Synthetic oligonucleotide
  Target: LAMA2; (+) strand; PAM type: YTN; PAM sequence: TTA
gacaagaaccaatgactggg

SEQ ID NO: 332426 - DNA, 20 bp, Artificial Sequence
  Description of Artificial Sequence: Synthetic oligonucleotide
  Target: LAMA2; (+) strand; PAM type: YTN; PAM sequence: CTG
ggaaccaaaatgcaatgagg

SEQ ID NO: 332427 - DNA, 20 bp, Artificial Sequence
  Description of Artificial Sequence: Synthetic oligonucleotide
  Target: LAMA2; (+) strand; PAM type: YTN; PAM sequence: CTT
ggcagcccaggagtagtggc

SEQ ID NO: 332428 - DNA, 20 bp, Artificial Sequence
  Description of Artificial Sequence: Synthetic oligonucleotide
  Target: LAMA2; (+) strand; PAM type: YTN; PAM sequence: TTG
gcagcccaggagtagtggct

SEQ ID NO: 332429 - DNA, 20 bp, Artificial Sequence
  Description of Artificial Sequence: Synthetic oligonucleotide
  Target: LAMA2; (+) strand; PAM type: YTN; PAM sequence: CTG
ctgttgtgagacacatggag

SEQ ID NO: 332430 - DNA, 20 bp, Artificial Sequence
  Description of Artificial Sequence: Synthetic oligonucleotide
  Target: LAMA2; (+) strand; PAM type: YTN; PAM sequence: CTG
ttgtgagacacatggagcta

SEQ ID NO: 332431 - DNA, 20 bp, Artificial Sequence
  Description of Artificial Sequence: Synthetic oligonucleotide
  Target: LAMA2; (+) strand; PAM type: YTN; PAM sequence: TTG
tgagacacatggagctaaaa

SEQ ID NO: 332432 - DNA, 20 bp, Artificial Sequence
  Description of Artificial Sequence: Synthetic oligonucleotide
  Target: LAMA2; (+) strand; PAM type: YTN; PAM sequence: CTA
aaatgggagagatgagaaac

SEQ ID NO: 332433 - DNA, 20 bp, Artificial Sequence
  Description of Artificial Sequence: Synthetic oligonucleotide
  Target: LAMA2; (+) strand; PAM type: YTN; PAM sequence: CTG
tgagctttgaggattgtaag

SEQ ID NO: 332434 - DNA, 20 bp, Artificial Sequence
  Description of Artificial Sequence: Synthetic oligonucleotide
  Target: LAMA2; (+) strand; PAM type: YTN; PAM sequence: CTT
tgaggattgtaagaaggaag

SEQ ID NO: 332435 - DNA, 20 bp, Artificial Sequence
  Description of Artificial Sequence: Synthetic oligonucleotide
  Target: LAMA2; (+) strand; PAM type: YTN; PAM sequence: TTT
gaggattgtaagaaggaagg

SEQ ID NO: 332436 - DNA, 20 bp, Artificial Sequence
  Description of Artificial Sequence: Synthetic oligonucleotide
  Target: LAMA2; (+) strand; PAM type: YTN; PAM sequence: TTG
aggattgtaagaaggaaggg

SEQ ID NO: 332437 - DNA, 20 bp, Artificial Sequence
  Description of Artificial Sequence: Synthetic oligonucleotide
  Target: LAMA2; (+) strand; PAM type: YTN; PAM sequence: TTG
taagaaggaagggagctgca

SEQ ID NO: 332438 - DNA, 20 bp, Artificial Sequence
  Description of Artificial Sequence: Synthetic oligonucleotide
  Target: LAMA2; (+) strand; PAM type: YTN; PAM sequence: CTG
caacaaaggtcacaggtctg

SEQ ID NO: 332439 - DNA, 20 bp, Artificial Sequence
  Description of Artificial Sequence: Synthetic oligonucleotide
  Target: LAMA2; (+) strand; PAM type: YTN; PAM sequence: CTG
tggggttgccacgcctccta

SEQ ID NO: 332440 - DNA, 20 bp, Artificial Sequence
  Description of Artificial Sequence: Synthetic oligonucleotide
  Target: LAMA2; (+) strand; PAM type: YTN; PAM sequence: TTG
ccacgcctcctattttctat

SEQ ID NO: 332441 - DNA, 20 bp, Artificial Sequence
  Description of Artificial Sequence: Synthetic oligonucleotide
  Target: LAMA2; (+) strand; PAM type: YTN; PAM sequence: CTC
ctattttctatctctaatct

SEQ ID NO: 332442 - DNA, 20 bp, Artificial Sequence
  Description of Artificial Sequence: Synthetic oligonucleotide
  Target: LAMA2; (+) strand; PAM type: YTN; PAM sequence: CTA
ttttctatctctaatctccc

SEQ ID NO: 332443 - DNA, 20 bp, Artificial Sequence
  Description of Artificial Sequence: Synthetic oligonucleotide
  Target: LAMA2; (+) strand; PAM type: YTN; PAM sequence: TTT
tctatctctaatctcccttt

SEQ ID NO: 332444 - DNA, 20 bp, Artificial Sequence
  Description of Artificial Sequence: Synthetic oligonucleotide
  Target: LAMA2; (+) strand; PAM type: YTN; PAM sequence: TTT
ctatctctaatctccctttt

SEQ ID NO: 332445 - DNA, 20 bp, Artificial Sequence
  Description of Artificial Sequence: Synthetic oligonucleotide
  Target: LAMA2; (+) strand; PAM type: YTN; PAM sequence: TTC
tatctctaatctcccttttg

SEQ ID NO: 332446 - DNA, 20 bp, Artificial Sequence
  Description of Artificial Sequence: Synthetic oligonucleotide
  Target: LAMA2; (+) strand; PAM type: YTN; PAM sequence: CTA
tctctaatctcccttttgat

SEQ ID NO: 332447 - DNA, 20 bp, Artificial Sequence
  Description of Artificial Sequence: Synthetic oligonucleotide
  Target: LAMA2; (+) strand; PAM type: YTN; PAM sequence: CTC
taatctcccttttgattttc

SEQ ID NO: 332448 - DNA, 20 bp, Artificial Sequence
  Description of Artificial Sequence: Synthetic oligonucleotide
  Target: LAMA2; (+) strand; PAM type: YTN; PAM sequence: CTA
atctcccttttgattttcac

SEQ ID NO: 332449 - DNA, 20 bp, Artificial Sequence
  Description of Artificial Sequence: Synthetic oligonucleotide
  Target: LAMA2; (+) strand; PAM type: YTN; PAM sequence: CTC
ccttttgattttcacaattg

SEQ ID NO: 332450 - DNA, 20 bp, Artificial Sequence
  Description of Artificial Sequence: Synthetic oligonucleotide
  Target: LAMA2; (+) strand; PAM type: YTN; PAM sequence: CTT
ttgattttcacaattggtcc

SEQ ID NO: 332451 - DNA, 20 bp, Artificial Sequence
  Description of Artificial Sequence: Synthetic oligonucleotide
  Target: LAMA2; (+) strand; PAM type: YTN; PAM sequence: TTT
tgattttcacaattggtcct

SEQ ID NO: 332452 - DNA, 20 bp, Artificial Sequence
  Description of Artificial Sequence: Synthetic oligonucleotide
  Target: LAMA2; (+) strand; PAM type: YTN; PAM sequence: TTT
gattttcacaattggtcctg

SEQ ID NO: 332453 - DNA, 20 bp, Artificial Sequence
  Description of Artificial Sequence: Synthetic oligonucleotide
  Target: LAMA2; (+) strand; PAM type: YTN; PAM sequence: TTG
attttcacaattggtcctgt

SEQ ID NO: 332454 - DNA, 20 bp, Artificial Sequence
  Description of Artificial Sequence: Synthetic oligonucleotide
  Target: LAMA2; (+) strand; PAM type: YTN; PAM sequence: TTT
tcacaattggtcctgttctt

SEQ ID NO: 332455 - DNA, 20 bp, Artificial Sequence
  Description of Artificial Sequence: Synthetic oligonucleotide
  Target: LAMA2; (+) strand; PAM type: YTN; PAM sequence: TTT
cacaattggtcctgttctta

SEQ ID NO: 332456 - DNA, 20 bp, Artificial Sequence
  Description of Artificial Sequence: Synthetic oligonucleotide
  Target: LAMA2; (+) strand; PAM type: YTN; PAM sequence: TTC
acaattggtcctgttcttat

SEQ ID NO: 332457 - DNA, 20 bp, Artificial Sequence
  Description of Artificial Sequence: Synthetic oligonucleotide
  Target: LAMA2; (+) strand; PAM type: YTN; PAM sequence: TTG
gtcctgttcttatatgtctg

SEQ ID NO: 332458 - DNA, 20 bp, Artificial Sequence
  Description of Artificial Sequence: Synthetic oligonucleotide
  Target: LAMA2; (+) strand; PAM type: YTN; PAM sequence: CTG
ttcttatatgtctgggtgaa

SEQ ID NO: 332459 - DNA, 20 bp, Artificial Sequence
  Description of Artificial Sequence: Synthetic oligonucleotide
  Target: LAMA2; (+) strand; PAM type: YTN; PAM sequence: TTC
ttatatgtctgggtgaaagt

SEQ ID NO: 332460 - DNA, 20 bp, Artificial Sequence
  Description of Artificial Sequence: Synthetic oligonucleotide
  Target: LAMA2; (+) strand; PAM type: YTN; PAM sequence: CTT
atatgtctgggtgaaagtaa

SEQ ID NO: 332461 - DNA, 20 bp, Artificial Sequence
  Description of Artificial Sequence: Synthetic oligonucleotide
  Target: LAMA2; (+) strand; PAM type: YTN; PAM sequence: TTA
tatgtctgggtgaaagtaag

SEQ ID NO: 332462 - DNA, 20 bp, Artificial Sequence
  Description of Artificial Sequence: Synthetic oligonucleotide
  Target: LAMA2; (+) strand; PAM type: YTN; PAM sequence: CTG
ggtgaaagtaagggaagatc

SEQ ID NO: 332463 - DNA, 20 bp, Artificial Sequence
  Description of Artificial Sequence: Synthetic oligonucleotide
  Target: LAMA2; (+) strand; PAM type: YTN; PAM sequence: CTG
tggtttttggtaggatagag

SEQ ID NO: 332464 - DNA, 20 bp, Artificial Sequence
  Description of Artificial Sequence: Synthetic oligonucleotide
  Target: LAMA2; (+) strand; PAM type: YTN; PAM sequence: TTT
ttggtaggatagagtttcat

SEQ ID NO: 332465 - DNA, 20 bp, Artificial Sequence
  Description of Artificial Sequence: Synthetic oligonucleotide
  Target: LAMA2; (+) strand; PAM type: YTN; PAM sequence: TTT
tggtaggatagagtttcatg

SEQ ID NO: 332466 - DNA, 20 bp, Artificial Sequence
  Description of Artificial Sequence: Synthetic oligonucleotide
  Target: LAMA2; (+) strand; PAM type: YTN; PAM sequence: TTT
ggtaggatagagtttcatgt

SEQ ID NO: 332467 - DNA, 20 bp, Artificial Sequence
  Description of Artificial Sequence: Synthetic oligonucleotide
  Target: LAMA2; (+) strand; PAM type: YTN; PAM sequence: TTG
gtaggatagagtttcatgtg

SEQ ID NO: 332468 - DNA, 20 bp, Artificial Sequence
  Description of Artificial Sequence: Synthetic oligonucleotide
  Target: LAMA2; (+) strand; PAM type: YTN; PAM sequence: TTT
catgtgccatcatctccttc

SEQ ID NO: 332469 - DNA, 20 bp, Artificial Sequence
  Description of Artificial Sequence: Synthetic oligonucleotide
  Target: LAMA2; (+) strand; PAM type: YTN; PAM sequence: TTC
atgtgccatcatctccttcc

SEQ ID NO: 332470 - DNA, 20 bp, Artificial Sequence
  Description of Artificial Sequence: Synthetic oligonucleotide
  Target: LAMA2; (+) strand; PAM type: YTN; PAM sequence: CTC
cttccttgccattattgtaa

SEQ ID NO: 332471 - DNA, 20 bp, Artificial Sequence
  Description of Artificial Sequence: Synthetic oligonucleotide
  Target: LAMA2; (+) strand; PAM type: YTN; PAM sequence: CTT
ccttgccattattgtaaaga

SEQ ID NO: 332472 - DNA, 20 bp, Artificial Sequence
  Description of Artificial Sequence: Synthetic oligonucleotide
  Target: LAMA2; (+) strand; PAM type: YTN; PAM sequence: TTC
cttgccattattgtaaagat

SEQ ID NO: 332473 - DNA, 20 bp, Artificial Sequence
  Description of Artificial Sequence: Synthetic oligonucleotide
  Target: LAMA2; (+) strand; PAM type: YTN; PAM sequence: CTT
gccattattgtaaagattcc

SEQ ID NO: 332474 - DNA, 20 bp, Artificial Sequence
  Description of Artificial Sequence: Synthetic oligonucleotide
  Target: LAMA2; (+) strand; PAM type: YTN; PAM sequence: TTG
ccattattgtaaagattcct

SEQ ID NO: 332475 - DNA, 20 bp, Artificial Sequence
  Description of Artificial Sequence: Synthetic oligonucleotide
  Target: LAMA2; (+) strand; PAM type: YTN; PAM sequence: TTA
ttgtaaagattcctccacta

SEQ ID NO: 332476 - DNA, 20 bp, Artificial Sequence
  Description of Artificial Sequence: Synthetic oligonucleotide
  Target: LAMA2; (+) strand; PAM type: YTN; PAM sequence: TTG
taaagattcctccactagag

SEQ ID NO: 332477 - DNA, 20 bp, Artificial Sequence
  Description of Artificial Sequence: Synthetic oligonucleotide
  Target: LAMA2; (+) strand; PAM type: YTN; PAM sequence: TTC
ctccactagagttagtgatg

SEQ ID NO: 332478 - DNA, 20 bp, Artificial Sequence
  Description of Artificial Sequence: Synthetic oligonucleotide
  Target: LAMA2; (+) strand; PAM type: YTN; PAM sequence: CTC
cactagagttagtgatgatg

SEQ ID NO: 332479 - DNA, 20 bp, Artificial Sequence
  Description of Artificial Sequence: Synthetic oligonucleotide
  Target: LAMA2; (+) strand; PAM type: YTN; PAM sequence: CTA
gagttagtgatgatggcaac

SEQ ID NO: 332480 - DNA, 20 bp, Artificial Sequence
  Description of Artificial Sequence: Synthetic oligonucleotide
  Target: LAMA2; (+) strand; PAM type: YTN; PAM sequence: TTA
gtgatgatggcaacagacaa

SEQ ID NO: 332481 - DNA, 20 bp, Artificial Sequence
  Description of Artificial Sequence: Synthetic oligonucleotide
  Target: LAMA2; (+) strand; PAM type: YTN; PAM sequence: TTT
gggttatctctcatattatt

SEQ ID NO: 332482 - DNA, 20 bp, Artificial Sequence
  Description of Artificial Sequence: Synthetic oligonucleotide
  Target: LAMA2; (+) strand; PAM type: YTN; PAM sequence: TTG
ggttatctctcatattatta

SEQ ID NO: 332483 - DNA, 20 bp, Artificial Sequence
  Description of Artificial Sequence: Synthetic oligonucleotide
  Target: LAMA2; (+) strand; PAM type: YTN; PAM sequence: TTA
tctctcatattattaaatag

SEQ ID NO: 332484 - DNA, 20 bp, Artificial Sequence
  Description of Artificial Sequence: Synthetic oligonucleotide
  Target: LAMA2; (+) strand; PAM type: YTN; PAM sequence: CTC
tcatattattaaatagtgat

SEQ ID NO: 332485 - DNA, 20 bp, Artificial Sequence
  Description of Artificial Sequence: Synthetic oligonucleotide
  Target: LAMA2; (+) strand; PAM type: YTN; PAM sequence: CTC
atattattaaatagtgatag

SEQ ID NO: 332486 - DNA, 20 bp, Artificial Sequence
  Description of Artificial Sequence: Synthetic oligonucleotide
  Target: LAMA2; (+) strand; PAM type: YTN; PAM sequence: TTA
ttaaatagtgatagaaaatt

SEQ ID NO: 332487 - DNA, 20 bp, Artificial Sequence
  Description of Artificial Sequence: Synthetic oligonucleotide
  Target: LAMA2; (+) strand; PAM type: YTN; PAM sequence: TTA
aatagtgatagaaaattggc

SEQ ID NO: 332488 - DNA, 20 bp, Artificial Sequence
  Description of Artificial Sequence: Synthetic oligonucleotide
  Target: LAMA2; (+) strand; PAM type: YTN; PAM sequence: TTG
gcaagttaaagactggccgc

SEQ ID NO: 332489 - DNA, 20 bp, Artificial Sequence
  Description of Artificial Sequence: Synthetic oligonucleotide
  Target: LAMA2; (+) strand; PAM type: YTN; PAM sequence: TTA
aagactggccgcaaaaagct

SEQ ID NO: 332490 - DNA, 20 bp, Artificial Sequence
  Description of Artificial Sequence: Synthetic oligonucleotide
  Target: LAMA2; (+) strand; PAM type: YTN; PAM sequence: CTG
gccgcaaaaagcttctgtaa

SEQ ID NO: 332491 - DNA, 20 bp, Artificial Sequence
  Description of Artificial Sequence: Synthetic oligonucleotide
  Target: LAMA2; (+) strand; PAM type: YTN; PAM sequence: CTT
ctgtaagggccaagggaaaa

SEQ ID NO: 332492 - DNA, 20 bp, Artificial Sequence
  Description of Artificial Sequence: Synthetic oligonucleotide
  Target: LAMA2; (+) strand; PAM type: YTN; PAM sequence: TTC
tgtaagggccaagggaaaac

SEQ ID NO: 332493 - DNA, 20 bp, Artificial Sequence
  Description of Artificial Sequence: Synthetic oligonucleotide
  Target: LAMA2; (+) strand; PAM type: YTN; PAM sequence: CTG
taagggccaagggaaaactt

SEQ ID NO: 332494 - DNA, 20 bp, Artificial Sequence
  Description of Artificial Sequence: Synthetic oligonucleotide
  Target: LAMA2; (+) strand; PAM type: YTN; PAM sequence: CTT
ctcttttgccctctgaaggt

SEQ ID NO: 332495 - DNA, 20 bp, Artificial Sequence
  Description of Artificial Sequence: Synthetic oligonucleotide
  Target: LAMA2; (+) strand; PAM type: YTN; PAM sequence: TTC
tcttttgccctctgaaggtt

SEQ ID NO: 332496 - DNA, 20 bp, Artificial Sequence
  Description of Artificial Sequence: Synthetic oligonucleotide
  Target: LAMA2; (+) strand; PAM type: YTN; PAM sequence: CTC
ttttgccctctgaaggtttg

SEQ ID NO: 332497 - DNA, 20 bp, Artificial Sequence
  Description of Artificial Sequence: Synthetic oligonucleotide
  Target: LAMA2; (+) strand; PAM type: YTN; PAM sequence: CTT
ttgccctctgaaggtttgct

SEQ ID NO: 332498 - DNA, 20 bp, Artificial Sequence
  Description of Artificial Sequence: Synthetic oligonucleotide
  Target: LAMA2; (+) strand; PAM type: YTN; PAM sequence: TTT
tgccctctgaaggtttgctg

SEQ ID NO: 332499 - DNA, 20 bp, Artificial Sequence
  Description of Artificial Sequence: Synthetic oligonucleotide
  Target: LAMA2; (+) strand; PAM type: YTN; PAM sequence: TTT
gccctctgaaggtttgctga

SEQ ID NO: 332500 - DNA, 20 bp, Artificial Sequence
  Description of Artificial Sequence: Synthetic oligonucleotide
  Target: LAMA2; (+) strand; PAM type: YTN; PAM sequence: TTG
ccctctgaaggtttgctgaa

SEQ ID NO: 332501 - DNA, 20 bp, Artificial Sequence
  Description of Artificial Sequence: Synthetic oligonucleotide
  Target: LAMA2; (+) strand; PAM type: YTN; PAM sequence: CTC
tgaaggtttgctgaaaaatc

SEQ ID NO: 332502 - DNA, 20 bp, Artificial Sequence
  Description of Artificial Sequence: Synthetic oligonucleotide
  Target: LAMA2; (+) strand; PAM type: YTN; PAM sequence: CTG
aaggtttgctgaaaaatcaa

SEQ ID NO: 332503 - DNA, 20 bp, Artificial Sequence
  Description of Artificial Sequence: Synthetic oligonucleotide
  Target: LAMA2; (+) strand; PAM type: YTN; PAM sequence: TTT
gctgaaaaatcaactgaaaa

SEQ ID NO: 332504 - DNA, 20 bp, Artificial Sequence
  Description of Artificial Sequence: Synthetic oligonucleotide
  Target: LAMA2; (+) strand; PAM type: YTN; PAM sequence: TTG
ctgaaaaatcaactgaaaaa

SEQ ID NO: 332505 - DNA, 20 bp, Artificial Sequence
  Description of Artificial Sequence: Synthetic oligonucleotide
  Target: LAMA2; (+) strand; PAM type: YTN; PAM sequence: CTG
aaaaatcaactgaaaaaagt

SEQ ID NO: 332506 - DNA, 20 bp, Artificial Sequence
  Description of Artificial Sequence: Synthetic oligonucleotide
  Target: LAMA2; (+) strand; PAM type: YTN; PAM sequence: CTG
aaaaaagttagcttggtagg

SEQ ID NO: 332507 - DNA, 20 bp, Artificial Sequence
  Description of Artificial Sequence: Synthetic oligonucleotide
  Target: LAMA2; (+) strand; PAM type: YTN; PAM sequence: TTA
gcttggtaggtgaaaggcat

SEQ ID NO: 332508 - DNA, 20 bp, Artificial Sequence
  Description of Artificial Sequence: Synthetic oligonucleotide
  Target: LAMA2; (+) strand; PAM type: YTN; PAM sequence: CTT
ggtaggtgaaaggcatacaa

SEQ ID NO: 332509 - DNA, 20 bp, Artificial Sequence
  Description of Artificial Sequence: Synthetic oligonucleotide
  Target: LAMA2; (+) strand; PAM type: YTN; PAM sequence: TTG
gtaggtgaaaggcatacaaa

SEQ ID NO: 332510 - DNA, 20 bp, Artificial Sequence
  Description of Artificial Sequence: Synthetic oligonucleotide
  Target: LAMA2; (+) strand; PAM type: YTN; PAM sequence: TTT
taacatgcatagcatggaag

SEQ ID NO: 332511 - DNA, 20 bp, Artificial Sequence
  Description of Artificial Sequence: Synthetic oligonucleotide
  Target: LAMA2; (+) strand; PAM type: YTN; PAM sequence: TTT
aacatgcatagcatggaaga

SEQ ID NO: 332512 - DNA, 20 bp, Artificial Sequence
  Description of Artificial Sequence: Synthetic oligonucleotide
  Target: LAMA2; (+) strand; PAM type: YTN; PAM sequence: TTA
acatgcatagcatggaagaa

SEQ ID NO: 332513 - DNA, 20 bp, Artificial Sequence
  Description of Artificial Sequence: Synthetic oligonucleotide
  Target: LAMA2; (+) strand; PAM type: YTN; PAM sequence: TTA
cccaataacccaataggagc

SEQ ID NO: 332514 - DNA, 20 bp, Artificial Sequence
  Description of Artificial Sequence: Synthetic oligonucleotide
  Target: LAMA2; (+) strand; PAM type: YTN; PAM sequence: CTT
cttcacgggggagggaagat

SEQ ID NO: 332515 - DNA, 20 bp, Artificial Sequence
  Description of Artificial Sequence: Synthetic oligonucleotide
  Target: LAMA2; (+) strand; PAM type: YTN; PAM sequence: TTC
ttcacgggggagggaagatg

SEQ ID NO: 332516 - DNA, 20 bp, Artificial Sequence
  Description of Artificial Sequence: Synthetic oligonucleotide
  Target: LAMA2; (+) strand; PAM type: YTN; PAM sequence: CTT
cacgggggagggaagatggg

SEQ ID NO: 332517 - DNA, 20 bp, Artificial Sequence
  Description of Artificial Sequence: Synthetic oligonucleotide
  Target: LAMA2; (+) strand; PAM type: YTN; PAM sequence: TTC
acgggggagggaagatgggg

SEQ ID NO: 332518 - DNA, 20 bp, Artificial Sequence
  Description of Artificial Sequence: Synthetic oligonucleotide
  Target: LAMA2; (+) strand; PAM type: YTN; PAM sequence: TTT
ggaaaatagtaaatgatttt

SEQ ID NO: 332519 - DNA, 20 bp, Artificial Sequence
  Description of Artificial Sequence: Synthetic oligonucleotide
  Target: LAMA2; (+) strand; PAM type: YTN; PAM sequence: TTG
gaaaatagtaaatgattttt

SEQ ID NO: 332520 - DNA, 20 bp, Artificial Sequence
  Description of Artificial Sequence: Synthetic oligonucleotide
  Target: LAMA2; (+) strand; PAM type: YTN; PAM sequence: TTT
tttaggggaattcaagaacc

SEQ ID NO: 332521 - DNA, 20 bp, Artificial Sequence
  Description of Artificial Sequence: Synthetic oligonucleotide
  Target: LAMA2; (+) strand; PAM type: YTN; PAM sequence: TTT
ttaggggaattcaagaacct

SEQ ID NO: 332522 - DNA, 20 bp, Artificial Sequence
  Description of Artificial Sequence: Synthetic oligonucleotide
  Target: LAMA2; (+) strand; PAM type: YTN; PAM sequence: TTT
taggggaattcaagaaccta

SEQ ID NO: 332523 - DNA, 20 bp, Artificial Sequence
  Description of Artificial Sequence: Synthetic oligonucleotide
  Target: LAMA2; (+) strand; PAM type: YTN; PAM sequence: TTT
aggggaattcaagaacctac

SEQ ID NO: 332524 - DNA, 20 bp, Artificial Sequence
  Description of Artificial Sequence: Synthetic oligonucleotide
  Target: LAMA2; (+) strand; PAM type: YTN; PAM sequence: TTA
ggggaattcaagaacctaca

SEQ ID NO: 332525 - DNA, 20 bp, Artificial Sequence
  Description of Artificial Sequence: Synthetic oligonucleotide
  Target: LAMA2; (+) strand; PAM type: YTN; PAM sequence: TTC
aagaacctacaatggcctgg

SEQ ID NO: 332526 - DNA, 20 bp, Artificial Sequence
  Description of Artificial Sequence: Synthetic oligonucleotide
  Target: LAMA2; (+) strand; PAM type: YTN; PAM sequence: CTA
caatggcctgggacaaagtc

SEQ ID NO: 332527 - DNA, 20 bp, Artificial Sequence
  Description of Artificial Sequence: Synthetic oligonucleotide
  Target: LAMA2; (+) strand; PAM type: YTN; PAM sequence: CTG
ggacaaagtctgttgggccc

SEQ ID NO: 332528 - DNA, 20 bp, Artificial Sequence
  Description of Artificial Sequence: Synthetic oligonucleotide
  Target: LAMA2; (+) strand; PAM type: YTN; PAM sequence: CTG
ttgggcccacagagcagata

SEQ ID NO: 332529 - DNA, 20 bp, Artificial Sequence
  Description of Artificial Sequence: Synthetic oligonucleotide
  Target: LAMA2; (+) strand; PAM type: YTN; PAM sequence: TTG
ggcccacagagcagatagtg

SEQ ID NO: 332530 - DNA, 20 bp, Artificial Sequence
  Description of Artificial Sequence: Synthetic oligonucleotide
  Target: LAMA2; (+) strand; PAM type: YTN; PAM sequence: TTT
gtaacaaaagtctgttcagg

SEQ ID NO: 332531 - DNA, 20 bp, Artificial Sequence
  Description of Artificial Sequence: Synthetic oligonucleotide
  Target: LAMA2; (+) strand; PAM type: YTN; PAM sequence: TTG
taacaaaagtctgttcaggt

SEQ ID NO: 332532 - DNA, 20 bp, Artificial Sequence
  Description of Artificial Sequence: Synthetic oligonucleotide
  Target: LAMA2; (+) strand; PAM type: YTN; PAM sequence: CTG
ttcaggtgtgccgacagact

SEQ ID NO: 332533 - DNA, 20 bp, Artificial Sequence
  Description of Artificial Sequence: Synthetic oligonucleotide
  Target: LAMA2; (+) strand; PAM type: YTN; PAM sequence: TTC
aggtgtgccgacagacttca

SEQ ID NO: 332534 - DNA, 20 bp, Artificial Sequence
  Description of Artificial Sequence: Synthetic oligonucleotide
  Target: LAMA2; (+) strand; PAM type: YTN; PAM sequence: CTT
cagtctctcttcatgtgaaa

SEQ ID NO: 332535 - DNA, 20 bp, Artificial Sequence
  Description of Artificial Sequence: Synthetic oligonucleotide
  Target: LAMA2; (+) strand; PAM type: YTN; PAM sequence: TTC
agtctctcttcatgtgaaat

SEQ ID NO: 332536 - DNA, 20 bp, Artificial Sequence
  Description of Artificial Sequence: Synthetic oligonucleotide
  Target: LAMA2; (+) strand; PAM type: YTN; PAM sequence: CTC
tcttcatgtgaaatgagtta

SEQ ID NO: 332537 - DNA, 20 bp, Artificial Sequence
  Description of Artificial Sequence: Synthetic oligonucleotide
  Target: LAMA2; (+) strand; PAM type: YTN; PAM sequence: CTC
ttcatgtgaaatgagttaaa

SEQ ID NO: 332538 - DNA, 20 bp, Artificial Sequence
  Description of Artificial Sequence: Synthetic oligonucleotide
  Target: LAMA2; (+) strand; PAM type: YTN; PAM sequence: CTT
catgtgaaatgagttaaatt

SEQ ID NO: 332539 - DNA, 20 bp, Artificial Sequence
  Description of Artificial Sequence: Synthetic oligonucleotide
  Target: LAMA2; (+) strand; PAM type: YTN; PAM sequence: TTC
atgtgaaatgagttaaatta

SEQ ID NO: 332540 - DNA, 20 bp, Artificial Sequence
  Description of Artificial Sequence: Synthetic oligonucleotide
  Target: LAMA2; (+) strand; PAM type: YTN; PAM sequence: TTA
aattaatgaaaacttaagca

SEQ ID NO: 332541 - DNA, 20 bp, Artificial Sequence
  Description of Artificial Sequence: Synthetic oligonucleotide
  Target: LAMA2; (+) strand; PAM type: YTN; PAM sequence: TTA
atgaaaacttaagcaagagg

SEQ ID NO: 332542 - DNA, 20 bp, Artificial Sequence
  Description of Artificial Sequence: Synthetic oligonucleotide
  Target: LAMA2; (+) strand; PAM type: YTN; PAM sequence: CTT
aagcaagagggccagaggaa

SEQ ID NO: 332543 - DNA, 20 bp, Artificial Sequence
  Description of Artificial Sequence: Synthetic oligonucleotide
  Target: LAMA2; (+) strand; PAM type: YTN; PAM sequence: TTA
agcaagagggccagaggaaa

SEQ ID NO: 332544 - DNA, 20 bp, Artificial Sequence
  Description of Artificial Sequence: Synthetic oligonucleotide
  Target: LAMA2; (+) strand; PAM type: YTN; PAM sequence: CTT
ttcctcctggtgggatcaga

SEQ ID NO: 332545 - DNA, 20 bp, Artificial Sequence
  Description of Artificial Sequence: Synthetic oligonucleotide
  Target: LAMA2; (+) strand; PAM type: YTN; PAM sequence: TTT
tcctcctggtgggatcagac

SEQ ID NO: 332546 - DNA, 20 bp, Artificial Sequence
  Description of Artificial Sequence: Synthetic oligonucleotide
  Target: LAMA2; (+) strand; PAM type: YTN; PAM sequence: TTT
cctcctggtgggatcagact

SEQ ID NO: 332547 - DNA, 20 bp, Artificial Sequence
  Description of Artificial Sequence: Synthetic oligonucleotide
  Target: LAMA2; (+) strand; PAM type: YTN; PAM sequence: TTC
ctcctggtgggatcagactg

SEQ ID NO: 332548 - DNA, 20 bp, Artificial Sequence
  Description of Artificial Sequence: Synthetic oligonucleotide
  Target: LAMA2; (+) strand; PAM type: YTN; PAM sequence: CTC
ctggtgggatcagactgtaa

SEQ ID NO: 332549 - DNA, 20 bp, Artificial Sequence
  Description of Artificial Sequence: Synthetic oligonucleotide
  Target: LAMA2; (+) strand; PAM type: YTN; PAM sequence: CTG
gtgggatcagactgtaagta

SEQ ID NO: 332550 - DNA, 20 bp, Artificial Sequence
  Description of Artificial Sequence: Synthetic oligonucleotide
  Target: LAMA2; (+) strand; PAM type: YTN; PAM sequence: CTG
taagtagatacgggagtatc

SEQ ID NO: 332551 - DNA, 20 bp, Artificial Sequence
  Description of Artificial Sequence: Synthetic oligonucleotide
  Target: LAMA2; (+) strand; PAM type: YTN; PAM sequence: CTT
atttcagcatttgctggtct

SEQ ID NO: 332552 - DNA, 20 bp, Artificial Sequence
  Description of Artificial Sequence: Synthetic oligonucleotide
  Target: LAMA2; (+) strand; PAM type: YTN; PAM sequence: TTA
tttcagcatttgctggtctc

SEQ ID NO: 332553 - DNA, 20 bp, Artificial Sequence
  Description of Artificial Sequence: Synthetic oligonucleotide
  Target: LAMA2; (+) strand; PAM type: YTN; PAM sequence: TTT
cagcatttgctggtctccaa

SEQ ID NO: 332554 - DNA, 20 bp, Artificial Sequence
  Description of Artificial Sequence: Synthetic oligonucleotide
  Target: LAMA2; (+) strand; PAM type: YTN; PAM sequence: TTC
agcatttgctggtctccaag

SEQ ID NO: 332555 - DNA, 20 bp, Artificial Sequence
  Description of Artificial Sequence: Synthetic oligonucleotide
  Target: LAMA2; (+) strand; PAM type: YTN; PAM sequence: TTT
gctggtctccaagagccttt

SEQ ID NO: 332556 - DNA, 20 bp, Artificial Sequence
  Description of Artificial Sequence: Synthetic oligonucleotide
  Target: LAMA2; (+) strand; PAM type: YTN; PAM sequence: TTG
ctggtctccaagagccttta

SEQ ID NO: 332557 - DNA, 20 bp, Artificial Sequence
  Description of Artificial Sequence: Synthetic oligonucleotide
  Target: LAMA2; (+) strand; PAM type: YTN; PAM sequence: CTG
gtctccaagagcctttaatt

SEQ ID NO: 332558 - DNA, 20 bp, Artificial Sequence
  Description of Artificial Sequence: Synthetic oligonucleotide
  Target: LAMA2; (+) strand; PAM type: YTN; PAM sequence: CTC
caagagcctttaatttaaaa

SEQ ID NO: 332559 - DNA, 20 bp, Artificial Sequence
  Description of Artificial Sequence: Synthetic oligonucleotide
  Target: LAMA2; (+) strand; PAM type: YTN; PAM sequence: CTT
taatttaaaataatcagcat

SEQ ID NO: 332560 - DNA, 20 bp, Artificial Sequence
  Description of Artificial Sequence: Synthetic oligonucleotide
  Target: LAMA2; (+) strand; PAM type: YTN; PAM sequence: TTT
aatttaaaataatcagcata

SEQ ID NO: 332561 - DNA, 20 bp, Artificial Sequence
  Description of Artificial Sequence: Synthetic oligonucleotide
  Target: LAMA2; (+) strand; PAM type: YTN; PAM sequence: TTA
atttaaaataatcagcatac

SEQ ID NO: 332562 - DNA, 20 bp, Artificial Sequence
  Description of Artificial Sequence: Synthetic oligonucleotide
  Target: LAMA2; (+) strand; PAM type: YTN; PAM sequence: TTT
aaaataatcagcataccagc

SEQ ID NO: 332563 - DNA, 20 bp, Artificial Sequence
  Description of Artificial Sequence: Synthetic oligonucleotide
  Target: LAMA2; (+) strand; PAM type: YTN; PAM sequence: TTA
aaataatcagcataccagca

SEQ ID NO: 332564 - DNA, 20 bp, Artificial Sequence
  Description of Artificial Sequence: Synthetic oligonucleotide
  Target: LAMA2; (+) strand; PAM type: YTN; PAM sequence: CTA
tattttcgggtattggtttc

SEQ ID NO: 332565 - DNA, 20 bp, Artificial Sequence
  Description of Artificial Sequence: Synthetic oligonucleotide
  Target: LAMA2; (+) strand; PAM type: YTN; PAM sequence: TTT
tcgggtattggtttctgagc

SEQ ID NO: 332566 - DNA, 20 bp, Artificial Sequence
  Description of Artificial Sequence: Synthetic oligonucleotide
  Target: LAMA2; (+) strand; PAM type: YTN; PAM sequence: TTT
cgggtattggtttctgagcc

SEQ ID NO: 332567 - DNA, 20 bp, Artificial Sequence
  Description of Artificial Sequence: Synthetic oligonucleotide
  Target: LAMA2; (+) strand; PAM type: YTN; PAM sequence: TTC
gggtattggtttctgagcct

SEQ ID NO: 332568 - DNA, 20 bp, Artificial Sequence
  Description of Artificial Sequence: Synthetic oligonucleotide
  Target: LAMA2; (+) strand; PAM type: YTN; PAM sequence: TTG
gtttctgagcctcaatatct

SEQ ID NO: 332569 - DNA, 20 bp, Artificial Sequence
  Description of Artificial Sequence: Synthetic oligonucleotide
  Target: LAMA2; (+) strand; PAM type: YTN; PAM sequence: TTT
ctgagcctcaatatctcata

SEQ ID NO: 332570 - DNA, 20 bp, Artificial Sequence
  Description of Artificial Sequence: Synthetic oligonucleotide
  Target: LAMA2; (+) strand; PAM type: YTN; PAM sequence: TTC
tgagcctcaatatctcatag

SEQ ID NO: 332571 - DNA, 20 bp, Artificial Sequence
  Description of Artificial Sequence: Synthetic oligonucleotide
  Target: LAMA2; (+) strand; PAM type: YTN; PAM sequence: CTG
agcctcaatatctcatagaa

SEQ ID NO: 332572 - DNA, 20 bp, Artificial Sequence
  Description of Artificial Sequence: Synthetic oligonucleotide
  Target: LAMA2; (+) strand; PAM type: YTN; PAM sequence: CTC
aatatctcatagaatgaatt

SEQ ID NO: 332573 - DNA, 20 bp, Artificial Sequence
  Description of Artificial Sequence: Synthetic oligonucleotide
  Target: LAMA2; (+) strand; PAM type: YTN; PAM sequence: CTC
atagaatgaatttaacagca

SEQ ID NO: 332574 - DNA, 20 bp, Artificial Sequence
  Description of Artificial Sequence: Synthetic oligonucleotide
  Target: LAMA2; (+) strand; PAM type: YTN; PAM sequence: TTT
aacagcattttatgttaaaa

SEQ ID NO: 332575 - DNA, 20 bp, Artificial Sequence
  Description of Artificial Sequence: Synthetic oligonucleotide
  Target: LAMA2; (+) strand; PAM type: YTN; PAM sequence: TTA
acagcattttatgttaaaac

SEQ ID NO: 332576 - DNA, 20 bp, Artificial Sequence
  Description of Artificial Sequence: Synthetic oligonucleotide
  Target: LAMA2; (+) strand; PAM type: YTN; PAM sequence: TTT
tatgttaaaaccagatatat

SEQ ID NO: 332577 - DNA, 20 bp, Artificial Sequence
  Description of Artificial Sequence: Synthetic oligonucleotide
  Target: LAMA2; (+) strand; PAM type: YTN; PAM sequence: TTT
atgttaaaaccagatatata

SEQ ID NO: 332578 - DNA, 20 bp, Artificial Sequence
  Description of Artificial Sequence: Synthetic oligonucleotide
  Target: LAMA2; (+) strand; PAM type: YTN; PAM sequence: TTA
tgttaaaaccagatatatat

SEQ ID NO: 332579 - DNA, 20 bp, Artificial Sequence
  Description of Artificial Sequence: Synthetic oligonucleotide
  Target: LAMA2; (+) strand; PAM type: YTN; PAM sequence: TTA
aaaccagatatatattggac

SEQ ID NO: 332580 - DNA, 20 bp, Artificial Sequence
  Description of Artificial Sequence: Synthetic oligonucleotide
  Target: LAMA2; (+) strand; PAM type: YTN; PAM sequence: TTG
gactccctacgtcttaataa

SEQ ID NO: 332581 - DNA, 20 bp, Artificial Sequence
  Description of Artificial Sequence: Synthetic oligonucleotide
  Target: LAMA2; (+) strand; PAM type: YTN; PAM sequence: CTC
cctacgtcttaataataatg

SEQ ID NO: 332582 - DNA, 20 bp, Artificial Sequence
  Description of Artificial Sequence: Synthetic oligonucleotide
  Target: LAMA2; (+) strand; PAM type: YTN; PAM sequence: CTA
cgtcttaataataatgaatg

SEQ ID NO: 332583 - DNA, 20 bp, Artificial Sequence
  Description of Artificial Sequence: Synthetic oligonucleotide
  Target: LAMA2; (+) strand; PAM type: YTN; PAM sequence: CTT
aataataatgaatgtgtcag

SEQ ID NO: 332584 - DNA, 20 bp, Artificial Sequence
  Description of Artificial Sequence: Synthetic oligonucleotide
  Target: LAMA2; (+) strand; PAM type: YTN; PAM sequence: TTA
ataataatgaatgtgtcaga

SEQ ID NO: 332585 - DNA, 20 bp, Artificial Sequence
  Description of Artificial Sequence: Synthetic oligonucleotide
  Target: LAMA2; (+) strand; PAM type: YTN; PAM sequence: TTC
aagtgtatttcaaccacaag

SEQ ID NO: 332586 - DNA, 20 bp, Artificial Sequence
  Description of Artificial Sequence: Synthetic oligonucleotide
  Target: LAMA2; (+) strand; PAM type: YTN; PAM sequence: TTT
caaccacaagtcaggatttt

SEQ ID NO: 332587 - DNA, 20 bp, Artificial Sequence
  Description of Artificial Sequence: Synthetic oligonucleotide
  Target: LAMA2; (+) strand; PAM type: YTN; PAM sequence: TTC
aaccacaagtcaggatttta

SEQ ID NO: 332588 - DNA, 20 bp, Artificial Sequence
  Description of Artificial Sequence: Synthetic oligonucleotide
  Target: LAMA2; (+) strand; PAM type: YTN; PAM sequence: TTT
tatgtttctgttaacaaggt

SEQ ID NO: 332589 - DNA, 20 bp, Artificial Sequence
  Description of Artificial Sequence: Synthetic oligonucleotide
  Target: LAMA2; (+) strand; PAM type: YTN; PAM sequence: TTT
atgtttctgttaacaaggtt

SEQ ID NO: 332590 - DNA, 20 bp, Artificial Sequence
  Description of Artificial Sequence: Synthetic oligonucleotide
  Target: LAMA2; (+) strand; PAM type: YTN; PAM sequence: TTA
tgtttctgttaacaaggttg

SEQ ID NO: 332591 - DNA, 20 bp, Artificial Sequence
  Description of Artificial Sequence: Synthetic oligonucleotide
  Target: LAMA2; (+) strand; PAM type: YTN; PAM sequence: TTT
ctgttaacaaggttgatggc

SEQ ID NO: 332592 - DNA, 20 bp, Artificial Sequence
  Description of Artificial Sequence: Synthetic oligonucleotide
  Target: LAMA2; (+) strand; PAM type: YTN; PAM sequence: TTC
tgttaacaaggttgatggca

SEQ ID NO: 332593 - DNA, 20 bp, Artificial Sequence
  Description of Artificial Sequence: Synthetic oligonucleotide
  Target: LAMA2; (+) strand; PAM type: YTN; PAM sequence: CTG
ttaacaaggttgatggcata

SEQ ID NO: 332594 - DNA, 20 bp, Artificial Sequence
  Description of Artificial Sequence: Synthetic oligonucleotide
  Target: LAMA2; (+) strand; PAM type: YTN; PAM sequence: TTA
acaaggttgatggcatacta

SEQ ID NO: 332595 - DNA, 20 bp, Artificial Sequence
  Description of Artificial Sequence: Synthetic oligonucleotide
  Target: LAMA2; (+) strand; PAM type: YTN; PAM sequence: TTG
atggcatactagagctgtct

SEQ ID NO: 332596 - DNA, 20 bp, Artificial Sequence
  Description of Artificial Sequence: Synthetic oligonucleotide
  Target: LAMA2; (+) strand; PAM type: YTN; PAM sequence: CTA
gagctgtctcaatagttagt

SEQ ID NO: 332597 - DNA, 20 bp, Artificial Sequence
  Description of Artificial Sequence: Synthetic oligonucleotide
  Target: LAMA2; (+) strand; PAM type: YTN; PAM sequence: CTG
tctcaatagttagttgttgc

SEQ ID NO: 332598 - DNA, 20 bp, Artificial Sequence
  Description of Artificial Sequence: Synthetic oligonucleotide
  Target: LAMA2; (+) strand; PAM type: YTN; PAM sequence: CTC
aatagttagttgttgctttt

SEQ ID NO: 332599 - DNA, 20 bp, Artificial Sequence
  Description of Artificial Sequence: Synthetic oligonucleotide
  Target: LAMA2; (+) strand; PAM type: YTN; PAM sequence: TTA
gttgttgcttttttgaatga

SEQ ID NO: 332600 - DNA, 20 bp, Artificial Sequence
  Description of Artificial Sequence: Synthetic oligonucleotide
  Target: LAMA2; (+) strand; PAM type: YTN; PAM sequence: TTG
ttgcttttttgaatgattga

SEQ ID NO: 332601 - DNA, 20 bp, Artificial Sequence
  Description of Artificial Sequence: Synthetic oligonucleotide
  Target: LAMA2; (+) strand; PAM type: YTN; PAM sequence: TTG
cttttttgaatgattgacaa

SEQ ID NO: 332602 - DNA, 20 bp, Artificial Sequence
  Description of Artificial Sequence: Synthetic oligonucleotide
  Target: LAMA2; (+) strand; PAM type: YTN; PAM sequence: CTT
ttttgaatgattgacaagtc

SEQ ID NO: 332603 - DNA, 20 bp, Artificial Sequence
  Description of Artificial Sequence: Synthetic oligonucleotide
  Target: LAMA2; (+) strand; PAM type: YTN; PAM sequence: TTT
tttgaatgattgacaagtca

SEQ ID NO: 332604 - DNA, 20 bp, Artificial Sequence
  Description of Artificial Sequence: Synthetic oligonucleotide
  Target: LAMA2; (+) strand; PAM type: YTN; PAM sequence: TTT
ttgaatgattgacaagtcaa

SEQ ID NO: 332605 - DNA, 20 bp, Artificial Sequence
  Description of Artificial Sequence: Synthetic oligonucleotide
  Target: LAMA2; (+) strand; PAM type: YTN; PAM sequence: TTT
tgaatgattgacaagtcaat

SEQ ID NO: 332606 - DNA, 20 bp, Artificial Sequence
  Description of Artificial Sequence: Synthetic oligonucleotide
  Target: LAMA2; (+) strand; PAM type: YTN; PAM sequence: TTT
gaatgattgacaagtcaatt

SEQ ID NO: 332607 - DNA, 20 bp, Artificial Sequence
  Description of Artificial Sequence: Synthetic oligonucleotide
  Target: LAMA2; (+) strand; PAM type: YTN; PAM sequence: TTG
aatgattgacaagtcaatta

SEQ ID NO: 332608 - DNA, 20 bp, Artificial Sequence
  Description of Artificial Sequence: Synthetic oligonucleotide
  Target: LAMA2; (+) strand; PAM type: YTN; PAM sequence: TTG
acaagtcaattagattttaa

SEQ ID NO: 332609 - DNA, 20 bp, Artificial Sequence
  Description of Artificial Sequence: Synthetic oligonucleotide
  Target: LAMA2; (+) strand; PAM type: YTN; PAM sequence: TTA
gattttaacattatatcttt

SEQ ID NO: 332610 - DNA, 20 bp, Artificial Sequence
  Description of Artificial Sequence: Synthetic oligonucleotide
  Target: LAMA2; (+) strand; PAM type: YTN; PAM sequence: TTT
taacattatatctttacact

SEQ ID NO: 332611 - DNA, 20 bp, Artificial Sequence
  Description of Artificial Sequence: Synthetic oligonucleotide
  Target: LAMA2; (+) strand; PAM type: YTN; PAM sequence: TTT
aacattatatctttacactt

SEQ ID NO: 332612 - DNA, 20 bp, Artificial Sequence
  Description of Artificial Sequence: Synthetic oligonucleotide
  Target: LAMA2; (+) strand; PAM type: YTN; PAM sequence: TTA
acattatatctttacactta

SEQ ID NO: 332613 - DNA, 20 bp, Artificial Sequence
  Description of Artificial Sequence: Synthetic oligonucleotide
  Target: LAMA2; (+) strand; PAM type: YTN; PAM sequence: TTA
tatctttacacttaatttct

SEQ ID NO: 332614 - DNA, 20 bp, Artificial Sequence
  Description of Artificial Sequence: Synthetic oligonucleotide
  Target: LAMA2; (+) strand; PAM type: YTN; PAM sequence: CTT
tacacttaatttctgtagtt

SEQ ID NO: 332615 - DNA, 20 bp, Artificial Sequence
  Description of Artificial Sequence: Synthetic oligonucleotide
  Target: LAMA2; (+) strand; PAM type: YTN; PAM sequence: TTT
acacttaatttctgtagtta

SEQ ID NO: 332616 - DNA, 20 bp, Artificial Sequence
  Description of Artificial Sequence: Synthetic oligonucleotide
  Target: LAMA2; (+) strand; PAM type: YTN; PAM sequence: TTA
cacttaatttctgtagttac

SEQ ID NO: 332617 - DNA, 20 bp, Artificial Sequence
  Description of Artificial Sequence: Synthetic oligonucleotide
  Target: LAMA2; (+) strand; PAM type: YTN; PAM sequence: CTT
aatttctgtagttaccttta

SEQ ID NO: 332618 - DNA, 20 bp, Artificial Sequence
  Description of Artificial Sequence: Synthetic oligonucleotide
  Target: LAMA2; (+) strand; PAM type: YTN; PAM sequence: TTA
atttctgtagttacctttaa

SEQ ID NO: 332619 - DNA, 20 bp, Artificial Sequence
  Description of Artificial Sequence: Synthetic oligonucleotide
  Target: LAMA2; (+) strand; PAM type: YTN; PAM sequence: TTT
ctgtagttacctttaaaatt

SEQ ID NO: 332620 - DNA, 20 bp, Artificial Sequence
  Description of Artificial Sequence: Synthetic oligonucleotide
  Target: LAMA2; (+) strand; PAM type: YTN; PAM sequence: TTC
tgtagttacctttaaaattg

SEQ ID NO: 332621 - DNA, 20 bp, Artificial Sequence
  Description of Artificial Sequence: Synthetic oligonucleotide
  Target: LAMA2; (+) strand; PAM type: YTN; PAM sequence: CTG
tagttacctttaaaattgcc

SEQ ID NO: 332622 - DNA, 20 bp, Artificial Sequence
  Description of Artificial Sequence: Synthetic oligonucleotide
  Target: LAMA2; (+) strand; PAM type: YTN; PAM sequence: TTA
cctttaaaattgcccatttt

SEQ ID NO: 332623 - DNA, 20 bp, Artificial Sequence
  Description of Artificial Sequence: Synthetic oligonucleotide
  Target: LAMA2; (+) strand; PAM type: YTN; PAM sequence: CTT
taaaattgcccattttggtt

SEQ ID NO: 332624 - DNA, 20 bp, Artificial Sequence
  Description of Artificial Sequence: Synthetic oligonucleotide
  Target: LAMA2; (+) strand; PAM type: YTN; PAM sequence: TTT
aaaattgcccattttggtta

SEQ ID NO: 332625 - DNA, 20 bp, Artificial Sequence
  Description of Artificial Sequence: Synthetic oligonucleotide
  Target: LAMA2; (+) strand; PAM type: YTN; PAM sequence: TTA
aaattgcccattttggttaa

SEQ ID NO: 332626 - DNA, 20 bp, Artificial Sequence
  Description of Artificial Sequence: Synthetic oligonucleotide
  Target: LAMA2; (+) strand; PAM type: YTN; PAM sequence: TTG
cccattttggttaatggcca

SEQ ID NO: 332627 - DNA, 20 bp, Artificial Sequence
  Description of Artificial Sequence: Synthetic oligonucleotide
  Target: LAMA2; (+) strand; PAM type: YTN; PAM sequence: TTT
tggttaatggccagagtgct

SEQ ID NO: 332628 - DNA, 20 bp, Artificial Sequence
  Description of Artificial Sequence: Synthetic oligonucleotide
  Target: LAMA2; (+) strand; PAM type: YTN; PAM sequence: TTT
ggttaatggccagagtgctg

SEQ ID NO: 332629 - DNA, 20 bp, Artificial Sequence
  Description of Artificial Sequence: Synthetic oligonucleotide
  Target: LAMA2; (+) strand; PAM type: YTN; PAM sequence: TTG
gttaatggccagagtgctga

SEQ ID NO: 332630 - DNA, 20 bp, Artificial Sequence
  Description of Artificial Sequence: Synthetic oligonucleotide
  Target: LAMA2; (+) strand; PAM type: YTN; PAM sequence: TTA
atggccagagtgctgaccag

SEQ ID NO: 332631 - DNA, 20 bp, Artificial Sequence
  Description of Artificial Sequence: Synthetic oligonucleotide
  Target: LAMA2; (+) strand; PAM type: YTN; PAM sequence: CTG
accagctcattcccctgcag

SEQ ID NO: 332632 - DNA, 20 bp, Artificial Sequence
  Description of Artificial Sequence: Synthetic oligonucleotide
  Target: LAMA2; (+) strand; PAM type: YTN; PAM sequence: CTC
attcccctgcagcctaagca

SEQ ID NO: 332633 - DNA, 20 bp, Artificial Sequence
  Description of Artificial Sequence: Synthetic oligonucleotide
  Target: LAMA2; (+) strand; PAM type: YTN; PAM sequence: TTC
ccctgcagcctaagcattta

SEQ ID NO: 332634 - DNA, 20 bp, Artificial Sequence
  Description of Artificial Sequence: Synthetic oligonucleotide
  Target: LAMA2; (+) strand; PAM type: YTN; PAM sequence: CTG
cagcctaagcatttaaacat

SEQ ID NO: 332635 - DNA, 20 bp, Artificial Sequence
  Description of Artificial Sequence: Synthetic oligonucleotide
  Target: LAMA2; (+) strand; PAM type: YTN; PAM sequence: CTA
agcatttaaacatttcctgc

SEQ ID NO: 332636 - DNA, 20 bp, Artificial Sequence
  Description of Artificial Sequence: Synthetic oligonucleotide
  Target: LAMA2; (+) strand; PAM type: YTN; PAM sequence: TTT
aaacatttcctgctaccttg

SEQ ID NO: 332637 - DNA, 20 bp, Artificial Sequence
  Description of Artificial Sequence: Synthetic oligonucleotide
  Target: LAMA2; (+) strand; PAM type: YTN; PAM sequence: TTA
aacatttcctgctaccttgt

SEQ ID NO: 332638 - DNA, 20 bp, Artificial Sequence
  Description of Artificial Sequence: Synthetic oligonucleotide
  Target: LAMA2; (+) strand; PAM type: YTN; PAM sequence: TTT
cctgctaccttgtatggtgc

SEQ ID NO: 332639 - DNA, 20 bp, Artificial Sequence
  Description of Artificial Sequence: Synthetic oligonucleotide
  Target: LAMA2; (+) strand; PAM type: YTN; PAM sequence: TTC
ctgctaccttgtatggtgct

SEQ ID NO: 332640 - DNA, 20 bp, Artificial Sequence
  Description of Artificial Sequence: Synthetic oligonucleotide
  Target: LAMA2; (+) strand; PAM type: YTN; PAM sequence: CTG
ctaccttgtatggtgctatg

SEQ ID NO: 332641 - DNA, 20 bp, Artificial Sequence
  Description of Artificial Sequence: Synthetic oligonucleotide
  Target: LAMA2; (+) strand; PAM type: YTN; PAM sequence: CTA
ccttgtatggtgctatgaga

SEQ ID NO: 332642 - DNA, 20 bp, Artificial Sequence
  Description of Artificial Sequence: Synthetic oligonucleotide
  Target: LAMA2; (+) strand; PAM type: YTN; PAM sequence: CTT
gtatggtgctatgagacagc

SEQ ID NO: 332643 - DNA, 20 bp, Artificial Sequence
  Description of Artificial Sequence: Synthetic oligonucleotide
  Target: LAMA2; (+) strand; PAM type: YTN; PAM sequence: TTG
tatggtgctatgagacagct

SEQ ID NO: 332644 - DNA, 20 bp, Artificial Sequence
  Description of Artificial Sequence: Synthetic oligonucleotide
  Target: LAMA2; (+) strand; PAM type: YTN; PAM sequence: CTA
tgagacagctgtcattgaag

SEQ ID NO: 332645 - DNA, 20 bp, Artificial Sequence
  Description of Artificial Sequence: Synthetic oligonucleotide
  Target: LAMA2; (+) strand; PAM type: YTN; PAM sequence: CTG
tcattgaagaaattctgttg

SEQ ID NO: 332646 - DNA, 20 bp, Artificial Sequence
  Description of Artificial Sequence: Synthetic oligonucleotide
  Target: LAMA2; (+) strand; PAM type: YTN; PAM sequence: TTG
aagaaattctgttgagaatc

SEQ ID NO: 332647 - DNA, 20 bp, Artificial Sequence
  Description of Artificial Sequence: Synthetic oligonucleotide
  Target: LAMA2; (+) strand; PAM type: YTN; PAM sequence: TTC
tgttgagaatctgaattact

SEQ ID NO: 332648 - DNA, 20 bp, Artificial Sequence
  Description of Artificial Sequence: Synthetic oligonucleotide
  Target: LAMA2; (+) strand; PAM type: YTN; PAM sequence: CTG
ttgagaatctgaattactct

SEQ ID NO: 332649 - DNA, 20 bp, Artificial Sequence
  Description of Artificial Sequence: Synthetic oligonucleotide
  Target: LAMA2; (+) strand; PAM type: YTN; PAM sequence: TTG
agaatctgaattactctcct

SEQ ID NO: 332650 - DNA, 20 bp, Artificial Sequence
  Description of Artificial Sequence: Synthetic oligonucleotide
  Target: LAMA2; (+) strand; PAM type: YTN; PAM sequence: CTG
aattactctccttctgtatt

SEQ ID NO: 332651 - DNA, 20 bp, Artificial Sequence
  Description of Artificial Sequence: Synthetic oligonucleotide
  Target: LAMA2; (+) strand; PAM type: YTN; PAM sequence: TTA
ctctccttctgtattatttt

SEQ ID NO: 332652 - DNA, 20 bp, Artificial Sequence
  Description of Artificial Sequence: Synthetic oligonucleotide
  Target: LAMA2; (+) strand; PAM type: YTN; PAM sequence: CTC
tccttctgtattattttaat

SEQ ID NO: 332653 - DNA, 20 bp, Artificial Sequence
  Description of Artificial Sequence: Synthetic oligonucleotide
  Target: LAMA2; (+) strand; PAM type: YTN; PAM sequence: CTC
cttctgtattattttaatgt

SEQ ID NO: 332654 - DNA, 20 bp, Artificial Sequence
  Description of Artificial Sequence: Synthetic oligonucleotide
  Target: LAMA2; (+) strand; PAM type: YTN; PAM sequence: CTT
ctgtattattttaatgtttg

SEQ ID NO: 332655 - DNA, 20 bp, Artificial Sequence
  Description of Artificial Sequence: Synthetic oligonucleotide
  Target: LAMA2; (+) strand; PAM type: YTN; PAM sequence: TTC
tgtattattttaatgtttga

SEQ ID NO: 332656 - DNA, 20 bp, Artificial Sequence
  Description of Artificial Sequence: Synthetic oligonucleotide
  Target: LAMA2; (+) strand; PAM type: YTN; PAM sequence: CTG
tattattttaatgtttgata

SEQ ID NO: 332657 - DNA, 20 bp, Artificial Sequence
  Description of Artificial Sequence: Synthetic oligonucleotide
  Target: LAMA2; (+) strand; PAM type: YTN; PAM sequence: TTA
ttttaatgtttgatattcac

SEQ ID NO: 332658 - DNA, 20 bp, Artificial Sequence
  Description of Artificial Sequence: Synthetic oligonucleotide
  Target: LAMA2; (+) strand; PAM type: YTN; PAM sequence: TTT
taatgtttgatattcacatg

SEQ ID NO: 332659 - DNA, 20 bp, Artificial Sequence
  Description of Artificial Sequence: Synthetic oligonucleotide
  Target: LAMA2; (+) strand; PAM type: YTN; PAM sequence: TTT
aatgtttgatattcacatga

SEQ ID NO: 332660 - DNA, 20 bp, Artificial Sequence
  Description of Artificial Sequence: Synthetic oligonucleotide
  Target: LAMA2; (+) strand; PAM type: YTN; PAM sequence: TTA
atgtttgatattcacatgat

SEQ ID NO: 332661 - DNA, 20 bp, Artificial Sequence
  Description of Artificial Sequence: Synthetic oligonucleotide
  Target: LAMA2; (+) strand; PAM type: YTN; PAM sequence: TTT
gatattcacatgatggttgt

SEQ ID NO: 332662 - DNA, 20 bp, Artificial Sequence
  Description of Artificial Sequence: Synthetic oligonucleotide
  Target: LAMA2; (+) strand; PAM type: YTN; PAM sequence: TTG
atattcacatgatggttgtt

SEQ ID NO: 332663 - DNA, 20 bp, Artificial Sequence
  Description of Artificial Sequence: Synthetic oligonucleotide
  Target: LAMA2; (+) strand; PAM type: YTN; PAM sequence: TTC
acatgatggttgttttaacc

SEQ ID NO: 332664 - DNA, 20 bp, Artificial Sequence
  Description of Artificial Sequence: Synthetic oligonucleotide
  Target: LAMA2; (+) strand; PAM type: YTN; PAM sequence: TTG
ttttaaccatttttttttac

SEQ ID NO: 332665 - DNA, 20 bp, Artificial Sequence
  Description of Artificial Sequence: Synthetic oligonucleotide
  Target: LAMA2; (+) strand; PAM type: YTN; PAM sequence: TTT
taaccatttttttttacttt

SEQ ID NO: 332666 - DNA, 20 bp, Artificial Sequence
  Description of Artificial Sequence: Synthetic oligonucleotide
  Target: LAMA2; (+) strand; PAM type: YTN; PAM sequence: TTT
aaccatttttttttacttta

SEQ ID NO: 332667 - DNA, 20 bp, Artificial Sequence
  Description of Artificial Sequence: Synthetic oligonucleotide
  Target: LAMA2; (+) strand; PAM type: YTN; PAM sequence: TTA
accatttttttttactttaa

SEQ ID NO: 332668 - DNA, 20 bp, Artificial Sequence
  Description of Artificial Sequence: Synthetic oligonucleotide
  Target: LAMA2; (+) strand; PAM type: YTN; PAM sequence: TTT
ttttttactttaaagaaaaa

SEQ ID NO: 332669 - DNA, 20 bp, Artificial Sequence
  Description of Artificial Sequence: Synthetic oligonucleotide
  Target: LAMA2; (+) strand; PAM type: YTN; PAM sequence: TTT
tttttactttaaagaaaaag

SEQ ID NO: 332670 - DNA, 20 bp, Artificial Sequence
  Description of Artificial Sequence: Synthetic oligonucleotide
  Target: LAMA2; (+) strand; PAM type: YTN; PAM sequence: TTT
ttttactttaaagaaaaagc

SEQ ID NO: 332671 - DNA, 20 bp, Artificial Sequence
  Description of Artificial Sequence: Synthetic oligonucleotide
  Target: LAMA2; (+) strand; PAM type: YTN; PAM sequence: TTT
tttactttaaagaaaaagct

SEQ ID NO: 332672 - DNA, 20 bp, Artificial Sequence
  Description of Artificial Sequence: Synthetic oligonucleotide
  Target: LAMA2; (+) strand; PAM type: YTN; PAM sequence: TTT
ttactttaaagaaaaagcta

SEQ ID NO: 332673 - DNA, 20 bp, Artificial Sequence
  Description of Artificial Sequence: Synthetic oligonucleotide
  Target: LAMA2; (+) strand; PAM type: YTN; PAM sequence: TTT
tactttaaagaaaaagctat

SEQ ID NO: 332674 - DNA, 20 bp, Artificial Sequence
  Description of Artificial Sequence: Synthetic oligonucleotide
  Target: LAMA2; (+) strand; PAM type: YTN; PAM sequence: TTT
actttaaagaaaaagctata

SEQ ID NO: 332675 - DNA, 20 bp, Artificial Sequence
  Description of Artificial Sequence: Synthetic oligonucleotide
  Target: LAMA2; (+) strand; PAM type: YTN; PAM sequence: TTA
ctttaaagaaaaagctataa

SEQ ID NO: 332676 - DNA, 20 bp, Artificial Sequence
  Description of Artificial Sequence: Synthetic oligonucleotide
  Target: LAMA2; (+) strand; PAM type: YTN; PAM sequence: CTT
taaagaaaaagctataaact

SEQ ID NO: 332677 - DNA, 20 bp, Artificial Sequence
  Description of Artificial Sequence: Synthetic oligonucleotide
  Target: LAMA2; (+) strand; PAM type: YTN; PAM sequence: TTT
aaagaaaaagctataaacta

SEQ ID NO: 332678 - DNA, 20 bp, Artificial Sequence
  Description of Artificial Sequence: Synthetic oligonucleotide
  Target: LAMA2; (+) strand; PAM type: YTN; PAM sequence: TTA
aagaaaaagctataaactag

SEQ ID NO: 332679 - DNA, 20 bp, Artificial Sequence
  Description of Artificial Sequence: Synthetic oligonucleotide
  Target: LAMA2; (+) strand; PAM type: YTN; PAM sequence: CTA
taaactagttatatgatctt

SEQ ID NO: 332680 - DNA, 20 bp, Artificial Sequence
  Description of Artificial Sequence: Synthetic oligonucleotide
  Target: LAMA2; (+) strand; PAM type: YTN; PAM sequence: CTA
gttatatgatcttttcttct

SEQ ID NO: 332681 - DNA, 20 bp, Artificial Sequence
  Description of Artificial Sequence: Synthetic oligonucleotide
  Target: LAMA2; (+) strand; PAM type: YTN; PAM sequence: TTA
tatgatcttttcttcttcct

SEQ ID NO: 332682 - DNA, 20 bp, Artificial Sequence
  Description of Artificial Sequence: Synthetic oligonucleotide
  Target: LAMA2; (+) strand; PAM type: YTN; PAM sequence: CTT
ttcttcttcctttcatatga

SEQ ID NO: 332683 - DNA, 20 bp, Artificial Sequence
  Description of Artificial Sequence: Synthetic oligonucleotide
  Target: LAMA2; (+) strand; PAM type: YTN; PAM sequence: TTT
tcttcttcctttcatatgat

SEQ ID NO: 332684 - DNA, 20 bp, Artificial Sequence
  Description of Artificial Sequence: Synthetic oligonucleotide
  Target: LAMA2; (+) strand; PAM type: YTN; PAM sequence: TTT
cttcttcctttcatatgatg

SEQ ID NO: 332685 - DNA, 20 bp, Artificial Sequence
  Description of Artificial Sequence: Synthetic oligonucleotide
  Target: LAMA2; (+) strand; PAM type: YTN; PAM sequence: TTC
ttcttcctttcatatgatgc

SEQ ID NO: 332686 - DNA, 20 bp, Artificial Sequence
  Description of Artificial Sequence: Synthetic oligonucleotide
  Target: LAMA2; (+) strand; PAM type: YTN; PAM sequence: CTT
cttcctttcatatgatgctg

SEQ ID NO: 332687 - DNA, 20 bp, Artificial Sequence
  Description of Artificial Sequence: Synthetic oligonucleotide
  Target: LAMA2; (+) strand; PAM type: YTN; PAM sequence: TTC
ttcctttcatatgatgctgc

SEQ ID NO: 332688 - DNA, 20 bp, Artificial Sequence
  Description of Artificial Sequence: Synthetic oligonucleotide
  Target: LAMA2; (+) strand; PAM type: YTN; PAM sequence: CTT
cctttcatatgatgctgcta

SEQ ID NO: 332689 - DNA, 20 bp, Artificial Sequence
  Description of Artificial Sequence: Synthetic oligonucleotide
  Target: LAMA2; (+) strand; PAM type: YTN; PAM sequence: TTC
ctttcatatgatgctgctaa

SEQ ID NO: 332690 - DNA, 20 bp, Artificial Sequence
  Description of Artificial Sequence: Synthetic oligonucleotide
  Target: LAMA2; (+) strand; PAM type: YTN; PAM sequence: CTT
tcatatgatgctgctaactc

SEQ ID NO: 332691 - DNA, 20 bp, Artificial Sequence
  Description of Artificial Sequence: Synthetic oligonucleotide
  Target: LAMA2; (+) strand; PAM type: YTN; PAM sequence: TTT
catatgatgctgctaactca

SEQ ID NO: 332692 - DNA, 20 bp, Artificial Sequence
  Description of Artificial Sequence: Synthetic oligonucleotide
  Target: LAMA2; (+) strand; PAM type: YTN; PAM sequence: TTC
atatgatgctgctaactcaa

SEQ ID NO: 332693 - DNA, 20 bp, Artificial Sequence
  Description of Artificial Sequence: Synthetic oligonucleotide
  Target: LAMA2; (+) strand; PAM type: YTN; PAM sequence: CTG
ctaactcaatagagagacac

SEQ ID NO: 332694 - DNA, 20 bp, Artificial Sequence
  Description of Artificial Sequence: Synthetic oligonucleotide
  Target: LAMA2; (+) strand; PAM type: YTN; PAM sequence: CTA
actcaatagagagacacccg

SEQ ID NO: 332695 - DNA, 20 bp, Artificial Sequence
  Description of Artificial Sequence: Synthetic oligonucleotide
  Target: LAMA2; (+) strand; PAM type: YTN; PAM sequence: CTC
aatagagagacacccgatta

SEQ ID NO: 332696 - DNA, 20 bp, Artificial Sequence
  Description of Artificial Sequence: Synthetic oligonucleotide
  Target: LAMA2; (+) strand; PAM type: YTN; PAM sequence: TTA
caaatgctattgatggaaag

SEQ ID NO: 332697 - DNA, 20 bp, Artificial Sequence
  Description of Artificial Sequence: Synthetic oligonucleotide
  Target: LAMA2; (+) strand; PAM type: YTN; PAM sequence: CTA
ttgatggaaagaacacttgg

SEQ ID NO: 332698 - DNA, 20 bp, Artificial Sequence
  Description of Artificial Sequence: Synthetic oligonucleotide
  Target: LAMA2; (+) strand; PAM type: YTN; PAM sequence: TTG
atggaaagaacacttggtgg

SEQ ID NO: 332699 - DNA, 20 bp, Artificial Sequence
  Description of Artificial Sequence: Synthetic oligonucleotide
  Target: LAMA2; (+) strand; PAM type: YTN; PAM sequence: CTT
ggtggcagagtcccagtatt

SEQ ID NO: 332700 - DNA, 20 bp, Artificial Sequence
  Description of Artificial Sequence: Synthetic oligonucleotide
  Target: LAMA2; (+) strand; PAM type: YTN; PAM sequence: TTG
gtggcagagtcccagtatta

SEQ ID NO: 332701 - DNA, 20 bp, Artificial Sequence
  Description of Artificial Sequence: Synthetic oligonucleotide
  Target: LAMA2; (+) strand; PAM type: YTN; PAM sequence: TTA
agaatggaatcgaataccat

SEQ ID NO: 332702 - DNA, 20 bp, Artificial Sequence
  Description of Artificial Sequence: Synthetic oligonucleotide
  Target: LAMA2; (+) strand; PAM type: YTN; PAM sequence: TTA
tgtgacaattaccctggatt

SEQ ID NO: 332703 - DNA, 20 bp, Artificial Sequence
  Description of Artificial Sequence: Synthetic oligonucleotide
  Target: LAMA2; (+) strand; PAM type: YTN; PAM sequence: TTA
ccctggatttacagcaggta

SEQ ID NO: 332704 - DNA, 20 bp, Artificial Sequence
  Description of Artificial Sequence: Synthetic oligonucleotide
  Target: LAMA2; (+) strand; PAM type: YTN; PAM sequence: CTG
gatttacagcaggtatagtt

SEQ ID NO: 332705 - DNA, 20 bp, Artificial Sequence
  Description of Artificial Sequence: Synthetic oligonucleotide
  Target: LAMA2; (+) strand; PAM type: YTN; PAM sequence: TTT
acagcaggtatagttcctct

SEQ ID NO: 332706 - DNA, 20 bp, Artificial Sequence
  Description of Artificial Sequence: Synthetic oligonucleotide
  Target: LAMA2; (+) strand; PAM type: YTN; PAM sequence: TTA
cagcaggtatagttcctctt

SEQ ID NO: 332707 - DNA, 20 bp, Artificial Sequence
  Description of Artificial Sequence: Synthetic oligonucleotide
  Target: LAMA2; (+) strand; PAM type: YTN; PAM sequence: TTC
ctctttttttgtcatttcca

SEQ ID NO: 332708 - DNA, 20 bp, Artificial Sequence
  Description of Artificial Sequence: Synthetic oligonucleotide
  Target: LAMA2; (+) strand; PAM type: YTN; PAM sequence: CTC
tttttttgtcatttccactt

SEQ ID NO: 332709 - DNA, 20 bp, Artificial Sequence
  Description of Artificial Sequence: Synthetic oligonucleotide
  Target: LAMA2; (+) strand; PAM type: YTN; PAM sequence: CTT
tttttgtcatttccactttt

SEQ ID NO: 332710 - DNA, 20 bp, Artificial Sequence
  Description of Artificial Sequence: Synthetic oligonucleotide
  Target: LAMA2; (+) strand; PAM type: YTN; PAM sequence: TTT
ttttgtcatttccacttttg

SEQ ID NO: 332711 - DNA, 20 bp, Artificial Sequence
  Description of Artificial Sequence: Synthetic oligonucleotide
  Target: LAMA2; (+) strand; PAM type: YTN; PAM sequence: TTT
tttgtcatttccacttttga

SEQ ID NO: 332712 - DNA, 20 bp, Artificial Sequence
  Description of Artificial Sequence: Synthetic oligonucleotide
  Target: LAMA2; (+) strand; PAM type: YTN; PAM sequence: TTT
ttgtcatttccacttttgaa

SEQ ID NO: 332713 - DNA, 20 bp, Artificial Sequence
  Description of Artificial Sequence: Synthetic oligonucleotide
  Target: LAMA2; (+) strand; PAM type: YTN; PAM sequence: TTT
tgtcatttccacttttgaaa

SEQ ID NO: 332714 - DNA, 20 bp, Artificial Sequence
  Description of Artificial Sequence: Synthetic oligonucleotide
  Target: LAMA2; (+) strand; PAM type: YTN; PAM sequence: TTT
gtcatttccacttttgaaat

SEQ ID NO: 332715 - DNA, 20 bp, Artificial Sequence
  Description of Artificial Sequence: Synthetic oligonucleotide
  Target: LAMA2; (+) strand; PAM type: YTN; PAM sequence: TTG
tcatttccacttttgaaatt

SEQ ID NO: 332716 - DNA, 20 bp, Artificial Sequence
  Description of Artificial Sequence: Synthetic oligonucleotide
  Target: LAMA2; (+) strand; PAM type: YTN; PAM sequence: TTT
ccacttttgaaattgcattt

SEQ ID NO: 332717 - DNA, 20 bp, Artificial Sequence
  Description of Artificial Sequence: Synthetic oligonucleotide
  Target: LAMA2; (+) strand; PAM type: YTN; PAM sequence: TTC
cacttttgaaattgcatttt

SEQ ID NO: 332718 - DNA, 20 bp, Artificial Sequence
  Description of Artificial Sequence: Synthetic oligonucleotide
  Target: LAMA2; (+) strand; PAM type: YTN; PAM sequence: CTT
ttgaaattgcattttacatt

SEQ ID NO: 332719 - DNA, 20 bp, Artificial Sequence
  Description of Artificial Sequence: Synthetic oligonucleotide
  Target: LAMA2; (+) strand; PAM type: YTN; PAM sequence: TTT
tgaaattgcattttacattt

SEQ ID NO: 332720 - DNA, 20 bp, Artificial Sequence
  Description of Artificial Sequence: Synthetic oligonucleotide
  Target: LAMA2; (+) strand; PAM type: YTN; PAM sequence: TTT
gaaattgcattttacatttg

SEQ ID NO: 332721 - DNA, 20 bp, Artificial Sequence
  Description of Artificial Sequence: Synthetic oligonucleotide
  Target: LAMA2; (+) strand; PAM type: YTN; PAM sequence: TTG
aaattgcattttacatttgc

SEQ ID NO: 332722 - DNA, 20 bp, Artificial Sequence
  Description of Artificial Sequence: Synthetic oligonucleotide
  Target: LAMA2; (+) strand; PAM type: YTN; PAM sequence: TTG
cattttacatttgctatttg

SEQ ID NO: 332723 - DNA, 20 bp, Artificial Sequence
  Description of Artificial Sequence: Synthetic oligonucleotide
  Target: LAMA2; (+) strand; PAM type: YTN; PAM sequence: TTT
tacatttgctatttgtttag

SEQ ID NO: 332724 - DNA, 20 bp, Artificial Sequence
  Description of Artificial Sequence: Synthetic oligonucleotide
  Target: LAMA2; (+) strand; PAM type: YTN; PAM sequence: TTT
acatttgctatttgtttagt

SEQ ID NO: 332725 - DNA, 20 bp, Artificial Sequence
  Description of Artificial Sequence: Synthetic oligonucleotide
  Target: LAMA2; (+) strand; PAM type: YTN; PAM sequence: TTA
catttgctatttgtttagtt

SEQ ID NO: 332726 - DNA, 20 bp, Artificial Sequence
  Description of Artificial Sequence: Synthetic oligonucleotide
  Target: LAMA2; (+) strand; PAM type: YTN; PAM sequence: TTT
gctatttgtttagttagtgg

SEQ ID NO: 332727 - DNA, 20 bp, Artificial Sequence
  Description of Artificial Sequence: Synthetic oligonucleotide
  Target: LAMA2; (+) strand; PAM type: YTN; PAM sequence: TTG
ctatttgtttagttagtggt

SEQ ID NO: 332728 - DNA, 20 bp, Artificial Sequence
  Description of Artificial Sequence: Synthetic oligonucleotide
  Target: LAMA2; (+) strand; PAM type: YTN; PAM sequence: CTA
tttgtttagttagtggtttg

SEQ ID NO: 332729 - DNA, 20 bp, Artificial Sequence
  Description of Artificial Sequence: Synthetic oligonucleotide
  Target: LAMA2; (+) strand; PAM type: YTN; PAM sequence: TTT
gtttagttagtggtttgtgg

SEQ ID NO: 332730 - DNA, 20 bp, Artificial Sequence
  Description of Artificial Sequence: Synthetic oligonucleotide
  Target: LAMA2; (+) strand; PAM type: YTN; PAM sequence: TTG
tttagttagtggtttgtggg

SEQ ID NO: 332731 - DNA, 20 bp, Artificial Sequence
  Description of Artificial Sequence: Synthetic oligonucleotide
  Target: LAMA2; (+) strand; PAM type: YTN; PAM sequence: TTT
agttagtggtttgtgggtga

SEQ ID NO: 332732 - DNA, 20 bp, Artificial Sequence
  Description of Artificial Sequence: Synthetic oligonucleotide
  Target: LAMA2; (+) strand; PAM type: YTN; PAM sequence: TTA
gttagtggtttgtgggtgaa

SEQ ID NO: 332733 - DNA, 20 bp, Artificial Sequence
  Description of Artificial Sequence: Synthetic oligonucleotide
  Target: LAMA2; (+) strand; PAM type: YTN; PAM sequence: TTA
gtggtttgtgggtgaaagga

SEQ ID NO: 332734 - DNA, 20 bp, Artificial Sequence
  Description of Artificial Sequence: Synthetic oligonucleotide
  Target: LAMA2; (+) strand; PAM type: YTN; PAM sequence: TTT
gtgggtgaaaggatactctt

SEQ ID NO: 332735 - DNA, 20 bp, Artificial Sequence
  Description of Artificial Sequence: Synthetic oligonucleotide
  Target: LAMA2; (+) strand; PAM type: YTN; PAM sequence: TTG
tgggtgaaaggatactcttt

SEQ ID NO: 332736 - DNA, 20 bp, Artificial Sequence
  Description of Artificial Sequence: Synthetic oligonucleotide
  Target: LAMA2; (+) strand; PAM type: YTN; PAM sequence: CTC
tttcttatcactctccattg

SEQ ID NO: 332737 - DNA, 20 bp, Artificial Sequence
  Description of Artificial Sequence: Synthetic oligonucleotide
  Target: LAMA2; (+) strand; PAM type: YTN; PAM sequence: CTT
tcttatcactctccattgtt

SEQ ID NO: 332738 - DNA, 20 bp, Artificial Sequence
  Description of Artificial Sequence: Synthetic oligonucleotide
  Target: LAMA2; (+) strand; PAM type: YTN; PAM sequence: TTT
cttatcactctccattgttt

SEQ ID NO: 332739 - DNA, 20 bp, Artificial Sequence
  Description of Artificial Sequence: Synthetic oligonucleotide
  Target: LAMA2; (+) strand; PAM type: YTN; PAM sequence: TTC
ttatcactctccattgtttt

SEQ ID NO: 332740 - DNA, 20 bp, Artificial Sequence
  Description of Artificial Sequence: Synthetic oligonucleotide
  Target: LAMA2; (+) strand; PAM type: YTN; PAM sequence: CTT
atcactctccattgttttct

SEQ ID NO: 332741 - DNA, 20 bp, Artificial Sequence
  Description of Artificial Sequence: Synthetic oligonucleotide
  Target: LAMA2; (+) strand; PAM type: YTN; PAM sequence: TTA
tcactctccattgttttctt

SEQ ID NO: 332742 - DNA, 20 bp, Artificial Sequence
  Description of Artificial Sequence: Synthetic oligonucleotide
  Target: LAMA2; (+) strand; PAM type: YTN; PAM sequence: CTC
tccattgttttcttgataag

SEQ ID NO: 332743 - DNA, 20 bp, Artificial Sequence
  Description of Artificial Sequence: Synthetic oligonucleotide
  Target: LAMA2; (+) strand; PAM type: YTN; PAM sequence: CTC
cattgttttcttgataagat

SEQ ID NO: 332744 - DNA, 20 bp, Artificial Sequence
  Description of Artificial Sequence: Synthetic oligonucleotide
  Target: LAMA2; (+) strand; PAM type: YTN; PAM sequence: TTG
ttttcttgataagatgaaca

SEQ ID NO: 332745 - DNA, 20 bp, Artificial Sequence
  Description of Artificial Sequence: Synthetic oligonucleotide
  Target: LAMA2; (+) strand; PAM type: YTN; PAM sequence: TTT
tcttgataagatgaacaaag

SEQ ID NO: 332746 - DNA, 20 bp, Artificial Sequence
  Description of Artificial Sequence: Synthetic oligonucleotide
  Target: LAMA2; (+) strand; PAM type: YTN; PAM sequence: TTT
cttgataagatgaacaaagg

SEQ ID NO: 332747 - DNA, 20 bp, Artificial Sequence
  Description of Artificial Sequence: Synthetic oligonucleotide
  Target: LAMA2; (+) strand; PAM type: YTN; PAM sequence: TTC
ttgataagatgaacaaaggg

SEQ ID NO: 332748 - DNA, 20 bp, Artificial Sequence
  Description of Artificial Sequence: Synthetic oligonucleotide
  Target: LAMA2; (+) strand; PAM type: YTN; PAM sequence: CTT
gataagatgaacaaagggtc

SEQ ID NO: 332749 - DNA, 20 bp, Artificial Sequence
  Description of Artificial Sequence: Synthetic oligonucleotide
  Target: LAMA2; (+) strand; PAM type: YTN; PAM sequence: TTG
ataagatgaacaaagggtcc

SEQ ID NO: 332750 - DNA, 20 bp, Artificial Sequence
  Description of Artificial Sequence: Synthetic oligonucleotide
  Target: LAMA2; (+) strand; PAM type: YTN; PAM sequence: CTA
ttcatatagcgtattgttat

SEQ ID NO: 332751 - DNA, 20 bp, Artificial Sequence
  Description of Artificial Sequence: Synthetic oligonucleotide
  Target: LAMA2; (+) strand; PAM type: YTN; PAM sequence: TTC
atatagcgtattgttattta

SEQ ID NO: 332752 - DNA, 20 bp, Artificial Sequence
  Description of Artificial Sequence: Synthetic oligonucleotide
  Target: LAMA2; (+) strand; PAM type: YTN; PAM sequence: TTG
ttatttacgagtattcagca

SEQ ID NO: 332753 - DNA, 20 bp, Artificial Sequence
  Description of Artificial Sequence: Synthetic oligonucleotide
  Target: LAMA2; (+) strand; PAM type: YTN; PAM sequence: TTA
tttacgagtattcagcattt

SEQ ID NO: 332754 - DNA, 20 bp, Artificial Sequence
  Description of Artificial Sequence: Synthetic oligonucleotide
  Target: LAMA2; (+) strand; PAM type: YTN; PAM sequence: TTT
acgagtattcagcatttaat

SEQ ID NO: 332755 - DNA, 20 bp, Artificial Sequence
  Description of Artificial Sequence: Synthetic oligonucleotide
  Target: LAMA2; (+) strand; PAM type: YTN; PAM sequence: TTA
cgagtattcagcatttaatt

SEQ ID NO: 332756 - DNA, 20 bp, Artificial Sequence
  Description of Artificial Sequence: Synthetic oligonucleotide
  Target: LAMA2; (+) strand; PAM type: YTN; PAM sequence: TTC
agcatttaattataaagcac

SEQ ID NO: 332757 - DNA, 20 bp, Artificial Sequence
  Description of Artificial Sequence: Synthetic oligonucleotide
  Target: LAMA2; (+) strand; PAM type: YTN; PAM sequence: TTT
aattataaagcacaattcaa

SEQ ID NO: 332758 - DNA, 20 bp, Artificial Sequence
  Description of Artificial Sequence: Synthetic oligonucleotide
  Target: LAMA2; (+) strand; PAM type: YTN; PAM sequence: TTA
attataaagcacaattcaaa

SEQ ID NO: 332759 - DNA, 20 bp, Artificial Sequence
  Description of Artificial Sequence: Synthetic oligonucleotide
  Target: LAMA2; (+) strand; PAM type: YTN; PAM sequence: TTA
taaagcacaattcaaatgga

SEQ ID NO: 332760 - DNA, 20 bp, Artificial Sequence
  Description of Artificial Sequence: Synthetic oligonucleotide
  Target: LAMA2; (+) strand; PAM type: YTN; PAM sequence: TTC
aaatggaagcacgtgaagag

SEQ ID NO: 332761 - DNA, 20 bp, Artificial Sequence
  Description of Artificial Sequence: Synthetic oligonucleotide
  Target: LAMA2; (+) strand; PAM type: YTN; PAM sequence: CTT
agaaatgaattaggtgctaa

SEQ ID NO: 332762 - DNA, 20 bp, Artificial Sequence
  Description of Artificial Sequence: Synthetic oligonucleotide
  Target: LAMA2; (+) strand; PAM type: YTN; PAM sequence: TTA
gaaatgaattaggtgctaac

SEQ ID NO: 332763 - DNA, 20 bp, Artificial Sequence
  Description of Artificial Sequence: Synthetic oligonucleotide
  Target: LAMA2; (+) strand; PAM type: YTN; PAM sequence: TTA
ggtgctaactctgttttagc

SEQ ID NO: 332764 - DNA, 20 bp, Artificial Sequence
  Description of Artificial Sequence: Synthetic oligonucleotide
  Target: LAMA2; (+) strand; PAM type: YTN; PAM sequence: CTA
actctgttttagctagctgg

SEQ ID NO: 332765 - DNA, 20 bp, Artificial Sequence
  Description of Artificial Sequence: Synthetic oligonucleotide
  Target: LAMA2; (+) strand; PAM type: YTN; PAM sequence: CTC
tgttttagctagctggactt

SEQ ID NO: 332766 - DNA, 20 bp, Artificial Sequence
  Description of Artificial Sequence: Synthetic oligonucleotide
  Target: LAMA2; (+) strand; PAM type: YTN; PAM sequence: CTG
ttttagctagctggacttaa

SEQ ID NO: 332767 - DNA, 20 bp, Artificial Sequence
  Description of Artificial Sequence: Synthetic oligonucleotide
  Target: LAMA2; (+) strand; PAM type: YTN; PAM sequence: TTT
tagctagctggacttaatga

SEQ ID NO: 332768 - DNA, 20 bp, Artificial Sequence
  Description of Artificial Sequence: Synthetic oligonucleotide
  Target: LAMA2; (+) strand; PAM type: YTN; PAM sequence: TTT
agctagctggacttaatgat

SEQ ID NO: 332769 - DNA, 20 bp, Artificial Sequence
  Description of Artificial Sequence: Synthetic oligonucleotide
  Target: LAMA2; (+) strand; PAM type: YTN; PAM sequence: TTA
gctagctggacttaatgatg

SEQ ID NO: 332770 - DNA, 20 bp, Artificial Sequence
  Description of Artificial Sequence: Synthetic oligonucleotide
  Target: LAMA2; (+) strand; PAM type: YTN; PAM sequence: CTA
gctggacttaatgatgaaaa

SEQ ID NO: 332771 - DNA, 20 bp, Artificial Sequence
  Description of Artificial Sequence: Synthetic oligonucleotide
  Target: LAMA2; (+) strand; PAM type: YTN; PAM sequence: CTG
gacttaatgatgaaaatatg

SEQ ID NO: 332772 - DNA, 20 bp, Artificial Sequence
  Description of Artificial Sequence: Synthetic oligonucleotide
  Target: LAMA2; (+) strand; PAM type: YTN; PAM sequence: CTT
aatgatgaaaatatggatca

SEQ ID NO: 332773 - DNA, 20 bp, Artificial Sequence
  Description of Artificial Sequence: Synthetic oligonucleotide
  Target: LAMA2; (+) strand; PAM type: YTN; PAM sequence: TTA
atgatgaaaatatggatcaa

SEQ ID NO: 332774 - DNA, 20 bp, Artificial Sequence
  Description of Artificial Sequence: Synthetic oligonucleotide
  Target: LAMA2; (+) strand; PAM type: YTN; PAM sequence: TTT
tacataacaaaaatataata

SEQ ID NO: 332775 - DNA, 20 bp, Artificial Sequence
  Description of Artificial Sequence: Synthetic oligonucleotide
  Target: LAMA2; (+) strand; PAM type: YTN; PAM sequence: TTT
acataacaaaaatataatag

SEQ ID NO: 332776 - DNA, 20 bp, Artificial Sequence
  Description of Artificial Sequence: Synthetic oligonucleotide
  Target: LAMA2; (+) strand; PAM type: YTN; PAM sequence: TTA
cataacaaaaatataatagt

SEQ ID NO: 332777 - DNA, 20 bp, Artificial Sequence
  Description of Artificial Sequence: Synthetic oligonucleotide
  Target: LAMA2; (+) strand; PAM type: YTN; PAM sequence: TTT
ttaacttttaaaataataca

SEQ ID NO: 332778 - DNA, 20 bp, Artificial Sequence
  Description of Artificial Sequence: Synthetic oligonucleotide
  Target: LAMA2; (+) strand; PAM type: YTN; PAM sequence: TTT
taacttttaaaataatacat

SEQ ID NO: 332779 - DNA, 20 bp, Artificial Sequence
  Description of Artificial Sequence: Synthetic oligonucleotide
  Target: LAMA2; (+) strand; PAM type: YTN; PAM sequence: TTT
aacttttaaaataatacatt

SEQ ID NO: 332780 - DNA, 20 bp, Artificial Sequence
  Description of Artificial Sequence: Synthetic oligonucleotide
  Target: LAMA2; (+) strand; PAM type: YTN; PAM sequence: TTA
acttttaaaataatacattg

SEQ ID NO: 332781 - DNA, 20 bp, Artificial Sequence
  Description of Artificial Sequence: Synthetic oligonucleotide
  Target: LAMA2; (+) strand; PAM type: YTN; PAM sequence: CTT
ttaaaataatacattgctcc

SEQ ID NO: 332782 - DNA, 20 bp, Artificial Sequence
  Description of Artificial Sequence: Synthetic oligonucleotide
  Target: LAMA2; (+) strand; PAM type: YTN; PAM sequence: TTT
taaaataatacattgctccc

SEQ ID NO: 332783 - DNA, 20 bp, Artificial Sequence
  Description of Artificial Sequence: Synthetic oligonucleotide
  Target: LAMA2; (+) strand; PAM type: YTN; PAM sequence: TTT
aaaataatacattgctccca

SEQ ID NO: 332784 - DNA, 20 bp, Artificial Sequence
  Description of Artificial Sequence: Synthetic oligonucleotide
  Target: LAMA2; (+) strand; PAM type: YTN; PAM sequence: TTA
aaataatacattgctcccac

SEQ ID NO: 332785 - DNA, 20 bp, Artificial Sequence
  Description of Artificial Sequence: Synthetic oligonucleotide
  Target: LAMA2; (+) strand; PAM type: YTN; PAM sequence: TTG
ctcccactgtgctgatggtg

SEQ ID NO: 332786 - DNA, 20 bp, Artificial Sequence
  Description of Artificial Sequence: Synthetic oligonucleotide
  Target: LAMA2; (+) strand; PAM type: YTN; PAM sequence: CTC
ccactgtgctgatggtgtgt

SEQ ID NO: 332787 - DNA, 20 bp, Artificial Sequence
  Description of Artificial Sequence: Synthetic oligonucleotide
  Target: LAMA2; (+) strand; PAM type: YTN; PAM sequence: CTG
tgctgatggtgtgtgcactt

SEQ ID NO: 332788 - DNA, 20 bp, Artificial Sequence
  Description of Artificial Sequence: Synthetic oligonucleotide
  Target: LAMA2; (+) strand; PAM type: YTN; PAM sequence: CTG
atggtgtgtgcacttaaagg

SEQ ID NO: 332789 - DNA, 20 bp, Artificial Sequence
  Description of Artificial Sequence: Synthetic oligonucleotide
  Target: LAMA2; (+) strand; PAM type: YTN; PAM sequence: CTT
aaaggttcttggataacaag

SEQ ID NO: 332790 - DNA, 20 bp, Artificial Sequence
  Description of Artificial Sequence: Synthetic oligonucleotide
  Target: LAMA2; (+) strand; PAM type: YTN; PAM sequence: TTA
aaggttcttggataacaagg

SEQ ID NO: 332791 - DNA, 20 bp, Artificial Sequence
  Description of Artificial Sequence: Synthetic oligonucleotide
  Target: LAMA2; (+) strand; PAM type: YTN; PAM sequence: TTC
ttggataacaaggctcttga

SEQ ID NO: 332792 - DNA, 20 bp, Artificial Sequence
  Description of Artificial Sequence: Synthetic oligonucleotide
  Target: LAMA2; (+) strand; PAM type: YTN; PAM sequence: CTT
ggataacaaggctcttgagc

SEQ ID NO: 332793 - DNA, 20 bp, Artificial Sequence
  Description of Artificial Sequence: Synthetic oligonucleotide
  Target: LAMA2; (+) strand; PAM type: YTN; PAM sequence: TTG
gataacaaggctcttgagca

SEQ ID NO: 332794 - DNA, 20 bp, Artificial Sequence
  Description of Artificial Sequence: Synthetic oligonucleotide
  Target: LAMA2; (+) strand; PAM type: YTN; PAM sequence: CTC
ttgagcaaattgcctctcat

SEQ ID NO: 332795 - DNA, 20 bp, Artificial Sequence
  Description of Artificial Sequence: Synthetic oligonucleotide
  Target: LAMA2; (+) strand; PAM type: YTN; PAM sequence: CTT
gagcaaattgcctctcatta

SEQ ID NO: 332796 - DNA, 20 bp, Artificial Sequence
  Description of Artificial Sequence: Synthetic oligonucleotide
  Target: LAMA2; (+) strand; PAM type: YTN; PAM sequence: TTG
agcaaattgcctctcattac

SEQ ID NO: 332797 - DNA, 20 bp, Artificial Sequence
  Description of Artificial Sequence: Synthetic oligonucleotide
  Target: LAMA2; (+) strand; PAM type: YTN; PAM sequence: TTG
cctctcattactgagagctg

SEQ ID NO: 332798 - DNA, 20 bp, Artificial Sequence
  Description of Artificial Sequence: Synthetic oligonucleotide
  Target: LAMA2; (+) strand; PAM type: YTN; PAM sequence: CTC
tcattactgagagctgagaa

SEQ ID NO: 332799 - DNA, 20 bp, Artificial Sequence
  Description of Artificial Sequence: Synthetic oligonucleotide
  Target: LAMA2; (+) strand; PAM type: YTN; PAM sequence: CTC
attactgagagctgagaaag

SEQ ID NO: 332800 - DNA, 20 bp, Artificial Sequence
  Description of Artificial Sequence: Synthetic oligonucleotide
  Target: LAMA2; (+) strand; PAM type: YTN; PAM sequence: TTA
ctgagagctgagaaagtttt

SEQ ID NO: 332801 - DNA, 20 bp, Artificial Sequence
  Description of Artificial Sequence: Synthetic oligonucleotide
  Target: LAMA2; (+) strand; PAM type: YTN; PAM sequence: CTG
agagctgagaaagttttgac

SEQ ID NO: 332802 - DNA, 20 bp, Artificial Sequence
  Description of Artificial Sequence: Synthetic oligonucleotide
  Target: LAMA2; (+) strand; PAM type: YTN; PAM sequence: CTG
agaaagttttgacagttgct

SEQ ID NO: 332803 - DNA, 20 bp, Artificial Sequence
  Description of Artificial Sequence: Synthetic oligonucleotide
  Target: LAMA2; (+) strand; PAM type: YTN; PAM sequence: TTT
tgacagttgctttcaagtta

SEQ ID NO: 332804 - DNA, 20 bp, Artificial Sequence
  Description of Artificial Sequence: Synthetic oligonucleotide
  Target: LAMA2; (+) strand; PAM type: YTN; PAM sequence: TTT
gacagttgctttcaagttaa

SEQ ID NO: 332805 - DNA, 20 bp, Artificial Sequence
  Description of Artificial Sequence: Synthetic oligonucleotide
  Target: LAMA2; (+) strand; PAM type: YTN; PAM sequence: TTG
acagttgctttcaagttaaa

SEQ ID NO: 332806 - DNA, 20 bp, Artificial Sequence
  Description of Artificial Sequence: Synthetic oligonucleotide
  Target: LAMA2; (+) strand; PAM type: YTN; PAM sequence: TTG
ctttcaagttaaacttgggt

SEQ ID NO: 332807 - DNA, 20 bp, Artificial Sequence
  Description of Artificial Sequence: Synthetic oligonucleotide
  Target: LAMA2; (+) strand; PAM type: YTN; PAM sequence: CTT
tcaagttaaacttgggtgac

SEQ ID NO: 332808 - DNA, 20 bp, Artificial Sequence
  Description of Artificial Sequence: Synthetic oligonucleotide
  Target: LAMA2; (+) strand; PAM type: YTN; PAM sequence: TTT
caagttaaacttgggtgact

SEQ ID NO: 332809 - DNA, 20 bp, Artificial Sequence
  Description of Artificial Sequence: Synthetic oligonucleotide
  Target: LAMA2; (+) strand; PAM type: YTN; PAM sequence: TTC
aagttaaacttgggtgacta

SEQ ID NO: 332810 - DNA, 20 bp, Artificial Sequence
  Description of Artificial Sequence: Synthetic oligonucleotide
  Target: LAMA2; (+) strand; PAM type: YTN; PAM sequence: TTA
aacttgggtgactaaatgaa

SEQ ID NO: 332811 - DNA, 20 bp, Artificial Sequence
  Description of Artificial Sequence: Synthetic oligonucleotide
  Target: LAMA2; (+) strand; PAM type: YTN; PAM sequence: CTT
gggtgactaaatgaagtaac

SEQ ID NO: 332812 - DNA, 20 bp, Artificial Sequence
  Description of Artificial Sequence: Synthetic oligonucleotide
  Target: LAMA2; (+) strand; PAM type: YTN; PAM sequence: TTG
ggtgactaaatgaagtaaca

SEQ ID NO: 332813 - DNA, 20 bp, Artificial Sequence
  Description of Artificial Sequence: Synthetic oligonucleotide
  Target: LAMA2; (+) strand; PAM type: YTN; PAM sequence: CTA
aatgaagtaacaagctttgt

SEQ ID NO: 332814 - DNA, 20 bp, Artificial Sequence
  Description of Artificial Sequence: Synthetic oligonucleotide
  Target: LAMA2; (+) strand; PAM type: YTN; PAM sequence: CTT
tgtagttatacaaaattgat

SEQ ID NO: 332815 - DNA, 20 bp, Artificial Sequence
  Description of Artificial Sequence: Synthetic oligonucleotide
  Target: LAMA2; (+) strand; PAM type: YTN; PAM sequence: TTT
gtagttatacaaaattgatg

SEQ ID NO: 332816 - DNA, 20 bp, Artificial Sequence
  Description of Artificial Sequence: Synthetic oligonucleotide
  Target: LAMA2; (+) strand; PAM type: YTN; PAM sequence: TTG
tagttatacaaaattgatgc

SEQ ID NO: 332817 - DNA, 20 bp, Artificial Sequence
  Description of Artificial Sequence: Synthetic oligonucleotide
  Target: LAMA2; (+) strand; PAM type: YTN; PAM sequence: TTA
tacaaaattgatgccggaag

SEQ ID NO: 332818 - DNA, 20 bp, Artificial Sequence
  Description of Artificial Sequence: Synthetic oligonucleotide
  Target: LAMA2; (+) strand; PAM type: YTN; PAM sequence: TTG
atgccggaagttgttcaagt

SEQ ID NO: 332819 - DNA, 20 bp, Artificial Sequence
  Description of Artificial Sequence: Synthetic oligonucleotide
  Target: LAMA2; (+) strand; PAM type: YTN; PAM sequence: TTG
ttcaagtttgtcttgcatag

SEQ ID NO: 332820 - DNA, 20 bp, Artificial Sequence
  Description of Artificial Sequence: Synthetic oligonucleotide
  Target: LAMA2; (+) strand; PAM type: YTN; PAM sequence: TTC
aagtttgtcttgcataggcc

SEQ ID NO: 332821 - DNA, 20 bp, Artificial Sequence
  Description of Artificial Sequence: Synthetic oligonucleotide
  Target: LAMA2; (+) strand; PAM type: YTN; PAM sequence: TTT
gtcttgcataggcctgggtg

SEQ ID NO: 332822 - DNA, 20 bp, Artificial Sequence
  Description of Artificial Sequence: Synthetic oligonucleotide
  Target: LAMA2; (+) strand; PAM type: YTN; PAM sequence: TTG
tcttgcataggcctgggtgc

SEQ ID NO: 332823 - DNA, 20 bp, Artificial Sequence
  Description of Artificial Sequence: Synthetic oligonucleotide
  Target: LAMA2; (+) strand; PAM type: YTN; PAM sequence: CTT
gcataggcctgggtgccttc

SEQ ID NO: 332824 - DNA, 20 bp, Artificial Sequence
  Description of Artificial Sequence: Synthetic oligonucleotide
  Target: LAMA2; (+) strand; PAM type: YTN; PAM sequence: TTG
cataggcctgggtgccttct

SEQ ID NO: 332825 - DNA, 20 bp, Artificial Sequence
  Description of Artificial Sequence: Synthetic oligonucleotide
  Target: LAMA2; (+) strand; PAM type: YTN; PAM sequence: CTG
ggtgccttctatgcttaatc

SEQ ID NO: 332826 - DNA, 20 bp, Artificial Sequence
  Description of Artificial Sequence: Synthetic oligonucleotide
  Target: LAMA2; (+) strand; PAM type: YTN; PAM sequence: CTT
ctatgcttaatctctttctt

SEQ ID NO: 332827 - DNA, 20 bp, Artificial Sequence
  Description of Artificial Sequence: Synthetic oligonucleotide
  Target: LAMA2; (+) strand; PAM type: YTN; PAM sequence: TTC
tatgcttaatctctttcttc

SEQ ID NO: 332828 - DNA, 20 bp, Artificial Sequence
  Description of Artificial Sequence: Synthetic oligonucleotide
  Target: LAMA2; (+) strand; PAM type: YTN; PAM sequence: CTA
tgcttaatctctttcttcct

SEQ ID NO: 332829 - DNA, 20 bp, Artificial Sequence
  Description of Artificial Sequence: Synthetic oligonucleotide
  Target: LAMA2; (+) strand; PAM type: YTN; PAM sequence: CTT
aatctctttcttccttctct

SEQ ID NO: 332830 - DNA, 20 bp, Artificial Sequence
  Description of Artificial Sequence: Synthetic oligonucleotide
  Target: LAMA2; (+) strand; PAM type: YTN; PAM sequence: TTA
atctctttcttccttctctt

SEQ ID NO: 332831 - DNA, 20 bp, Artificial Sequence
  Description of Artificial Sequence: Synthetic oligonucleotide
  Target: LAMA2; (+) strand; PAM type: YTN; PAM sequence: CTC
tttcttccttctcttcacaa

SEQ ID NO: 332832 - DNA, 20 bp, Artificial Sequence
  Description of Artificial Sequence: Synthetic oligonucleotide
  Target: LAMA2; (+) strand; PAM type: YTN; PAM sequence: CTT
tcttccttctcttcacaata

SEQ ID NO: 332833 - DNA, 20 bp, Artificial Sequence
  Description of Artificial Sequence: Synthetic oligonucleotide
  Target: LAMA2; (+) strand; PAM type: YTN; PAM sequence: TTT
cttccttctcttcacaatat

SEQ ID NO: 332834 - DNA, 20 bp, Artificial Sequence
  Description of Artificial Sequence: Synthetic oligonucleotide
  Target: LAMA2; (+) strand; PAM type: YTN; PAM sequence: TTC
ttccttctcttcacaatatt

SEQ ID NO: 332835 - DNA, 20 bp, Artificial Sequence
  Description of Artificial Sequence: Synthetic oligonucleotide
  Target: LAMA2; (+) strand; PAM type: YTN; PAM sequence: CTT
ccttctcttcacaatattca

SEQ ID NO: 332836 - DNA, 20 bp, Artificial Sequence
  Description of Artificial Sequence: Synthetic oligonucleotide
  Target: LAMA2; (+) strand; PAM type: YTN; PAM sequence: TTC
cttctcttcacaatattcag

SEQ ID NO: 332837 - DNA, 20 bp, Artificial Sequence
  Description of Artificial Sequence: Synthetic oligonucleotide
  Target: LAMA2; (+) strand; PAM type: YTN; PAM sequence: CTT
ctcttcacaatattcaggtc

SEQ ID NO: 332838 - DNA, 20 bp, Artificial Sequence
  Description of Artificial Sequence: Synthetic oligonucleotide
  Target: LAMA2; (+) strand; PAM type: YTN; PAM sequence: TTC
tcttcacaatattcaggtca

SEQ ID NO: 332839 - DNA, 20 bp, Artificial Sequence
  Description of Artificial Sequence: Synthetic oligonucleotide
  Target: LAMA2; (+) strand; PAM type: YTN; PAM sequence: CTC
ttcacaatattcaggtcagg

SEQ ID NO: 332840 - DNA, 20 bp, Artificial Sequence
  Description of Artificial Sequence: Synthetic oligonucleotide
  Target: LAMA2; (+) strand; PAM type: YTN; PAM sequence: CTT
cacaatattcaggtcaggct

SEQ ID NO: 332841 - DNA, 20 bp, Artificial Sequence
  Description of Artificial Sequence: Synthetic oligonucleotide
  Target: LAMA2; (+) strand; PAM type: YTN; PAM sequence: TTC
acaatattcaggtcaggctg

SEQ ID NO: 332842 - DNA, 20 bp, Artificial Sequence
  Description of Artificial Sequence: Synthetic oligonucleotide
  Target: LAMA2; (+) strand; PAM type: YTN; PAM sequence: TTC
aggtcaggctgaagttatta

SEQ ID NO: 332843 - DNA, 20 bp, Artificial Sequence
  Description of Artificial Sequence: Synthetic oligonucleotide
  Target: LAMA2; (+) strand; PAM type: YTN; PAM sequence: CTG
aagttattaatcaggaatcg

SEQ ID NO: 332844 - DNA, 20 bp, Artificial Sequence
  Description of Artificial Sequence: Synthetic oligonucleotide
  Target: LAMA2; (+) strand; PAM type: YTN; PAM sequence: TTA
ttaatcaggaatcgccagca

SEQ ID NO: 332845 - DNA, 20 bp, Artificial Sequence
  Description of Artificial Sequence: Synthetic oligonucleotide
  Target: LAMA2; (+) strand; PAM type: YTN; PAM sequence: TTA
atcaggaatcgccagcacct

SEQ ID NO: 332846 - DNA, 20 bp, Artificial Sequence
  Description of Artificial Sequence: Synthetic oligonucleotide
  Target: LAMA2; (+) strand; PAM type: YTN; PAM sequence: CTC
aaattatttaggcttgcaat

SEQ ID NO: 332847 - DNA, 20 bp, Artificial Sequence
  Description of Artificial Sequence: Synthetic oligonucleotide
  Target: LAMA2; (+) strand; PAM type: YTN; PAM sequence: TTA
tttaggcttgcaattaggat

SEQ ID NO: 332848 - DNA, 20 bp, Artificial Sequence
  Description of Artificial Sequence: Synthetic oligonucleotide
  Target: LAMA2; (+) strand; PAM type: YTN; PAM sequence: TTT
aggcttgcaattaggatgga

SEQ ID NO: 332849 - DNA, 20 bp, Artificial Sequence
  Description of Artificial Sequence: Synthetic oligonucleotide
  Target: LAMA2; (+) strand; PAM type: YTN; PAM sequence: TTA
ggcttgcaattaggatggaa

SEQ ID NO: 332850 - DNA, 20 bp, Artificial Sequence
  Description of Artificial Sequence: Synthetic oligonucleotide
  Target: LAMA2; (+) strand; PAM type: YTN; PAM sequence: CTT
gcaattaggatggaaagtgg

SEQ ID NO: 332851 - DNA, 20 bp, Artificial Sequence
  Description of Artificial Sequence: Synthetic oligonucleotide
  Target: LAMA2; (+) strand; PAM type: YTN; PAM sequence: TTG
caattaggatggaaagtgga

SEQ ID NO: 332852 - DNA, 20 bp, Artificial Sequence
  Description of Artificial Sequence: Synthetic oligonucleotide
  Target: LAMA2; (+) strand; PAM type: YTN; PAM sequence: TTA
ggatggaaagtggacaaatg

SEQ ID NO: 332853 - DNA, 20 bp, Artificial Sequence
  Description of Artificial Sequence: Synthetic oligonucleotide
  Target: LAMA2; (+) strand; PAM type: YTN; PAM sequence: TTC
catcctatttgtatgcctaa

SEQ ID NO: 332854 - DNA, 20 bp, Artificial Sequence
  Description of Artificial Sequence: Synthetic oligonucleotide
  Target: LAMA2; (+) strand; PAM type: YTN; PAM sequence: CTA
tttgtatgcctaaataatgt

SEQ ID NO: 332855 - DNA, 20 bp, Artificial Sequence
  Description of Artificial Sequence: Synthetic oligonucleotide
  Target: LAMA2; (+) strand; PAM type: YTN; PAM sequence: TTT
gtatgcctaaataatgtgca

SEQ ID NO: 332856 - DNA, 20 bp, Artificial Sequence
  Description of Artificial Sequence: Synthetic oligonucleotide
  Target: LAMA2; (+) strand; PAM type: YTN; PAM sequence: TTG
tatgcctaaataatgtgcag

SEQ ID NO: 332857 - DNA, 20 bp, Artificial Sequence
  Description of Artificial Sequence: Synthetic oligonucleotide
  Target: LAMA2; (+) strand; PAM type: YTN; PAM sequence: CTA
aataatgtgcaggggtgatg

SEQ ID NO: 332858 - DNA, 20 bp, Artificial Sequence
  Description of Artificial Sequence: Synthetic oligonucleotide
  Target: LAMA2; (+) strand; PAM type: YTN; PAM sequence: TTA
atgacagacaccatacactg

SEQ ID NO: 332859 - DNA, 20 bp, Artificial Sequence
  Description of Artificial Sequence: Synthetic oligonucleotide
  Target: LAMA2; (+) strand; PAM type: YTN; PAM sequence: CTG
taaaggtcatggtttttata

SEQ ID NO: 332860 - DNA, 20 bp, Artificial Sequence
  Description of Artificial Sequence: Synthetic oligonucleotide
  Target: LAMA2; (+) strand; PAM type: YTN; PAM sequence: TTT
ttataagttatcactgtgtg

SEQ ID NO: 332861 - DNA, 20 bp, Artificial Sequence
  Description of Artificial Sequence: Synthetic oligonucleotide
  Target: LAMA2; (+) strand; PAM type: YTN; PAM sequence: TTT
tataagttatcactgtgtgg

SEQ ID NO: 332862 - DNA, 20 bp, Artificial Sequence
  Description of Artificial Sequence: Synthetic oligonucleotide
  Target: LAMA2; (+) strand; PAM type: YTN; PAM sequence: TTT
ataagttatcactgtgtggg

SEQ ID NO: 332863 - DNA, 20 bp, Artificial Sequence
  Description of Artificial Sequence: Synthetic oligonucleotide
  Target: LAMA2; (+) strand; PAM type: YTN; PAM sequence: TTA
taagttatcactgtgtgggg

SEQ ID NO: 332864 - DNA, 20 bp, Artificial Sequence
  Description of Artificial Sequence: Synthetic oligonucleotide
  Target: LAMA2; (+) strand; PAM type: YTN; PAM sequence: TTA
tcactgtgtggggaagcccc

SEQ ID NO: 332865 - DNA, 20 bp, Artificial Sequence
  Description of Artificial Sequence: Synthetic oligonucleotide
  Target: LAMA2; (+) strand; PAM type: YTN; PAM sequence: CTG
tgtggggaagcccccagcca

SEQ ID NO: 332866 - DNA, 20 bp, Artificial Sequence
  Description of Artificial Sequence: Synthetic oligonucleotide
  Target: LAMA2; (+) strand; PAM type: YTN; PAM sequence: TTT
tcctaatggatgccatttgc

SEQ ID NO: 332867 - DNA, 20 bp, Artificial Sequence
  Description of Artificial Sequence: Synthetic oligonucleotide
  Target: LAMA2; (+) strand; PAM type: YTN; PAM sequence: TTT
cctaatggatgccatttgcc

SEQ ID NO: 332868 - DNA, 20 bp, Artificial Sequence
  Description of Artificial Sequence: Synthetic oligonucleotide
  Target: LAMA2; (+) strand; PAM type: YTN; PAM sequence: TTC
ctaatggatgccatttgcca

SEQ ID NO: 332869 - DNA, 20 bp, Artificial Sequence
  Description of Artificial Sequence: Synthetic oligonucleotide
  Target: LAMA2; (+) strand; PAM type: YTN; PAM sequence: CTA
atggatgccatttgccacca

SEQ ID NO: 332870 - DNA, 20 bp, Artificial Sequence
  Description of Artificial Sequence: Synthetic oligonucleotide
  Target: LAMA2; (+) strand; PAM type: YTN; PAM sequence: TTT
gccaccagcatgagtacaat

SEQ ID NO: 332871 - DNA, 20 bp, Artificial Sequence
  Description of Artificial Sequence: Synthetic oligonucleotide
  Target: LAMA2; (+) strand; PAM type: YTN; PAM sequence: TTG
ccaccagcatgagtacaatc

SEQ ID NO: 332872 - DNA, 20 bp, Artificial Sequence
  Description of Artificial Sequence: Synthetic oligonucleotide
  Target: LAMA2; (+) strand; PAM type: YTN; PAM sequence: CTC
cctcctccagtgtctaggtt

SEQ ID NO: 332873 - DNA, 20 bp, Artificial Sequence
  Description of Artificial Sequence: Synthetic oligonucleotide
  Target: LAMA2; (+) strand; PAM type: YTN; PAM sequence: CTC
ctccagtgtctaggttcatt

SEQ ID NO: 332874 - DNA, 20 bp, Artificial Sequence
  Description of Artificial Sequence: Synthetic oligonucleotide
  Target: LAMA2; (+) strand; PAM type: YTN; PAM sequence: CTC
cagtgtctaggttcattttg

SEQ ID NO: 332875 - DNA, 20 bp, Artificial Sequence
  Description of Artificial Sequence: Synthetic oligonucleotide
  Target: LAMA2; (+) strand; PAM type: YTN; PAM sequence: CTA
ggttcattttggtgagggct

SEQ ID NO: 332876 - DNA, 20 bp, Artificial Sequence
  Description of Artificial Sequence: Synthetic oligonucleotide
  Target: LAMA2; (+) strand; PAM type: YTN; PAM sequence: TTC
attttggtgagggctgcata

SEQ ID NO: 332877 - DNA, 20 bp, Artificial Sequence
  Description of Artificial Sequence: Synthetic oligonucleotide
  Target: LAMA2; (+) strand; PAM type: YTN; PAM sequence: TTT
tggtgagggctgcatatatt

SEQ ID NO: 332878 - DNA, 20 bp, Artificial Sequence
  Description of Artificial Sequence: Synthetic oligonucleotide
  Target: LAMA2; (+) strand; PAM type: YTN; PAM sequence: TTT
ggtgagggctgcatatattc

SEQ ID NO: 332879 - DNA, 20 bp, Artificial Sequence
  Description of Artificial Sequence: Synthetic oligonucleotide
  Target: LAMA2; (+) strand; PAM type: YTN; PAM sequence: TTG
gtgagggctgcatatattca

SEQ ID NO: 332880 - DNA, 20 bp, Artificial Sequence
  Description of Artificial Sequence: Synthetic oligonucleotide
  Target: LAMA2; (+) strand; PAM type: YTN; PAM sequence: CTG
catatattcaagagccacag

SEQ ID NO: 332881 - DNA, 20 bp, Artificial Sequence
  Description of Artificial Sequence: Synthetic oligonucleotide
  Target: LAMA2; (+) strand; PAM type: YTN; PAM sequence: TTC
aagagccacagaaagctggc

SEQ ID NO: 332882 - DNA, 20 bp, Artificial Sequence
  Description of Artificial Sequence: Synthetic oligonucleotide
  Target: LAMA2; (+) strand; PAM type: YTN; PAM sequence: CTG
gctggagcaaacaagctggt

SEQ ID NO: 332883 - DNA, 20 bp, Artificial Sequence
  Description of Artificial Sequence: Synthetic oligonucleotide
  Target: LAMA2; (+) strand; PAM type: YTN; PAM sequence: CTG
gagcaaacaagctggtggat

SEQ ID NO: 332884 - DNA, 20 bp, Artificial Sequence
  Description of Artificial Sequence: Synthetic oligonucleotide
  Target: LAMA2; (+) strand; PAM type: YTN; PAM sequence: CTG
gtggattgcacggtagacct

SEQ ID NO: 332885 - DNA, 20 bp, Artificial Sequence
  Description of Artificial Sequence: Synthetic oligonucleotide
  Target: LAMA2; (+) strand; PAM type: YTN; PAM sequence: TTG
cacggtagacctgccttcca

SEQ ID NO: 332886 - DNA, 20 bp, Artificial Sequence
  Description of Artificial Sequence: Synthetic oligonucleotide
  Target: LAMA2; (+) strand; PAM type: YTN; PAM sequence: CTG
ccttccacccatatgggcct

SEQ ID NO: 332887 - DNA, 20 bp, Artificial Sequence
  Description of Artificial Sequence: Synthetic oligonucleotide
  Target: LAMA2; (+) strand; PAM type: YTN; PAM sequence: CTT
ccacccatatgggcctcctc

SEQ ID NO: 332888 - DNA, 20 bp, Artificial Sequence
  Description of Artificial Sequence: Synthetic oligonucleotide
  Target: LAMA2; (+) strand; PAM type: YTN; PAM sequence: TTC
cacccatatgggcctcctcg

SEQ ID NO: 332889 - DNA, 20 bp, Artificial Sequence
  Description of Artificial Sequence: Synthetic oligonucleotide
  Target: LAMA2; (+) strand; PAM type: YTN; PAM sequence: CTC
ctcgggatatgaggaactgg

SEQ ID NO: 332890 - DNA, 20 bp, Artificial Sequence
  Description of Artificial Sequence: Synthetic oligonucleotide
  Target: LAMA2; (+) strand; PAM type: YTN; PAM sequence: CTC
gggatatgaggaactggtgg

SEQ ID NO: 332891 - DNA, 20 bp, Artificial Sequence
  Description of Artificial Sequence: Synthetic oligonucleotide
  Target: LAMA2; (+) strand; PAM type: YTN; PAM sequence: CTG
gtggcggcaggggctcagtg

SEQ ID NO: 332892 - DNA, 20 bp, Artificial Sequence
  Description of Artificial Sequence: Synthetic oligonucleotide
  Target: LAMA2; (+) strand; PAM type: YTN; PAM sequence: CTC
agtgctgcagcttatatcac

SEQ ID NO: 332893 - DNA, 20 bp, Artificial Sequence
  Description of Artificial Sequence: Synthetic oligonucleotide
  Target: LAMA2; (+) strand; PAM type: YTN; PAM sequence: CTG
cagcttatatcaccaaatgg

SEQ ID NO: 332894 - DNA, 20 bp, Artificial Sequence
  Description of Artificial Sequence: Synthetic oligonucleotide
  Target: LAMA2; (+) strand; PAM type: YTN; PAM sequence: CTT
atatcaccaaatggcatgga

SEQ ID NO: 332895 - DNA, 20 bp, Artificial Sequence
  Description of Artificial Sequence: Synthetic oligonucleotide
  Target: LAMA2; (+) strand; PAM type: YTN; PAM sequence: TTA
tatcaccaaatggcatggac

SEQ ID NO: 332896 - DNA, 20 bp, Artificial Sequence
  Description of Artificial Sequence: Synthetic oligonucleotide
  Target: LAMA2; (+) strand; PAM type: YTN; PAM sequence: CTT
atttctaccctcactaatat

SEQ ID NO: 332897 - DNA, 20 bp, Artificial Sequence
  Description of Artificial Sequence: Synthetic oligonucleotide
  Target: LAMA2; (+) strand; PAM type: YTN; PAM sequence: TTA
tttctaccctcactaatata

SEQ ID NO: 332898 - DNA, 20 bp, Artificial Sequence
  Description of Artificial Sequence: Synthetic oligonucleotide
  Target: LAMA2; (+) strand; PAM type: YTN; PAM sequence: TTT
ctaccctcactaatatacag

SEQ ID NO: 332899 - DNA, 20 bp, Artificial Sequence
  Description of Artificial Sequence: Synthetic oligonucleotide
  Target: LAMA2; (+) strand; PAM type: YTN; PAM sequence: TTC
taccctcactaatatacagc

SEQ ID NO: 332900 - DNA, 20 bp, Artificial Sequence
  Description of Artificial Sequence: Synthetic oligonucleotide
  Target: LAMA2; (+) strand; PAM type: YTN; PAM sequence: CTA
ccctcactaatatacagcag

SEQ ID NO: 332901 - DNA, 20 bp, Artificial Sequence
  Description of Artificial Sequence: Synthetic oligonucleotide
  Target: LAMA2; (+) strand; PAM type: YTN; PAM sequence: CTC
actaatatacagcagctgaa

SEQ ID NO: 332902 - DNA, 20 bp, Artificial Sequence
  Description of Artificial Sequence: Synthetic oligonucleotide
  Target: LAMA2; (+) strand; PAM type: YTN; PAM sequence: CTA
atatacagcagctgaatgtc

SEQ ID NO: 332903 - DNA, 20 bp, Artificial Sequence
  Description of Artificial Sequence: Synthetic oligonucleotide
  Target: LAMA2; (+) strand; PAM type: YTN; PAM sequence: CTG
aatgtcagtcctgagttaat

SEQ ID NO: 332904 - DNA, 20 bp, Artificial Sequence
  Description of Artificial Sequence: Synthetic oligonucleotide
  Target: LAMA2; (+) strand; PAM type: YTN; PAM sequence: CTG
agttaataatatttctcagg

SEQ ID NO: 332905 - DNA, 20 bp, Artificial Sequence
  Description of Artificial Sequence: Synthetic oligonucleotide
  Target: LAMA2; (+) strand; PAM type: YTN; PAM sequence: TTA
ataatatttctcaggaagtc

SEQ ID NO: 332906 - DNA, 20 bp, Artificial Sequence
  Description of Artificial Sequence: Synthetic oligonucleotide
  Target: LAMA2; (+) strand; PAM type: YTN; PAM sequence: TTT
ctcaggaagtctcagagcac

SEQ ID NO: 332907 - DNA, 20 bp, Artificial Sequence
  Description of Artificial Sequence: Synthetic oligonucleotide
  Target: LAMA2; (+) strand; PAM type: YTN; PAM sequence: TTC
tcaggaagtctcagagcact

SEQ ID NO: 332908 - DNA, 20 bp, Artificial Sequence
  Description of Artificial Sequence: Synthetic oligonucleotide
  Target: LAMA2; (+) strand; PAM type: YTN; PAM sequence: CTC
aggaagtctcagagcactat

SEQ ID NO: 332909 - DNA, 20 bp, Artificial Sequence
  Description of Artificial Sequence: Synthetic oligonucleotide
  Target: LAMA2; (+) strand; PAM type: YTN; PAM sequence: CTC
agagcactatcagagaatgg

SEQ ID NO: 332910 - DNA, 20 bp, Artificial Sequence
  Description of Artificial Sequence: Synthetic oligonucleotide
  Target: LAMA2; (+) strand; PAM type: YTN; PAM sequence: CTA
tcagagaatggcagggcaag

SEQ ID NO: 332911 - DNA, 20 bp, Artificial Sequence
  Description of Artificial Sequence: Synthetic oligonucleotide
  Target: LAMA2; (+) strand; PAM type: YTN; PAM sequence: CTA
ccacactgatcaatcatgct

SEQ ID NO: 332912 - DNA, 20 bp, Artificial Sequence
  Description of Artificial Sequence: Synthetic oligonucleotide
  Target: LAMA2; (+) strand; PAM type: YTN; PAM sequence: CTG
atcaatcatgctttaggaaa

SEQ ID NO: 332913 - DNA, 20 bp, Artificial Sequence
  Description of Artificial Sequence: Synthetic oligonucleotide
  Target: LAMA2; (+) strand; PAM type: YTN; PAM sequence: CTT
taggaaaattaatcctgtgc

SEQ ID NO: 332914 - DNA, 20 bp, Artificial Sequence
  Description of Artificial Sequence: Synthetic oligonucleotide
  Target: LAMA2; (+) strand; PAM type: YTN; PAM sequence: TTT
aggaaaattaatcctgtgca

SEQ ID NO: 332915 - DNA, 20 bp, Artificial Sequence
  Description of Artificial Sequence: Synthetic oligonucleotide
  Target: LAMA2; (+) strand; PAM type: YTN; PAM sequence: TTA
ggaaaattaatcctgtgcat

SEQ ID NO: 332916 - DNA, 20 bp, Artificial Sequence
  Description of Artificial Sequence: Synthetic oligonucleotide
  Target: LAMA2; (+) strand; PAM type: YTN; PAM sequence: TTA
atcctgtgcatgaatcccct

SEQ ID NO: 332917 - DNA, 20 bp, Artificial Sequence
  Description of Artificial Sequence: Synthetic oligonucleotide
  Target: LAMA2; (+) strand; PAM type: YTN; PAM sequence: CTG
tgcatgaatcccctggggat

SEQ ID NO: 332918 - DNA, 20 bp, Artificial Sequence
  Description of Artificial Sequence: Synthetic oligonucleotide
  Target: LAMA2; (+) strand; PAM type: YTN; PAM sequence: CTG
gggatcttagcctcaaaatg

SEQ ID NO: 332919 - DNA, 20 bp, Artificial Sequence
  Description of Artificial Sequence: Synthetic oligonucleotide
  Target: LAMA2; (+) strand; PAM type: YTN; PAM sequence: CTT
agcctcaaaatggactgcat

SEQ ID NO: 332920 - DNA, 20 bp, Artificial Sequence
  Description of Artificial Sequence: Synthetic oligonucleotide
  Target: LAMA2; (+) strand; PAM type: YTN; PAM sequence: TTA
gcctcaaaatggactgcata

SEQ ID NO: 332921 - DNA, 20 bp, Artificial Sequence
  Description of Artificial Sequence: Synthetic oligonucleotide
  Target: LAMA2; (+) strand; PAM type: YTN; PAM sequence: CTC
aaaatggactgcataccact

SEQ ID NO: 332922 - DNA, 20 bp, Artificial Sequence
  Description of Artificial Sequence: Synthetic oligonucleotide
  Target: LAMA2; (+) strand; PAM type: YTN; PAM sequence: CTG
cataccactcctgataaaga

SEQ ID NO: 332923 - DNA, 20 bp, Artificial Sequence
  Description of Artificial Sequence: Synthetic oligonucleotide
  Target: LAMA2; (+) strand; PAM type: YTN; PAM sequence: CTC
ctgataaagacaactttgtc

SEQ ID NO: 332924 - DNA, 20 bp, Artificial Sequence
  Description of Artificial Sequence: Synthetic oligonucleotide
  Target: LAMA2; (+) strand; PAM type: YTN; PAM sequence: CTG
ataaagacaactttgtcctt

SEQ ID NO: 332925 - DNA, 20 bp, Artificial Sequence
  Description of Artificial Sequence: Synthetic oligonucleotide
  Target: LAMA2; (+) strand; PAM type: YTN; PAM sequence: CTT
tgtcctttattggtcacaag

SEQ ID NO: 332926 - DNA, 20 bp, Artificial Sequence
  Description of Artificial Sequence: Synthetic oligonucleotide
  Target: LAMA2; (+) strand; PAM type: YTN; PAM sequence: TTT
gtcctttattggtcacaaga

SEQ ID NO: 332927 - DNA, 20 bp, Artificial Sequence
  Description of Artificial Sequence: Synthetic oligonucleotide
  Target: LAMA2; (+) strand; PAM type: YTN; PAM sequence: TTG
tcctttattggtcacaagag

SEQ ID NO: 332928 - DNA, 20 bp, Artificial Sequence
  Description of Artificial Sequence: Synthetic oligonucleotide
  Target: LAMA2; (+) strand; PAM type: YTN; PAM sequence: CTT
tattggtcacaagagttctc

SEQ ID NO: 332929 - DNA, 20 bp, Artificial Sequence
  Description of Artificial Sequence: Synthetic oligonucleotide
  Target: LAMA2; (+) strand; PAM type: YTN; PAM sequence: TTT
attggtcacaagagttctcc

SEQ ID NO: 332930 - DNA, 20 bp, Artificial Sequence
  Description of Artificial Sequence: Synthetic oligonucleotide
  Target: LAMA2; (+) strand; PAM type: YTN; PAM sequence: TTA
ttggtcacaagagttctccc

SEQ ID NO: 332931 - DNA, 20 bp, Artificial Sequence
  Description of Artificial Sequence: Synthetic oligonucleotide
  Target: LAMA2; (+) strand; PAM type: YTN; PAM sequence: TTG
gtcacaagagttctccccct

SEQ ID NO: 332932 - DNA, 20 bp, Artificial Sequence
  Description of Artificial Sequence: Synthetic oligonucleotide
  Target: LAMA2; (+) strand; PAM type: YTN; PAM sequence: TTC
tcccccttcatgtgatcatt

SEQ ID NO: 332933 - DNA, 20 bp, Artificial Sequence
  Description of Artificial Sequence: Synthetic oligonucleotide
  Target: LAMA2; (+) strand; PAM type: YTN; PAM sequence: CTC
ccccttcatgtgatcattga

SEQ ID NO: 332934 - DNA, 20 bp, Artificial Sequence
  Description of Artificial Sequence: Synthetic oligonucleotide
  Target: LAMA2; (+) strand; PAM type: YTN; PAM sequence: CTT
catgtgatcattgaaagtct

SEQ ID NO: 332935 - DNA, 20 bp, Artificial Sequence
  Description of Artificial Sequence: Synthetic oligonucleotide
  Target: LAMA2; (+) strand; PAM type: YTN; PAM sequence: TTC
atgtgatcattgaaagtcta

SEQ ID NO: 332936 - DNA, 20 bp, Artificial Sequence
  Description of Artificial Sequence: Synthetic oligonucleotide
  Target: LAMA2; (+) strand; PAM type: YTN; PAM sequence: TTG
aaagtctagtctcccaatca

SEQ ID NO: 332937 - DNA, 20 bp, Artificial Sequence
  Description of Artificial Sequence: Synthetic oligonucleotide
  Target: LAMA2; (+) strand; PAM type: YTN; PAM sequence: CTA
gtctcccaatcaagagtgag

SEQ ID NO: 332938 - DNA, 20 bp, Artificial Sequence
  Description of Artificial Sequence: Synthetic oligonucleotide
  Target: LAMA2; (+) strand; PAM type: YTN; PAM sequence: CTC
ccaatcaagagtgagtctgc

SEQ ID NO: 332939 - DNA, 20 bp, Artificial Sequence
  Description of Artificial Sequence: Synthetic oligonucleotide
  Target: LAMA2; (+) strand; PAM type: YTN; PAM sequence: CTG
ctgtgcattgactcaggtca

SEQ ID NO: 332940 - DNA, 20 bp, Artificial Sequence
  Description of Artificial Sequence: Synthetic oligonucleotide
  Target: LAMA2; (+) strand; PAM type: YTN; PAM sequence: CTG
tgcattgactcaggtcatct

SEQ ID NO: 332941 - DNA, 20 bp, Artificial Sequence
  Description of Artificial Sequence: Synthetic oligonucleotide
  Target: LAMA2; (+) strand; PAM type: YTN; PAM sequence: TTG
actcaggtcatctccaggga

SEQ ID NO: 332942 - DNA, 20 bp, Artificial Sequence
  Description of Artificial Sequence: Synthetic oligonucleotide
  Target: LAMA2; (+) strand; PAM type: YTN; PAM sequence: CTC
aggtcatctccagggacagg

SEQ ID NO: 332943 - DNA, 20 bp, Artificial Sequence
  Description of Artificial Sequence: Synthetic oligonucleotide
  Target: LAMA2; (+) strand; PAM type: YTN; PAM sequence: CTC
cagggacaggcaatcaataa

SEQ ID NO: 332944 - DNA, 20 bp, Artificial Sequence
  Description of Artificial Sequence: Synthetic oligonucleotide
  Target: LAMA2; (+) strand; PAM type: YTN; PAM sequence: CTT
tattgttctggtttattctc

SEQ ID NO: 332945 - DNA, 20 bp, Artificial Sequence
  Description of Artificial Sequence: Synthetic oligonucleotide
  Target: LAMA2; (+) strand; PAM type: YTN; PAM sequence: TTT
attgttctggtttattctcc

SEQ ID NO: 332946 - DNA, 20 bp, Artificial Sequence
  Description of Artificial Sequence: Synthetic oligonucleotide
  Target: LAMA2; (+) strand; PAM type: YTN; PAM sequence: TTA
ttgttctggtttattctcca

SEQ ID NO: 332947 - DNA, 20 bp, Artificial Sequence
  Description of Artificial Sequence: Synthetic oligonucleotide
  Target: LAMA2; (+) strand; PAM type: YTN; PAM sequence: TTG
ttctggtttattctccattt

SEQ ID NO: 332948 - DNA, 20 bp, Artificial Sequence
  Description of Artificial Sequence: Synthetic oligonucleotide
  Target: LAMA2; (+) strand; PAM type: YTN; PAM sequence: TTC
tggtttattctccatttatt

SEQ ID NO: 332949 - DNA, 20 bp, Artificial Sequence
  Description of Artificial Sequence: Synthetic oligonucleotide
  Target: LAMA2; (+) strand; PAM type: YTN; PAM sequence: CTG
gtttattctccatttattct

SEQ ID NO: 332950 - DNA, 20 bp, Artificial Sequence
  Description of Artificial Sequence: Synthetic oligonucleotide
  Target: LAMA2; (+) strand; PAM type: YTN; PAM sequence: TTT
attctccatttattctttta

SEQ ID NO: 332951 - DNA, 20 bp, Artificial Sequence
  Description of Artificial Sequence: Synthetic oligonucleotide
  Target: LAMA2; (+) strand; PAM type: YTN; PAM sequence: TTA
ttctccatttattcttttag

SEQ ID NO: 332952 - DNA, 20 bp, Artificial Sequence
  Description of Artificial Sequence: Synthetic oligonucleotide
  Target: LAMA2; (+) strand; PAM type: YTN; PAM sequence: TTC
tccatttattcttttagatt

SEQ ID NO: 332953 - DNA, 20 bp, Artificial Sequence
  Description of Artificial Sequence: Synthetic oligonucleotide
  Target: LAMA2; (+) strand; PAM type: YTN; PAM sequence: CTC
catttattcttttagattgc

SEQ ID NO: 332954 - DNA, 20 bp, Artificial Sequence
  Description of Artificial Sequence: Synthetic oligonucleotide
  Target: LAMA2; (+) strand; PAM type: YTN; PAM sequence: TTT
attcttttagattgcacata

SEQ ID NO: 332955 - DNA, 20 bp, Artificial Sequence
  Description of Artificial Sequence: Synthetic oligonucleotide
  Target: LAMA2; (+) strand; PAM type: YTN; PAM sequence: TTA
ttcttttagattgcacatag

SEQ ID NO: 332956 - DNA, 20 bp, Artificial Sequence
  Description of Artificial Sequence: Synthetic oligonucleotide
  Target: LAMA2; (+) strand; PAM type: YTN; PAM sequence: TTC
ttttagattgcacatagaac

SEQ ID NO: 332957 - DNA, 20 bp, Artificial Sequence
  Description of Artificial Sequence: Synthetic oligonucleotide
  Target: LAMA2; (+) strand; PAM type: YTN; PAM sequence: CTT
ttagattgcacatagaacaa

SEQ ID NO: 332958 - DNA, 20 bp, Artificial Sequence
  Description of Artificial Sequence: Synthetic oligonucleotide
  Target: LAMA2; (+) strand; PAM type: YTN; PAM sequence: TTT
tagattgcacatagaacaat

SEQ ID NO: 332959 - DNA, 20 bp, Artificial Sequence
  Description of Artificial Sequence: Synthetic oligonucleotide
  Target: LAMA2; (+) strand; PAM type: YTN; PAM sequence: TTT
agattgcacatagaacaatg

SEQ ID NO: 332960 - DNA, 20 bp, Artificial Sequence
  Description of Artificial Sequence: Synthetic oligonucleotide
  Target: LAMA2; (+) strand; PAM type: YTN; PAM sequence: TTA
gattgcacatagaacaatgg

SEQ ID NO: 332961 - DNA, 20 bp, Artificial Sequence
  Description of Artificial Sequence: Synthetic oligonucleotide
  Target: LAMA2; (+) strand; PAM type: YTN; PAM sequence: TTG
cacatagaacaatggggtca

SEQ ID NO: 332962 - DNA, 20 bp, Artificial Sequence
  Description of Artificial Sequence: Synthetic oligonucleotide
  Target: LAMA2; (+) strand; PAM type: YTN; PAM sequence: TTA
ttaatataatttgcacaaat

SEQ ID NO: 332963 - DNA, 20 bp, Artificial Sequence
  Description of Artificial Sequence: Synthetic oligonucleotide
  Target: LAMA2; (+) strand; PAM type: YTN; PAM sequence: TTA
atataatttgcacaaatcac

SEQ ID NO: 332964 - DNA, 20 bp, Artificial Sequence
  Description of Artificial Sequence: Synthetic oligonucleotide
  Target: LAMA2; (+) strand; PAM type: YTN; PAM sequence: TTT
gcacaaatcacttatagtac

SEQ ID NO: 332965 - DNA, 20 bp, Artificial Sequence
  Description of Artificial Sequence: Synthetic oligonucleotide
  Target: LAMA2; (+) strand; PAM type: YTN; PAM sequence: TTG
cacaaatcacttatagtact

SEQ ID NO: 332966 - DNA, 20 bp, Artificial Sequence
  Description of Artificial Sequence: Synthetic oligonucleotide
  Target: LAMA2; (+) strand; PAM type: YTN; PAM sequence: CTT
atagtactctttgagctgaa

SEQ ID NO: 332967 - DNA, 20 bp, Artificial Sequence
  Description of Artificial Sequence: Synthetic oligonucleotide
  Target: LAMA2; (+) strand; PAM type: YTN; PAM sequence: TTA
tagtactctttgagctgaac

SEQ ID NO: 332968 - DNA, 20 bp, Artificial Sequence
  Description of Artificial Sequence: Synthetic oligonucleotide
  Target: LAMA2; (+) strand; PAM type: YTN; PAM sequence: CTC
tttgagctgaacagcaatat

SEQ ID NO: 332969 - DNA, 20 bp, Artificial Sequence
  Description of Artificial Sequence: Synthetic oligonucleotide
  Target: LAMA2; (+) strand; PAM type: YTN; PAM sequence: CTT
tgagctgaacagcaatatta

SEQ ID NO: 332970 - DNA, 20 bp, Artificial Sequence
  Description of Artificial Sequence: Synthetic oligonucleotide
  Target: LAMA2; (+) strand; PAM type: YTN; PAM sequence: TTT
gagctgaacagcaatattat

SEQ ID NO: 332971 - DNA, 20 bp, Artificial Sequence
  Description of Artificial Sequence: Synthetic oligonucleotide
  Target: LAMA2; (+) strand; PAM type: YTN; PAM sequence: TTG
agctgaacagcaatattatt

SEQ ID NO: 332972 - DNA, 20 bp, Artificial Sequence
  Description of Artificial Sequence: Synthetic oligonucleotide
  Target: LAMA2; (+) strand; PAM type: YTN; PAM sequence: CTG
aacagcaatattatttacct

SEQ ID NO: 332973 - DNA, 20 bp, Artificial Sequence
  Description of Artificial Sequence: Synthetic oligonucleotide
  Target: LAMA2; (+) strand; PAM type: YTN; PAM sequence: TTA
tttacctgttatcaaacatg

SEQ ID NO: 332974 - DNA, 20 bp, Artificial Sequence
  Description of Artificial Sequence: Synthetic oligonucleotide
  Target: LAMA2; (+) strand; PAM type: YTN; PAM sequence: TTT
acctgttatcaaacatggca

SEQ ID NO: 332975 - DNA, 20 bp, Artificial Sequence
  Description of Artificial Sequence: Synthetic oligonucleotide
  Target: LAMA2; (+) strand; PAM type: YTN; PAM sequence: TTA
cctgttatcaaacatggcag

SEQ ID NO: 332976 - DNA, 20 bp, Artificial Sequence
  Description of Artificial Sequence: Synthetic oligonucleotide
  Target: LAMA2; (+) strand; PAM type: YTN; PAM sequence: CTG
ttatcaaacatggcagcatt

SEQ ID NO: 332977 - DNA, 20 bp, Artificial Sequence
  Description of Artificial Sequence: Synthetic oligonucleotide
  Target: LAMA2; (+) strand; PAM type: YTN; PAM sequence: TTA
tcaaacatggcagcattttt

SEQ ID NO: 332978 - DNA, 20 bp, Artificial Sequence
  Description of Artificial Sequence: Synthetic oligonucleotide
  Target: LAMA2; (+) strand; PAM type: YTN; PAM sequence: TTT
ttcccctcctaatttacaac

SEQ ID NO: 332979 - DNA, 20 bp, Artificial Sequence
  Description of Artificial Sequence: Synthetic oligonucleotide
  Target: LAMA2; (+) strand; PAM type: YTN; PAM sequence: TTT
tcccctcctaatttacaact

SEQ ID NO: 332980 - DNA, 20 bp, Artificial Sequence
  Description of Artificial Sequence: Synthetic oligonucleotide
  Target: LAMA2; (+) strand; PAM type: YTN; PAM sequence: TTT
cccctcctaatttacaactg

SEQ ID NO: 332981 - DNA, 20 bp, Artificial Sequence
  Description of Artificial Sequence: Synthetic oligonucleotide
  Target: LAMA2; (+) strand; PAM type: YTN; PAM sequence: TTC
ccctcctaatttacaactgg

SEQ ID NO: 332982 - DNA, 20 bp, Artificial Sequence
  Description of Artificial Sequence: Synthetic oligonucleotide
  Target: LAMA2; (+) strand; PAM type: YTN; PAM sequence: CTC
ctaatttacaactggatggc

SEQ ID NO: 332983 - DNA, 20 bp, Artificial Sequence
  Description of Artificial Sequence: Synthetic oligonucleotide
  Target: LAMA2; (+) strand; PAM type: YTN; PAM sequence: CTA
atttacaactggatggcgca

SEQ ID NO: 332984 - DNA, 20 bp, Artificial Sequence
  Description of Artificial Sequence: Synthetic oligonucleotide
  Target: LAMA2; (+) strand; PAM type: YTN; PAM sequence: TTT
acaactggatggcgcaacca

SEQ ID NO: 332985 - DNA, 20 bp, Artificial Sequence
  Description of Artificial Sequence: Synthetic oligonucleotide
  Target: LAMA2; (+) strand; PAM type: YTN; PAM sequence: TTA
caactggatggcgcaaccac

SEQ ID NO: 332986 - DNA, 20 bp, Artificial Sequence
  Description of Artificial Sequence: Synthetic oligonucleotide
  Target: LAMA2; (+) strand; PAM type: YTN; PAM sequence: CTG
gatggcgcaaccacaagttt

SEQ ID NO: 332987 - DNA, 20 bp, Artificial Sequence
  Description of Artificial Sequence: Synthetic oligonucleotide
  Target: LAMA2; (+) strand; PAM type: YTN; PAM sequence: TTT
ttactaaatcatttctaact

SEQ ID NO: 332988 - DNA, 20 bp, Artificial Sequence
  Description of Artificial Sequence: Synthetic oligonucleotide
  Target: LAMA2; (+) strand; PAM type: YTN; PAM sequence: TTT
tactaaatcatttctaactt

SEQ ID NO: 332989 - DNA, 20 bp, Artificial Sequence
  Description of Artificial Sequence: Synthetic oligonucleotide
  Target: LAMA2; (+) strand; PAM type: YTN; PAM sequence: TTT
actaaatcatttctaacttg

SEQ ID NO: 332990 - DNA, 20 bp, Artificial Sequence
  Description of Artificial Sequence: Synthetic oligonucleotide
  Target: LAMA2; (+) strand; PAM type: YTN; PAM sequence: TTA
ctaaatcatttctaacttgc

SEQ ID NO: 332991 - DNA, 20 bp, Artificial Sequence
  Description of Artificial Sequence: Synthetic oligonucleotide
  Target: LAMA2; (+) strand; PAM type: YTN; PAM sequence: CTA
aatcatttctaacttgcctg

SEQ ID NO: 332992 - DNA, 20 bp, Artificial Sequence
  Description of Artificial Sequence: Synthetic oligonucleotide
  Target: LAMA2; (+) strand; PAM type: YTN; PAM sequence: TTT
ctaacttgcctgtttttatc

SEQ ID NO: 332993 - DNA, 20 bp, Artificial Sequence
  Description of Artificial Sequence: Synthetic oligonucleotide
  Target: LAMA2; (+) strand; PAM type: YTN; PAM sequence: TTC
taacttgcctgtttttatca

SEQ ID NO: 332994 - DNA, 20 bp, Artificial Sequence
  Description of Artificial Sequence: Synthetic oligonucleotide
  Target: LAMA2; (+) strand; PAM type: YTN; PAM sequence: CTA
acttgcctgtttttatcaat

SEQ ID NO: 332995 - DNA, 20 bp, Artificial Sequence
  Description of Artificial Sequence: Synthetic oligonucleotide
  Target: LAMA2; (+) strand; PAM type: YTN; PAM sequence: CTT
gcctgtttttatcaattcag

SEQ ID NO: 332996 - DNA, 20 bp, Artificial Sequence
  Description of Artificial Sequence: Synthetic oligonucleotide
  Target: LAMA2; (+) strand; PAM type: YTN; PAM sequence: TTG
cctgtttttatcaattcagc

SEQ ID NO: 332997 - DNA, 20 bp, Artificial Sequence
  Description of Artificial Sequence: Synthetic oligonucleotide
  Target: LAMA2; (+) strand; PAM type: YTN; PAM sequence: CTG
tttttatcaattcagcaagt

SEQ ID NO: 332998 - DNA, 20 bp, Artificial Sequence
  Description of Artificial Sequence: Synthetic oligonucleotide
  Target: LAMA2; (+) strand; PAM type: YTN; PAM sequence: TTT
ttatcaattcagcaagtcaa

SEQ ID NO: 332999 - DNA, 20 bp, Artificial Sequence
  Description of Artificial Sequence: Synthetic oligonucleotide
  Target: LAMA2; (+) strand; PAM type: YTN; PAM sequence: TTT
tatcaattcagcaagtcaaa

SEQ ID NO: 333000 - DNA, 20 bp, Artificial Sequence
  Description of Artificial Sequence: Synthetic oligonucleotide
  Target: LAMA2; (+) strand; PAM type: YTN; PAM sequence: TTT
atcaattcagcaagtcaaag

SEQ ID NO: 333001 - DNA, 20 bp, Artificial Sequence
  Description of Artificial Sequence: Synthetic oligonucleotide
  Target: LAMA2; (+) strand; PAM type: YTN; PAM sequence: TTA
tcaattcagcaagtcaaaga

SEQ ID NO: 333002 - DNA, 20 bp, Artificial Sequence
  Description of Artificial Sequence: Synthetic oligonucleotide
  Target: LAMA2; (+) strand; PAM type: YTN; PAM sequence: TTC
agcaagtcaaagagtttacc

SEQ ID NO: 333003 - DNA, 20 bp, Artificial Sequence
  Description of Artificial Sequence: Synthetic oligonucleotide
  Target: LAMA2; (+) strand; PAM type: YTN; PAM sequence: TTT
acctgaaagcctatttttca

SEQ ID NO: 333004 - DNA, 20 bp, Artificial Sequence
  Description of Artificial Sequence: Synthetic oligonucleotide
  Target: LAMA2; (+) strand; PAM type: YTN; PAM sequence: TTA
cctgaaagcctatttttcag

SEQ ID NO: 333005 - DNA, 20 bp, Artificial Sequence
  Description of Artificial Sequence: Synthetic oligonucleotide
  Target: LAMA2; (+) strand; PAM type: YTN; PAM sequence: CTG
aaagcctatttttcagtgat

SEQ ID NO: 333006 - DNA, 20 bp, Artificial Sequence
  Description of Artificial Sequence: Synthetic oligonucleotide
  Target: LAMA2; (+) strand; PAM type: YTN; PAM sequence: CTA
tttttcagtgatgtcattga

SEQ ID NO: 333007 - DNA, 20 bp, Artificial Sequence
  Description of Artificial Sequence: Synthetic oligonucleotide
  Target: LAMA2; (+) strand; PAM type: YTN; PAM sequence: TTT
ttcagtgatgtcattgatat

SEQ ID NO: 333008 - DNA, 20 bp, Artificial Sequence
  Description of Artificial Sequence: Synthetic oligonucleotide
  Target: LAMA2; (+) strand; PAM type: YTN; PAM sequence: TTT
tcagtgatgtcattgatatt

SEQ ID NO: 333009 - DNA, 20 bp, Artificial Sequence
  Description of Artificial Sequence: Synthetic oligonucleotide
  Target: LAMA2; (+) strand; PAM type: YTN; PAM sequence: TTT
cagtgatgtcattgatattt

SEQ ID NO: 333010 - DNA, 20 bp, Artificial Sequence
  Description of Artificial Sequence: Synthetic oligonucleotide
  Target: LAMA2; (+) strand; PAM type: YTN; PAM sequence: TTC
agtgatgtcattgatatttt

SEQ ID NO: 333011 - DNA, 20 bp, Artificial Sequence
  Description of Artificial Sequence: Synthetic oligonucleotide
  Target: LAMA2; (+) strand; PAM type: YTN; PAM sequence: TTG
atattttcctaaatttactt

SEQ ID NO: 333012 - DNA, 20 bp, Artificial Sequence
  Description of Artificial Sequence: Synthetic oligonucleotide
  Target: LAMA2; (+) strand; PAM type: YTN; PAM sequence: TTT
tcctaaatttactttgcata

SEQ ID NO: 333013 - DNA, 20 bp, Artificial Sequence
  Description of Artificial Sequence: Synthetic oligonucleotide
  Target: LAMA2; (+) strand; PAM type: YTN; PAM sequence: TTT
cctaaatttactttgcatac

SEQ ID NO: 333014 - DNA, 20 bp, Artificial Sequence
  Description of Artificial Sequence: Synthetic oligonucleotide
  Target: LAMA2; (+) strand; PAM type: YTN; PAM sequence: TTC
ctaaatttactttgcatact

SEQ ID NO: 333015 - DNA, 20 bp, Artificial Sequence
  Description of Artificial Sequence: Synthetic oligonucleotide
  Target: LAMA2; (+) strand; PAM type: YTN; PAM sequence: CTA
aatttactttgcatactcac

SEQ ID NO: 333016 - DNA, 20 bp, Artificial Sequence
  Description of Artificial Sequence: Synthetic oligonucleotide
  Target: LAMA2; (+) strand; PAM type: YTN; PAM sequence: TTT
actttgcatactcactcatc

SEQ ID NO: 333017 - DNA, 20 bp, Artificial Sequence
  Description of Artificial Sequence: Synthetic oligonucleotide
  Target: LAMA2; (+) strand; PAM type: YTN; PAM sequence: TTA
ctttgcatactcactcatcc

SEQ ID NO: 333018 - DNA, 20 bp, Artificial Sequence
  Description of Artificial Sequence: Synthetic oligonucleotide
  Target: LAMA2; (+) strand; PAM type: YTN; PAM sequence: CTT
tgcatactcactcatccatt

SEQ ID NO: 333019 - DNA, 20 bp, Artificial Sequence
  Description of Artificial Sequence: Synthetic oligonucleotide
  Target: LAMA2; (+) strand; PAM type: YTN; PAM sequence: TTT
gcatactcactcatccattc

SEQ ID NO: 333020 - DNA, 20 bp, Artificial Sequence
  Description of Artificial Sequence: Synthetic oligonucleotide
  Target: LAMA2; (+) strand; PAM type: YTN; PAM sequence: TTG
catactcactcatccattcc

SEQ ID NO: 333021 - DNA, 20 bp, Artificial Sequence
  Description of Artificial Sequence: Synthetic oligonucleotide
  Target: LAMA2; (+) strand; PAM type: YTN; PAM sequence: CTC
actcatccattcccacacag

SEQ ID NO: 333022 - DNA, 20 bp, Artificial Sequence
  Description of Artificial Sequence: Synthetic oligonucleotide
  Target: LAMA2; (+) strand; PAM type: YTN; PAM sequence: CTC
atccattcccacacagtatc

SEQ ID NO: 333023 - DNA, 20 bp, Artificial Sequence
  Description of Artificial Sequence: Synthetic oligonucleotide
  Target: LAMA2; (+) strand; PAM type: YTN; PAM sequence: TTC
ccacacagtatcttaagaat

SEQ ID NO: 333024 - DNA, 20 bp, Artificial Sequence
  Description of Artificial Sequence: Synthetic oligonucleotide
  Target: LAMA2; (+) strand; PAM type: YTN; PAM sequence: CTT
aagaattatgtggatttgtc

SEQ ID NO: 333025 - DNA, 20 bp, Artificial Sequence
  Description of Artificial Sequence: Synthetic oligonucleotide
  Target: LAMA2; (+) strand; PAM type: YTN; PAM sequence: TTA
agaattatgtggatttgtcg

SEQ ID NO: 333026 - DNA, 20 bp, Artificial Sequence
  Description of Artificial Sequence: Synthetic oligonucleotide
  Target: LAMA2; (+) strand; PAM type: YTN; PAM sequence: TTA
tgtggatttgtcgttctgtt

SEQ ID NO: 333027 - DNA, 20 bp, Artificial Sequence
  Description of Artificial Sequence: Synthetic oligonucleotide
  Target: LAMA2; (+) strand; PAM type: YTN; PAM sequence: TTT
gtcgttctgttttctcttcc

SEQ ID NO: 333028 - DNA, 20 bp, Artificial Sequence
  Description of Artificial Sequence: Synthetic oligonucleotide
  Target: LAMA2; (+) strand; PAM type: YTN; PAM sequence: TTG
tcgttctgttttctcttcct

SEQ ID NO: 333029 - DNA, 20 bp, Artificial Sequence
  Description of Artificial Sequence: Synthetic oligonucleotide
  Target: LAMA2; (+) strand; PAM type: YTN; PAM sequence: TTC
tgttttctcttcctcccatt

SEQ ID NO: 333030 - DNA, 20 bp, Artificial Sequence
  Description of Artificial Sequence: Synthetic oligonucleotide
  Target: LAMA2; (+) strand; PAM type: YTN; PAM sequence: CTG
ttttctcttcctcccattta

SEQ ID NO: 333031 - DNA, 20 bp, Artificial Sequence
  Description of Artificial Sequence: Synthetic oligonucleotide
  Target: LAMA2; (+) strand; PAM type: YTN; PAM sequence: TTT
tctcttcctcccatttagtt

SEQ ID NO: 333032 - DNA, 20 bp, Artificial Sequence
  Description of Artificial Sequence: Synthetic oligonucleotide
  Target: LAMA2; (+) strand; PAM type: YTN; PAM sequence: TTT
ctcttcctcccatttagttt

SEQ ID NO: 333033 - DNA, 20 bp, Artificial Sequence
  Description of Artificial Sequence: Synthetic oligonucleotide
  Target: LAMA2; (+) strand; PAM type: YTN; PAM sequence: TTC
tcttcctcccatttagttta

SEQ ID NO: 333034 - DNA, 20 bp, Artificial Sequence
  Description of Artificial Sequence: Synthetic oligonucleotide
  Target: LAMA2; (+) strand; PAM type: YTN; PAM sequence: CTC
ttcctcccatttagtttaat

SEQ ID NO: 333035 - DNA, 20 bp, Artificial Sequence
  Description of Artificial Sequence: Synthetic oligonucleotide
  Target: LAMA2; (+) strand; PAM type: YTN; PAM sequence: CTT
cctcccatttagtttaatgg

SEQ ID NO: 333036 - DNA, 20 bp, Artificial Sequence
  Description of Artificial Sequence: Synthetic oligonucleotide
  Target: LAMA2; (+) strand; PAM type: YTN; PAM sequence: TTC
ctcccatttagtttaatgga

SEQ ID NO: 333037 - DNA, 20 bp, Artificial Sequence
  Description of Artificial Sequence: Synthetic oligonucleotide
  Target: LAMA2; (+) strand; PAM type: YTN; PAM sequence: CTC
ccatttagtttaatggaggt

SEQ ID NO: 333038 - DNA, 20 bp, Artificial Sequence
  Description of Artificial Sequence: Synthetic oligonucleotide
  Target: LAMA2; (+) strand; PAM type: YTN; PAM sequence: TTT
agtttaatggaggtaagatg

SEQ ID NO: 333039 - DNA, 20 bp, Artificial Sequence
  Description of Artificial Sequence: Synthetic oligonucleotide
  Target: LAMA2; (+) strand; PAM type: YTN; PAM sequence: TTA
gtttaatggaggtaagatga

SEQ ID NO: 333040 - DNA, 20 bp, Artificial Sequence
  Description of Artificial Sequence: Synthetic oligonucleotide
  Target: LAMA2; (+) strand; PAM type: YTN; PAM sequence: TTT
aatggaggtaagatgagtga

SEQ ID NO: 333041 - DNA, 20 bp, Artificial Sequence
  Description of Artificial Sequence: Synthetic oligonucleotide
  Target: LAMA2; (+) strand; PAM type: YTN; PAM sequence: TTA
atggaggtaagatgagtgaa

SEQ ID NO: 333042 - DNA, 20 bp, Artificial Sequence
  Description of Artificial Sequence: Synthetic oligonucleotide
  Target: LAMA2; (+) strand; PAM type: YTN; PAM sequence: TTT
tatgcttcattcatcataac

SEQ ID NO: 333043 - DNA, 20 bp, Artificial Sequence
  Description of Artificial Sequence: Synthetic oligonucleotide
  Target: LAMA2; (+) strand; PAM type: YTN; PAM sequence: TTT
atgcttcattcatcataaca

SEQ ID NO: 333044 - DNA, 20 bp, Artificial Sequence
  Description of Artificial Sequence: Synthetic oligonucleotide
  Target: LAMA2; (+) strand; PAM type: YTN; PAM sequence: TTA
tgcttcattcatcataacaa

SEQ ID NO: 333045 - DNA, 20 bp, Artificial Sequence
  Description of Artificial Sequence: Synthetic oligonucleotide
  Target: LAMA2; (+) strand; PAM type: YTN; PAM sequence: CTT
cattcatcataacaaagtgc

SEQ ID NO: 333046 - DNA, 20 bp, Artificial Sequence
  Description of Artificial Sequence: Synthetic oligonucleotide
  Target: LAMA2; (+) strand; PAM type: YTN; PAM sequence: TTC
attcatcataacaaagtgcc

SEQ ID NO: 333047 - DNA, 20 bp, Artificial Sequence
  Description of Artificial Sequence: Synthetic oligonucleotide
  Target: LAMA2; (+) strand; PAM type: YTN; PAM sequence: TTC
atcataacaaagtgccagaa

SEQ ID NO: 333048 - DNA, 20 bp, Artificial Sequence
  Description of Artificial Sequence: Synthetic oligonucleotide
  Target: LAMA2; (+) strand; PAM type: YTN; PAM sequence: TTC
tgtatataacccaggtctac

SEQ ID NO: 333049 - DNA, 20 bp, Artificial Sequence
  Description of Artificial Sequence: Synthetic oligonucleotide
  Target: LAMA2; (+) strand; PAM type: YTN; PAM sequence: CTG
tatataacccaggtctacct

SEQ ID NO: 333050 - DNA, 20 bp, Artificial Sequence
  Description of Artificial Sequence: Synthetic oligonucleotide
  Target: LAMA2; (+) strand; PAM type: YTN; PAM sequence: CTA
cctgactccaaagtctgaaa

SEQ ID NO: 333051 - DNA, 20 bp, Artificial Sequence
  Description of Artificial Sequence: Synthetic oligonucleotide
  Target: LAMA2; (+) strand; PAM type: YTN; PAM sequence: CTG
actccaaagtctgaaattca

SEQ ID NO: 333052 - DNA, 20 bp, Artificial Sequence
  Description of Artificial Sequence: Synthetic oligonucleotide
  Target: LAMA2; (+) strand; PAM type: YTN; PAM sequence: CTC
caaagtctgaaattcaccaa

SEQ ID NO: 333053 - DNA, 20 bp, Artificial Sequence
  Description of Artificial Sequence: Synthetic oligonucleotide
  Target: LAMA2; (+) strand; PAM type: YTN; PAM sequence: CTG
aaattcaccaagtggaattg

SEQ ID NO: 333054 - DNA, 20 bp, Artificial Sequence
  Description of Artificial Sequence: Synthetic oligonucleotide
  Target: LAMA2; (+) strand; PAM type: YTN; PAM sequence: TTC
accaagtggaattggtacag

SEQ ID NO: 333055 - DNA, 20 bp, Artificial Sequence
  Description of Artificial Sequence: Synthetic oligonucleotide
  Target: LAMA2; (+) strand; PAM type: YTN; PAM sequence: TTG
gtacagagcatatgtgttca

SEQ ID NO: 333056 - DNA, 20 bp, Artificial Sequence
  Description of Artificial Sequence: Synthetic oligonucleotide
  Target: LAMA2; (+) strand; PAM type: YTN; PAM sequence: TTC
aaattgtcccatattccagg

SEQ ID NO: 333057 - DNA, 20 bp, Artificial Sequence
  Description of Artificial Sequence: Synthetic oligonucleotide
  Target: LAMA2; (+) strand; PAM type: YTN; PAM sequence: TTG
tcccatattccaggatggtg

SEQ ID NO: 333058 - DNA, 20 bp, Artificial Sequence
  Description of Artificial Sequence: Synthetic oligonucleotide
  Target: LAMA2; (+) strand; PAM type: YTN; PAM sequence: TTC
caggatggtgtccatccata

SEQ ID NO: 333059 - DNA, 20 bp, Artificial Sequence
  Description of Artificial Sequence: Synthetic oligonucleotide
  Target: LAMA2; (+) strand; PAM type: YTN; PAM sequence: CTT
atttattccagctttctatt

SEQ ID NO: 333060 - DNA, 20 bp, Artificial Sequence
  Description of Artificial Sequence: Synthetic oligonucleotide
  Target: LAMA2; (+) strand; PAM type: YTN; PAM sequence: TTA
tttattccagctttctattt

SEQ ID NO: 333061 - DNA, 20 bp, Artificial Sequence
  Description of Artificial Sequence: Synthetic oligonucleotide
  Target: LAMA2; (+) strand; PAM type: YTN; PAM sequence: TTT
attccagctttctatttcct

SEQ ID NO: 333062 - DNA, 20 bp, Artificial Sequence
  Description of Artificial Sequence: Synthetic oligonucleotide
  Target: LAMA2; (+) strand; PAM type: YTN; PAM sequence: TTA
ttccagctttctatttcctg

SEQ ID NO: 333063 - DNA, 20 bp, Artificial Sequence
  Description of Artificial Sequence: Synthetic oligonucleotide
  Target: LAMA2; (+) strand; PAM type: YTN; PAM sequence: TTC
cagctttctatttcctgaaa

SEQ ID NO: 333064 - DNA, 20 bp, Artificial Sequence
  Description of Artificial Sequence: Synthetic oligonucleotide
  Target: LAMA2; (+) strand; PAM type: YTN; PAM sequence: CTT
tctatttcctgaaaatcaac

SEQ ID NO: 333065 - DNA, 20 bp, Artificial Sequence
  Description of Artificial Sequence: Synthetic oligonucleotide
  Target: LAMA2; (+) strand; PAM type: YTN; PAM sequence: TTT
ctatttcctgaaaatcaacc

SEQ ID NO: 333066 - DNA, 20 bp, Artificial Sequence
  Description of Artificial Sequence: Synthetic oligonucleotide
  Target: LAMA2; (+) strand; PAM type: YTN; PAM sequence: TTC
tatttcctgaaaatcaacct

SEQ ID NO: 333067 - DNA, 20 bp, Artificial Sequence
  Description of Artificial Sequence: Synthetic oligonucleotide
  Target: LAMA2; (+) strand; PAM type: YTN; PAM sequence: CTA
tttcctgaaaatcaacctac

SEQ ID NO: 333068 - DNA, 20 bp, Artificial Sequence
  Description of Artificial Sequence: Synthetic oligonucleotide
  Target: LAMA2; (+) strand; PAM type: YTN; PAM sequence: TTT
cctgaaaatcaacctactgt

SEQ ID NO: 333069 - DNA, 20 bp, Artificial Sequence
  Description of Artificial Sequence: Synthetic oligonucleotide
  Target: LAMA2; (+) strand; PAM type: YTN; PAM sequence: TTC
ctgaaaatcaacctactgtg

SEQ ID NO: 333070 - DNA, 20 bp, Artificial Sequence
  Description of Artificial Sequence: Synthetic oligonucleotide
  Target: LAMA2; (+) strand; PAM type: YTN; PAM sequence: CTG
aaaatcaacctactgtgtgt

SEQ ID NO: 333071 - DNA, 20 bp, Artificial Sequence
  Description of Artificial Sequence: Synthetic oligonucleotide
  Target: LAMA2; (+) strand; PAM type: YTN; PAM sequence: CTA
ctgtgtgtgtagaagaaggg

SEQ ID NO: 333072 - DNA, 20 bp, Artificial Sequence
  Description of Artificial Sequence: Synthetic oligonucleotide
  Target: LAMA2; (+) strand; PAM type: YTN; PAM sequence: CTG
tgtgtgtagaagaaggggaa

SEQ ID NO: 333073 - DNA, 20 bp, Artificial Sequence
  Description of Artificial Sequence: Synthetic oligonucleotide
  Target: LAMA2; (+) strand; PAM type: YTN; PAM sequence: TTC
aagtaatctctaaaaatgta

SEQ ID NO: 333074 - DNA, 20 bp, Artificial Sequence
  Description of Artificial Sequence: Synthetic oligonucleotide
  Target: LAMA2; (+) strand; PAM type: YTN; PAM sequence: CTC
taaaaatgtaataaatcctt

SEQ ID NO: 333075 - DNA, 20 bp, Artificial Sequence
  Description of Artificial Sequence: Synthetic oligonucleotide
  Target: LAMA2; (+) strand; PAM type: YTN; PAM sequence: CTA
aaaatgtaataaatccttat

SEQ ID NO: 333076 - DNA, 20 bp, Artificial Sequence
  Description of Artificial Sequence: Synthetic oligonucleotide
  Target: LAMA2; (+) strand; PAM type: YTN; PAM sequence: CTT
atttctacttgactcaagat

SEQ ID NO: 333077 - DNA, 20 bp, Artificial Sequence
  Description of Artificial Sequence: Synthetic oligonucleotide
  Target: LAMA2; (+) strand; PAM type: YTN; PAM sequence: TTA
tttctacttgactcaagatt

SEQ ID NO: 333078 - DNA, 20 bp, Artificial Sequence
  Description of Artificial Sequence: Synthetic oligonucleotide
  Target: LAMA2; (+) strand; PAM type: YTN; PAM sequence: TTT
ctacttgactcaagatttta

SEQ ID NO: 333079 - DNA, 20 bp, Artificial Sequence
  Description of Artificial Sequence: Synthetic oligonucleotide
  Target: LAMA2; (+) strand; PAM type: YTN; PAM sequence: TTC
tacttgactcaagattttaa

SEQ ID NO: 333080 - DNA, 20 bp, Artificial Sequence
  Description of Artificial Sequence: Synthetic oligonucleotide
  Target: LAMA2; (+) strand; PAM type: YTN; PAM sequence: CTA
cttgactcaagattttaatt

SEQ ID NO: 333081 - DNA, 20 bp, Artificial Sequence
  Description of Artificial Sequence: Synthetic oligonucleotide
  Target: LAMA2; (+) strand; PAM type: YTN; PAM sequence: CTT
gactcaagattttaatttag

SEQ ID NO: 333082 - DNA, 20 bp, Artificial Sequence
  Description of Artificial Sequence: Synthetic oligonucleotide
  Target: LAMA2; (+) strand; PAM type: YTN; PAM sequence: TTG
actcaagattttaatttagt

SEQ ID NO: 333083 - DNA, 20 bp, Artificial Sequence
  Description of Artificial Sequence: Synthetic oligonucleotide
  Target: LAMA2; (+) strand; PAM type: YTN; PAM sequence: CTC
aagattttaatttagtcagt

SEQ ID NO: 333084 - DNA, 20 bp, Artificial Sequence
  Description of Artificial Sequence: Synthetic oligonucleotide
  Target: LAMA2; (+) strand; PAM type: YTN; PAM sequence: TTT
taatttagtcagttatttag

SEQ ID NO: 333085 - DNA, 20 bp, Artificial Sequence
  Description of Artificial Sequence: Synthetic oligonucleotide
  Target: LAMA2; (+) strand; PAM type: YTN; PAM sequence: TTT
aatttagtcagttatttagt

SEQ ID NO: 333086 - DNA, 20 bp, Artificial Sequence
  Description of Artificial Sequence: Synthetic oligonucleotide
  Target: LAMA2; (+) strand; PAM type: YTN; PAM sequence: TTA
atttagtcagttatttagtg

SEQ ID NO: 333087 - DNA, 20 bp, Artificial Sequence
  Description of Artificial Sequence: Synthetic oligonucleotide
  Target: LAMA2; (+) strand; PAM type: YTN; PAM sequence: TTT
agtcagttatttagtgatgt

SEQ ID NO: 333088 - DNA, 20 bp, Artificial Sequence
  Description of Artificial Sequence: Synthetic oligonucleotide
  Target: LAMA2; (+) strand; PAM type: YTN; PAM sequence: TTA
gtcagttatttagtgatgtg

SEQ ID NO: 333089 - DNA, 20 bp, Artificial Sequence
  Description of Artificial Sequence: Synthetic oligonucleotide
  Target: LAMA2; (+) strand; PAM type: YTN; PAM sequence: TTA
tttagtgatgtgaaaagtta

SEQ ID NO: 333090 - DNA, 20 bp, Artificial Sequence
  Description of Artificial Sequence: Synthetic oligonucleotide
  Target: LAMA2; (+) strand; PAM type: YTN; PAM sequence: TTT
agtgatgtgaaaagttaaac

SEQ ID NO: 333091 - DNA, 20 bp, Artificial Sequence
  Description of Artificial Sequence: Synthetic oligonucleotide
  Target: LAMA2; (+) strand; PAM type: YTN; PAM sequence: TTA
gtgatgtgaaaagttaaaca

SEQ ID NO: 333092 - DNA, 20 bp, Artificial Sequence
  Description of Artificial Sequence: Synthetic oligonucleotide
  Target: LAMA2; (+) strand; PAM type: YTN; PAM sequence: TTA
aacaggttttgtaatcaagt

SEQ ID NO: 333093 - DNA, 20 bp, Artificial Sequence
  Description of Artificial Sequence: Synthetic oligonucleotide
  Target: LAMA2; (+) strand; PAM type: YTN; PAM sequence: TTT
tgtaatcaagtttcgtgatg

SEQ ID NO: 333094 - DNA, 20 bp, Artificial Sequence
  Description of Artificial Sequence: Synthetic oligonucleotide
  Target: LAMA2; (+) strand; PAM type: YTN; PAM sequence: TTT
gtaatcaagtttcgtgatgg

SEQ ID NO: 333095 - DNA, 20 bp, Artificial Sequence
  Description of Artificial Sequence: Synthetic oligonucleotide
  Target: LAMA2; (+) strand; PAM type: YTN; PAM sequence: TTG
taatcaagtttcgtgatgga

SEQ ID NO: 333096 - DNA, 20 bp, Artificial Sequence
  Description of Artificial Sequence: Synthetic oligonucleotide
  Target: LAMA2; (+) strand; PAM type: YTN; PAM sequence: TTT
cgtgatggaacttctcagac

SEQ ID NO: 333097 - DNA, 20 bp, Artificial Sequence
  Description of Artificial Sequence: Synthetic oligonucleotide
  Target: LAMA2; (+) strand; PAM type: YTN; PAM sequence: TTC
gtgatggaacttctcagaca

SEQ ID NO: 333098 - DNA, 20 bp, Artificial Sequence
  Description of Artificial Sequence: Synthetic oligonucleotide
  Target: LAMA2; (+) strand; PAM type: YTN; PAM sequence: CTT
ctcagacaagaaagagcttc

SEQ ID NO: 333099 - DNA, 20 bp, Artificial Sequence
  Description of Artificial Sequence: Synthetic oligonucleotide
  Target: LAMA2; (+) strand; PAM type: YTN; PAM sequence: TTC
tcagacaagaaagagcttca

SEQ ID NO: 333100 - DNA, 20 bp, Artificial Sequence
  Description of Artificial Sequence: Synthetic oligonucleotide
  Target: LAMA2; (+) strand; PAM type: YTN; PAM sequence: CTC
agacaagaaagagcttcaga

SEQ ID NO: 333101 - DNA, 20 bp, Artificial Sequence
  Description of Artificial Sequence: Synthetic oligonucleotide
  Target: LAMA2; (+) strand; PAM type: YTN; PAM sequence: CTT
cagacttccaatttggcctc

SEQ ID NO: 333102 - DNA, 20 bp, Artificial Sequence
  Description of Artificial Sequence: Synthetic oligonucleotide
  Target: LAMA2; (+) strand; PAM type: YTN; PAM sequence: TTC
agacttccaatttggcctca

SEQ ID NO: 333103 - DNA, 20 bp, Artificial Sequence
  Description of Artificial Sequence: Synthetic oligonucleotide
  Target: LAMA2; (+) strand; PAM type: YTN; PAM sequence: CTT
ccaatttggcctcaggcttt

SEQ ID NO: 333104 - DNA, 20 bp, Artificial Sequence
  Description of Artificial Sequence: Synthetic oligonucleotide
  Target: LAMA2; (+) strand; PAM type: YTN; PAM sequence: TTC
caatttggcctcaggctttg

SEQ ID NO: 333105 - DNA, 20 bp, Artificial Sequence
  Description of Artificial Sequence: Synthetic oligonucleotide
  Target: LAMA2; (+) strand; PAM type: YTN; PAM sequence: TTT
ggcctcaggctttggaataa

SEQ ID NO: 333106 - DNA, 20 bp, Artificial Sequence
  Description of Artificial Sequence: Synthetic oligonucleotide
  Target: LAMA2; (+) strand; PAM type: YTN; PAM sequence: TTG
gcctcaggctttggaataac

SEQ ID NO: 333107 - DNA, 20 bp, Artificial Sequence
  Description of Artificial Sequence: Synthetic oligonucleotide
  Target: LAMA2; (+) strand; PAM type: YTN; PAM sequence: CTC
aggctttggaataacaaact

SEQ ID NO: 333108 - DNA, 20 bp, Artificial Sequence
  Description of Artificial Sequence: Synthetic oligonucleotide
  Target: LAMA2; (+) strand; PAM type: YTN; PAM sequence: CTT
tggaataacaaactgtgaga

SEQ ID NO: 333109 - DNA, 20 bp, Artificial Sequence
  Description of Artificial Sequence: Synthetic oligonucleotide
  Target: LAMA2; (+) strand; PAM type: YTN; PAM sequence: TTT
ggaataacaaactgtgagac

SEQ ID NO: 333110 - DNA, 20 bp, Artificial Sequence
  Description of Artificial Sequence: Synthetic oligonucleotide
  Target: LAMA2; (+) strand; PAM type: YTN; PAM sequence: TTG
gaataacaaactgtgagaca

SEQ ID NO: 333111 - DNA, 20 bp, Artificial Sequence
  Description of Artificial Sequence: Synthetic oligonucleotide
  Target: LAMA2; (+) strand; PAM type: YTN; PAM sequence: CTG
tgagacatgtttataatact

SEQ ID NO: 333112 - DNA, 20 bp, Artificial Sequence
  Description of Artificial Sequence: Synthetic oligonucleotide
  Target: LAMA2; (+) strand; PAM type: YTN; PAM sequence: TTT
ataatacttattcagctatg

SEQ ID NO: 333113 - DNA, 20 bp, Artificial Sequence
  Description of Artificial Sequence: Synthetic oligonucleotide
  Target: LAMA2; (+) strand; PAM type: YTN; PAM sequence: TTA
taatacttattcagctatgg

SEQ ID NO: 333114 - DNA, 20 bp, Artificial Sequence
  Description of Artificial Sequence: Synthetic oligonucleotide
  Target: LAMA2; (+) strand; PAM type: YTN; PAM sequence: CTT
attcagctatggatggtata

SEQ ID NO: 333115 - DNA, 20 bp, Artificial Sequence
  Description of Artificial Sequence: Synthetic oligonucleotide
  Target: LAMA2; (+) strand; PAM type: YTN; PAM sequence: TTA
ttcagctatggatggtatat

SEQ ID NO: 333116 - DNA, 20 bp, Artificial Sequence
  Description of Artificial Sequence: Synthetic oligonucleotide
  Target: LAMA2; (+) strand; PAM type: YTN; PAM sequence: TTC
agctatggatggtatattgt

SEQ ID NO: 333117 - DNA, 20 bp, Artificial Sequence
  Description of Artificial Sequence: Synthetic oligonucleotide
  Target: LAMA2; (+) strand; PAM type: YTN; PAM sequence: CTA
tggatggtatattgtactgc

SEQ ID NO: 333118 - DNA, 20 bp, Artificial Sequence
  Description of Artificial Sequence: Synthetic oligonucleotide
  Target: LAMA2; (+) strand; PAM type: YTN; PAM sequence: TTG
tactgcactggcaacagaga

SEQ ID NO: 333119 - DNA, 20 bp, Artificial Sequence
  Description of Artificial Sequence: Synthetic oligonucleotide
  Target: LAMA2; (+) strand; PAM type: YTN; PAM sequence: CTG
cactggcaacagagaaaatg

SEQ ID NO: 333120 - DNA, 20 bp, Artificial Sequence
  Description of Artificial Sequence: Synthetic oligonucleotide
  Target: LAMA2; (+) strand; PAM type: YTN; PAM sequence: CTG
gcaacagagaaaatgtggac

SEQ ID NO: 333121 - DNA, 20 bp, Artificial Sequence
  Description of Artificial Sequence: Synthetic oligonucleotide
  Target: LAMA2; (+) strand; PAM type: YTN; PAM sequence: TTC
ttattatgtaactcctcaca

SEQ ID NO: 333122 - DNA, 20 bp, Artificial Sequence
  Description of Artificial Sequence: Synthetic oligonucleotide
  Target: LAMA2; (+) strand; PAM type: YTN; PAM sequence: CTT
attatgtaactcctcacaat

SEQ ID NO: 333123 - DNA, 20 bp, Artificial Sequence
  Description of Artificial Sequence: Synthetic oligonucleotide
  Target: LAMA2; (+) strand; PAM type: YTN; PAM sequence: TTA
ttatgtaactcctcacaata

SEQ ID NO: 333124 - DNA, 20 bp, Artificial Sequence
  Description of Artificial Sequence: Synthetic oligonucleotide
  Target: LAMA2; (+) strand; PAM type: YTN; PAM sequence: TTA
tgtaactcctcacaataatc

SEQ ID NO: 333125 - DNA, 20 bp, Artificial Sequence
  Description of Artificial Sequence: Synthetic oligonucleotide
  Target: LAMA2; (+) strand; PAM type: YTN; PAM sequence: CTC
ctcacaataatcctgaataa

SEQ ID NO: 333126 - DNA, 20 bp, Artificial Sequence
  Description of Artificial Sequence: Synthetic oligonucleotide
  Target: LAMA2; (+) strand; PAM type: YTN; PAM sequence: CTC
acaataatcctgaataaacc

SEQ ID NO: 333127 - DNA, 20 bp, Artificial Sequence
  Description of Artificial Sequence: Synthetic oligonucleotide
  Target: LAMA2; (+) strand; PAM type: YTN; PAM sequence: CTG
aataaaccagctaatattaa

SEQ ID NO: 333128 - DNA, 20 bp, Artificial Sequence
  Description of Artificial Sequence: Synthetic oligonucleotide
  Target: LAMA2; (+) strand; PAM type: YTN; PAM sequence: CTA
atattaatattcctattgca

SEQ ID NO: 333129 - DNA, 20 bp, Artificial Sequence
  Description of Artificial Sequence: Synthetic oligonucleotide
  Target: LAMA2; (+) strand; PAM type: YTN; PAM sequence: TTA
atattcctattgcatagttg

SEQ ID NO: 333130 - DNA, 20 bp, Artificial Sequence
  Description of Artificial Sequence: Synthetic oligonucleotide
  Target: LAMA2; (+) strand; PAM type: YTN; PAM sequence: TTC
ctattgcatagttgaagaac

SEQ ID NO: 333131 - DNA, 20 bp, Artificial Sequence
  Description of Artificial Sequence: Synthetic oligonucleotide
  Target: LAMA2; (+) strand; PAM type: YTN; PAM sequence: CTA
ttgcatagttgaagaacact

SEQ ID NO: 333132 - DNA, 20 bp, Artificial Sequence
  Description of Artificial Sequence: Synthetic oligonucleotide
  Target: LAMA2; (+) strand; PAM type: YTN; PAM sequence: TTG
catagttgaagaacactgtg

SEQ ID NO: 333133 - DNA, 20 bp, Artificial Sequence
  Description of Artificial Sequence: Synthetic oligonucleotide
  Target: LAMA2; (+) strand; PAM type: YTN; PAM sequence: TTG
aagaacactgtgctttagaa

SEQ ID NO: 333134 - DNA, 20 bp, Artificial Sequence
  Description of Artificial Sequence: Synthetic oligonucleotide
  Target: LAMA2; (+) strand; PAM type: YTN; PAM sequence: CTG
tgctttagaaaagttcagtg

SEQ ID NO: 333135 - DNA, 20 bp, Artificial Sequence
  Description of Artificial Sequence: Synthetic oligonucleotide
  Target: LAMA2; (+) strand; PAM type: YTN; PAM sequence: CTT
tagaaaagttcagtgacttg

SEQ ID NO: 333136 - DNA, 20 bp, Artificial Sequence
  Description of Artificial Sequence: Synthetic oligonucleotide
  Target: LAMA2; (+) strand; PAM type: YTN; PAM sequence: TTT
agaaaagttcagtgacttgg

SEQ ID NO: 333137 - DNA, 20 bp, Artificial Sequence
  Description of Artificial Sequence: Synthetic oligonucleotide
  Target: LAMA2; (+) strand; PAM type: YTN; PAM sequence: TTA
gaaaagttcagtgacttggc

SEQ ID NO: 333138 - DNA, 20 bp, Artificial Sequence
  Description of Artificial Sequence: Synthetic oligonucleotide
  Target: LAMA2; (+) strand; PAM type: YTN; PAM sequence: TTC
agtgacttggccttctttct

SEQ ID NO: 333139 - DNA, 20 bp, Artificial Sequence
  Description of Artificial Sequence: Synthetic oligonucleotide
  Target: LAMA2; (+) strand; PAM type: YTN; PAM sequence: CTT
ggccttctttctaaagctta

SEQ ID NO: 333140 - DNA, 20 bp, Artificial Sequence
  Description of Artificial Sequence: Synthetic oligonucleotide
  Target: LAMA2; (+) strand; PAM type: YTN; PAM sequence: TTG
gccttctttctaaagcttat

SEQ ID NO: 333141 - DNA, 20 bp, Artificial Sequence
  Description of Artificial Sequence: Synthetic oligonucleotide
  Target: LAMA2; (+) strand; PAM type: YTN; PAM sequence: CTT
ctttctaaagcttattatgg

SEQ ID NO: 333142 - DNA, 20 bp, Artificial Sequence
  Description of Artificial Sequence: Synthetic oligonucleotide
  Target: LAMA2; (+) strand; PAM type: YTN; PAM sequence: TTC
tttctaaagcttattatggg

SEQ ID NO: 333143 - DNA, 20 bp, Artificial Sequence
  Description of Artificial Sequence: Synthetic oligonucleotide
  Target: LAMA2; (+) strand; PAM type: YTN; PAM sequence: CTT
tctaaagcttattatgggca

SEQ ID NO: 333144 - DNA, 20 bp, Artificial Sequence
  Description of Artificial Sequence: Synthetic oligonucleotide
  Target: LAMA2; (+) strand; PAM type: YTN; PAM sequence: TTT
ctaaagcttattatgggcag

SEQ ID NO: 333145 - DNA, 20 bp, Artificial Sequence
  Description of Artificial Sequence: Synthetic oligonucleotide
  Target: LAMA2; (+) strand; PAM type: YTN; PAM sequence: TTC
taaagcttattatgggcagg

SEQ ID NO: 333146 - DNA, 20 bp, Artificial Sequence
  Description of Artificial Sequence: Synthetic oligonucleotide
  Target: LAMA2; (+) strand; PAM type: YTN; PAM sequence: CTA
aagcttattatgggcagggc

SEQ ID NO: 333147 - DNA, 20 bp, Artificial Sequence
  Description of Artificial Sequence: Synthetic oligonucleotide
  Target: LAMA2; (+) strand; PAM type: YTN; PAM sequence: CTT
attatgggcagggctggggc

SEQ ID NO: 333148 - DNA, 20 bp, Artificial Sequence
  Description of Artificial Sequence: Synthetic oligonucleotide
  Target: LAMA2; (+) strand; PAM type: YTN; PAM sequence: TTA
ttatgggcagggctggggca

SEQ ID NO: 333149 - DNA, 20 bp, Artificial Sequence
  Description of Artificial Sequence: Synthetic oligonucleotide
  Target: LAMA2; (+) strand; PAM type: YTN; PAM sequence: TTA
tgggcagggctggggcaaca

SEQ ID NO: 333150 - DNA, 20 bp, Artificial Sequence
  Description of Artificial Sequence: Synthetic oligonucleotide
  Target: LAMA2; (+) strand; PAM type: YTN; PAM sequence: CTG
gggcaacatgaatagtctga

SEQ ID NO: 333151 - DNA, 20 bp, Artificial Sequence
  Description of Artificial Sequence: Synthetic oligonucleotide
  Target: LAMA2; (+) strand; PAM type: YTN; PAM sequence: CTG
aatccagacccaaatacact

SEQ ID NO: 333152 - DNA, 20 bp, Artificial Sequence
  Description of Artificial Sequence: Synthetic oligonucleotide
  Target: LAMA2; (+) strand; PAM type: YTN; PAM sequence: CTA
tcttttctaatgggtatctg

SEQ ID NO: 333153 - DNA, 20 bp, Artificial Sequence
  Description of Artificial Sequence: Synthetic oligonucleotide
  Target: LAMA2; (+) strand; PAM type: YTN; PAM sequence: CTT
ttctaatgggtatctgaaga

SEQ ID NO: 333154 - DNA, 20 bp, Artificial Sequence
  Description of Artificial Sequence: Synthetic oligonucleotide
  Target: LAMA2; (+) strand; PAM type: YTN; PAM sequence: TTT
tctaatgggtatctgaagac

SEQ ID NO: 333155 - DNA, 20 bp, Artificial Sequence
  Description of Artificial Sequence: Synthetic oligonucleotide
  Target: LAMA2; (+) strand; PAM type: YTN; PAM sequence: TTT
ctaatgggtatctgaagaca

SEQ ID NO: 333156 - DNA, 20 bp, Artificial Sequence
  Description of Artificial Sequence: Synthetic oligonucleotide
  Target: LAMA2; (+) strand; PAM type: YTN; PAM sequence: TTC
taatgggtatctgaagacat

SEQ ID NO: 333157 - DNA, 20 bp, Artificial Sequence
  Description of Artificial Sequence: Synthetic oligonucleotide
  Target: LAMA2; (+) strand; PAM type: YTN; PAM sequence: CTA
atgggtatctgaagacataa

SEQ ID NO: 333158 - DNA, 20 bp, Artificial Sequence
  Description of Artificial Sequence: Synthetic oligonucleotide
  Target: LAMA2; (+) strand; PAM type: YTN; PAM sequence: CTG
aagacataatcctagggagc

SEQ ID NO: 333159 - DNA, 20 bp, Artificial Sequence
  Description of Artificial Sequence: Synthetic oligonucleotide
  Target: LAMA2; (+) strand; PAM type: YTN; PAM sequence: CTA
gggagctcaggataattttt

SEQ ID NO: 333160 - DNA, 20 bp, Artificial Sequence
  Description of Artificial Sequence: Synthetic oligonucleotide
  Target: LAMA2; (+) strand; PAM type: YTN; PAM sequence: CTC
aggataatttttattatata

SEQ ID NO: 333161 - DNA, 20 bp, Artificial Sequence
  Description of Artificial Sequence: Synthetic oligonucleotide
  Target: LAMA2; (+) strand; PAM type: YTN; PAM sequence: TTT
ttattatatattttcaaggg

SEQ ID NO: 333162 - DNA, 20 bp, Artificial Sequence
  Description of Artificial Sequence: Synthetic oligonucleotide
  Target: LAMA2; (+) strand; PAM type: YTN; PAM sequence: TTT
tattatatattttcaagggc

SEQ ID NO: 333163 - DNA, 20 bp, Artificial Sequence
  Description of Artificial Sequence: Synthetic oligonucleotide
  Target: LAMA2; (+) strand; PAM type: YTN; PAM sequence: TTT
attatatattttcaagggct

SEQ ID NO: 333164 - DNA, 20 bp, Artificial Sequence
  Description of Artificial Sequence: Synthetic oligonucleotide
  Target: LAMA2; (+) strand; PAM type: YTN; PAM sequence: TTA
ttatatattttcaagggctc

SEQ ID NO: 333165 - DNA, 20 bp, Artificial Sequence
  Description of Artificial Sequence: Synthetic oligonucleotide
  Target: LAMA2; (+) strand; PAM type: YTN; PAM sequence: TTA
tatattttcaagggctccaa

SEQ ID NO: 333166 - DNA, 20 bp, Artificial Sequence
  Description of Artificial Sequence: Synthetic oligonucleotide
  Target: LAMA2; (+) strand; PAM type: YTN; PAM sequence: TTT
tcaagggctccaaatgtagt

SEQ ID NO: 333167 - DNA, 20 bp, Artificial Sequence
  Description of Artificial Sequence: Synthetic oligonucleotide
  Target: LAMA2; (+) strand; PAM type: YTN; PAM sequence: TTT
caagggctccaaatgtagtt

SEQ ID NO: 333168 - DNA, 20 bp, Artificial Sequence
  Description of Artificial Sequence: Synthetic oligonucleotide
  Target: LAMA2; (+) strand; PAM type: YTN; PAM sequence: TTC
aagggctccaaatgtagttc

SEQ ID NO: 333169 - DNA, 20 bp, Artificial Sequence
  Description of Artificial Sequence: Synthetic oligonucleotide
  Target: LAMA2; (+) strand; PAM type: YTN; PAM sequence: CTC
caaatgtagttcaggttcaa

SEQ ID NO: 333170 - DNA, 20 bp, Artificial Sequence
  Description of Artificial Sequence: Synthetic oligonucleotide
  Target: LAMA2; (+) strand; PAM type: YTN; PAM sequence: TTC
aggttcaagaaatattgcac

SEQ ID NO: 333171 - DNA, 20 bp, Artificial Sequence
  Description of Artificial Sequence: Synthetic oligonucleotide
  Target: LAMA2; (+) strand; PAM type: YTN; PAM sequence: TTC
aagaaatattgcactatctt

SEQ ID NO: 333172 - DNA, 20 bp, Artificial Sequence
  Description of Artificial Sequence: Synthetic oligonucleotide
  Target: LAMA2; (+) strand; PAM type: YTN; PAM sequence: TTG
cactatcttctcctggcttc

SEQ ID NO: 333173 - DNA, 20 bp, Artificial Sequence
  Description of Artificial Sequence: Synthetic oligonucleotide
  Target: LAMA2; (+) strand; PAM type: YTN; PAM sequence: CTA
tcttctcctggcttctatgg

SEQ ID NO: 333174 - DNA, 20 bp, Artificial Sequence
  Description of Artificial Sequence: Synthetic oligonucleotide
  Target: LAMA2; (+) strand; PAM type: YTN; PAM sequence: CTT
ctcctggcttctatgggata

SEQ ID NO: 333175 - DNA, 20 bp, Artificial Sequence
  Description of Artificial Sequence: Synthetic oligonucleotide
  Target: LAMA2; (+) strand; PAM type: YTN; PAM sequence: TTC
tcctggcttctatgggataa

SEQ ID NO: 333176 - DNA, 20 bp, Artificial Sequence
  Description of Artificial Sequence: Synthetic oligonucleotide
  Target: LAMA2; (+) strand; PAM type: YTN; PAM sequence: CTC
ctggcttctatgggataata

SEQ ID NO: 333177 - DNA, 20 bp, Artificial Sequence
  Description of Artificial Sequence: Synthetic oligonucleotide
  Target: LAMA2; (+) strand; PAM type: YTN; PAM sequence: CTG
gcttctatgggataatatag

SEQ ID NO: 333178 - DNA, 20 bp, Artificial Sequence
  Description of Artificial Sequence: Synthetic oligonucleotide
  Target: LAMA2; (+) strand; PAM type: YTN; PAM sequence: CTT
ctatgggataatatagccaa

SEQ ID NO: 333179 - DNA, 20 bp, Artificial Sequence
  Description of Artificial Sequence: Synthetic oligonucleotide
  Target: LAMA2; (+) strand; PAM type: YTN; PAM sequence: TTC
tatgggataatatagccaac

SEQ ID NO: 333180 - DNA, 20 bp, Artificial Sequence
  Description of Artificial Sequence: Synthetic oligonucleotide
  Target: LAMA2; (+) strand; PAM type: YTN; PAM sequence: CTA
tgggataatatagccaacaa

SEQ ID NO: 333181 - DNA, 20 bp, Artificial Sequence
  Description of Artificial Sequence: Synthetic oligonucleotide
  Target: LAMA2; (+) strand; PAM type: YTN; PAM sequence: CTG
tttcgttataaagcagggga

SEQ ID NO: 333182 - DNA, 20 bp, Artificial Sequence
  Description of Artificial Sequence: Synthetic oligonucleotide
  Target: LAMA2; (+) strand; PAM type: YTN; PAM sequence: TTT
cgttataaagcaggggacta

SEQ ID NO: 333183 - DNA, 20 bp, Artificial Sequence
  Description of Artificial Sequence: Synthetic oligonucleotide
  Target: LAMA2; (+) strand; PAM type: YTN; PAM sequence: TTC
gttataaagcaggggactag

SEQ ID NO: 333184 - DNA, 20 bp, Artificial Sequence
  Description of Artificial Sequence: Synthetic oligonucleotide
  Target: LAMA2; (+) strand; PAM type: YTN; PAM sequence: TTA
taaagcaggggactagaacc

SEQ ID NO: 333185 - DNA, 20 bp, Artificial Sequence
  Description of Artificial Sequence: Synthetic oligonucleotide
  Target: LAMA2; (+) strand; PAM type: YTN; PAM sequence: CTA
gaaccctcattttctagtat

SEQ ID NO: 333186 - DNA, 20 bp, Artificial Sequence
  Description of Artificial Sequence: Synthetic oligonucleotide
  Target: LAMA2; (+) strand; PAM type: YTN; PAM sequence: CTC
attttctagtatactctagt

SEQ ID NO: 333187 - DNA, 20 bp, Artificial Sequence
  Description of Artificial Sequence: Synthetic oligonucleotide
  Target: LAMA2; (+) strand; PAM type: YTN; PAM sequence: TTT
tctagtatactctagtgtgc

SEQ ID NO: 333188 - DNA, 20 bp, Artificial Sequence
  Description of Artificial Sequence: Synthetic oligonucleotide
  Target: LAMA2; (+) strand; PAM type: YTN; PAM sequence: TTT
ctagtatactctagtgtgcc

SEQ ID NO: 333189 - DNA, 20 bp, Artificial Sequence
  Description of Artificial Sequence: Synthetic oligonucleotide
  Target: LAMA2; (+) strand; PAM type: YTN; PAM sequence: TTC
tagtatactctagtgtgcct

SEQ ID NO: 333190 - DNA, 20 bp, Artificial Sequence
  Description of Artificial Sequence: Synthetic oligonucleotide
  Target: LAMA2; (+) strand; PAM type: YTN; PAM sequence: CTA
gtatactctagtgtgcctct

SEQ ID NO: 333191 - DNA, 20 bp, Artificial Sequence
  Description of Artificial Sequence: Synthetic oligonucleotide
  Target: LAMA2; (+) strand; PAM type: YTN; PAM sequence: CTC
tagtgtgcctctaaaatggc

SEQ ID NO: 333192 - DNA, 20 bp, Artificial Sequence
  Description of Artificial Sequence: Synthetic oligonucleotide
  Target: LAMA2; (+) strand; PAM type: YTN; PAM sequence: CTA
gtgtgcctctaaaatggcaa

SEQ ID NO: 333193 - DNA, 20 bp, Artificial Sequence
  Description of Artificial Sequence: Synthetic oligonucleotide
  Target: LAMA2; (+) strand; PAM type: YTN; PAM sequence: CTC
taaaatggcaaagcttctgt

SEQ ID NO: 333194 - DNA, 20 bp, Artificial Sequence
  Description of Artificial Sequence: Synthetic oligonucleotide
  Target: LAMA2; (+) strand; PAM type: YTN; PAM sequence: CTA
aaatggcaaagcttctgtct

SEQ ID NO: 333195 - DNA, 20 bp, Artificial Sequence
  Description of Artificial Sequence: Synthetic oligonucleotide
  Target: LAMA2; (+) strand; PAM type: YTN; PAM sequence: CTT
ctgtcttttctacctaccgc

SEQ ID NO: 333196 - DNA, 20 bp, Artificial Sequence
  Description of Artificial Sequence: Synthetic oligonucleotide
  Target: LAMA2; (+) strand; PAM type: YTN; PAM sequence: TTC
tgtcttttctacctaccgca

SEQ ID NO: 333197 - DNA, 20 bp, Artificial Sequence
  Description of Artificial Sequence: Synthetic oligonucleotide
  Target: LAMA2; (+) strand; PAM type: YTN; PAM sequence: CTG
tcttttctacctaccgcatg

SEQ ID NO: 333198 - DNA, 20 bp, Artificial Sequence
  Description of Artificial Sequence: Synthetic oligonucleotide
  Target: LAMA2; (+) strand; PAM type: YTN; PAM sequence: CTT
ttctacctaccgcatgaagg

SEQ ID NO: 333199 - DNA, 20 bp, Artificial Sequence
  Description of Artificial Sequence: Synthetic oligonucleotide
  Target: LAMA2; (+) strand; PAM type: YTN; PAM sequence: TTT
tctacctaccgcatgaagga

SEQ ID NO: 333200 - DNA, 20 bp, Artificial Sequence
  Description of Artificial Sequence: Synthetic oligonucleotide
  Target: LAMA2; (+) strand; PAM type: YTN; PAM sequence: TTT
ctacctaccgcatgaaggat

SEQ ID NO: 333201 - DNA, 20 bp, Artificial Sequence
  Description of Artificial Sequence: Synthetic oligonucleotide
  Target: LAMA2; (+) strand; PAM type: YTN; PAM sequence: TTC
tacctaccgcatgaaggatt

SEQ ID NO: 333202 - DNA, 20 bp, Artificial Sequence
  Description of Artificial Sequence: Synthetic oligonucleotide
  Target: LAMA2; (+) strand; PAM type: YTN; PAM sequence: CTA
cctaccgcatgaaggattaa

SEQ ID NO: 333203 - DNA, 20 bp, Artificial Sequence
  Description of Artificial Sequence: Synthetic oligonucleotide
  Target: LAMA2; (+) strand; PAM type: YTN; PAM sequence: CTA
ccgcatgaaggattaatagg

SEQ ID NO: 333204 - DNA, 20 bp, Artificial Sequence
  Description of Artificial Sequence: Synthetic oligonucleotide
  Target: LAMA2; (+) strand; PAM type: YTN; PAM sequence: TTA
ataggttattcaaaataaga

SEQ ID NO: 333205 - DNA, 20 bp, Artificial Sequence
  Description of Artificial Sequence: Synthetic oligonucleotide
  Target: LAMA2; (+) strand; PAM type: YTN; PAM sequence: TTA
ttcaaaataagatgagctat

SEQ ID NO: 333206 - DNA, 20 bp, Artificial Sequence
  Description of Artificial Sequence: Synthetic oligonucleotide
  Target: LAMA2; (+) strand; PAM type: YTN; PAM sequence: TTC
aaaataagatgagctattat

SEQ ID NO: 333207 - DNA, 20 bp, Artificial Sequence
  Description of Artificial Sequence: Synthetic oligonucleotide
  Target: LAMA2; (+) strand; PAM type: YTN; PAM sequence: CTA
ttatccaactgggattaaaa

SEQ ID NO: 333208 - DNA, 20 bp, Artificial Sequence
  Description of Artificial Sequence: Synthetic oligonucleotide
  Target: LAMA2; (+) strand; PAM type: YTN; PAM sequence: TTA
tccaactgggattaaaaggc

SEQ ID NO: 333209 - DNA, 20 bp, Artificial Sequence
  Description of Artificial Sequence: Synthetic oligonucleotide
  Target: LAMA2; (+) strand; PAM type: YTN; PAM sequence: CTG
ggattaaaaggcagtaaaat

SEQ ID NO: 333210 - DNA, 20 bp, Artificial Sequence
  Description of Artificial Sequence: Synthetic oligonucleotide
  Target: LAMA2; (+) strand; PAM type: YTN; PAM sequence: TTA
aaaggcagtaaaattataat

SEQ ID NO: 333211 - DNA, 20 bp, Artificial Sequence
  Description of Artificial Sequence: Synthetic oligonucleotide
  Target: LAMA2; (+) strand; PAM type: YTN; PAM sequence: TTA
taatgaataggtaaatatca

SEQ ID NO: 333212 - DNA, 20 bp, Artificial Sequence
  Description of Artificial Sequence: Synthetic oligonucleotide
  Target: LAMA2; (+) strand; PAM type: YTN; PAM sequence: CTA
aatgtttgtttgtcatttat

SEQ ID NO: 333213 - DNA, 20 bp, Artificial Sequence
  Description of Artificial Sequence: Synthetic oligonucleotide
  Target: LAMA2; (+) strand; PAM type: YTN; PAM sequence: TTT
gtttgtcatttattcagcaa

SEQ ID NO: 333214 - DNA, 20 bp, Artificial Sequence
  Description of Artificial Sequence: Synthetic oligonucleotide
  Target: LAMA2; (+) strand; PAM type: YTN; PAM sequence: TTG
tttgtcatttattcagcaag

SEQ ID NO: 333215 - DNA, 20 bp, Artificial Sequence
  Description of Artificial Sequence: Synthetic oligonucleotide
  Target: LAMA2; (+) strand; PAM type: YTN; PAM sequence: TTT
gtcatttattcagcaagaga

SEQ ID NO: 333216 - DNA, 20 bp, Artificial Sequence
  Description of Artificial Sequence: Synthetic oligonucleotide
  Target: LAMA2; (+) strand; PAM type: YTN; PAM sequence: TTG
tcatttattcagcaagagac

SEQ ID NO: 333217 - DNA, 20 bp, Artificial Sequence
  Description of Artificial Sequence: Synthetic oligonucleotide
  Target: LAMA2; (+) strand; PAM type: YTN; PAM sequence: TTT
attcagcaagagacttgacc

SEQ ID NO: 333218 - DNA, 20 bp, Artificial Sequence
  Description of Artificial Sequence: Synthetic oligonucleotide
  Target: LAMA2; (+) strand; PAM type: YTN; PAM sequence: TTA
ttcagcaagagacttgacca

SEQ ID NO: 333219 - DNA, 20 bp, Artificial Sequence
  Description of Artificial Sequence: Synthetic oligonucleotide
  Target: LAMA2; (+) strand; PAM type: YTN; PAM sequence: TTC
agcaagagacttgaccattt

SEQ ID NO: 333220 - DNA, 20 bp, Artificial Sequence
  Description of Artificial Sequence: Synthetic oligonucleotide
  Target: LAMA2; (+) strand; PAM type: YTN; PAM sequence: CTT
gaccatttattagttcttct

SEQ ID NO: 333221 - DNA, 20 bp, Artificial Sequence
  Description of Artificial Sequence: Synthetic oligonucleotide
  Target: LAMA2; (+) strand; PAM type: YTN; PAM sequence: TTG
accatttattagttcttctt

SEQ ID NO: 333222 - DNA, 20 bp, Artificial Sequence
  Description of Artificial Sequence: Synthetic oligonucleotide
  Target: LAMA2; (+) strand; PAM type: YTN; PAM sequence: TTT
attagttcttcttttgtata

SEQ ID NO: 333223 - DNA, 20 bp, Artificial Sequence
  Description of Artificial Sequence: Synthetic oligonucleotide
  Target: LAMA2; (+) strand; PAM type: YTN; PAM sequence: TTA
ttagttcttcttttgtataa

SEQ ID NO: 333224 - DNA, 20 bp, Artificial Sequence
  Description of Artificial Sequence: Synthetic oligonucleotide
  Target: LAMA2; (+) strand; PAM type: YTN; PAM sequence: TTA
gttcttcttttgtataaatt

SEQ ID NO: 333225 - DNA, 20 bp, Artificial Sequence
  Description of Artificial Sequence: Synthetic oligonucleotide
  Target: LAMA2; (+) strand; PAM type: YTN; PAM sequence: TTC
ttcttttgtataaatttcaa

SEQ ID NO: 333226 - DNA, 20 bp, Artificial Sequence
  Description of Artificial Sequence: Synthetic oligonucleotide
  Target: LAMA2; (+) strand; PAM type: YTN; PAM sequence: CTT
cttttgtataaatttcaaca

SEQ ID NO: 333227 - DNA, 20 bp, Artificial Sequence
  Description of Artificial Sequence: Synthetic oligonucleotide
  Target: LAMA2; (+) strand; PAM type: YTN; PAM sequence: TTC
ttttgtataaatttcaacaa

SEQ ID NO: 333228 - DNA, 20 bp, Artificial Sequence
  Description of Artificial Sequence: Synthetic oligonucleotide
  Target: LAMA2; (+) strand; PAM type: YTN; PAM sequence: CTT
ttgtataaatttcaacaagt

SEQ ID NO: 333229 - DNA, 20 bp, Artificial Sequence
  Description of Artificial Sequence: Synthetic oligonucleotide
  Target: LAMA2; (+) strand; PAM type: YTN; PAM sequence: TTT
tgtataaatttcaacaagtg

SEQ ID NO: 333230 - DNA, 20 bp, Artificial Sequence
  Description of Artificial Sequence: Synthetic oligonucleotide
  Target: LAMA2; (+) strand; PAM type: YTN; PAM sequence: TTT
gtataaatttcaacaagtgc

SEQ ID NO: 333231 - DNA, 20 bp, Artificial Sequence
  Description of Artificial Sequence: Synthetic oligonucleotide
  Target: LAMA2; (+) strand; PAM type: YTN; PAM sequence: TTG
tataaatttcaacaagtgcc

SEQ ID NO: 333232 - DNA, 20 bp, Artificial Sequence
  Description of Artificial Sequence: Synthetic oligonucleotide
  Target: LAMA2; (+) strand; PAM type: YTN; PAM sequence: TTT
caacaagtgccagtattgtt

SEQ ID NO: 333233 - DNA, 20 bp, Artificial Sequence
  Description of Artificial Sequence: Synthetic oligonucleotide
  Target: LAMA2; (+) strand; PAM type: YTN; PAM sequence: TTC
aacaagtgccagtattgttg

SEQ ID NO: 333234 - DNA, 20 bp, Artificial Sequence
  Description of Artificial Sequence: Synthetic oligonucleotide
  Target: LAMA2; (+) strand; PAM type: YTN; PAM sequence: TTG
ttgttgataaatgcttggct

SEQ ID NO: 333235 - DNA, 20 bp, Artificial Sequence
  Description of Artificial Sequence: Synthetic oligonucleotide
  Target: LAMA2; (+) strand; PAM type: YTN; PAM sequence: TTG
ttgataaatgcttggctcct

SEQ ID NO: 333236 - DNA, 20 bp, Artificial Sequence
  Description of Artificial Sequence: Synthetic oligonucleotide
  Target: LAMA2; (+) strand; PAM type: YTN; PAM sequence: TTG
ataaatgcttggctcctctg

SEQ ID NO: 333237 - DNA, 20 bp, Artificial Sequence
  Description of Artificial Sequence: Synthetic oligonucleotide
  Target: LAMA2; (+) strand; PAM type: YTN; PAM sequence: CTT
ggctcctctgtgacacattt

SEQ ID NO: 333238 - DNA, 20 bp, Artificial Sequence
  Description of Artificial Sequence: Synthetic oligonucleotide
  Target: LAMA2; (+) strand; PAM type: YTN; PAM sequence: TTG
gctcctctgtgacacatttt

SEQ ID NO: 333239 - DNA, 20 bp, Artificial Sequence
  Description of Artificial Sequence: Synthetic oligonucleotide
  Target: LAMA2; (+) strand; PAM type: YTN; PAM sequence: CTC
ctctgtgacacattttcata

SEQ ID NO: 333240 - DNA, 20 bp, Artificial Sequence
  Description of Artificial Sequence: Synthetic oligonucleotide
  Target: LAMA2; (+) strand; PAM type: YTN; PAM sequence: CTC
tgtgacacattttcataaat

SEQ ID NO: 333241 - DNA, 20 bp, Artificial Sequence
  Description of Artificial Sequence: Synthetic oligonucleotide
  Target: LAMA2; (+) strand; PAM type: YTN; PAM sequence: CTG
tgacacattttcataaatta

SEQ ID NO: 333242 - DNA, 20 bp, Artificial Sequence
  Description of Artificial Sequence: Synthetic oligonucleotide
  Target: LAMA2; (+) strand; PAM type: YTN; PAM sequence: TTT
tcataaattagtatcttaaa

SEQ ID NO: 333243 - DNA, 20 bp, Artificial Sequence
  Description of Artificial Sequence: Synthetic oligonucleotide
  Target: LAMA2; (+) strand; PAM type: YTN; PAM sequence: TTT
cataaattagtatcttaaac

SEQ ID NO: 333244 - DNA, 20 bp, Artificial Sequence
  Description of Artificial Sequence: Synthetic oligonucleotide
  Target: LAMA2; (+) strand; PAM type: YTN; PAM sequence: TTC
ataaattagtatcttaaaca

SEQ ID NO: 333245 - DNA, 20 bp, Artificial Sequence
  Description of Artificial Sequence: Synthetic oligonucleotide
  Target: LAMA2; (+) strand; PAM type: YTN; PAM sequence: TTA
gtatcttaaacataacagaa

SEQ ID NO: 333246 - DNA, 20 bp, Artificial Sequence
  Description of Artificial Sequence: Synthetic oligonucleotide
  Target: LAMA2; (+) strand; PAM type: YTN; PAM sequence: CTT
aaacataacagaaacgattg

SEQ ID NO: 333247 - DNA, 20 bp, Artificial Sequence
  Description of Artificial Sequence: Synthetic oligonucleotide
  Target: LAMA2; (+) strand; PAM type: YTN; PAM sequence: TTA
aacataacagaaacgattgc

SEQ ID NO: 333248 - DNA, 20 bp, Artificial Sequence
  Description of Artificial Sequence: Synthetic oligonucleotide
  Target: LAMA2; (+) strand; PAM type: YTN; PAM sequence: TTG
catttatttgattaaatcac

SEQ ID NO: 333249 - DNA, 20 bp, Artificial Sequence
  Description of Artificial Sequence: Synthetic oligonucleotide
  Target: LAMA2; (+) strand; PAM type: YTN; PAM sequence: TTT
atttgattaaatcactatag

SEQ ID NO: 333250 - DNA, 20 bp, Artificial Sequence
  Description of Artificial Sequence: Synthetic oligonucleotide
  Target: LAMA2; (+) strand; PAM type: YTN; PAM sequence: TTA
tttgattaaatcactataga

SEQ ID NO: 333251 - DNA, 20 bp, Artificial Sequence
  Description of Artificial Sequence: Synthetic oligonucleotide
  Target: LAMA2; (+) strand; PAM type: YTN; PAM sequence: TTT
gattaaatcactatagatta

SEQ ID NO: 333252 - DNA, 20 bp, Artificial Sequence
  Description of Artificial Sequence: Synthetic oligonucleotide
  Target: LAMA2; (+) strand; PAM type: YTN; PAM sequence: TTG
attaaatcactatagattac

SEQ ID NO: 333253 - DNA, 20 bp, Artificial Sequence
  Description of Artificial Sequence: Synthetic oligonucleotide
  Target: LAMA2; (+) strand; PAM type: YTN; PAM sequence: TTA
aatcactatagattacagtg

SEQ ID NO: 333254 - DNA, 20 bp, Artificial Sequence
  Description of Artificial Sequence: Synthetic oligonucleotide
  Target: LAMA2; (+) strand; PAM type: YTN; PAM sequence: CTA
tagattacagtgggtttttt

SEQ ID NO: 333255 - DNA, 20 bp, Artificial Sequence
  Description of Artificial Sequence: Synthetic oligonucleotide
  Target: LAMA2; (+) strand; PAM type: YTN; PAM sequence: TTA
cagtgggttttttttttttt

SEQ ID NO: 333256 - DNA, 20 bp, Artificial Sequence
  Description of Artificial Sequence: Synthetic oligonucleotide
  Target: LAMA2; (+) strand; PAM type: YTN; PAM sequence: TTT
ttttttttttttttttacat

SEQ ID NO: 333257 - DNA, 20 bp, Artificial Sequence
  Description of Artificial Sequence: Synthetic oligonucleotide
  Target: LAMA2; (+) strand; PAM type: YTN; PAM sequence: TTT
tttttttttttttttacatt

SEQ ID NO: 333258 - DNA, 20 bp, Artificial Sequence
  Description of Artificial Sequence: Synthetic oligonucleotide
  Target: LAMA2; (+) strand; PAM type: YTN; PAM sequence: TTT
ttttttttttttttacattt

SEQ ID NO: 333259 - DNA, 20 bp, Artificial Sequence
  Description of Artificial Sequence: Synthetic oligonucleotide
  Target: LAMA2; (+) strand; PAM type: YTN; PAM sequence: TTT
tttttttttttttacatttt

SEQ ID NO: 333260 - DNA, 20 bp, Artificial Sequence
  Description of Artificial Sequence: Synthetic oligonucleotide
  Target: LAMA2; (+) strand; PAM type: YTN; PAM sequence: TTT
ttttttttttttacatttta

SEQ ID NO: 333261 - DNA, 20 bp, Artificial Sequence
  Description of Artificial Sequence: Synthetic oligonucleotide
  Target: LAMA2; (+) strand; PAM type: YTN; PAM sequence: TTT
tttttttttttacattttaa

SEQ ID NO: 333262 - DNA, 20 bp, Artificial Sequence
  Description of Artificial Sequence: Synthetic oligonucleotide
  Target: LAMA2; (+) strand; PAM type: YTN; PAM sequence: TTT
ttttttttttacattttaac

SEQ ID NO: 333263 - DNA, 20 bp, Artificial Sequence
  Description of Artificial Sequence: Synthetic oligonucleotide
  Target: LAMA2; (+) strand; PAM type: YTN; PAM sequence: TTT
tttttttttacattttaaca

SEQ ID NO: 333264 - DNA, 20 bp, Artificial Sequence
  Description of Artificial Sequence: Synthetic oligonucleotide
  Target: LAMA2; (+) strand; PAM type: YTN; PAM sequence: TTT
ttttttttacattttaacat

SEQ ID NO: 333265 - DNA, 20 bp, Artificial Sequence
  Description of Artificial Sequence: Synthetic oligonucleotide
  Target: LAMA2; (+) strand; PAM type: YTN; PAM sequence: TTT
tttttttacattttaacatt

SEQ ID NO: 333266 - DNA, 20 bp, Artificial Sequence
  Description of Artificial Sequence: Synthetic oligonucleotide
  Target: LAMA2; (+) strand; PAM type: YTN; PAM sequence: TTT
ttttttacattttaacattc

SEQ ID NO: 333267 - DNA, 20 bp, Artificial Sequence
  Description of Artificial Sequence: Synthetic oligonucleotide
  Target: LAMA2; (+) strand; PAM type: YTN; PAM sequence: TTT
tttttacattttaacattca

SEQ ID NO: 333268 - DNA, 20 bp, Artificial Sequence
  Description of Artificial Sequence: Synthetic oligonucleotide
  Target: LAMA2; (+) strand; PAM type: YTN; PAM sequence: TTT
ttttacattttaacattcaa

SEQ ID NO: 333269 - DNA, 20 bp, Artificial Sequence
  Description of Artificial Sequence: Synthetic oligonucleotide
  Target: LAMA2; (+) strand; PAM type: YTN; PAM sequence: TTT
tttacattttaacattcaag

SEQ ID NO: 333270 - DNA, 20 bp, Artificial Sequence
  Description of Artificial Sequence: Synthetic oligonucleotide
  Target: LAMA2; (+) strand; PAM type: YTN; PAM sequence: TTT
ttacattttaacattcaaga

SEQ ID NO: 333271 - DNA, 20 bp, Artificial Sequence
  Description of Artificial Sequence: Synthetic oligonucleotide
  Target: LAMA2; (+) strand; PAM type: YTN; PAM sequence: TTT
tacattttaacattcaagat

SEQ ID NO: 333272 - DNA, 20 bp, Artificial Sequence
  Description of Artificial Sequence: Synthetic oligonucleotide
  Target: LAMA2; (+) strand; PAM type: YTN; PAM sequence: TTT
acattttaacattcaagata

SEQ ID NO: 333273 - DNA, 20 bp, Artificial Sequence
  Description of Artificial Sequence: Synthetic oligonucleotide
  Target: LAMA2; (+) strand; PAM type: YTN; PAM sequence: TTA
cattttaacattcaagataa

SEQ ID NO: 333274 - DNA, 20 bp, Artificial Sequence
  Description of Artificial Sequence: Synthetic oligonucleotide
  Target: LAMA2; (+) strand; PAM type: YTN; PAM sequence: TTT
taacattcaagataagcact

SEQ ID NO: 333275 - DNA, 20 bp, Artificial Sequence
  Description of Artificial Sequence: Synthetic oligonucleotide
  Target: LAMA2; (+) strand; PAM type: YTN; PAM sequence: TTT
aacattcaagataagcacta

SEQ ID NO: 333276 - DNA, 20 bp, Artificial Sequence
  Description of Artificial Sequence: Synthetic oligonucleotide
  Target: LAMA2; (+) strand; PAM type: YTN; PAM sequence: TTA
acattcaagataagcactag

SEQ ID NO: 333277 - DNA, 20 bp, Artificial Sequence
  Description of Artificial Sequence: Synthetic oligonucleotide
  Target: LAMA2; (+) strand; PAM type: YTN; PAM sequence: TTC
aagataagcactagaaaaaa

SEQ ID NO: 333278 - DNA, 20 bp, Artificial Sequence
  Description of Artificial Sequence: Synthetic oligonucleotide
  Target: LAMA2; (+) strand; PAM type: YTN; PAM sequence: CTA
gaaaaaatagcaatttgttt

SEQ ID NO: 333279 - DNA, 20 bp, Artificial Sequence
  Description of Artificial Sequence: Synthetic oligonucleotide
  Target: LAMA2; (+) strand; PAM type: YTN; PAM sequence: TTT
gtttggaagaaagtagctac

SEQ ID NO: 333280 - DNA, 20 bp, Artificial Sequence
  Description of Artificial Sequence: Synthetic oligonucleotide
  Target: LAMA2; (+) strand; PAM type: YTN; PAM sequence: TTG
tttggaagaaagtagctact

SEQ ID NO: 333281 - DNA, 20 bp, Artificial Sequence
  Description of Artificial Sequence: Synthetic oligonucleotide
  Target: LAMA2; (+) strand; PAM type: YTN; PAM sequence: TTT
ggaagaaagtagctacttat

SEQ ID NO: 333282 - DNA, 20 bp, Artificial Sequence
  Description of Artificial Sequence: Synthetic oligonucleotide
  Target: LAMA2; (+) strand; PAM type: YTN; PAM sequence: TTG
gaagaaagtagctacttatt

SEQ ID NO: 333283 - DNA, 20 bp, Artificial Sequence
  Description of Artificial Sequence: Synthetic oligonucleotide
  Target: LAMA2; (+) strand; PAM type: YTN; PAM sequence: CTA
cttattttataagtagattg

SEQ ID NO: 333284 - DNA, 20 bp, Artificial Sequence
  Description of Artificial Sequence: Synthetic oligonucleotide
  Target: LAMA2; (+) strand; PAM type: YTN; PAM sequence: CTT
attttataagtagattgttc

SEQ ID NO: 333285 - DNA, 20 bp, Artificial Sequence
  Description of Artificial Sequence: Synthetic oligonucleotide
  Target: LAMA2; (+) strand; PAM type: YTN; PAM sequence: TTA
ttttataagtagattgttct

SEQ ID NO: 333286 - DNA, 20 bp, Artificial Sequence
  Description of Artificial Sequence: Synthetic oligonucleotide
  Target: LAMA2; (+) strand; PAM type: YTN; PAM sequence: TTT
tataagtagattgttcttag

SEQ ID NO: 333287 - DNA, 20 bp, Artificial Sequence
  Description of Artificial Sequence: Synthetic oligonucleotide
  Target: LAMA2; (+) strand; PAM type: YTN; PAM sequence: TTT
ataagtagattgttcttaga

SEQ ID NO: 333288 - DNA, 20 bp, Artificial Sequence
  Description of Artificial Sequence: Synthetic oligonucleotide
  Target: LAMA2; (+) strand; PAM type: YTN; PAM sequence: TTA
taagtagattgttcttagat

SEQ ID NO: 333289 - DNA, 20 bp, Artificial Sequence
  Description of Artificial Sequence: Synthetic oligonucleotide
  Target: LAMA2; (+) strand; PAM type: YTN; PAM sequence: TTG
ttcttagatacgtattacta

SEQ ID NO: 333290 - DNA, 20 bp, Artificial Sequence
  Description of Artificial Sequence: Synthetic oligonucleotide
  Target: LAMA2; (+) strand; PAM type: YTN; PAM sequence: TTC
ttagatacgtattactaagg

SEQ ID NO: 333291 - DNA, 20 bp, Artificial Sequence
  Description of Artificial Sequence: Synthetic oligonucleotide
  Target: LAMA2; (+) strand; PAM type: YTN; PAM sequence: CTT
agatacgtattactaaggga

SEQ ID NO: 333292 - DNA, 20 bp, Artificial Sequence
  Description of Artificial Sequence: Synthetic oligonucleotide
  Target: LAMA2; (+) strand; PAM type: YTN; PAM sequence: TTA
gatacgtattactaagggat

SEQ ID NO: 333293 - DNA, 20 bp, Artificial Sequence
  Description of Artificial Sequence: Synthetic oligonucleotide
  Target: LAMA2; (+) strand; PAM type: YTN; PAM sequence: TTA
ctaagggattattaactttt

SEQ ID NO: 333294 - DNA, 20 bp, Artificial Sequence
  Description of Artificial Sequence: Synthetic oligonucleotide
  Target: LAMA2; (+) strand; PAM type: YTN; PAM sequence: CTA
agggattattaacttttctc

SEQ ID NO: 333295 - DNA, 20 bp, Artificial Sequence
  Description of Artificial Sequence: Synthetic oligonucleotide
  Target: LAMA2; (+) strand; PAM type: YTN; PAM sequence: TTA
ttaacttttctcattctatt

SEQ ID NO: 333296 - DNA, 20 bp, Artificial Sequence
  Description of Artificial Sequence: Synthetic oligonucleotide
  Target: LAMA2; (+) strand; PAM type: YTN; PAM sequence: TTA
acttttctcattctatttac

SEQ ID NO: 333297 - DNA, 20 bp, Artificial Sequence
  Description of Artificial Sequence: Synthetic oligonucleotide
  Target: LAMA2; (+) strand; PAM type: YTN; PAM sequence: CTT
ttctcattctatttactcat

SEQ ID NO: 333298 - DNA, 20 bp, Artificial Sequence
  Description of Artificial Sequence: Synthetic oligonucleotide
  Target: LAMA2; (+) strand; PAM type: YTN; PAM sequence: TTT
tctcattctatttactcata

SEQ ID NO: 333299 - DNA, 20 bp, Artificial Sequence
  Description of Artificial Sequence: Synthetic oligonucleotide
  Target: LAMA2; (+) strand; PAM type: YTN; PAM sequence: TTT
ctcattctatttactcatag

SEQ ID NO: 333300 - DNA, 20 bp, Artificial Sequence
  Description of Artificial Sequence: Synthetic oligonucleotide
  Target: LAMA2; (+) strand; PAM type: YTN; PAM sequence: TTC
tcattctatttactcatagc

SEQ ID NO: 333301 - DNA, 20 bp, Artificial Sequence
  Description of Artificial Sequence: Synthetic oligonucleotide
  Target: LAMA2; (+) strand; PAM type: YTN; PAM sequence: CTC
attctatttactcatagcat

SEQ ID NO: 333302 - DNA, 20 bp, Artificial Sequence
  Description of Artificial Sequence: Synthetic oligonucleotide
  Target: LAMA2; (+) strand; PAM type: YTN; PAM sequence: TTC
tatttactcatagcatattt

SEQ ID NO: 333303 - DNA, 20 bp, Artificial Sequence
  Description of Artificial Sequence: Synthetic oligonucleotide
  Target: LAMA2; (+) strand; PAM type: YTN; PAM sequence: CTA
tttactcatagcatattttg

SEQ ID NO: 333304 - DNA, 20 bp, Artificial Sequence
  Description of Artificial Sequence: Synthetic oligonucleotide
  Target: LAMA2; (+) strand; PAM type: YTN; PAM sequence: TTT
actcatagcatattttgagc

SEQ ID NO: 333305 - DNA, 20 bp, Artificial Sequence
  Description of Artificial Sequence: Synthetic oligonucleotide
  Target: LAMA2; (+) strand; PAM type: YTN; PAM sequence: TTA
ctcatagcatattttgagca

SEQ ID NO: 333306 - DNA, 20 bp, Artificial Sequence
  Description of Artificial Sequence: Synthetic oligonucleotide
  Target: LAMA2; (+) strand; PAM type: YTN; PAM sequence: CTC
atagcatattttgagcaagt

SEQ ID NO: 333307 - DNA, 20 bp, Artificial Sequence
  Description of Artificial Sequence: Synthetic oligonucleotide
  Target: LAMA2; (+) strand; PAM type: YTN; PAM sequence: TTT
tgagcaagtgatttaatcat

SEQ ID NO: 333308 - DNA, 20 bp, Artificial Sequence
  Description of Artificial Sequence: Synthetic oligonucleotide
  Target: LAMA2; (+) strand; PAM type: YTN; PAM sequence: TTT
gagcaagtgatttaatcatg

SEQ ID NO: 333309 - DNA, 20 bp, Artificial Sequence
  Description of Artificial Sequence: Synthetic oligonucleotide
  Target: LAMA2; (+) strand; PAM type: YTN; PAM sequence: TTG
agcaagtgatttaatcatgc

SEQ ID NO: 333310 - DNA, 20 bp, Artificial Sequence
  Description of Artificial Sequence: Synthetic oligonucleotide
  Target: LAMA2; (+) strand; PAM type: YTN; PAM sequence: TTT
aatcatgctgtgcctcaact

SEQ ID NO: 333311 - DNA, 20 bp, Artificial Sequence
  Description of Artificial Sequence: Synthetic oligonucleotide
  Target: LAMA2; (+) strand; PAM type: YTN; PAM sequence: TTA
atcatgctgtgcctcaactt

SEQ ID NO: 333312 - DNA, 20 bp, Artificial Sequence
  Description of Artificial Sequence: Synthetic oligonucleotide
  Target: LAMA2; (+) strand; PAM type: YTN; PAM sequence: CTG
tgcctcaacttctagattag

SEQ ID NO: 333313 - DNA, 20 bp, Artificial Sequence
  Description of Artificial Sequence: Synthetic oligonucleotide
  Target: LAMA2; (+) strand; PAM type: YTN; PAM sequence: CTC
aacttctagattagcagact

SEQ ID NO: 333314 - DNA, 20 bp, Artificial Sequence
  Description of Artificial Sequence: Synthetic oligonucleotide
  Target: LAMA2; (+) strand; PAM type: YTN; PAM sequence: CTT
ctagattagcagactaaata

SEQ ID NO: 333315 - DNA, 20 bp, Artificial Sequence
  Description of Artificial Sequence: Synthetic oligonucleotide
  Target: LAMA2; (+) strand; PAM type: YTN; PAM sequence: TTC
tagattagcagactaaatat

SEQ ID NO: 333316 - DNA, 20 bp, Artificial Sequence
  Description of Artificial Sequence: Synthetic oligonucleotide
  Target: LAMA2; (+) strand; PAM type: YTN; PAM sequence: CTA
gattagcagactaaatatta

SEQ ID NO: 333317 - DNA, 20 bp, Artificial Sequence
  Description of Artificial Sequence: Synthetic oligonucleotide
  Target: LAMA2; (+) strand; PAM type: YTN; PAM sequence: TTA
gcagactaaatattacaata

SEQ ID NO: 333318 - DNA, 20 bp, Artificial Sequence
  Description of Artificial Sequence: Synthetic oligonucleotide
  Target: LAMA2; (+) strand; PAM type: YTN; PAM sequence: CTA
aatattacaatatcttggca

SEQ ID NO: 333319 - DNA, 20 bp, Artificial Sequence
  Description of Artificial Sequence: Synthetic oligonucleotide
  Target: LAMA2; (+) strand; PAM type: YTN; PAM sequence: TTA
caatatcttggcaagaaaat

SEQ ID NO: 333320 - DNA, 20 bp, Artificial Sequence
  Description of Artificial Sequence: Synthetic oligonucleotide
  Target: LAMA2; (+) strand; PAM type: YTN; PAM sequence: CTT
ggcaagaaaattaaagtaat

SEQ ID NO: 333321 - DNA, 20 bp, Artificial Sequence
  Description of Artificial Sequence: Synthetic oligonucleotide
  Target: LAMA2; (+) strand; PAM type: YTN; PAM sequence: TTG
gcaagaaaattaaagtaatg

SEQ ID NO: 333322 - DNA, 20 bp, Artificial Sequence
  Description of Artificial Sequence: Synthetic oligonucleotide
  Target: LAMA2; (+) strand; PAM type: YTN; PAM sequence: TTA
aagtaatgataatggcaata

SEQ ID NO: 333323 - DNA, 20 bp, Artificial Sequence
  Description of Artificial Sequence: Synthetic oligonucleotide
  Target: LAMA2; (+) strand; PAM type: YTN; PAM sequence: CTA
aattccatctcacaattaca

SEQ ID NO: 333324 - DNA, 20 bp, Artificial Sequence
  Description of Artificial Sequence: Synthetic oligonucleotide
  Target: LAMA2; (+) strand; PAM type: YTN; PAM sequence: TTC
catctcacaattacagctat

SEQ ID NO: 333325 - DNA, 20 bp, Artificial Sequence
  Description of Artificial Sequence: Synthetic oligonucleotide
  Target: LAMA2; (+) strand; PAM type: YTN; PAM sequence: CTC
acaattacagctattaaaag

SEQ ID NO: 333326 - DNA, 20 bp, Artificial Sequence
  Description of Artificial Sequence: Synthetic oligonucleotide
  Target: LAMA2; (+) strand; PAM type: YTN; PAM sequence: TTA
cagctattaaaaggatctag

SEQ ID NO: 333327 - DNA, 20 bp, Artificial Sequence
  Description of Artificial Sequence: Synthetic oligonucleotide
  Target: LAMA2; (+) strand; PAM type: YTN; PAM sequence: CTA
ttaaaaggatctagagtcag

SEQ ID NO: 333328 - DNA, 20 bp, Artificial Sequence
  Description of Artificial Sequence: Synthetic oligonucleotide
  Target: LAMA2; (+) strand; PAM type: YTN; PAM sequence: TTA
aaaggatctagagtcagcat

SEQ ID NO: 333329 - DNA, 20 bp, Artificial Sequence
  Description of Artificial Sequence: Synthetic oligonucleotide
  Target: LAMA2; (+) strand; PAM type: YTN; PAM sequence: CTA
gagtcagcatgaacttaaag

SEQ ID NO: 333330 - DNA, 20 bp, Artificial Sequence
  Description of Artificial Sequence: Synthetic oligonucleotide
  Target: LAMA2; (+) strand; PAM type: YTN; PAM sequence: CTT
aaagaaaagcttaactgttc

SEQ ID NO: 333331 - DNA, 20 bp, Artificial Sequence
  Description of Artificial Sequence: Synthetic oligonucleotide
  Target: LAMA2; (+) strand; PAM type: YTN; PAM sequence: TTA
aagaaaagcttaactgttcc

SEQ ID NO: 333332 - DNA, 20 bp, Artificial Sequence
  Description of Artificial Sequence: Synthetic oligonucleotide
  Target: LAMA2; (+) strand; PAM type: YTN; PAM sequence: CTT
aactgttccagtgacgtgta

SEQ ID NO: 333333 - DNA, 20 bp, Artificial Sequence
  Description of Artificial Sequence: Synthetic oligonucleotide
  Target: LAMA2; (+) strand; PAM type: YTN; PAM sequence: TTA
actgttccagtgacgtgtat

SEQ ID NO: 333334 - DNA, 20 bp, Artificial Sequence
  Description of Artificial Sequence: Synthetic oligonucleotide
  Target: LAMA2; (+) strand; PAM type: YTN; PAM sequence: CTG
ttccagtgacgtgtatataa

SEQ ID NO: 333335 - DNA, 20 bp, Artificial Sequence
  Description of Artificial Sequence: Synthetic oligonucleotide
  Target: LAMA2; (+) strand; PAM type: YTN; PAM sequence: TTC
cagtgacgtgtatataaaaa

SEQ ID NO: 333336 - DNA, 20 bp, Artificial Sequence
  Description of Artificial Sequence: Synthetic oligonucleotide
  Target: LAMA2; (+) strand; PAM type: YTN; PAM sequence: CTC
aatataattgcgaacaaaaa

SEQ ID NO: 333337 - DNA, 20 bp, Artificial Sequence
  Description of Artificial Sequence: Synthetic oligonucleotide
  Target: LAMA2; (+) strand; PAM type: YTN; PAM sequence: TTG
cgaacaaaaatatacaacaa

SEQ ID NO: 333338 - DNA, 20 bp, Artificial Sequence
  Description of Artificial Sequence: Synthetic oligonucleotide
  Target: LAMA2; (+) strand; PAM type: YTN; PAM sequence: TTT
aaaggagacagtaataggga

SEQ ID NO: 333339 - DNA, 20 bp, Artificial Sequence
  Description of Artificial Sequence: Synthetic oligonucleotide
  Target: LAMA2; (+) strand; PAM type: YTN; PAM sequence: TTA
aaggagacagtaatagggac

SEQ ID NO: 333340 - DNA, 20 bp, Artificial Sequence
  Description of Artificial Sequence: Synthetic oligonucleotide
  Target: LAMA2; (+) strand; PAM type: YTN; PAM sequence: CTC
aaacgttaataagatgtcta

SEQ ID NO: 333341 - DNA, 20 bp, Artificial Sequence
  Description of Artificial Sequence: Synthetic oligonucleotide
  Target: LAMA2; (+) strand; PAM type: YTN; PAM sequence: TTA
ataagatgtctaaaacattc

SEQ ID NO: 333342 - DNA, 20 bp, Artificial Sequence
  Description of Artificial Sequence: Synthetic oligonucleotide
  Target: LAMA2; (+) strand; PAM type: YTN; PAM sequence: CTA
aaacattctattttagtctt

SEQ ID NO: 333343 - DNA, 20 bp, Artificial Sequence
  Description of Artificial Sequence: Synthetic oligonucleotide
  Target: LAMA2; (+) strand; PAM type: YTN; PAM sequence: TTC
tattttagtctttttcctac

SEQ ID NO: 333344 - DNA, 20 bp, Artificial Sequence
  Description of Artificial Sequence: Synthetic oligonucleotide
  Target: LAMA2; (+) strand; PAM type: YTN; PAM sequence: CTA
ttttagtctttttcctacca

SEQ ID NO: 333345 - DNA, 20 bp, Artificial Sequence
  Description of Artificial Sequence: Synthetic oligonucleotide
  Target: LAMA2; (+) strand; PAM type: YTN; PAM sequence: TTT
tagtctttttcctaccagat

SEQ ID NO: 333346 - DNA, 20 bp, Artificial Sequence
  Description of Artificial Sequence: Synthetic oligonucleotide
  Target: LAMA2; (+) strand; PAM type: YTN; PAM sequence: TTT
agtctttttcctaccagatt

SEQ ID NO: 333347 - DNA, 20 bp, Artificial Sequence
  Description of Artificial Sequence: Synthetic oligonucleotide
  Target: LAMA2; (+) strand; PAM type: YTN; PAM sequence: TTA
gtctttttcctaccagattt

SEQ ID NO: 333348 - DNA, 20 bp, Artificial Sequence
  Description of Artificial Sequence: Synthetic oligonucleotide
  Target: LAMA2; (+) strand; PAM type: YTN; PAM sequence: CTT
tttcctaccagatttcacca

SEQ ID NO: 333349 - DNA, 20 bp, Artificial Sequence
  Description of Artificial Sequence: Synthetic oligonucleotide
  Target: LAMA2; (+) strand; PAM type: YTN; PAM sequence: TTT
ttcctaccagatttcaccag

SEQ ID NO: 333350 - DNA, 20 bp, Artificial Sequence
  Description of Artificial Sequence: Synthetic oligonucleotide
  Target: LAMA2; (+) strand; PAM type: YTN; PAM sequence: TTT
tcctaccagatttcaccaga

SEQ ID NO: 333351 - DNA, 20 bp, Artificial Sequence
  Description of Artificial Sequence: Synthetic oligonucleotide
  Target: LAMA2; (+) strand; PAM type: YTN; PAM sequence: TTT
cctaccagatttcaccagaa

SEQ ID NO: 333352 - DNA, 20 bp, Artificial Sequence
  Description of Artificial Sequence: Synthetic oligonucleotide
  Target: LAMA2; (+) strand; PAM type: YTN; PAM sequence: TTC
ctaccagatttcaccagaat

SEQ ID NO: 333353 - DNA, 20 bp, Artificial Sequence
  Description of Artificial Sequence: Synthetic oligonucleotide
  Target: LAMA2; (+) strand; PAM type: YTN; PAM sequence: CTA
ccagatttcaccagaatatg

SEQ ID NO: 333354 - DNA, 20 bp, Artificial Sequence
  Description of Artificial Sequence: Synthetic oligonucleotide
  Target: LAMA2; (+) strand; PAM type: YTN; PAM sequence: TTT
caccagaatatgtcattatg

SEQ ID NO: 333355 - DNA, 20 bp, Artificial Sequence
  Description of Artificial Sequence: Synthetic oligonucleotide
  Target: LAMA2; (+) strand; PAM type: YTN; PAM sequence: TTC
accagaatatgtcattatgt

SEQ ID NO: 333356 - DNA, 20 bp, Artificial Sequence
  Description of Artificial Sequence: Synthetic oligonucleotide
  Target: LAMA2; (+) strand; PAM type: YTN; PAM sequence: TTA
tgtctgattttatttatttc

SEQ ID NO: 333357 - DNA, 20 bp, Artificial Sequence
  Description of Artificial Sequence: Synthetic oligonucleotide
  Target: LAMA2; (+) strand; PAM type: YTN; PAM sequence: CTG
attttatttatttcttttaa

SEQ ID NO: 333358 - DNA, 20 bp, Artificial Sequence
  Description of Artificial Sequence: Synthetic oligonucleotide
  Target: LAMA2; (+) strand; PAM type: YTN; PAM sequence: TTT
tatttatttcttttaaaatc

SEQ ID NO: 333359 - DNA, 20 bp, Artificial Sequence
  Description of Artificial Sequence: Synthetic oligonucleotide
  Target: LAMA2; (+) strand; PAM type: YTN; PAM sequence: TTT
atttatttcttttaaaatct

SEQ ID NO: 333360 - DNA, 20 bp, Artificial Sequence
  Description of Artificial Sequence: Synthetic oligonucleotide
  Target: LAMA2; (+) strand; PAM type: YTN; PAM sequence: TTA
tttatttcttttaaaatcta

SEQ ID NO: 333361 - DNA, 20 bp, Artificial Sequence
  Description of Artificial Sequence: Synthetic oligonucleotide
  Target: LAMA2; (+) strand; PAM type: YTN; PAM sequence: TTT
atttcttttaaaatctagcc

SEQ ID NO: 333362 - DNA, 20 bp, Artificial Sequence
  Description of Artificial Sequence: Synthetic oligonucleotide
  Target: LAMA2; (+) strand; PAM type: YTN; PAM sequence: TTA
tttcttttaaaatctagcca

SEQ ID NO: 333363 - DNA, 20 bp, Artificial Sequence
  Description of Artificial Sequence: Synthetic oligonucleotide
  Target: LAMA2; (+) strand; PAM type: YTN; PAM sequence: TTT
cttttaaaatctagccatta

SEQ ID NO: 333364 - DNA, 20 bp, Artificial Sequence
  Description of Artificial Sequence: Synthetic oligonucleotide
  Target: LAMA2; (+) strand; PAM type: YTN; PAM sequence: TTC
ttttaaaatctagccattat

SEQ ID NO: 333365 - DNA, 20 bp, Artificial Sequence
  Description of Artificial Sequence: Synthetic oligonucleotide
  Target: LAMA2; (+) strand; PAM type: YTN; PAM sequence: CTT
ttaaaatctagccattatct

SEQ ID NO: 333366 - DNA, 20 bp, Artificial Sequence
  Description of Artificial Sequence: Synthetic oligonucleotide
  Target: LAMA2; (+) strand; PAM type: YTN; PAM sequence: TTT
taaaatctagccattatctc

SEQ ID NO: 333367 - DNA, 20 bp, Artificial Sequence
  Description of Artificial Sequence: Synthetic oligonucleotide
  Target: LAMA2; (+) strand; PAM type: YTN; PAM sequence: TTT
aaaatctagccattatctcc

SEQ ID NO: 333368 - DNA, 20 bp, Artificial Sequence
  Description of Artificial Sequence: Synthetic oligonucleotide
  Target: LAMA2; (+) strand; PAM type: YTN; PAM sequence: TTA
aaatctagccattatctccg

SEQ ID NO: 333369 - DNA, 20 bp, Artificial Sequence
  Description of Artificial Sequence: Synthetic oligonucleotide
  Target: LAMA2; (+) strand; PAM type: YTN; PAM sequence: CTA
gccattatctccgtcatgcc

SEQ ID NO: 333370 - DNA, 20 bp, Artificial Sequence
  Description of Artificial Sequence: Synthetic oligonucleotide
  Target: LAMA2; (+) strand; PAM type: YTN; PAM sequence: TTA
tctccgtcatgccctttgat

SEQ ID NO: 333371 - DNA, 20 bp, Artificial Sequence
  Description of Artificial Sequence: Synthetic oligonucleotide
  Target: LAMA2; (+) strand; PAM type: YTN; PAM sequence: CTC
cgtcatgccctttgatttgt

SEQ ID NO: 333372 - DNA, 20 bp, Artificial Sequence
  Description of Artificial Sequence: Synthetic oligonucleotide
  Target: LAMA2; (+) strand; PAM type: YTN; PAM sequence: CTT
tgatttgtttcagaagaaag

SEQ ID NO: 333373 - DNA, 20 bp, Artificial Sequence
  Description of Artificial Sequence: Synthetic oligonucleotide
  Target: LAMA2; (+) strand; PAM type: YTN; PAM sequence: TTT
gatttgtttcagaagaaagc

SEQ ID NO: 333374 - DNA, 20 bp, Artificial Sequence
  Description of Artificial Sequence: Synthetic oligonucleotide
  Target: LAMA2; (+) strand; PAM type: YTN; PAM sequence: TTG
atttgtttcagaagaaagct

SEQ ID NO: 333375 - DNA, 20 bp, Artificial Sequence
  Description of Artificial Sequence: Synthetic oligonucleotide
  Target: LAMA2; (+) strand; PAM type: YTN; PAM sequence: TTT
gtttcagaagaaagctgatt

SEQ ID NO: 333376 - DNA, 20 bp, Artificial Sequence
  Description of Artificial Sequence: Synthetic oligonucleotide
  Target: LAMA2; (+) strand; PAM type: YTN; PAM sequence: TTG
tttcagaagaaagctgattg

SEQ ID NO: 333377 - DNA, 20 bp, Artificial Sequence
  Description of Artificial Sequence: Synthetic oligonucleotide
  Target: LAMA2; (+) strand; PAM type: YTN; PAM sequence: TTT
cagaagaaagctgattggca

SEQ ID NO: 333378 - DNA, 20 bp, Artificial Sequence
  Description of Artificial Sequence: Synthetic oligonucleotide
  Target: LAMA2; (+) strand; PAM type: YTN; PAM sequence: TTC
agaagaaagctgattggcag

SEQ ID NO: 333379 - DNA, 20 bp, Artificial Sequence
  Description of Artificial Sequence: Synthetic oligonucleotide
  Target: LAMA2; (+) strand; PAM type: YTN; PAM sequence: CTG
attggcaggcggggtaaaac

SEQ ID NO: 333380 - DNA, 20 bp, Artificial Sequence
  Description of Artificial Sequence: Synthetic oligonucleotide
  Target: LAMA2; (+) strand; PAM type: YTN; PAM sequence: TTG
gcaggcggggtaaaacagag

SEQ ID NO: 333381 - DNA, 20 bp, Artificial Sequence
  Description of Artificial Sequence: Synthetic oligonucleotide
  Target: LAMA2; (+) strand; PAM type: YTN; PAM sequence: CTT
ttcagtagacttttcaaaca

SEQ ID NO: 333382 - DNA, 20 bp, Artificial Sequence
  Description of Artificial Sequence: Synthetic oligonucleotide
  Target: LAMA2; (+) strand; PAM type: YTN; PAM sequence: TTT
tcagtagacttttcaaacac

SEQ ID NO: 333383 - DNA, 20 bp, Artificial Sequence
  Description of Artificial Sequence: Synthetic oligonucleotide
  Target: LAMA2; (+) strand; PAM type: YTN; PAM sequence: TTT
cagtagacttttcaaacaca

SEQ ID NO: 333384 - DNA, 20 bp, Artificial Sequence
  Description of Artificial Sequence: Synthetic oligonucleotide
  Target: LAMA2; (+) strand; PAM type: YTN; PAM sequence: TTC
agtagacttttcaaacacat

SEQ ID NO: 333385 - DNA, 20 bp, Artificial Sequence
  Description of Artificial Sequence: Synthetic oligonucleotide
  Target: LAMA2; (+) strand; PAM type: YTN; PAM sequence: CTT
ttcaaacacatattgaggtg

SEQ ID NO: 333386 - DNA, 20 bp, Artificial Sequence
  Description of Artificial Sequence: Synthetic oligonucleotide
  Target: LAMA2; (+) strand; PAM type: YTN; PAM sequence: TTT
tcaaacacatattgaggtga

SEQ ID NO: 333387 - DNA, 20 bp, Artificial Sequence
  Description of Artificial Sequence: Synthetic oligonucleotide
  Target: LAMA2; (+) strand; PAM type: YTN; PAM sequence: TTT
caaacacatattgaggtgat

SEQ ID NO: 333388 - DNA, 20 bp, Artificial Sequence
  Description of Artificial Sequence: Synthetic oligonucleotide
  Target: LAMA2; (+) strand; PAM type: YTN; PAM sequence: TTC
aaacacatattgaggtgata

SEQ ID NO: 333389 - DNA, 20 bp, Artificial Sequence
  Description of Artificial Sequence: Synthetic oligonucleotide
  Target: LAMA2; (+) strand; PAM type: YTN; PAM sequence: TTG
aggtgatactcactcctggc

SEQ ID NO: 333390 - DNA, 20 bp, Artificial Sequence
  Description of Artificial Sequence: Synthetic oligonucleotide
  Target: LAMA2; (+) strand; PAM type: YTN; PAM sequence: CTC
actcctggctaatccaggaa

SEQ ID NO: 333391 - DNA, 20 bp, Artificial Sequence
  Description of Artificial Sequence: Synthetic oligonucleotide
  Target: LAMA2; (+) strand; PAM type: YTN; PAM sequence: CTC
ctggctaatccaggaatgcc

SEQ ID NO: 333392 - DNA, 20 bp, Artificial Sequence
  Description of Artificial Sequence: Synthetic oligonucleotide
  Target: LAMA2; (+) strand; PAM type: YTN; PAM sequence: CTG
gctaatccaggaatgccatt

SEQ ID NO: 333393 - DNA, 20 bp, Artificial Sequence
  Description of Artificial Sequence: Synthetic oligonucleotide
  Target: LAMA2; (+) strand; PAM type: YTN; PAM sequence: CTA
atccaggaatgccattaatt

SEQ ID NO: 333394 - DNA, 20 bp, Artificial Sequence
  Description of Artificial Sequence: Synthetic oligonucleotide
  Target: LAMA2; (+) strand; PAM type: YTN; PAM sequence: TTA
attagttaagctcatgtctt

SEQ ID NO: 333395 - DNA, 20 bp, Artificial Sequence
  Description of Artificial Sequence: Synthetic oligonucleotide
  Target: LAMA2; (+) strand; PAM type: YTN; PAM sequence: TTA
gttaagctcatgtcttaact

SEQ ID NO: 333396 - DNA, 20 bp, Artificial Sequence
  Description of Artificial Sequence: Synthetic oligonucleotide
  Target: LAMA2; (+) strand; PAM type: YTN; PAM sequence: TTA
agctcatgtcttaactagga

SEQ ID NO: 333397 - DNA, 20 bp, Artificial Sequence
  Description of Artificial Sequence: Synthetic oligonucleotide
  Target: LAMA2; (+) strand; PAM type: YTN; PAM sequence: CTC
atgtcttaactaggagtctt

SEQ ID NO: 333398 - DNA, 20 bp, Artificial Sequence
  Description of Artificial Sequence: Synthetic oligonucleotide
  Target: LAMA2; (+) strand; PAM type: YTN; PAM sequence: CTT
aactaggagtcttctcctca

SEQ ID NO: 333399 - DNA, 20 bp, Artificial Sequence
  Description of Artificial Sequence: Synthetic oligonucleotide
  Target: LAMA2; (+) strand; PAM type: YTN; PAM sequence: TTA
actaggagtcttctcctcaa

SEQ ID NO: 333400 - DNA, 20 bp, Artificial Sequence
  Description of Artificial Sequence: Synthetic oligonucleotide
  Target: LAMA2; (+) strand; PAM type: YTN; PAM sequence: CTA
ggagtcttctcctcaataag

SEQ ID NO: 333401 - DNA, 20 bp, Artificial Sequence
  Description of Artificial Sequence: Synthetic oligonucleotide
  Target: LAMA2; (+) strand; PAM type: YTN; PAM sequence: CTT
ctcctcaataagcaattcac

SEQ ID NO: 333402 - DNA, 20 bp, Artificial Sequence
  Description of Artificial Sequence: Synthetic oligonucleotide
  Target: LAMA2; (+) strand; PAM type: YTN; PAM sequence: TTC
tcctcaataagcaattcact

SEQ ID NO: 333403 - DNA, 20 bp, Artificial Sequence
  Description of Artificial Sequence: Synthetic oligonucleotide
  Target: LAMA2; (+) strand; PAM type: YTN; PAM sequence: CTC
ctcaataagcaattcacttc

SEQ ID NO: 333404 - DNA, 20 bp, Artificial Sequence
  Description of Artificial Sequence: Synthetic oligonucleotide
  Target: LAMA2; (+) strand; PAM type: YTN; PAM sequence: CTC
aataagcaattcacttctct

SEQ ID NO: 333405 - DNA, 20 bp, Artificial Sequence
  Description of Artificial Sequence: Synthetic oligonucleotide
  Target: LAMA2; (+) strand; PAM type: YTN; PAM sequence: TTC
acttctcttcctggtctatc

SEQ ID NO: 333406 - DNA, 20 bp, Artificial Sequence
  Description of Artificial Sequence: Synthetic oligonucleotide
  Target: LAMA2; (+) strand; PAM type: YTN; PAM sequence: CTT
ctcttcctggtctatccctc

SEQ ID NO: 333407 - DNA, 20 bp, Artificial Sequence
  Description of Artificial Sequence: Synthetic oligonucleotide
  Target: LAMA2; (+) strand; PAM type: YTN; PAM sequence: TTC
tcttcctggtctatccctca

SEQ ID NO: 333408 - DNA, 20 bp, Artificial Sequence
  Description of Artificial Sequence: Synthetic oligonucleotide
  Target: LAMA2; (+) strand; PAM type: YTN; PAM sequence: CTC
ttcctggtctatccctcaaa

SEQ ID NO: 333409 - DNA, 20 bp, Artificial Sequence
  Description of Artificial Sequence: Synthetic oligonucleotide
  Target: LAMA2; (+) strand; PAM type: YTN; PAM sequence: CTT
cctggtctatccctcaaaac

SEQ ID NO: 333410 - DNA, 20 bp, Artificial Sequence
  Description of Artificial Sequence: Synthetic oligonucleotide
  Target: LAMA2; (+) strand; PAM type: YTN; PAM sequence: TTC
ctggtctatccctcaaaact

SEQ ID NO: 333411 - DNA, 20 bp, Artificial Sequence
  Description of Artificial Sequence: Synthetic oligonucleotide
  Target: LAMA2; (+) strand; PAM type: YTN; PAM sequence: CTG
gtctatccctcaaaactaag

SEQ ID NO: 333412 - DNA, 20 bp, Artificial Sequence
  Description of Artificial Sequence: Synthetic oligonucleotide
  Target: LAMA2; (+) strand; PAM type: YTN; PAM sequence: CTA
tccctcaaaactaagaatgc

SEQ ID NO: 333413 - DNA, 20 bp, Artificial Sequence
  Description of Artificial Sequence: Synthetic oligonucleotide
  Target: LAMA2; (+) strand; PAM type: YTN; PAM sequence: CTC
aaaactaagaatgcgtttac

SEQ ID NO: 333414 - DNA, 20 bp, Artificial Sequence
  Description of Artificial Sequence: Synthetic oligonucleotide
  Target: LAMA2; (+) strand; PAM type: YTN; PAM sequence: CTA
agaatgcgtttaccaaacaa

SEQ ID NO: 333415 - DNA, 20 bp, Artificial Sequence
  Description of Artificial Sequence: Synthetic oligonucleotide
  Target: LAMA2; (+) strand; PAM type: YTN; PAM sequence: TTT
accaaacaagattatcttac

SEQ ID NO: 333416 - DNA, 20 bp, Artificial Sequence
  Description of Artificial Sequence: Synthetic oligonucleotide
  Target: LAMA2; (+) strand; PAM type: YTN; PAM sequence: TTA
ccaaacaagattatcttaca

SEQ ID NO: 333417 - DNA, 20 bp, Artificial Sequence
  Description of Artificial Sequence: Synthetic oligonucleotide
  Target: LAMA2; (+) strand; PAM type: YTN; PAM sequence: TTA
tcttacagctacagagatca

SEQ ID NO: 333418 - DNA, 20 bp, Artificial Sequence
  Description of Artificial Sequence: Synthetic oligonucleotide
  Target: LAMA2; (+) strand; PAM type: YTN; PAM sequence: CTT
acagctacagagatcacact

SEQ ID NO: 333419 - DNA, 20 bp, Artificial Sequence
  Description of Artificial Sequence: Synthetic oligonucleotide
  Target: LAMA2; (+) strand; PAM type: YTN; PAM sequence: TTA
cagctacagagatcacactc

SEQ ID NO: 333420 - DNA, 20 bp, Artificial Sequence
  Description of Artificial Sequence: Synthetic oligonucleotide
  Target: LAMA2; (+) strand; PAM type: YTN; PAM sequence: CTA
cagagatcacactccacata

SEQ ID NO: 333421 - DNA, 20 bp, Artificial Sequence
  Description of Artificial Sequence: Synthetic oligonucleotide
  Target: LAMA2; (+) strand; PAM type: YTN; PAM sequence: CTC
cacatattcttaacctaaat

SEQ ID NO: 333422 - DNA, 20 bp, Artificial Sequence
  Description of Artificial Sequence: Synthetic oligonucleotide
  Target: LAMA2; (+) strand; PAM type: YTN; PAM sequence: TTC
ttaacctaaatattttattc

SEQ ID NO: 333423 - DNA, 20 bp, Artificial Sequence
  Description of Artificial Sequence: Synthetic oligonucleotide
  Target: LAMA2; (+) strand; PAM type: YTN; PAM sequence: CTT
aacctaaatattttattcac

SEQ ID NO: 333424 - DNA, 20 bp, Artificial Sequence
  Description of Artificial Sequence: Synthetic oligonucleotide
  Target: LAMA2; (+) strand; PAM type: YTN; PAM sequence: TTA
acctaaatattttattcact

SEQ ID NO: 333425 - DNA, 20 bp, Artificial Sequence
  Description of Artificial Sequence: Synthetic oligonucleotide
  Target: LAMA2; (+) strand; PAM type: YTN; PAM sequence: CTA
aatattttattcactgatct

SEQ ID NO: 333426 - DNA, 20 bp, Artificial Sequence
  Description of Artificial Sequence: Synthetic oligonucleotide
  Target: LAMA2; (+) strand; PAM type: YTN; PAM sequence: TTT
tattcactgatcttgcagag

SEQ ID NO: 333427 - DNA, 20 bp, Artificial Sequence
  Description of Artificial Sequence: Synthetic oligonucleotide
  Target: LAMA2; (+) strand; PAM type: YTN; PAM sequence: TTT
attcactgatcttgcagaga

SEQ ID NO: 333428 - DNA, 20 bp, Artificial Sequence
  Description of Artificial Sequence: Synthetic oligonucleotide
  Target: LAMA2; (+) strand; PAM type: YTN; PAM sequence: TTA
ttcactgatcttgcagagaa

SEQ ID NO: 333429 - DNA, 20 bp, Artificial Sequence
  Description of Artificial Sequence: Synthetic oligonucleotide
  Target: LAMA2; (+) strand; PAM type: YTN; PAM sequence: TTC
actgatcttgcagagaaaaa

SEQ ID NO: 333430 - DNA, 20 bp, Artificial Sequence
  Description of Artificial Sequence: Synthetic oligonucleotide
  Target: LAMA2; (+) strand; PAM type: YTN; PAM sequence: CTG
atcttgcagagaaaaatttg

SEQ ID NO: 333431 - DNA, 20 bp, Artificial Sequence
  Description of Artificial Sequence: Synthetic oligonucleotide
  Target: LAMA2; (+) strand; PAM type: YTN; PAM sequence: CTT
gcagagaaaaatttgtttgg

SEQ ID NO: 333432 - DNA, 20 bp, Artificial Sequence
  Description of Artificial Sequence: Synthetic oligonucleotide
  Target: LAMA2; (+) strand; PAM type: YTN; PAM sequence: TTG
cagagaaaaatttgtttgga

SEQ ID NO: 333433 - DNA, 20 bp, Artificial Sequence
  Description of Artificial Sequence: Synthetic oligonucleotide
  Target: LAMA2; (+) strand; PAM type: YTN; PAM sequence: TTT
gtttggacaagttaacagtt

SEQ ID NO: 333434 - DNA, 20 bp, Artificial Sequence
  Description of Artificial Sequence: Synthetic oligonucleotide
  Target: LAMA2; (+) strand; PAM type: YTN; PAM sequence: TTG
tttggacaagttaacagttt

SEQ ID NO: 333435 - DNA, 20 bp, Artificial Sequence
  Description of Artificial Sequence: Synthetic oligonucleotide
  Target: LAMA2; (+) strand; PAM type: YTN; PAM sequence: TTT
ggacaagttaacagttttaa

SEQ ID NO: 333436 - DNA, 20 bp, Artificial Sequence
  Description of Artificial Sequence: Synthetic oligonucleotide
  Target: LAMA2; (+) strand; PAM type: YTN; PAM sequence: TTG
gacaagttaacagttttaac

SEQ ID NO: 333437 - DNA, 20 bp, Artificial Sequence
  Description of Artificial Sequence: Synthetic oligonucleotide
  Target: LAMA2; (+) strand; PAM type: YTN; PAM sequence: TTA
acagttttaactggaattta

SEQ ID NO: 333438 - DNA, 20 bp, Artificial Sequence
  Description of Artificial Sequence: Synthetic oligonucleotide
  Target: LAMA2; (+) strand; PAM type: YTN; PAM sequence: TTT
taactggaatttatgtttta

SEQ ID NO: 333439 - DNA, 20 bp, Artificial Sequence
  Description of Artificial Sequence: Synthetic oligonucleotide
  Target: LAMA2; (+) strand; PAM type: YTN; PAM sequence: TTT
aactggaatttatgttttag

SEQ ID NO: 333440 - DNA, 20 bp, Artificial Sequence
  Description of Artificial Sequence: Synthetic oligonucleotide
  Target: LAMA2; (+) strand; PAM type: YTN; PAM sequence: TTA
actggaatttatgttttagg

SEQ ID NO: 333441 - DNA, 20 bp, Artificial Sequence
  Description of Artificial Sequence: Synthetic oligonucleotide
  Target: LAMA2; (+) strand; PAM type: YTN; PAM sequence: CTG
gaatttatgttttaggagga

SEQ ID NO: 333442 - DNA, 20 bp, Artificial Sequence
  Description of Artificial Sequence: Synthetic oligonucleotide
  Target: LAMA2; (+) strand; PAM type: YTN; PAM sequence: TTT
atgttttaggaggaggataa

SEQ ID NO: 333443 - DNA, 20 bp, Artificial Sequence
  Description of Artificial Sequence: Synthetic oligonucleotide
  Target: LAMA2; (+) strand; PAM type: YTN; PAM sequence: TTA
tgttttaggaggaggataaa

SEQ ID NO: 333444 - DNA, 20 bp, Artificial Sequence
  Description of Artificial Sequence: Synthetic oligonucleotide
  Target: LAMA2; (+) strand; PAM type: YTN; PAM sequence: TTT
taggaggaggataaactact

SEQ ID NO: 333445 - DNA, 20 bp, Artificial Sequence
  Description of Artificial Sequence: Synthetic oligonucleotide
  Target: LAMA2; (+) strand; PAM type: YTN; PAM sequence: TTT
aggaggaggataaactacta

SEQ ID NO: 333446 - DNA, 20 bp, Artificial Sequence
  Description of Artificial Sequence: Synthetic oligonucleotide
  Target: LAMA2; (+) strand; PAM type: YTN; PAM sequence: TTA
ggaggaggataaactactat

SEQ ID NO: 333447 - DNA, 20 bp, Artificial Sequence
  Description of Artificial Sequence: Synthetic oligonucleotide
  Target: LAMA2; (+) strand; PAM type: YTN; PAM sequence: CTA
ctatttctatgcaaatatta

SEQ ID NO: 333448 - DNA, 20 bp, Artificial Sequence
  Description of Artificial Sequence: Synthetic oligonucleotide
  Target: LAMA2; (+) strand; PAM type: YTN; PAM sequence: CTA
tttctatgcaaatattacta

SEQ ID NO: 333449 - DNA, 20 bp, Artificial Sequence
  Description of Artificial Sequence: Synthetic oligonucleotide
  Target: LAMA2; (+) strand; PAM type: YTN; PAM sequence: TTT
ctatgcaaatattactatac

SEQ ID NO: 333450 - DNA, 20 bp, Artificial Sequence
  Description of Artificial Sequence: Synthetic oligonucleotide
  Target: LAMA2; (+) strand; PAM type: YTN; PAM sequence: TTC
tatgcaaatattactatact

SEQ ID NO: 333451 - DNA, 20 bp, Artificial Sequence
  Description of Artificial Sequence: Synthetic oligonucleotide
  Target: LAMA2; (+) strand; PAM type: YTN; PAM sequence: CTA
tgcaaatattactatacttt

SEQ ID NO: 333452 - DNA, 20 bp, Artificial Sequence
  Description of Artificial Sequence: Synthetic oligonucleotide
  Target: LAMA2; (+) strand; PAM type: YTN; PAM sequence: TTA
ctatacttttagaatccatg

SEQ ID NO: 333453 - DNA, 20 bp, Artificial Sequence
  Description of Artificial Sequence: Synthetic oligonucleotide
  Target: LAMA2; (+) strand; PAM type: YTN; PAM sequence: CTA
tacttttagaatccatgtga

SEQ ID NO: 333454 - DNA, 20 bp, Artificial Sequence
  Description of Artificial Sequence: Synthetic oligonucleotide
  Target: LAMA2; (+) strand; PAM type: YTN; PAM sequence: CTT
ttagaatccatgtgaatagt

SEQ ID NO: 333455 - DNA, 20 bp, Artificial Sequence
  Description of Artificial Sequence: Synthetic oligonucleotide
  Target: LAMA2; (+) strand; PAM type: YTN; PAM sequence: TTT
tagaatccatgtgaatagta

SEQ ID NO: 333456 - DNA, 20 bp, Artificial Sequence
  Description of Artificial Sequence: Synthetic oligonucleotide
  Target: LAMA2; (+) strand; PAM type: YTN; PAM sequence: TTT
agaatccatgtgaatagtat

SEQ ID NO: 333457 - DNA, 20 bp, Artificial Sequence
  Description of Artificial Sequence: Synthetic oligonucleotide
  Target: LAMA2; (+) strand; PAM type: YTN; PAM sequence: TTA
gaatccatgtgaatagtata

SEQ ID NO: 333458 - DNA, 20 bp, Artificial Sequence
  Description of Artificial Sequence: Synthetic oligonucleotide
  Target: LAMA2; (+) strand; PAM type: YTN; PAM sequence: TTT
ttctctaaagcctagaatca

SEQ ID NO: 333459 - DNA, 20 bp, Artificial Sequence
  Description of Artificial Sequence: Synthetic oligonucleotide
  Target: LAMA2; (+) strand; PAM type: YTN; PAM sequence: TTT
tctctaaagcctagaatcat

SEQ ID NO: 333460 - DNA, 20 bp, Artificial Sequence
  Description of Artificial Sequence: Synthetic oligonucleotide
  Target: LAMA2; (+) strand; PAM type: YTN; PAM sequence: TTT
ctctaaagcctagaatcatt

SEQ ID NO: 333461 - DNA, 20 bp, Artificial Sequence
  Description of Artificial Sequence: Synthetic oligonucleotide
  Target: LAMA2; (+) strand; PAM type: YTN; PAM sequence: TTC
tctaaagcctagaatcatta

SEQ ID NO: 333462 - DNA, 20 bp, Artificial Sequence
  Description of Artificial Sequence: Synthetic oligonucleotide
  Target: LAMA2; (+) strand; PAM type: YTN; PAM sequence: CTC
taaagcctagaatcattaat

SEQ ID NO: 333463 - DNA, 20 bp, Artificial Sequence
  Description of Artificial Sequence: Synthetic oligonucleotide
  Target: LAMA2; (+) strand; PAM type: YTN; PAM sequence: CTA
aagcctagaatcattaatgt

SEQ ID NO: 333464 - DNA, 20 bp, Artificial Sequence
  Description of Artificial Sequence: Synthetic oligonucleotide
  Target: LAMA2; (+) strand; PAM type: YTN; PAM sequence: CTA
gaatcattaatgtaatggtt

SEQ ID NO: 333465 - DNA, 20 bp, Artificial Sequence
  Description of Artificial Sequence: Synthetic oligonucleotide
  Target: LAMA2; (+) strand; PAM type: YTN; PAM sequence: TTA
atgtaatggttaaacatttc

SEQ ID NO: 333466 - DNA, 20 bp, Artificial Sequence
  Description of Artificial Sequence: Synthetic oligonucleotide
  Target: LAMA2; (+) strand; PAM type: YTN; PAM sequence: TTA
aacatttctgcaataataaa

SEQ ID NO: 333467 - DNA, 20 bp, Artificial Sequence
  Description of Artificial Sequence: Synthetic oligonucleotide
  Target: LAMA2; (+) strand; PAM type: YTN; PAM sequence: TTT
ctgcaataataaaacataaa

SEQ ID NO: 333468 - DNA, 20 bp, Artificial Sequence
  Description of Artificial Sequence: Synthetic oligonucleotide
  Target: LAMA2; (+) strand; PAM type: YTN; PAM sequence: TTC
tgcaataataaaacataaaa

SEQ ID NO: 333469 - DNA, 20 bp, Artificial Sequence
  Description of Artificial Sequence: Synthetic oligonucleotide
  Target: LAMA2; (+) strand; PAM type: YTN; PAM sequence: CTG
caataataaaacataaaata

SEQ ID NO: 333470 - DNA, 20 bp, Artificial Sequence
  Description of Artificial Sequence: Synthetic oligonucleotide
  Target: LAMA2; (+) strand; PAM type: YTN; PAM sequence: CTT
tatatattcaagttttaaca

SEQ ID NO: 333471 - DNA, 20 bp, Artificial Sequence
  Description of Artificial Sequence: Synthetic oligonucleotide
  Target: LAMA2; (+) strand; PAM type: YTN; PAM sequence: TTT
atatattcaagttttaacaa

SEQ ID NO: 333472 - DNA, 20 bp, Artificial Sequence
  Description of Artificial Sequence: Synthetic oligonucleotide
  Target: LAMA2; (+) strand; PAM type: YTN; PAM sequence: TTA
tatattcaagttttaacaat

SEQ ID NO: 333473 - DNA, 20 bp, Artificial Sequence
  Description of Artificial Sequence: Synthetic oligonucleotide
  Target: LAMA2; (+) strand; PAM type: YTN; PAM sequence: TTC
aagttttaacaatcatttaa

SEQ ID NO: 333474 - DNA, 20 bp, Artificial Sequence
  Description of Artificial Sequence: Synthetic oligonucleotide
  Target: LAMA2; (+) strand; PAM type: YTN; PAM sequence: TTT
taacaatcatttaaacatat

SEQ ID NO: 333475 - DNA, 20 bp, Artificial Sequence
  Description of Artificial Sequence: Synthetic oligonucleotide
  Target: LAMA2; (+) strand; PAM type: YTN; PAM sequence: TTT
aacaatcatttaaacatatt

SEQ ID NO: 333476 - DNA, 20 bp, Artificial Sequence
  Description of Artificial Sequence: Synthetic oligonucleotide
  Target: LAMA2; (+) strand; PAM type: YTN; PAM sequence: TTA
acaatcatttaaacatatta

SEQ ID NO: 333477 - DNA, 20 bp, Artificial Sequence
  Description of Artificial Sequence: Synthetic oligonucleotide
  Target: LAMA2; (+) strand; PAM type: YTN; PAM sequence: TTT
aaacatattaaaggtgatcc

SEQ ID NO: 333478 - DNA, 20 bp, Artificial Sequence
  Description of Artificial Sequence: Synthetic oligonucleotide
  Target: LAMA2; (+) strand; PAM type: YTN; PAM sequence: TTA
aacatattaaaggtgatcca

SEQ ID NO: 333479 - DNA, 20 bp, Artificial Sequence
  Description of Artificial Sequence: Synthetic oligonucleotide
  Target: LAMA2; (+) strand; PAM type: YTN; PAM sequence: TTA
aaggtgatccaattttcagt

SEQ ID NO: 333480 - DNA, 20 bp, Artificial Sequence
  Description of Artificial Sequence: Synthetic oligonucleotide
  Target: LAMA2; (+) strand; PAM type: YTN; PAM sequence: TTT
tcagtcttgaaggaaggtca

SEQ ID NO: 333481 - DNA, 20 bp, Artificial Sequence
  Description of Artificial Sequence: Synthetic oligonucleotide
  Target: LAMA2; (+) strand; PAM type: YTN; PAM sequence: TTT
cagtcttgaaggaaggtcat

SEQ ID NO: 333482 - DNA, 20 bp, Artificial Sequence
  Description of Artificial Sequence: Synthetic oligonucleotide
  Target: LAMA2; (+) strand; PAM type: YTN; PAM sequence: TTC
agtcttgaaggaaggtcatt

SEQ ID NO: 333483 - DNA, 20 bp, Artificial Sequence
  Description of Artificial Sequence: Synthetic oligonucleotide
  Target: LAMA2; (+) strand; PAM type: YTN; PAM sequence: CTT
gaaggaaggtcattattctt

SEQ ID NO: 333484 - DNA, 20 bp, Artificial Sequence
  Description of Artificial Sequence: Synthetic oligonucleotide
  Target: LAMA2; (+) strand; PAM type: YTN; PAM sequence: TTG
aaggaaggtcattattcttt

SEQ ID NO: 333485 - DNA, 20 bp, Artificial Sequence
  Description of Artificial Sequence: Synthetic oligonucleotide
  Target: LAMA2; (+) strand; PAM type: YTN; PAM sequence: TTA
ttctttcatgtcaattcttt

SEQ ID NO: 333486 - DNA, 20 bp, Artificial Sequence
  Description of Artificial Sequence: Synthetic oligonucleotide
  Target: LAMA2; (+) strand; PAM type: YTN; PAM sequence: TTC
tttcatgtcaattctttcct

SEQ ID NO: 333487 - DNA, 20 bp, Artificial Sequence
  Description of Artificial Sequence: Synthetic oligonucleotide
  Target: LAMA2; (+) strand; PAM type: YTN; PAM sequence: CTT
tcatgtcaattctttcctca

SEQ ID NO: 333488 - DNA, 20 bp, Artificial Sequence
  Description of Artificial Sequence: Synthetic oligonucleotide
  Target: LAMA2; (+) strand; PAM type: YTN; PAM sequence: TTT
catgtcaattctttcctcat

SEQ ID NO: 333489 - DNA, 20 bp, Artificial Sequence
  Description of Artificial Sequence: Synthetic oligonucleotide
  Target: LAMA2; (+) strand; PAM type: YTN; PAM sequence: TTC
atgtcaattctttcctcatg

SEQ ID NO: 333490 - DNA, 20 bp, Artificial Sequence
  Description of Artificial Sequence: Synthetic oligonucleotide
  Target: LAMA2; (+) strand; PAM type: YTN; PAM sequence: TTC
tttcctcatgctcttcttac

SEQ ID NO: 333491 - DNA, 20 bp, Artificial Sequence
  Description of Artificial Sequence: Synthetic oligonucleotide
  Target: LAMA2; (+) strand; PAM type: YTN; PAM sequence: CTT
tcctcatgctcttcttactg

SEQ ID NO: 333492 - DNA, 20 bp, Artificial Sequence
  Description of Artificial Sequence: Synthetic oligonucleotide
  Target: LAMA2; (+) strand; PAM type: YTN; PAM sequence: TTT
cctcatgctcttcttactga

SEQ ID NO: 333493 - DNA, 20 bp, Artificial Sequence
  Description of Artificial Sequence: Synthetic oligonucleotide
  Target: LAMA2; (+) strand; PAM type: YTN; PAM sequence: TTC
ctcatgctcttcttactgat

SEQ ID NO: 333494 - DNA, 20 bp, Artificial Sequence
  Description of Artificial Sequence: Synthetic oligonucleotide
  Target: LAMA2; (+) strand; PAM type: YTN; PAM sequence: CTC
atgctcttcttactgattcc

SEQ ID NO: 333495 - DNA, 20 bp, Artificial Sequence
  Description of Artificial Sequence: Synthetic oligonucleotide
  Target: LAMA2; (+) strand; PAM type: YTN; PAM sequence: CTC
ttcttactgattcctgatta

SEQ ID NO: 333496 - DNA, 20 bp, Artificial Sequence
  Description of Artificial Sequence: Synthetic oligonucleotide
  Target: LAMA2; (+) strand; PAM type: YTN; PAM sequence: CTT
cttactgattcctgattact

SEQ ID NO: 333497 - DNA, 20 bp, Artificial Sequence
  Description of Artificial Sequence: Synthetic oligonucleotide
  Target: LAMA2; (+) strand; PAM type: YTN; PAM sequence: TTC
ttactgattcctgattactg

SEQ ID NO: 333498 - DNA, 20 bp, Artificial Sequence
  Description of Artificial Sequence: Synthetic oligonucleotide
  Target: LAMA2; (+) strand; PAM type: YTN; PAM sequence: CTT
actgattcctgattactgat

SEQ ID NO: 333499 - DNA, 20 bp, Artificial Sequence
  Description of Artificial Sequence: Synthetic oligonucleotide
  Target: LAMA2; (+) strand; PAM type: YTN; PAM sequence: TTA
ctgattcctgattactgatt

SEQ ID NO: 333500 - DNA, 20 bp, Artificial Sequence
  Description of Artificial Sequence: Synthetic oligonucleotide
  Target: LAMA2; (+) strand; PAM type: YTN; PAM sequence: CTG
attcctgattactgattaaa

SEQ ID NO: 333501 - DNA, 20 bp, Artificial Sequence
  Description of Artificial Sequence: Synthetic oligonucleotide
  Target: LAMA2; (+) strand; PAM type: YTN; PAM sequence: TTC
ctgattactgattaaaggat

SEQ ID NO: 333502 - DNA, 20 bp, Artificial Sequence
  Description of Artificial Sequence: Synthetic oligonucleotide
  Target: LAMA2; (+) strand; PAM type: YTN; PAM sequence: CTG
attactgattaaaggatgtg

SEQ ID NO: 333503 - DNA, 20 bp, Artificial Sequence
  Description of Artificial Sequence: Synthetic oligonucleotide
  Target: LAMA2; (+) strand; PAM type: YTN; PAM sequence: TTA
ctgattaaaggatgtgttgt

SEQ ID NO: 333504 - DNA, 20 bp, Artificial Sequence
  Description of Artificial Sequence: Synthetic oligonucleotide
  Target: LAMA2; (+) strand; PAM type: YTN; PAM sequence: CTG
attaaaggatgtgttgtaca

SEQ ID NO: 333505 - DNA, 20 bp, Artificial Sequence
  Description of Artificial Sequence: Synthetic oligonucleotide
  Target: LAMA2; (+) strand; PAM type: YTN; PAM sequence: TTA
aaggatgtgttgtacaagga

SEQ ID NO: 333506 - DNA, 20 bp, Artificial Sequence
  Description of Artificial Sequence: Synthetic oligonucleotide
  Target: LAMA2; (+) strand; PAM type: YTN; PAM sequence: TTG
tacaaggagggaattttgga

SEQ ID NO: 333507 - DNA, 20 bp, Artificial Sequence
  Description of Artificial Sequence: Synthetic oligonucleotide
  Target: LAMA2; (+) strand; PAM type: YTN; PAM sequence: TTT
tggaaaattcacaaatacat

SEQ ID NO: 333508 - DNA, 20 bp, Artificial Sequence
  Description of Artificial Sequence: Synthetic oligonucleotide
  Target: LAMA2; (+) strand; PAM type: YTN; PAM sequence: TTT
ggaaaattcacaaatacatg

SEQ ID NO: 333509 - DNA, 20 bp, Artificial Sequence
  Description of Artificial Sequence: Synthetic oligonucleotide
  Target: LAMA2; (+) strand; PAM type: YTN; PAM sequence: TTG
gaaaattcacaaatacatgg

SEQ ID NO: 333510 - DNA, 20 bp, Artificial Sequence
  Description of Artificial Sequence: Synthetic oligonucleotide
  Target: LAMA2; (+) strand; PAM type: YTN; PAM sequence: TTC
acaaatacatggaaattaaa

SEQ ID NO: 333511 - DNA, 20 bp, Artificial Sequence
  Description of Artificial Sequence: Synthetic oligonucleotide
  Target: LAMA2; (+) strand; PAM type: YTN; PAM sequence: TTA
aacaacatactcccaaacaa

SEQ ID NO: 333512 - DNA, 20 bp, Artificial Sequence
  Description of Artificial Sequence: Synthetic oligonucleotide
  Target: LAMA2; (+) strand; PAM type: YTN; PAM sequence: CTC
ccaaacaaccaatggataaa

SEQ ID NO: 333513 - DNA, 20 bp, Artificial Sequence
  Description of Artificial Sequence: Synthetic oligonucleotide
  Target: LAMA2; (+) strand; PAM type: YTN; PAM sequence: TTA
aaagagaaatttaaaaataa

SEQ ID NO: 333514 - DNA, 20 bp, Artificial Sequence
  Description of Artificial Sequence: Synthetic oligonucleotide
  Target: LAMA2; (+) strand; PAM type: YTN; PAM sequence: TTT
aaaaataacttgagacaaat

SEQ ID NO: 333515 - DNA, 20 bp, Artificial Sequence
  Description of Artificial Sequence: Synthetic oligonucleotide
  Target: LAMA2; (+) strand; PAM type: YTN; PAM sequence: TTA
aaaataacttgagacaaatg

SEQ ID NO: 333516 - DNA, 20 bp, Artificial Sequence
  Description of Artificial Sequence: Synthetic oligonucleotide
  Target: LAMA2; (+) strand; PAM type: YTN; PAM sequence: CTT
gagacaaatgagaatggaca

SEQ ID NO: 333517 - DNA, 20 bp, Artificial Sequence
  Description of Artificial Sequence: Synthetic oligonucleotide
  Target: LAMA2; (+) strand; PAM type: YTN; PAM sequence: TTG
agacaaatgagaatggacac

SEQ ID NO: 333518 - DNA, 20 bp, Artificial Sequence
  Description of Artificial Sequence: Synthetic oligonucleotide
  Target: LAMA2; (+) strand; PAM type: YTN; PAM sequence: CTA
acactgataagaagaagcaa

SEQ ID NO: 333519 - DNA, 20 bp, Artificial Sequence
  Description of Artificial Sequence: Synthetic oligonucleotide
  Target: LAMA2; (+) strand; PAM type: YTN; PAM sequence: CTG
ataagaagaagcaaaagcag

SEQ ID NO: 333520 - DNA, 20 bp, Artificial Sequence
  Description of Artificial Sequence: Synthetic oligonucleotide
  Target: LAMA2; (+) strand; PAM type: YTN; PAM sequence: TTC
taagaagaaaggctatagta

SEQ ID NO: 333521 - DNA, 20 bp, Artificial Sequence
  Description of Artificial Sequence: Synthetic oligonucleotide
  Target: LAMA2; (+) strand; PAM type: YTN; PAM sequence: CTA
agaagaaaggctatagtaat

SEQ ID NO: 333522 - DNA, 20 bp, Artificial Sequence
  Description of Artificial Sequence: Synthetic oligonucleotide
  Target: LAMA2; (+) strand; PAM type: YTN; PAM sequence: CTA
tagtaataaatacctacgtc

SEQ ID NO: 333523 - DNA, 20 bp, Artificial Sequence
  Description of Artificial Sequence: Synthetic oligonucleotide
  Target: LAMA2; (+) strand; PAM type: YTN; PAM sequence: CTA
cgtcaaaaagaagaaagatc

SEQ ID NO: 333524 - DNA, 20 bp, Artificial Sequence
  Description of Artificial Sequence: Synthetic oligonucleotide
  Target: LAMA2; (+) strand; PAM type: YTN; PAM sequence: CTA
aaattaacaacctaaggtta

SEQ ID NO: 333525 - DNA, 20 bp, Artificial Sequence
  Description of Artificial Sequence: Synthetic oligonucleotide
  Target: LAMA2; (+) strand; PAM type: YTN; PAM sequence: TTA
acaacctaaggttacatttc

SEQ ID NO: 333526 - DNA, 20 bp, Artificial Sequence
  Description of Artificial Sequence: Synthetic oligonucleotide
  Target: LAMA2; (+) strand; PAM type: YTN; PAM sequence: CTA
aggttacatttcaagaaagc

SEQ ID NO: 333527 - DNA, 20 bp, Artificial Sequence
  Description of Artificial Sequence: Synthetic oligonucleotide
  Target: LAMA2; (+) strand; PAM type: YTN; PAM sequence: TTA
catttcaagaaagcaaaaaa

SEQ ID NO: 333528 - DNA, 20 bp, Artificial Sequence
  Description of Artificial Sequence: Synthetic oligonucleotide
  Target: LAMA2; (+) strand; PAM type: YTN; PAM sequence: TTT
caagaaagcaaaaaaaaaaa

SEQ ID NO: 333529 - DNA, 20 bp, Artificial Sequence
  Description of Artificial Sequence: Synthetic oligonucleotide
  Target: LAMA2; (+) strand; PAM type: YTN; PAM sequence: TTC
aagaaagcaaaaaaaaaaaa

SEQ ID NO: 333530 - DNA, 20 bp, Artificial Sequence
  Description of Artificial Sequence: Synthetic oligonucleotide
  Target: LAMA2; (+) strand; PAM type: YTN; PAM sequence: CTA
ggcctagaagtagcagaaag

SEQ ID NO: 333531 - DNA, 20 bp, Artificial Sequence
  Description of Artificial Sequence: Synthetic oligonucleotide
  Target: LAMA2; (+) strand; PAM type: YTN; PAM sequence: CTA
gaagtagcagaaagaaggaa

SEQ ID NO: 333532 - DNA, 20 bp, Artificial Sequence
  Description of Artificial Sequence: Synthetic oligonucleotide
  Target: LAMA2; (+) strand; PAM type: YTN; PAM sequence: CTG
ggtagaaataaatgaaatag

SEQ ID NO: 333533 - DNA, 20 bp, Artificial Sequence
  Description of Artificial Sequence: Synthetic oligonucleotide
  Target: LAMA2; (+) strand; PAM type: YTN; PAM sequence: CTA
gggaaacaatggaagagatt

SEQ ID NO: 333534 - DNA, 20 bp, Artificial Sequence
  Description of Artificial Sequence: Synthetic oligonucleotide
  Target: LAMA2; (+) strand; PAM type: YTN; PAM sequence: TTA
gcaaaactgtcacttgggtt

SEQ ID NO: 333535 - DNA, 20 bp, Artificial Sequence
  Description of Artificial Sequence: Synthetic oligonucleotide
  Target: LAMA2; (+) strand; PAM type: YTN; PAM sequence: CTG
tcacttgggttttggaaaat

SEQ ID NO: 333536 - DNA, 20 bp, Artificial Sequence
  Description of Artificial Sequence: Synthetic oligonucleotide
  Target: LAMA2; (+) strand; PAM type: YTN; PAM sequence: CTT
gggttttggaaaatataagc

SEQ ID NO: 333537 - DNA, 20 bp, Artificial Sequence
  Description of Artificial Sequence: Synthetic oligonucleotide
  Target: LAMA2; (+) strand; PAM type: YTN; PAM sequence: TTG
ggttttggaaaatataagct

SEQ ID NO: 333538 - DNA, 20 bp, Artificial Sequence
  Description of Artificial Sequence: Synthetic oligonucleotide
  Target: LAMA2; (+) strand; PAM type: YTN; PAM sequence: TTT
tggaaaatataagctaaatt

SEQ ID NO: 333539 - DNA, 20 bp, Artificial Sequence
  Description of Artificial Sequence: Synthetic oligonucleotide
  Target: LAMA2; (+) strand; PAM type: YTN; PAM sequence: TTT
ggaaaatataagctaaattg

SEQ ID NO: 333540 - DNA, 20 bp, Artificial Sequence
  Description of Artificial Sequence: Synthetic oligonucleotide
  Target: LAMA2; (+) strand; PAM type: YTN; PAM sequence: TTG
gaaaatataagctaaattga

SEQ ID NO: 333541 - DNA, 20 bp, Artificial Sequence
  Description of Artificial Sequence: Synthetic oligonucleotide
  Target: LAMA2; (+) strand; PAM type: YTN; PAM sequence: CTA
aattgacaaaagtttagcta

SEQ ID NO: 333542 - DNA, 20 bp, Artificial Sequence
  Description of Artificial Sequence: Synthetic oligonucleotide
  Target: LAMA2; (+) strand; PAM type: YTN; PAM sequence: TTG
acaaaagtttagctaaactt

SEQ ID NO: 333543 - DNA, 20 bp, Artificial Sequence
  Description of Artificial Sequence: Synthetic oligonucleotide
  Target: LAMA2; (+) strand; PAM type: YTN; PAM sequence: TTT
agctaaactttctaagaaaa

SEQ ID NO: 333544 - DNA, 20 bp, Artificial Sequence
  Description of Artificial Sequence: Synthetic oligonucleotide
  Target: LAMA2; (+) strand; PAM type: YTN; PAM sequence: TTA
gctaaactttctaagaaaaa

SEQ ID NO: 333545 - DNA, 20 bp, Artificial Sequence
  Description of Artificial Sequence: Synthetic oligonucleotide
  Target: LAMA2; (+) strand; PAM type: YTN; PAM sequence: CTA
aactttctaagaaaaaagat

SEQ ID NO: 333546 - DNA, 20 bp, Artificial Sequence
  Description of Artificial Sequence: Synthetic oligonucleotide
  Target: LAMA2; (+) strand; PAM type: YTN; PAM sequence: CTT
tctaagaaaaaagatcagaa

SEQ ID NO: 333547 - DNA, 20 bp, Artificial Sequence
  Description of Artificial Sequence: Synthetic oligonucleotide
  Target: LAMA2; (+) strand; PAM type: YTN; PAM sequence: TTT
ctaagaaaaaagatcagaat

SEQ ID NO: 333548 - DNA, 20 bp, Artificial Sequence
  Description of Artificial Sequence: Synthetic oligonucleotide
  Target: LAMA2; (+) strand; PAM type: YTN; PAM sequence: TTC
taagaaaaaagatcagaatt

SEQ ID NO: 333549 - DNA, 20 bp, Artificial Sequence
  Description of Artificial Sequence: Synthetic oligonucleotide
  Target: LAMA2; (+) strand; PAM type: YTN; PAM sequence: CTA
agaaaaaagatcagaattga

SEQ ID NO: 333550 - DNA, 20 bp, Artificial Sequence
  Description of Artificial Sequence: Synthetic oligonucleotide
  Target: LAMA2; (+) strand; PAM type: YTN; PAM sequence: TTG
aaagaggagacattactact

SEQ ID NO: 333551 - DNA, 20 bp, Artificial Sequence
  Description of Artificial Sequence: Synthetic oligonucleotide
  Target: LAMA2; (+) strand; PAM type: YTN; PAM sequence: TTA
ctactgatacttcagaaata

SEQ ID NO: 333552 - DNA, 20 bp, Artificial Sequence
  Description of Artificial Sequence: Synthetic oligonucleotide
  Target: LAMA2; (+) strand; PAM type: YTN; PAM sequence: CTA
ctgatacttcagaaatacaa

SEQ ID NO: 333553 - DNA, 20 bp, Artificial Sequence
  Description of Artificial Sequence: Synthetic oligonucleotide
  Target: LAMA2; (+) strand; PAM type: YTN; PAM sequence: CTG
atacttcagaaatacaaagg

SEQ ID NO: 333554 - DNA, 20 bp, Artificial Sequence
  Description of Artificial Sequence: Synthetic oligonucleotide
  Target: LAMA2; (+) strand; PAM type: YTN; PAM sequence: CTT
cagaaatacaaaggatcata

SEQ ID NO: 333555 - DNA, 20 bp, Artificial Sequence
  Description of Artificial Sequence: Synthetic oligonucleotide
  Target: LAMA2; (+) strand; PAM type: YTN; PAM sequence: TTC
agaaatacaaaggatcataa

SEQ ID NO: 333556 - DNA, 20 bp, Artificial Sequence
  Description of Artificial Sequence: Synthetic oligonucleotide
  Target: LAMA2; (+) strand; PAM type: YTN; PAM sequence: CTA
ctctcaacaattatatgcca

SEQ ID NO: 333557 - DNA, 20 bp, Artificial Sequence
  Description of Artificial Sequence: Synthetic oligonucleotide
  Target: LAMA2; (+) strand; PAM type: YTN; PAM sequence: CTC
tcaacaattatatgccaaca

SEQ ID NO: 333558 - DNA, 20 bp, Artificial Sequence
  Description of Artificial Sequence: Synthetic oligonucleotide
  Target: LAMA2; (+) strand; PAM type: YTN; PAM sequence: CTC
aacaattatatgccaacaaa

SEQ ID NO: 333559 - DNA, 20 bp, Artificial Sequence
  Description of Artificial Sequence: Synthetic oligonucleotide
  Target: LAMA2; (+) strand; PAM type: YTN; PAM sequence: TTA
tatgccaacaaactggataa

SEQ ID NO: 333560 - DNA, 20 bp, Artificial Sequence
  Description of Artificial Sequence: Synthetic oligonucleotide
  Target: LAMA2; (+) strand; PAM type: YTN; PAM sequence: CTG
gataacctagaaaaaatgga

SEQ ID NO: 333561 - DNA, 20 bp, Artificial Sequence
  Description of Artificial Sequence: Synthetic oligonucleotide
  Target: LAMA2; (+) strand; PAM type: YTN; PAM sequence: CTA
gaaaaaatggaaaaattcct

SEQ ID NO: 333562 - DNA, 20 bp, Artificial Sequence
  Description of Artificial Sequence: Synthetic oligonucleotide
  Target: LAMA2; (+) strand; PAM type: YTN; PAM sequence: TTC
ctagacctactaacactgaa

SEQ ID NO: 333563 - DNA, 20 bp, Artificial Sequence
  Description of Artificial Sequence: Synthetic oligonucleotide
  Target: LAMA2; (+) strand; PAM type: YTN; PAM sequence: CTA
gacctactaacactgaatca

SEQ ID NO: 333564 - DNA, 20 bp, Artificial Sequence
  Description of Artificial Sequence: Synthetic oligonucleotide
  Target: LAMA2; (+) strand; PAM type: YTN; PAM sequence: CTA
ctaacactgaatcatgaaga

SEQ ID NO: 333565 - DNA, 20 bp, Artificial Sequence
  Description of Artificial Sequence: Synthetic oligonucleotide
  Target: LAMA2; (+) strand; PAM type: YTN; PAM sequence: CTA
acactgaatcatgaagaaat

SEQ ID NO: 333566 - DNA, 20 bp, Artificial Sequence
  Description of Artificial Sequence: Synthetic oligonucleotide
  Target: LAMA2; (+) strand; PAM type: YTN; PAM sequence: CTG
aatcatgaagaaatagataa

SEQ ID NO: 333567 - DNA, 20 bp, Artificial Sequence
  Description of Artificial Sequence: Synthetic oligonucleotide
  Target: LAMA2; (+) strand; PAM type: YTN; PAM sequence: TTG
aatcaggaataagaaatacc

SEQ ID NO: 333568 - DNA, 20 bp, Artificial Sequence
  Description of Artificial Sequence: Synthetic oligonucleotide
  Target: LAMA2; (+) strand; PAM type: YTN; PAM sequence: CTA
tcaaagaaaagcccagaacc

SEQ ID NO: 333569 - DNA, 20 bp, Artificial Sequence
  Description of Artificial Sequence: Synthetic oligonucleotide
  Target: LAMA2; (+) strand; PAM type: YTN; PAM sequence: CTG
atggttttactgctgaattc

SEQ ID NO: 333570 - DNA, 20 bp, Artificial Sequence
  Description of Artificial Sequence: Synthetic oligonucleotide
  Target: LAMA2; (+) strand; PAM type: YTN; PAM sequence: TTT
tactgctgaattctaccaaa

SEQ ID NO: 333571 - DNA, 20 bp, Artificial Sequence
  Description of Artificial Sequence: Synthetic oligonucleotide
  Target: LAMA2; (+) strand; PAM type: YTN; PAM sequence: TTT
actgctgaattctaccaaac

SEQ ID NO: 333572 - DNA, 20 bp, Artificial Sequence
  Description of Artificial Sequence: Synthetic oligonucleotide
  Target: LAMA2; (+) strand; PAM type: YTN; PAM sequence: TTA
ctgctgaattctaccaaaca

SEQ ID NO: 333573 - DNA, 20 bp, Artificial Sequence
  Description of Artificial Sequence: Synthetic oligonucleotide
  Target: LAMA2; (+) strand; PAM type: YTN; PAM sequence: CTG
ctgaattctaccaaacattt

SEQ ID NO: 333574 - DNA, 20 bp, Artificial Sequence
  Description of Artificial Sequence: Synthetic oligonucleotide
  Target: LAMA2; (+) strand; PAM type: YTN; PAM sequence: CTG
aattctaccaaacatttaag

SEQ ID NO: 333575 - DNA, 20 bp, Artificial Sequence
  Description of Artificial Sequence: Synthetic oligonucleotide
  Target: LAMA2; (+) strand; PAM type: YTN; PAM sequence: TTC
taccaaacatttaaggaact

SEQ ID NO: 333576 - DNA, 20 bp, Artificial Sequence
  Description of Artificial Sequence: Synthetic oligonucleotide
  Target: LAMA2; (+) strand; PAM type: YTN; PAM sequence: CTA
ccaaacatttaaggaactaa

SEQ ID NO: 333577 - DNA, 20 bp, Artificial Sequence
  Description of Artificial Sequence: Synthetic oligonucleotide
  Target: LAMA2; (+) strand; PAM type: YTN; PAM sequence: TTT
aaggaactaataccaatcct

SEQ ID NO: 333578 - DNA, 20 bp, Artificial Sequence
  Description of Artificial Sequence: Synthetic oligonucleotide
  Target: LAMA2; (+) strand; PAM type: YTN; PAM sequence: TTA
aggaactaataccaatcctt

SEQ ID NO: 333579 - DNA, 20 bp, Artificial Sequence
  Description of Artificial Sequence: Synthetic oligonucleotide
  Target: LAMA2; (+) strand; PAM type: YTN; PAM sequence: CTA
ataccaatccttctcaaaat

SEQ ID NO: 333580 - DNA, 20 bp, Artificial Sequence
  Description of Artificial Sequence: Synthetic oligonucleotide
  Target: LAMA2; (+) strand; PAM type: YTN; PAM sequence: CTT
ctcaaaatcctccaaataac

SEQ ID NO: 333581 - DNA, 20 bp, Artificial Sequence
  Description of Artificial Sequence: Synthetic oligonucleotide
  Target: LAMA2; (+) strand; PAM type: YTN; PAM sequence: TTC
tcaaaatcctccaaataact

SEQ ID NO: 333582 - DNA, 20 bp, Artificial Sequence
  Description of Artificial Sequence: Synthetic oligonucleotide
  Target: LAMA2; (+) strand; PAM type: YTN; PAM sequence: CTC
aaaatcctccaaataactga

SEQ ID NO: 333583 - DNA, 20 bp, Artificial Sequence
  Description of Artificial Sequence: Synthetic oligonucleotide
  Target: LAMA2; (+) strand; PAM type: YTN; PAM sequence: CTC
caaataactgaagatgaggg

SEQ ID NO: 333584 - DNA, 20 bp, Artificial Sequence
  Description of Artificial Sequence: Synthetic oligonucleotide
  Target: LAMA2; (+) strand; PAM type: YTN; PAM sequence: CTG
aagatgagggagtacttcca

SEQ ID NO: 333585 - DNA, 20 bp, Artificial Sequence
  Description of Artificial Sequence: Synthetic oligonucleotide
  Target: LAMA2; (+) strand; PAM type: YTN; PAM sequence: CTT
ccaaacttattttatgaggc

SEQ ID NO: 333586 - DNA, 20 bp, Artificial Sequence
  Description of Artificial Sequence: Synthetic oligonucleotide
  Target: LAMA2; (+) strand; PAM type: YTN; PAM sequence: TTC
caaacttattttatgaggcc

SEQ ID NO: 333587 - DNA, 20 bp, Artificial Sequence
  Description of Artificial Sequence: Synthetic oligonucleotide
  Target: LAMA2; (+) strand; PAM type: YTN; PAM sequence: CTT
attttatgaggccagccatt

SEQ ID NO: 333588 - DNA, 20 bp, Artificial Sequence
  Description of Artificial Sequence: Synthetic oligonucleotide
  Target: LAMA2; (+) strand; PAM type: YTN; PAM sequence: TTA
ttttatgaggccagccatta

SEQ ID NO: 333589 - DNA, 20 bp, Artificial Sequence
  Description of Artificial Sequence: Synthetic oligonucleotide
  Target: LAMA2; (+) strand; PAM type: YTN; PAM sequence: TTT
tatgaggccagccattagcc

SEQ ID NO: 333590 - DNA, 20 bp, Artificial Sequence
  Description of Artificial Sequence: Synthetic oligonucleotide
  Target: LAMA2; (+) strand; PAM type: YTN; PAM sequence: TTT
atgaggccagccattagcct

SEQ ID NO: 333591 - DNA, 20 bp, Artificial Sequence
  Description of Artificial Sequence: Synthetic oligonucleotide
  Target: LAMA2; (+) strand; PAM type: YTN; PAM sequence: TTA
tgaggccagccattagcctg

SEQ ID NO: 333592 - DNA, 20 bp, Artificial Sequence
  Description of Artificial Sequence: Synthetic oligonucleotide
  Target: LAMA2; (+) strand; PAM type: YTN; PAM sequence: TTA
gcctgataccaaagccaaag

SEQ ID NO: 333593 - DNA, 20 bp, Artificial Sequence
  Description of Artificial Sequence: Synthetic oligonucleotide
  Target: LAMA2; (+) strand; PAM type: YTN; PAM sequence: CTG
ataccaaagccaaagacact

SEQ ID NO: 333594 - DNA, 20 bp, Artificial Sequence
  Description of Artificial Sequence: Synthetic oligonucleotide
  Target: LAMA2; (+) strand; PAM type: YTN; PAM sequence: CTG
caagaaaagtacattacaga

SEQ ID NO: 333595 - DNA, 20 bp, Artificial Sequence
  Description of Artificial Sequence: Synthetic oligonucleotide
  Target: LAMA2; (+) strand; PAM type: YTN; PAM sequence: TTA
cagatcaatatttttgatga

SEQ ID NO: 333596 - DNA, 20 bp, Artificial Sequence
  Description of Artificial Sequence: Synthetic oligonucleotide
  Target: LAMA2; (+) strand; PAM type: YTN; PAM sequence: TTT
ttgatgaacatagatgcaaa

SEQ ID NO: 333597 - DNA, 20 bp, Artificial Sequence
  Description of Artificial Sequence: Synthetic oligonucleotide
  Target: LAMA2; (+) strand; PAM type: YTN; PAM sequence: TTT
tgatgaacatagatgcaaaa

SEQ ID NO: 333598 - DNA, 20 bp, Artificial Sequence
  Description of Artificial Sequence: Synthetic oligonucleotide
  Target: LAMA2; (+) strand; PAM type: YTN; PAM sequence: TTT
gatgaacatagatgcaaaac

SEQ ID NO: 333599 - DNA, 20 bp, Artificial Sequence
  Description of Artificial Sequence: Synthetic oligonucleotide
  Target: LAMA2; (+) strand; PAM type: YTN; PAM sequence: TTG
atgaacatagatgcaaaact

SEQ ID NO: 333600 - DNA, 20 bp, Artificial Sequence
  Description of Artificial Sequence: Synthetic oligonucleotide
  Target: LAMA2; (+) strand; PAM type: YTN; PAM sequence: CTC
ctcaagaaaatactaacaaa

SEQ ID NO: 333601 - DNA, 20 bp, Artificial Sequence
  Description of Artificial Sequence: Synthetic oligonucleotide
  Target: LAMA2; (+) strand; PAM type: YTN; PAM sequence: CTC
aagaaaatactaacaaacca

SEQ ID NO: 333602 - DNA, 20 bp, Artificial Sequence
  Description of Artificial Sequence: Synthetic oligonucleotide
  Target: LAMA2; (+) strand; PAM type: YTN; PAM sequence: CTA
acaaaccaaattcagcagca

SEQ ID NO: 333603 - DNA, 20 bp, Artificial Sequence
  Description of Artificial Sequence: Synthetic oligonucleotide
  Target: LAMA2; (+) strand; PAM type: YTN; PAM sequence: TTC
agcagcacattaaaaggatc

SEQ ID NO: 333604 - DNA, 20 bp, Artificial Sequence
  Description of Artificial Sequence: Synthetic oligonucleotide
  Target: LAMA2; (+) strand; PAM type: YTN; PAM sequence: TTA
aaaggatcattcactgtgat

SEQ ID NO: 333605 - DNA, 20 bp, Artificial Sequence
  Description of Artificial Sequence: Synthetic oligonucleotide
  Target: LAMA2; (+) strand; PAM type: YTN; PAM sequence: TTC
actgtgatcaagtgggatca

SEQ ID NO: 333606 - DNA, 20 bp, Artificial Sequence
  Description of Artificial Sequence: Synthetic oligonucleotide
  Target: LAMA2; (+) strand; PAM type: YTN; PAM sequence: CTG
tgatcaagtgggatcactac

SEQ ID NO: 333607 - DNA, 20 bp, Artificial Sequence
  Description of Artificial Sequence: Synthetic oligonucleotide
  Target: LAMA2; (+) strand; PAM type: YTN; PAM sequence: CTA
ccagggatgccatggtttaa

SEQ ID NO: 333608 - DNA, 20 bp, Artificial Sequence
  Description of Artificial Sequence: Synthetic oligonucleotide
  Target: LAMA2; (+) strand; PAM type: YTN; PAM sequence: TTT
aacctttgcaaatctataaa

SEQ ID NO: 333609 - DNA, 20 bp, Artificial Sequence
  Description of Artificial Sequence: Synthetic oligonucleotide
  Target: LAMA2; (+) strand; PAM type: YTN; PAM sequence: TTA
acctttgcaaatctataaat

SEQ ID NO: 333610 - DNA, 20 bp, Artificial Sequence
  Description of Artificial Sequence: Synthetic oligonucleotide
  Target: LAMA2; (+) strand; PAM type: YTN; PAM sequence: CTT
tgcaaatctataaatgtgat

SEQ ID NO: 333611 - DNA, 20 bp, Artificial Sequence
  Description of Artificial Sequence: Synthetic oligonucleotide
  Target: LAMA2; (+) strand; PAM type: YTN; PAM sequence: TTT
gcaaatctataaatgtgata

SEQ ID NO: 333612 - DNA, 20 bp, Artificial Sequence
  Description of Artificial Sequence: Synthetic oligonucleotide
  Target: LAMA2; (+) strand; PAM type: YTN; PAM sequence: TTG
caaatctataaatgtgatac

SEQ ID NO: 333613 - DNA, 20 bp, Artificial Sequence
  Description of Artificial Sequence: Synthetic oligonucleotide
  Target: LAMA2; (+) strand; PAM type: YTN; PAM sequence: CTA
taaatgtgataccttacatt

SEQ ID NO: 333614 - DNA, 20 bp, Artificial Sequence
  Description of Artificial Sequence: Synthetic oligonucleotide
  Target: LAMA2; (+) strand; PAM type: YTN; PAM sequence: CTT
acattagtagaatgaaggac

SEQ ID NO: 333615 - DNA, 20 bp, Artificial Sequence
  Description of Artificial Sequence: Synthetic oligonucleotide
  Target: LAMA2; (+) strand; PAM type: YTN; PAM sequence: TTA
cattagtagaatgaaggaca

SEQ ID NO: 333616 - DNA, 20 bp, Artificial Sequence
  Description of Artificial Sequence: Synthetic oligonucleotide
  Target: LAMA2; (+) strand; PAM type: YTN; PAM sequence: TTA
gtagaatgaaggacaaaaat

SEQ ID NO: 333617 - DNA, 20 bp, Artificial Sequence
  Description of Artificial Sequence: Synthetic oligonucleotide
  Target: LAMA2; (+) strand; PAM type: YTN; PAM sequence: CTC
aatagatgcagaaaaagcat

SEQ ID NO: 333618 - DNA, 20 bp, Artificial Sequence
  Description of Artificial Sequence: Synthetic oligonucleotide
  Target: LAMA2; (+) strand; PAM type: YTN; PAM sequence: TTT
gacaaaattcaacattgttt

SEQ ID NO: 333619 - DNA, 20 bp, Artificial Sequence
  Description of Artificial Sequence: Synthetic oligonucleotide
  Target: LAMA2; (+) strand; PAM type: YTN; PAM sequence: TTG
acaaaattcaacattgttta

SEQ ID NO: 333620 - DNA, 20 bp, Artificial Sequence
  Description of Artificial Sequence: Synthetic oligonucleotide
  Target: LAMA2; (+) strand; PAM type: YTN; PAM sequence: TTC
aacattgtttaatgataaaa

SEQ ID NO: 333621 - DNA, 20 bp, Artificial Sequence
  Description of Artificial Sequence: Synthetic oligonucleotide
  Target: LAMA2; (+) strand; PAM type: YTN; PAM sequence: TTG
tttaatgataaaagctgtca

SEQ ID NO: 333622 - DNA, 20 bp, Artificial Sequence
  Description of Artificial Sequence: Synthetic oligonucleotide
  Target: LAMA2; (+) strand; PAM type: YTN; PAM sequence: TTT
aatgataaaagctgtcaaca

SEQ ID NO: 333623 - DNA, 20 bp, Artificial Sequence
  Description of Artificial Sequence: Synthetic oligonucleotide
  Target: LAMA2; (+) strand; PAM type: YTN; PAM sequence: TTA
atgataaaagctgtcaacaa

SEQ ID NO: 333624 - DNA, 20 bp, Artificial Sequence
  Description of Artificial Sequence: Synthetic oligonucleotide
  Target: LAMA2; (+) strand; PAM type: YTN; PAM sequence: CTG
tcaacaaattagctatagaa

SEQ ID NO: 333625 - DNA, 20 bp, Artificial Sequence
  Description of Artificial Sequence: Synthetic oligonucleotide
  Target: LAMA2; (+) strand; PAM type: YTN; PAM sequence: TTA
gctatagaaggaatgtacgt

SEQ ID NO: 333626 - DNA, 20 bp, Artificial Sequence
  Description of Artificial Sequence: Synthetic oligonucleotide
  Target: LAMA2; (+) strand; PAM type: YTN; PAM sequence: CTA
tagaaggaatgtacgtcaac

SEQ ID NO: 333627 - DNA, 20 bp, Artificial Sequence
  Description of Artificial Sequence: Synthetic oligonucleotide
  Target: LAMA2; (+) strand; PAM type: YTN; PAM sequence: CTG
tatatgacacatcctcagct

SEQ ID NO: 333628 - DNA, 20 bp, Artificial Sequence
  Description of Artificial Sequence: Synthetic oligonucleotide
  Target: LAMA2; (+) strand; PAM type: YTN; PAM sequence: CTC
agctaacatcatactcaata

SEQ ID NO: 333629 - DNA, 20 bp, Artificial Sequence
  Description of Artificial Sequence: Synthetic oligonucleotide
  Target: LAMA2; (+) strand; PAM type: YTN; PAM sequence: CTA
acatcatactcaatagtgaa

SEQ ID NO: 333630 - DNA, 20 bp, Artificial Sequence
  Description of Artificial Sequence: Synthetic oligonucleotide
  Target: LAMA2; (+) strand; PAM type: YTN; PAM sequence: CTC
aatagtgaaaagctgaaagg

SEQ ID NO: 333631 - DNA, 20 bp, Artificial Sequence
  Description of Artificial Sequence: Synthetic oligonucleotide
  Target: LAMA2; (+) strand; PAM type: YTN; PAM sequence: CTG
aaaggtttttctctaagatc

SEQ ID NO: 333632 - DNA, 20 bp, Artificial Sequence
  Description of Artificial Sequence: Synthetic oligonucleotide
  Target: LAMA2; (+) strand; PAM type: YTN; PAM sequence: TTT
ttctctaagatcaggaataa

SEQ ID NO: 333633 - DNA, 20 bp, Artificial Sequence
  Description of Artificial Sequence: Synthetic oligonucleotide
  Target: LAMA2; (+) strand; PAM type: YTN; PAM sequence: TTT
tctctaagatcaggaataag

SEQ ID NO: 333634 - DNA, 20 bp, Artificial Sequence
  Description of Artificial Sequence: Synthetic oligonucleotide
  Target: LAMA2; (+) strand; PAM type: YTN; PAM sequence: TTT
ctctaagatcaggaataaga

SEQ ID NO: 333635 - DNA, 20 bp, Artificial Sequence
  Description of Artificial Sequence: Synthetic oligonucleotide
  Target: LAMA2; (+) strand; PAM type: YTN; PAM sequence: TTC
tctaagatcaggaataagac

SEQ ID NO: 333636 - DNA, 20 bp, Artificial Sequence
  Description of Artificial Sequence: Synthetic oligonucleotide
  Target: LAMA2; (+) strand; PAM type: YTN; PAM sequence: CTC
taagatcaggaataagacaa

SEQ ID NO: 333637 - DNA, 20 bp, Artificial Sequence
  Description of Artificial Sequence: Synthetic oligonucleotide
  Target: LAMA2; (+) strand; PAM type: YTN; PAM sequence: CTA
agatcaggaataagacaagg

SEQ ID NO: 333638 - DNA, 20 bp, Artificial Sequence
  Description of Artificial Sequence: Synthetic oligonucleotide
  Target: LAMA2; (+) strand; PAM type: YTN; PAM sequence: CTT
gcaccacttctatttggcat

SEQ ID NO: 333639 - DNA, 20 bp, Artificial Sequence
  Description of Artificial Sequence: Synthetic oligonucleotide
  Target: LAMA2; (+) strand; PAM type: YTN; PAM sequence: TTG
caccacttctatttggcata

SEQ ID NO: 333640 - DNA, 20 bp, Artificial Sequence
  Description of Artificial Sequence: Synthetic oligonucleotide
  Target: LAMA2; (+) strand; PAM type: YTN; PAM sequence: CTT
ctatttggcataatactgga

SEQ ID NO: 333641 - DNA, 20 bp, Artificial Sequence
  Description of Artificial Sequence: Synthetic oligonucleotide
  Target: LAMA2; (+) strand; PAM type: YTN; PAM sequence: TTC
tatttggcataatactggaa

SEQ ID NO: 333642 - DNA, 20 bp, Artificial Sequence
  Description of Artificial Sequence: Synthetic oligonucleotide
  Target: LAMA2; (+) strand; PAM type: YTN; PAM sequence: CTA
tttggcataatactggaaga

SEQ ID NO: 333643 - DNA, 20 bp, Artificial Sequence
  Description of Artificial Sequence: Synthetic oligonucleotide
  Target: LAMA2; (+) strand; PAM type: YTN; PAM sequence: TTT
ggcataatactggaagacct

SEQ ID NO: 333644 - DNA, 20 bp, Artificial Sequence
  Description of Artificial Sequence: Synthetic oligonucleotide
  Target: LAMA2; (+) strand; PAM type: YTN; PAM sequence: TTG
gcataatactggaagaccta

SEQ ID NO: 333645 - DNA, 20 bp, Artificial Sequence
  Description of Artificial Sequence: Synthetic oligonucleotide
  Target: LAMA2; (+) strand; PAM type: YTN; PAM sequence: CTG
gaagacctagccagagaaat

SEQ ID NO: 333646 - DNA, 20 bp, Artificial Sequence
  Description of Artificial Sequence: Synthetic oligonucleotide
  Target: LAMA2; (+) strand; PAM type: YTN; PAM sequence: CTA
gccagagaaatcaggcaaaa

SEQ ID NO: 333647 - DNA, 20 bp, Artificial Sequence
  Description of Artificial Sequence: Synthetic oligonucleotide
  Target: LAMA2; (+) strand; PAM type: YTN; PAM sequence: TTG
tcatcaaaattgaaaaagaa

SEQ ID NO: 333648 - DNA, 20 bp, Artificial Sequence
  Description of Artificial Sequence: Synthetic oligonucleotide
  Target: LAMA2; (+) strand; PAM type: YTN; PAM sequence: TTG
aaaaagaaaaaggtaaagtg

SEQ ID NO: 333649 - DNA, 20 bp, Artificial Sequence
  Description of Artificial Sequence: Synthetic oligonucleotide
  Target: LAMA2; (+) strand; PAM type: YTN; PAM sequence: CTC
tttttgcagatgacataatc

SEQ ID NO: 333650 - DNA, 20 bp, Artificial Sequence
  Description of Artificial Sequence: Synthetic oligonucleotide
  Target: LAMA2; (+) strand; PAM type: YTN; PAM sequence: CTT
tttgcagatgacataatctt

SEQ ID NO: 333651 - DNA, 20 bp, Artificial Sequence
  Description of Artificial Sequence: Synthetic oligonucleotide
  Target: LAMA2; (+) strand; PAM type: YTN; PAM sequence: TTT
ttgcagatgacataatctta

SEQ ID NO: 333652 - DNA, 20 bp, Artificial Sequence
  Description of Artificial Sequence: Synthetic oligonucleotide
  Target: LAMA2; (+) strand; PAM type: YTN; PAM sequence: TTT
tgcagatgacataatcttac

SEQ ID NO: 333653 - DNA, 20 bp, Artificial Sequence
  Description of Artificial Sequence: Synthetic oligonucleotide
  Target: LAMA2; (+) strand; PAM type: YTN; PAM sequence: TTT
gcagatgacataatcttaca

SEQ ID NO: 333654 - DNA, 20 bp, Artificial Sequence
  Description of Artificial Sequence: Synthetic oligonucleotide
  Target: LAMA2; (+) strand; PAM type: YTN; PAM sequence: TTG
cagatgacataatcttacat

SEQ ID NO: 333655 - DNA, 20 bp, Artificial Sequence
  Description of Artificial Sequence: Synthetic oligonucleotide
  Target: LAMA2; (+) strand; PAM type: YTN; PAM sequence: CTT
acatatagaaaaccctgact

SEQ ID NO: 333656 - DNA, 20 bp, Artificial Sequence
  Description of Artificial Sequence: Synthetic oligonucleotide
  Target: LAMA2; (+) strand; PAM type: YTN; PAM sequence: TTA
catatagaaaaccctgactc

SEQ ID NO: 333657 - DNA, 20 bp, Artificial Sequence
  Description of Artificial Sequence: Synthetic oligonucleotide
  Target: LAMA2; (+) strand; PAM type: YTN; PAM sequence: CTG
actccaccaaaataactgtt

SEQ ID NO: 333658 - DNA, 20 bp, Artificial Sequence
  Description of Artificial Sequence: Synthetic oligonucleotide
  Target: LAMA2; (+) strand; PAM type: YTN; PAM sequence: CTC
caccaaaataactgttagaa

SEQ ID NO: 333659 - DNA, 20 bp, Artificial Sequence
  Description of Artificial Sequence: Synthetic oligonucleotide
  Target: LAMA2; (+) strand; PAM type: YTN; PAM sequence: CTG
ttagaactaataaacaaatt

SEQ ID NO: 333660 - DNA, 20 bp, Artificial Sequence
  Description of Artificial Sequence: Synthetic oligonucleotide
  Target: LAMA2; (+) strand; PAM type: YTN; PAM sequence: TTA
gaactaataaacaaattctg

SEQ ID NO: 333661 - DNA, 20 bp, Artificial Sequence
  Description of Artificial Sequence: Synthetic oligonucleotide
  Target: LAMA2; (+) strand; PAM type: YTN; PAM sequence: CTA
ataaacaaattctgtaaatt

SEQ ID NO: 333662 - DNA, 20 bp, Artificial Sequence
  Description of Artificial Sequence: Synthetic oligonucleotide
  Target: LAMA2; (+) strand; PAM type: YTN; PAM sequence: TTC
tgtaaattagcaggatacaa

SEQ ID NO: 333663 - DNA, 20 bp, Artificial Sequence
  Description of Artificial Sequence: Synthetic oligonucleotide
  Target: LAMA2; (+) strand; PAM type: YTN; PAM sequence: CTG
taaattagcaggatacaaaa

SEQ ID NO: 333664 - DNA, 20 bp, Artificial Sequence
  Description of Artificial Sequence: Synthetic oligonucleotide
  Target: LAMA2; (+) strand; PAM type: YTN; PAM sequence: TTA
gcaggatacaaaatcaatat

SEQ ID NO: 333665 - DNA, 20 bp, Artificial Sequence
  Description of Artificial Sequence: Synthetic oligonucleotide
  Target: LAMA2; (+) strand; PAM type: YTN; PAM sequence: CTA
aaattagcaacatttccata

SEQ ID NO: 333666 - DNA, 20 bp, Artificial Sequence
  Description of Artificial Sequence: Synthetic oligonucleotide
  Target: LAMA2; (+) strand; PAM type: YTN; PAM sequence: TTA
gcaacatttccataaactaa

SEQ ID NO: 333667 - DNA, 20 bp, Artificial Sequence
  Description of Artificial Sequence: Synthetic oligonucleotide
  Target: LAMA2; (+) strand; PAM type: YTN; PAM sequence: TTT
ccataaactaacgaggaact

SEQ ID NO: 333668 - DNA, 20 bp, Artificial Sequence
  Description of Artificial Sequence: Synthetic oligonucleotide
  Target: LAMA2; (+) strand; PAM type: YTN; PAM sequence: TTC
cataaactaacgaggaacta

SEQ ID NO: 333669 - DNA, 20 bp, Artificial Sequence
  Description of Artificial Sequence: Synthetic oligonucleotide
  Target: LAMA2; (+) strand; PAM type: YTN; PAM sequence: CTA
acgaggaactatctttaaaa

SEQ ID NO: 333670 - DNA, 20 bp, Artificial Sequence
  Description of Artificial Sequence: Synthetic oligonucleotide
  Target: LAMA2; (+) strand; PAM type: YTN; PAM sequence: CTA
tctttaaaaaaatcaataaa

SEQ ID NO: 333671 - DNA, 20 bp, Artificial Sequence
  Description of Artificial Sequence: Synthetic oligonucleotide
  Target: LAMA2; (+) strand; PAM type: YTN; PAM sequence: CTT
taaaaaaatcaataaaataa

SEQ ID NO: 333672 - DNA, 20 bp, Artificial Sequence
  Description of Artificial Sequence: Synthetic oligonucleotide
  Target: LAMA2; (+) strand; PAM type: YTN; PAM sequence: TTT
aaaaaaatcaataaaataat

SEQ ID NO: 333673 - DNA, 20 bp, Artificial Sequence
  Description of Artificial Sequence: Synthetic oligonucleotide
  Target: LAMA2; (+) strand; PAM type: YTN; PAM sequence: TTA
aaaaaatcaataaaataatc

SEQ ID NO: 333674 - DNA, 20 bp, Artificial Sequence
  Description of Artificial Sequence: Synthetic oligonucleotide
  Target: LAMA2; (+) strand; PAM type: YTN; PAM sequence: TTC
accatagctaaaagaaaaat

SEQ ID NO: 333675 - DNA, 20 bp, Artificial Sequence
  Description of Artificial Sequence: Synthetic oligonucleotide
  Target: LAMA2; (+) strand; PAM type: YTN; PAM sequence: CTA
aaagaaaaataaaaaatttg

SEQ ID NO: 333676 - DNA, 20 bp, Artificial Sequence
  Description of Artificial Sequence: Synthetic oligonucleotide
  Target: LAMA2; (+) strand; PAM type: YTN; PAM sequence: TTT
ggtaataaatttaaccaaga

SEQ ID NO: 333677 - DNA, 20 bp, Artificial Sequence
  Description of Artificial Sequence: Synthetic oligonucleotide
  Target: LAMA2; (+) strand; PAM type: YTN; PAM sequence: TTG
gtaataaatttaaccaagag

SEQ ID NO: 333678 - DNA, 20 bp, Artificial Sequence
  Description of Artificial Sequence: Synthetic oligonucleotide
  Target: LAMA2; (+) strand; PAM type: YTN; PAM sequence: TTT
aaccaagaggattgctatga

SEQ ID NO: 333679 - DNA, 20 bp, Artificial Sequence
  Description of Artificial Sequence: Synthetic oligonucleotide
  Target: LAMA2; (+) strand; PAM type: YTN; PAM sequence: TTA
accaagaggattgctatgat

SEQ ID NO: 333680 - DNA, 20 bp, Artificial Sequence
  Description of Artificial Sequence: Synthetic oligonucleotide
  Target: LAMA2; (+) strand; PAM type: YTN; PAM sequence: TTG
ctatgatttggctctgtgtc

SEQ ID NO: 333681 - DNA, 20 bp, Artificial Sequence
  Description of Artificial Sequence: Synthetic oligonucleotide
  Target: LAMA2; (+) strand; PAM type: YTN; PAM sequence: CTA
tgatttggctctgtgtcccc

SEQ ID NO: 333682 - DNA, 20 bp, Artificial Sequence
  Description of Artificial Sequence: Synthetic oligonucleotide
  Target: LAMA2; (+) strand; PAM type: YTN; PAM sequence: TTT
ggctctgtgtccccacccaa

SEQ ID NO: 333683 - DNA, 20 bp, Artificial Sequence
  Description of Artificial Sequence: Synthetic oligonucleotide
  Target: LAMA2; (+) strand; PAM type: YTN; PAM sequence: TTG
gctctgtgtccccacccaaa

SEQ ID NO: 333684 - DNA, 20 bp, Artificial Sequence
  Description of Artificial Sequence: Synthetic oligonucleotide
  Target: LAMA2; (+) strand; PAM type: YTN; PAM sequence: CTC
tgtgtccccacccaaatttc

SEQ ID NO: 333685 - DNA, 20 bp, Artificial Sequence
  Description of Artificial Sequence: Synthetic oligonucleotide
  Target: LAMA2; (+) strand; PAM type: YTN; PAM sequence: CTG
tgtccccacccaaatttcat

SEQ ID NO: 333686 - DNA, 20 bp, Artificial Sequence
  Description of Artificial Sequence: Synthetic oligonucleotide
  Target: LAMA2; (+) strand; PAM type: YTN; PAM sequence: TTT
catcttgaattgtactccaa

SEQ ID NO: 333687 - DNA, 20 bp, Artificial Sequence
  Description of Artificial Sequence: Synthetic oligonucleotide
  Target: LAMA2; (+) strand; PAM type: YTN; PAM sequence: TTC
atcttgaattgtactccaat

SEQ ID NO: 333688 - DNA, 20 bp, Artificial Sequence
  Description of Artificial Sequence: Synthetic oligonucleotide
  Target: LAMA2; (+) strand; PAM type: YTN; PAM sequence: CTT
gaattgtactccaataattc

SEQ ID NO: 333689 - DNA, 20 bp, Artificial Sequence
  Description of Artificial Sequence: Synthetic oligonucleotide
  Target: LAMA2; (+) strand; PAM type: YTN; PAM sequence: TTG
aattgtactccaataattcc

SEQ ID NO: 333690 - DNA, 20 bp, Artificial Sequence
  Description of Artificial Sequence: Synthetic oligonucleotide
  Target: LAMA2; (+) strand; PAM type: YTN; PAM sequence: TTG
tactccaataattcccatgt

SEQ ID NO: 333691 - DNA, 20 bp, Artificial Sequence
  Description of Artificial Sequence: Synthetic oligonucleotide
  Target: LAMA2; (+) strand; PAM type: YTN; PAM sequence: CTC
caataattcccatgtgttgt

SEQ ID NO: 333692 - DNA, 20 bp, Artificial Sequence
  Description of Artificial Sequence: Synthetic oligonucleotide
  Target: LAMA2; (+) strand; PAM type: YTN; PAM sequence: TTC
ccatgtgttgtgggagggac

SEQ ID NO: 333693 - DNA, 20 bp, Artificial Sequence
  Description of Artificial Sequence: Synthetic oligonucleotide
  Target: LAMA2; (+) strand; PAM type: YTN; PAM sequence: TTG
tgggagggacctggtgggag

SEQ ID NO: 333694 - DNA, 20 bp, Artificial Sequence
  Description of Artificial Sequence: Synthetic oligonucleotide
  Target: LAMA2; (+) strand; PAM type: YTN; PAM sequence: CTG
gtgggagatggctgaatcat

SEQ ID NO: 333695 - DNA, 20 bp, Artificial Sequence
  Description of Artificial Sequence: Synthetic oligonucleotide
  Target: LAMA2; (+) strand; PAM type: YTN; PAM sequence: CTG
aatcatgggagtgttttccc

SEQ ID NO: 333696 - DNA, 20 bp, Artificial Sequence
  Description of Artificial Sequence: Synthetic oligonucleotide
  Target: LAMA2; (+) strand; PAM type: YTN; PAM sequence: TTT
tcccccatgctgttgtcgtg

SEQ ID NO: 333697 - DNA, 20 bp, Artificial Sequence
  Description of Artificial Sequence: Synthetic oligonucleotide
  Target: LAMA2; (+) strand; PAM type: YTN; PAM sequence: TTT
cccccatgctgttgtcgtgg

SEQ ID NO: 333698 - DNA, 20 bp, Artificial Sequence
  Description of Artificial Sequence: Synthetic oligonucleotide
  Target: LAMA2; (+) strand; PAM type: YTN; PAM sequence: TTC
ccccatgctgttgtcgtggt

SEQ ID NO: 333699 - DNA, 20 bp, Artificial Sequence
  Description of Artificial Sequence: Synthetic oligonucleotide
  Target: LAMA2; (+) strand; PAM type: YTN; PAM sequence: CTG
ttgtcgtggtagtgaaaagt

SEQ ID NO: 333700 - DNA, 20 bp, Artificial Sequence
  Description of Artificial Sequence: Synthetic oligonucleotide
  Target: LAMA2; (+) strand; PAM type: YTN; PAM sequence: TTG
tcgtggtagtgaaaagtctc

SEQ ID NO: 333701 - DNA, 20 bp, Artificial Sequence
  Description of Artificial Sequence: Synthetic oligonucleotide
  Target: LAMA2; (+) strand; PAM type: YTN; PAM sequence: CTC
atgagatctggtagttttat

SEQ ID NO: 333702 - DNA, 20 bp, Artificial Sequence
  Description of Artificial Sequence: Synthetic oligonucleotide
  Target: LAMA2; (+) strand; PAM type: YTN; PAM sequence: CTG
gtagttttatcaggggtttc

SEQ ID NO: 333703 - DNA, 20 bp, Artificial Sequence
  Description of Artificial Sequence: Synthetic oligonucleotide
  Target: LAMA2; (+) strand; PAM type: YTN; PAM sequence: TTT
tatcaggggtttccgctttt

SEQ ID NO: 333704 - DNA, 20 bp, Artificial Sequence
  Description of Artificial Sequence: Synthetic oligonucleotide
  Target: LAMA2; (+) strand; PAM type: YTN; PAM sequence: TTT
atcaggggtttccgcttttg

SEQ ID NO: 333705 - DNA, 20 bp, Artificial Sequence
  Description of Artificial Sequence: Synthetic oligonucleotide
  Target: LAMA2; (+) strand; PAM type: YTN; PAM sequence: TTA
tcaggggtttccgcttttgc

SEQ ID NO: 333706 - DNA, 20 bp, Artificial Sequence
  Description of Artificial Sequence: Synthetic oligonucleotide
  Target: LAMA2; (+) strand; PAM type: YTN; PAM sequence: TTT
ccgcttttgcattttcctca

SEQ ID NO: 333707 - DNA, 20 bp, Artificial Sequence
  Description of Artificial Sequence: Synthetic oligonucleotide
  Target: LAMA2; (+) strand; PAM type: YTN; PAM sequence: TTC
cgcttttgcattttcctcat

SEQ ID NO: 333708 - DNA, 20 bp, Artificial Sequence
  Description of Artificial Sequence: Synthetic oligonucleotide
  Target: LAMA2; (+) strand; PAM type: YTN; PAM sequence: CTT
ttgcattttcctcattctct

SEQ ID NO: 333709 - DNA, 20 bp, Artificial Sequence
  Description of Artificial Sequence: Synthetic oligonucleotide
  Target: LAMA2; (+) strand; PAM type: YTN; PAM sequence: TTT
tgcattttcctcattctctc

SEQ ID NO: 333710 - DNA, 20 bp, Artificial Sequence
  Description of Artificial Sequence: Synthetic oligonucleotide
  Target: LAMA2; (+) strand; PAM type: YTN; PAM sequence: TTT
gcattttcctcattctctcc

SEQ ID NO: 333711 - DNA, 20 bp, Artificial Sequence
  Description of Artificial Sequence: Synthetic oligonucleotide
  Target: LAMA2; (+) strand; PAM type: YTN; PAM sequence: TTG
cattttcctcattctctcct

SEQ ID NO: 333712 - DNA, 20 bp, Artificial Sequence
  Description of Artificial Sequence: Synthetic oligonucleotide
  Target: LAMA2; (+) strand; PAM type: YTN; PAM sequence: TTT
tcctcattctctccttgcct

SEQ ID NO: 333713 - DNA, 20 bp, Artificial Sequence
  Description of Artificial Sequence: Synthetic oligonucleotide
  Target: LAMA2; (+) strand; PAM type: YTN; PAM sequence: TTT
cctcattctctccttgcctg

SEQ ID NO: 333714 - DNA, 20 bp, Artificial Sequence
  Description of Artificial Sequence: Synthetic oligonucleotide
  Target: LAMA2; (+) strand; PAM type: YTN; PAM sequence: TTC
ctcattctctccttgcctgc

SEQ ID NO: 333715 - DNA, 20 bp, Artificial Sequence
  Description of Artificial Sequence: Synthetic oligonucleotide
  Target: LAMA2; (+) strand; PAM type: YTN; PAM sequence: CTC
attctctccttgcctgctgc

SEQ ID NO: 333716 - DNA, 20 bp, Artificial Sequence
  Description of Artificial Sequence: Synthetic oligonucleotide
  Target: LAMA2; (+) strand; PAM type: YTN; PAM sequence: TTC
tctccttgcctgctgccatc

SEQ ID NO: 333717 - DNA, 20 bp, Artificial Sequence
  Description of Artificial Sequence: Synthetic oligonucleotide
  Target: LAMA2; (+) strand; PAM type: YTN; PAM sequence: CTC
tccttgcctgctgccatcca

SEQ ID NO: 333718 - DNA, 20 bp, Artificial Sequence
  Description of Artificial Sequence: Synthetic oligonucleotide
  Target: LAMA2; (+) strand; PAM type: YTN; PAM sequence: CTC
cttgcctgctgccatccatg

SEQ ID NO: 333719 - DNA, 20 bp, Artificial Sequence
  Description of Artificial Sequence: Synthetic oligonucleotide
  Target: LAMA2; (+) strand; PAM type: YTN; PAM sequence: CTT
gcctgctgccatccatgtaa

SEQ ID NO: 333720 - DNA, 20 bp, Artificial Sequence
  Description of Artificial Sequence: Synthetic oligonucleotide
  Target: LAMA2; (+) strand; PAM type: YTN; PAM sequence: TTG
cctgctgccatccatgtaag

SEQ ID NO: 333721 - DNA, 20 bp, Artificial Sequence
  Description of Artificial Sequence: Synthetic oligonucleotide
  Target: LAMA2; (+) strand; PAM type: YTN; PAM sequence: CTG
ctgccatccatgtaagacag

SEQ ID NO: 333722 - DNA, 20 bp, Artificial Sequence
  Description of Artificial Sequence: Synthetic oligonucleotide
  Target: LAMA2; (+) strand; PAM type: YTN; PAM sequence: CTG
ccatccatgtaagacaggac

SEQ ID NO: 333723 - DNA, 20 bp, Artificial Sequence
  Description of Artificial Sequence: Synthetic oligonucleotide
  Target: LAMA2; (+) strand; PAM type: YTN; PAM sequence: CTC
ctccttaccttccaccatga

SEQ ID NO: 333724 - DNA, 20 bp, Artificial Sequence
  Description of Artificial Sequence: Synthetic oligonucleotide
  Target: LAMA2; (+) strand; PAM type: YTN; PAM sequence: CTC
cttaccttccaccatgattg

SEQ ID NO: 333725 - DNA, 20 bp, Artificial Sequence
  Description of Artificial Sequence: Synthetic oligonucleotide
  Target: LAMA2; (+) strand; PAM type: YTN; PAM sequence: CTT
accttccaccatgattgtga

SEQ ID NO: 333726 - DNA, 20 bp, Artificial Sequence
  Description of Artificial Sequence: Synthetic oligonucleotide
  Target: LAMA2; (+) strand; PAM type: YTN; PAM sequence: TTA
ccttccaccatgattgtgag

SEQ ID NO: 333727 - DNA, 20 bp, Artificial Sequence
  Description of Artificial Sequence: Synthetic oligonucleotide
  Target: LAMA2; (+) strand; PAM type: YTN; PAM sequence: CTT
ccaccatgattgtgaggctt

SEQ ID NO: 333728 - DNA, 20 bp, Artificial Sequence
  Description of Artificial Sequence: Synthetic oligonucleotide
  Target: LAMA2; (+) strand; PAM type: YTN; PAM sequence: TTC
caccatgattgtgaggcttc

SEQ ID NO: 333729 - DNA, 20 bp, Artificial Sequence
  Description of Artificial Sequence: Synthetic oligonucleotide
  Target: LAMA2; (+) strand; PAM type: YTN; PAM sequence: TTG
tgaggcttccccagccacat

SEQ ID NO: 333730 - DNA, 20 bp, Artificial Sequence
  Description of Artificial Sequence: Synthetic oligonucleotide
  Target: LAMA2; (+) strand; PAM type: YTN; PAM sequence: CTT
ccccagccacatggaactat

SEQ ID NO: 333731 - DNA, 20 bp, Artificial Sequence
  Description of Artificial Sequence: Synthetic oligonucleotide
  Target: LAMA2; (+) strand; PAM type: YTN; PAM sequence: TTC
cccagccacatggaactata

SEQ ID NO: 333732 - DNA, 20 bp, Artificial Sequence
  Description of Artificial Sequence: Synthetic oligonucleotide
  Target: LAMA2; (+) strand; PAM type: YTN; PAM sequence: CTA
taagtccaattaaacctctt

SEQ ID NO: 333733 - DNA, 20 bp, Artificial Sequence
  Description of Artificial Sequence: Synthetic oligonucleotide
  Target: LAMA2; (+) strand; PAM type: YTN; PAM sequence: TTA
aacctctttcttttgtaaat

SEQ ID NO: 333734 - DNA, 20 bp, Artificial Sequence
  Description of Artificial Sequence: Synthetic oligonucleotide
  Target: LAMA2; (+) strand; PAM type: YTN; PAM sequence: CTC
tttcttttgtaaattgccca

SEQ ID NO: 333735 - DNA, 20 bp, Artificial Sequence
  Description of Artificial Sequence: Synthetic oligonucleotide
  Target: LAMA2; (+) strand; PAM type: YTN; PAM sequence: CTT
tcttttgtaaattgcccagt

SEQ ID NO: 333736 - DNA, 20 bp, Artificial Sequence
  Description of Artificial Sequence: Synthetic oligonucleotide
  Target: LAMA2; (+) strand; PAM type: YTN; PAM sequence: TTT
cttttgtaaattgcccagtc

SEQ ID NO: 333737 - DNA, 20 bp, Artificial Sequence
  Description of Artificial Sequence: Synthetic oligonucleotide
  Target: LAMA2; (+) strand; PAM type: YTN; PAM sequence: TTC
ttttgtaaattgcccagtct

SEQ ID NO: 333738 - DNA, 20 bp, Artificial Sequence
  Description of Artificial Sequence: Synthetic oligonucleotide
  Target: LAMA2; (+) strand; PAM type: YTN; PAM sequence: CTT
ttgtaaattgcccagtctca

SEQ ID NO: 333739 - DNA, 20 bp, Artificial Sequence
  Description of Artificial Sequence: Synthetic oligonucleotide
  Target: LAMA2; (+) strand; PAM type: YTN; PAM sequence: TTT
tgtaaattgcccagtctcag

SEQ ID NO: 333740 - DNA, 20 bp, Artificial Sequence
  Description of Artificial Sequence: Synthetic oligonucleotide
  Target: LAMA2; (+) strand; PAM type: YTN; PAM sequence: TTT
gtaaattgcccagtctcagg

SEQ ID NO: 333741 - DNA, 20 bp, Artificial Sequence
  Description of Artificial Sequence: Synthetic oligonucleotide
  Target: LAMA2; (+) strand; PAM type: YTN; PAM sequence: TTG
taaattgcccagtctcaggt

SEQ ID NO: 333742 - DNA, 20 bp, Artificial Sequence
  Description of Artificial Sequence: Synthetic oligonucleotide
  Target: LAMA2; (+) strand; PAM type: YTN; PAM sequence: TTG
cccagtctcaggtttttttt

SEQ ID NO: 333743 - DNA, 20 bp, Artificial Sequence
  Description of Artificial Sequence: Synthetic oligonucleotide
  Target: LAMA2; (+) strand; PAM type: YTN; PAM sequence: CTC
aggttttttttttttttttt

SEQ ID NO: 333744 - DNA, 20 bp, Artificial Sequence
  Description of Artificial Sequence: Synthetic oligonucleotide
  Target: LAMA2; (+) strand; PAM type: YTN; PAM sequence: TTT
tttttttttttttttttttt

SEQ ID NO: 333745 - DNA, 20 bp, Artificial Sequence
  Description of Artificial Sequence: Synthetic oligonucleotide
  Target: LAMA2; (+) strand; PAM type: YTN; PAM sequence: TTT
tttttttttttttttttttt

SEQ ID NO: 333746 - DNA, 20 bp, Artificial Sequence
  Description of Artificial Sequence: Synthetic oligonucleotide
  Target: LAMA2; (+) strand; PAM type: YTN; PAM sequence: TTT
tttttttttttttttttttt

SEQ ID NO: 333747 - DNA, 20 bp, Artificial Sequence
  Description of Artificial Sequence: Synthetic oligonucleotide
  Target: LAMA2; (+) strand; PAM type: YTN; PAM sequence: TTT
tttttttttttttttttttg

SEQ ID NO: 333748 - DNA, 20 bp, Artificial Sequence
  Description of Artificial Sequence: Synthetic oligonucleotide
  Target: LAMA2; (+) strand; PAM type: YTN; PAM sequence: TTT
ttttttttttttttttttga

SEQ ID NO: 333749 - DNA, 20 bp, Artificial Sequence
  Description of Artificial Sequence: Synthetic oligonucleotide
  Target: LAMA2; (+) strand; PAM type: YTN; PAM sequence: TTT
tttttttttttttttttgag

SEQ ID NO: 333750 - DNA, 20 bp, Artificial Sequence
  Description of Artificial Sequence: Synthetic oligonucleotide
  Target: LAMA2; (+) strand; PAM type: YTN; PAM sequence: TTT
ttttttttttttttttgaga

SEQ ID NO: 333751 - DNA, 20 bp, Artificial Sequence
  Description of Artificial Sequence: Synthetic oligonucleotide
  Target: LAMA2; (+) strand; PAM type: YTN; PAM sequence: TTT
tttttttttttttttgagac

SEQ ID NO: 333752 - DNA, 20 bp, Artificial Sequence
  Description of Artificial Sequence: Synthetic oligonucleotide
  Target: LAMA2; (+) strand; PAM type: YTN; PAM sequence: TTT
ttttttttttttttgagacg

SEQ ID NO: 333753 - DNA, 20 bp, Artificial Sequence
  Description of Artificial Sequence: Synthetic oligonucleotide
  Target: LAMA2; (+) strand; PAM type: YTN; PAM sequence: TTT
tttttttttttttgagacgc

SEQ ID NO: 333754 - DNA, 20 bp, Artificial Sequence
  Description of Artificial Sequence: Synthetic oligonucleotide
  Target: LAMA2; (+) strand; PAM type: YTN; PAM sequence: TTT
ttttttttttttgagacgca

SEQ ID NO: 333755 - DNA, 20 bp, Artificial Sequence
  Description of Artificial Sequence: Synthetic oligonucleotide
  Target: LAMA2; (+) strand; PAM type: YTN; PAM sequence: TTT
tttttttttttgagacgcag

SEQ ID NO: 333756 - DNA, 20 bp, Artificial Sequence
  Description of Artificial Sequence: Synthetic oligonucleotide
  Target: LAMA2; (+) strand; PAM type: YTN; PAM sequence: TTT
ttttttttttgagacgcagt

SEQ ID NO: 333757 - DNA, 20 bp, Artificial Sequence
  Description of Artificial Sequence: Synthetic oligonucleotide
  Target: LAMA2; (+) strand; PAM type: YTN; PAM sequence: TTT
tttttttttgagacgcagtc

SEQ ID NO: 333758 - DNA, 20 bp, Artificial Sequence
  Description of Artificial Sequence: Synthetic oligonucleotide
  Target: LAMA2; (+) strand; PAM type: YTN; PAM sequence: TTT
ttttttttgagacgcagtct

SEQ ID NO: 333759 - DNA, 20 bp, Artificial Sequence
  Description of Artificial Sequence: Synthetic oligonucleotide
  Target: LAMA2; (+) strand; PAM type: YTN; PAM sequence: TTT
tttttttgagacgcagtctc

SEQ ID NO: 333760 - DNA, 20 bp, Artificial Sequence
  Description of Artificial Sequence: Synthetic oligonucleotide
  Target: LAMA2; (+) strand; PAM type: YTN; PAM sequence: TTT
ttttttgagacgcagtctcg

SEQ ID NO: 333761 - DNA, 20 bp, Artificial Sequence
  Description of Artificial Sequence: Synthetic oligonucleotide
  Target: LAMA2; (+) strand; PAM type: YTN; PAM sequence: TTT
tttttgagacgcagtctcgc

SEQ ID NO: 333762 - DNA, 20 bp, Artificial Sequence
  Description of Artificial Sequence: Synthetic oligonucleotide
  Target: LAMA2; (+) strand; PAM type: YTN; PAM sequence: TTT
ttttgagacgcagtctcgct

SEQ ID NO: 333763 - DNA, 20 bp, Artificial Sequence
  Description of Artificial Sequence: Synthetic oligonucleotide
  Target: LAMA2; (+) strand; PAM type: YTN; PAM sequence: TTT
tttgagacgcagtctcgctc

SEQ ID NO: 333764 - DNA, 20 bp, Artificial Sequence
  Description of Artificial Sequence: Synthetic oligonucleotide
  Target: LAMA2; (+) strand; PAM type: YTN; PAM sequence: TTT
ttgagacgcagtctcgctct

SEQ ID NO: 333765 - DNA, 20 bp, Artificial Sequence
  Description of Artificial Sequence: Synthetic oligonucleotide
  Target: LAMA2; (+) strand; PAM type: YTN; PAM sequence: TTT
tgagacgcagtctcgctctg

SEQ ID NO: 333766 - DNA, 20 bp, Artificial Sequence
  Description of Artificial Sequence: Synthetic oligonucleotide
  Target: LAMA2; (+) strand; PAM type: YTN; PAM sequence: TTT
gagacgcagtctcgctctgt

SEQ ID NO: 333767 - DNA, 20 bp, Artificial Sequence
  Description of Artificial Sequence: Synthetic oligonucleotide
  Target: LAMA2; (+) strand; PAM type: YTN; PAM sequence: TTG
agacgcagtctcgctctgtc

SEQ ID NO: 333768 - DNA, 20 bp, Artificial Sequence
  Description of Artificial Sequence: Synthetic oligonucleotide
  Target: LAMA2; (+) strand; PAM type: YTN; PAM sequence: CTC
gctctgtcgcccaggctgga

SEQ ID NO: 333769 - DNA, 20 bp, Artificial Sequence
  Description of Artificial Sequence: Synthetic oligonucleotide
  Target: LAMA2; (+) strand; PAM type: YTN; PAM sequence: CTC
tgtcgcccaggctggagtgc

SEQ ID NO: 333770 - DNA, 20 bp, Artificial Sequence
  Description of Artificial Sequence: Synthetic oligonucleotide
  Target: LAMA2; (+) strand; PAM type: YTN; PAM sequence: CTG
tcgcccaggctggagtgcag

SEQ ID NO: 333771 - DNA, 20 bp, Artificial Sequence
  Description of Artificial Sequence: Synthetic oligonucleotide
  Target: LAMA2; (+) strand; PAM type: YTN; PAM sequence: CTG
gagtgcagtggcgggatctc

SEQ ID NO: 333772 - DNA, 20 bp, Artificial Sequence
  Description of Artificial Sequence: Synthetic oligonucleotide
  Target: LAMA2; (+) strand; PAM type: YTN; PAM sequence: CTC
ggctcactgcaagctccgcc

SEQ ID NO: 333773 - DNA, 20 bp, Artificial Sequence
  Description of Artificial Sequence: Synthetic oligonucleotide
  Target: LAMA2; (+) strand; PAM type: YTN; PAM sequence: CTC
actgcaagctccgcctcccg

SEQ ID NO: 333774 - DNA, 20 bp, Artificial Sequence
  Description of Artificial Sequence: Synthetic oligonucleotide
  Target: LAMA2; (+) strand; PAM type: YTN; PAM sequence: CTG
caagctccgcctcccgggtt

SEQ ID NO: 333775 - DNA, 20 bp, Artificial Sequence
  Description of Artificial Sequence: Synthetic oligonucleotide
  Target: LAMA2; (+) strand; PAM type: YTN; PAM sequence: CTC
cgcctcccgggttcatgcca

SEQ ID NO: 333776 - DNA, 20 bp, Artificial Sequence
  Description of Artificial Sequence: Synthetic oligonucleotide
  Target: LAMA2; (+) strand; PAM type: YTN; PAM sequence: CTC
ccgggttcatgccattctcc

SEQ ID NO: 333777 - DNA, 20 bp, Artificial Sequence
  Description of Artificial Sequence: Synthetic oligonucleotide
  Target: LAMA2; (+) strand; PAM type: YTN; PAM sequence: TTC
atgccattctcctgcctcag

SEQ ID NO: 333778 - DNA, 20 bp, Artificial Sequence
  Description of Artificial Sequence: Synthetic oligonucleotide
  Target: LAMA2; (+) strand; PAM type: YTN; PAM sequence: TTC
tcctgcctcagcctcccaag

SEQ ID NO: 333779 - DNA, 20 bp, Artificial Sequence
  Description of Artificial Sequence: Synthetic oligonucleotide
  Target: LAMA2; (+) strand; PAM type: YTN; PAM sequence: CTC
ctgcctcagcctcccaagta

SEQ ID NO: 333780 - DNA, 20 bp, Artificial Sequence
  Description of Artificial Sequence: Synthetic oligonucleotide
  Target: LAMA2; (+) strand; PAM type: YTN; PAM sequence: CTG
cctcagcctcccaagtagct

SEQ ID NO: 333781 - DNA, 20 bp, Artificial Sequence
  Description of Artificial Sequence: Synthetic oligonucleotide
  Target: LAMA2; (+) strand; PAM type: YTN; PAM sequence: CTC
agcctcccaagtagctggga

SEQ ID NO: 333782 - DNA, 20 bp, Artificial Sequence
  Description of Artificial Sequence: Synthetic oligonucleotide
  Target: LAMA2; (+) strand; PAM type: YTN; PAM sequence: CTC
ccaagtagctgggactacag

SEQ ID NO: 333783 - DNA, 20 bp, Artificial Sequence
  Description of Artificial Sequence: Synthetic oligonucleotide
  Target: LAMA2; (+) strand; PAM type: YTN; PAM sequence: CTG
ggactacaggcgcccgccac

SEQ ID NO: 333784 - DNA, 20 bp, Artificial Sequence
  Description of Artificial Sequence: Synthetic oligonucleotide
  Target: LAMA2; (+) strand; PAM type: YTN; PAM sequence: CTA
caggcgcccgccactacgcc

SEQ ID NO: 333785 - DNA, 20 bp, Artificial Sequence
  Description of Artificial Sequence: Synthetic oligonucleotide
  Target: LAMA2; (+) strand; PAM type: YTN; PAM sequence: CTA
cgcccggctaattttttgta

SEQ ID NO: 333786 - DNA, 20 bp, Artificial Sequence
  Description of Artificial Sequence: Synthetic oligonucleotide
  Target: LAMA2; (+) strand; PAM type: YTN; PAM sequence: CTA
attttttgtatttttagtag

SEQ ID NO: 333787 - DNA, 20 bp, Artificial Sequence
  Description of Artificial Sequence: Synthetic oligonucleotide
  Target: LAMA2; (+) strand; PAM type: YTN; PAM sequence: TTT
tttgtatttttagtagagac

SEQ ID NO: 333788 - DNA, 20 bp, Artificial Sequence
  Description of Artificial Sequence: Synthetic oligonucleotide
  Target: LAMA2; (+) strand; PAM type: YTN; PAM sequence: TTT
ttgtatttttagtagagacg

SEQ ID NO: 333789 - DNA, 20 bp, Artificial Sequence
  Description of Artificial Sequence: Synthetic oligonucleotide
  Target: LAMA2; (+) strand; PAM type: YTN; PAM sequence: TTT
tgtatttttagtagagacgg

SEQ ID NO: 333790 - DNA, 20 bp, Artificial Sequence
  Description of Artificial Sequence: Synthetic oligonucleotide
  Target: LAMA2; (+) strand; PAM type: YTN; PAM sequence: TTT
gtatttttagtagagacggg

SEQ ID NO: 333791 - DNA, 20 bp, Artificial Sequence
  Description of Artificial Sequence: Synthetic oligonucleotide
  Target: LAMA2; (+) strand; PAM type: YTN; PAM sequence: TTG
tatttttagtagagacgggg

SEQ ID NO: 333792 - DNA, 20 bp, Artificial Sequence
  Description of Artificial Sequence: Synthetic oligonucleotide
  Target: LAMA2; (+) strand; PAM type: YTN; PAM sequence: TTT
ttagtagagacggggtttca

SEQ ID NO: 333793 - DNA, 20 bp, Artificial Sequence
  Description of Artificial Sequence: Synthetic oligonucleotide
  Target: LAMA2; (+) strand; PAM type: YTN; PAM sequence: TTT
tagtagagacggggtttcac

SEQ ID NO: 333794 - DNA, 20 bp, Artificial Sequence
  Description of Artificial Sequence: Synthetic oligonucleotide
  Target: LAMA2; (+) strand; PAM type: YTN; PAM sequence: TTT
agtagagacggggtttcacc

SEQ ID NO: 333795 - DNA, 20 bp, Artificial Sequence
  Description of Artificial Sequence: Synthetic oligonucleotide
  Target: LAMA2; (+) strand; PAM type: YTN; PAM sequence: TTA
gtagagacggggtttcaccg

SEQ ID NO: 333796 - DNA, 20 bp, Artificial Sequence
  Description of Artificial Sequence: Synthetic oligonucleotide
  Target: LAMA2; (+) strand; PAM type: YTN; PAM sequence: TTT
caccgttttagccgggatgg

SEQ ID NO: 333797 - DNA, 20 bp, Artificial Sequence
  Description of Artificial Sequence: Synthetic oligonucleotide
  Target: LAMA2; (+) strand; PAM type: YTN; PAM sequence: TTC
accgttttagccgggatggt

SEQ ID NO: 333798 - DNA, 20 bp, Artificial Sequence
  Description of Artificial Sequence: Synthetic oligonucleotide
  Target: LAMA2; (+) strand; PAM type: YTN; PAM sequence: TTT
tagccgggatggtctcgatc

SEQ ID NO: 333799 - DNA, 20 bp, Artificial Sequence
  Description of Artificial Sequence: Synthetic oligonucleotide
  Target: LAMA2; (+) strand; PAM type: YTN; PAM sequence: TTT
agccgggatggtctcgatct

SEQ ID NO: 333800 - DNA, 20 bp, Artificial Sequence
  Description of Artificial Sequence: Synthetic oligonucleotide
  Target: LAMA2; (+) strand; PAM type: YTN; PAM sequence: TTA
gccgggatggtctcgatctc

SEQ ID NO: 333801 - DNA, 20 bp, Artificial Sequence
  Description of Artificial Sequence: Synthetic oligonucleotide
  Target: LAMA2; (+) strand; PAM type: YTN; PAM sequence: CTC
gatctcctgacctcgtgatc

SEQ ID NO: 333802 - DNA, 20 bp, Artificial Sequence
  Description of Artificial Sequence: Synthetic oligonucleotide
  Target: LAMA2; (+) strand; PAM type: YTN; PAM sequence: CTC
ctgacctcgtgatccgcccg

SEQ ID NO: 333803 - DNA, 20 bp, Artificial Sequence
  Description of Artificial Sequence: Synthetic oligonucleotide
  Target: LAMA2; (+) strand; PAM type: YTN; PAM sequence: CTG
acctcgtgatccgcccgcct

SEQ ID NO: 333804 - DNA, 20 bp, Artificial Sequence
  Description of Artificial Sequence: Synthetic oligonucleotide
  Target: LAMA2; (+) strand; PAM type: YTN; PAM sequence: CTC
gtgatccgcccgcctcggcc

SEQ ID NO: 333805 - DNA, 20 bp, Artificial Sequence
  Description of Artificial Sequence: Synthetic oligonucleotide
  Target: LAMA2; (+) strand; PAM type: YTN; PAM sequence: CTC
ggcctcccaaagtgctggga

SEQ ID NO: 333806 - DNA, 20 bp, Artificial Sequence
  Description of Artificial Sequence: Synthetic oligonucleotide
  Target: LAMA2; (+) strand; PAM type: YTN; PAM sequence: CTC
ccaaagtgctgggattacag

SEQ ID NO: 333807 - DNA, 20 bp, Artificial Sequence
  Description of Artificial Sequence: Synthetic oligonucleotide
  Target: LAMA2; (+) strand; PAM type: YTN; PAM sequence: CTG
ggattacaggcgtgagccac

SEQ ID NO: 333808 - DNA, 20 bp, Artificial Sequence
  Description of Artificial Sequence: Synthetic oligonucleotide
  Target: LAMA2; (+) strand; PAM type: YTN; PAM sequence: TTA
caggcgtgagccaccgcgcc

SEQ ID NO: 333809 - DNA, 20 bp, Artificial Sequence
  Description of Artificial Sequence: Synthetic oligonucleotide
  Target: LAMA2; (+) strand; PAM type: YTN; PAM sequence: CTC
aggtatgtctttatcagcag

SEQ ID NO: 333810 - DNA, 20 bp, Artificial Sequence
  Description of Artificial Sequence: Synthetic oligonucleotide
  Target: LAMA2; (+) strand; PAM type: YTN; PAM sequence: CTT
tatcagcagtgtaaaaacag

SEQ ID NO: 333811 - DNA, 20 bp, Artificial Sequence
  Description of Artificial Sequence: Synthetic oligonucleotide
  Target: LAMA2; (+) strand; PAM type: YTN; PAM sequence: TTT
atcagcagtgtaaaaacaga

SEQ ID NO: 333812 - DNA, 20 bp, Artificial Sequence
  Description of Artificial Sequence: Synthetic oligonucleotide
  Target: LAMA2; (+) strand; PAM type: YTN; PAM sequence: TTA
tcagcagtgtaaaaacagac

SEQ ID NO: 333813 - DNA, 20 bp, Artificial Sequence
  Description of Artificial Sequence: Synthetic oligonucleotide
  Target: LAMA2; (+) strand; PAM type: YTN; PAM sequence: CTA
atacagagatgaaagactgg

SEQ ID NO: 333814 - DNA, 20 bp, Artificial Sequence
  Description of Artificial Sequence: Synthetic oligonucleotide
  Target: LAMA2; (+) strand; PAM type: YTN; PAM sequence: CTG
gtacactgaaaactgtaaaa

SEQ ID NO: 333815 - DNA, 20 bp, Artificial Sequence
  Description of Artificial Sequence: Synthetic oligonucleotide
  Target: LAMA2; (+) strand; PAM type: YTN; PAM sequence: CTG
aaaactgtaaaacagtgatg

SEQ ID NO: 333816 - DNA, 20 bp, Artificial Sequence
  Description of Artificial Sequence: Synthetic oligonucleotide
  Target: LAMA2; (+) strand; PAM type: YTN; PAM sequence: CTG
taaaacagtgatgaaataaa

SEQ ID NO: 333817 - DNA, 20 bp, Artificial Sequence
  Description of Artificial Sequence: Synthetic oligonucleotide
  Target: LAMA2; (+) strand; PAM type: YTN; PAM sequence: TTG
aagacacaaataaatgggaa

SEQ ID NO: 333818 - DNA, 20 bp, Artificial Sequence
  Description of Artificial Sequence: Synthetic oligonucleotide
  Target: LAMA2; (+) strand; PAM type: YTN; PAM sequence: CTG
tgttttgtggaataactaat

SEQ ID NO: 333819 - DNA, 20 bp, Artificial Sequence
  Description of Artificial Sequence: Synthetic oligonucleotide
  Target: LAMA2; (+) strand; PAM type: YTN; PAM sequence: TTT
tgtggaataactaatattat

SEQ ID NO: 333820 - DNA, 20 bp, Artificial Sequence
  Description of Artificial Sequence: Synthetic oligonucleotide
  Target: LAMA2; (+) strand; PAM type: YTN; PAM sequence: TTT
gtggaataactaatattatt

SEQ ID NO: 333821 - DNA, 20 bp, Artificial Sequence
  Description of Artificial Sequence: Synthetic oligonucleotide
  Target: LAMA2; (+) strand; PAM type: YTN; PAM sequence: TTG
tggaataactaatattatta

SEQ ID NO: 333822 - DNA, 20 bp, Artificial Sequence
  Description of Artificial Sequence: Synthetic oligonucleotide
  Target: LAMA2; (+) strand; PAM type: YTN; PAM sequence: CTA
atattattaaaatgtccata

SEQ ID NO: 333823 - DNA, 20 bp, Artificial Sequence
  Description of Artificial Sequence: Synthetic oligonucleotide
  Target: LAMA2; (+) strand; PAM type: YTN; PAM sequence: TTA
ttaaaatgtccatactactc

SEQ ID NO: 333824 - DNA, 20 bp, Artificial Sequence
  Description of Artificial Sequence: Synthetic oligonucleotide
  Target: LAMA2; (+) strand; PAM type: YTN; PAM sequence: TTA
aaatgtccatactactcaat

SEQ ID NO: 333825 - DNA, 20 bp, Artificial Sequence
  Description of Artificial Sequence: Synthetic oligonucleotide
  Target: LAMA2; (+) strand; PAM type: YTN; PAM sequence: CTA
ctcaatgtgatccacagatt

SEQ ID NO: 333826 - DNA, 20 bp, Artificial Sequence
  Description of Artificial Sequence: Synthetic oligonucleotide
  Target: LAMA2; (+) strand; PAM type: YTN; PAM sequence: CTC
aatgtgatccacagattcag

SEQ ID NO: 333827 - DNA, 20 bp, Artificial Sequence
  Description of Artificial Sequence: Synthetic oligonucleotide
  Target: LAMA2; (+) strand; PAM type: YTN; PAM sequence: TTC
agtgcaattcttgtcaaaat

SEQ ID NO: 333828 - DNA, 20 bp, Artificial Sequence
  Description of Artificial Sequence: Synthetic oligonucleotide
  Target: LAMA2; (+) strand; PAM type: YTN; PAM sequence: TTC
ttgtcaaaattccaatgacg

SEQ ID NO: 333829 - DNA, 20 bp, Artificial Sequence
  Description of Artificial Sequence: Synthetic oligonucleotide
  Target: LAMA2; (+) strand; PAM type: YTN; PAM sequence: CTT
gtcaaaattccaatgacgtt

SEQ ID NO: 333830 - DNA, 20 bp, Artificial Sequence
  Description of Artificial Sequence: Synthetic oligonucleotide
  Target: LAMA2; (+) strand; PAM type: YTN; PAM sequence: TTG
tcaaaattccaatgacgttt

SEQ ID NO: 333831 - DNA, 20 bp, Artificial Sequence
  Description of Artificial Sequence: Synthetic oligonucleotide
  Target: LAMA2; (+) strand; PAM type: YTN; PAM sequence: TTC
caatgacgtttttcacagaa

SEQ ID NO: 333832 - DNA, 20 bp, Artificial Sequence
  Description of Artificial Sequence: Synthetic oligonucleotide
  Target: LAMA2; (+) strand; PAM type: YTN; PAM sequence: TTT
ttcacagaaataaaaataaa

SEQ ID NO: 333833 - DNA, 20 bp, Artificial Sequence
  Description of Artificial Sequence: Synthetic oligonucleotide
  Target: LAMA2; (+) strand; PAM type: YTN; PAM sequence: TTT
tcacagaaataaaaataaat

SEQ ID NO: 333834 - DNA, 20 bp, Artificial Sequence
  Description of Artificial Sequence: Synthetic oligonucleotide
  Target: LAMA2; (+) strand; PAM type: YTN; PAM sequence: TTT
cacagaaataaaaataaatc

SEQ ID NO: 333835 - DNA, 20 bp, Artificial Sequence
  Description of Artificial Sequence: Synthetic oligonucleotide
  Target: LAMA2; (+) strand; PAM type: YTN; PAM sequence: TTC
acagaaataaaaataaatcc

SEQ ID NO: 333836 - DNA, 20 bp, Artificial Sequence
  Description of Artificial Sequence: Synthetic oligonucleotide
  Target: LAMA2; (+) strand; PAM type: YTN; PAM sequence: CTA
aatattttatggaaccacaa

SEQ ID NO: 333837 - DNA, 20 bp, Artificial Sequence
  Description of Artificial Sequence: Synthetic oligonucleotide
  Target: LAMA2; (+) strand; PAM type: YTN; PAM sequence: TTT
tatggaaccacaaaaggtgc

SEQ ID NO: 333838 - DNA, 20 bp, Artificial Sequence
  Description of Artificial Sequence: Synthetic oligonucleotide
  Target: LAMA2; (+) strand; PAM type: YTN; PAM sequence: TTT
atggaaccacaaaaggtgct

SEQ ID NO: 333839 - DNA, 20 bp, Artificial Sequence
  Description of Artificial Sequence: Synthetic oligonucleotide
  Target: LAMA2; (+) strand; PAM type: YTN; PAM sequence: TTA
tggaaccacaaaaggtgcta

SEQ ID NO: 333840 - DNA, 20 bp, Artificial Sequence
  Description of Artificial Sequence: Synthetic oligonucleotide
  Target: LAMA2; (+) strand; PAM type: YTN; PAM sequence: CTA
aagcaatcttgagcaaaaag

SEQ ID NO: 333841 - DNA, 20 bp, Artificial Sequence
  Description of Artificial Sequence: Synthetic oligonucleotide
  Target: LAMA2; (+) strand; PAM type: YTN; PAM sequence: CTT
gagcaaaaagaacaaagctg

SEQ ID NO: 333842 - DNA, 20 bp, Artificial Sequence
  Description of Artificial Sequence: Synthetic oligonucleotide
  Target: LAMA2; (+) strand; PAM type: YTN; PAM sequence: TTG
agcaaaaagaacaaagctgg

SEQ ID NO: 333843 - DNA, 20 bp, Artificial Sequence
  Description of Artificial Sequence: Synthetic oligonucleotide
  Target: LAMA2; (+) strand; PAM type: YTN; PAM sequence: CTG
gaagcatcacactatctgac

SEQ ID NO: 333844 - DNA, 20 bp, Artificial Sequence
  Description of Artificial Sequence: Synthetic oligonucleotide
  Target: LAMA2; (+) strand; PAM type: YTN; PAM sequence: CTA
tctgactttaaaatatacta

SEQ ID NO: 333845 - DNA, 20 bp, Artificial Sequence
  Description of Artificial Sequence: Synthetic oligonucleotide
  Target: LAMA2; (+) strand; PAM type: YTN; PAM sequence: CTG
actttaaaatatactacaaa

SEQ ID NO: 333846 - DNA, 20 bp, Artificial Sequence
  Description of Artificial Sequence: Synthetic oligonucleotide
  Target: LAMA2; (+) strand; PAM type: YTN; PAM sequence: CTT
taaaatatactacaaagctg

SEQ ID NO: 333847 - DNA, 20 bp, Artificial Sequence
  Description of Artificial Sequence: Synthetic oligonucleotide
  Target: LAMA2; (+) strand; PAM type: YTN; PAM sequence: TTT
aaaatatactacaaagctgt

SEQ ID NO: 333848 - DNA, 20 bp, Artificial Sequence
  Description of Artificial Sequence: Synthetic oligonucleotide
  Target: LAMA2; (+) strand; PAM type: YTN; PAM sequence: TTA
aaatatactacaaagctgta

SEQ ID NO: 333849 - DNA, 20 bp, Artificial Sequence
  Description of Artificial Sequence: Synthetic oligonucleotide
  Target: LAMA2; (+) strand; PAM type: YTN; PAM sequence: CTA
caaagctgtagtaatcaaaa

SEQ ID NO: 333850 - DNA, 20 bp, Artificial Sequence
  Description of Artificial Sequence: Synthetic oligonucleotide
  Target: LAMA2; (+) strand; PAM type: YTN; PAM sequence: CTG
tagtaatcaaaacagtatgc

SEQ ID NO: 333851 - DNA, 20 bp, Artificial Sequence
  Description of Artificial Sequence: Synthetic oligonucleotide
  Target: LAMA2; (+) strand; PAM type: YTN; PAM sequence: CTG
ctaacttaaaaacagataca

SEQ ID NO: 333852 - DNA, 20 bp, Artificial Sequence
  Description of Artificial Sequence: Synthetic oligonucleotide
  Target: LAMA2; (+) strand; PAM type: YTN; PAM sequence: CTA
acttaaaaacagatacatag

SEQ ID NO: 333853 - DNA, 20 bp, Artificial Sequence
  Description of Artificial Sequence: Synthetic oligonucleotide
  Target: LAMA2; (+) strand; PAM type: YTN; PAM sequence: CTT
aaaaacagatacatagacca

SEQ ID NO: 333854 - DNA, 20 bp, Artificial Sequence
  Description of Artificial Sequence: Synthetic oligonucleotide
  Target: LAMA2; (+) strand; PAM type: YTN; PAM sequence: TTA
aaaacagatacatagaccaa

SEQ ID NO: 333855 - DNA, 20 bp, Artificial Sequence
  Description of Artificial Sequence: Synthetic oligonucleotide
  Target: LAMA2; (+) strand; PAM type: YTN; PAM sequence: CTA
agcatttatggtcaattgat

SEQ ID NO: 333856 - DNA, 20 bp, Artificial Sequence
  Description of Artificial Sequence: Synthetic oligonucleotide
  Target: LAMA2; (+) strand; PAM type: YTN; PAM sequence: TTT
atggtcaattgatttttgac

SEQ ID NO: 333857 - DNA, 20 bp, Artificial Sequence
  Description of Artificial Sequence: Synthetic oligonucleotide
  Target: LAMA2; (+) strand; PAM type: YTN; PAM sequence: TTA
tggtcaattgatttttgaca

SEQ ID NO: 333858 - DNA, 20 bp, Artificial Sequence
  Description of Artificial Sequence: Synthetic oligonucleotide
  Target: LAMA2; (+) strand; PAM type: YTN; PAM sequence: TTG
atttttgacaaagatgccaa

SEQ ID NO: 333859 - DNA, 20 bp, Artificial Sequence
  Description of Artificial Sequence: Synthetic oligonucleotide
  Target: LAMA2; (+) strand; PAM type: YTN; PAM sequence: TTT
ttgacaaagatgccaagaac

SEQ ID NO: 333860 - DNA, 20 bp, Artificial Sequence
  Description of Artificial Sequence: Synthetic oligonucleotide
  Target: LAMA2; (+) strand; PAM type: YTN; PAM sequence: TTT
tgacaaagatgccaagaaca

SEQ ID NO: 333861 - DNA, 20 bp, Artificial Sequence
  Description of Artificial Sequence: Synthetic oligonucleotide
  Target: LAMA2; (+) strand; PAM type: YTN; PAM sequence: TTT
gacaaagatgccaagaacac

SEQ ID NO: 333862 - DNA, 20 bp, Artificial Sequence
  Description of Artificial Sequence: Synthetic oligonucleotide
  Target: LAMA2; (+) strand; PAM type: YTN; PAM sequence: TTG
acaaagatgccaagaacaca

SEQ ID NO: 333863 - DNA, 20 bp, Artificial Sequence
  Description of Artificial Sequence: Synthetic oligonucleotide
  Target: LAMA2; (+) strand; PAM type: YTN; PAM sequence: TTG
aactgtctgtccagtgaagg

SEQ ID NO: 333864 - DNA, 20 bp, Artificial Sequence
  Description of Artificial Sequence: Synthetic oligonucleotide
  Target: LAMA2; (+) strand; PAM type: YTN; PAM sequence: CTG
tctgtccagtgaagggtgtt

SEQ ID NO: 333865 - DNA, 20 bp, Artificial Sequence
  Description of Artificial Sequence: Synthetic oligonucleotide
  Target: LAMA2; (+) strand; PAM type: YTN; PAM sequence: CTG
tccagtgaagggtgtttgga

SEQ ID NO: 333866 - DNA, 20 bp, Artificial Sequence
  Description of Artificial Sequence: Synthetic oligonucleotide
  Target: LAMA2; (+) strand; PAM type: YTN; PAM sequence: TTT
ggagcagtagatgtccacat

SEQ ID NO: 333867 - DNA, 20 bp, Artificial Sequence
  Description of Artificial Sequence: Synthetic oligonucleotide
  Target: LAMA2; (+) strand; PAM type: YTN; PAM sequence: TTG
gagcagtagatgtccacatg

SEQ ID NO: 333868 - DNA, 20 bp, Artificial Sequence
  Description of Artificial Sequence: Synthetic oligonucleotide
  Target: LAMA2; (+) strand; PAM type: YTN; PAM sequence: CTT
atctcatgccatataaaaaa

SEQ ID NO: 333869 - DNA, 20 bp, Artificial Sequence
  Description of Artificial Sequence: Synthetic oligonucleotide
  Target: LAMA2; (+) strand; PAM type: YTN; PAM sequence: TTA
tctcatgccatataaaaaat

SEQ ID NO: 333870 - DNA, 20 bp, Artificial Sequence
  Description of Artificial Sequence: Synthetic oligonucleotide
  Target: LAMA2; (+) strand; PAM type: YTN; PAM sequence: CTC
atgccatataaaaaatccat

SEQ ID NO: 333871 - DNA, 20 bp, Artificial Sequence
  Description of Artificial Sequence: Synthetic oligonucleotide
  Target: LAMA2; (+) strand; PAM type: YTN; PAM sequence: TTC
aaattctaaatgaattaaag

SEQ ID NO: 333872 - DNA, 20 bp, Artificial Sequence
  Description of Artificial Sequence: Synthetic oligonucleotide
  Target: LAMA2; (+) strand; PAM type: YTN; PAM sequence: TTC
taaatgaattaaagactgaa

SEQ ID NO: 333873 - DNA, 20 bp, Artificial Sequence
  Description of Artificial Sequence: Synthetic oligonucleotide
  Target: LAMA2; (+) strand; PAM type: YTN; PAM sequence: CTA
aatgaattaaagactgaaac

SEQ ID NO: 333874 - DNA, 20 bp, Artificial Sequence
  Description of Artificial Sequence: Synthetic oligonucleotide
  Target: LAMA2; (+) strand; PAM type: YTN; PAM sequence: TTA
aagactgaaactgtaaaact

SEQ ID NO: 333875 - DNA, 20 bp, Artificial Sequence
  Description of Artificial Sequence: Synthetic oligonucleotide
  Target: LAMA2; (+) strand; PAM type: YTN; PAM sequence: CTG
aaactgtaaaactactgaaa

SEQ ID NO: 333876 - DNA, 20 bp, Artificial Sequence
  Description of Artificial Sequence: Synthetic oligonucleotide
  Target: LAMA2; (+) strand; PAM type: YTN; PAM sequence: CTG
taaaactactgaaagaaaac

SEQ ID NO: 333877 - DNA, 20 bp, Artificial Sequence
  Description of Artificial Sequence: Synthetic oligonucleotide
  Target: LAMA2; (+) strand; PAM type: YTN; PAM sequence: CTA
ctgaaagaaaacacagggga

SEQ ID NO: 333878 - DNA, 20 bp, Artificial Sequence
  Description of Artificial Sequence: Synthetic oligonucleotide
  Target: LAMA2; (+) strand; PAM type: YTN; PAM sequence: CTG
aaagaaaacacaggggaaaa

SEQ ID NO: 333879 - DNA, 20 bp, Artificial Sequence
  Description of Artificial Sequence: Synthetic oligonucleotide
  Target: LAMA2; (+) strand; PAM type: YTN; PAM sequence: TTC
catgacattggtctgggcaa

SEQ ID NO: 333880 - DNA, 20 bp, Artificial Sequence
  Description of Artificial Sequence: Synthetic oligonucleotide
  Target: LAMA2; (+) strand; PAM type: YTN; PAM sequence: TTG
gtctgggcaatgatttttta

SEQ ID NO: 333881 - DNA, 20 bp, Artificial Sequence
  Description of Artificial Sequence: Synthetic oligonucleotide
  Target: LAMA2; (+) strand; PAM type: YTN; PAM sequence: CTG
ggcaatgattttttaaagat

SEQ ID NO: 333882 - DNA, 20 bp, Artificial Sequence
  Description of Artificial Sequence: Synthetic oligonucleotide
  Target: LAMA2; (+) strand; PAM type: YTN; PAM sequence: TTT
tttaaagatataaaccccaa

SEQ ID NO: 333883 - DNA, 20 bp, Artificial Sequence
  Description of Artificial Sequence: Synthetic oligonucleotide
  Target: LAMA2; (+) strand; PAM type: YTN; PAM sequence: TTT
ttaaagatataaaccccaaa

SEQ ID NO: 333884 - DNA, 20 bp, Artificial Sequence
  Description of Artificial Sequence: Synthetic oligonucleotide
  Target: LAMA2; (+) strand; PAM type: YTN; PAM sequence: TTT
taaagatataaaccccaaag

SEQ ID NO: 333885 - DNA, 20 bp, Artificial Sequence
  Description of Artificial Sequence: Synthetic oligonucleotide
  Target: LAMA2; (+) strand; PAM type: YTN; PAM sequence: TTT
aaagatataaaccccaaagc

SEQ ID NO: 333886 - DNA, 20 bp, Artificial Sequence
  Description of Artificial Sequence: Synthetic oligonucleotide
  Target: LAMA2; (+) strand; PAM type: YTN; PAM sequence: TTA
aagatataaaccccaaagca

SEQ ID NO: 333887 - DNA, 20 bp, Artificial Sequence
  Description of Artificial Sequence: Synthetic oligonucleotide
  Target: LAMA2; (+) strand; PAM type: YTN; PAM sequence: TTA
cattaaactgaaacacatct

SEQ ID NO: 333888 - DNA, 20 bp, Artificial Sequence
  Description of Artificial Sequence: Synthetic oligonucleotide
  Target: LAMA2; (+) strand; PAM type: YTN; PAM sequence: TTA
aactgaaacacatctggata

SEQ ID NO: 333889 - DNA, 20 bp, Artificial Sequence
  Description of Artificial Sequence: Synthetic oligonucleotide
  Target: LAMA2; (+) strand; PAM type: YTN; PAM sequence: CTG
aaacacatctggataaccag

SEQ ID NO: 333890 - DNA, 20 bp, Artificial Sequence
  Description of Artificial Sequence: Synthetic oligonucleotide
  Target: LAMA2; (+) strand; PAM type: YTN; PAM sequence: CTG
gataaccagggaaacaatca

SEQ ID NO: 333891 - DNA, 20 bp, Artificial Sequence
  Description of Artificial Sequence: Synthetic oligonucleotide
  Target: LAMA2; (+) strand; PAM type: YTN; PAM sequence: CTG
ctcttcaaatcactgaattt

SEQ ID NO: 333892 - DNA, 20 bp, Artificial Sequence
  Description of Artificial Sequence: Synthetic oligonucleotide
  Target: LAMA2; (+) strand; PAM type: YTN; PAM sequence: CTC
ttcaaatcactgaatttatt

SEQ ID NO: 333893 - DNA, 20 bp, Artificial Sequence
  Description of Artificial Sequence: Synthetic oligonucleotide
  Target: LAMA2; (+) strand; PAM type: YTN; PAM sequence: CTT
caaatcactgaatttatttt

SEQ ID NO: 333894 - DNA, 20 bp, Artificial Sequence
  Description of Artificial Sequence: Synthetic oligonucleotide
  Target: LAMA2; (+) strand; PAM type: YTN; PAM sequence: TTC
aaatcactgaatttattttg

SEQ ID NO: 333895 - DNA, 20 bp, Artificial Sequence
  Description of Artificial Sequence: Synthetic oligonucleotide
  Target: LAMA2; (+) strand; PAM type: YTN; PAM sequence: CTG
aatttattttgttggtacta

SEQ ID NO: 333896 - DNA, 20 bp, Artificial Sequence
  Description of Artificial Sequence: Synthetic oligonucleotide
  Target: LAMA2; (+) strand; PAM type: YTN; PAM sequence: TTT
attttgttggtactatttgg

SEQ ID NO: 333897 - DNA, 20 bp, Artificial Sequence
  Description of Artificial Sequence: Synthetic oligonucleotide
  Target: LAMA2; (+) strand; PAM type: YTN; PAM sequence: TTA
ttttgttggtactatttggg

SEQ ID NO: 333898 - DNA, 20 bp, Artificial Sequence
  Description of Artificial Sequence: Synthetic oligonucleotide
  Target: LAMA2; (+) strand; PAM type: YTN; PAM sequence: TTT
tgttggtactatttgggtca

SEQ ID NO: 333899 - DNA, 20 bp, Artificial Sequence
  Description of Artificial Sequence: Synthetic oligonucleotide
  Target: LAMA2; (+) strand; PAM type: YTN; PAM sequence: TTT
gttggtactatttgggtcac

SEQ ID NO: 333900 - DNA, 20 bp, Artificial Sequence
  Description of Artificial Sequence: Synthetic oligonucleotide
  Target: LAMA2; (+) strand; PAM type: YTN; PAM sequence: TTG
ttggtactatttgggtcact

SEQ ID NO: 333901 - DNA, 20 bp, Artificial Sequence
  Description of Artificial Sequence: Synthetic oligonucleotide
  Target: LAMA2; (+) strand; PAM type: YTN; PAM sequence: TTG
gtactatttgggtcactgct

SEQ ID NO: 333902 - DNA, 20 bp, Artificial Sequence
  Description of Artificial Sequence: Synthetic oligonucleotide
  Target: LAMA2; (+) strand; PAM type: YTN; PAM sequence: CTA
tttgggtcactgctaaattg

SEQ ID NO: 333903 - DNA, 20 bp, Artificial Sequence
  Description of Artificial Sequence: Synthetic oligonucleotide
  Target: LAMA2; (+) strand; PAM type: YTN; PAM sequence: TTT
gggtcactgctaaattggtg

SEQ ID NO: 333904 - DNA, 20 bp, Artificial Sequence
  Description of Artificial Sequence: Synthetic oligonucleotide
  Target: LAMA2; (+) strand; PAM type: YTN; PAM sequence: TTG
ggtcactgctaaattggtga

SEQ ID NO: 333905 - DNA, 20 bp, Artificial Sequence
  Description of Artificial Sequence: Synthetic oligonucleotide
  Target: LAMA2; (+) strand; PAM type: YTN; PAM sequence: CTG
ctaaattggtgaataccaaa

SEQ ID NO: 333906 - DNA, 20 bp, Artificial Sequence
  Description of Artificial Sequence: Synthetic oligonucleotide
  Target: LAMA2; (+) strand; PAM type: YTN; PAM sequence: CTA
aattggtgaataccaaacta

SEQ ID NO: 333907 - DNA, 20 bp, Artificial Sequence
  Description of Artificial Sequence: Synthetic oligonucleotide
  Target: LAMA2; (+) strand; PAM type: YTN; PAM sequence: TTG
gtgaataccaaactaacaca

SEQ ID NO: 333908 - DNA, 20 bp, Artificial Sequence
  Description of Artificial Sequence: Synthetic oligonucleotide
  Target: LAMA2; (+) strand; PAM type: YTN; PAM sequence: CTA
acacagaagagattataata

SEQ ID NO: 333909 - DNA, 20 bp, Artificial Sequence
  Description of Artificial Sequence: Synthetic oligonucleotide
  Target: LAMA2; (+) strand; PAM type: YTN; PAM sequence: TTA
taatatacatgttccaaatg

SEQ ID NO: 333910 - DNA, 20 bp, Artificial Sequence
  Description of Artificial Sequence: Synthetic oligonucleotide
  Target: LAMA2; (+) strand; PAM type: YTN; PAM sequence: TTC
caaatgtagattatacctta

SEQ ID NO: 333911 - DNA, 20 bp, Artificial Sequence
  Description of Artificial Sequence: Synthetic oligonucleotide
  Target: LAMA2; (+) strand; PAM type: YTN; PAM sequence: TTA
taccttacctgagtatacct

SEQ ID NO: 333912 - DNA, 20 bp, Artificial Sequence
  Description of Artificial Sequence: Synthetic oligonucleotide
  Target: LAMA2; (+) strand; PAM type: YTN; PAM sequence: CTT
acctgagtataccttaagta

SEQ ID NO: 333913 - DNA, 20 bp, Artificial Sequence
  Description of Artificial Sequence: Synthetic oligonucleotide
  Target: LAMA2; (+) strand; PAM type: YTN; PAM sequence: TTA
cctgagtataccttaagtac

SEQ ID NO: 333914 - DNA, 20 bp, Artificial Sequence
  Description of Artificial Sequence: Synthetic oligonucleotide
  Target: LAMA2; (+) strand; PAM type: YTN; PAM sequence: CTG
agtataccttaagtacaaca

SEQ ID NO: 333915 - DNA, 20 bp, Artificial Sequence
  Description of Artificial Sequence: Synthetic oligonucleotide
  Target: LAMA2; (+) strand; PAM type: YTN; PAM sequence: CTT
aagtacaacagaatatagtt

SEQ ID NO: 333916 - DNA, 20 bp, Artificial Sequence
  Description of Artificial Sequence: Synthetic oligonucleotide
  Target: LAMA2; (+) strand; PAM type: YTN; PAM sequence: TTA
agtacaacagaatatagtta

SEQ ID NO: 333917 - DNA, 20 bp, Artificial Sequence
  Description of Artificial Sequence: Synthetic oligonucleotide
  Target: LAMA2; (+) strand; PAM type: YTN; PAM sequence: TTA
aaatcacagttctttacctg

SEQ ID NO: 333918 - DNA, 20 bp, Artificial Sequence
  Description of Artificial Sequence: Synthetic oligonucleotide
  Target: LAMA2; (+) strand; PAM type: YTN; PAM sequence: TTC
tttacctgttttaattgtat

SEQ ID NO: 333919 - DNA, 20 bp, Artificial Sequence
  Description of Artificial Sequence: Synthetic oligonucleotide
  Target: LAMA2; (+) strand; PAM type: YTN; PAM sequence: CTT
tacctgttttaattgtatat

SEQ ID NO: 333920 - DNA, 20 bp, Artificial Sequence
  Description of Artificial Sequence: Synthetic oligonucleotide
  Target: LAMA2; (+) strand; PAM type: YTN; PAM sequence: TTT
acctgttttaattgtatata

SEQ ID NO: 333921 - DNA, 20 bp, Artificial Sequence
  Description of Artificial Sequence: Synthetic oligonucleotide
  Target: LAMA2; (+) strand; PAM type: YTN; PAM sequence: TTA
cctgttttaattgtatatag

SEQ ID NO: 333922 - DNA, 20 bp, Artificial Sequence
  Description of Artificial Sequence: Synthetic oligonucleotide
  Target: LAMA2; (+) strand; PAM type: YTN; PAM sequence: CTG
ttttaattgtatatagattt

SEQ ID NO: 333923 - DNA, 20 bp, Artificial Sequence
  Description of Artificial Sequence: Synthetic oligonucleotide
  Target: LAMA2; (+) strand; PAM type: YTN; PAM sequence: TTT
taattgtatatagattttta

SEQ ID NO: 333924 - DNA, 20 bp, Artificial Sequence
  Description of Artificial Sequence: Synthetic oligonucleotide
  Target: LAMA2; (+) strand; PAM type: YTN; PAM sequence: TTT
aattgtatatagatttttaa

SEQ ID NO: 333925 - DNA, 20 bp, Artificial Sequence
  Description of Artificial Sequence: Synthetic oligonucleotide
  Target: LAMA2; (+) strand; PAM type: YTN; PAM sequence: TTA
attgtatatagatttttaag

SEQ ID NO: 333926 - DNA, 20 bp, Artificial Sequence
  Description of Artificial Sequence: Synthetic oligonucleotide
  Target: LAMA2; (+) strand; PAM type: YTN; PAM sequence: TTG
tatatagatttttaagatca

SEQ ID NO: 333927 - DNA, 20 bp, Artificial Sequence
  Description of Artificial Sequence: Synthetic oligonucleotide
  Target: LAMA2; (+) strand; PAM type: YTN; PAM sequence: TTT
ttaagatcatttgttcagta

SEQ ID NO: 333928 - DNA, 20 bp, Artificial Sequence
  Description of Artificial Sequence: Synthetic oligonucleotide
  Target: LAMA2; (+) strand; PAM type: YTN; PAM sequence: TTT
taagatcatttgttcagtat

SEQ ID NO: 333929 - DNA, 20 bp, Artificial Sequence
  Description of Artificial Sequence: Synthetic oligonucleotide
  Target: LAMA2; (+) strand; PAM type: YTN; PAM sequence: TTT
aagatcatttgttcagtatc

SEQ ID NO: 333930 - DNA, 20 bp, Artificial Sequence
  Description of Artificial Sequence: Synthetic oligonucleotide
  Target: LAMA2; (+) strand; PAM type: YTN; PAM sequence: TTA
agatcatttgttcagtatca

SEQ ID NO: 333931 - DNA, 20 bp, Artificial Sequence
  Description of Artificial Sequence: Synthetic oligonucleotide
  Target: LAMA2; (+) strand; PAM type: YTN; PAM sequence: TTT
gttcagtatcacaagtagaa

SEQ ID NO: 333932 - DNA, 20 bp, Artificial Sequence
  Description of Artificial Sequence: Synthetic oligonucleotide
  Target: LAMA2; (+) strand; PAM type: YTN; PAM sequence: TTG
ttcagtatcacaagtagaat

SEQ ID NO: 333933 - DNA, 20 bp, Artificial Sequence
  Description of Artificial Sequence: Synthetic oligonucleotide
  Target: LAMA2; (+) strand; PAM type: YTN; PAM sequence: TTC
agtatcacaagtagaatctg

SEQ ID NO: 333934 - DNA, 20 bp, Artificial Sequence
  Description of Artificial Sequence: Synthetic oligonucleotide
  Target: LAMA2; (+) strand; PAM type: YTN; PAM sequence: CTG
tggttaattagaaaatatat

SEQ ID NO: 333935 - DNA, 20 bp, Artificial Sequence
  Description of Artificial Sequence: Synthetic oligonucleotide
  Target: LAMA2; (+) strand; PAM type: YTN; PAM sequence: TTA
attagaaaatatattttccc

SEQ ID NO: 333936 - DNA, 20 bp, Artificial Sequence
  Description of Artificial Sequence: Synthetic oligonucleotide
  Target: LAMA2; (+) strand; PAM type: YTN; PAM sequence: TTA
gaaaatatattttcccttta

SEQ ID NO: 333937 - DNA, 20 bp, Artificial Sequence
  Description of Artificial Sequence: Synthetic oligonucleotide
  Target: LAMA2; (+) strand; PAM type: YTN; PAM sequence: TTT
tccctttaaatgaatttgtg

SEQ ID NO: 333938 - DNA, 20 bp, Artificial Sequence
  Description of Artificial Sequence: Synthetic oligonucleotide
  Target: LAMA2; (+) strand; PAM type: YTN; PAM sequence: TTT
ccctttaaatgaatttgtgc

SEQ ID NO: 333939 - DNA, 20 bp, Artificial Sequence
  Description of Artificial Sequence: Synthetic oligonucleotide
  Target: LAMA2; (+) strand; PAM type: YTN; PAM sequence: TTC
cctttaaatgaatttgtgct

SEQ ID NO: 333940 - DNA, 20 bp, Artificial Sequence
  Description of Artificial Sequence: Synthetic oligonucleotide
  Target: LAMA2; (+) strand; PAM type: YTN; PAM sequence: CTT
taaatgaatttgtgctgact

SEQ ID NO: 333941 - DNA, 20 bp, Artificial Sequence
  Description of Artificial Sequence: Synthetic oligonucleotide
  Target: LAMA2; (+) strand; PAM type: YTN; PAM sequence: TTT
aaatgaatttgtgctgactt

SEQ ID NO: 333942 - DNA, 20 bp, Artificial Sequence
  Description of Artificial Sequence: Synthetic oligonucleotide
  Target: LAMA2; (+) strand; PAM type: YTN; PAM sequence: TTA
aatgaatttgtgctgacttt

SEQ ID NO: 333943 - DNA, 20 bp, Artificial Sequence
  Description of Artificial Sequence: Synthetic oligonucleotide
  Target: LAMA2; (+) strand; PAM type: YTN; PAM sequence: TTT
gtgctgacttttaaaattat

SEQ ID NO: 333944 - DNA, 20 bp, Artificial Sequence
  Description of Artificial Sequence: Synthetic oligonucleotide
  Target: LAMA2; (+) strand; PAM type: YTN; PAM sequence: TTG
tgctgacttttaaaattatt

SEQ ID NO: 333945 - DNA, 20 bp, Artificial Sequence
  Description of Artificial Sequence: Synthetic oligonucleotide
  Target: LAMA2; (+) strand; PAM type: YTN; PAM sequence: CTG
acttttaaaattattaataa

SEQ ID NO: 333946 - DNA, 20 bp, Artificial Sequence
  Description of Artificial Sequence: Synthetic oligonucleotide
  Target: LAMA2; (+) strand; PAM type: YTN; PAM sequence: CTT
ttaaaattattaataaaggt

SEQ ID NO: 333947 - DNA, 20 bp, Artificial Sequence
  Description of Artificial Sequence: Synthetic oligonucleotide
  Target: LAMA2; (+) strand; PAM type: YTN; PAM sequence: TTT
taaaattattaataaaggtg

SEQ ID NO: 333948 - DNA, 20 bp, Artificial Sequence
  Description of Artificial Sequence: Synthetic oligonucleotide
  Target: LAMA2; (+) strand; PAM type: YTN; PAM sequence: TTT
aaaattattaataaaggtga

SEQ ID NO: 333949 - DNA, 20 bp, Artificial Sequence
  Description of Artificial Sequence: Synthetic oligonucleotide
  Target: LAMA2; (+) strand; PAM type: YTN; PAM sequence: TTA
aaattattaataaaggtgac

SEQ ID NO: 333950 - DNA, 20 bp, Artificial Sequence
  Description of Artificial Sequence: Synthetic oligonucleotide
  Target: LAMA2; (+) strand; PAM type: YTN; PAM sequence: TTA
ttaataaaggtgacagctag

SEQ ID NO: 333951 - DNA, 20 bp, Artificial Sequence
  Description of Artificial Sequence: Synthetic oligonucleotide
  Target: LAMA2; (+) strand; PAM type: YTN; PAM sequence: TTA
ataaaggtgacagctagctt

SEQ ID NO: 333952 - DNA, 20 bp, Artificial Sequence
  Description of Artificial Sequence: Synthetic oligonucleotide
  Target: LAMA2; (+) strand; PAM type: YTN; PAM sequence: CTA
gctttggtgtctatattgaa

SEQ ID NO: 333953 - DNA, 20 bp, Artificial Sequence
  Description of Artificial Sequence: Synthetic oligonucleotide
  Target: LAMA2; (+) strand; PAM type: YTN; PAM sequence: CTT
tggtgtctatattgaagaaa

SEQ ID NO: 333954 - DNA, 20 bp, Artificial Sequence
  Description of Artificial Sequence: Synthetic oligonucleotide
  Target: LAMA2; (+) strand; PAM type: YTN; PAM sequence: TTT
ggtgtctatattgaagaaaa

SEQ ID NO: 333955 - DNA, 20 bp, Artificial Sequence
  Description of Artificial Sequence: Synthetic oligonucleotide
  Target: LAMA2; (+) strand; PAM type: YTN; PAM sequence: TTG
gtgtctatattgaagaaaat

SEQ ID NO: 333956 - DNA, 20 bp, Artificial Sequence
  Description of Artificial Sequence: Synthetic oligonucleotide
  Target: LAMA2; (+) strand; PAM type: YTN; PAM sequence: CTA
tattgaagaaaatgttcatc

SEQ ID NO: 333957 - DNA, 20 bp, Artificial Sequence
  Description of Artificial Sequence: Synthetic oligonucleotide
  Target: LAMA2; (+) strand; PAM type: YTN; PAM sequence: TTG
aagaaaatgttcatcctaat

SEQ ID NO: 333958 - DNA, 20 bp, Artificial Sequence
  Description of Artificial Sequence: Synthetic oligonucleotide
  Target: LAMA2; (+) strand; PAM type: YTN; PAM sequence: TTC
atcctaattggtttccgttt

SEQ ID NO: 333959 - DNA, 20 bp, Artificial Sequence
  Description of Artificial Sequence: Synthetic oligonucleotide
  Target: LAMA2; (+) strand; PAM type: YTN; PAM sequence: CTA
attggtttccgtttgtctac

SEQ ID NO: 333960 - DNA, 20 bp, Artificial Sequence
  Description of Artificial Sequence: Synthetic oligonucleotide
  Target: LAMA2; (+) strand; PAM type: YTN; PAM sequence: TTG
gtttccgtttgtctaccctt

SEQ ID NO: 333961 - DNA, 20 bp, Artificial Sequence
  Description of Artificial Sequence: Synthetic oligonucleotide
  Target: LAMA2; (+) strand; PAM type: YTN; PAM sequence: TTT
ccgtttgtctaccctttggt

SEQ ID NO: 333962 - DNA, 20 bp, Artificial Sequence
  Description of Artificial Sequence: Synthetic oligonucleotide
  Target: LAMA2; (+) strand; PAM type: YTN; PAM sequence: TTC
cgtttgtctaccctttggtc

SEQ ID NO: 333963 - DNA, 20 bp, Artificial Sequence
  Description of Artificial Sequence: Synthetic oligonucleotide
  Target: LAMA2; (+) strand; PAM type: YTN; PAM sequence: TTT
gtctaccctttggtctgctt

SEQ ID NO: 333964 - DNA, 20 bp, Artificial Sequence
  Description of Artificial Sequence: Synthetic oligonucleotide
  Target: LAMA2; (+) strand; PAM type: YTN; PAM sequence: TTG
tctaccctttggtctgcttt

SEQ ID NO: 333965 - DNA, 20 bp, Artificial Sequence
  Description of Artificial Sequence: Synthetic oligonucleotide
  Target: LAMA2; (+) strand; PAM type: YTN; PAM sequence: CTA
ccctttggtctgctttcaac

SEQ ID NO: 333966 - DNA, 20 bp, Artificial Sequence
  Description of Artificial Sequence: Synthetic oligonucleotide
  Target: LAMA2; (+) strand; PAM type: YTN; PAM sequence: CTT
tggtctgctttcaacacagc

SEQ ID NO: 333967 - DNA, 20 bp, Artificial Sequence
  Description of Artificial Sequence: Synthetic oligonucleotide
  Target: LAMA2; (+) strand; PAM type: YTN; PAM sequence: TTT
ggtctgctttcaacacagca

SEQ ID NO: 333968 - DNA, 20 bp, Artificial Sequence
  Description of Artificial Sequence: Synthetic oligonucleotide
  Target: LAMA2; (+) strand; PAM type: YTN; PAM sequence: TTG
gtctgctttcaacacagcag

SEQ ID NO: 333969 - DNA, 20 bp, Artificial Sequence
  Description of Artificial Sequence: Synthetic oligonucleotide
  Target: LAMA2; (+) strand; PAM type: YTN; PAM sequence: CTG
ctttcaacacagcagtcaca

SEQ ID NO: 333970 - DNA, 20 bp, Artificial Sequence
  Description of Artificial Sequence: Synthetic oligonucleotide
  Target: LAMA2; (+) strand; PAM type: YTN; PAM sequence: CTT
tcaacacagcagtcacagca

SEQ ID NO: 333971 - DNA, 20 bp, Artificial Sequence
  Description of Artificial Sequence: Synthetic oligonucleotide
  Target: LAMA2; (+) strand; PAM type: YTN; PAM sequence: TTT
caacacagcagtcacagcaa

SEQ ID NO: 333972 - DNA, 20 bp, Artificial Sequence
  Description of Artificial Sequence: Synthetic oligonucleotide
  Target: LAMA2; (+) strand; PAM type: YTN; PAM sequence: TTC
aacacagcagtcacagcaat

SEQ ID NO: 333973 - DNA, 20 bp, Artificial Sequence
  Description of Artificial Sequence: Synthetic oligonucleotide
  Target: LAMA2; (+) strand; PAM type: YTN; PAM sequence: CTC
attagtacagatcacataac

SEQ ID NO: 333974 - DNA, 20 bp, Artificial Sequence
  Description of Artificial Sequence: Synthetic oligonucleotide
  Target: LAMA2; (+) strand; PAM type: YTN; PAM sequence: TTA
gtacagatcacataacactt

SEQ ID NO: 333975 - DNA, 20 bp, Artificial Sequence
  Description of Artificial Sequence: Synthetic oligonucleotide
  Target: LAMA2; (+) strand; PAM type: YTN; PAM sequence: CTT
tccactaaaagtggaaatct

SEQ ID NO: 333976 - DNA, 20 bp, Artificial Sequence
  Description of Artificial Sequence: Synthetic oligonucleotide
  Target: LAMA2; (+) strand; PAM type: YTN; PAM sequence: TTT
ccactaaaagtggaaatctt

SEQ ID NO: 333977 - DNA, 20 bp, Artificial Sequence
  Description of Artificial Sequence: Synthetic oligonucleotide
  Target: LAMA2; (+) strand; PAM type: YTN; PAM sequence: TTC
cactaaaagtggaaatctta

SEQ ID NO: 333978 - DNA, 20 bp, Artificial Sequence
  Description of Artificial Sequence: Synthetic oligonucleotide
  Target: LAMA2; (+) strand; PAM type: YTN; PAM sequence: CTA
aaagtggaaatcttattagt

SEQ ID NO: 333979 - DNA, 20 bp, Artificial Sequence
  Description of Artificial Sequence: Synthetic oligonucleotide
  Target: LAMA2; (+) strand; PAM type: YTN; PAM sequence: CTT
attagtacagatcacacaac

SEQ ID NO: 333980 - DNA, 20 bp, Artificial Sequence
  Description of Artificial Sequence: Synthetic oligonucleotide
  Target: LAMA2; (+) strand; PAM type: YTN; PAM sequence: TTA
ttagtacagatcacacaaca

SEQ ID NO: 333981 - DNA, 20 bp, Artificial Sequence
  Description of Artificial Sequence: Synthetic oligonucleotide
  Target: LAMA2; (+) strand; PAM type: YTN; PAM sequence: TTA
gtacagatcacacaacactt

SEQ ID NO: 333982 - DNA, 20 bp, Artificial Sequence
  Description of Artificial Sequence: Synthetic oligonucleotide
  Target: LAMA2; (+) strand; PAM type: YTN; PAM sequence: CTT
tccactaaaagtctctactg

SEQ ID NO: 333983 - DNA, 20 bp, Artificial Sequence
  Description of Artificial Sequence: Synthetic oligonucleotide
  Target: LAMA2; (+) strand; PAM type: YTN; PAM sequence: TTT
ccactaaaagtctctactgg

SEQ ID NO: 333984 - DNA, 20 bp, Artificial Sequence
  Description of Artificial Sequence: Synthetic oligonucleotide
  Target: LAMA2; (+) strand; PAM type: YTN; PAM sequence: TTC
cactaaaagtctctactggt

SEQ ID NO: 333985 - DNA, 20 bp, Artificial Sequence
  Description of Artificial Sequence: Synthetic oligonucleotide
  Target: LAMA2; (+) strand; PAM type: YTN; PAM sequence: CTA
aaagtctctactggttttcc

SEQ ID NO: 333986 - DNA, 20 bp, Artificial Sequence
  Description of Artificial Sequence: Synthetic oligonucleotide
  Target: LAMA2; (+) strand; PAM type: YTN; PAM sequence: CTC
tactggttttccatcacatt

SEQ ID NO: 333987 - DNA, 20 bp, Artificial Sequence
  Description of Artificial Sequence: Synthetic oligonucleotide
  Target: LAMA2; (+) strand; PAM type: YTN; PAM sequence: CTA
ctggttttccatcacattca

SEQ ID NO: 333988 - DNA, 20 bp, Artificial Sequence
  Description of Artificial Sequence: Synthetic oligonucleotide
  Target: LAMA2; (+) strand; PAM type: YTN; PAM sequence: CTG
gttttccatcacattcagtg

SEQ ID NO: 333989 - DNA, 20 bp, Artificial Sequence
  Description of Artificial Sequence: Synthetic oligonucleotide
  Target: LAMA2; (+) strand; PAM type: YTN; PAM sequence: TTT
tccatcacattcagtgggaa

SEQ ID NO: 333990 - DNA, 20 bp, Artificial Sequence
  Description of Artificial Sequence: Synthetic oligonucleotide
  Target: LAMA2; (+) strand; PAM type: YTN; PAM sequence: TTT
ccatcacattcagtgggaaa

SEQ ID NO: 333991 - DNA, 20 bp, Artificial Sequence
  Description of Artificial Sequence: Synthetic oligonucleotide
  Target: LAMA2; (+) strand; PAM type: YTN; PAM sequence: TTC
catcacattcagtgggaaaa

SEQ ID NO: 333992 - DNA, 20 bp, Artificial Sequence
  Description of Artificial Sequence: Synthetic oligonucleotide
  Target: LAMA2; (+) strand; PAM type: YTN; PAM sequence: TTC
agtgggaaaagcacaatgac

SEQ ID NO: 333993 - DNA, 20 bp, Artificial Sequence
  Description of Artificial Sequence: Synthetic oligonucleotide
  Target: LAMA2; (+) strand; PAM type: YTN; PAM sequence: CTT
aaggaccttttcctcacctc

SEQ ID NO: 333994 - DNA, 20 bp, Artificial Sequence
  Description of Artificial Sequence: Synthetic oligonucleotide
  Target: LAMA2; (+) strand; PAM type: YTN; PAM sequence: TTA
aggaccttttcctcacctct

SEQ ID NO: 333995 - DNA, 20 bp, Artificial Sequence
  Description of Artificial Sequence: Synthetic oligonucleotide
  Target: LAMA2; (+) strand; PAM type: YTN; PAM sequence: CTT
ttcctcacctcttttcatct

SEQ ID NO: 333996 - DNA, 20 bp, Artificial Sequence
  Description of Artificial Sequence: Synthetic oligonucleotide
  Target: LAMA2; (+) strand; PAM type: YTN; PAM sequence: TTT
tcctcacctcttttcatctc

SEQ ID NO: 333997 - DNA, 20 bp, Artificial Sequence
  Description of Artificial Sequence: Synthetic oligonucleotide
  Target: LAMA2; (+) strand; PAM type: YTN; PAM sequence: TTT
cctcacctcttttcatctct

SEQ ID NO: 333998 - DNA, 20 bp, Artificial Sequence
  Description of Artificial Sequence: Synthetic oligonucleotide
  Target: LAMA2; (+) strand; PAM type: YTN; PAM sequence: TTC
ctcacctcttttcatctctg

SEQ ID NO: 333999 - DNA, 20 bp, Artificial Sequence
  Description of Artificial Sequence: Synthetic oligonucleotide
  Target: LAMA2; (+) strand; PAM type: YTN; PAM sequence: CTC
acctcttttcatctctggcc

SEQ ID NO: 334000 - DNA, 20 bp, Artificial Sequence
  Description of Artificial Sequence: Synthetic oligonucleotide
  Target: LAMA2; (+) strand; PAM type: YTN; PAM sequence: CTC
ttttcatctctggcctcatc

SEQ ID NO: 334001 - DNA, 20 bp, Artificial Sequence
  Description of Artificial Sequence: Synthetic oligonucleotide
  Target: LAMA2; (+) strand; PAM type: YTN; PAM sequence: CTT
ttcatctctggcctcatctg

SEQ ID NO: 334002 - DNA, 20 bp, Artificial Sequence
  Description of Artificial Sequence: Synthetic oligonucleotide
  Target: LAMA2; (+) strand; PAM type: YTN; PAM sequence: TTT
tcatctctggcctcatctga

SEQ ID NO: 334003 - DNA, 20 bp, Artificial Sequence
  Description of Artificial Sequence: Synthetic oligonucleotide
  Target: LAMA2; (+) strand; PAM type: YTN; PAM sequence: TTT
catctctggcctcatctgat

SEQ ID NO: 334004 - DNA, 20 bp, Artificial Sequence
  Description of Artificial Sequence: Synthetic oligonucleotide
  Target: LAMA2; (+) strand; PAM type: YTN; PAM sequence: TTC
atctctggcctcatctgatc

SEQ ID NO: 334005 - DNA, 20 bp, Artificial Sequence
  Description of Artificial Sequence: Synthetic oligonucleotide
  Target: LAMA2; (+) strand; PAM type: YTN; PAM sequence: CTC
tggcctcatctgatctctct

SEQ ID NO: 334006 - DNA, 20 bp, Artificial Sequence
  Description of Artificial Sequence: Synthetic oligonucleotide
  Target: LAMA2; (+) strand; PAM type: YTN; PAM sequence: CTG
gcctcatctgatctctcttc

SEQ ID NO: 334007 - DNA, 20 bp, Artificial Sequence
  Description of Artificial Sequence: Synthetic oligonucleotide
  Target: LAMA2; (+) strand; PAM type: YTN; PAM sequence: CTC
atctgatctctcttcctcag

SEQ ID NO: 334008 - DNA, 20 bp, Artificial Sequence
  Description of Artificial Sequence: Synthetic oligonucleotide
  Target: LAMA2; (+) strand; PAM type: YTN; PAM sequence: CTG
atctctcttcctcagttgcc

SEQ ID NO: 334009 - DNA, 20 bp, Artificial Sequence
  Description of Artificial Sequence: Synthetic oligonucleotide
  Target: LAMA2; (+) strand; PAM type: YTN; PAM sequence: CTC
tcttcctcagttgcccagct

SEQ ID NO: 334010 - DNA, 20 bp, Artificial Sequence
  Description of Artificial Sequence: Synthetic oligonucleotide
  Target: LAMA2; (+) strand; PAM type: YTN; PAM sequence: CTC
ttcctcagttgcccagctgg

SEQ ID NO: 334011 - DNA, 20 bp, Artificial Sequence
  Description of Artificial Sequence: Synthetic oligonucleotide
  Target: LAMA2; (+) strand; PAM type: YTN; PAM sequence: CTT
cctcagttgcccagctggtc

SEQ ID NO: 334012 - DNA, 20 bp, Artificial Sequence
  Description of Artificial Sequence: Synthetic oligonucleotide
  Target: LAMA2; (+) strand; PAM type: YTN; PAM sequence: TTC
ctcagttgcccagctggtca

SEQ ID NO: 334013 - DNA, 20 bp, Artificial Sequence
  Description of Artificial Sequence: Synthetic oligonucleotide
  Target: LAMA2; (+) strand; PAM type: YTN; PAM sequence: CTC
agttgcccagctggtcatcc

SEQ ID NO: 334014 - DNA, 20 bp, Artificial Sequence
  Description of Artificial Sequence: Synthetic oligonucleotide
  Target: LAMA2; (+) strand; PAM type: YTN; PAM sequence: TTG
cccagctggtcatcccgcta

SEQ ID NO: 334015 - DNA, 20 bp, Artificial Sequence
  Description of Artificial Sequence: Synthetic oligonucleotide
  Target: LAMA2; (+) strand; PAM type: YTN; PAM sequence: CTG
gtcatcccgctatgtcttga

SEQ ID NO: 334016 - DNA, 20 bp, Artificial Sequence
  Description of Artificial Sequence: Synthetic oligonucleotide
  Target: LAMA2; (+) strand; PAM type: YTN; PAM sequence: CTA
tgtcttgaacactcacacct

SEQ ID NO: 334017 - DNA, 20 bp, Artificial Sequence
  Description of Artificial Sequence: Synthetic oligonucleotide
  Target: LAMA2; (+) strand; PAM type: YTN; PAM sequence: CTT
gaacactcacacctgcctca

SEQ ID NO: 334018 - DNA, 20 bp, Artificial Sequence
  Description of Artificial Sequence: Synthetic oligonucleotide
  Target: LAMA2; (+) strand; PAM type: YTN; PAM sequence: TTG
aacactcacacctgcctcag

SEQ ID NO: 334019 - DNA, 20 bp, Artificial Sequence
  Description of Artificial Sequence: Synthetic oligonucleotide
  Target: LAMA2; (+) strand; PAM type: YTN; PAM sequence: CTC
acacctgcctcagggccttt

SEQ ID NO: 334020 - DNA, 20 bp, Artificial Sequence
  Description of Artificial Sequence: Synthetic oligonucleotide
  Target: LAMA2; (+) strand; PAM type: YTN; PAM sequence: CTG
cctcagggcctttgcacttg

SEQ ID NO: 334021 - DNA, 20 bp, Artificial Sequence
  Description of Artificial Sequence: Synthetic oligonucleotide
  Target: LAMA2; (+) strand; PAM type: YTN; PAM sequence: CTC
agggcctttgcacttgatat

SEQ ID NO: 334022 - DNA, 20 bp, Artificial Sequence
  Description of Artificial Sequence: Synthetic oligonucleotide
  Target: LAMA2; (+) strand; PAM type: YTN; PAM sequence: CTT
tgcacttgatatttcttatg

SEQ ID NO: 334023 - DNA, 20 bp, Artificial Sequence
  Description of Artificial Sequence: Synthetic oligonucleotide
  Target: LAMA2; (+) strand; PAM type: YTN; PAM sequence: TTT
gcacttgatatttcttatgt

SEQ ID NO: 334024 - DNA, 20 bp, Artificial Sequence
  Description of Artificial Sequence: Synthetic oligonucleotide
  Target: LAMA2; (+) strand; PAM type: YTN; PAM sequence: TTG
cacttgatatttcttatgtc

SEQ ID NO: 334025 - DNA, 20 bp, Artificial Sequence
  Description of Artificial Sequence: Synthetic oligonucleotide
  Target: LAMA2; (+) strand; PAM type: YTN; PAM sequence: CTT
gatatttcttatgtctagaa

SEQ ID NO: 334026 - DNA, 20 bp, Artificial Sequence
  Description of Artificial Sequence: Synthetic oligonucleotide
  Target: LAMA2; (+) strand; PAM type: YTN; PAM sequence: TTG
atatttcttatgtctagaat

SEQ ID NO: 334027 - DNA, 20 bp, Artificial Sequence
  Description of Artificial Sequence: Synthetic oligonucleotide
  Target: LAMA2; (+) strand; PAM type: YTN; PAM sequence: TTT
cttatgtctagaattatttt

SEQ ID NO: 334028 - DNA, 20 bp, Artificial Sequence
  Description of Artificial Sequence: Synthetic oligonucleotide
  Target: LAMA2; (+) strand; PAM type: YTN; PAM sequence: TTC
ttatgtctagaattattttc

SEQ ID NO: 334029 - DNA, 20 bp, Artificial Sequence
  Description of Artificial Sequence: Synthetic oligonucleotide
  Target: LAMA2; (+) strand; PAM type: YTN; PAM sequence: CTT
atgtctagaattattttctt

SEQ ID NO: 334030 - DNA, 20 bp, Artificial Sequence
  Description of Artificial Sequence: Synthetic oligonucleotide
  Target: LAMA2; (+) strand; PAM type: YTN; PAM sequence: TTA
tgtctagaattattttcttc

SEQ ID NO: 334031 - DNA, 20 bp, Artificial Sequence
  Description of Artificial Sequence: Synthetic oligonucleotide
  Target: LAMA2; (+) strand; PAM type: YTN; PAM sequence: CTA
gaattattttcttcaatttc

SEQ ID NO: 334032 - DNA, 20 bp, Artificial Sequence
  Description of Artificial Sequence: Synthetic oligonucleotide
  Target: LAMA2; (+) strand; PAM type: YTN; PAM sequence: TTA
ttttcttcaatttcaatgta

SEQ ID NO: 334033 - DNA, 20 bp, Artificial Sequence
  Description of Artificial Sequence: Synthetic oligonucleotide
  Target: LAMA2; (+) strand; PAM type: YTN; PAM sequence: TTT
tcttcaatttcaatgtagct

SEQ ID NO: 334034 - DNA, 20 bp, Artificial Sequence
  Description of Artificial Sequence: Synthetic oligonucleotide
  Target: LAMA2; (+) strand; PAM type: YTN; PAM sequence: TTT
cttcaatttcaatgtagctt

SEQ ID NO: 334035 - DNA, 20 bp, Artificial Sequence
  Description of Artificial Sequence: Synthetic oligonucleotide
  Target: LAMA2; (+) strand; PAM type: YTN; PAM sequence: TTC
ttcaatttcaatgtagcttg

SEQ ID NO: 334036 - DNA, 20 bp, Artificial Sequence
  Description of Artificial Sequence: Synthetic oligonucleotide
  Target: LAMA2; (+) strand; PAM type: YTN; PAM sequence: CTT
caatttcaatgtagcttgtt

SEQ ID NO: 334037 - DNA, 20 bp, Artificial Sequence
  Description of Artificial Sequence: Synthetic oligonucleotide
  Target: LAMA2; (+) strand; PAM type: YTN; PAM sequence: TTC
aatttcaatgtagcttgttt

SEQ ID NO: 334038 - DNA, 20 bp, Artificial Sequence
  Description of Artificial Sequence: Synthetic oligonucleotide
  Target: LAMA2; (+) strand; PAM type: YTN; PAM sequence: TTT
caatgtagcttgtttcctca

SEQ ID NO: 334039 - DNA, 20 bp, Artificial Sequence
  Description of Artificial Sequence: Synthetic oligonucleotide
  Target: LAMA2; (+) strand; PAM type: YTN; PAM sequence: TTC
aatgtagcttgtttcctcac

SEQ ID NO: 334040 - DNA, 20 bp, Artificial Sequence
  Description of Artificial Sequence: Synthetic oligonucleotide
  Target: LAMA2; (+) strand; PAM type: YTN; PAM sequence: CTT
gtttcctcacctccttttgg

SEQ ID NO: 334041 - DNA, 20 bp, Artificial Sequence
  Description of Artificial Sequence: Synthetic oligonucleotide
  Target: LAMA2; (+) strand; PAM type: YTN; PAM sequence: TTG
tttcctcacctccttttggt

SEQ ID NO: 334042 - DNA, 20 bp, Artificial Sequence
  Description of Artificial Sequence: Synthetic oligonucleotide
  Target: LAMA2; (+) strand; PAM type: YTN; PAM sequence: TTT
cctcacctccttttggtttt

SEQ ID NO: 334043 - DNA, 20 bp, Artificial Sequence
  Description of Artificial Sequence: Synthetic oligonucleotide
  Target: LAMA2; (+) strand; PAM type: YTN; PAM sequence: TTC
ctcacctccttttggttttt

SEQ ID NO: 334044 - DNA, 20 bp, Artificial Sequence
  Description of Artificial Sequence: Synthetic oligonucleotide
  Target: LAMA2; (+) strand; PAM type: YTN; PAM sequence: CTC
acctccttttggtttttatt

SEQ ID NO: 334045 - DNA, 20 bp, Artificial Sequence
  Description of Artificial Sequence: Synthetic oligonucleotide
  Target: LAMA2; (+) strand; PAM type: YTN; PAM sequence: CTC
cttttggtttttattcaagt

SEQ ID NO: 334046 - DNA, 20 bp, Artificial Sequence
  Description of Artificial Sequence: Synthetic oligonucleotide
  Target: LAMA2; (+) strand; PAM type: YTN; PAM sequence: CTT
ttggtttttattcaagtgtt

SEQ ID NO: 334047 - DNA, 20 bp, Artificial Sequence
  Description of Artificial Sequence: Synthetic oligonucleotide
  Target: LAMA2; (+) strand; PAM type: YTN; PAM sequence: TTT
tggtttttattcaagtgtta

SEQ ID NO: 334048 - DNA, 20 bp, Artificial Sequence
  Description of Artificial Sequence: Synthetic oligonucleotide
  Target: LAMA2; (+) strand; PAM type: YTN; PAM sequence: TTT
ggtttttattcaagtgttac

SEQ ID NO: 334049 - DNA, 20 bp, Artificial Sequence
  Description of Artificial Sequence: Synthetic oligonucleotide
  Target: LAMA2; (+) strand; PAM type: YTN; PAM sequence: TTG
gtttttattcaagtgttacc

SEQ ID NO: 334050 - DNA, 20 bp, Artificial Sequence
  Description of Artificial Sequence: Synthetic oligonucleotide
  Target: LAMA2; (+) strand; PAM type: YTN; PAM sequence: TTT
ttattcaagtgttaccttct

SEQ ID NO: 334051 - DNA, 20 bp, Artificial Sequence
  Description of Artificial Sequence: Synthetic oligonucleotide
  Target: LAMA2; (+) strand; PAM type: YTN; PAM sequence: TTT
tattcaagtgttaccttctc

SEQ ID NO: 334052 - DNA, 20 bp, Artificial Sequence
  Description of Artificial Sequence: Synthetic oligonucleotide
  Target: LAMA2; (+) strand; PAM type: YTN; PAM sequence: TTT
attcaagtgttaccttctca

SEQ ID NO: 334053 - DNA, 20 bp, Artificial Sequence
  Description of Artificial Sequence: Synthetic oligonucleotide
  Target: LAMA2; (+) strand; PAM type: YTN; PAM sequence: TTA
ttcaagtgttaccttctcaa

SEQ ID NO: 334054 - DNA, 20 bp, Artificial Sequence
  Description of Artificial Sequence: Synthetic oligonucleotide
  Target: LAMA2; (+) strand; PAM type: YTN; PAM sequence: TTC
aagtgttaccttctcaacaa

SEQ ID NO: 334055 - DNA, 20 bp, Artificial Sequence
  Description of Artificial Sequence: Synthetic oligonucleotide
  Target: LAMA2; (+) strand; PAM type: YTN; PAM sequence: TTA
ccttctcaacaagggcctcc

SEQ ID NO: 334056 - DNA, 20 bp, Artificial Sequence
  Description of Artificial Sequence: Synthetic oligonucleotide
  Target: LAMA2; (+) strand; PAM type: YTN; PAM sequence: CTT
ctcaacaagggcctccttga

SEQ ID NO: 334057 - DNA, 20 bp, Artificial Sequence
  Description of Artificial Sequence: Synthetic oligonucleotide
  Target: LAMA2; (+) strand; PAM type: YTN; PAM sequence: TTC
tcaacaagggcctccttgac

SEQ ID NO: 334058 - DNA, 20 bp, Artificial Sequence
  Description of Artificial Sequence: Synthetic oligonucleotide
  Target: LAMA2; (+) strand; PAM type: YTN; PAM sequence: CTC
aacaagggcctccttgacaa

SEQ ID NO: 334059 - DNA, 20 bp, Artificial Sequence
  Description of Artificial Sequence: Synthetic oligonucleotide
  Target: LAMA2; (+) strand; PAM type: YTN; PAM sequence: CTC
cttgacaactctatttaaaa

SEQ ID NO: 334060 - DNA, 20 bp, Artificial Sequence
  Description of Artificial Sequence: Synthetic oligonucleotide
  Target: LAMA2; (+) strand; PAM type: YTN; PAM sequence: CTT
gacaactctatttaaaattg

SEQ ID NO: 334061 - DNA, 20 bp, Artificial Sequence
  Description of Artificial Sequence: Synthetic oligonucleotide
  Target: LAMA2; (+) strand; PAM type: YTN; PAM sequence: TTG
acaactctatttaaaattgc

SEQ ID NO: 334062 - DNA, 20 bp, Artificial Sequence
  Description of Artificial Sequence: Synthetic oligonucleotide
  Target: LAMA2; (+) strand; PAM type: YTN; PAM sequence: CTC
tatttaaaattgcagctccc

SEQ ID NO: 334063 - DNA, 20 bp, Artificial Sequence
  Description of Artificial Sequence: Synthetic oligonucleotide
  Target: LAMA2; (+) strand; PAM type: YTN; PAM sequence: CTA
tttaaaattgcagctcccag

SEQ ID NO: 334064 - DNA, 20 bp, Artificial Sequence
  Description of Artificial Sequence: Synthetic oligonucleotide
  Target: LAMA2; (+) strand; PAM type: YTN; PAM sequence: TTT
aaaattgcagctcccagcct

SEQ ID NO: 334065 - DNA, 20 bp, Artificial Sequence
  Description of Artificial Sequence: Synthetic oligonucleotide
  Target: LAMA2; (+) strand; PAM type: YTN; PAM sequence: TTA
aaattgcagctcccagcctg

SEQ ID NO: 334066 - DNA, 20 bp, Artificial Sequence
  Description of Artificial Sequence: Synthetic oligonucleotide
  Target: LAMA2; (+) strand; PAM type: YTN; PAM sequence: TTG
cagctcccagcctgtccact

SEQ ID NO: 334067 - DNA, 20 bp, Artificial Sequence
  Description of Artificial Sequence: Synthetic oligonucleotide
  Target: LAMA2; (+) strand; PAM type: YTN; PAM sequence: CTC
ccagcctgtccacttcctaa

SEQ ID NO: 334068 - DNA, 20 bp, Artificial Sequence
  Description of Artificial Sequence: Synthetic oligonucleotide
  Target: LAMA2; (+) strand; PAM type: YTN; PAM sequence: CTG
tccacttcctaaaccacttt

SEQ ID NO: 334069 - DNA, 20 bp, Artificial Sequence
  Description of Artificial Sequence: Synthetic oligonucleotide
  Target: LAMA2; (+) strand; PAM type: YTN; PAM sequence: CTT
cctaaaccactttcctgctt

SEQ ID NO: 334070 - DNA, 20 bp, Artificial Sequence
  Description of Artificial Sequence: Synthetic oligonucleotide
  Target: LAMA2; (+) strand; PAM type: YTN; PAM sequence: TTC
ctaaaccactttcctgcttt

SEQ ID NO: 334071 - DNA, 20 bp, Artificial Sequence
  Description of Artificial Sequence: Synthetic oligonucleotide
  Target: LAMA2; (+) strand; PAM type: YTN; PAM sequence: CTA
aaccactttcctgctttatt

SEQ ID NO: 334072 - DNA, 20 bp, Artificial Sequence
  Description of Artificial Sequence: Synthetic oligonucleotide
  Target: LAMA2; (+) strand; PAM type: YTN; PAM sequence: CTT
tcctgctttatttttctcca

SEQ ID NO: 334073 - DNA, 20 bp, Artificial Sequence
  Description of Artificial Sequence: Synthetic oligonucleotide
  Target: LAMA2; (+) strand; PAM type: YTN; PAM sequence: TTT
cctgctttatttttctccat

SEQ ID NO: 334074 - DNA, 20 bp, Artificial Sequence
  Description of Artificial Sequence: Synthetic oligonucleotide
  Target: LAMA2; (+) strand; PAM type: YTN; PAM sequence: TTC
ctgctttatttttctccata

SEQ ID NO: 334075 - DNA, 20 bp, Artificial Sequence
  Description of Artificial Sequence: Synthetic oligonucleotide
  Target: LAMA2; (+) strand; PAM type: YTN; PAM sequence: CTG
ctttatttttctccataaaa

SEQ ID NO: 334076 - DNA, 20 bp, Artificial Sequence
  Description of Artificial Sequence: Synthetic oligonucleotide
  Target: LAMA2; (+) strand; PAM type: YTN; PAM sequence: CTT
tatttttctccataaaatat

SEQ ID NO: 334077 - DNA, 20 bp, Artificial Sequence
  Description of Artificial Sequence: Synthetic oligonucleotide
  Target: LAMA2; (+) strand; PAM type: YTN; PAM sequence: TTT
atttttctccataaaatata

SEQ ID NO: 334078 - DNA, 20 bp, Artificial Sequence
  Description of Artificial Sequence: Synthetic oligonucleotide
  Target: LAMA2; (+) strand; PAM type: YTN; PAM sequence: TTA
tttttctccataaaatatat

SEQ ID NO: 334079 - DNA, 20 bp, Artificial Sequence
  Description of Artificial Sequence: Synthetic oligonucleotide
  Target: LAMA2; (+) strand; PAM type: YTN; PAM sequence: TTT
ttctccataaaatatatcac

SEQ ID NO: 334080 - DNA, 20 bp, Artificial Sequence
  Description of Artificial Sequence: Synthetic oligonucleotide
  Target: LAMA2; (+) strand; PAM type: YTN; PAM sequence: TTT
tctccataaaatatatcacc

SEQ ID NO: 334081 - DNA, 20 bp, Artificial Sequence
  Description of Artificial Sequence: Synthetic oligonucleotide
  Target: LAMA2; (+) strand; PAM type: YTN; PAM sequence: TTT
ctccataaaatatatcacca

SEQ ID NO: 334082 - DNA, 20 bp, Artificial Sequence
  Description of Artificial Sequence: Synthetic oligonucleotide
  Target: LAMA2; (+) strand; PAM type: YTN; PAM sequence: TTC
tccataaaatatatcaccat

SEQ ID NO: 334083 - DNA, 20 bp, Artificial Sequence
  Description of Artificial Sequence: Synthetic oligonucleotide
  Target: LAMA2; (+) strand; PAM type: YTN; PAM sequence: CTC
cataaaatatatcaccatct

SEQ ID NO: 334084 - DNA, 20 bp, Artificial Sequence
  Description of Artificial Sequence: Synthetic oligonucleotide
  Target: LAMA2; (+) strand; PAM type: YTN; PAM sequence: CTA
acttactatgtacatgttac

SEQ ID NO: 334085 - DNA, 20 bp, Artificial Sequence
  Description of Artificial Sequence: Synthetic oligonucleotide
  Target: LAMA2; (+) strand; PAM type: YTN; PAM sequence: CTT
actatgtacatgttactgtt

SEQ ID NO: 334086 - DNA, 20 bp, Artificial Sequence
  Description of Artificial Sequence: Synthetic oligonucleotide
  Target: LAMA2; (+) strand; PAM type: YTN; PAM sequence: TTA
ctatgtacatgttactgttc

SEQ ID NO: 334087 - DNA, 20 bp, Artificial Sequence
  Description of Artificial Sequence: Synthetic oligonucleotide
  Target: LAMA2; (+) strand; PAM type: YTN; PAM sequence: CTA
tgtacatgttactgttcagt

SEQ ID NO: 334088 - DNA, 20 bp, Artificial Sequence
  Description of Artificial Sequence: Synthetic oligonucleotide
  Target: LAMA2; (+) strand; PAM type: YTN; PAM sequence: TTA
ctgttcagttgaatatttat

SEQ ID NO: 334089 - DNA, 20 bp, Artificial Sequence
  Description of Artificial Sequence: Synthetic oligonucleotide
  Target: LAMA2; (+) strand; PAM type: YTN; PAM sequence: CTG
ttcagttgaatatttatctt

SEQ ID NO: 334090 - DNA, 20 bp, Artificial Sequence
  Description of Artificial Sequence: Synthetic oligonucleotide
  Target: LAMA2; (+) strand; PAM type: YTN; PAM sequence: TTC
agttgaatatttatctttct

SEQ ID NO: 334091 - DNA, 20 bp, Artificial Sequence
  Description of Artificial Sequence: Synthetic oligonucleotide
  Target: LAMA2; (+) strand; PAM type: YTN; PAM sequence: TTG
aatatttatctttctaaatg

SEQ ID NO: 334092 - DNA, 20 bp, Artificial Sequence
  Description of Artificial Sequence: Synthetic oligonucleotide
  Target: LAMA2; (+) strand; PAM type: YTN; PAM sequence: TTT
atctttctaaatgcaatttt

SEQ ID NO: 334093 - DNA, 20 bp, Artificial Sequence
  Description of Artificial Sequence: Synthetic oligonucleotide
  Target: LAMA2; (+) strand; PAM type: YTN; PAM sequence: TTA
tctttctaaatgcaattttt

SEQ ID NO: 334094 - DNA, 20 bp, Artificial Sequence
  Description of Artificial Sequence: Synthetic oligonucleotide
  Target: LAMA2; (+) strand; PAM type: YTN; PAM sequence: CTT
tctaaatgcaatttttttgt

SEQ ID NO: 334095 - DNA, 20 bp, Artificial Sequence
  Description of Artificial Sequence: Synthetic oligonucleotide
  Target: LAMA2; (+) strand; PAM type: YTN; PAM sequence: TTT
ctaaatgcaatttttttgtg

SEQ ID NO: 334096 - DNA, 20 bp, Artificial Sequence
  Description of Artificial Sequence: Synthetic oligonucleotide
  Target: LAMA2; (+) strand; PAM type: YTN; PAM sequence: TTC
taaatgcaatttttttgtgc

SEQ ID NO: 334097 - DNA, 20 bp, Artificial Sequence
  Description of Artificial Sequence: Synthetic oligonucleotide
  Target: LAMA2; (+) strand; PAM type: YTN; PAM sequence: CTA
aatgcaatttttttgtgcgt

SEQ ID NO: 334098 - DNA, 20 bp, Artificial Sequence
  Description of Artificial Sequence: Synthetic oligonucleotide
  Target: LAMA2; (+) strand; PAM type: YTN; PAM sequence: TTT
ttttgtgcgtggagctattt

SEQ ID NO: 334099 - DNA, 20 bp, Artificial Sequence
  Description of Artificial Sequence: Synthetic oligonucleotide
  Target: LAMA2; (+) strand; PAM type: YTN; PAM sequence: TTT
tttgtgcgtggagctatttg

SEQ ID NO: 334100 - DNA, 20 bp, Artificial Sequence
  Description of Artificial Sequence: Synthetic oligonucleotide
  Target: LAMA2; (+) strand; PAM type: YTN; PAM sequence: TTT
ttgtgcgtggagctatttgt

SEQ ID NO: 334101 - DNA, 20 bp, Artificial Sequence
  Description of Artificial Sequence: Synthetic oligonucleotide
  Target: LAMA2; (+) strand; PAM type: YTN; PAM sequence: TTT
tgtgcgtggagctatttgtt

SEQ ID NO: 334102 - DNA, 20 bp, Artificial Sequence
  Description of Artificial Sequence: Synthetic oligonucleotide
  Target: LAMA2; (+) strand; PAM type: YTN; PAM sequence: TTT
gtgcgtggagctatttgttg

SEQ ID NO: 334103 - DNA, 20 bp, Artificial Sequence
  Description of Artificial Sequence: Synthetic oligonucleotide
  Target: LAMA2; (+) strand; PAM type: YTN; PAM sequence: TTG
tgcgtggagctatttgttgt

SEQ ID NO: 334104 - DNA, 20 bp, Artificial Sequence
  Description of Artificial Sequence: Synthetic oligonucleotide
  Target: LAMA2; (+) strand; PAM type: YTN; PAM sequence: CTA
tttgttgttgtaatcattgc

SEQ ID NO: 334105 - DNA, 20 bp, Artificial Sequence
  Description of Artificial Sequence: Synthetic oligonucleotide
  Target: LAMA2; (+) strand; PAM type: YTN; PAM sequence: TTT
gttgttgtaatcattgcttt

SEQ ID NO: 334106 - DNA, 20 bp, Artificial Sequence
  Description of Artificial Sequence: Synthetic oligonucleotide
  Target: LAMA2; (+) strand; PAM type: YTN; PAM sequence: TTG
ttgttgtaatcattgctttc

SEQ ID NO: 334107 - DNA, 20 bp, Artificial Sequence
  Description of Artificial Sequence: Synthetic oligonucleotide
  Target: LAMA2; (+) strand; PAM type: YTN; PAM sequence: TTG
ttgtaatcattgctttctaa

SEQ ID NO: 334108 - DNA, 20 bp, Artificial Sequence
  Description of Artificial Sequence: Synthetic oligonucleotide
  Target: LAMA2; (+) strand; PAM type: YTN; PAM sequence: TTG
taatcattgctttctaagca

SEQ ID NO: 334109 - DNA, 20 bp, Artificial Sequence
  Description of Artificial Sequence: Synthetic oligonucleotide
  Target: LAMA2; (+) strand; PAM type: YTN; PAM sequence: TTG
ctttctaagcacttagaata

SEQ ID NO: 334110 - DNA, 20 bp, Artificial Sequence
  Description of Artificial Sequence: Synthetic oligonucleotide
  Target: LAMA2; (+) strand; PAM type: YTN; PAM sequence: CTT
tctaagcacttagaatagtg

SEQ ID NO: 334111 - DNA, 20 bp, Artificial Sequence
  Description of Artificial Sequence: Synthetic oligonucleotide
  Target: LAMA2; (+) strand; PAM type: YTN; PAM sequence: TTT
ctaagcacttagaatagtgc

SEQ ID NO: 334112 - DNA, 20 bp, Artificial Sequence
  Description of Artificial Sequence: Synthetic oligonucleotide
  Target: LAMA2; (+) strand; PAM type: YTN; PAM sequence: TTC
taagcacttagaatagtgca

SEQ ID NO: 334113 - DNA, 20 bp, Artificial Sequence
  Description of Artificial Sequence: Synthetic oligonucleotide
  Target: LAMA2; (+) strand; PAM type: YTN; PAM sequence: CTA
agcacttagaatagtgcaca

SEQ ID NO: 334114 - DNA, 20 bp, Artificial Sequence
  Description of Artificial Sequence: Synthetic oligonucleotide
  Target: LAMA2; (+) strand; PAM type: YTN; PAM sequence: CTT
agaatagtgcacaacatata

SEQ ID NO: 334115 - DNA, 20 bp, Artificial Sequence
  Description of Artificial Sequence: Synthetic oligonucleotide
  Target: LAMA2; (+) strand; PAM type: YTN; PAM sequence: TTA
gaatagtgcacaacatatag

SEQ ID NO: 334116 - DNA, 20 bp, Artificial Sequence
  Description of Artificial Sequence: Synthetic oligonucleotide
  Target: LAMA2; (+) strand; PAM type: YTN; PAM sequence: TTC
aatgtgtttgtattaagtta

SEQ ID NO: 334117 - DNA, 20 bp, Artificial Sequence
  Description of Artificial Sequence: Synthetic oligonucleotide
  Target: LAMA2; (+) strand; PAM type: YTN; PAM sequence: TTT
gtattaagttaataaatgac

SEQ ID NO: 334118 - DNA, 20 bp, Artificial Sequence
  Description of Artificial Sequence: Synthetic oligonucleotide
  Target: LAMA2; (+) strand; PAM type: YTN; PAM sequence: TTG
tattaagttaataaatgact

SEQ ID NO: 334119 - DNA, 20 bp, Artificial Sequence
  Description of Artificial Sequence: Synthetic oligonucleotide
  Target: LAMA2; (+) strand; PAM type: YTN; PAM sequence: TTA
agttaataaatgactgaatg

SEQ ID NO: 334120 - DNA, 20 bp, Artificial Sequence
  Description of Artificial Sequence: Synthetic oligonucleotide
  Target: LAMA2; (+) strand; PAM type: YTN; PAM sequence: TTA
ataaatgactgaatgaataa

SEQ ID NO: 334121 - DNA, 20 bp, Artificial Sequence
  Description of Artificial Sequence: Synthetic oligonucleotide
  Target: LAMA2; (+) strand; PAM type: YTN; PAM sequence: CTG
aatgaataactagtacaaac

SEQ ID NO: 334122 - DNA, 20 bp, Artificial Sequence
  Description of Artificial Sequence: Synthetic oligonucleotide
  Target: LAMA2; (+) strand; PAM type: YTN; PAM sequence: CTA
gtacaaaccaccaatccata

SEQ ID NO: 334123 - DNA, 20 bp, Artificial Sequence
  Description of Artificial Sequence: Synthetic oligonucleotide
  Target: LAMA2; (+) strand; PAM type: YTN; PAM sequence: TTT
aagaatcttattgaatctga

SEQ ID NO: 334124 - DNA, 20 bp, Artificial Sequence
  Description of Artificial Sequence: Synthetic oligonucleotide
  Target: LAMA2; (+) strand; PAM type: YTN; PAM sequence: TTA
agaatcttattgaatctgag

SEQ ID NO: 334125 - DNA, 20 bp, Artificial Sequence
  Description of Artificial Sequence: Synthetic oligonucleotide
  Target: LAMA2; (+) strand; PAM type: YTN; PAM sequence: CTT
attgaatctgagaattaaag

SEQ ID NO: 334126 - DNA, 20 bp, Artificial Sequence
  Description of Artificial Sequence: Synthetic oligonucleotide
  Target: LAMA2; (+) strand; PAM type: YTN; PAM sequence: TTA
ttgaatctgagaattaaagg

SEQ ID NO: 334127 - DNA, 20 bp, Artificial Sequence
  Description of Artificial Sequence: Synthetic oligonucleotide
  Target: LAMA2; (+) strand; PAM type: YTN; PAM sequence: TTG
aatctgagaattaaaggatt

SEQ ID NO: 334128 - DNA, 20 bp, Artificial Sequence
  Description of Artificial Sequence: Synthetic oligonucleotide
  Target: LAMA2; (+) strand; PAM type: YTN; PAM sequence: CTG
agaattaaaggattaagtga

SEQ ID NO: 334129 - DNA, 20 bp, Artificial Sequence
  Description of Artificial Sequence: Synthetic oligonucleotide
  Target: LAMA2; (+) strand; PAM type: YTN; PAM sequence: TTA
aaggattaagtgatttcact

SEQ ID NO: 334130 - DNA, 20 bp, Artificial Sequence
  Description of Artificial Sequence: Synthetic oligonucleotide
  Target: LAMA2; (+) strand; PAM type: YTN; PAM sequence: TTA
agtgatttcactgtgcttct

SEQ ID NO: 334131 - DNA, 20 bp, Artificial Sequence
  Description of Artificial Sequence: Synthetic oligonucleotide
  Target: LAMA2; (+) strand; PAM type: YTN; PAM sequence: TTT
cactgtgcttcttatgataa

SEQ ID NO: 334132 - DNA, 20 bp, Artificial Sequence
  Description of Artificial Sequence: Synthetic oligonucleotide
  Target: LAMA2; (+) strand; PAM type: YTN; PAM sequence: TTC
actgtgcttcttatgataaa

SEQ ID NO: 334133 - DNA, 20 bp, Artificial Sequence
  Description of Artificial Sequence: Synthetic oligonucleotide
  Target: LAMA2; (+) strand; PAM type: YTN; PAM sequence: CTG
tgcttcttatgataaaacac

SEQ ID NO: 334134 - DNA, 20 bp, Artificial Sequence
  Description of Artificial Sequence: Synthetic oligonucleotide
  Target: LAMA2; (+) strand; PAM type: YTN; PAM sequence: CTT
cttatgataaaacacactgc

SEQ ID NO: 334135 - DNA, 20 bp, Artificial Sequence
  Description of Artificial Sequence: Synthetic oligonucleotide
  Target: LAMA2; (+) strand; PAM type: YTN; PAM sequence: TTC
ttatgataaaacacactgca

SEQ ID NO: 334136 - DNA, 20 bp, Artificial Sequence
  Description of Artificial Sequence: Synthetic oligonucleotide
  Target: LAMA2; (+) strand; PAM type: YTN; PAM sequence: CTT
atgataaaacacactgcact

SEQ ID NO: 334137 - DNA, 20 bp, Artificial Sequence
  Description of Artificial Sequence: Synthetic oligonucleotide
  Target: LAMA2; (+) strand; PAM type: YTN; PAM sequence: TTA
tgataaaacacactgcactt

SEQ ID NO: 334138 - DNA, 20 bp, Artificial Sequence
  Description of Artificial Sequence: Synthetic oligonucleotide
  Target: LAMA2; (+) strand; PAM type: YTN; PAM sequence: CTG
cactttttctaattatgaaa

SEQ ID NO: 334139 - DNA, 20 bp, Artificial Sequence
  Description of Artificial Sequence: Synthetic oligonucleotide
  Target: LAMA2; (+) strand; PAM type: YTN; PAM sequence: CTT
tttctaattatgaaatttcc

SEQ ID NO: 334140 - DNA, 20 bp, Artificial Sequence
  Description of Artificial Sequence: Synthetic oligonucleotide
  Target: LAMA2; (+) strand; PAM type: YTN; PAM sequence: TTT
ttctaattatgaaatttcct

SEQ ID NO: 334141 - DNA, 20 bp, Artificial Sequence
  Description of Artificial Sequence: Synthetic oligonucleotide
  Target: LAMA2; (+) strand; PAM type: YTN; PAM sequence: TTT
tctaattatgaaatttcctt

SEQ ID NO: 334142 - DNA, 20 bp, Artificial Sequence
  Description of Artificial Sequence: Synthetic oligonucleotide
  Target: LAMA2; (+) strand; PAM type: YTN; PAM sequence: TTT
ctaattatgaaatttccttt

SEQ ID NO: 334143 - DNA, 20 bp, Artificial Sequence
  Description of Artificial Sequence: Synthetic oligonucleotide
  Target: LAMA2; (+) strand; PAM type: YTN; PAM sequence: TTC
taattatgaaatttccttta

SEQ ID NO: 334144 - DNA, 20 bp, Artificial Sequence
  Description of Artificial Sequence: Synthetic oligonucleotide
  Target: LAMA2; (+) strand; PAM type: YTN; PAM sequence: CTA
attatgaaatttcctttaag

SEQ ID NO: 334145 - DNA, 20 bp, Artificial Sequence
  Description of Artificial Sequence: Synthetic oligonucleotide
  Target: LAMA2; (+) strand; PAM type: YTN; PAM sequence: TTA
tgaaatttcctttaaggttg

SEQ ID NO: 334146 - DNA, 20 bp, Artificial Sequence
  Description of Artificial Sequence: Synthetic oligonucleotide
  Target: LAMA2; (+) strand; PAM type: YTN; PAM sequence: TTT
cctttaaggttgaatggcat

SEQ ID NO: 334147 - DNA, 20 bp, Artificial Sequence
  Description of Artificial Sequence: Synthetic oligonucleotide
  Target: LAMA2; (+) strand; PAM type: YTN; PAM sequence: TTC
ctttaaggttgaatggcatt

SEQ ID NO: 334148 - DNA, 20 bp, Artificial Sequence
  Description of Artificial Sequence: Synthetic oligonucleotide
  Target: LAMA2; (+) strand; PAM type: YTN; PAM sequence: CTT
taaggttgaatggcattgtt

SEQ ID NO: 334149 - DNA, 20 bp, Artificial Sequence
  Description of Artificial Sequence: Synthetic oligonucleotide
  Target: LAMA2; (+) strand; PAM type: YTN; PAM sequence: TTT
aaggttgaatggcattgttt

SEQ ID NO: 334150 - DNA, 20 bp, Artificial Sequence
  Description of Artificial Sequence: Synthetic oligonucleotide
  Target: LAMA2; (+) strand; PAM type: YTN; PAM sequence: TTA
aggttgaatggcattgtttt

SEQ ID NO: 334151 - DNA, 20 bp, Artificial Sequence
  Description of Artificial Sequence: Synthetic oligonucleotide
  Target: LAMA2; (+) strand; PAM type: YTN; PAM sequence: TTG
aatggcattgttttagtcta

SEQ ID NO: 334152 - DNA, 20 bp, Artificial Sequence
  Description of Artificial Sequence: Synthetic oligonucleotide
  Target: LAMA2; (+) strand; PAM type: YTN; PAM sequence: TTG
ttttagtctatttgggctat

SEQ ID NO: 334153 - DNA, 20 bp, Artificial Sequence
  Description of Artificial Sequence: Synthetic oligonucleotide
  Target: LAMA2; (+) strand; PAM type: YTN; PAM sequence: TTT
tagtctatttgggctattat

SEQ ID NO: 334154 - DNA, 20 bp, Artificial Sequence
  Description of Artificial Sequence: Synthetic oligonucleotide
  Target: LAMA2; (+) strand; PAM type: YTN; PAM sequence: TTT
agtctatttgggctattata

SEQ ID NO: 334155 - DNA, 20 bp, Artificial Sequence
  Description of Artificial Sequence: Synthetic oligonucleotide
  Target: LAMA2; (+) strand; PAM type: YTN; PAM sequence: TTA
gtctatttgggctattataa

SEQ ID NO: 334156 - DNA, 20 bp, Artificial Sequence
  Description of Artificial Sequence: Synthetic oligonucleotide
  Target: LAMA2; (+) strand; PAM type: YTN; PAM sequence: CTA
tttgggctattataacaaag

SEQ ID NO: 334157 - DNA, 20 bp, Artificial Sequence
  Description of Artificial Sequence: Synthetic oligonucleotide
  Target: LAMA2; (+) strand; PAM type: YTN; PAM sequence: TTT
gggctattataacaaagtac

SEQ ID NO: 334158 - DNA, 20 bp, Artificial Sequence
  Description of Artificial Sequence: Synthetic oligonucleotide
  Target: LAMA2; (+) strand; PAM type: YTN; PAM sequence: TTG
ggctattataacaaagtacc

SEQ ID NO: 334159 - DNA, 20 bp, Artificial Sequence
  Description of Artificial Sequence: Synthetic oligonucleotide
  Target: LAMA2; (+) strand; PAM type: YTN; PAM sequence: CTA
ttataacaaagtaccagatg

SEQ ID NO: 334160 - DNA, 20 bp, Artificial Sequence
  Description of Artificial Sequence: Synthetic oligonucleotide
  Target: LAMA2; (+) strand; PAM type: YTN; PAM sequence: TTA
taacaaagtaccagatgagg

SEQ ID NO: 334161 - DNA, 20 bp, Artificial Sequence
  Description of Artificial Sequence: Synthetic oligonucleotide
  Target: LAMA2; (+) strand; PAM type: YTN; PAM sequence: CTT
ataaactgcagcaatttatt

SEQ ID NO: 334162 - DNA, 20 bp, Artificial Sequence
  Description of Artificial Sequence: Synthetic oligonucleotide
  Target: LAMA2; (+) strand; PAM type: YTN; PAM sequence: TTA
taaactgcagcaatttattt

SEQ ID NO: 334163 - DNA, 20 bp, Artificial Sequence
  Description of Artificial Sequence: Synthetic oligonucleotide
  Target: LAMA2; (+) strand; PAM type: YTN; PAM sequence: CTG
cagcaatttatttctcatag

SEQ ID NO: 334164 - DNA, 20 bp, Artificial Sequence
  Description of Artificial Sequence: Synthetic oligonucleotide
  Target: LAMA2; (+) strand; PAM type: YTN; PAM sequence: TTT
atttctcatagttctggagg

SEQ ID NO: 334165 - DNA, 20 bp, Artificial Sequence
  Description of Artificial Sequence: Synthetic oligonucleotide
  Target: LAMA2; (+) strand; PAM type: YTN; PAM sequence: TTA
tttctcatagttctggaggc

SEQ ID NO: 334166 - DNA, 20 bp, Artificial Sequence
  Description of Artificial Sequence: Synthetic oligonucleotide
  Target: LAMA2; (+) strand; PAM type: YTN; PAM sequence: TTT
ctcatagttctggaggcttg

SEQ ID NO: 334167 - DNA, 20 bp, Artificial Sequence
  Description of Artificial Sequence: Synthetic oligonucleotide
  Target: LAMA2; (+) strand; PAM type: YTN; PAM sequence: TTC
tcatagttctggaggcttga

SEQ ID NO: 334168 - DNA, 20 bp, Artificial Sequence
  Description of Artificial Sequence: Synthetic oligonucleotide
  Target: LAMA2; (+) strand; PAM type: YTN; PAM sequence: CTC
atagttctggaggcttgacg

SEQ ID NO: 334169 - DNA, 20 bp, Artificial Sequence
  Description of Artificial Sequence: Synthetic oligonucleotide
  Target: LAMA2; (+) strand; PAM type: YTN; PAM sequence: TTC
tggaggcttgacgtccaaga

SEQ ID NO: 334170 - DNA, 20 bp, Artificial Sequence
  Description of Artificial Sequence: Synthetic oligonucleotide
  Target: LAMA2; (+) strand; PAM type: YTN; PAM sequence: CTG
gaggcttgacgtccaagatc

SEQ ID NO: 334171 - DNA, 20 bp, Artificial Sequence
  Description of Artificial Sequence: Synthetic oligonucleotide
  Target: LAMA2; (+) strand; PAM type: YTN; PAM sequence: CTT
gacgtccaagatcaaagcac

SEQ ID NO: 334172 - DNA, 20 bp, Artificial Sequence
  Description of Artificial Sequence: Synthetic oligonucleotide
  Target: LAMA2; (+) strand; PAM type: YTN; PAM sequence: TTG
acgtccaagatcaaagcact

SEQ ID NO: 334173 - DNA, 20 bp, Artificial Sequence
  Description of Artificial Sequence: Synthetic oligonucleotide
  Target: LAMA2; (+) strand; PAM type: YTN; PAM sequence: CTG
gcagattcaatgtctggtga

SEQ ID NO: 334174 - DNA, 20 bp, Artificial Sequence
  Description of Artificial Sequence: Synthetic oligonucleotide
  Target: LAMA2; (+) strand; PAM type: YTN; PAM sequence: TTC
aatgtctggtgagggtctgc

SEQ ID NO: 334175 - DNA, 20 bp, Artificial Sequence
  Description of Artificial Sequence: Synthetic oligonucleotide
  Target: LAMA2; (+) strand; PAM type: YTN; PAM sequence: CTG
gtgagggtctgcttcctggt

SEQ ID NO: 334176 - DNA, 20 bp, Artificial Sequence
  Description of Artificial Sequence: Synthetic oligonucleotide
  Target: LAMA2; (+) strand; PAM type: YTN; PAM sequence: CTG
cttcctggttcatagatggc

SEQ ID NO: 334177 - DNA, 20 bp, Artificial Sequence
  Description of Artificial Sequence: Synthetic oligonucleotide
  Target: LAMA2; (+) strand; PAM type: YTN; PAM sequence: CTT
cctggttcatagatggcctt

SEQ ID NO: 334178 - DNA, 20 bp, Artificial Sequence
  Description of Artificial Sequence: Synthetic oligonucleotide
  Target: LAMA2; (+) strand; PAM type: YTN; PAM sequence: TTC
ctggttcatagatggccttc

SEQ ID NO: 334179 - DNA, 20 bp, Artificial Sequence
  Description of Artificial Sequence: Synthetic oligonucleotide
  Target: LAMA2; (+) strand; PAM type: YTN; PAM sequence: CTG
gttcatagatggccttcttc

SEQ ID NO: 334180 - DNA, 20 bp, Artificial Sequence
  Description of Artificial Sequence: Synthetic oligonucleotide
  Target: LAMA2; (+) strand; PAM type: YTN; PAM sequence: TTC
atagatggccttcttcttgc

SEQ ID NO: 334181 - DNA, 20 bp, Artificial Sequence
  Description of Artificial Sequence: Synthetic oligonucleotide
  Target: LAMA2; (+) strand; PAM type: YTN; PAM sequence: CTT
cttcttgctgtagcctcaca

SEQ ID NO: 334182 - DNA, 20 bp, Artificial Sequence
  Description of Artificial Sequence: Synthetic oligonucleotide
  Target: LAMA2; (+) strand; PAM type: YTN; PAM sequence: TTC
ttcttgctgtagcctcacat

SEQ ID NO: 334183 - DNA, 20 bp, Artificial Sequence
  Description of Artificial Sequence: Synthetic oligonucleotide
  Target: LAMA2; (+) strand; PAM type: YTN; PAM sequence: CTT
cttgctgtagcctcacatgg

SEQ ID NO: 334184 - DNA, 20 bp, Artificial Sequence
  Description of Artificial Sequence: Synthetic oligonucleotide
  Target: LAMA2; (+) strand; PAM type: YTN; PAM sequence: TTC
ttgctgtagcctcacatggc

SEQ ID NO: 334185 - DNA, 20 bp, Artificial Sequence
  Description of Artificial Sequence: Synthetic oligonucleotide
  Target: LAMA2; (+) strand; PAM type: YTN; PAM sequence: CTT
gctgtagcctcacatggcag

SEQ ID NO: 334186 - DNA, 20 bp, Artificial Sequence
  Description of Artificial Sequence: Synthetic oligonucleotide
  Target: LAMA2; (+) strand; PAM type: YTN; PAM sequence: TTG
ctgtagcctcacatggcaga

SEQ ID NO: 334187 - DNA, 20 bp, Artificial Sequence
  Description of Artificial Sequence: Synthetic oligonucleotide
  Target: LAMA2; (+) strand; PAM type: YTN; PAM sequence: CTG
tagcctcacatggcagaagg

SEQ ID NO: 334188 - DNA, 20 bp, Artificial Sequence
  Description of Artificial Sequence: Synthetic oligonucleotide
  Target: LAMA2; (+) strand; PAM type: YTN; PAM sequence: CTC
acatggcagaaggggcaaat

SEQ ID NO: 334189 - DNA, 20 bp, Artificial Sequence
  Description of Artificial Sequence: Synthetic oligonucleotide
  Target: LAMA2; (+) strand; PAM type: YTN; PAM sequence: CTT
tctggggtttcatttataag

SEQ ID NO: 334190 - DNA, 20 bp, Artificial Sequence
  Description of Artificial Sequence: Synthetic oligonucleotide
  Target: LAMA2; (+) strand; PAM type: YTN; PAM sequence: TTT
ctggggtttcatttataagg

SEQ ID NO: 334191 - DNA, 20 bp, Artificial Sequence
  Description of Artificial Sequence: Synthetic oligonucleotide
  Target: LAMA2; (+) strand; PAM type: YTN; PAM sequence: TTC
tggggtttcatttataaggg

SEQ ID NO: 334192 - DNA, 20 bp, Artificial Sequence
  Description of Artificial Sequence: Synthetic oligonucleotide
  Target: LAMA2; (+) strand; PAM type: YTN; PAM sequence: CTG
gggtttcatttataagggta

SEQ ID NO: 334193 - DNA, 20 bp, Artificial Sequence
  Description of Artificial Sequence: Synthetic oligonucleotide
  Target: LAMA2; (+) strand; PAM type: YTN; PAM sequence: TTT
catttataagggtactaatt

SEQ ID NO: 334194 - DNA, 20 bp, Artificial Sequence
  Description of Artificial Sequence: Synthetic oligonucleotide
  Target: LAMA2; (+) strand; PAM type: YTN; PAM sequence: TTC
atttataagggtactaattc

SEQ ID NO: 334195 - DNA, 20 bp, Artificial Sequence
  Description of Artificial Sequence: Synthetic oligonucleotide
  Target: LAMA2; (+) strand; PAM type: YTN; PAM sequence: TTT
ataagggtactaattccatt

SEQ ID NO: 334196 - DNA, 20 bp, Artificial Sequence
  Description of Artificial Sequence: Synthetic oligonucleotide
  Target: LAMA2; (+) strand; PAM type: YTN; PAM sequence: TTA
taagggtactaattccattc

SEQ ID NO: 334197 - DNA, 20 bp, Artificial Sequence
  Description of Artificial Sequence: Synthetic oligonucleotide
  Target: LAMA2; (+) strand; PAM type: YTN; PAM sequence: CTA
attccattcttgggggctct

SEQ ID NO: 334198 - DNA, 20 bp, Artificial Sequence
  Description of Artificial Sequence: Synthetic oligonucleotide
  Target: LAMA2; (+) strand; PAM type: YTN; PAM sequence: TTC
cattcttgggggctctgtcc

SEQ ID NO: 334199 - DNA, 20 bp, Artificial Sequence
  Description of Artificial Sequence: Synthetic oligonucleotide
  Target: LAMA2; (+) strand; PAM type: YTN; PAM sequence: TTC
ttgggggctctgtcctcatg

SEQ ID NO: 334200 - DNA, 20 bp, Artificial Sequence
  Description of Artificial Sequence: Synthetic oligonucleotide
  Target: LAMA2; (+) strand; PAM type: YTN; PAM sequence: CTT
gggggctctgtcctcatgac

SEQ ID NO: 334201 - DNA, 20 bp, Artificial Sequence
  Description of Artificial Sequence: Synthetic oligonucleotide
  Target: LAMA2; (+) strand; PAM type: YTN; PAM sequence: TTG
ggggctctgtcctcatgacc

SEQ ID NO: 334202 - DNA, 20 bp, Artificial Sequence
  Description of Artificial Sequence: Synthetic oligonucleotide
  Target: LAMA2; (+) strand; PAM type: YTN; PAM sequence: CTC
tgtcctcatgacctaattac

SEQ ID NO: 334203 - DNA, 20 bp, Artificial Sequence
  Description of Artificial Sequence: Synthetic oligonucleotide
  Target: LAMA2; (+) strand; PAM type: YTN; PAM sequence: CTG
tcctcatgacctaattacct

SEQ ID NO: 334204 - DNA, 20 bp, Artificial Sequence
  Description of Artificial Sequence: Synthetic oligonucleotide
  Target: LAMA2; (+) strand; PAM type: YTN; PAM sequence: CTC
atgacctaattacctcccca

SEQ ID NO: 334205 - DNA, 20 bp, Artificial Sequence
  Description of Artificial Sequence: Synthetic oligonucleotide
  Target: LAMA2; (+) strand; PAM type: YTN; PAM sequence: CTA
attacctccccaatccccat

SEQ ID NO: 334206 - DNA, 20 bp, Artificial Sequence
  Description of Artificial Sequence: Synthetic oligonucleotide
  Target: LAMA2; (+) strand; PAM type: YTN; PAM sequence: TTA
cctccccaatccccatcacc

SEQ ID NO: 334207 - DNA, 20 bp, Artificial Sequence
  Description of Artificial Sequence: Synthetic oligonucleotide
  Target: LAMA2; (+) strand; PAM type: YTN; PAM sequence: CTC
cccaatccccatcacctaat

SEQ ID NO: 334208 - DNA, 20 bp, Artificial Sequence
  Description of Artificial Sequence: Synthetic oligonucleotide
  Target: LAMA2; (+) strand; PAM type: YTN; PAM sequence: CTA
ataccatcacattaggggtt

SEQ ID NO: 334209 - DNA, 20 bp, Artificial Sequence
  Description of Artificial Sequence: Synthetic oligonucleotide
  Target: LAMA2; (+) strand; PAM type: YTN; PAM sequence: TTA
ggggttaggatttcaacata

SEQ ID NO: 334210 - DNA, 20 bp, Artificial Sequence
  Description of Artificial Sequence: Synthetic oligonucleotide
  Target: LAMA2; (+) strand; PAM type: YTN; PAM sequence: TTA
ggatttcaacatatgaattt

SEQ ID NO: 334211 - DNA, 20 bp, Artificial Sequence
  Description of Artificial Sequence: Synthetic oligonucleotide
  Target: LAMA2; (+) strand; PAM type: YTN; PAM sequence: TTT
caacatatgaattttagggg

SEQ ID NO: 334212 - DNA, 20 bp, Artificial Sequence
  Description of Artificial Sequence: Synthetic oligonucleotide
  Target: LAMA2; (+) strand; PAM type: YTN; PAM sequence: TTC
aacatatgaattttagggga

SEQ ID NO: 334213 - DNA, 20 bp, Artificial Sequence
  Description of Artificial Sequence: Synthetic oligonucleotide
  Target: LAMA2; (+) strand; PAM type: YTN; PAM sequence: TTT
taggggaacagaaacattca

SEQ ID NO: 334214 - DNA, 20 bp, Artificial Sequence
  Description of Artificial Sequence: Synthetic oligonucleotide
  Target: LAMA2; (+) strand; PAM type: YTN; PAM sequence: TTT
aggggaacagaaacattcag

SEQ ID NO: 334215 - DNA, 20 bp, Artificial Sequence
  Description of Artificial Sequence: Synthetic oligonucleotide
  Target: LAMA2; (+) strand; PAM type: YTN; PAM sequence: TTA
ggggaacagaaacattcagt

SEQ ID NO: 334216 - DNA, 20 bp, Artificial Sequence
  Description of Artificial Sequence: Synthetic oligonucleotide
  Target: LAMA2; (+) strand; PAM type: YTN; PAM sequence: TTC
agtctatagaaagcgtgaag

SEQ ID NO: 334217 - DNA, 20 bp, Artificial Sequence
  Description of Artificial Sequence: Synthetic oligonucleotide
  Target: LAMA2; (+) strand; PAM type: YTN; PAM sequence: CTA
tagaaagcgtgaagtaaatt

SEQ ID NO: 334218 - DNA, 20 bp, Artificial Sequence
  Description of Artificial Sequence: Synthetic oligonucleotide
  Target: LAMA2; (+) strand; PAM type: YTN; PAM sequence: TTT
tcttccagttcctatgcatg

SEQ ID NO: 334219 - DNA, 20 bp, Artificial Sequence
  Description of Artificial Sequence: Synthetic oligonucleotide
  Target: LAMA2; (+) strand; PAM type: YTN; PAM sequence: TTT
cttccagttcctatgcatgt

SEQ ID NO: 334220 - DNA, 20 bp, Artificial Sequence
  Description of Artificial Sequence: Synthetic oligonucleotide
  Target: LAMA2; (+) strand; PAM type: YTN; PAM sequence: TTC
ttccagttcctatgcatgtt

SEQ ID NO: 334221 - DNA, 20 bp, Artificial Sequence
  Description of Artificial Sequence: Synthetic oligonucleotide
  Target: LAMA2; (+) strand; PAM type: YTN; PAM sequence: CTT
ccagttcctatgcatgttct

SEQ ID NO: 334222 - DNA, 20 bp, Artificial Sequence
  Description of Artificial Sequence: Synthetic oligonucleotide
  Target: LAMA2; (+) strand; PAM type: YTN; PAM sequence: TTC
cagttcctatgcatgttctt

SEQ ID NO: 334223 - DNA, 20 bp, Artificial Sequence
  Description of Artificial Sequence: Synthetic oligonucleotide
  Target: LAMA2; (+) strand; PAM type: YTN; PAM sequence: TTC
ctatgcatgttcttactctg

SEQ ID NO: 334224 - DNA, 20 bp, Artificial Sequence
  Description of Artificial Sequence: Synthetic oligonucleotide
  Target: LAMA2; (+) strand; PAM type: YTN; PAM sequence: CTA
tgcatgttcttactctgctt

SEQ ID NO: 334225 - DNA, 20 bp, Artificial Sequence
  Description of Artificial Sequence: Synthetic oligonucleotide
  Target: LAMA2; (+) strand; PAM type: YTN; PAM sequence: TTC
ttactctgcttttaagcgta

SEQ ID NO: 334226 - DNA, 20 bp, Artificial Sequence
  Description of Artificial Sequence: Synthetic oligonucleotide
  Target: LAMA2; (+) strand; PAM type: YTN; PAM sequence: CTT
actctgcttttaagcgtatt

SEQ ID NO: 334227 - DNA, 20 bp, Artificial Sequence
  Description of Artificial Sequence: Synthetic oligonucleotide
  Target: LAMA2; (+) strand; PAM type: YTN; PAM sequence: TTA
ctctgcttttaagcgtattc

SEQ ID NO: 334228 - DNA, 20 bp, Artificial Sequence
  Description of Artificial Sequence: Synthetic oligonucleotide
  Target: LAMA2; (+) strand; PAM type: YTN; PAM sequence: CTC
tgcttttaagcgtattctaa

SEQ ID NO: 334229 - DNA, 20 bp, Artificial Sequence
  Description of Artificial Sequence: Synthetic oligonucleotide
  Target: LAMA2; (+) strand; PAM type: YTN; PAM sequence: CTG
cttttaagcgtattctaaat

SEQ ID NO: 334230 - DNA, 20 bp, Artificial Sequence
  Description of Artificial Sequence: Synthetic oligonucleotide
  Target: LAMA2; (+) strand; PAM type: YTN; PAM sequence: CTT
ttaagcgtattctaaatttc

SEQ ID NO: 334231 - DNA, 20 bp, Artificial Sequence
  Description of Artificial Sequence: Synthetic oligonucleotide
  Target: LAMA2; (+) strand; PAM type: YTN; PAM sequence: TTT
taagcgtattctaaatttca

SEQ ID NO: 334232 - DNA, 20 bp, Artificial Sequence
  Description of Artificial Sequence: Synthetic oligonucleotide
  Target: LAMA2; (+) strand; PAM type: YTN; PAM sequence: TTT
aagcgtattctaaatttcag

SEQ ID NO: 334233 - DNA, 20 bp, Artificial Sequence
  Description of Artificial Sequence: Synthetic oligonucleotide
  Target: LAMA2; (+) strand; PAM type: YTN; PAM sequence: TTA
agcgtattctaaatttcagt

SEQ ID NO: 334234 - DNA, 20 bp, Artificial Sequence
  Description of Artificial Sequence: Synthetic oligonucleotide
  Target: LAMA2; (+) strand; PAM type: YTN; PAM sequence: TTC
taaatttcagttgtatctgt

SEQ ID NO: 334235 - DNA, 20 bp, Artificial Sequence
  Description of Artificial Sequence: Synthetic oligonucleotide
  Target: LAMA2; (+) strand; PAM type: YTN; PAM sequence: CTA
aatttcagttgtatctgtca

SEQ ID NO: 334236 - DNA, 20 bp, Artificial Sequence
  Description of Artificial Sequence: Synthetic oligonucleotide
  Target: LAMA2; (+) strand; PAM type: YTN; PAM sequence: TTT
cagttgtatctgtcactatg

SEQ ID NO: 334237 - DNA, 20 bp, Artificial Sequence
  Description of Artificial Sequence: Synthetic oligonucleotide
  Target: LAMA2; (+) strand; PAM type: YTN; PAM sequence: TTC
agttgtatctgtcactatgt

SEQ ID NO: 334238 - DNA, 20 bp, Artificial Sequence
  Description of Artificial Sequence: Synthetic oligonucleotide
  Target: LAMA2; (+) strand; PAM type: YTN; PAM sequence: TTG
tatctgtcactatgtgactt

SEQ ID NO: 334239 - DNA, 20 bp, Artificial Sequence
  Description of Artificial Sequence: Synthetic oligonucleotide
  Target: LAMA2; (+) strand; PAM type: YTN; PAM sequence: CTG
tcactatgtgactttaccac

SEQ ID NO: 334240 - DNA, 20 bp, Artificial Sequence
  Description of Artificial Sequence: Synthetic oligonucleotide
  Target: LAMA2; (+) strand; PAM type: YTN; PAM sequence: CTA
tgtgactttaccacacttac

SEQ ID NO: 334241 - DNA, 20 bp, Artificial Sequence
  Description of Artificial Sequence: Synthetic oligonucleotide
  Target: LAMA2; (+) strand; PAM type: YTN; PAM sequence: CTT
taccacacttacagctttat

SEQ ID NO: 334242 - DNA, 20 bp, Artificial Sequence
  Description of Artificial Sequence: Synthetic oligonucleotide
  Target: LAMA2; (+) strand; PAM type: YTN; PAM sequence: TTT
accacacttacagctttatt

SEQ ID NO: 334243 - DNA, 20 bp, Artificial Sequence
  Description of Artificial Sequence: Synthetic oligonucleotide
  Target: LAMA2; (+) strand; PAM type: YTN; PAM sequence: TTA
ccacacttacagctttattt

SEQ ID NO: 334244 - DNA, 20 bp, Artificial Sequence
  Description of Artificial Sequence: Synthetic oligonucleotide
  Target: LAMA2; (+) strand; PAM type: YTN; PAM sequence: CTT
acagctttatttaggaaaag

SEQ ID NO: 334245 - DNA, 20 bp, Artificial Sequence
  Description of Artificial Sequence: Synthetic oligonucleotide
  Target: LAMA2; (+) strand; PAM type: YTN; PAM sequence: TTA
cagctttatttaggaaaaga

SEQ ID NO: 334246 - DNA, 20 bp, Artificial Sequence
  Description of Artificial Sequence: Synthetic oligonucleotide
  Target: LAMA2; (+) strand; PAM type: YTN; PAM sequence: CTT
tatttaggaaaagagatgtt

SEQ ID NO: 334247 - DNA, 20 bp, Artificial Sequence
  Description of Artificial Sequence: Synthetic oligonucleotide
  Target: LAMA2; (+) strand; PAM type: YTN; PAM sequence: TTT
atttaggaaaagagatgtta

SEQ ID NO: 334248 - DNA, 20 bp, Artificial Sequence
  Description of Artificial Sequence: Synthetic oligonucleotide
  Target: LAMA2; (+) strand; PAM type: YTN; PAM sequence: TTA
tttaggaaaagagatgttaa

SEQ ID NO: 334249 - DNA, 20 bp, Artificial Sequence
  Description of Artificial Sequence: Synthetic oligonucleotide
  Target: LAMA2; (+) strand; PAM type: YTN; PAM sequence: TTT
aggaaaagagatgttaatta

SEQ ID NO: 334250 - DNA, 20 bp, Artificial Sequence
  Description of Artificial Sequence: Synthetic oligonucleotide
  Target: LAMA2; (+) strand; PAM type: YTN; PAM sequence: TTA
ggaaaagagatgttaattat

SEQ ID NO: 334251 - DNA, 20 bp, Artificial Sequence
  Description of Artificial Sequence: Synthetic oligonucleotide
  Target: LAMA2; (+) strand; PAM type: YTN; PAM sequence: TTA
attattttaactcttctttt

SEQ ID NO: 334252 - DNA, 20 bp, Artificial Sequence
  Description of Artificial Sequence: Synthetic oligonucleotide
  Target: LAMA2; (+) strand; PAM type: YTN; PAM sequence: TTA
ttttaactcttcttttgtaa

SEQ ID NO: 334253 - DNA, 20 bp, Artificial Sequence
  Description of Artificial Sequence: Synthetic oligonucleotide
  Target: LAMA2; (+) strand; PAM type: YTN; PAM sequence: TTT
taactcttcttttgtaacag

SEQ ID NO: 334254 - DNA, 20 bp, Artificial Sequence
  Description of Artificial Sequence: Synthetic oligonucleotide
  Target: LAMA2; (+) strand; PAM type: YTN; PAM sequence: TTT
aactcttcttttgtaacaga

SEQ ID NO: 334255 - DNA, 20 bp, Artificial Sequence
  Description of Artificial Sequence: Synthetic oligonucleotide
  Target: LAMA2; (+) strand; PAM type: YTN; PAM sequence: TTA
actcttcttttgtaacagag

SEQ ID NO: 334256 - DNA, 20 bp, Artificial Sequence
  Description of Artificial Sequence: Synthetic oligonucleotide
  Target: LAMA2; (+) strand; PAM type: YTN; PAM sequence: CTC
ttcttttgtaacagagaagt

SEQ ID NO: 334257 - DNA, 20 bp, Artificial Sequence
  Description of Artificial Sequence: Synthetic oligonucleotide
  Target: LAMA2; (+) strand; PAM type: YTN; PAM sequence: CTT
cttttgtaacagagaagtct

SEQ ID NO: 334258 - DNA, 20 bp, Artificial Sequence
  Description of Artificial Sequence: Synthetic oligonucleotide
  Target: LAMA2; (+) strand; PAM type: YTN; PAM sequence: TTC
ttttgtaacagagaagtctg

SEQ ID NO: 334259 - DNA, 20 bp, Artificial Sequence
  Description of Artificial Sequence: Synthetic oligonucleotide
  Target: LAMA2; (+) strand; PAM type: YTN; PAM sequence: CTT
ttgtaacagagaagtctggg

SEQ ID NO: 334260 - DNA, 20 bp, Artificial Sequence
  Description of Artificial Sequence: Synthetic oligonucleotide
  Target: LAMA2; (+) strand; PAM type: YTN; PAM sequence: TTT
tgtaacagagaagtctggga

SEQ ID NO: 334261 - DNA, 20 bp, Artificial Sequence
  Description of Artificial Sequence: Synthetic oligonucleotide
  Target: LAMA2; (+) strand; PAM type: YTN; PAM sequence: TTT
gtaacagagaagtctgggac

SEQ ID NO: 334262 - DNA, 20 bp, Artificial Sequence
  Description of Artificial Sequence: Synthetic oligonucleotide
  Target: LAMA2; (+) strand; PAM type: YTN; PAM sequence: TTG
taacagagaagtctgggact

SEQ ID NO: 334263 - DNA, 20 bp, Artificial Sequence
  Description of Artificial Sequence: Synthetic oligonucleotide
  Target: LAMA2; (+) strand; PAM type: YTN; PAM sequence: CTG
ggactgtcattttttgtttt

SEQ ID NO: 334264 - DNA, 20 bp, Artificial Sequence
  Description of Artificial Sequence: Synthetic oligonucleotide
  Target: LAMA2; (+) strand; PAM type: YTN; PAM sequence: CTG
tcattttttgttttttgctt

SEQ ID NO: 334265 - DNA, 20 bp, Artificial Sequence
  Description of Artificial Sequence: Synthetic oligonucleotide
  Target: LAMA2; (+) strand; PAM type: YTN; PAM sequence: TTT
tttgttttttgcttgacatt

SEQ ID NO: 334266 - DNA, 20 bp, Artificial Sequence
  Description of Artificial Sequence: Synthetic oligonucleotide
  Target: LAMA2; (+) strand; PAM type: YTN; PAM sequence: TTT
ttgttttttgcttgacattg

SEQ ID NO: 334267 - DNA, 20 bp, Artificial Sequence
  Description of Artificial Sequence: Synthetic oligonucleotide
  Target: LAMA2; (+) strand; PAM type: YTN; PAM sequence: TTT
tgttttttgcttgacattgt

SEQ ID NO: 334268 - DNA, 20 bp, Artificial Sequence
  Description of Artificial Sequence: Synthetic oligonucleotide
  Target: LAMA2; (+) strand; PAM type: YTN; PAM sequence: TTT
gttttttgcttgacattgta

SEQ ID NO: 334269 - DNA, 20 bp, Artificial Sequence
  Description of Artificial Sequence: Synthetic oligonucleotide
  Target: LAMA2; (+) strand; PAM type: YTN; PAM sequence: TTG
ttttttgcttgacattgtat

SEQ ID NO: 334270 - DNA, 20 bp, Artificial Sequence
  Description of Artificial Sequence: Synthetic oligonucleotide
  Target: LAMA2; (+) strand; PAM type: YTN; PAM sequence: TTT
tttgcttgacattgtatttt

SEQ ID NO: 334271 - DNA, 20 bp, Artificial Sequence
  Description of Artificial Sequence: Synthetic oligonucleotide
  Target: LAMA2; (+) strand; PAM type: YTN; PAM sequence: TTT
ttgcttgacattgtattttt

SEQ ID NO: 334272 - DNA, 20 bp, Artificial Sequence
  Description of Artificial Sequence: Synthetic oligonucleotide
  Target: LAMA2; (+) strand; PAM type: YTN; PAM sequence: TTT
tgcttgacattgtatttttt

SEQ ID NO: 334273 - DNA, 20 bp, Artificial Sequence
  Description of Artificial Sequence: Synthetic oligonucleotide
  Target: LAMA2; (+) strand; PAM type: YTN; PAM sequence: TTT
gcttgacattgtattttttc

SEQ ID NO: 334274 - DNA, 20 bp, Artificial Sequence
  Description of Artificial Sequence: Synthetic oligonucleotide
  Target: LAMA2; (+) strand; PAM type: YTN; PAM sequence: TTG
cttgacattgtattttttcc

SEQ ID NO: 334275 - DNA, 20 bp, Artificial Sequence
  Description of Artificial Sequence: Synthetic oligonucleotide
  Target: LAMA2; (+) strand; PAM type: YTN; PAM sequence: CTT
gacattgtattttttcctca

SEQ ID NO: 334276 - DNA, 20 bp, Artificial Sequence
  Description of Artificial Sequence: Synthetic oligonucleotide
  Target: LAMA2; (+) strand; PAM type: YTN; PAM sequence: TTG
acattgtattttttcctcat

SEQ ID NO: 334277 - DNA, 20 bp, Artificial Sequence
  Description of Artificial Sequence: Synthetic oligonucleotide
  Target: LAMA2; (+) strand; PAM type: YTN; PAM sequence: TTG
tattttttcctcatagaaca

SEQ ID NO: 334278 - DNA, 20 bp, Artificial Sequence
  Description of Artificial Sequence: Synthetic oligonucleotide
  Target: LAMA2; (+) strand; PAM type: YTN; PAM sequence: TTT
tttcctcatagaacaaaagt

SEQ ID NO: 334279 - DNA, 20 bp, Artificial Sequence
  Description of Artificial Sequence: Synthetic oligonucleotide
  Target: LAMA2; (+) strand; PAM type: YTN; PAM sequence: TTT
ttcctcatagaacaaaagtt

SEQ ID NO: 334280 - DNA, 20 bp, Artificial Sequence
  Description of Artificial Sequence: Synthetic oligonucleotide
  Target: LAMA2; (+) strand; PAM type: YTN; PAM sequence: TTT
tcctcatagaacaaaagtta

SEQ ID NO: 334281 - DNA, 20 bp, Artificial Sequence
  Description of Artificial Sequence: Synthetic oligonucleotide
  Target: LAMA2; (+) strand; PAM type: YTN; PAM sequence: TTT
cctcatagaacaaaagttag

SEQ ID NO: 334282 - DNA, 20 bp, Artificial Sequence
  Description of Artificial Sequence: Synthetic oligonucleotide
  Target: LAMA2; (+) strand; PAM type: YTN; PAM sequence: TTC
ctcatagaacaaaagttagt

SEQ ID NO: 334283 - DNA, 20 bp, Artificial Sequence
  Description of Artificial Sequence: Synthetic oligonucleotide
  Target: LAMA2; (+) strand; PAM type: YTN; PAM sequence: CTC
atagaacaaaagttagtata

SEQ ID NO: 334284 - DNA, 20 bp, Artificial Sequence
  Description of Artificial Sequence: Synthetic oligonucleotide
  Target: LAMA2; (+) strand; PAM type: YTN; PAM sequence: TTA
gtataaaagaaagggaaaaa

SEQ ID NO: 334285 - DNA, 20 bp, Artificial Sequence
  Description of Artificial Sequence: Synthetic oligonucleotide
  Target: LAMA2; (+) strand; PAM type: YTN; PAM sequence: CTG
tttaaacaagagtgtaaatg

SEQ ID NO: 334286 - DNA, 20 bp, Artificial Sequence
  Description of Artificial Sequence: Synthetic oligonucleotide
  Target: LAMA2; (+) strand; PAM type: YTN; PAM sequence: TTT
aaacaagagtgtaaatgtag

SEQ ID NO: 334287 - DNA, 20 bp, Artificial Sequence
  Description of Artificial Sequence: Synthetic oligonucleotide
  Target: LAMA2; (+) strand; PAM type: YTN; PAM sequence: TTA
aacaagagtgtaaatgtagg

SEQ ID NO: 334288 - DNA, 20 bp, Artificial Sequence
  Description of Artificial Sequence: Synthetic oligonucleotide
  Target: LAMA2; (+) strand; PAM type: YTN; PAM sequence: TTT
tgatctaaaatgttgataaa

SEQ ID NO: 334289 - DNA, 20 bp, Artificial Sequence
  Description of Artificial Sequence: Synthetic oligonucleotide
  Target: LAMA2; (+) strand; PAM type: YTN; PAM sequence: TTT
gatctaaaatgttgataaac

SEQ ID NO: 334290 - DNA, 20 bp, Artificial Sequence
  Description of Artificial Sequence: Synthetic oligonucleotide
  Target: LAMA2; (+) strand; PAM type: YTN; PAM sequence: TTG
atctaaaatgttgataaacc

SEQ ID NO: 334291 - DNA, 20 bp, Artificial Sequence
  Description of Artificial Sequence: Synthetic oligonucleotide
  Target: LAMA2; (+) strand; PAM type: YTN; PAM sequence: CTA
aaatgttgataaaccaaatt

SEQ ID NO: 334292 - DNA, 20 bp, Artificial Sequence
  Description of Artificial Sequence: Synthetic oligonucleotide
  Target: LAMA2; (+) strand; PAM type: YTN; PAM sequence: TTG
ataaaccaaattctagcaat

SEQ ID NO: 334293 - DNA, 20 bp, Artificial Sequence
  Description of Artificial Sequence: Synthetic oligonucleotide
  Target: LAMA2; (+) strand; PAM type: YTN; PAM sequence: TTC
tagcaataccatgaaaatgt

SEQ ID NO: 334294 - DNA, 20 bp, Artificial Sequence
  Description of Artificial Sequence: Synthetic oligonucleotide
  Target: LAMA2; (+) strand; PAM type: YTN; PAM sequence: CTA
gcaataccatgaaaatgtaa

SEQ ID NO: 334295 - DNA, 20 bp, Artificial Sequence
  Description of Artificial Sequence: Synthetic oligonucleotide
  Target: LAMA2; (+) strand; PAM type: YTN; PAM sequence: TTT
tggagacccagatcctattt

SEQ ID NO: 334296 - DNA, 20 bp, Artificial Sequence
  Description of Artificial Sequence: Synthetic oligonucleotide
  Target: LAMA2; (+) strand; PAM type: YTN; PAM sequence: TTT
ggagacccagatcctatttc

SEQ ID NO: 334297 - DNA, 20 bp, Artificial Sequence
  Description of Artificial Sequence: Synthetic oligonucleotide
  Target: LAMA2; (+) strand; PAM type: YTN; PAM sequence: TTG
gagacccagatcctatttca

SEQ ID NO: 334298 - DNA, 20 bp, Artificial Sequence
  Description of Artificial Sequence: Synthetic oligonucleotide
  Target: LAMA2; (+) strand; PAM type: YTN; PAM sequence: CTA
tttcaaatagagtcaagatg

SEQ ID NO: 334299 - DNA, 20 bp, Artificial Sequence
  Description of Artificial Sequence: Synthetic oligonucleotide
  Target: LAMA2; (+) strand; PAM type: YTN; PAM sequence: TTT
caaatagagtcaagatgact

SEQ ID NO: 334300 - DNA, 20 bp, Artificial Sequence
  Description of Artificial Sequence: Synthetic oligonucleotide
  Target: LAMA2; (+) strand; PAM type: YTN; PAM sequence: TTC
aaatagagtcaagatgactg

SEQ ID NO: 334301 - DNA, 20 bp, Artificial Sequence
  Description of Artificial Sequence: Synthetic oligonucleotide
  Target: LAMA2; (+) strand; PAM type: YTN; PAM sequence: CTG
ccctagaaaatgcttcttga

SEQ ID NO: 334302 - DNA, 20 bp, Artificial Sequence
  Description of Artificial Sequence: Synthetic oligonucleotide
  Target: LAMA2; (+) strand; PAM type: YTN; PAM sequence: CTA
gaaaatgcttcttgaagtca

SEQ ID NO: 334303 - DNA, 20 bp, Artificial Sequence
  Description of Artificial Sequence: Synthetic oligonucleotide
  Target: LAMA2; (+) strand; PAM type: YTN; PAM sequence: CTT
cttgaagtcatggaataaat

SEQ ID NO: 334304 - DNA, 20 bp, Artificial Sequence
  Description of Artificial Sequence: Synthetic oligonucleotide
  Target: LAMA2; (+) strand; PAM type: YTN; PAM sequence: TTC
ttgaagtcatggaataaatt

SEQ ID NO: 334305 - DNA, 20 bp, Artificial Sequence
  Description of Artificial Sequence: Synthetic oligonucleotide
  Target: LAMA2; (+) strand; PAM type: YTN; PAM sequence: CTT
gaagtcatggaataaattag

SEQ ID NO: 334306 - DNA, 20 bp, Artificial Sequence
  Description of Artificial Sequence: Synthetic oligonucleotide
  Target: LAMA2; (+) strand; PAM type: YTN; PAM sequence: TTG
aagtcatggaataaattaga

SEQ ID NO: 334307 - DNA, 20 bp, Artificial Sequence
  Description of Artificial Sequence: Synthetic oligonucleotide
  Target: LAMA2; (+) strand; PAM type: YTN; PAM sequence: TTA
gatgattgtttatttaaaaa

SEQ ID NO: 334308 - DNA, 20 bp, Artificial Sequence
  Description of Artificial Sequence: Synthetic oligonucleotide
  Target: LAMA2; (+) strand; PAM type: YTN; PAM sequence: TTG
tttatttaaaaaaaaagaac

SEQ ID NO: 334309 - DNA, 20 bp, Artificial Sequence
  Description of Artificial Sequence: Synthetic oligonucleotide
  Target: LAMA2; (+) strand; PAM type: YTN; PAM sequence: TTT
atttaaaaaaaaagaacaat

SEQ ID NO: 334310 - DNA, 20 bp, Artificial Sequence
  Description of Artificial Sequence: Synthetic oligonucleotide
  Target: LAMA2; (+) strand; PAM type: YTN; PAM sequence: TTA
tttaaaaaaaaagaacaata

SEQ ID NO: 334311 - DNA, 20 bp, Artificial Sequence
  Description of Artificial Sequence: Synthetic oligonucleotide
  Target: LAMA2; (+) strand; PAM type: YTN; PAM sequence: TTT
aaaaaaaaagaacaataata

SEQ ID NO: 334312 - DNA, 20 bp, Artificial Sequence
  Description of Artificial Sequence: Synthetic oligonucleotide
  Target: LAMA2; (+) strand; PAM type: YTN; PAM sequence: TTA
aaaaaaaagaacaataatac

SEQ ID NO: 334313 - DNA, 20 bp, Artificial Sequence
  Description of Artificial Sequence: Synthetic oligonucleotide
  Target: LAMA2; (+) strand; PAM type: YTN; PAM sequence: CTG
ttaaaaaatctgtgaggaaa

SEQ ID NO: 334314 - DNA, 20 bp, Artificial Sequence
  Description of Artificial Sequence: Synthetic oligonucleotide
  Target: LAMA2; (+) strand; PAM type: YTN; PAM sequence: TTA
aaaaatctgtgaggaaagag

SEQ ID NO: 334315 - DNA, 20 bp, Artificial Sequence
  Description of Artificial Sequence: Synthetic oligonucleotide
  Target: LAMA2; (+) strand; PAM type: YTN; PAM sequence: CTG
tgaggaaagagctgttaaaa

SEQ ID NO: 334316 - DNA, 20 bp, Artificial Sequence
  Description of Artificial Sequence: Synthetic oligonucleotide
  Target: LAMA2; (+) strand; PAM type: YTN; PAM sequence: CTG
ttaaaatgttgaaaccacat

SEQ ID NO: 334317 - DNA, 20 bp, Artificial Sequence
  Description of Artificial Sequence: Synthetic oligonucleotide
  Target: LAMA2; (+) strand; PAM type: YTN; PAM sequence: TTA
aaatgttgaaaccacatgaa

SEQ ID NO: 334318 - DNA, 20 bp, Artificial Sequence
  Description of Artificial Sequence: Synthetic oligonucleotide
  Target: LAMA2; (+) strand; PAM type: YTN; PAM sequence: TTG
aaaccacatgaattctgtta

SEQ ID NO: 334319 - DNA, 20 bp, Artificial Sequence
  Description of Artificial Sequence: Synthetic oligonucleotide
  Target: LAMA2; (+) strand; PAM type: YTN; PAM sequence: TTC
tgttatggaaagtctgaaca

SEQ ID NO: 334320 - DNA, 20 bp, Artificial Sequence
  Description of Artificial Sequence: Synthetic oligonucleotide
  Target: LAMA2; (+) strand; PAM type: YTN; PAM sequence: CTG
ttatggaaagtctgaacaag

SEQ ID NO: 334321 - DNA, 20 bp, Artificial Sequence
  Description of Artificial Sequence: Synthetic oligonucleotide
  Target: LAMA2; (+) strand; PAM type: YTN; PAM sequence: TTA
tggaaagtctgaacaagact

SEQ ID NO: 334322 - DNA, 20 bp, Artificial Sequence
  Description of Artificial Sequence: Synthetic oligonucleotide
  Target: LAMA2; (+) strand; PAM type: YTN; PAM sequence: CTG
aacaagactttctaaaatag

SEQ ID NO: 334323 - DNA, 20 bp, Artificial Sequence
  Description of Artificial Sequence: Synthetic oligonucleotide
  Target: LAMA2; (+) strand; PAM type: YTN; PAM sequence: CTT
tctaaaatagattgaatgtg

SEQ ID NO: 334324 - DNA, 20 bp, Artificial Sequence
  Description of Artificial Sequence: Synthetic oligonucleotide
  Target: LAMA2; (+) strand; PAM type: YTN; PAM sequence: TTT
ctaaaatagattgaatgtgg

SEQ ID NO: 334325 - DNA, 20 bp, Artificial Sequence
  Description of Artificial Sequence: Synthetic oligonucleotide
  Target: LAMA2; (+) strand; PAM type: YTN; PAM sequence: TTC
taaaatagattgaatgtggg

SEQ ID NO: 334326 - DNA, 20 bp, Artificial Sequence
  Description of Artificial Sequence: Synthetic oligonucleotide
  Target: LAMA2; (+) strand; PAM type: YTN; PAM sequence: CTA
aaatagattgaatgtgggca

SEQ ID NO: 334327 - DNA, 20 bp, Artificial Sequence
  Description of Artificial Sequence: Synthetic oligonucleotide
  Target: LAMA2; (+) strand; PAM type: YTN; PAM sequence: TTG
aatgtgggcagttttcacag

SEQ ID NO: 334328 - DNA, 20 bp, Artificial Sequence
  Description of Artificial Sequence: Synthetic oligonucleotide
  Target: LAMA2; (+) strand; PAM type: YTN; PAM sequence: TTT
tcacagctgcctgatgactt

SEQ ID NO: 334329 - DNA, 20 bp, Artificial Sequence
  Description of Artificial Sequence: Synthetic oligonucleotide
  Target: LAMA2; (+) strand; PAM type: YTN; PAM sequence: TTT
cacagctgcctgatgacttc

SEQ ID NO: 334330 - DNA, 20 bp, Artificial Sequence
  Description of Artificial Sequence: Synthetic oligonucleotide
  Target: LAMA2; (+) strand; PAM type: YTN; PAM sequence: TTC
acagctgcctgatgacttcc

SEQ ID NO: 334331 - DNA, 20 bp, Artificial Sequence
  Description of Artificial Sequence: Synthetic oligonucleotide
  Target: LAMA2; (+) strand; PAM type: YTN; PAM sequence: CTG
cctgatgacttccacacaca

SEQ ID NO: 334332 - DNA, 20 bp, Artificial Sequence
  Description of Artificial Sequence: Synthetic oligonucleotide
  Target: LAMA2; (+) strand; PAM type: YTN; PAM sequence: CTG
atgacttccacacacaaaac

SEQ ID NO: 334333 - DNA, 20 bp, Artificial Sequence
  Description of Artificial Sequence: Synthetic oligonucleotide
  Target: LAMA2; (+) strand; PAM type: YTN; PAM sequence: CTT
ccacacacaaaacatccaca

SEQ ID NO: 334334 - DNA, 20 bp, Artificial Sequence
  Description of Artificial Sequence: Synthetic oligonucleotide
  Target: LAMA2; (+) strand; PAM type: YTN; PAM sequence: TTC
cacacacaaaacatccacat

SEQ ID NO: 334335 - DNA, 20 bp, Artificial Sequence
  Description of Artificial Sequence: Synthetic oligonucleotide
  Target: LAMA2; (+) strand; PAM type: YTN; PAM sequence: TTT
catccttttggtggaatact

SEQ ID NO: 334336 - DNA, 20 bp, Artificial Sequence
  Description of Artificial Sequence: Synthetic oligonucleotide
  Target: LAMA2; (+) strand; PAM type: YTN; PAM sequence: TTC
atccttttggtggaatactg

SEQ ID NO: 334337 - DNA, 20 bp, Artificial Sequence
  Description of Artificial Sequence: Synthetic oligonucleotide
  Target: LAMA2; (+) strand; PAM type: YTN; PAM sequence: CTT
ttggtggaatactgtgtatt

SEQ ID NO: 334338 - DNA, 20 bp, Artificial Sequence
  Description of Artificial Sequence: Synthetic oligonucleotide
  Target: LAMA2; (+) strand; PAM type: YTN; PAM sequence: TTT
tggtggaatactgtgtattt

SEQ ID NO: 334339 - DNA, 20 bp, Artificial Sequence
  Description of Artificial Sequence: Synthetic oligonucleotide
  Target: LAMA2; (+) strand; PAM type: YTN; PAM sequence: TTT
ggtggaatactgtgtatttt

SEQ ID NO: 334340 - DNA, 20 bp, Artificial Sequence
  Description of Artificial Sequence: Synthetic oligonucleotide
  Target: LAMA2; (+) strand; PAM type: YTN; PAM sequence: TTG
gtggaatactgtgtattttc

SEQ ID NO: 334341 - DNA, 20 bp, Artificial Sequence
  Description of Artificial Sequence: Synthetic oligonucleotide
  Target: LAMA2; (+) strand; PAM type: YTN; PAM sequence: CTG
tgtattttccaattttattc

SEQ ID NO: 334342 - DNA, 20 bp, Artificial Sequence
  Description of Artificial Sequence: Synthetic oligonucleotide
  Target: LAMA2; (+) strand; PAM type: YTN; PAM sequence: TTT
tccaattttattcttagagt

SEQ ID NO: 334343 - DNA, 20 bp, Artificial Sequence
  Description of Artificial Sequence: Synthetic oligonucleotide
  Target: LAMA2; (+) strand; PAM type: YTN; PAM sequence: TTT
ccaattttattcttagagtt

SEQ ID NO: 334344 - DNA, 20 bp, Artificial Sequence
  Description of Artificial Sequence: Synthetic oligonucleotide
  Target: LAMA2; (+) strand; PAM type: YTN; PAM sequence: TTC
caattttattcttagagttt

SEQ ID NO: 334345 - DNA, 20 bp, Artificial Sequence
  Description of Artificial Sequence: Synthetic oligonucleotide
  Target: LAMA2; (+) strand; PAM type: YTN; PAM sequence: TTT
tattcttagagtttaatttt

SEQ ID NO: 334346 - DNA, 20 bp, Artificial Sequence
  Description of Artificial Sequence: Synthetic oligonucleotide
  Target: LAMA2; (+) strand; PAM type: YTN; PAM sequence: TTT
attcttagagtttaattttt

SEQ ID NO: 334347 - DNA, 20 bp, Artificial Sequence
  Description of Artificial Sequence: Synthetic oligonucleotide
  Target: LAMA2; (+) strand; PAM type: YTN; PAM sequence: TTA
ttcttagagtttaatttttt

SEQ ID NO: 334348 - DNA, 20 bp, Artificial Sequence
  Description of Artificial Sequence: Synthetic oligonucleotide
  Target: LAMA2; (+) strand; PAM type: YTN; PAM sequence: TTC
ttagagtttaattttttact

SEQ ID NO: 334349 - DNA, 20 bp, Artificial Sequence
  Description of Artificial Sequence: Synthetic oligonucleotide
  Target: LAMA2; (+) strand; PAM type: YTN; PAM sequence: CTT
agagtttaattttttactta

SEQ ID NO: 334350 - DNA, 20 bp, Artificial Sequence
  Description of Artificial Sequence: Synthetic oligonucleotide
  Target: LAMA2; (+) strand; PAM type: YTN; PAM sequence: TTA
gagtttaattttttacttac

SEQ ID NO: 334351 - DNA, 20 bp, Artificial Sequence
  Description of Artificial Sequence: Synthetic oligonucleotide
  Target: LAMA2; (+) strand; PAM type: YTN; PAM sequence: TTT
aattttttacttacatatta

SEQ ID NO: 334352 - DNA, 20 bp, Artificial Sequence
  Description of Artificial Sequence: Synthetic oligonucleotide
  Target: LAMA2; (+) strand; PAM type: YTN; PAM sequence: TTA
attttttacttacatattat

SEQ ID NO: 334353 - DNA, 20 bp, Artificial Sequence
  Description of Artificial Sequence: Synthetic oligonucleotide
  Target: LAMA2; (+) strand; PAM type: YTN; PAM sequence: TTT
tttacttacatattatgctt

SEQ ID NO: 334354 - DNA, 20 bp, Artificial Sequence
  Description of Artificial Sequence: Synthetic oligonucleotide
  Target: LAMA2; (+) strand; PAM type: YTN; PAM sequence: TTT
ttacttacatattatgctta

SEQ ID NO: 334355 - DNA, 20 bp, Artificial Sequence
  Description of Artificial Sequence: Synthetic oligonucleotide
  Target: LAMA2; (+) strand; PAM type: YTN; PAM sequence: TTT
tacttacatattatgcttat

SEQ ID NO: 334356 - DNA, 20 bp, Artificial Sequence
  Description of Artificial Sequence: Synthetic oligonucleotide
  Target: LAMA2; (+) strand; PAM type: YTN; PAM sequence: TTT
acttacatattatgcttatg

SEQ ID NO: 334357 - DNA, 20 bp, Artificial Sequence
  Description of Artificial Sequence: Synthetic oligonucleotide
  Target: LAMA2; (+) strand; PAM type: YTN; PAM sequence: TTA
cttacatattatgcttatgt

SEQ ID NO: 334358 - DNA, 20 bp, Artificial Sequence
  Description of Artificial Sequence: Synthetic oligonucleotide
  Target: LAMA2; (+) strand; PAM type: YTN; PAM sequence: CTT
acatattatgcttatgtata

SEQ ID NO: 334359 - DNA, 20 bp, Artificial Sequence
  Description of Artificial Sequence: Synthetic oligonucleotide
  Target: LAMA2; (+) strand; PAM type: YTN; PAM sequence: TTA
catattatgcttatgtatat

SEQ ID NO: 334360 - DNA, 20 bp, Artificial Sequence
  Description of Artificial Sequence: Synthetic oligonucleotide
  Target: LAMA2; (+) strand; PAM type: YTN; PAM sequence: TTA
tgcttatgtatatcatattt

SEQ ID NO: 334361 - DNA, 20 bp, Artificial Sequence
  Description of Artificial Sequence: Synthetic oligonucleotide
  Target: LAMA2; (+) strand; PAM type: YTN; PAM sequence: CTT
atgtatatcatatttgttat

SEQ ID NO: 334362 - DNA, 20 bp, Artificial Sequence
  Description of Artificial Sequence: Synthetic oligonucleotide
  Target: LAMA2; (+) strand; PAM type: YTN; PAM sequence: TTA
tgtatatcatatttgttata

SEQ ID NO: 334363 - DNA, 20 bp, Artificial Sequence
  Description of Artificial Sequence: Synthetic oligonucleotide
  Target: LAMA2; (+) strand; PAM type: YTN; PAM sequence: TTT
gttatatatattatatataa

SEQ ID NO: 334364 - DNA, 20 bp, Artificial Sequence
  Description of Artificial Sequence: Synthetic oligonucleotide
  Target: LAMA2; (+) strand; PAM type: YTN; PAM sequence: TTG
ttatatatattatatataac

SEQ ID NO: 334365 - DNA, 20 bp, Artificial Sequence
  Description of Artificial Sequence: Synthetic oligonucleotide
  Target: LAMA2; (+) strand; PAM type: YTN; PAM sequence: TTA
tatatattatatataactaa

SEQ ID NO: 334366 - DNA, 20 bp, Artificial Sequence
  Description of Artificial Sequence: Synthetic oligonucleotide
  Target: LAMA2; (+) strand; PAM type: YTN; PAM sequence: TTA
tatataactaatatacaatt

SEQ ID NO: 334367 - DNA, 20 bp, Artificial Sequence
  Description of Artificial Sequence: Synthetic oligonucleotide
  Target: LAMA2; (+) strand; PAM type: YTN; PAM sequence: CTA
atatacaattatattattta

SEQ ID NO: 334368 - DNA, 20 bp, Artificial Sequence
  Description of Artificial Sequence: Synthetic oligonucleotide
  Target: LAMA2; (+) strand; PAM type: YTN; PAM sequence: TTA
tattatttatttaaaaataa

SEQ ID NO: 334369 - DNA, 20 bp, Artificial Sequence
  Description of Artificial Sequence: Synthetic oligonucleotide
  Target: LAMA2; (+) strand; PAM type: YTN; PAM sequence: TTA
tttatttaaaaataaggaat

SEQ ID NO: 334370 - DNA, 20 bp, Artificial Sequence
  Description of Artificial Sequence: Synthetic oligonucleotide
  Target: LAMA2; (+) strand; PAM type: YTN; PAM sequence: TTT
atttaaaaataaggaattaa

SEQ ID NO: 334371 - DNA, 20 bp, Artificial Sequence
  Description of Artificial Sequence: Synthetic oligonucleotide
  Target: LAMA2; (+) strand; PAM type: YTN; PAM sequence: TTA
tttaaaaataaggaattaaa

SEQ ID NO: 334372 - DNA, 20 bp, Artificial Sequence
  Description of Artificial Sequence: Synthetic oligonucleotide
  Target: LAMA2; (+) strand; PAM type: YTN; PAM sequence: TTT
aaaaataaggaattaaaaac

SEQ ID NO: 334373 - DNA, 20 bp, Artificial Sequence
  Description of Artificial Sequence: Synthetic oligonucleotide
  Target: LAMA2; (+) strand; PAM type: YTN; PAM sequence: TTA
aaaataaggaattaaaaaca

SEQ ID NO: 334374 - DNA, 20 bp, Artificial Sequence
  Description of Artificial Sequence: Synthetic oligonucleotide
  Target: LAMA2; (+) strand; PAM type: YTN; PAM sequence: TTA
aaaacaattatattatttgt

SEQ ID NO: 334375 - DNA, 20 bp, Artificial Sequence
  Description of Artificial Sequence: Synthetic oligonucleotide
  Target: LAMA2; (+) strand; PAM type: YTN; PAM sequence: TTA
tattatttgtttttaaataa

SEQ ID NO: 334376 - DNA, 20 bp, Artificial Sequence
  Description of Artificial Sequence: Synthetic oligonucleotide
  Target: LAMA2; (+) strand; PAM type: YTN; PAM sequence: TTA
tttgtttttaaataaggaat

SEQ ID NO: 334377 - DNA, 20 bp, Artificial Sequence
  Description of Artificial Sequence: Synthetic oligonucleotide
  Target: LAMA2; (+) strand; PAM type: YTN; PAM sequence: TTT
gtttttaaataaggaattac

SEQ ID NO: 334378 - DNA, 20 bp, Artificial Sequence
  Description of Artificial Sequence: Synthetic oligonucleotide
  Target: LAMA2; (+) strand; PAM type: YTN; PAM sequence: TTG
tttttaaataaggaattaca

SEQ ID NO: 334379 - DNA, 20 bp, Artificial Sequence
  Description of Artificial Sequence: Synthetic oligonucleotide
  Target: LAMA2; (+) strand; PAM type: YTN; PAM sequence: TTT
ttaaataaggaattacaaaa

SEQ ID NO: 334380 - DNA, 20 bp, Artificial Sequence
  Description of Artificial Sequence: Synthetic oligonucleotide
  Target: LAMA2; (+) strand; PAM type: YTN; PAM sequence: TTT
taaataaggaattacaaaat

SEQ ID NO: 334381 - DNA, 20 bp, Artificial Sequence
  Description of Artificial Sequence: Synthetic oligonucleotide
  Target: LAMA2; (+) strand; PAM type: YTN; PAM sequence: TTT
aaataaggaattacaaaata

SEQ ID NO: 334382 - DNA, 20 bp, Artificial Sequence
  Description of Artificial Sequence: Synthetic oligonucleotide
  Target: LAMA2; (+) strand; PAM type: YTN; PAM sequence: TTA
aataaggaattacaaaataa

SEQ ID NO: 334383 - DNA, 20 bp, Artificial Sequence
  Description of Artificial Sequence: Synthetic oligonucleotide
  Target: LAMA2; (+) strand; PAM type: YTN; PAM sequence: TTA
caaaataatgaagagaccgt

SEQ ID NO: 334384 - DNA, 20 bp, Artificial Sequence
  Description of Artificial Sequence: Synthetic oligonucleotide
  Target: LAMA2; (+) strand; PAM type: YTN; PAM sequence: TTT
attatagatcttgaaactgt

SEQ ID NO: 334385 - DNA, 20 bp, Artificial Sequence
  Description of Artificial Sequence: Synthetic oligonucleotide
  Target: LAMA2; (+) strand; PAM type: YTN; PAM sequence: TTA
ttatagatcttgaaactgtg

SEQ ID NO: 334386 - DNA, 20 bp, Artificial Sequence
  Description of Artificial Sequence: Synthetic oligonucleotide
  Target: LAMA2; (+) strand; PAM type: YTN; PAM sequence: TTA
tagatcttgaaactgtgact

SEQ ID NO: 334387 - DNA, 20 bp, Artificial Sequence
  Description of Artificial Sequence: Synthetic oligonucleotide
  Target: LAMA2; (+) strand; PAM type: YTN; PAM sequence: CTT
gaaactgtgactaaaaaccc

SEQ ID NO: 334388 - DNA, 20 bp, Artificial Sequence
  Description of Artificial Sequence: Synthetic oligonucleotide
  Target: LAMA2; (+) strand; PAM type: YTN; PAM sequence: TTG
aaactgtgactaaaaacccc

SEQ ID NO: 334389 - DNA, 20 bp, Artificial Sequence
  Description of Artificial Sequence: Synthetic oligonucleotide
  Target: LAMA2; (+) strand; PAM type: YTN; PAM sequence: CTG
tgactaaaaaccccatgcac

SEQ ID NO: 334390 - DNA, 20 bp, Artificial Sequence
  Description of Artificial Sequence: Synthetic oligonucleotide
  Target: LAMA2; (+) strand; PAM type: YTN; PAM sequence: CTA
aaaaccccatgcacagagaa

SEQ ID NO: 334391 - DNA, 20 bp, Artificial Sequence
  Description of Artificial Sequence: Synthetic oligonucleotide
  Target: LAMA2; (+) strand; PAM type: YTN; PAM sequence: TTC
ttgagtcaaatggcttcatt

SEQ ID NO: 334392 - DNA, 20 bp, Artificial Sequence
  Description of Artificial Sequence: Synthetic oligonucleotide
  Target: LAMA2; (+) strand; PAM type: YTN; PAM sequence: CTT
gagtcaaatggcttcattga

SEQ ID NO: 334393 - DNA, 20 bp, Artificial Sequence
  Description of Artificial Sequence: Synthetic oligonucleotide
  Target: LAMA2; (+) strand; PAM type: YTN; PAM sequence: TTG
agtcaaatggcttcattgat

SEQ ID NO: 334394 - DNA, 20 bp, Artificial Sequence
  Description of Artificial Sequence: Synthetic oligonucleotide
  Target: LAMA2; (+) strand; PAM type: YTN; PAM sequence: CTT
cattgatgaatagaagttag

SEQ ID NO: 334395 - DNA, 20 bp, Artificial Sequence
  Description of Artificial Sequence: Synthetic oligonucleotide
  Target: LAMA2; (+) strand; PAM type: YTN; PAM sequence: TTC
attgatgaatagaagttaga

SEQ ID NO: 334396 - DNA, 20 bp, Artificial Sequence
  Description of Artificial Sequence: Synthetic oligonucleotide
  Target: LAMA2; (+) strand; PAM type: YTN; PAM sequence: TTG
atgaatagaagttagaatac

SEQ ID NO: 334397 - DNA, 20 bp, Artificial Sequence
  Description of Artificial Sequence: Synthetic oligonucleotide
  Target: LAMA2; (+) strand; PAM type: YTN; PAM sequence: TTA
gaatactggttattgttaca

SEQ ID NO: 334398 - DNA, 20 bp, Artificial Sequence
  Description of Artificial Sequence: Synthetic oligonucleotide
  Target: LAMA2; (+) strand; PAM type: YTN; PAM sequence: CTG
gttattgttacaaggagagg

SEQ ID NO: 334399 - DNA, 20 bp, Artificial Sequence
  Description of Artificial Sequence: Synthetic oligonucleotide
  Target: LAMA2; (+) strand; PAM type: YTN; PAM sequence: TTA
ttgttacaaggagagggaag

SEQ ID NO: 334400 - DNA, 20 bp, Artificial Sequence
  Description of Artificial Sequence: Synthetic oligonucleotide
  Target: LAMA2; (+) strand; PAM type: YTN; PAM sequence: TTG
ttacaaggagagggaagata

SEQ ID NO: 334401 - DNA, 20 bp, Artificial Sequence
  Description of Artificial Sequence: Synthetic oligonucleotide
  Target: LAMA2; (+) strand; PAM type: YTN; PAM sequence: TTA
caaggagagggaagataatg

SEQ ID NO: 334402 - DNA, 20 bp, Artificial Sequence
  Description of Artificial Sequence: Synthetic oligonucleotide
  Target: LAMA2; (+) strand; PAM type: YTN; PAM sequence: CTG
ggagagggtatgaggaaagt

SEQ ID NO: 334403 - DNA, 20 bp, Artificial Sequence
  Description of Artificial Sequence: Synthetic oligonucleotide
  Target: LAMA2; (+) strand; PAM type: YTN; PAM sequence: TTT
catttcttatttttgattat

SEQ ID NO: 334404 - DNA, 20 bp, Artificial Sequence
  Description of Artificial Sequence: Synthetic oligonucleotide
  Target: LAMA2; (+) strand; PAM type: YTN; PAM sequence: TTC
atttcttatttttgattata

SEQ ID NO: 334405 - DNA, 20 bp, Artificial Sequence
  Description of Artificial Sequence: Synthetic oligonucleotide
  Target: LAMA2; (+) strand; PAM type: YTN; PAM sequence: TTT
cttatttttgattatataat

SEQ ID NO: 334406 - DNA, 20 bp, Artificial Sequence
  Description of Artificial Sequence: Synthetic oligonucleotide
  Target: LAMA2; (+) strand; PAM type: YTN; PAM sequence: TTC
ttatttttgattatataatt

SEQ ID NO: 334407 - DNA, 20 bp, Artificial Sequence
  Description of Artificial Sequence: Synthetic oligonucleotide
  Target: LAMA2; (+) strand; PAM type: YTN; PAM sequence: CTT
atttttgattatataattgt

SEQ ID NO: 334408 - DNA, 20 bp, Artificial Sequence
  Description of Artificial Sequence: Synthetic oligonucleotide
  Target: LAMA2; (+) strand; PAM type: YTN; PAM sequence: TTA
tttttgattatataattgta

SEQ ID NO: 334409 - DNA, 20 bp, Artificial Sequence
  Description of Artificial Sequence: Synthetic oligonucleotide
  Target: LAMA2; (+) strand; PAM type: YTN; PAM sequence: TTT
ttgattatataattgtacaa

SEQ ID NO: 334410 - DNA, 20 bp, Artificial Sequence
  Description of Artificial Sequence: Synthetic oligonucleotide
  Target: LAMA2; (+) strand; PAM type: YTN; PAM sequence: TTT
tgattatataattgtacaat

SEQ ID NO: 334411 - DNA, 20 bp, Artificial Sequence
  Description of Artificial Sequence: Synthetic oligonucleotide
  Target: LAMA2; (+) strand; PAM type: YTN; PAM sequence: TTT
gattatataattgtacaata

SEQ ID NO: 334412 - DNA, 20 bp, Artificial Sequence
  Description of Artificial Sequence: Synthetic oligonucleotide
  Target: LAMA2; (+) strand; PAM type: YTN; PAM sequence: TTG
attatataattgtacaataa

SEQ ID NO: 334413 - DNA, 20 bp, Artificial Sequence
  Description of Artificial Sequence: Synthetic oligonucleotide
  Target: LAMA2; (+) strand; PAM type: YTN; PAM sequence: TTA
tataattgtacaataataat

SEQ ID NO: 334414 - DNA, 20 bp, Artificial Sequence
  Description of Artificial Sequence: Synthetic oligonucleotide
  Target: LAMA2; (+) strand; PAM type: YTN; PAM sequence: TTG
tacaataataatgtgttagt

SEQ ID NO: 334415 - DNA, 20 bp, Artificial Sequence
  Description of Artificial Sequence: Synthetic oligonucleotide
  Target: LAMA2; (+) strand; PAM type: YTN; PAM sequence: TTA
gtacatagaactaatataat

SEQ ID NO: 334416 - DNA, 20 bp, Artificial Sequence
  Description of Artificial Sequence: Synthetic oligonucleotide
  Target: LAMA2; (+) strand; PAM type: YTN; PAM sequence: CTA
atataattgtaaataagtgt

SEQ ID NO: 334417 - DNA, 20 bp, Artificial Sequence
  Description of Artificial Sequence: Synthetic oligonucleotide
  Target: LAMA2; (+) strand; PAM type: YTN; PAM sequence: TTG
taaataagtgtgtttatata

SEQ ID NO: 334418 - DNA, 20 bp, Artificial Sequence
  Description of Artificial Sequence: Synthetic oligonucleotide
  Target: LAMA2; (+) strand; PAM type: YTN; PAM sequence: TTT
atatataataaaatatacaa

SEQ ID NO: 334419 - DNA, 20 bp, Artificial Sequence
  Description of Artificial Sequence: Synthetic oligonucleotide
  Target: LAMA2; (+) strand; PAM type: YTN; PAM sequence: TTA
tatataataaaatatacaaa

SEQ ID NO: 334420 - DNA, 20 bp, Artificial Sequence
  Description of Artificial Sequence: Synthetic oligonucleotide
  Target: LAMA2; (+) strand; PAM type: YTN; PAM sequence: TTG
tataatgtataattatatac

SEQ ID NO: 334421 - DNA, 20 bp, Artificial Sequence
  Description of Artificial Sequence: Synthetic oligonucleotide
  Target: LAMA2; (+) strand; PAM type: YTN; PAM sequence: TTA
tatacaatataataaaaatg

SEQ ID NO: 334422 - DNA, 20 bp, Artificial Sequence
  Description of Artificial Sequence: Synthetic oligonucleotide
  Target: LAMA2; (+) strand; PAM type: YTN; PAM sequence: TTG
tataatatataattatatac

SEQ ID NO: 334423 - DNA, 20 bp, Artificial Sequence
  Description of Artificial Sequence: Synthetic oligonucleotide
  Target: LAMA2; (+) strand; PAM type: YTN; PAM sequence: TTA
tatacaattatattaattat

SEQ ID NO: 334424 - DNA, 20 bp, Artificial Sequence
  Description of Artificial Sequence: Synthetic oligonucleotide
  Target: LAMA2; (+) strand; PAM type: YTN; PAM sequence: TTA
tattaattatatgtactaat

SEQ ID NO: 334425 - DNA, 20 bp, Artificial Sequence
  Description of Artificial Sequence: Synthetic oligonucleotide
  Target: LAMA2; (+) strand; PAM type: YTN; PAM sequence: TTA
attatatgtactaatgtatt

SEQ ID NO: 334426 - DNA, 20 bp, Artificial Sequence
  Description of Artificial Sequence: Synthetic oligonucleotide
  Target: LAMA2; (+) strand; PAM type: YTN; PAM sequence: TTA
tatgtactaatgtattagct

SEQ ID NO: 334427 - DNA, 20 bp, Artificial Sequence
  Description of Artificial Sequence: Synthetic oligonucleotide
  Target: LAMA2; (+) strand; PAM type: YTN; PAM sequence: CTA
atgtattagctatatgtatt

SEQ ID NO: 334428 - DNA, 20 bp, Artificial Sequence
  Description of Artificial Sequence: Synthetic oligonucleotide
  Target: LAMA2; (+) strand; PAM type: YTN; PAM sequence: TTA
gctatatgtatttatatgta

SEQ ID NO: 334429 - DNA, 20 bp, Artificial Sequence
  Description of Artificial Sequence: Synthetic oligonucleotide
  Target: LAMA2; (+) strand; PAM type: YTN; PAM sequence: CTA
tatgtatttatatgtaccta

SEQ ID NO: 334430 - DNA, 20 bp, Artificial Sequence
  Description of Artificial Sequence: Synthetic oligonucleotide
  Target: LAMA2; (+) strand; PAM type: YTN; PAM sequence: TTT
atatgtacctatatataaga

SEQ ID NO: 334431 - DNA, 20 bp, Artificial Sequence
  Description of Artificial Sequence: Synthetic oligonucleotide
  Target: LAMA2; (+) strand; PAM type: YTN; PAM sequence: TTA
tatgtacctatatataagac

SEQ ID NO: 334432 - DNA, 20 bp, Artificial Sequence
  Description of Artificial Sequence: Synthetic oligonucleotide
  Target: LAMA2; (+) strand; PAM type: YTN; PAM sequence: CTA
tatataagactttttctaga

SEQ ID NO: 334433 - DNA, 20 bp, Artificial Sequence
  Description of Artificial Sequence: Synthetic oligonucleotide
  Target: LAMA2; (+) strand; PAM type: YTN; PAM sequence: CTT
tttctagaaattgactacat

SEQ ID NO: 334434 - DNA, 20 bp, Artificial Sequence
  Description of Artificial Sequence: Synthetic oligonucleotide
  Target: LAMA2; (+) strand; PAM type: YTN; PAM sequence: TTT
ttctagaaattgactacata

SEQ ID NO: 334435 - DNA, 20 bp, Artificial Sequence
  Description of Artificial Sequence: Synthetic oligonucleotide
  Target: LAMA2; (+) strand; PAM type: YTN; PAM sequence: TTT
tctagaaattgactacatat

SEQ ID NO: 334436 - DNA, 20 bp, Artificial Sequence
  Description of Artificial Sequence: Synthetic oligonucleotide
  Target: LAMA2; (+) strand; PAM type: YTN; PAM sequence: TTT
ctagaaattgactacatatt

SEQ ID NO: 334437 - DNA, 20 bp, Artificial Sequence
  Description of Artificial Sequence: Synthetic oligonucleotide
  Target: LAMA2; (+) strand; PAM type: YTN; PAM sequence: TTC
tagaaattgactacatattt

SEQ ID NO: 334438 - DNA, 20 bp, Artificial Sequence
  Description of Artificial Sequence: Synthetic oligonucleotide
  Target: LAMA2; (+) strand; PAM type: YTN; PAM sequence: CTA
gaaattgactacatatttga

SEQ ID NO: 334439 - DNA, 20 bp, Artificial Sequence
  Description of Artificial Sequence: Synthetic oligonucleotide
  Target: LAMA2; (+) strand; PAM type: YTN; PAM sequence: TTG
actacatatttgaattgtga

SEQ ID NO: 334440 - DNA, 20 bp, Artificial Sequence
  Description of Artificial Sequence: Synthetic oligonucleotide
  Target: LAMA2; (+) strand; PAM type: YTN; PAM sequence: CTA
catatttgaattgtgagaca

SEQ ID NO: 334441 - DNA, 20 bp, Artificial Sequence
  Description of Artificial Sequence: Synthetic oligonucleotide
  Target: LAMA2; (+) strand; PAM type: YTN; PAM sequence: TTT
gaattgtgagacagcatgta

SEQ ID NO: 334442 - DNA, 20 bp, Artificial Sequence
  Description of Artificial Sequence: Synthetic oligonucleotide
  Target: LAMA2; (+) strand; PAM type: YTN; PAM sequence: TTG
aattgtgagacagcatgtat

SEQ ID NO: 334443 - DNA, 20 bp, Artificial Sequence
  Description of Artificial Sequence: Synthetic oligonucleotide
  Target: LAMA2; (+) strand; PAM type: YTN; PAM sequence: TTG
tgagacagcatgtatgtttt

SEQ ID NO: 334444 - DNA, 20 bp, Artificial Sequence
  Description of Artificial Sequence: Synthetic oligonucleotide
  Target: LAMA2; (+) strand; PAM type: YTN; PAM sequence: TTT
tgattcatagataagatatg

SEQ ID NO: 334445 - DNA, 20 bp, Artificial Sequence
  Description of Artificial Sequence: Synthetic oligonucleotide
  Target: LAMA2; (+) strand; PAM type: YTN; PAM sequence: TTT
gattcatagataagatatgt

SEQ ID NO: 334446 - DNA, 20 bp, Artificial Sequence
  Description of Artificial Sequence: Synthetic oligonucleotide
  Target: LAMA2; (+) strand; PAM type: YTN; PAM sequence: TTG
attcatagataagatatgtt

SEQ ID NO: 334447 - DNA, 20 bp, Artificial Sequence
  Description of Artificial Sequence: Synthetic oligonucleotide
  Target: LAMA2; (+) strand; PAM type: YTN; PAM sequence: TTC
atagataagatatgtttcca

SEQ ID NO: 334448 - DNA, 20 bp, Artificial Sequence
  Description of Artificial Sequence: Synthetic oligonucleotide
  Target: LAMA2; (+) strand; PAM type: YTN; PAM sequence: TTT
ccaatattacccatatctct

SEQ ID NO: 334449 - DNA, 20 bp, Artificial Sequence
  Description of Artificial Sequence: Synthetic oligonucleotide
  Target: LAMA2; (+) strand; PAM type: YTN; PAM sequence: TTC
caatattacccatatctcta

SEQ ID NO: 334450 - DNA, 20 bp, Artificial Sequence
  Description of Artificial Sequence: Synthetic oligonucleotide
  Target: LAMA2; (+) strand; PAM type: YTN; PAM sequence: TTA
cccatatctctaaaatacaa

SEQ ID NO: 334451 - DNA, 20 bp, Artificial Sequence
  Description of Artificial Sequence: Synthetic oligonucleotide
  Target: LAMA2; (+) strand; PAM type: YTN; PAM sequence: CTC
taaaatacaaacatggcaaa

SEQ ID NO: 334452 - DNA, 20 bp, Artificial Sequence
  Description of Artificial Sequence: Synthetic oligonucleotide
  Target: LAMA2; (+) strand; PAM type: YTN; PAM sequence: CTA
aaatacaaacatggcaaaaa

SEQ ID NO: 334453 - DNA, 20 bp, Artificial Sequence
  Description of Artificial Sequence: Synthetic oligonucleotide
  Target: LAMA2; (+) strand; PAM type: YTN; PAM sequence: CTG
gagtgagactaaggagaaag

SEQ ID NO: 334454 - DNA, 20 bp, Artificial Sequence
  Description of Artificial Sequence: Synthetic oligonucleotide
  Target: LAMA2; (+) strand; PAM type: YTN; PAM sequence: CTA
aggagaaaggaggagctata

SEQ ID NO: 334455 - DNA, 20 bp, Artificial Sequence
  Description of Artificial Sequence: Synthetic oligonucleotide
  Target: LAMA2; (+) strand; PAM type: YTN; PAM sequence: CTA
taagtgtgcccagattccat

SEQ ID NO: 334456 - DNA, 20 bp, Artificial Sequence
  Description of Artificial Sequence: Synthetic oligonucleotide
  Target: LAMA2; (+) strand; PAM type: YTN; PAM sequence: TTC
catttctttacctatgactt

SEQ ID NO: 334457 - DNA, 20 bp, Artificial Sequence
  Description of Artificial Sequence: Synthetic oligonucleotide
  Target: LAMA2; (+) strand; PAM type: YTN; PAM sequence: TTT
ctttacctatgacttatgcg

SEQ ID NO: 334458 - DNA, 20 bp, Artificial Sequence
  Description of Artificial Sequence: Synthetic oligonucleotide
  Target: LAMA2; (+) strand; PAM type: YTN; PAM sequence: TTC
tttacctatgacttatgcgt

SEQ ID NO: 334459 - DNA, 20 bp, Artificial Sequence
  Description of Artificial Sequence: Synthetic oligonucleotide
  Target: LAMA2; (+) strand; PAM type: YTN; PAM sequence: CTT
tacctatgacttatgcgttg

SEQ ID NO: 334460 - DNA, 20 bp, Artificial Sequence
  Description of Artificial Sequence: Synthetic oligonucleotide
  Target: LAMA2; (+) strand; PAM type: YTN; PAM sequence: TTT
acctatgacttatgcgttgg

SEQ ID NO: 334461 - DNA, 20 bp, Artificial Sequence
  Description of Artificial Sequence: Synthetic oligonucleotide
  Target: LAMA2; (+) strand; PAM type: YTN; PAM sequence: TTA
cctatgacttatgcgttggt

SEQ ID NO: 334462 - DNA, 20 bp, Artificial Sequence
  Description of Artificial Sequence: Synthetic oligonucleotide
  Target: LAMA2; (+) strand; PAM type: YTN; PAM sequence: CTA
tgacttatgcgttggtacat

SEQ ID NO: 334463 - DNA, 20 bp, Artificial Sequence
  Description of Artificial Sequence: Synthetic oligonucleotide
  Target: LAMA2; (+) strand; PAM type: YTN; PAM sequence: CTT
atgcgttggtacatttacct

SEQ ID NO: 334464 - DNA, 20 bp, Artificial Sequence
  Description of Artificial Sequence: Synthetic oligonucleotide
  Target: LAMA2; (+) strand; PAM type: YTN; PAM sequence: TTA
tgcgttggtacatttacctt

SEQ ID NO: 334465 - DNA, 20 bp, Artificial Sequence
  Description of Artificial Sequence: Synthetic oligonucleotide
  Target: LAMA2; (+) strand; PAM type: YTN; PAM sequence: TTG
gtacatttaccttaggtaac

SEQ ID NO: 334466 - DNA, 20 bp, Artificial Sequence
  Description of Artificial Sequence: Synthetic oligonucleotide
  Target: LAMA2; (+) strand; PAM type: YTN; PAM sequence: TTT
accttaggtaacttgtccca

SEQ ID NO: 334467 - DNA, 20 bp, Artificial Sequence
  Description of Artificial Sequence: Synthetic oligonucleotide
  Target: LAMA2; (+) strand; PAM type: YTN; PAM sequence: TTA
ccttaggtaacttgtcccac

SEQ ID NO: 334468 - DNA, 20 bp, Artificial Sequence
  Description of Artificial Sequence: Synthetic oligonucleotide
  Target: LAMA2; (+) strand; PAM type: YTN; PAM sequence: CTT
aggtaacttgtcccactttt

SEQ ID NO: 334469 - DNA, 20 bp, Artificial Sequence
  Description of Artificial Sequence: Synthetic oligonucleotide
  Target: LAMA2; (+) strand; PAM type: YTN; PAM sequence: TTA
ggtaacttgtcccactttta

SEQ ID NO: 334470 - DNA, 20 bp, Artificial Sequence
  Description of Artificial Sequence: Synthetic oligonucleotide
  Target: LAMA2; (+) strand; PAM type: YTN; PAM sequence: CTT
gtcccacttttatgctcttc

SEQ ID NO: 334471 - DNA, 20 bp, Artificial Sequence
  Description of Artificial Sequence: Synthetic oligonucleotide
  Target: LAMA2; (+) strand; PAM type: YTN; PAM sequence: TTG
tcccacttttatgctcttca

SEQ ID NO: 334472 - DNA, 20 bp, Artificial Sequence
  Description of Artificial Sequence: Synthetic oligonucleotide
  Target: LAMA2; (+) strand; PAM type: YTN; PAM sequence: CTT
ttatgctcttcaatttggtc

SEQ ID NO: 334473 - DNA, 20 bp, Artificial Sequence
  Description of Artificial Sequence: Synthetic oligonucleotide
  Target: LAMA2; (+) strand; PAM type: YTN; PAM sequence: TTT
tatgctcttcaatttggtct

SEQ ID NO: 334474 - DNA, 20 bp, Artificial Sequence
  Description of Artificial Sequence: Synthetic oligonucleotide
  Target: LAMA2; (+) strand; PAM type: YTN; PAM sequence: TTT
atgctcttcaatttggtcta

SEQ ID NO: 334475 - DNA, 20 bp, Artificial Sequence
  Description of Artificial Sequence: Synthetic oligonucleotide
  Target: LAMA2; (+) strand; PAM type: YTN; PAM sequence: TTA
tgctcttcaatttggtctag

SEQ ID NO: 334476 - DNA, 20 bp, Artificial Sequence
  Description of Artificial Sequence: Synthetic oligonucleotide
  Target: LAMA2; (+) strand; PAM type: YTN; PAM sequence: CTC
ttcaatttggtctagtgtaa

SEQ ID NO: 334477 - DNA, 20 bp, Artificial Sequence
  Description of Artificial Sequence: Synthetic oligonucleotide
  Target: LAMA2; (+) strand; PAM type: YTN; PAM sequence: CTT
caatttggtctagtgtaaaa

SEQ ID NO: 334478 - DNA, 20 bp, Artificial Sequence
  Description of Artificial Sequence: Synthetic oligonucleotide
  Target: LAMA2; (+) strand; PAM type: YTN; PAM sequence: TTC
aatttggtctagtgtaaaat

SEQ ID NO: 334479 - DNA, 20 bp, Artificial Sequence
  Description of Artificial Sequence: Synthetic oligonucleotide
  Target: LAMA2; (+) strand; PAM type: YTN; PAM sequence: TTT
ggtctagtgtaaaatggagc

SEQ ID NO: 334480 - DNA, 20 bp, Artificial Sequence
  Description of Artificial Sequence: Synthetic oligonucleotide
  Target: LAMA2; (+) strand; PAM type: YTN; PAM sequence: TTG
gtctagtgtaaaatggagca

SEQ ID NO: 334481 - DNA, 20 bp, Artificial Sequence
  Description of Artificial Sequence: Synthetic oligonucleotide
  Target: LAMA2; (+) strand; PAM type: YTN; PAM sequence: CTA
gtgtaaaatggagcaaatag

SEQ ID NO: 334482 - DNA, 20 bp, Artificial Sequence
  Description of Artificial Sequence: Synthetic oligonucleotide
  Target: LAMA2; (+) strand; PAM type: YTN; PAM sequence: CTT
ccttattacgaggcatatta

SEQ ID NO: 334483 - DNA, 20 bp, Artificial Sequence
  Description of Artificial Sequence: Synthetic oligonucleotide
  Target: LAMA2; (+) strand; PAM type: YTN; PAM sequence: TTC
cttattacgaggcatattat

SEQ ID NO: 334484 - DNA, 20 bp, Artificial Sequence
  Description of Artificial Sequence: Synthetic oligonucleotide
  Target: LAMA2; (+) strand; PAM type: YTN; PAM sequence: CTT
attacgaggcatattataag

SEQ ID NO: 334485 - DNA, 20 bp, Artificial Sequence
  Description of Artificial Sequence: Synthetic oligonucleotide
  Target: LAMA2; (+) strand; PAM type: YTN; PAM sequence: TTA
ttacgaggcatattataagg

SEQ ID NO: 334486 - DNA, 20 bp, Artificial Sequence
  Description of Artificial Sequence: Synthetic oligonucleotide
  Target: LAMA2; (+) strand; PAM type: YTN; PAM sequence: TTA
cgaggcatattataaggata

SEQ ID NO: 334487 - DNA, 20 bp, Artificial Sequence
  Description of Artificial Sequence: Synthetic oligonucleotide
  Target: LAMA2; (+) strand; PAM type: YTN; PAM sequence: TTA
taaggataaagtgatgtgtt

SEQ ID NO: 334488 - DNA, 20 bp, Artificial Sequence
  Description of Artificial Sequence: Synthetic oligonucleotide
  Target: LAMA2; (+) strand; PAM type: YTN; PAM sequence: TTA
taggcaaagagcatagcaca

SEQ ID NO: 334489 - DNA, 20 bp, Artificial Sequence
  Description of Artificial Sequence: Synthetic oligonucleotide
  Target: LAMA2; (+) strand; PAM type: YTN; PAM sequence: CTG
ctgcactttaggtgatactc

SEQ ID NO: 334490 - DNA, 20 bp, Artificial Sequence
  Description of Artificial Sequence: Synthetic oligonucleotide
  Target: LAMA2; (+) strand; PAM type: YTN; PAM sequence: CTG
cactttaggtgatactcaga

SEQ ID NO: 334491 - DNA, 20 bp, Artificial Sequence
  Description of Artificial Sequence: Synthetic oligonucleotide
  Target: LAMA2; (+) strand; PAM type: YTN; PAM sequence: CTT
taggtgatactcagaaaata

SEQ ID NO: 334492 - DNA, 20 bp, Artificial Sequence
  Description of Artificial Sequence: Synthetic oligonucleotide
  Target: LAMA2; (+) strand; PAM type: YTN; PAM sequence: TTT
aggtgatactcagaaaatat

SEQ ID NO: 334493 - DNA, 20 bp, Artificial Sequence
  Description of Artificial Sequence: Synthetic oligonucleotide
  Target: LAMA2; (+) strand; PAM type: YTN; PAM sequence: TTA
ggtgatactcagaaaatatt

SEQ ID NO: 334494 - DNA, 20 bp, Artificial Sequence
  Description of Artificial Sequence: Synthetic oligonucleotide
  Target: LAMA2; (+) strand; PAM type: YTN; PAM sequence: CTC
agaaaatattacttttggtc

SEQ ID NO: 334495 - DNA, 20 bp, Artificial Sequence
  Description of Artificial Sequence: Synthetic oligonucleotide
  Target: LAMA2; (+) strand; PAM type: YTN; PAM sequence: TTA
cttttggtcttccacattga

SEQ ID NO: 334496 - DNA, 20 bp, Artificial Sequence
  Description of Artificial Sequence: Synthetic oligonucleotide
  Target: LAMA2; (+) strand; PAM type: YTN; PAM sequence: CTT
ttggtcttccacattgaaaa

SEQ ID NO: 334497 - DNA, 20 bp, Artificial Sequence
  Description of Artificial Sequence: Synthetic oligonucleotide
  Target: LAMA2; (+) strand; PAM type: YTN; PAM sequence: TTT
tggtcttccacattgaaaat

SEQ ID NO: 334498 - DNA, 20 bp, Artificial Sequence
  Description of Artificial Sequence: Synthetic oligonucleotide
  Target: LAMA2; (+) strand; PAM type: YTN; PAM sequence: TTT
ggtcttccacattgaaaata

SEQ ID NO: 334499 - DNA, 20 bp, Artificial Sequence
  Description of Artificial Sequence: Synthetic oligonucleotide
  Target: LAMA2; (+) strand; PAM type: YTN; PAM sequence: TTG
gtcttccacattgaaaataa

SEQ ID NO: 334500 - DNA, 20 bp, Artificial Sequence
  Description of Artificial Sequence: Synthetic oligonucleotide
  Target: LAMA2; (+) strand; PAM type: YTN; PAM sequence: CTT
ccacattgaaaataatggtg

SEQ ID NO: 334501 - DNA, 20 bp, Artificial Sequence
  Description of Artificial Sequence: Synthetic oligonucleotide
  Target: LAMA2; (+) strand; PAM type: YTN; PAM sequence: TTC
cacattgaaaataatggtga

SEQ ID NO: 334502 - DNA, 20 bp, Artificial Sequence
  Description of Artificial Sequence: Synthetic oligonucleotide
  Target: LAMA2; (+) strand; PAM type: YTN; PAM sequence: TTG
aaaataatggtgaatggaga

SEQ ID NO: 334503 - DNA, 20 bp, Artificial Sequence
  Description of Artificial Sequence: Synthetic oligonucleotide
  Target: LAMA2; (+) strand; PAM type: YTN; PAM sequence: CTA
agttgtaatgtgaaaaatgg

SEQ ID NO: 334504 - DNA, 20 bp, Artificial Sequence
  Description of Artificial Sequence: Synthetic oligonucleotide
  Target: LAMA2; (+) strand; PAM type: YTN; PAM sequence: TTG
taatgtgaaaaatggaaaat

SEQ ID NO: 334505 - DNA, 20 bp, Artificial Sequence
  Description of Artificial Sequence: Synthetic oligonucleotide
  Target: LAMA2; (+) strand; PAM type: YTN; PAM sequence: CTC
aaaaatgctttaattactgg

SEQ ID NO: 334506 - DNA, 20 bp, Artificial Sequence
  Description of Artificial Sequence: Synthetic oligonucleotide
  Target: LAMA2; (+) strand; PAM type: YTN; PAM sequence: CTT
taattactggatattgaaat

SEQ ID NO: 334507 - DNA, 20 bp, Artificial Sequence
  Description of Artificial Sequence: Synthetic oligonucleotide
  Target: LAMA2; (+) strand; PAM type: YTN; PAM sequence: TTT
aattactggatattgaaatg

SEQ ID NO: 334508 - DNA, 20 bp, Artificial Sequence
  Description of Artificial Sequence: Synthetic oligonucleotide
  Target: LAMA2; (+) strand; PAM type: YTN; PAM sequence: TTA
attactggatattgaaatga

SEQ ID NO: 334509 - DNA, 20 bp, Artificial Sequence
  Description of Artificial Sequence: Synthetic oligonucleotide
  Target: LAMA2; (+) strand; PAM type: YTN; PAM sequence: TTA
ctggatattgaaatgatacc

SEQ ID NO: 334510 - DNA, 20 bp, Artificial Sequence
  Description of Artificial Sequence: Synthetic oligonucleotide
  Target: LAMA2; (+) strand; PAM type: YTN; PAM sequence: CTG
gatattgaaatgatacctat

SEQ ID NO: 334511 - DNA, 20 bp, Artificial Sequence
  Description of Artificial Sequence: Synthetic oligonucleotide
  Target: LAMA2; (+) strand; PAM type: YTN; PAM sequence: TTG
aaatgatacctatgaggttc

SEQ ID NO: 334512 - DNA, 20 bp, Artificial Sequence
  Description of Artificial Sequence: Synthetic oligonucleotide
  Target: LAMA2; (+) strand; PAM type: YTN; PAM sequence: CTA
tgaggttcactttgtatatc

SEQ ID NO: 334513 - DNA, 20 bp, Artificial Sequence
  Description of Artificial Sequence: Synthetic oligonucleotide
  Target: LAMA2; (+) strand; PAM type: YTN; PAM sequence: TTC
actttgtatatcacctaaga

SEQ ID NO: 334514 - DNA, 20 bp, Artificial Sequence
  Description of Artificial Sequence: Synthetic oligonucleotide
  Target: LAMA2; (+) strand; PAM type: YTN; PAM sequence: CTT
tgtatatcacctaagaatat

SEQ ID NO: 334515 - DNA, 20 bp, Artificial Sequence
  Description of Artificial Sequence: Synthetic oligonucleotide
  Target: LAMA2; (+) strand; PAM type: YTN; PAM sequence: TTT
gtatatcacctaagaatatt

SEQ ID NO: 334516 - DNA, 20 bp, Artificial Sequence
  Description of Artificial Sequence: Synthetic oligonucleotide
  Target: LAMA2; (+) strand; PAM type: YTN; PAM sequence: TTG
tatatcacctaagaatatta

SEQ ID NO: 334517 - DNA, 20 bp, Artificial Sequence
  Description of Artificial Sequence: Synthetic oligonucleotide
  Target: LAMA2; (+) strand; PAM type: YTN; PAM sequence: CTA
agaatattattttactcaat

SEQ ID NO: 334518 - DNA, 20 bp, Artificial Sequence
  Description of Artificial Sequence: Synthetic oligonucleotide
  Target: LAMA2; (+) strand; PAM type: YTN; PAM sequence: TTA
ttttactcaatatattttta

SEQ ID NO: 334519 - DNA, 20 bp, Artificial Sequence
  Description of Artificial Sequence: Synthetic oligonucleotide
  Target: LAMA2; (+) strand; PAM type: YTN; PAM sequence: TTT
tactcaatatatttttagca

SEQ ID NO: 334520 - DNA, 20 bp, Artificial Sequence
  Description of Artificial Sequence: Synthetic oligonucleotide
  Target: LAMA2; (+) strand; PAM type: YTN; PAM sequence: TTT
actcaatatatttttagcac

SEQ ID NO: 334521 - DNA, 20 bp, Artificial Sequence
  Description of Artificial Sequence: Synthetic oligonucleotide
  Target: LAMA2; (+) strand; PAM type: YTN; PAM sequence: TTA
ctcaatatatttttagcact

SEQ ID NO: 334522 - DNA, 20 bp, Artificial Sequence
  Description of Artificial Sequence: Synthetic oligonucleotide
  Target: LAMA2; (+) strand; PAM type: YTN; PAM sequence: CTC
aatatatttttagcacttta

SEQ ID NO: 334523 - DNA, 20 bp, Artificial Sequence
  Description of Artificial Sequence: Synthetic oligonucleotide
  Target: LAMA2; (+) strand; PAM type: YTN; PAM sequence: TTT
ttagcactttatggacatta

SEQ ID NO: 334524 - DNA, 20 bp, Artificial Sequence
  Description of Artificial Sequence: Synthetic oligonucleotide
  Target: LAMA2; (+) strand; PAM type: YTN; PAM sequence: TTT
tagcactttatggacattaa

SEQ ID NO: 334525 - DNA, 20 bp, Artificial Sequence
  Description of Artificial Sequence: Synthetic oligonucleotide
  Target: LAMA2; (+) strand; PAM type: YTN; PAM sequence: TTT
agcactttatggacattaat

SEQ ID NO: 334526 - DNA, 20 bp, Artificial Sequence
  Description of Artificial Sequence: Synthetic oligonucleotide
  Target: LAMA2; (+) strand; PAM type: YTN; PAM sequence: TTA
gcactttatggacattaata

SEQ ID NO: 334527 - DNA, 20 bp, Artificial Sequence
  Description of Artificial Sequence: Synthetic oligonucleotide
  Target: LAMA2; (+) strand; PAM type: YTN; PAM sequence: CTT
tatggacattaatatttcta

SEQ ID NO: 334528 - DNA, 20 bp, Artificial Sequence
  Description of Artificial Sequence: Synthetic oligonucleotide
  Target: LAMA2; (+) strand; PAM type: YTN; PAM sequence: TTT
atggacattaatatttctat

SEQ ID NO: 334529 - DNA, 20 bp, Artificial Sequence
  Description of Artificial Sequence: Synthetic oligonucleotide
  Target: LAMA2; (+) strand; PAM type: YTN; PAM sequence: TTA
tggacattaatatttctatg

SEQ ID NO: 334530 - DNA, 20 bp, Artificial Sequence
  Description of Artificial Sequence: Synthetic oligonucleotide
  Target: LAMA2; (+) strand; PAM type: YTN; PAM sequence: TTA
atatttctatggagaaagct

SEQ ID NO: 334531 - DNA, 20 bp, Artificial Sequence
  Description of Artificial Sequence: Synthetic oligonucleotide
  Target: LAMA2; (+) strand; PAM type: YTN; PAM sequence: TTT
ctatggagaaagcttaaaaa

SEQ ID NO: 334532 - DNA, 20 bp, Artificial Sequence
  Description of Artificial Sequence: Synthetic oligonucleotide
  Target: LAMA2; (+) strand; PAM type: YTN; PAM sequence: TTC
tatggagaaagcttaaaaag

SEQ ID NO: 334533 - DNA, 20 bp, Artificial Sequence
  Description of Artificial Sequence: Synthetic oligonucleotide
  Target: LAMA2; (+) strand; PAM type: YTN; PAM sequence: CTA
tggagaaagcttaaaaagtg

SEQ ID NO: 334534 - DNA, 20 bp, Artificial Sequence
  Description of Artificial Sequence: Synthetic oligonucleotide
  Target: LAMA2; (+) strand; PAM type: YTN; PAM sequence: CTT
aaaaagtgtcacttgtgcat

SEQ ID NO: 334535 - DNA, 20 bp, Artificial Sequence
  Description of Artificial Sequence: Synthetic oligonucleotide
  Target: LAMA2; (+) strand; PAM type: YTN; PAM sequence: TTA
aaaagtgtcacttgtgcatt

SEQ ID NO: 334536 - DNA, 20 bp, Artificial Sequence
  Description of Artificial Sequence: Synthetic oligonucleotide
  Target: LAMA2; (+) strand; PAM type: YTN; PAM sequence: CTT
gtgcattgaaactcttttgt

SEQ ID NO: 334537 - DNA, 20 bp, Artificial Sequence
  Description of Artificial Sequence: Synthetic oligonucleotide
  Target: LAMA2; (+) strand; PAM type: YTN; PAM sequence: TTG
tgcattgaaactcttttgta

SEQ ID NO: 334538 - DNA, 20 bp, Artificial Sequence
  Description of Artificial Sequence: Synthetic oligonucleotide
  Target: LAMA2; (+) strand; PAM type: YTN; PAM sequence: TTG
aaactcttttgtaacagctt

SEQ ID NO: 334539 - DNA, 20 bp, Artificial Sequence
  Description of Artificial Sequence: Synthetic oligonucleotide
  Target: LAMA2; (+) strand; PAM type: YTN; PAM sequence: CTC
ttttgtaacagcttctttac

SEQ ID NO: 334540 - DNA, 20 bp, Artificial Sequence
  Description of Artificial Sequence: Synthetic oligonucleotide
  Target: LAMA2; (+) strand; PAM type: YTN; PAM sequence: CTT
ttgtaacagcttctttactc

SEQ ID NO: 334541 - DNA, 20 bp, Artificial Sequence
  Description of Artificial Sequence: Synthetic oligonucleotide
  Target: LAMA2; (+) strand; PAM type: YTN; PAM sequence: TTT
tgtaacagcttctttactct

SEQ ID NO: 334542 - DNA, 20 bp, Artificial Sequence
  Description of Artificial Sequence: Synthetic oligonucleotide
  Target: LAMA2; (+) strand; PAM type: YTN; PAM sequence: TTT
gtaacagcttctttactctt

SEQ ID NO: 334543 - DNA, 20 bp, Artificial Sequence
  Description of Artificial Sequence: Synthetic oligonucleotide
  Target: LAMA2; (+) strand; PAM type: YTN; PAM sequence: TTG
taacagcttctttactcttc

SEQ ID NO: 334544 - DNA, 20 bp, Artificial Sequence
  Description of Artificial Sequence: Synthetic oligonucleotide
  Target: LAMA2; (+) strand; PAM type: YTN; PAM sequence: CTT
ctttactcttctgttgttgt

SEQ ID NO: 334545 - DNA, 20 bp, Artificial Sequence
  Description of Artificial Sequence: Synthetic oligonucleotide
  Target: LAMA2; (+) strand; PAM type: YTN; PAM sequence: TTC
tttactcttctgttgttgtc

SEQ ID NO: 334546 - DNA, 20 bp, Artificial Sequence
  Description of Artificial Sequence: Synthetic oligonucleotide
  Target: LAMA2; (+) strand; PAM type: YTN; PAM sequence: CTT
tactcttctgttgttgtcat

SEQ ID NO: 334547 - DNA, 20 bp, Artificial Sequence
  Description of Artificial Sequence: Synthetic oligonucleotide
  Target: LAMA2; (+) strand; PAM type: YTN; PAM sequence: TTT
actcttctgttgttgtcatg

SEQ ID NO: 334548 - DNA, 20 bp, Artificial Sequence
  Description of Artificial Sequence: Synthetic oligonucleotide
  Target: LAMA2; (+) strand; PAM type: YTN; PAM sequence: TTA
ctcttctgttgttgtcatga

SEQ ID NO: 334549 - DNA, 20 bp, Artificial Sequence
  Description of Artificial Sequence: Synthetic oligonucleotide
  Target: LAMA2; (+) strand; PAM type: YTN; PAM sequence: CTC
ttctgttgttgtcatgatat

SEQ ID NO: 334550 - DNA, 20 bp, Artificial Sequence
  Description of Artificial Sequence: Synthetic oligonucleotide
  Target: LAMA2; (+) strand; PAM type: YTN; PAM sequence: CTT
ctgttgttgtcatgatatcc

SEQ ID NO: 334551 - DNA, 20 bp, Artificial Sequence
  Description of Artificial Sequence: Synthetic oligonucleotide
  Target: LAMA2; (+) strand; PAM type: YTN; PAM sequence: TTC
tgttgttgtcatgatatcct

SEQ ID NO: 334552 - DNA, 20 bp, Artificial Sequence
  Description of Artificial Sequence: Synthetic oligonucleotide
  Target: LAMA2; (+) strand; PAM type: YTN; PAM sequence: CTG
ttgttgtcatgatatcctcc

SEQ ID NO: 334553 - DNA, 20 bp, Artificial Sequence
  Description of Artificial Sequence: Synthetic oligonucleotide
  Target: LAMA2; (+) strand; PAM type: YTN; PAM sequence: TTG
ttgtcatgatatcctccaga

SEQ ID NO: 334554 - DNA, 20 bp, Artificial Sequence
  Description of Artificial Sequence: Synthetic oligonucleotide
  Target: LAMA2; (+) strand; PAM type: YTN; PAM sequence: TTG
tcatgatatcctccagatta

SEQ ID NO: 334555 - DNA, 20 bp, Artificial Sequence
  Description of Artificial Sequence: Synthetic oligonucleotide
  Target: LAMA2; (+) strand; PAM type: YTN; PAM sequence: CTC
cagattacttaaatttttaa

SEQ ID NO: 334556 - DNA, 20 bp, Artificial Sequence
  Description of Artificial Sequence: Synthetic oligonucleotide
  Target: LAMA2; (+) strand; PAM type: YTN; PAM sequence: TTA
cttaaatttttaaccaagaa

SEQ ID NO: 334557 - DNA, 20 bp, Artificial Sequence
  Description of Artificial Sequence: Synthetic oligonucleotide
  Target: LAMA2; (+) strand; PAM type: YTN; PAM sequence: CTT
aaatttttaaccaagaagta

SEQ ID NO: 334558 - DNA, 20 bp, Artificial Sequence
  Description of Artificial Sequence: Synthetic oligonucleotide
  Target: LAMA2; (+) strand; PAM type: YTN; PAM sequence: TTA
aatttttaaccaagaagtaa

SEQ ID NO: 334559 - DNA, 20 bp, Artificial Sequence
  Description of Artificial Sequence: Synthetic oligonucleotide
  Target: LAMA2; (+) strand; PAM type: YTN; PAM sequence: TTT
ttaaccaagaagtaacctta

SEQ ID NO: 334560 - DNA, 20 bp, Artificial Sequence
  Description of Artificial Sequence: Synthetic oligonucleotide
  Target: LAMA2; (+) strand; PAM type: YTN; PAM sequence: TTT
taaccaagaagtaaccttac

SEQ ID NO: 334561 - DNA, 20 bp, Artificial Sequence
  Description of Artificial Sequence: Synthetic oligonucleotide
  Target: LAMA2; (+) strand; PAM type: YTN; PAM sequence: TTT
aaccaagaagtaaccttact

SEQ ID NO: 334562 - DNA, 20 bp, Artificial Sequence
  Description of Artificial Sequence: Synthetic oligonucleotide
  Target: LAMA2; (+) strand; PAM type: YTN; PAM sequence: TTA
accaagaagtaaccttactt

SEQ ID NO: 334563 - DNA, 20 bp, Artificial Sequence
  Description of Artificial Sequence: Synthetic oligonucleotide
  Target: LAMA2; (+) strand; PAM type: YTN; PAM sequence: CTT
acttattactagtatgctct

SEQ ID NO: 334564 - DNA, 20 bp, Artificial Sequence
  Description of Artificial Sequence: Synthetic oligonucleotide
  Target: LAMA2; (+) strand; PAM type: YTN; PAM sequence: TTA
cttattactagtatgctctt

SEQ ID NO: 334565 - DNA, 20 bp, Artificial Sequence
  Description of Artificial Sequence: Synthetic oligonucleotide
  Target: LAMA2; (+) strand; PAM type: YTN; PAM sequence: CTT
attactagtatgctctttcc

SEQ ID NO: 334566 - DNA, 20 bp, Artificial Sequence
  Description of Artificial Sequence: Synthetic oligonucleotide
  Target: LAMA2; (+) strand; PAM type: YTN; PAM sequence: TTA
ttactagtatgctctttcct

SEQ ID NO: 334567 - DNA, 20 bp, Artificial Sequence
  Description of Artificial Sequence: Synthetic oligonucleotide
  Target: LAMA2; (+) strand; PAM type: YTN; PAM sequence: TTA
ctagtatgctctttccttaa

SEQ ID NO: 334568 - DNA, 20 bp, Artificial Sequence
  Description of Artificial Sequence: Synthetic oligonucleotide
  Target: LAMA2; (+) strand; PAM type: YTN; PAM sequence: CTA
gtatgctctttccttaaaag

SEQ ID NO: 334569 - DNA, 20 bp, Artificial Sequence
  Description of Artificial Sequence: Synthetic oligonucleotide
  Target: LAMA2; (+) strand; PAM type: YTN; PAM sequence: CTC
tttccttaaaagcttttctg

SEQ ID NO: 334570 - DNA, 20 bp, Artificial Sequence
  Description of Artificial Sequence: Synthetic oligonucleotide
  Target: LAMA2; (+) strand; PAM type: YTN; PAM sequence: CTT
tccttaaaagcttttctgat

SEQ ID NO: 334571 - DNA, 20 bp, Artificial Sequence
  Description of Artificial Sequence: Synthetic oligonucleotide
  Target: LAMA2; (+) strand; PAM type: YTN; PAM sequence: TTT
ccttaaaagcttttctgatt

SEQ ID NO: 334572 - DNA, 20 bp, Artificial Sequence
  Description of Artificial Sequence: Synthetic oligonucleotide
  Target: LAMA2; (+) strand; PAM type: YTN; PAM sequence: TTC
cttaaaagcttttctgattt

SEQ ID NO: 334573 - DNA, 20 bp, Artificial Sequence
  Description of Artificial Sequence: Synthetic oligonucleotide
  Target: LAMA2; (+) strand; PAM type: YTN; PAM sequence: CTT
aaaagcttttctgatttatg

SEQ ID NO: 334574 - DNA, 20 bp, Artificial Sequence
  Description of Artificial Sequence: Synthetic oligonucleotide
  Target: LAMA2; (+) strand; PAM type: YTN; PAM sequence: TTA
aaagcttttctgatttatgt

SEQ ID NO: 334575 - DNA, 20 bp, Artificial Sequence
  Description of Artificial Sequence: Synthetic oligonucleotide
  Target: LAMA2; (+) strand; PAM type: YTN; PAM sequence: CTT
ttctgatttatgttatttta

SEQ ID NO: 334576 - DNA, 20 bp, Artificial Sequence
  Description of Artificial Sequence: Synthetic oligonucleotide
  Target: LAMA2; (+) strand; PAM type: YTN; PAM sequence: TTT
tctgatttatgttattttaa

SEQ ID NO: 334577 - DNA, 20 bp, Artificial Sequence
  Description of Artificial Sequence: Synthetic oligonucleotide
  Target: LAMA2; (+) strand; PAM type: YTN; PAM sequence: TTT
ctgatttatgttattttaat

SEQ ID NO: 334578 - DNA, 20 bp, Artificial Sequence
  Description of Artificial Sequence: Synthetic oligonucleotide
  Target: LAMA2; (+) strand; PAM type: YTN; PAM sequence: TTC
tgatttatgttattttaatt

SEQ ID NO: 334579 - DNA, 20 bp, Artificial Sequence
  Description of Artificial Sequence: Synthetic oligonucleotide
  Target: LAMA2; (+) strand; PAM type: YTN; PAM sequence: CTG
atttatgttattttaattat

SEQ ID NO: 334580 - DNA, 20 bp, Artificial Sequence
  Description of Artificial Sequence: Synthetic oligonucleotide
  Target: LAMA2; (+) strand; PAM type: YTN; PAM sequence: TTT
atgttattttaattatatca

SEQ ID NO: 334581 - DNA, 20 bp, Artificial Sequence
  Description of Artificial Sequence: Synthetic oligonucleotide
  Target: LAMA2; (+) strand; PAM type: YTN; PAM sequence: TTA
tgttattttaattatatcaa

SEQ ID NO: 334582 - DNA, 20 bp, Artificial Sequence
  Description of Artificial Sequence: Synthetic oligonucleotide
  Target: LAMA2; (+) strand; PAM type: YTN; PAM sequence: TTA
ttttaattatatcaatcttg

SEQ ID NO: 334583 - DNA, 20 bp, Artificial Sequence
  Description of Artificial Sequence: Synthetic oligonucleotide
  Target: LAMA2; (+) strand; PAM type: YTN; PAM sequence: TTT
taattatatcaatcttgtta

SEQ ID NO: 334584 - DNA, 20 bp, Artificial Sequence
  Description of Artificial Sequence: Synthetic oligonucleotide
  Target: LAMA2; (+) strand; PAM type: YTN; PAM sequence: TTT
aattatatcaatcttgttat

SEQ ID NO: 334585 - DNA, 20 bp, Artificial Sequence
  Description of Artificial Sequence: Synthetic oligonucleotide
  Target: LAMA2; (+) strand; PAM type: YTN; PAM sequence: TTA
attatatcaatcttgttatt

SEQ ID NO: 334586 - DNA, 20 bp, Artificial Sequence
  Description of Artificial Sequence: Synthetic oligonucleotide
  Target: LAMA2; (+) strand; PAM type: YTN; PAM sequence: TTA
tatcaatcttgttattatgt

SEQ ID NO: 334587 - DNA, 20 bp, Artificial Sequence
  Description of Artificial Sequence: Synthetic oligonucleotide
  Target: LAMA2; (+) strand; PAM type: YTN; PAM sequence: CTT
gttattatgtacagttttta

SEQ ID NO: 334588 - DNA, 20 bp, Artificial Sequence
  Description of Artificial Sequence: Synthetic oligonucleotide
  Target: LAMA2; (+) strand; PAM type: YTN; PAM sequence: TTG
ttattatgtacagtttttaa

SEQ ID NO: 334589 - DNA, 20 bp, Artificial Sequence
  Description of Artificial Sequence: Synthetic oligonucleotide
  Target: LAMA2; (+) strand; PAM type: YTN; PAM sequence: TTA
ttatgtacagtttttaatta

SEQ ID NO: 334590 - DNA, 20 bp, Artificial Sequence
  Description of Artificial Sequence: Synthetic oligonucleotide
  Target: LAMA2; (+) strand; PAM type: YTN; PAM sequence: TTA
tgtacagtttttaattattt

SEQ ID NO: 334591 - DNA, 20 bp, Artificial Sequence
  Description of Artificial Sequence: Synthetic oligonucleotide
  Target: LAMA2; (+) strand; PAM type: YTN; PAM sequence: TTT
ttaattattttaataatttc

SEQ ID NO: 334592 - DNA, 20 bp, Artificial Sequence
  Description of Artificial Sequence: Synthetic oligonucleotide
  Target: LAMA2; (+) strand; PAM type: YTN; PAM sequence: TTT
taattattttaataatttca

SEQ ID NO: 334593 - DNA, 20 bp, Artificial Sequence
  Description of Artificial Sequence: Synthetic oligonucleotide
  Target: LAMA2; (+) strand; PAM type: YTN; PAM sequence: TTT
aattattttaataatttcaa

SEQ ID NO: 334594 - DNA, 20 bp, Artificial Sequence
  Description of Artificial Sequence: Synthetic oligonucleotide
  Target: LAMA2; (+) strand; PAM type: YTN; PAM sequence: TTA
attattttaataatttcaac

SEQ ID NO: 334595 - DNA, 20 bp, Artificial Sequence
  Description of Artificial Sequence: Synthetic oligonucleotide
  Target: LAMA2; (+) strand; PAM type: YTN; PAM sequence: TTA
ttttaataatttcaaccttt

SEQ ID NO: 334596 - DNA, 20 bp, Artificial Sequence
  Description of Artificial Sequence: Synthetic oligonucleotide
  Target: LAMA2; (+) strand; PAM type: YTN; PAM sequence: TTT
taataatttcaacctttctg

SEQ ID NO: 334597 - DNA, 20 bp, Artificial Sequence
  Description of Artificial Sequence: Synthetic oligonucleotide
  Target: LAMA2; (+) strand; PAM type: YTN; PAM sequence: TTT
aataatttcaacctttctgc

SEQ ID NO: 334598 - DNA, 20 bp, Artificial Sequence
  Description of Artificial Sequence: Synthetic oligonucleotide
  Target: LAMA2; (+) strand; PAM type: YTN; PAM sequence: TTA
ataatttcaacctttctgca

SEQ ID NO: 334599 - DNA, 20 bp, Artificial Sequence
  Description of Artificial Sequence: Synthetic oligonucleotide
  Target: LAMA2; (+) strand; PAM type: YTN; PAM sequence: TTT
caacctttctgcaactttcc

SEQ ID NO: 334600 - DNA, 20 bp, Artificial Sequence
  Description of Artificial Sequence: Synthetic oligonucleotide
  Target: LAMA2; (+) strand; PAM type: YTN; PAM sequence: TTC
aacctttctgcaactttcca

SEQ ID NO: 334601 - DNA, 20 bp, Artificial Sequence
  Description of Artificial Sequence: Synthetic oligonucleotide
  Target: LAMA2; (+) strand; PAM type: YTN; PAM sequence: CTT
tctgcaactttccattttag

SEQ ID NO: 334602 - DNA, 20 bp, Artificial Sequence
  Description of Artificial Sequence: Synthetic oligonucleotide
  Target: LAMA2; (+) strand; PAM type: YTN; PAM sequence: TTT
ctgcaactttccattttaga

SEQ ID NO: 334603 - DNA, 20 bp, Artificial Sequence
  Description of Artificial Sequence: Synthetic oligonucleotide
  Target: LAMA2; (+) strand; PAM type: YTN; PAM sequence: TTC
tgcaactttccattttagat

SEQ ID NO: 334604 - DNA, 20 bp, Artificial Sequence
  Description of Artificial Sequence: Synthetic oligonucleotide
  Target: LAMA2; (+) strand; PAM type: YTN; PAM sequence: CTG
caactttccattttagatat

SEQ ID NO: 334605 - DNA, 20 bp, Artificial Sequence
  Description of Artificial Sequence: Synthetic oligonucleotide
  Target: LAMA2; (+) strand; PAM type: YTN; PAM sequence: CTT
tccattttagatatgtctca

SEQ ID NO: 334606 - DNA, 20 bp, Artificial Sequence
  Description of Artificial Sequence: Synthetic oligonucleotide
  Target: LAMA2; (+) strand; PAM type: YTN; PAM sequence: TTT
ccattttagatatgtctcat

SEQ ID NO: 334607 - DNA, 20 bp, Artificial Sequence
  Description of Artificial Sequence: Synthetic oligonucleotide
  Target: LAMA2; (+) strand; PAM type: YTN; PAM sequence: TTC
cattttagatatgtctcatt

SEQ ID NO: 334608 - DNA, 20 bp, Artificial Sequence
  Description of Artificial Sequence: Synthetic oligonucleotide
  Target: LAMA2; (+) strand; PAM type: YTN; PAM sequence: TTT
tagatatgtctcattaatgg

SEQ ID NO: 334609 - DNA, 20 bp, Artificial Sequence
  Description of Artificial Sequence: Synthetic oligonucleotide
  Target: LAMA2; (+) strand; PAM type: YTN; PAM sequence: TTT
agatatgtctcattaatggc

SEQ ID NO: 334610 - DNA, 20 bp, Artificial Sequence
  Description of Artificial Sequence: Synthetic oligonucleotide
  Target: LAMA2; (+) strand; PAM type: YTN; PAM sequence: TTA
gatatgtctcattaatggca

SEQ ID NO: 334611 - DNA, 20 bp, Artificial Sequence
  Description of Artificial Sequence: Synthetic oligonucleotide
  Target: LAMA2; (+) strand; PAM type: YTN; PAM sequence: CTC
attaatggcatatagtgaag

SEQ ID NO: 334612 - DNA, 20 bp, Artificial Sequence
  Description of Artificial Sequence: Synthetic oligonucleotide
  Target: LAMA2; (+) strand; PAM type: YTN; PAM sequence: TTA
atggcatatagtgaagtttt

SEQ ID NO: 334613 - DNA, 20 bp, Artificial Sequence
  Description of Artificial Sequence: Synthetic oligonucleotide
  Target: LAMA2; (+) strand; PAM type: YTN; PAM sequence: TTT
tgacgttttgtctagtttgg

SEQ ID NO: 334614 - DNA, 20 bp, Artificial Sequence
  Description of Artificial Sequence: Synthetic oligonucleotide
  Target: LAMA2; (+) strand; PAM type: YTN; PAM sequence: TTT
gacgttttgtctagtttggc

SEQ ID NO: 334615 - DNA, 20 bp, Artificial Sequence
  Description of Artificial Sequence: Synthetic oligonucleotide
  Target: LAMA2; (+) strand; PAM type: YTN; PAM sequence: TTG
acgttttgtctagtttggca

SEQ ID NO: 334616 - DNA, 20 bp, Artificial Sequence
  Description of Artificial Sequence: Synthetic oligonucleotide
  Target: LAMA2; (+) strand; PAM type: YTN; PAM sequence: TTT
tgtctagtttggcagtgttg

SEQ ID NO: 334617 - DNA, 20 bp, Artificial Sequence
  Description of Artificial Sequence: Synthetic oligonucleotide
  Target: LAMA2; (+) strand; PAM type: YTN; PAM sequence: TTT
gtctagtttggcagtgttgg

SEQ ID NO: 334618 - DNA, 20 bp, Artificial Sequence
  Description of Artificial Sequence: Synthetic oligonucleotide
  Target: LAMA2; (+) strand; PAM type: YTN; PAM sequence: TTG
tctagtttggcagtgttggt

SEQ ID NO: 334619 - DNA, 20 bp, Artificial Sequence
  Description of Artificial Sequence: Synthetic oligonucleotide
  Target: LAMA2; (+) strand; PAM type: YTN; PAM sequence: CTA
gtttggcagtgttggtcttt

SEQ ID NO: 334620 - DNA, 20 bp, Artificial Sequence
  Description of Artificial Sequence: Synthetic oligonucleotide
  Target: LAMA2; (+) strand; PAM type: YTN; PAM sequence: TTT
ggcagtgttggtcttttaat

SEQ ID NO: 334621 - DNA, 20 bp, Artificial Sequence
  Description of Artificial Sequence: Synthetic oligonucleotide
  Target: LAMA2; (+) strand; PAM type: YTN; PAM sequence: TTG
gcagtgttggtcttttaatg

SEQ ID NO: 334622 - DNA, 20 bp, Artificial Sequence
  Description of Artificial Sequence: Synthetic oligonucleotide
  Target: LAMA2; (+) strand; PAM type: YTN; PAM sequence: TTG
gtcttttaatgaaacatgca

SEQ ID NO: 334623 - DNA, 20 bp, Artificial Sequence
  Description of Artificial Sequence: Synthetic oligonucleotide
  Target: LAMA2; (+) strand; PAM type: YTN; PAM sequence: CTT
ttaatgaaacatgcattttc

SEQ ID NO: 334624 - DNA, 20 bp, Artificial Sequence
  Description of Artificial Sequence: Synthetic oligonucleotide
  Target: LAMA2; (+) strand; PAM type: YTN; PAM sequence: TTT
taatgaaacatgcattttca

SEQ ID NO: 334625 - DNA, 20 bp, Artificial Sequence
  Description of Artificial Sequence: Synthetic oligonucleotide
  Target: LAMA2; (+) strand; PAM type: YTN; PAM sequence: TTT
aatgaaacatgcattttcag

SEQ ID NO: 334626 - DNA, 20 bp, Artificial Sequence
  Description of Artificial Sequence: Synthetic oligonucleotide
  Target: LAMA2; (+) strand; PAM type: YTN; PAM sequence: TTA
atgaaacatgcattttcagt

SEQ ID NO: 334627 - DNA, 20 bp, Artificial Sequence
  Description of Artificial Sequence: Synthetic oligonucleotide
  Target: LAMA2; (+) strand; PAM type: YTN; PAM sequence: TTT
tcagtggatctgtgtgtatc

SEQ ID NO: 334628 - DNA, 20 bp, Artificial Sequence
  Description of Artificial Sequence: Synthetic oligonucleotide
  Target: LAMA2; (+) strand; PAM type: YTN; PAM sequence: TTT
cagtggatctgtgtgtatct

SEQ ID NO: 334629 - DNA, 20 bp, Artificial Sequence
  Description of Artificial Sequence: Synthetic oligonucleotide
  Target: LAMA2; (+) strand; PAM type: YTN; PAM sequence: TTC
agtggatctgtgtgtatcta

SEQ ID NO: 334630 - DNA, 20 bp, Artificial Sequence
  Description of Artificial Sequence: Synthetic oligonucleotide
  Target: LAMA2; (+) strand; PAM type: YTN; PAM sequence: CTG
tgtgtatctaagtgaagcat

SEQ ID NO: 334631 - DNA, 20 bp, Artificial Sequence
  Description of Artificial Sequence: Synthetic oligonucleotide
  Target: LAMA2; (+) strand; PAM type: YTN; PAM sequence: CTA
agtgaagcatgtacacagaa

SEQ ID NO: 334632 - DNA, 20 bp, Artificial Sequence
  Description of Artificial Sequence: Synthetic oligonucleotide
  Target: LAMA2; (+) strand; PAM type: YTN; PAM sequence: CTG
agagaatttttgctaaatga

SEQ ID NO: 334633 - DNA, 20 bp, Artificial Sequence
  Description of Artificial Sequence: Synthetic oligonucleotide
  Target: LAMA2; (+) strand; PAM type: YTN; PAM sequence: TTT
ttgctaaatgaaccttccca

SEQ ID NO: 334634 - DNA, 20 bp, Artificial Sequence
  Description of Artificial Sequence: Synthetic oligonucleotide
  Target: LAMA2; (+) strand; PAM type: YTN; PAM sequence: TTT
tgctaaatgaaccttcccaa

SEQ ID NO: 334635 - DNA, 20 bp, Artificial Sequence
  Description of Artificial Sequence: Synthetic oligonucleotide
  Target: LAMA2; (+) strand; PAM type: YTN; PAM sequence: TTT
gctaaatgaaccttcccaag

SEQ ID NO: 334636 - DNA, 20 bp, Artificial Sequence
  Description of Artificial Sequence: Synthetic oligonucleotide
  Target: LAMA2; (+) strand; PAM type: YTN; PAM sequence: TTG
ctaaatgaaccttcccaagt

SEQ ID NO: 334637 - DNA, 20 bp, Artificial Sequence
  Description of Artificial Sequence: Synthetic oligonucleotide
  Target: LAMA2; (+) strand; PAM type: YTN; PAM sequence: CTA
aatgaaccttcccaagtaac

SEQ ID NO: 334638 - DNA, 20 bp, Artificial Sequence
  Description of Artificial Sequence: Synthetic oligonucleotide
  Target: LAMA2; (+) strand; PAM type: YTN; PAM sequence: CTT
cccaagtaactactactgag

SEQ ID NO: 334639 - DNA, 20 bp, Artificial Sequence
  Description of Artificial Sequence: Synthetic oligonucleotide
  Target: LAMA2; (+) strand; PAM type: YTN; PAM sequence: TTC
ccaagtaactactactgaga

SEQ ID NO: 334640 - DNA, 20 bp, Artificial Sequence
  Description of Artificial Sequence: Synthetic oligonucleotide
  Target: LAMA2; (+) strand; PAM type: YTN; PAM sequence: CTA
ctactgagacaaaaataacc

SEQ ID NO: 334641 - DNA, 20 bp, Artificial Sequence
  Description of Artificial Sequence: Synthetic oligonucleotide
  Target: LAMA2; (+) strand; PAM type: YTN; PAM sequence: CTA
ctgagacaaaaataaccagc

SEQ ID NO: 334642 - DNA, 20 bp, Artificial Sequence
  Description of Artificial Sequence: Synthetic oligonucleotide
  Target: LAMA2; (+) strand; PAM type: YTN; PAM sequence: CTG
agacaaaaataaccagcaac

SEQ ID NO: 334643 - DNA, 20 bp, Artificial Sequence
  Description of Artificial Sequence: Synthetic oligonucleotide
  Target: LAMA2; (+) strand; PAM type: YTN; PAM sequence: CTT
ccctcatgccttttccaatc

SEQ ID NO: 334644 - DNA, 20 bp, Artificial Sequence
  Description of Artificial Sequence: Synthetic oligonucleotide
  Target: LAMA2; (+) strand; PAM type: YTN; PAM sequence: TTC
cctcatgccttttccaatca

SEQ ID NO: 334645 - DNA, 20 bp, Artificial Sequence
  Description of Artificial Sequence: Synthetic oligonucleotide
  Target: LAMA2; (+) strand; PAM type: YTN; PAM sequence: CTC
atgccttttccaatcactat

SEQ ID NO: 334646 - DNA, 20 bp, Artificial Sequence
  Description of Artificial Sequence: Synthetic oligonucleotide
  Target: LAMA2; (+) strand; PAM type: YTN; PAM sequence: CTT
ttccaatcactatcttgcct

SEQ ID NO: 334647 - DNA, 20 bp, Artificial Sequence
  Description of Artificial Sequence: Synthetic oligonucleotide
  Target: LAMA2; (+) strand; PAM type: YTN; PAM sequence: TTT
tccaatcactatcttgcctt

SEQ ID NO: 334648 - DNA, 20 bp, Artificial Sequence
  Description of Artificial Sequence: Synthetic oligonucleotide
  Target: LAMA2; (+) strand; PAM type: YTN; PAM sequence: TTT
ccaatcactatcttgccttc

SEQ ID NO: 334649 - DNA, 20 bp, Artificial Sequence
  Description of Artificial Sequence: Synthetic oligonucleotide
  Target: LAMA2; (+) strand; PAM type: YTN; PAM sequence: TTC
caatcactatcttgccttct

SEQ ID NO: 334650 - DNA, 20 bp, Artificial Sequence
  Description of Artificial Sequence: Synthetic oligonucleotide
  Target: LAMA2; (+) strand; PAM type: YTN; PAM sequence: CTA
tcttgccttctcccctaata

SEQ ID NO: 334651 - DNA, 20 bp, Artificial Sequence
  Description of Artificial Sequence: Synthetic oligonucleotide
  Target: LAMA2; (+) strand; PAM type: YTN; PAM sequence: CTT
gccttctcccctaatagtaa

SEQ ID NO: 334652 - DNA, 20 bp, Artificial Sequence
  Description of Artificial Sequence: Synthetic oligonucleotide
  Target: LAMA2; (+) strand; PAM type: YTN; PAM sequence: TTG
ccttctcccctaatagtaac

SEQ ID NO: 334653 - DNA, 20 bp, Artificial Sequence
  Description of Artificial Sequence: Synthetic oligonucleotide
  Target: LAMA2; (+) strand; PAM type: YTN; PAM sequence: CTT
ctcccctaatagtaaccagt

SEQ ID NO: 334654 - DNA, 20 bp, Artificial Sequence
  Description of Artificial Sequence: Synthetic oligonucleotide
  Target: LAMA2; (+) strand; PAM type: YTN; PAM sequence: TTC
tcccctaatagtaaccagta

SEQ ID NO: 334655 - DNA, 20 bp, Artificial Sequence
  Description of Artificial Sequence: Synthetic oligonucleotide
  Target: LAMA2; (+) strand; PAM type: YTN; PAM sequence: CTC
ccctaatagtaaccagtatt

SEQ ID NO: 334656 - DNA, 20 bp, Artificial Sequence
  Description of Artificial Sequence: Synthetic oligonucleotide
  Target: LAMA2; (+) strand; PAM type: YTN; PAM sequence: CTA
atagtaaccagtattctaac

SEQ ID NO: 334657 - DNA, 20 bp, Artificial Sequence
  Description of Artificial Sequence: Synthetic oligonucleotide
  Target: LAMA2; (+) strand; PAM type: YTN; PAM sequence: TTC
taacttgtattcaccagtga

SEQ ID NO: 334658 - DNA, 20 bp, Artificial Sequence
  Description of Artificial Sequence: Synthetic oligonucleotide
  Target: LAMA2; (+) strand; PAM type: YTN; PAM sequence: CTA
acttgtattcaccagtgaag

SEQ ID NO: 334659 - DNA, 20 bp, Artificial Sequence
  Description of Artificial Sequence: Synthetic oligonucleotide
  Target: LAMA2; (+) strand; PAM type: YTN; PAM sequence: CTT
gtattcaccagtgaagccat

SEQ ID NO: 334660 - DNA, 20 bp, Artificial Sequence
  Description of Artificial Sequence: Synthetic oligonucleotide
  Target: LAMA2; (+) strand; PAM type: YTN; PAM sequence: TTG
tattcaccagtgaagccatt

SEQ ID NO: 334661 - DNA, 20 bp, Artificial Sequence
  Description of Artificial Sequence: Synthetic oligonucleotide
  Target: LAMA2; (+) strand; PAM type: YTN; PAM sequence: TTC
accagtgaagccatttgatc

SEQ ID NO: 334662 - DNA, 20 bp, Artificial Sequence
  Description of Artificial Sequence: Synthetic oligonucleotide
  Target: LAMA2; (+) strand; PAM type: YTN; PAM sequence: TTT
gatctaggagttttctctgt

SEQ ID NO: 334663 - DNA, 20 bp, Artificial Sequence
  Description of Artificial Sequence: Synthetic oligonucleotide
  Target: LAMA2; (+) strand; PAM type: YTN; PAM sequence: TTG
atctaggagttttctctgtg

SEQ ID NO: 334664 - DNA, 20 bp, Artificial Sequence
  Description of Artificial Sequence: Synthetic oligonucleotide
  Target: LAMA2; (+) strand; PAM type: YTN; PAM sequence: CTA
ggagttttctctgtgcatgg

SEQ ID NO: 334665 - DNA, 20 bp, Artificial Sequence
  Description of Artificial Sequence: Synthetic oligonucleotide
  Target: LAMA2; (+) strand; PAM type: YTN; PAM sequence: TTT
tctctgtgcatgggttttag

SEQ ID NO: 334666 - DNA, 20 bp, Artificial Sequence
  Description of Artificial Sequence: Synthetic oligonucleotide
  Target: LAMA2; (+) strand; PAM type: YTN; PAM sequence: TTT
ctctgtgcatgggttttagt

SEQ ID NO: 334667 - DNA, 20 bp, Artificial Sequence
  Description of Artificial Sequence: Synthetic oligonucleotide
  Target: LAMA2; (+) strand; PAM type: YTN; PAM sequence: TTC
tctgtgcatgggttttagtc

SEQ ID NO: 334668 - DNA, 20 bp, Artificial Sequence
  Description of Artificial Sequence: Synthetic oligonucleotide
  Target: LAMA2; (+) strand; PAM type: YTN; PAM sequence: CTC
tgtgcatgggttttagtcac

SEQ ID NO: 334669 - DNA, 20 bp, Artificial Sequence
  Description of Artificial Sequence: Synthetic oligonucleotide
  Target: LAMA2; (+) strand; PAM type: YTN; PAM sequence: CTG
tgcatgggttttagtcacag

SEQ ID NO: 334670 - DNA, 20 bp, Artificial Sequence
  Description of Artificial Sequence: Synthetic oligonucleotide
  Target: LAMA2; (+) strand; PAM type: YTN; PAM sequence: TTT
tagtcacagattccatatct

SEQ ID NO: 334671 - DNA, 20 bp, Artificial Sequence
  Description of Artificial Sequence: Synthetic oligonucleotide
  Target: LAMA2; (+) strand; PAM type: YTN; PAM sequence: TTT
agtcacagattccatatcta

SEQ ID NO: 334672 - DNA, 20 bp, Artificial Sequence
  Description of Artificial Sequence: Synthetic oligonucleotide
  Target: LAMA2; (+) strand; PAM type: YTN; PAM sequence: TTA
gtcacagattccatatctat

SEQ ID NO: 334673 - DNA, 20 bp, Artificial Sequence
  Description of Artificial Sequence: Synthetic oligonucleotide
  Target: LAMA2; (+) strand; PAM type: YTN; PAM sequence: TTC
catatctataataaatgtgg

SEQ ID NO: 334674 - DNA, 20 bp, Artificial Sequence
  Description of Artificial Sequence: Synthetic oligonucleotide
  Target: LAMA2; (+) strand; PAM type: YTN; PAM sequence: CTA
taataaatgtgggactcact

SEQ ID NO: 334675 - DNA, 20 bp, Artificial Sequence
  Description of Artificial Sequence: Synthetic oligonucleotide
  Target: LAMA2; (+) strand; PAM type: YTN; PAM sequence: CTC
actggagttttcatttctta

SEQ ID NO: 334676 - DNA, 20 bp, Artificial Sequence
  Description of Artificial Sequence: Synthetic oligonucleotide
  Target: LAMA2; (+) strand; PAM type: YTN; PAM sequence: CTG
gagttttcatttcttatatt

SEQ ID NO: 334677 - DNA, 20 bp, Artificial Sequence
  Description of Artificial Sequence: Synthetic oligonucleotide
  Target: LAMA2; (+) strand; PAM type: YTN; PAM sequence: TTT
tcatttcttatattttcagt

SEQ ID NO: 334678 - DNA, 20 bp, Artificial Sequence
  Description of Artificial Sequence: Synthetic oligonucleotide
  Target: LAMA2; (+) strand; PAM type: YTN; PAM sequence: TTT
catttcttatattttcagtt

SEQ ID NO: 334679 - DNA, 20 bp, Artificial Sequence
  Description of Artificial Sequence: Synthetic oligonucleotide
  Target: LAMA2; (+) strand; PAM type: YTN; PAM sequence: TTC
atttcttatattttcagttt

SEQ ID NO: 334680 - DNA, 20 bp, Artificial Sequence
  Description of Artificial Sequence: Synthetic oligonucleotide
  Target: LAMA2; (+) strand; PAM type: YTN; PAM sequence: TTT
cttatattttcagtttagtt

SEQ ID NO: 334681 - DNA, 20 bp, Artificial Sequence
  Description of Artificial Sequence: Synthetic oligonucleotide
  Target: LAMA2; (+) strand; PAM type: YTN; PAM sequence: TTC
ttatattttcagtttagttg

SEQ ID NO: 334682 - DNA, 20 bp, Artificial Sequence
  Description of Artificial Sequence: Synthetic oligonucleotide
  Target: LAMA2; (+) strand; PAM type: YTN; PAM sequence: CTT
atattttcagtttagttgag

SEQ ID NO: 334683 - DNA, 20 bp, Artificial Sequence
  Description of Artificial Sequence: Synthetic oligonucleotide
  Target: LAMA2; (+) strand; PAM type: YTN; PAM sequence: TTA
tattttcagtttagttgagt

SEQ ID NO: 334684 - DNA, 20 bp, Artificial Sequence
  Description of Artificial Sequence: Synthetic oligonucleotide
  Target: LAMA2; (+) strand; PAM type: YTN; PAM sequence: TTT
tcagtttagttgagttgggc

SEQ ID NO: 334685 - DNA, 20 bp, Artificial Sequence
  Description of Artificial Sequence: Synthetic oligonucleotide
  Target: LAMA2; (+) strand; PAM type: YTN; PAM sequence: TTT
cagtttagttgagttgggct

SEQ ID NO: 334686 - DNA, 20 bp, Artificial Sequence
  Description of Artificial Sequence: Synthetic oligonucleotide
  Target: LAMA2; (+) strand; PAM type: YTN; PAM sequence: TTC
agtttagttgagttgggctt

SEQ ID NO: 334687 - DNA, 20 bp, Artificial Sequence
  Description of Artificial Sequence: Synthetic oligonucleotide
  Target: LAMA2; (+) strand; PAM type: YTN; PAM sequence: TTT
agttgagttgggcttttcaa

SEQ ID NO: 334688 - DNA, 20 bp, Artificial Sequence
  Description of Artificial Sequence: Synthetic oligonucleotide
  Target: LAMA2; (+) strand; PAM type: YTN; PAM sequence: TTA
gttgagttgggcttttcaag

SEQ ID NO: 334689 - DNA, 20 bp, Artificial Sequence
  Description of Artificial Sequence: Synthetic oligonucleotide
  Target: LAMA2; (+) strand; PAM type: YTN; PAM sequence: TTG
agttgggcttttcaagaaat

SEQ ID NO: 334690 - DNA, 20 bp, Artificial Sequence
  Description of Artificial Sequence: Synthetic oligonucleotide
  Target: LAMA2; (+) strand; PAM type: YTN; PAM sequence: TTG
ggcttttcaagaaattgatc

SEQ ID NO: 334691 - DNA, 20 bp, Artificial Sequence
  Description of Artificial Sequence: Synthetic oligonucleotide
  Target: LAMA2; (+) strand; PAM type: YTN; PAM sequence: CTT
ttcaagaaattgatccactt

SEQ ID NO: 334692 - DNA, 20 bp, Artificial Sequence
  Description of Artificial Sequence: Synthetic oligonucleotide
  Target: LAMA2; (+) strand; PAM type: YTN; PAM sequence: TTT
tcaagaaattgatccactta

SEQ ID NO: 334693 - DNA, 20 bp, Artificial Sequence
  Description of Artificial Sequence: Synthetic oligonucleotide
  Target: LAMA2; (+) strand; PAM type: YTN; PAM sequence: TTT
caagaaattgatccacttac

SEQ ID NO: 334694 - DNA, 20 bp, Artificial Sequence
  Description of Artificial Sequence: Synthetic oligonucleotide
  Target: LAMA2; (+) strand; PAM type: YTN; PAM sequence: TTC
aagaaattgatccacttacc

SEQ ID NO: 334695 - DNA, 20 bp, Artificial Sequence
  Description of Artificial Sequence: Synthetic oligonucleotide
  Target: LAMA2; (+) strand; PAM type: YTN; PAM sequence: TTG
atccacttacctaatttttc

SEQ ID NO: 334696 - DNA, 20 bp, Artificial Sequence
  Description of Artificial Sequence: Synthetic oligonucleotide
  Target: LAMA2; (+) strand; PAM type: YTN; PAM sequence: CTT
acctaatttttcaaatatat

SEQ ID NO: 334697 - DNA, 20 bp, Artificial Sequence
  Description of Artificial Sequence: Synthetic oligonucleotide
  Target: LAMA2; (+) strand; PAM type: YTN; PAM sequence: TTA
cctaatttttcaaatatatc

SEQ ID NO: 334698 - DNA, 20 bp, Artificial Sequence
  Description of Artificial Sequence: Synthetic oligonucleotide
  Target: LAMA2; (+) strand; PAM type: YTN; PAM sequence: CTA
atttttcaaatatatcgaca

SEQ ID NO: 334699 - DNA, 20 bp, Artificial Sequence
  Description of Artificial Sequence: Synthetic oligonucleotide
  Target: LAMA2; (+) strand; PAM type: YTN; PAM sequence: TTT
ttcaaatatatcgacatgag

SEQ ID NO: 334700 - DNA, 20 bp, Artificial Sequence
  Description of Artificial Sequence: Synthetic oligonucleotide
  Target: LAMA2; (+) strand; PAM type: YTN; PAM sequence: TTT
tcaaatatatcgacatgagt

SEQ ID NO: 334701 - DNA, 20 bp, Artificial Sequence
  Description of Artificial Sequence: Synthetic oligonucleotide
  Target: LAMA2; (+) strand; PAM type: YTN; PAM sequence: TTT
caaatatatcgacatgagtt

SEQ ID NO: 334702 - DNA, 20 bp, Artificial Sequence
  Description of Artificial Sequence: Synthetic oligonucleotide
  Target: LAMA2; (+) strand; PAM type: YTN; PAM sequence: TTC
aaatatatcgacatgagttg

SEQ ID NO: 334703 - DNA, 20 bp, Artificial Sequence
  Description of Artificial Sequence: Synthetic oligonucleotide
  Target: LAMA2; (+) strand; PAM type: YTN; PAM sequence: TTG
ttagtgatattatcatcttt

SEQ ID NO: 334704 - DNA, 20 bp, Artificial Sequence
  Description of Artificial Sequence: Synthetic oligonucleotide
  Target: LAMA2; (+) strand; PAM type: YTN; PAM sequence: TTA
gtgatattatcatcttttaa

SEQ ID NO: 334705 - DNA, 20 bp, Artificial Sequence
  Description of Artificial Sequence: Synthetic oligonucleotide
  Target: LAMA2; (+) strand; PAM type: YTN; PAM sequence: TTA
tcatcttttaatttacaatg

SEQ ID NO: 334706 - DNA, 20 bp, Artificial Sequence
  Description of Artificial Sequence: Synthetic oligonucleotide
  Target: LAMA2; (+) strand; PAM type: YTN; PAM sequence: CTT
ttaatttacaatgatctgta

SEQ ID NO: 334707 - DNA, 20 bp, Artificial Sequence
  Description of Artificial Sequence: Synthetic oligonucleotide
  Target: LAMA2; (+) strand; PAM type: YTN; PAM sequence: TTT
taatttacaatgatctgtag

SEQ ID NO: 334708 - DNA, 20 bp, Artificial Sequence
  Description of Artificial Sequence: Synthetic oligonucleotide
  Target: LAMA2; (+) strand; PAM type: YTN; PAM sequence: TTT
aatttacaatgatctgtagt

SEQ ID NO: 334709 - DNA, 20 bp, Artificial Sequence
  Description of Artificial Sequence: Synthetic oligonucleotide
  Target: LAMA2; (+) strand; PAM type: YTN; PAM sequence: TTA
atttacaatgatctgtagtg

SEQ ID NO: 334710 - DNA, 20 bp, Artificial Sequence
  Description of Artificial Sequence: Synthetic oligonucleotide
  Target: LAMA2; (+) strand; PAM type: YTN; PAM sequence: TTT
acaatgatctgtagtgatgc

SEQ ID NO: 334711 - DNA, 20 bp, Artificial Sequence
  Description of Artificial Sequence: Synthetic oligonucleotide
  Target: LAMA2; (+) strand; PAM type: YTN; PAM sequence: TTA
caatgatctgtagtgatgcc

SEQ ID NO: 334712 - DNA, 20 bp, Artificial Sequence
  Description of Artificial Sequence: Synthetic oligonucleotide
  Target: LAMA2; (+) strand; PAM type: YTN; PAM sequence: CTG
tagtgatgccctttttttat

SEQ ID NO: 334713 - DNA, 20 bp, Artificial Sequence
  Description of Artificial Sequence: Synthetic oligonucleotide
  Target: LAMA2; (+) strand; PAM type: YTN; PAM sequence: CTT
tttttattccagatattgtt

SEQ ID NO: 334714 - DNA, 20 bp, Artificial Sequence
  Description of Artificial Sequence: Synthetic oligonucleotide
  Target: LAMA2; (+) strand; PAM type: YTN; PAM sequence: TTT
ttttattccagatattgttg

SEQ ID NO: 334715 - DNA, 20 bp, Artificial Sequence
  Description of Artificial Sequence: Synthetic oligonucleotide
  Target: LAMA2; (+) strand; PAM type: YTN; PAM sequence: TTT
tttattccagatattgttgt

SEQ ID NO: 334716 - DNA, 20 bp, Artificial Sequence
  Description of Artificial Sequence: Synthetic oligonucleotide
  Target: LAMA2; (+) strand; PAM type: YTN; PAM sequence: TTT
ttattccagatattgttgtg

SEQ ID NO: 334717 - DNA, 20 bp, Artificial Sequence
  Description of Artificial Sequence: Synthetic oligonucleotide
  Target: LAMA2; (+) strand; PAM type: YTN; PAM sequence: TTT
tattccagatattgttgtgt

SEQ ID NO: 334718 - DNA, 20 bp, Artificial Sequence
  Description of Artificial Sequence: Synthetic oligonucleotide
  Target: LAMA2; (+) strand; PAM type: YTN; PAM sequence: TTT
attccagatattgttgtgta

SEQ ID NO: 334719 - DNA, 20 bp, Artificial Sequence
  Description of Artificial Sequence: Synthetic oligonucleotide
  Target: LAMA2; (+) strand; PAM type: YTN; PAM sequence: TTA
ttccagatattgttgtgtaa

SEQ ID NO: 334720 - DNA, 20 bp, Artificial Sequence
  Description of Artificial Sequence: Synthetic oligonucleotide
  Target: LAMA2; (+) strand; PAM type: YTN; PAM sequence: TTC
cagatattgttgtgtaacct

SEQ ID NO: 334721 - DNA, 20 bp, Artificial Sequence
  Description of Artificial Sequence: Synthetic oligonucleotide
  Target: LAMA2; (+) strand; PAM type: YTN; PAM sequence: TTG
ttgtgtaacctttgtttttc

SEQ ID NO: 334722 - DNA, 20 bp, Artificial Sequence
  Description of Artificial Sequence: Synthetic oligonucleotide
  Target: LAMA2; (+) strand; PAM type: YTN; PAM sequence: TTG
tgtaacctttgtttttcctt

SEQ ID NO: 334723 - DNA, 20 bp, Artificial Sequence
  Description of Artificial Sequence: Synthetic oligonucleotide
  Target: LAMA2; (+) strand; PAM type: YTN; PAM sequence: CTT
tgtttttcctttacagcttt

SEQ ID NO: 334724 - DNA, 20 bp, Artificial Sequence
  Description of Artificial Sequence: Synthetic oligonucleotide
  Target: LAMA2; (+) strand; PAM type: YTN; PAM sequence: TTT
gtttttcctttacagcttta

SEQ ID NO: 334725 - DNA, 20 bp, Artificial Sequence
  Description of Artificial Sequence: Synthetic oligonucleotide
  Target: LAMA2; (+) strand; PAM type: YTN; PAM sequence: TTG
tttttcctttacagctttaa

SEQ ID NO: 334726 - DNA, 20 bp, Artificial Sequence
  Description of Artificial Sequence: Synthetic oligonucleotide
  Target: LAMA2; (+) strand; PAM type: YTN; PAM sequence: TTT
ttcctttacagctttaatag

SEQ ID NO: 334727 - DNA, 20 bp, Artificial Sequence
  Description of Artificial Sequence: Synthetic oligonucleotide
  Target: LAMA2; (+) strand; PAM type: YTN; PAM sequence: TTT
tcctttacagctttaatagg

SEQ ID NO: 334728 - DNA, 20 bp, Artificial Sequence
  Description of Artificial Sequence: Synthetic oligonucleotide
  Target: LAMA2; (+) strand; PAM type: YTN; PAM sequence: TTT
cctttacagctttaataggt

SEQ ID NO: 334729 - DNA, 20 bp, Artificial Sequence
  Description of Artificial Sequence: Synthetic oligonucleotide
  Target: LAMA2; (+) strand; PAM type: YTN; PAM sequence: TTC
ctttacagctttaataggtc

SEQ ID NO: 334730 - DNA, 20 bp, Artificial Sequence
  Description of Artificial Sequence: Synthetic oligonucleotide
  Target: LAMA2; (+) strand; PAM type: YTN; PAM sequence: CTT
tacagctttaataggtcttc

SEQ ID NO: 334731 - DNA, 20 bp, Artificial Sequence
  Description of Artificial Sequence: Synthetic oligonucleotide
  Target: LAMA2; (+) strand; PAM type: YTN; PAM sequence: TTT
acagctttaataggtcttca

SEQ ID NO: 334732 - DNA, 20 bp, Artificial Sequence
  Description of Artificial Sequence: Synthetic oligonucleotide
  Target: LAMA2; (+) strand; PAM type: YTN; PAM sequence: TTA
cagctttaataggtcttcat

SEQ ID NO: 334733 - DNA, 20 bp, Artificial Sequence
  Description of Artificial Sequence: Synthetic oligonucleotide
  Target: LAMA2; (+) strand; PAM type: YTN; PAM sequence: CTT
taataggtcttcataatttc

SEQ ID NO: 334734 - DNA, 20 bp, Artificial Sequence
  Description of Artificial Sequence: Synthetic oligonucleotide
  Target: LAMA2; (+) strand; PAM type: YTN; PAM sequence: TTT
aataggtcttcataatttca

SEQ ID NO: 334735 - DNA, 20 bp, Artificial Sequence
  Description of Artificial Sequence: Synthetic oligonucleotide
  Target: LAMA2; (+) strand; PAM type: YTN; PAM sequence: TTA
ataggtcttcataatttcat

SEQ ID NO: 334736 - DNA, 20 bp, Artificial Sequence
  Description of Artificial Sequence: Synthetic oligonucleotide
  Target: LAMA2; (+) strand; PAM type: YTN; PAM sequence: CTT
cataatttcattagtctttt

SEQ ID NO: 334737 - DNA, 20 bp, Artificial Sequence
  Description of Artificial Sequence: Synthetic oligonucleotide
  Target: LAMA2; (+) strand; PAM type: YTN; PAM sequence: TTC
ataatttcattagtcttttt

SEQ ID NO: 334738 - DNA, 20 bp, Artificial Sequence
  Description of Artificial Sequence: Synthetic oligonucleotide
  Target: LAMA2; (+) strand; PAM type: YTN; PAM sequence: TTT
cattagtctttttcaaatag

SEQ ID NO: 334739 - DNA, 20 bp, Artificial Sequence
  Description of Artificial Sequence: Synthetic oligonucleotide
  Target: LAMA2; (+) strand; PAM type: YTN; PAM sequence: TTC
attagtctttttcaaatagc

SEQ ID NO: 334740 - DNA, 20 bp, Artificial Sequence
  Description of Artificial Sequence: Synthetic oligonucleotide
  Target: LAMA2; (+) strand; PAM type: YTN; PAM sequence: TTA
gtctttttcaaatagccagt

SEQ ID NO: 334741 - DNA, 20 bp, Artificial Sequence
  Description of Artificial Sequence: Synthetic oligonucleotide
  Target: LAMA2; (+) strand; PAM type: YTN; PAM sequence: CTT
tttcaaatagccagttttgg

SEQ ID NO: 334742 - DNA, 20 bp, Artificial Sequence
  Description of Artificial Sequence: Synthetic oligonucleotide
  Target: LAMA2; (+) strand; PAM type: YTN; PAM sequence: TTT
ttcaaatagccagttttggg

SEQ ID NO: 334743 - DNA, 20 bp, Artificial Sequence
  Description of Artificial Sequence: Synthetic oligonucleotide
  Target: LAMA2; (+) strand; PAM type: YTN; PAM sequence: TTT
tcaaatagccagttttgggc

SEQ ID NO: 334744 - DNA, 20 bp, Artificial Sequence
  Description of Artificial Sequence: Synthetic oligonucleotide
  Target: LAMA2; (+) strand; PAM type: YTN; PAM sequence: TTT
caaatagccagttttgggct

SEQ ID NO: 334745 - DNA, 20 bp, Artificial Sequence
  Description of Artificial Sequence: Synthetic oligonucleotide
  Target: LAMA2; (+) strand; PAM type: YTN; PAM sequence: TTC
aaatagccagttttgggctt

SEQ ID NO: 334746 - DNA, 20 bp, Artificial Sequence
  Description of Artificial Sequence: Synthetic oligonucleotide
  Target: LAMA2; (+) strand; PAM type: YTN; PAM sequence: TTT
tgggcttgattgattttctc

SEQ ID NO: 334747 - DNA, 20 bp, Artificial Sequence
  Description of Artificial Sequence: Synthetic oligonucleotide
  Target: LAMA2; (+) strand; PAM type: YTN; PAM sequence: TTT
gggcttgattgattttctct

SEQ ID NO: 334748 - DNA, 20 bp, Artificial Sequence
  Description of Artificial Sequence: Synthetic oligonucleotide
  Target: LAMA2; (+) strand; PAM type: YTN; PAM sequence: TTG
ggcttgattgattttctcta

SEQ ID NO: 334749 - DNA, 20 bp, Artificial Sequence
  Description of Artificial Sequence: Synthetic oligonucleotide
  Target: LAMA2; (+) strand; PAM type: YTN; PAM sequence: CTT
gattgattttctctatcgtg

SEQ ID NO: 334750 - DNA, 20 bp, Artificial Sequence
  Description of Artificial Sequence: Synthetic oligonucleotide
  Target: LAMA2; (+) strand; PAM type: YTN; PAM sequence: TTG
attgattttctctatcgtga

SEQ ID NO: 334751 - DNA, 20 bp, Artificial Sequence
  Description of Artificial Sequence: Synthetic oligonucleotide
  Target: LAMA2; (+) strand; PAM type: YTN; PAM sequence: TTG
attttctctatcgtgaaatt

SEQ ID NO: 334752 - DNA, 20 bp, Artificial Sequence
  Description of Artificial Sequence: Synthetic oligonucleotide
  Target: LAMA2; (+) strand; PAM type: YTN; PAM sequence: TTT
tctctatcgtgaaattgtta

SEQ ID NO: 334753 - DNA, 20 bp, Artificial Sequence
  Description of Artificial Sequence: Synthetic oligonucleotide
  Target: LAMA2; (+) strand; PAM type: YTN; PAM sequence: TTT
ctctatcgtgaaattgttat

SEQ ID NO: 334754 - DNA, 20 bp, Artificial Sequence
  Description of Artificial Sequence: Synthetic oligonucleotide
  Target: LAMA2; (+) strand; PAM type: YTN; PAM sequence: TTC
tctatcgtgaaattgttata

SEQ ID NO: 334755 - DNA, 20 bp, Artificial Sequence
  Description of Artificial Sequence: Synthetic oligonucleotide
  Target: LAMA2; (+) strand; PAM type: YTN; PAM sequence: CTC
tatcgtgaaattgttatatt

SEQ ID NO: 334756 - DNA, 20 bp, Artificial Sequence
  Description of Artificial Sequence: Synthetic oligonucleotide
  Target: LAMA2; (+) strand; PAM type: YTN; PAM sequence: CTA
tcgtgaaattgttatattgt

SEQ ID NO: 334757 - DNA, 20 bp, Artificial Sequence
  Description of Artificial Sequence: Synthetic oligonucleotide
  Target: LAMA2; (+) strand; PAM type: YTN; PAM sequence: TTG
ttatattgtattgaatcctg

SEQ ID NO: 334758 - DNA, 20 bp, Artificial Sequence
  Description of Artificial Sequence: Synthetic oligonucleotide
  Target: LAMA2; (+) strand; PAM type: YTN; PAM sequence: TTA
tattgtattgaatcctgctc

SEQ ID NO: 334759 - DNA, 20 bp, Artificial Sequence
  Description of Artificial Sequence: Synthetic oligonucleotide
  Target: LAMA2; (+) strand; PAM type: YTN; PAM sequence: TTG
tattgaatcctgctcttata

SEQ ID NO: 334760 - DNA, 20 bp, Artificial Sequence
  Description of Artificial Sequence: Synthetic oligonucleotide
  Target: LAMA2; (+) strand; PAM type: YTN; PAM sequence: TTG
aatcctgctcttatatgtct

SEQ ID NO: 334761 - DNA, 20 bp, Artificial Sequence
  Description of Artificial Sequence: Synthetic oligonucleotide
  Target: LAMA2; (+) strand; PAM type: YTN; PAM sequence: CTG
ctcttatatgtcttgttttt

SEQ ID NO: 334762 - DNA, 20 bp, Artificial Sequence
  Description of Artificial Sequence: Synthetic oligonucleotide
  Target: LAMA2; (+) strand; PAM type: YTN; PAM sequence: CTC
ttatatgtcttgttttttac

SEQ ID NO: 334763 - DNA, 20 bp, Artificial Sequence
  Description of Artificial Sequence: Synthetic oligonucleotide
  Target: LAMA2; (+) strand; PAM type: YTN; PAM sequence: CTT
atatgtcttgttttttactt

SEQ ID NO: 334764 - DNA, 20 bp, Artificial Sequence
  Description of Artificial Sequence: Synthetic oligonucleotide
  Target: LAMA2; (+) strand; PAM type: YTN; PAM sequence: TTA
tatgtcttgttttttacttc

SEQ ID NO: 334765 - DNA, 20 bp, Artificial Sequence
  Description of Artificial Sequence: Synthetic oligonucleotide
  Target: LAMA2; (+) strand; PAM type: YTN; PAM sequence: CTT
gttttttacttctcgttatt

SEQ ID NO: 334766 - DNA, 20 bp, Artificial Sequence
  Description of Artificial Sequence: Synthetic oligonucleotide
  Target: LAMA2; (+) strand; PAM type: YTN; PAM sequence: TTG
ttttttacttctcgttattt

SEQ ID NO: 334767 - DNA, 20 bp, Artificial Sequence
  Description of Artificial Sequence: Synthetic oligonucleotide
  Target: LAMA2; (+) strand; PAM type: YTN; PAM sequence: TTT
tttacttctcgttatttttt

SEQ ID NO: 334768 - DNA, 20 bp, Artificial Sequence
  Description of Artificial Sequence: Synthetic oligonucleotide
  Target: LAMA2; (+) strand; PAM type: YTN; PAM sequence: TTT
ttacttctcgttatttttta

SEQ ID NO: 334769 - DNA, 20 bp, Artificial Sequence
  Description of Artificial Sequence: Synthetic oligonucleotide
  Target: LAMA2; (+) strand; PAM type: YTN; PAM sequence: TTT
tacttctcgttattttttat

SEQ ID NO: 334770 - DNA, 20 bp, Artificial Sequence
  Description of Artificial Sequence: Synthetic oligonucleotide
  Target: LAMA2; (+) strand; PAM type: YTN; PAM sequence: TTT
acttctcgttattttttatt

SEQ ID NO: 334771 - DNA, 20 bp, Artificial Sequence
  Description of Artificial Sequence: Synthetic oligonucleotide
  Target: LAMA2; (+) strand; PAM type: YTN; PAM sequence: TTA
cttctcgttattttttattt

SEQ ID NO: 334772 - DNA, 20 bp, Artificial Sequence
  Description of Artificial Sequence: Synthetic oligonucleotide
  Target: LAMA2; (+) strand; PAM type: YTN; PAM sequence: CTT
ctcgttattttttattttag

SEQ ID NO: 334773 - DNA, 20 bp, Artificial Sequence
  Description of Artificial Sequence: Synthetic oligonucleotide
  Target: LAMA2; (+) strand; PAM type: YTN; PAM sequence: TTC
tcgttattttttattttagt

SEQ ID NO: 334774 - DNA, 20 bp, Artificial Sequence
  Description of Artificial Sequence: Synthetic oligonucleotide
  Target: LAMA2; (+) strand; PAM type: YTN; PAM sequence: CTC
gttattttttattttagttt

SEQ ID NO: 334775 - DNA, 20 bp, Artificial Sequence
  Description of Artificial Sequence: Synthetic oligonucleotide
  Target: LAMA2; (+) strand; PAM type: YTN; PAM sequence: TTA
ttttttattttagtttacta

SEQ ID NO: 334776 - DNA, 20 bp, Artificial Sequence
  Description of Artificial Sequence: Synthetic oligonucleotide
  Target: LAMA2; (+) strand; PAM type: YTN; PAM sequence: TTT
tttattttagtttactacat

SEQ ID NO: 334777 - DNA, 20 bp, Artificial Sequence
  Description of Artificial Sequence: Synthetic oligonucleotide
  Target: LAMA2; (+) strand; PAM type: YTN; PAM sequence: TTT
ttattttagtttactacatt

SEQ ID NO: 334778 - DNA, 20 bp, Artificial Sequence
  Description of Artificial Sequence: Synthetic oligonucleotide
  Target: LAMA2; (+) strand; PAM type: YTN; PAM sequence: TTT
tattttagtttactacattt

SEQ ID NO: 334779 - DNA, 20 bp, Artificial Sequence
  Description of Artificial Sequence: Synthetic oligonucleotide
  Target: LAMA2; (+) strand; PAM type: YTN; PAM sequence: TTT
attttagtttactacatttt

SEQ ID NO: 334780 - DNA, 20 bp, Artificial Sequence
  Description of Artificial Sequence: Synthetic oligonucleotide
  Target: LAMA2; (+) strand; PAM type: YTN; PAM sequence: TTA
ttttagtttactacattttc

SEQ ID NO: 334781 - DNA, 20 bp, Artificial Sequence
  Description of Artificial Sequence: Synthetic oligonucleotide
  Target: LAMA2; (+) strand; PAM type: YTN; PAM sequence: TTT
tagtttactacattttctta

SEQ ID NO: 334782 - DNA, 20 bp, Artificial Sequence
  Description of Artificial Sequence: Synthetic oligonucleotide
  Target: LAMA2; (+) strand; PAM type: YTN; PAM sequence: TTT
agtttactacattttcttag

SEQ ID NO: 334783 - DNA, 20 bp, Artificial Sequence
  Description of Artificial Sequence: Synthetic oligonucleotide
  Target: LAMA2; (+) strand; PAM type: YTN; PAM sequence: TTA
gtttactacattttcttagc

SEQ ID NO: 334784 - DNA, 20 bp, Artificial Sequence
  Description of Artificial Sequence: Synthetic oligonucleotide
  Target: LAMA2; (+) strand; PAM type: YTN; PAM sequence: TTT
actacattttcttagcttct

SEQ ID NO: 334785 - DNA, 20 bp, Artificial Sequence
  Description of Artificial Sequence: Synthetic oligonucleotide
  Target: LAMA2; (+) strand; PAM type: YTN; PAM sequence: TTA
ctacattttcttagcttctt

SEQ ID NO: 334786 - DNA, 20 bp, Artificial Sequence
  Description of Artificial Sequence: Synthetic oligonucleotide
  Target: LAMA2; (+) strand; PAM type: YTN; PAM sequence: CTA
cattttcttagcttcttgaa

SEQ ID NO: 334787 - DNA, 20 bp, Artificial Sequence
  Description of Artificial Sequence: Synthetic oligonucleotide
  Target: LAMA2; (+) strand; PAM type: YTN; PAM sequence: TTT
tcttagcttcttgaaatgga

SEQ ID NO: 334788 - DNA, 20 bp, Artificial Sequence
  Description of Artificial Sequence: Synthetic oligonucleotide
  Target: LAMA2; (+) strand; PAM type: YTN; PAM sequence: TTT
cttagcttcttgaaatggat

SEQ ID NO: 334789 - DNA, 20 bp, Artificial Sequence
  Description of Artificial Sequence: Synthetic oligonucleotide
  Target: LAMA2; (+) strand; PAM type: YTN; PAM sequence: TTC
ttagcttcttgaaatggata

SEQ ID NO: 334790 - DNA, 20 bp, Artificial Sequence
  Description of Artificial Sequence: Synthetic oligonucleotide
  Target: LAMA2; (+) strand; PAM type: YTN; PAM sequence: CTT
agcttcttgaaatggatacc

SEQ ID NO: 334791 - DNA, 20 bp, Artificial Sequence
  Description of Artificial Sequence: Synthetic oligonucleotide
  Target: LAMA2; (+) strand; PAM type: YTN; PAM sequence: TTA
gcttcttgaaatggatacct

SEQ ID NO: 334792 - DNA, 20 bp, Artificial Sequence
  Description of Artificial Sequence: Synthetic oligonucleotide
  Target: LAMA2; (+) strand; PAM type: YTN; PAM sequence: CTT
cttgaaatggatacctatgt

SEQ ID NO: 334793 - DNA, 20 bp, Artificial Sequence
  Description of Artificial Sequence: Synthetic oligonucleotide
  Target: LAMA2; (+) strand; PAM type: YTN; PAM sequence: TTC
ttgaaatggatacctatgtt

SEQ ID NO: 334794 - DNA, 20 bp, Artificial Sequence
  Description of Artificial Sequence: Synthetic oligonucleotide
  Target: LAMA2; (+) strand; PAM type: YTN; PAM sequence: CTT
gaaatggatacctatgttat

SEQ ID NO: 334795 - DNA, 20 bp, Artificial Sequence
  Description of Artificial Sequence: Synthetic oligonucleotide
  Target: LAMA2; (+) strand; PAM type: YTN; PAM sequence: TTG
aaatggatacctatgttatt

SEQ ID NO: 334796 - DNA, 20 bp, Artificial Sequence
  Description of Artificial Sequence: Synthetic oligonucleotide
  Target: LAMA2; (+) strand; PAM type: YTN; PAM sequence: CTA
tgttattaatatttcagttc

SEQ ID NO: 334797 - DNA, 20 bp, Artificial Sequence
  Description of Artificial Sequence: Synthetic oligonucleotide
  Target: LAMA2; (+) strand; PAM type: YTN; PAM sequence: TTA
ttaatatttcagttcttttt

SEQ ID NO: 334798 - DNA, 20 bp, Artificial Sequence
  Description of Artificial Sequence: Synthetic oligonucleotide
  Target: LAMA2; (+) strand; PAM type: YTN; PAM sequence: TTA
atatttcagttcttttttcc

SEQ ID NO: 334799 - DNA, 20 bp, Artificial Sequence
  Description of Artificial Sequence: Synthetic oligonucleotide
  Target: LAMA2; (+) strand; PAM type: YTN; PAM sequence: TTT
cagttcttttttcctaatat

SEQ ID NO: 334800 - DNA, 20 bp, Artificial Sequence
  Description of Artificial Sequence: Synthetic oligonucleotide
  Target: LAMA2; (+) strand; PAM type: YTN; PAM sequence: TTC
agttcttttttcctaatata

SEQ ID NO: 334801 - DNA, 20 bp, Artificial Sequence
  Description of Artificial Sequence: Synthetic oligonucleotide
  Target: LAMA2; (+) strand; PAM type: YTN; PAM sequence: TTC
ttttttcctaatatatttat

SEQ ID NO: 334802 - DNA, 20 bp, Artificial Sequence
  Description of Artificial Sequence: Synthetic oligonucleotide
  Target: LAMA2; (+) strand; PAM type: YTN; PAM sequence: CTT
ttttcctaatatatttatta

SEQ ID NO: 334803 - DNA, 20 bp, Artificial Sequence
  Description of Artificial Sequence: Synthetic oligonucleotide
  Target: LAMA2; (+) strand; PAM type: YTN; PAM sequence: TTT
tttcctaatatatttattaa

SEQ ID NO: 334804 - DNA, 20 bp, Artificial Sequence
  Description of Artificial Sequence: Synthetic oligonucleotide
  Target: LAMA2; (+) strand; PAM type: YTN; PAM sequence: TTT
ttcctaatatatttattaac

SEQ ID NO: 334805 - DNA, 20 bp, Artificial Sequence
  Description of Artificial Sequence: Synthetic oligonucleotide
  Target: LAMA2; (+) strand; PAM type: YTN; PAM sequence: TTT
tcctaatatatttattaacg

SEQ ID NO: 334806 - DNA, 20 bp, Artificial Sequence
  Description of Artificial Sequence: Synthetic oligonucleotide
  Target: LAMA2; (+) strand; PAM type: YTN; PAM sequence: TTT
cctaatatatttattaacgc

SEQ ID NO: 334807 - DNA, 20 bp, Artificial Sequence
  Description of Artificial Sequence: Synthetic oligonucleotide
  Target: LAMA2; (+) strand; PAM type: YTN; PAM sequence: TTC
ctaatatatttattaacgcc

SEQ ID NO: 334808 - DNA, 20 bp, Artificial Sequence
  Description of Artificial Sequence: Synthetic oligonucleotide
  Target: LAMA2; (+) strand; PAM type: YTN; PAM sequence: CTA
atatatttattaacgcctac

SEQ ID NO: 334809 - DNA, 20 bp, Artificial Sequence
  Description of Artificial Sequence: Synthetic oligonucleotide
  Target: LAMA2; (+) strand; PAM type: YTN; PAM sequence: TTT
attaacgcctacaatttgcc

SEQ ID NO: 334810 - DNA, 20 bp, Artificial Sequence
  Description of Artificial Sequence: Synthetic oligonucleotide
  Target: LAMA2; (+) strand; PAM type: YTN; PAM sequence: TTA
ttaacgcctacaatttgcct

SEQ ID NO: 334811 - DNA, 20 bp, Artificial Sequence
  Description of Artificial Sequence: Synthetic oligonucleotide
  Target: LAMA2; (+) strand; PAM type: YTN; PAM sequence: TTA
acgcctacaatttgcctcta

SEQ ID NO: 334812 - DNA, 20 bp, Artificial Sequence
  Description of Artificial Sequence: Synthetic oligonucleotide
  Target: LAMA2; (+) strand; PAM type: YTN; PAM sequence: CTA
caatttgcctctacataggg

SEQ ID NO: 334813 - DNA, 20 bp, Artificial Sequence
  Description of Artificial Sequence: Synthetic oligonucleotide
  Target: LAMA2; (+) strand; PAM type: YTN; PAM sequence: TTT
gcctctacatagggctttag

SEQ ID NO: 334814 - DNA, 20 bp, Artificial Sequence
  Description of Artificial Sequence: Synthetic oligonucleotide
  Target: LAMA2; (+) strand; PAM type: YTN; PAM sequence: TTG
cctctacatagggctttagt

SEQ ID NO: 334815 - DNA, 20 bp, Artificial Sequence
  Description of Artificial Sequence: Synthetic oligonucleotide
  Target: LAMA2; (+) strand; PAM type: YTN; PAM sequence: CTC
tacatagggctttagttgcc

SEQ ID NO: 334816 - DNA, 20 bp, Artificial Sequence
  Description of Artificial Sequence: Synthetic oligonucleotide
  Target: LAMA2; (+) strand; PAM type: YTN; PAM sequence: CTA
catagggctttagttgcctc

SEQ ID NO: 334817 - DNA, 20 bp, Artificial Sequence
  Description of Artificial Sequence: Synthetic oligonucleotide
  Target: LAMA2; (+) strand; PAM type: YTN; PAM sequence: CTT
tagttgcctcctacaagttt

SEQ ID NO: 334818 - DNA, 20 bp, Artificial Sequence
  Description of Artificial Sequence: Synthetic oligonucleotide
  Target: LAMA2; (+) strand; PAM type: YTN; PAM sequence: TTT
agttgcctcctacaagtttg

SEQ ID NO: 334819 - DNA, 20 bp, Artificial Sequence
  Description of Artificial Sequence: Synthetic oligonucleotide
  Target: LAMA2; (+) strand; PAM type: YTN; PAM sequence: TTA
gttgcctcctacaagtttga

SEQ ID NO: 334820 - DNA, 20 bp, Artificial Sequence
  Description of Artificial Sequence: Synthetic oligonucleotide
  Target: LAMA2; (+) strand; PAM type: YTN; PAM sequence: TTG
cctcctacaagtttgatata

SEQ ID NO: 334821 - DNA, 20 bp, Artificial Sequence
  Description of Artificial Sequence: Synthetic oligonucleotide
  Target: LAMA2; (+) strand; PAM type: YTN; PAM sequence: CTC
ctacaagtttgatatattgt

SEQ ID NO: 334822 - DNA, 20 bp, Artificial Sequence
  Description of Artificial Sequence: Synthetic oligonucleotide
  Target: LAMA2; (+) strand; PAM type: YTN; PAM sequence: CTA
caagtttgatatattgtatt

SEQ ID NO: 334823 - DNA, 20 bp, Artificial Sequence
  Description of Artificial Sequence: Synthetic oligonucleotide
  Target: LAMA2; (+) strand; PAM type: YTN; PAM sequence: TTT
gatatattgtatttttcatt

SEQ ID NO: 334824 - DNA, 20 bp, Artificial Sequence
  Description of Artificial Sequence: Synthetic oligonucleotide
  Target: LAMA2; (+) strand; PAM type: YTN; PAM sequence: TTG
atatattgtatttttcatta

SEQ ID NO: 334825 - DNA, 20 bp, Artificial Sequence
  Description of Artificial Sequence: Synthetic oligonucleotide
  Target: LAMA2; (+) strand; PAM type: YTN; PAM sequence: TTG
tatttttcattatcatttat

SEQ ID NO: 334826 - DNA, 20 bp, Artificial Sequence
  Description of Artificial Sequence: Synthetic oligonucleotide
  Target: LAMA2; (+) strand; PAM type: YTN; PAM sequence: TTT
ttcattatcatttattttaa

SEQ ID NO: 334827 - DNA, 20 bp, Artificial Sequence
  Description of Artificial Sequence: Synthetic oligonucleotide
  Target: LAMA2; (+) strand; PAM type: YTN; PAM sequence: TTT
tcattatcatttattttaaa

SEQ ID NO: 334828 - DNA, 20 bp, Artificial Sequence
  Description of Artificial Sequence: Synthetic oligonucleotide
  Target: LAMA2; (+) strand; PAM type: YTN; PAM sequence: TTT
cattatcatttattttaaaa

SEQ ID NO: 334829 - DNA, 20 bp, Artificial Sequence
  Description of Artificial Sequence: Synthetic oligonucleotide
  Target: LAMA2; (+) strand; PAM type: YTN; PAM sequence: TTC
attatcatttattttaaaat

SEQ ID NO: 334830 - DNA, 20 bp, Artificial Sequence
  Description of Artificial Sequence: Synthetic oligonucleotide
  Target: LAMA2; (+) strand; PAM type: YTN; PAM sequence: TTA
tcatttattttaaaatatat

SEQ ID NO: 334831 - DNA, 20 bp, Artificial Sequence
  Description of Artificial Sequence: Synthetic oligonucleotide
  Target: LAMA2; (+) strand; PAM type: YTN; PAM sequence: TTT
attttaaaatatattctaat

SEQ ID NO: 334832 - DNA, 20 bp, Artificial Sequence
  Description of Artificial Sequence: Synthetic oligonucleotide
  Target: LAMA2; (+) strand; PAM type: YTN; PAM sequence: TTA
ttttaaaatatattctaatt

SEQ ID NO: 334833 - DNA, 20 bp, Artificial Sequence
  Description of Artificial Sequence: Synthetic oligonucleotide
  Target: LAMA2; (+) strand; PAM type: YTN; PAM sequence: TTT
taaaatatattctaattttc

SEQ ID NO: 334834 - DNA, 20 bp, Artificial Sequence
  Description of Artificial Sequence: Synthetic oligonucleotide
  Target: LAMA2; (+) strand; PAM type: YTN; PAM sequence: TTT
aaaatatattctaattttca

SEQ ID NO: 334835 - DNA, 20 bp, Artificial Sequence
  Description of Artificial Sequence: Synthetic oligonucleotide
  Target: LAMA2; (+) strand; PAM type: YTN; PAM sequence: TTA
aaatatattctaattttcat

SEQ ID NO: 334836 - DNA, 20 bp, Artificial Sequence
  Description of Artificial Sequence: Synthetic oligonucleotide
  Target: LAMA2; (+) strand; PAM type: YTN; PAM sequence: TTC
taattttcatagtaaatttt

SEQ ID NO: 334837 - DNA, 20 bp, Artificial Sequence
  Description of Artificial Sequence: Synthetic oligonucleotide
  Target: LAMA2; (+) strand; PAM type: YTN; PAM sequence: CTA
attttcatagtaaatttttc

SEQ ID NO: 334838 - DNA, 20 bp, Artificial Sequence
  Description of Artificial Sequence: Synthetic oligonucleotide
  Target: LAMA2; (+) strand; PAM type: YTN; PAM sequence: TTT
tcatagtaaatttttctgtg

SEQ ID NO: 334839 - DNA, 20 bp, Artificial Sequence
  Description of Artificial Sequence: Synthetic oligonucleotide
  Target: LAMA2; (+) strand; PAM type: YTN; PAM sequence: TTT
catagtaaatttttctgtgg

SEQ ID NO: 334840 - DNA, 20 bp, Artificial Sequence
  Description of Artificial Sequence: Synthetic oligonucleotide
  Target: LAMA2; (+) strand; PAM type: YTN; PAM sequence: TTC
atagtaaatttttctgtggc

SEQ ID NO: 334841 - DNA, 20 bp, Artificial Sequence
  Description of Artificial Sequence: Synthetic oligonucleotide
  Target: LAMA2; (+) strand; PAM type: YTN; PAM sequence: TTT
ttctgtggcctctgagttat

SEQ ID NO: 334842 - DNA, 20 bp, Artificial Sequence
  Description of Artificial Sequence: Synthetic oligonucleotide
  Target: LAMA2; (+) strand; PAM type: YTN; PAM sequence: TTT
tctgtggcctctgagttata

SEQ ID NO: 334843 - DNA, 20 bp, Artificial Sequence
  Description of Artificial Sequence: Synthetic oligonucleotide
  Target: LAMA2; (+) strand; PAM type: YTN; PAM sequence: TTT
ctgtggcctctgagttatat

SEQ ID NO: 334844 - DNA, 20 bp, Artificial Sequence
  Description of Artificial Sequence: Synthetic oligonucleotide
  Target: LAMA2; (+) strand; PAM type: YTN; PAM sequence: TTC
tgtggcctctgagttatata

SEQ ID NO: 334845 - DNA, 20 bp, Artificial Sequence
  Description of Artificial Sequence: Synthetic oligonucleotide
  Target: LAMA2; (+) strand; PAM type: YTN; PAM sequence: CTG
tggcctctgagttatataga

SEQ ID NO: 334846 - DNA, 20 bp, Artificial Sequence
  Description of Artificial Sequence: Synthetic oligonucleotide
  Target: LAMA2; (+) strand; PAM type: YTN; PAM sequence: CTC
tgagttatatagaagtgaag

SEQ ID NO: 334847 - DNA, 20 bp, Artificial Sequence
  Description of Artificial Sequence: Synthetic oligonucleotide
  Target: LAMA2; (+) strand; PAM type: YTN; PAM sequence: CTG
agttatatagaagtgaagtg

SEQ ID NO: 334848 - DNA, 20 bp, Artificial Sequence
  Description of Artificial Sequence: Synthetic oligonucleotide
  Target: LAMA2; (+) strand; PAM type: YTN; PAM sequence: TTA
tatagaagtgaagtgcttaa

SEQ ID NO: 334849 - DNA, 20 bp, Artificial Sequence
  Description of Artificial Sequence: Synthetic oligonucleotide
  Target: LAMA2; (+) strand; PAM type: YTN; PAM sequence: CTT
aatttctgaacaattgagta

SEQ ID NO: 334850 - DNA, 20 bp, Artificial Sequence
  Description of Artificial Sequence: Synthetic oligonucleotide
  Target: LAMA2; (+) strand; PAM type: YTN; PAM sequence: TTA
atttctgaacaattgagtat

SEQ ID NO: 334851 - DNA, 20 bp, Artificial Sequence
  Description of Artificial Sequence: Synthetic oligonucleotide
  Target: LAMA2; (+) strand; PAM type: YTN; PAM sequence: TTT
ctgaacaattgagtattttt

SEQ ID NO: 334852 - DNA, 20 bp, Artificial Sequence
  Description of Artificial Sequence: Synthetic oligonucleotide
  Target: LAMA2; (+) strand; PAM type: YTN; PAM sequence: TTC
tgaacaattgagtatttttc

SEQ ID NO: 334853 - DNA, 20 bp, Artificial Sequence
  Description of Artificial Sequence: Synthetic oligonucleotide
  Target: LAMA2; (+) strand; PAM type: YTN; PAM sequence: CTG
aacaattgagtatttttcta

SEQ ID NO: 334854 - DNA, 20 bp, Artificial Sequence
  Description of Artificial Sequence: Synthetic oligonucleotide
  Target: LAMA2; (+) strand; PAM type: YTN; PAM sequence: TTG
agtatttttctaatcgtttt

SEQ ID NO: 334855 - DNA, 20 bp, Artificial Sequence
  Description of Artificial Sequence: Synthetic oligonucleotide
  Target: LAMA2; (+) strand; PAM type: YTN; PAM sequence: TTT
ttctaatcgttttgtttttg

SEQ ID NO: 334856 - DNA, 20 bp, Artificial Sequence
  Description of Artificial Sequence: Synthetic oligonucleotide
  Target: LAMA2; (+) strand; PAM type: YTN; PAM sequence: TTT
tctaatcgttttgtttttgt

SEQ ID NO: 334857 - DNA, 20 bp, Artificial Sequence
  Description of Artificial Sequence: Synthetic oligonucleotide
  Target: LAMA2; (+) strand; PAM type: YTN; PAM sequence: TTT
ctaatcgttttgtttttgtt

SEQ ID NO: 334858 - DNA, 20 bp, Artificial Sequence
  Description of Artificial Sequence: Synthetic oligonucleotide
  Target: LAMA2; (+) strand; PAM type: YTN; PAM sequence: TTC
taatcgttttgtttttgttg

SEQ ID NO: 334859 - DNA, 20 bp, Artificial Sequence
  Description of Artificial Sequence: Synthetic oligonucleotide
  Target: LAMA2; (+) strand; PAM type: YTN; PAM sequence: CTA
atcgttttgtttttgttgtt

SEQ ID NO: 334860 - DNA, 20 bp, Artificial Sequence
  Description of Artificial Sequence: Synthetic oligonucleotide
  Target: LAMA2; (+) strand; PAM type: YTN; PAM sequence: TTT
tgtttttgttgttattcctt

SEQ ID NO: 334861 - DNA, 20 bp, Artificial Sequence
  Description of Artificial Sequence: Synthetic oligonucleotide
  Target: LAMA2; (+) strand; PAM type: YTN; PAM sequence: TTT
gtttttgttgttattccttt

SEQ ID NO: 334862 - DNA, 20 bp, Artificial Sequence
  Description of Artificial Sequence: Synthetic oligonucleotide
  Target: LAMA2; (+) strand; PAM type: YTN; PAM sequence: TTG
tttttgttgttattcctttc

SEQ ID NO: 334863 - DNA, 20 bp, Artificial Sequence
  Description of Artificial Sequence: Synthetic oligonucleotide
  Target: LAMA2; (+) strand; PAM type: YTN; PAM sequence: TTT
ttgttgttattcctttcctc

SEQ ID NO: 334864 - DNA, 20 bp, Artificial Sequence
  Description of Artificial Sequence: Synthetic oligonucleotide
  Target: LAMA2; (+) strand; PAM type: YTN; PAM sequence: TTT
tgttgttattcctttcctca

SEQ ID NO: 334865 - DNA, 20 bp, Artificial Sequence
  Description of Artificial Sequence: Synthetic oligonucleotide
  Target: LAMA2; (+) strand; PAM type: YTN; PAM sequence: TTT
gttgttattcctttcctcac

SEQ ID NO: 334866 - DNA, 20 bp, Artificial Sequence
  Description of Artificial Sequence: Synthetic oligonucleotide
  Target: LAMA2; (+) strand; PAM type: YTN; PAM sequence: TTG
ttgttattcctttcctcact

SEQ ID NO: 334867 - DNA, 20 bp, Artificial Sequence
  Description of Artificial Sequence: Synthetic oligonucleotide
  Target: LAMA2; (+) strand; PAM type: YTN; PAM sequence: TTG
ttattcctttcctcactaat

SEQ ID NO: 334868 - DNA, 20 bp, Artificial Sequence
  Description of Artificial Sequence: Synthetic oligonucleotide
  Target: LAMA2; (+) strand; PAM type: YTN; PAM sequence: TTA
ttcctttcctcactaattcc

SEQ ID NO: 334869 - DNA, 20 bp, Artificial Sequence
  Description of Artificial Sequence: Synthetic oligonucleotide
  Target: LAMA2; (+) strand; PAM type: YTN; PAM sequence: TTC
ctttcctcactaattccact

SEQ ID NO: 334870 - DNA, 20 bp, Artificial Sequence
  Description of Artificial Sequence: Synthetic oligonucleotide
  Target: LAMA2; (+) strand; PAM type: YTN; PAM sequence: CTT
tcctcactaattccactatg

SEQ ID NO: 334871 - DNA, 20 bp, Artificial Sequence
  Description of Artificial Sequence: Synthetic oligonucleotide
  Target: LAMA2; (+) strand; PAM type: YTN; PAM sequence: TTT
cctcactaattccactatgg

SEQ ID NO: 334872 - DNA, 20 bp, Artificial Sequence
  Description of Artificial Sequence: Synthetic oligonucleotide
  Target: LAMA2; (+) strand; PAM type: YTN; PAM sequence: TTC
ctcactaattccactatggt

SEQ ID NO: 334873 - DNA, 20 bp, Artificial Sequence
  Description of Artificial Sequence: Synthetic oligonucleotide
  Target: LAMA2; (+) strand; PAM type: YTN; PAM sequence: CTC
actaattccactatggtcag

SEQ ID NO: 334874 - DNA, 20 bp, Artificial Sequence
  Description of Artificial Sequence: Synthetic oligonucleotide
  Target: LAMA2; (+) strand; PAM type: YTN; PAM sequence: CTA
attccactatggtcagtgta

SEQ ID NO: 334875 - DNA, 20 bp, Artificial Sequence
  Description of Artificial Sequence: Synthetic oligonucleotide
  Target: LAMA2; (+) strand; PAM type: YTN; PAM sequence: TTC
cactatggtcagtgtatttt

SEQ ID NO: 334876 - DNA, 20 bp, Artificial Sequence
  Description of Artificial Sequence: Synthetic oligonucleotide
  Target: LAMA2; (+) strand; PAM type: YTN; PAM sequence: CTA
tggtcagtgtattttcaatt

SEQ ID NO: 334877 - DNA, 20 bp, Artificial Sequence
  Description of Artificial Sequence: Synthetic oligonucleotide
  Target: LAMA2; (+) strand; PAM type: YTN; PAM sequence: TTT
tcaattctttgagactaaac

SEQ ID NO: 334878 - DNA, 20 bp, Artificial Sequence
  Description of Artificial Sequence: Synthetic oligonucleotide
  Target: LAMA2; (+) strand; PAM type: YTN; PAM sequence: TTT
caattctttgagactaaact

SEQ ID NO: 334879 - DNA, 20 bp, Artificial Sequence
  Description of Artificial Sequence: Synthetic oligonucleotide
  Target: LAMA2; (+) strand; PAM type: YTN; PAM sequence: TTC
aattctttgagactaaactt

SEQ ID NO: 334880 - DNA, 20 bp, Artificial Sequence
  Description of Artificial Sequence: Synthetic oligonucleotide
  Target: LAMA2; (+) strand; PAM type: YTN; PAM sequence: TTC
tttgagactaaactttttga

SEQ ID NO: 334881 - DNA, 20 bp, Artificial Sequence
  Description of Artificial Sequence: Synthetic oligonucleotide
  Target: LAMA2; (+) strand; PAM type: YTN; PAM sequence: CTT
tgagactaaactttttgaga

SEQ ID NO: 334882 - DNA, 20 bp, Artificial Sequence
  Description of Artificial Sequence: Synthetic oligonucleotide
  Target: LAMA2; (+) strand; PAM type: YTN; PAM sequence: TTT
gagactaaactttttgagac

SEQ ID NO: 334883 - DNA, 20 bp, Artificial Sequence
  Description of Artificial Sequence: Synthetic oligonucleotide
  Target: LAMA2; (+) strand; PAM type: YTN; PAM sequence: TTG
agactaaactttttgagact

SEQ ID NO: 334884 - DNA, 20 bp, Artificial Sequence
  Description of Artificial Sequence: Synthetic oligonucleotide
  Target: LAMA2; (+) strand; PAM type: YTN; PAM sequence: CTA
aactttttgagacttgtttt

SEQ ID NO: 334885 - DNA, 20 bp, Artificial Sequence
  Description of Artificial Sequence: Synthetic oligonucleotide
  Target: LAMA2; (+) strand; PAM type: YTN; PAM sequence: CTT
tttgagacttgtttttatcc

SEQ ID NO: 334886 - DNA, 20 bp, Artificial Sequence
  Description of Artificial Sequence: Synthetic oligonucleotide
  Target: LAMA2; (+) strand; PAM type: YTN; PAM sequence: TTT
ttgagacttgtttttatcca

SEQ ID NO: 334887 - DNA, 20 bp, Artificial Sequence
  Description of Artificial Sequence: Synthetic oligonucleotide
  Target: LAMA2; (+) strand; PAM type: YTN; PAM sequence: TTT
tgagacttgtttttatccaa

SEQ ID NO: 334888 - DNA, 20 bp, Artificial Sequence
  Description of Artificial Sequence: Synthetic oligonucleotide
  Target: LAMA2; (+) strand; PAM type: YTN; PAM sequence: TTT
gagacttgtttttatccaac

SEQ ID NO: 334889 - DNA, 20 bp, Artificial Sequence
  Description of Artificial Sequence: Synthetic oligonucleotide
  Target: LAMA2; (+) strand; PAM type: YTN; PAM sequence: TTG
agacttgtttttatccaaca

SEQ ID NO: 334890 - DNA, 20 bp, Artificial Sequence
  Description of Artificial Sequence: Synthetic oligonucleotide
  Target: LAMA2; (+) strand; PAM type: YTN; PAM sequence: CTT
gtttttatccaacatatggc

SEQ ID NO: 334891 - DNA, 20 bp, Artificial Sequence
  Description of Artificial Sequence: Synthetic oligonucleotide
  Target: LAMA2; (+) strand; PAM type: YTN; PAM sequence: TTG
tttttatccaacatatggca

SEQ ID NO: 334892 - DNA, 20 bp, Artificial Sequence
  Description of Artificial Sequence: Synthetic oligonucleotide
  Target: LAMA2; (+) strand; PAM type: YTN; PAM sequence: TTT
ttatccaacatatggcagtg

SEQ ID NO: 334893 - DNA, 20 bp, Artificial Sequence
  Description of Artificial Sequence: Synthetic oligonucleotide
  Target: LAMA2; (+) strand; PAM type: YTN; PAM sequence: TTT
tatccaacatatggcagtga

SEQ ID NO: 334894 - DNA, 20 bp, Artificial Sequence
  Description of Artificial Sequence: Synthetic oligonucleotide
  Target: LAMA2; (+) strand; PAM type: YTN; PAM sequence: TTT
atccaacatatggcagtgac

SEQ ID NO: 334895 - DNA, 20 bp, Artificial Sequence
  Description of Artificial Sequence: Synthetic oligonucleotide
  Target: LAMA2; (+) strand; PAM type: YTN; PAM sequence: TTA
tccaacatatggcagtgact

SEQ ID NO: 334896 - DNA, 20 bp, Artificial Sequence
  Description of Artificial Sequence: Synthetic oligonucleotide
  Target: LAMA2; (+) strand; PAM type: YTN; PAM sequence: CTT
gaaaacaatgtggaccagtt

SEQ ID NO: 334897 - DNA, 20 bp, Artificial Sequence
  Description of Artificial Sequence: Synthetic oligonucleotide
  Target: LAMA2; (+) strand; PAM type: YTN; PAM sequence: TTG
aaaacaatgtggaccagttg

SEQ ID NO: 334898 - DNA, 20 bp, Artificial Sequence
  Description of Artificial Sequence: Synthetic oligonucleotide
  Target: LAMA2; (+) strand; PAM type: YTN; PAM sequence: TTG
ccctggctcactcctgtaat

SEQ ID NO: 334899 - DNA, 20 bp, Artificial Sequence
  Description of Artificial Sequence: Synthetic oligonucleotide
  Target: LAMA2; (+) strand; PAM type: YTN; PAM sequence: CTG
gctcactcctgtaatcccag

SEQ ID NO: 334900 - DNA, 20 bp, Artificial Sequence
  Description of Artificial Sequence: Synthetic oligonucleotide
  Target: LAMA2; (+) strand; PAM type: YTN; PAM sequence: CTC
actcctgtaatcccagcact

SEQ ID NO: 334901 - DNA, 20 bp, Artificial Sequence
  Description of Artificial Sequence: Synthetic oligonucleotide
  Target: LAMA2; (+) strand; PAM type: YTN; PAM sequence: CTC
ctgtaatcccagcactttgg

SEQ ID NO: 334902 - DNA, 20 bp, Artificial Sequence
  Description of Artificial Sequence: Synthetic oligonucleotide
  Target: LAMA2; (+) strand; PAM type: YTN; PAM sequence: CTG
taatcccagcactttgggag

SEQ ID NO: 334903 - DNA, 20 bp, Artificial Sequence
  Description of Artificial Sequence: Synthetic oligonucleotide
  Target: LAMA2; (+) strand; PAM type: YTN; PAM sequence: CTT
tgggaggccaaggcaggcgg

SEQ ID NO: 334904 - DNA, 20 bp, Artificial Sequence
  Description of Artificial Sequence: Synthetic oligonucleotide
  Target: LAMA2; (+) strand; PAM type: YTN; PAM sequence: TTT
gggaggccaaggcaggcgga

SEQ ID NO: 334905 - DNA, 20 bp, Artificial Sequence
  Description of Artificial Sequence: Synthetic oligonucleotide
  Target: LAMA2; (+) strand; PAM type: YTN; PAM sequence: TTG
ggaggccaaggcaggcggat

SEQ ID NO: 334906 - DNA, 20 bp, Artificial Sequence
  Description of Artificial Sequence: Synthetic oligonucleotide
  Target: LAMA2; (+) strand; PAM type: YTN; PAM sequence: CTT
gagcccagaagttcaagacc

SEQ ID NO: 334907 - DNA, 20 bp, Artificial Sequence
  Description of Artificial Sequence: Synthetic oligonucleotide
  Target: LAMA2; (+) strand; PAM type: YTN; PAM sequence: TTG
agcccagaagttcaagacca

SEQ ID NO: 334908 - DNA, 20 bp, Artificial Sequence
  Description of Artificial Sequence: Synthetic oligonucleotide
  Target: LAMA2; (+) strand; PAM type: YTN; PAM sequence: TTC
aagaccagtgtgggcaacgt

SEQ ID NO: 334909 - DNA, 20 bp, Artificial Sequence
  Description of Artificial Sequence: Synthetic oligonucleotide
  Target: LAMA2; (+) strand; PAM type: YTN; PAM sequence: CTC
atctctaccaaacaaaacaa

SEQ ID NO: 334910 - DNA, 20 bp, Artificial Sequence
  Description of Artificial Sequence: Synthetic oligonucleotide
  Target: LAMA2; (+) strand; PAM type: YTN; PAM sequence: CTC
taccaaacaaaacaaaacaa

SEQ ID NO: 334911 - DNA, 20 bp, Artificial Sequence
  Description of Artificial Sequence: Synthetic oligonucleotide
  Target: LAMA2; (+) strand; PAM type: YTN; PAM sequence: CTA
ccaaacaaaacaaaacaaaa

SEQ ID NO: 334912 - DNA, 20 bp, Artificial Sequence
  Description of Artificial Sequence: Synthetic oligonucleotide
  Target: LAMA2; (+) strand; PAM type: YTN; PAM sequence: TTA
gctgggtgtgtgcctgtagt

SEQ ID NO: 334913 - DNA, 20 bp, Artificial Sequence
  Description of Artificial Sequence: Synthetic oligonucleotide
  Target: LAMA2; (+) strand; PAM type: YTN; PAM sequence: CTG
ggtgtgtgcctgtagtccca

SEQ ID NO: 334914 - DNA, 20 bp, Artificial Sequence
  Description of Artificial Sequence: Synthetic oligonucleotide
  Target: LAMA2; (+) strand; PAM type: YTN; PAM sequence: CTG
tagtcccagctattctggag

SEQ ID NO: 334915 - DNA, 20 bp, Artificial Sequence
  Description of Artificial Sequence: Synthetic oligonucleotide
  Target: LAMA2; (+) strand; PAM type: YTN; PAM sequence: CTA
ttctggagtctgaggtggga

SEQ ID NO: 334916 - DNA, 20 bp, Artificial Sequence
  Description of Artificial Sequence: Synthetic oligonucleotide
  Target: LAMA2; (+) strand; PAM type: YTN; PAM sequence: TTC
tggagtctgaggtgggagaa

SEQ ID NO: 334917 - DNA, 20 bp, Artificial Sequence
  Description of Artificial Sequence: Synthetic oligonucleotide
  Target: LAMA2; (+) strand; PAM type: YTN; PAM sequence: CTG
gagtctgaggtgggagaatc

SEQ ID NO: 334918 - DNA, 20 bp, Artificial Sequence
  Description of Artificial Sequence: Synthetic oligonucleotide
  Target: LAMA2; (+) strand; PAM type: YTN; PAM sequence: CTG
aggtgggagaatcacttcaa

SEQ ID NO: 334919 - DNA, 20 bp, Artificial Sequence
  Description of Artificial Sequence: Synthetic oligonucleotide
  Target: LAMA2; (+) strand; PAM type: YTN; PAM sequence: CTT
caacccaggaggtagaggtt

SEQ ID NO: 334920 - DNA, 20 bp, Artificial Sequence
  Description of Artificial Sequence: Synthetic oligonucleotide
  Target: LAMA2; (+) strand; PAM type: YTN; PAM sequence: TTC
aacccaggaggtagaggttg

SEQ ID NO: 334921 - DNA, 20 bp, Artificial Sequence
  Description of Artificial Sequence: Synthetic oligonucleotide
  Target: LAMA2; (+) strand; PAM type: YTN; PAM sequence: TTG
tggtgagccgagattacgcc

SEQ ID NO: 334922 - DNA, 20 bp, Artificial Sequence
  Description of Artificial Sequence: Synthetic oligonucleotide
  Target: LAMA2; (+) strand; PAM type: YTN; PAM sequence: TTA
cgccactgcactccagcctg

SEQ ID NO: 334923 - DNA, 20 bp, Artificial Sequence
  Description of Artificial Sequence: Synthetic oligonucleotide
  Target: LAMA2; (+) strand; PAM type: YTN; PAM sequence: CTG
cactccagcctgggtgacag

SEQ ID NO: 334924 - DNA, 20 bp, Artificial Sequence
  Description of Artificial Sequence: Synthetic oligonucleotide
  Target: LAMA2; (+) strand; PAM type: YTN; PAM sequence: CTC
cagcctgggtgacagagctg

SEQ ID NO: 334925 - DNA, 20 bp, Artificial Sequence
  Description of Artificial Sequence: Synthetic oligonucleotide
  Target: LAMA2; (+) strand; PAM type: YTN; PAM sequence: CTG
ggtgacagagctggacatca

SEQ ID NO: 334926 - DNA, 20 bp, Artificial Sequence
  Description of Artificial Sequence: Synthetic oligonucleotide
  Target: LAMA2; (+) strand; PAM type: YTN; PAM sequence: CTG
gacatcagaccctgtctaaa

SEQ ID NO: 334927 - DNA, 20 bp, Artificial Sequence
  Description of Artificial Sequence: Synthetic oligonucleotide
  Target: LAMA2; (+) strand; PAM type: YTN; PAM sequence: CTG
tctaaaaaaaagcaaagaaa

SEQ ID NO: 334928 - DNA, 20 bp, Artificial Sequence
  Description of Artificial Sequence: Synthetic oligonucleotide
  Target: LAMA2; (+) strand; PAM type: YTN; PAM sequence: CTA
aaaaaaagcaaagaaaagaa

SEQ ID NO: 334929 - DNA, 20 bp, Artificial Sequence
  Description of Artificial Sequence: Synthetic oligonucleotide
  Target: LAMA2; (+) strand; PAM type: YTN; PAM sequence: TTC
tatagttgttggttgcagta

SEQ ID NO: 334930 - DNA, 20 bp, Artificial Sequence
  Description of Artificial Sequence: Synthetic oligonucleotide
  Target: LAMA2; (+) strand; PAM type: YTN; PAM sequence: CTA
tagttgttggttgcagtact

SEQ ID NO: 334931 - DNA, 20 bp, Artificial Sequence
  Description of Artificial Sequence: Synthetic oligonucleotide
  Target: LAMA2; (+) strand; PAM type: YTN; PAM sequence: TTG
ttggttgcagtactacaaat

SEQ ID NO: 334932 - DNA, 20 bp, Artificial Sequence
  Description of Artificial Sequence: Synthetic oligonucleotide
  Target: LAMA2; (+) strand; PAM type: YTN; PAM sequence: TTG
gttgcagtactacaaatata

SEQ ID NO: 334933 - DNA, 20 bp, Artificial Sequence
  Description of Artificial Sequence: Synthetic oligonucleotide
  Target: LAMA2; (+) strand; PAM type: YTN; PAM sequence: TTG
cagtactacaaatatatcag

SEQ ID NO: 334934 - DNA, 20 bp, Artificial Sequence
  Description of Artificial Sequence: Synthetic oligonucleotide
  Target: LAMA2; (+) strand; PAM type: YTN; PAM sequence: CTA
caaatatatcagtgagttat

SEQ ID NO: 334935 - DNA, 20 bp, Artificial Sequence
  Description of Artificial Sequence: Synthetic oligonucleotide
  Target: LAMA2; (+) strand; PAM type: YTN; PAM sequence: TTA
tatttatatatattgatact

SEQ ID NO: 334936 - DNA, 20 bp, Artificial Sequence
  Description of Artificial Sequence: Synthetic oligonucleotide
  Target: LAMA2; (+) strand; PAM type: YTN; PAM sequence: TTT
atatatattgatacttttaa

SEQ ID NO: 334937 - DNA, 20 bp, Artificial Sequence
  Description of Artificial Sequence: Synthetic oligonucleotide
  Target: LAMA2; (+) strand; PAM type: YTN; PAM sequence: TTA
tatatattgatacttttaaa

SEQ ID NO: 334938 - DNA, 20 bp, Artificial Sequence
  Description of Artificial Sequence: Synthetic oligonucleotide
  Target: LAMA2; (+) strand; PAM type: YTN; PAM sequence: TTG
atacttttaaattagagaca

SEQ ID NO: 334939 - DNA, 20 bp, Artificial Sequence
  Description of Artificial Sequence: Synthetic oligonucleotide
  Target: LAMA2; (+) strand; PAM type: YTN; PAM sequence: CTT
ttaaattagagacatacaaa

SEQ ID NO: 334940 - DNA, 20 bp, Artificial Sequence
  Description of Artificial Sequence: Synthetic oligonucleotide
  Target: LAMA2; (+) strand; PAM type: YTN; PAM sequence: TTT
taaattagagacatacaaat

SEQ ID NO: 334941 - DNA, 20 bp, Artificial Sequence
  Description of Artificial Sequence: Synthetic oligonucleotide
  Target: LAMA2; (+) strand; PAM type: YTN; PAM sequence: TTT
aaattagagacatacaaatt

SEQ ID NO: 334942 - DNA, 20 bp, Artificial Sequence
  Description of Artificial Sequence: Synthetic oligonucleotide
  Target: LAMA2; (+) strand; PAM type: YTN; PAM sequence: TTA
aattagagacatacaaattt

SEQ ID NO: 334943 - DNA, 20 bp, Artificial Sequence
  Description of Artificial Sequence: Synthetic oligonucleotide
  Target: LAMA2; (+) strand; PAM type: YTN; PAM sequence: TTA
gagacatacaaatttaggat

SEQ ID NO: 334944 - DNA, 20 bp, Artificial Sequence
  Description of Artificial Sequence: Synthetic oligonucleotide
  Target: LAMA2; (+) strand; PAM type: YTN; PAM sequence: TTT
aggattattaaatttaataa

SEQ ID NO: 334945 - DNA, 20 bp, Artificial Sequence
  Description of Artificial Sequence: Synthetic oligonucleotide
  Target: LAMA2; (+) strand; PAM type: YTN; PAM sequence: TTA
ggattattaaatttaataat

SEQ ID NO: 334946 - DNA, 20 bp, Artificial Sequence
  Description of Artificial Sequence: Synthetic oligonucleotide
  Target: LAMA2; (+) strand; PAM type: YTN; PAM sequence: TTA
ttaaatttaataatttaaat

SEQ ID NO: 334947 - DNA, 20 bp, Artificial Sequence
  Description of Artificial Sequence: Synthetic oligonucleotide
  Target: LAMA2; (+) strand; PAM type: YTN; PAM sequence: TTA
aatttaataatttaaatttt

SEQ ID NO: 334948 - DNA, 20 bp, Artificial Sequence
  Description of Artificial Sequence: Synthetic oligonucleotide
  Target: LAMA2; (+) strand; PAM type: YTN; PAM sequence: TTT
aataatttaaattttgtatt

SEQ ID NO: 334949 - DNA, 20 bp, Artificial Sequence
  Description of Artificial Sequence: Synthetic oligonucleotide
  Target: LAMA2; (+) strand; PAM type: YTN; PAM sequence: TTA
ataatttaaattttgtatta

SEQ ID NO: 334950 - DNA, 20 bp, Artificial Sequence
  Description of Artificial Sequence: Synthetic oligonucleotide
  Target: LAMA2; (+) strand; PAM type: YTN; PAM sequence: TTT
aaattttgtattaactcttt

SEQ ID NO: 334951 - DNA, 20 bp, Artificial Sequence
  Description of Artificial Sequence: Synthetic oligonucleotide
  Target: LAMA2; (+) strand; PAM type: YTN; PAM sequence: TTA
aattttgtattaactctttt

SEQ ID NO: 334952 - DNA, 20 bp, Artificial Sequence
  Description of Artificial Sequence: Synthetic oligonucleotide
  Target: LAMA2; (+) strand; PAM type: YTN; PAM sequence: TTT
tgtattaactcttttgtatt

SEQ ID NO: 334953 - DNA, 20 bp, Artificial Sequence
  Description of Artificial Sequence: Synthetic oligonucleotide
  Target: LAMA2; (+) strand; PAM type: YTN; PAM sequence: TTT
gtattaactcttttgtatta

SEQ ID NO: 334954 - DNA, 20 bp, Artificial Sequence
  Description of Artificial Sequence: Synthetic oligonucleotide
  Target: LAMA2; (+) strand; PAM type: YTN; PAM sequence: TTG
tattaactcttttgtattaa

SEQ ID NO: 334955 - DNA, 20 bp, Artificial Sequence
  Description of Artificial Sequence: Synthetic oligonucleotide
  Target: LAMA2; (+) strand; PAM type: YTN; PAM sequence: TTA
actcttttgtattaaccacc

SEQ ID NO: 334956 - DNA, 20 bp, Artificial Sequence
  Description of Artificial Sequence: Synthetic oligonucleotide
  Target: LAMA2; (+) strand; PAM type: YTN; PAM sequence: CTC
ttttgtattaaccacctttt

SEQ ID NO: 334957 - DNA, 20 bp, Artificial Sequence
  Description of Artificial Sequence: Synthetic oligonucleotide
  Target: LAMA2; (+) strand; PAM type: YTN; PAM sequence: CTT
ttgtattaaccaccttttta

SEQ ID NO: 334958 - DNA, 20 bp, Artificial Sequence
  Description of Artificial Sequence: Synthetic oligonucleotide
  Target: LAMA2; (+) strand; PAM type: YTN; PAM sequence: TTT
tgtattaaccacctttttaa

SEQ ID NO: 334959 - DNA, 20 bp, Artificial Sequence
  Description of Artificial Sequence: Synthetic oligonucleotide
  Target: LAMA2; (+) strand; PAM type: YTN; PAM sequence: TTT
gtattaaccacctttttaat

SEQ ID NO: 334960 - DNA, 20 bp, Artificial Sequence
  Description of Artificial Sequence: Synthetic oligonucleotide
  Target: LAMA2; (+) strand; PAM type: YTN; PAM sequence: TTG
tattaaccacctttttaata

SEQ ID NO: 334961 - DNA, 20 bp, Artificial Sequence
  Description of Artificial Sequence: Synthetic oligonucleotide
  Target: LAMA2; (+) strand; PAM type: YTN; PAM sequence: TTA
accacctttttaatactact

SEQ ID NO: 334962 - DNA, 20 bp, Artificial Sequence
  Description of Artificial Sequence: Synthetic oligonucleotide
  Target: LAMA2; (+) strand; PAM type: YTN; PAM sequence: CTT
tttaatactactgccagcag

SEQ ID NO: 334963 - DNA, 20 bp, Artificial Sequence
  Description of Artificial Sequence: Synthetic oligonucleotide
  Target: LAMA2; (+) strand; PAM type: YTN; PAM sequence: TTT
ttaatactactgccagcagt

SEQ ID NO: 334964 - DNA, 20 bp, Artificial Sequence
  Description of Artificial Sequence: Synthetic oligonucleotide
  Target: LAMA2; (+) strand; PAM type: YTN; PAM sequence: TTT
taatactactgccagcagta

SEQ ID NO: 334965 - DNA, 20 bp, Artificial Sequence
  Description of Artificial Sequence: Synthetic oligonucleotide
  Target: LAMA2; (+) strand; PAM type: YTN; PAM sequence: TTT
aatactactgccagcagtac

SEQ ID NO: 334966 - DNA, 20 bp, Artificial Sequence
  Description of Artificial Sequence: Synthetic oligonucleotide
  Target: LAMA2; (+) strand; PAM type: YTN; PAM sequence: TTA
atactactgccagcagtact

SEQ ID NO: 334967 - DNA, 20 bp, Artificial Sequence
  Description of Artificial Sequence: Synthetic oligonucleotide
  Target: LAMA2; (+) strand; PAM type: YTN; PAM sequence: CTA
ctgccagcagtacttctatc

SEQ ID NO: 334968 - DNA, 20 bp, Artificial Sequence
  Description of Artificial Sequence: Synthetic oligonucleotide
  Target: LAMA2; (+) strand; PAM type: YTN; PAM sequence: CTG
ccagcagtacttctatcttt

SEQ ID NO: 334969 - DNA, 20 bp, Artificial Sequence
  Description of Artificial Sequence: Synthetic oligonucleotide
  Target: LAMA2; (+) strand; PAM type: YTN; PAM sequence: CTT
ctatctttagagtgtacttt

SEQ ID NO: 334970 - DNA, 20 bp, Artificial Sequence
  Description of Artificial Sequence: Synthetic oligonucleotide
  Target: LAMA2; (+) strand; PAM type: YTN; PAM sequence: TTC
tatctttagagtgtactttt

SEQ ID NO: 334971 - DNA, 20 bp, Artificial Sequence
  Description of Artificial Sequence: Synthetic oligonucleotide
  Target: LAMA2; (+) strand; PAM type: YTN; PAM sequence: CTA
tctttagagtgtacttttgt

SEQ ID NO: 334972 - DNA, 20 bp, Artificial Sequence
  Description of Artificial Sequence: Synthetic oligonucleotide
  Target: LAMA2; (+) strand; PAM type: YTN; PAM sequence: CTT
tagagtgtacttttgtatgt

SEQ ID NO: 334973 - DNA, 20 bp, Artificial Sequence
  Description of Artificial Sequence: Synthetic oligonucleotide
  Target: LAMA2; (+) strand; PAM type: YTN; PAM sequence: TTT
agagtgtacttttgtatgta

SEQ ID NO: 334974 - DNA, 20 bp, Artificial Sequence
  Description of Artificial Sequence: Synthetic oligonucleotide
  Target: LAMA2; (+) strand; PAM type: YTN; PAM sequence: TTA
gagtgtacttttgtatgtag

SEQ ID NO: 334975 - DNA, 20 bp, Artificial Sequence
  Description of Artificial Sequence: Synthetic oligonucleotide
  Target: LAMA2; (+) strand; PAM type: YTN; PAM sequence: CTT
ttgtatgtagattcactagc

SEQ ID NO: 334976 - DNA, 20 bp, Artificial Sequence
  Description of Artificial Sequence: Synthetic oligonucleotide
  Target: LAMA2; (+) strand; PAM type: YTN; PAM sequence: TTT
tgtatgtagattcactagct

SEQ ID NO: 334977 - DNA, 20 bp, Artificial Sequence
  Description of Artificial Sequence: Synthetic oligonucleotide
  Target: LAMA2; (+) strand; PAM type: YTN; PAM sequence: TTT
gtatgtagattcactagctt

SEQ ID NO: 334978 - DNA, 20 bp, Artificial Sequence
  Description of Artificial Sequence: Synthetic oligonucleotide
  Target: LAMA2; (+) strand; PAM type: YTN; PAM sequence: TTG
tatgtagattcactagcttc

SEQ ID NO: 334979 - DNA, 20 bp, Artificial Sequence
  Description of Artificial Sequence: Synthetic oligonucleotide
  Target: LAMA2; (+) strand; PAM type: YTN; PAM sequence: TTC
actagcttccttttttctct

SEQ ID NO: 334980 - DNA, 20 bp, Artificial Sequence
  Description of Artificial Sequence: Synthetic oligonucleotide
  Target: LAMA2; (+) strand; PAM type: YTN; PAM sequence: CTA
gcttccttttttctctgtgt

SEQ ID NO: 334981 - DNA, 20 bp, Artificial Sequence
  Description of Artificial Sequence: Synthetic oligonucleotide
  Target: LAMA2; (+) strand; PAM type: YTN; PAM sequence: CTT
ccttttttctctgtgtttgc

SEQ ID NO: 334982 - DNA, 20 bp, Artificial Sequence
  Description of Artificial Sequence: Synthetic oligonucleotide
  Target: LAMA2; (+) strand; PAM type: YTN; PAM sequence: TTC
cttttttctctgtgtttgcg

SEQ ID NO: 334983 - DNA, 20 bp, Artificial Sequence
  Description of Artificial Sequence: Synthetic oligonucleotide
  Target: LAMA2; (+) strand; PAM type: YTN; PAM sequence: CTT
ttttctctgtgtttgcgtga

SEQ ID NO: 334984 - DNA, 20 bp, Artificial Sequence
  Description of Artificial Sequence: Synthetic oligonucleotide
  Target: LAMA2; (+) strand; PAM type: YTN; PAM sequence: TTT
tttctctgtgtttgcgtgat

SEQ ID NO: 334985 - DNA, 20 bp, Artificial Sequence
  Description of Artificial Sequence: Synthetic oligonucleotide
  Target: LAMA2; (+) strand; PAM type: YTN; PAM sequence: TTT
ttctctgtgtttgcgtgata

SEQ ID NO: 334986 - DNA, 20 bp, Artificial Sequence
  Description of Artificial Sequence: Synthetic oligonucleotide
  Target: LAMA2; (+) strand; PAM type: YTN; PAM sequence: TTT
tctctgtgtttgcgtgatat

SEQ ID NO: 334987 - DNA, 20 bp, Artificial Sequence
  Description of Artificial Sequence: Synthetic oligonucleotide
  Target: LAMA2; (+) strand; PAM type: YTN; PAM sequence: TTT
ctctgtgtttgcgtgatata

SEQ ID NO: 334988 - DNA, 20 bp, Artificial Sequence
  Description of Artificial Sequence: Synthetic oligonucleotide
  Target: LAMA2; (+) strand; PAM type: YTN; PAM sequence: TTC
tctgtgtttgcgtgatatag

SEQ ID NO: 334989 - DNA, 20 bp, Artificial Sequence
  Description of Artificial Sequence: Synthetic oligonucleotide
  Target: LAMA2; (+) strand; PAM type: YTN; PAM sequence: CTC
tgtgtttgcgtgatataggt

SEQ ID NO: 334990 - DNA, 20 bp, Artificial Sequence
  Description of Artificial Sequence: Synthetic oligonucleotide
  Target: LAMA2; (+) strand; PAM type: YTN; PAM sequence: CTG
tgtttgcgtgatataggttt

SEQ ID NO: 334991 - DNA, 20 bp, Artificial Sequence
  Description of Artificial Sequence: Synthetic oligonucleotide
  Target: LAMA2; (+) strand; PAM type: YTN; PAM sequence: TTT
gcgtgatataggttttctca

SEQ ID NO: 334992 - DNA, 20 bp, Artificial Sequence
  Description of Artificial Sequence: Synthetic oligonucleotide
  Target: LAMA2; (+) strand; PAM type: YTN; PAM sequence: TTG
cgtgatataggttttctcat

SEQ ID NO: 334993 - DNA, 20 bp, Artificial Sequence
  Description of Artificial Sequence: Synthetic oligonucleotide
  Target: LAMA2; (+) strand; PAM type: YTN; PAM sequence: TTT
tctcatatgttgagtgtact

SEQ ID NO: 334994 - DNA, 20 bp, Artificial Sequence
  Description of Artificial Sequence: Synthetic oligonucleotide
  Target: LAMA2; (+) strand; PAM type: YTN; PAM sequence: TTT
ctcatatgttgagtgtactt

SEQ ID NO: 334995 - DNA, 20 bp, Artificial Sequence
  Description of Artificial Sequence: Synthetic oligonucleotide
  Target: LAMA2; (+) strand; PAM type: YTN; PAM sequence: TTC
tcatatgttgagtgtactta

SEQ ID NO: 334996 - DNA, 20 bp, Artificial Sequence
  Description of Artificial Sequence: Synthetic oligonucleotide
  Target: LAMA2; (+) strand; PAM type: YTN; PAM sequence: CTC
atatgttgagtgtacttata

SEQ ID NO: 334997 - DNA, 20 bp, Artificial Sequence
  Description of Artificial Sequence: Synthetic oligonucleotide
  Target: LAMA2; (+) strand; PAM type: YTN; PAM sequence: TTG
agtgtacttatatttaaggt

SEQ ID NO: 334998 - DNA, 20 bp, Artificial Sequence
  Description of Artificial Sequence: Synthetic oligonucleotide
  Target: LAMA2; (+) strand; PAM type: YTN; PAM sequence: CTT
atatttaaggtgtatcttct

SEQ ID NO: 334999 - DNA, 20 bp, Artificial Sequence
  Description of Artificial Sequence: Synthetic oligonucleotide
  Target: LAMA2; (+) strand; PAM type: YTN; PAM sequence: TTA
tatttaaggtgtatcttctg

SEQ ID NO: 335000 - DNA, 20 bp, Artificial Sequence
  Description of Artificial Sequence: Synthetic oligonucleotide
  Target: LAMA2; (+) strand; PAM type: YTN; PAM sequence: TTT
aaggtgtatcttctgtgagc

SEQ ID NO: 335001 - DNA, 20 bp, Artificial Sequence
  Description of Artificial Sequence: Synthetic oligonucleotide
  Target: LAMA2; (+) strand; PAM type: YTN; PAM sequence: TTA
aggtgtatcttctgtgagca

SEQ ID NO: 335002 - DNA, 20 bp, Artificial Sequence
  Description of Artificial Sequence: Synthetic oligonucleotide
  Target: LAMA2; (+) strand; PAM type: YTN; PAM sequence: CTT
ctgtgagcagcataaatttg

SEQ ID NO: 335003 - DNA, 20 bp, Artificial Sequence
  Description of Artificial Sequence: Synthetic oligonucleotide
  Target: LAMA2; (+) strand; PAM type: YTN; PAM sequence: TTC
tgtgagcagcataaatttga

SEQ ID NO: 335004 - DNA, 20 bp, Artificial Sequence
  Description of Artificial Sequence: Synthetic oligonucleotide
  Target: LAMA2; (+) strand; PAM type: YTN; PAM sequence: CTG
tgagcagcataaatttgaat

SEQ ID NO: 335005 - DNA, 20 bp, Artificial Sequence
  Description of Artificial Sequence: Synthetic oligonucleotide
  Target: LAMA2; (+) strand; PAM type: YTN; PAM sequence: TTT
gaattgtttatttaactaat

SEQ ID NO: 335006 - DNA, 20 bp, Artificial Sequence
  Description of Artificial Sequence: Synthetic oligonucleotide
  Target: LAMA2; (+) strand; PAM type: YTN; PAM sequence: TTG
aattgtttatttaactaatc

SEQ ID NO: 335007 - DNA, 20 bp, Artificial Sequence
  Description of Artificial Sequence: Synthetic oligonucleotide
  Target: LAMA2; (+) strand; PAM type: YTN; PAM sequence: TTG
tttatttaactaatctgata

SEQ ID NO: 335008 - DNA, 20 bp, Artificial Sequence
  Description of Artificial Sequence: Synthetic oligonucleotide
  Target: LAMA2; (+) strand; PAM type: YTN; PAM sequence: TTT
atttaactaatctgataatc

SEQ ID NO: 335009 - DNA, 20 bp, Artificial Sequence
  Description of Artificial Sequence: Synthetic oligonucleotide
  Target: LAMA2; (+) strand; PAM type: YTN; PAM sequence: TTA
tttaactaatctgataatct

SEQ ID NO: 335010 - DNA, 20 bp, Artificial Sequence
  Description of Artificial Sequence: Synthetic oligonucleotide
  Target: LAMA2; (+) strand; PAM type: YTN; PAM sequence: TTT
aactaatctgataatctttt

SEQ ID NO: 335011 - DNA, 20 bp, Artificial Sequence
  Description of Artificial Sequence: Synthetic oligonucleotide
  Target: LAMA2; (+) strand; PAM type: YTN; PAM sequence: TTA
actaatctgataatcttttc

SEQ ID NO: 335012 - DNA, 20 bp, Artificial Sequence
  Description of Artificial Sequence: Synthetic oligonucleotide
  Target: LAMA2; (+) strand; PAM type: YTN; PAM sequence: CTA
atctgataatcttttccttt

SEQ ID NO: 335013 - DNA, 20 bp, Artificial Sequence
  Description of Artificial Sequence: Synthetic oligonucleotide
  Target: LAMA2; (+) strand; PAM type: YTN; PAM sequence: CTG
ataatcttttcctttaaatt

SEQ ID NO: 335014 - DNA, 20 bp, Artificial Sequence
  Description of Artificial Sequence: Synthetic oligonucleotide
  Target: LAMA2; (+) strand; PAM type: YTN; PAM sequence: CTT
ttcctttaaattggatactt

SEQ ID NO: 335015 - DNA, 20 bp, Artificial Sequence
  Description of Artificial Sequence: Synthetic oligonucleotide
  Target: LAMA2; (+) strand; PAM type: YTN; PAM sequence: TTT
tcctttaaattggatactta

SEQ ID NO: 335016 - DNA, 20 bp, Artificial Sequence
  Description of Artificial Sequence: Synthetic oligonucleotide
  Target: LAMA2; (+) strand; PAM type: YTN; PAM sequence: TTT
cctttaaattggatacttaa

SEQ ID NO: 335017 - DNA, 20 bp, Artificial Sequence
  Description of Artificial Sequence: Synthetic oligonucleotide
  Target: LAMA2; (+) strand; PAM type: YTN; PAM sequence: TTC
ctttaaattggatacttaat

SEQ ID NO: 335018 - DNA, 20 bp, Artificial Sequence
  Description of Artificial Sequence: Synthetic oligonucleotide
  Target: LAMA2; (+) strand; PAM type: YTN; PAM sequence: CTT
taaattggatacttaattca

SEQ ID NO: 335019 - DNA, 20 bp, Artificial Sequence
  Description of Artificial Sequence: Synthetic oligonucleotide
  Target: LAMA2; (+) strand; PAM type: YTN; PAM sequence: TTT
aaattggatacttaattcat

SEQ ID NO: 335020 - DNA, 20 bp, Artificial Sequence
  Description of Artificial Sequence: Synthetic oligonucleotide
  Target: LAMA2; (+) strand; PAM type: YTN; PAM sequence: TTA
aattggatacttaattcatt

SEQ ID NO: 335021 - DNA, 20 bp, Artificial Sequence
  Description of Artificial Sequence: Synthetic oligonucleotide
  Target: LAMA2; (+) strand; PAM type: YTN; PAM sequence: TTG
gatacttaattcatttacat

SEQ ID NO: 335022 - DNA, 20 bp, Artificial Sequence
  Description of Artificial Sequence: Synthetic oligonucleotide
  Target: LAMA2; (+) strand; PAM type: YTN; PAM sequence: CTT
aattcatttacatttagtgt

SEQ ID NO: 335023 - DNA, 20 bp, Artificial Sequence
  Description of Artificial Sequence: Synthetic oligonucleotide
  Target: LAMA2; (+) strand; PAM type: YTN; PAM sequence: TTA
attcatttacatttagtgtt

SEQ ID NO: 335024 - DNA, 20 bp, Artificial Sequence
  Description of Artificial Sequence: Synthetic oligonucleotide
  Target: LAMA2; (+) strand; PAM type: YTN; PAM sequence: TTC
atttacatttagtgttacta

SEQ ID NO: 335025 - DNA, 20 bp, Artificial Sequence
  Description of Artificial Sequence: Synthetic oligonucleotide
  Target: LAMA2; (+) strand; PAM type: YTN; PAM sequence: TTT
acatttagtgttactatact

SEQ ID NO: 335026 - DNA, 20 bp, Artificial Sequence
  Description of Artificial Sequence: Synthetic oligonucleotide
  Target: LAMA2; (+) strand; PAM type: YTN; PAM sequence: TTA
catttagtgttactatactg

SEQ ID NO: 335027 - DNA, 20 bp, Artificial Sequence
  Description of Artificial Sequence: Synthetic oligonucleotide
  Target: LAMA2; (+) strand; PAM type: YTN; PAM sequence: TTT
agtgttactatactgatata

SEQ ID NO: 335028 - DNA, 20 bp, Artificial Sequence
  Description of Artificial Sequence: Synthetic oligonucleotide
  Target: LAMA2; (+) strand; PAM type: YTN; PAM sequence: TTA
gtgttactatactgatatat

SEQ ID NO: 335029 - DNA, 20 bp, Artificial Sequence
  Description of Artificial Sequence: Synthetic oligonucleotide
  Target: LAMA2; (+) strand; PAM type: YTN; PAM sequence: TTA
ctatactgatatatgggttc

SEQ ID NO: 335030 - DNA, 20 bp, Artificial Sequence
  Description of Artificial Sequence: Synthetic oligonucleotide
  Target: LAMA2; (+) strand; PAM type: YTN; PAM sequence: CTA
tactgatatatgggttcaaa

SEQ ID NO: 335031 - DNA, 20 bp, Artificial Sequence
  Description of Artificial Sequence: Synthetic oligonucleotide
  Target: LAMA2; (+) strand; PAM type: YTN; PAM sequence: CTG
atatatgggttcaaattacc

SEQ ID NO: 335032 - DNA, 20 bp, Artificial Sequence
  Description of Artificial Sequence: Synthetic oligonucleotide
  Target: LAMA2; (+) strand; PAM type: YTN; PAM sequence: TTC
aaattaccatattctcatct

SEQ ID NO: 335033 - DNA, 20 bp, Artificial Sequence
  Description of Artificial Sequence: Synthetic oligonucleotide
  Target: LAMA2; (+) strand; PAM type: YTN; PAM sequence: TTA
ccatattctcatctgttttc

SEQ ID NO: 335034 - DNA, 20 bp, Artificial Sequence
  Description of Artificial Sequence: Synthetic oligonucleotide
  Target: LAMA2; (+) strand; PAM type: YTN; PAM sequence: TTC
tcatctgttttctgtttgtc

SEQ ID NO: 335035 - DNA, 20 bp, Artificial Sequence
  Description of Artificial Sequence: Synthetic oligonucleotide
  Target: LAMA2; (+) strand; PAM type: YTN; PAM sequence: CTC
atctgttttctgtttgtctt

SEQ ID NO: 335036 - DNA, 20 bp, Artificial Sequence
  Description of Artificial Sequence: Synthetic oligonucleotide
  Target: LAMA2; (+) strand; PAM type: YTN; PAM sequence: CTG
ttttctgtttgtcttatctt

SEQ ID NO: 335037 - DNA, 20 bp, Artificial Sequence
  Description of Artificial Sequence: Synthetic oligonucleotide
  Target: LAMA2; (+) strand; PAM type: YTN; PAM sequence: TTT
tctgtttgtcttatcttttg

SEQ ID NO: 335038 - DNA, 20 bp, Artificial Sequence
  Description of Artificial Sequence: Synthetic oligonucleotide
  Target: LAMA2; (+) strand; PAM type: YTN; PAM sequence: TTT
ctgtttgtcttatcttttgc

SEQ ID NO: 335039 - DNA, 20 bp, Artificial Sequence
  Description of Artificial Sequence: Synthetic oligonucleotide
  Target: LAMA2; (+) strand; PAM type: YTN; PAM sequence: TTC
tgtttgtcttatcttttgct

SEQ ID NO: 335040 - DNA, 20 bp, Artificial Sequence
  Description of Artificial Sequence: Synthetic oligonucleotide
  Target: LAMA2; (+) strand; PAM type: YTN; PAM sequence: CTG
tttgtcttatcttttgctaa

SEQ ID NO: 335041 - DNA, 20 bp, Artificial Sequence
  Description of Artificial Sequence: Synthetic oligonucleotide
  Target: LAMA2; (+) strand; PAM type: YTN; PAM sequence: TTT
gtcttatcttttgctaattt

SEQ ID NO: 335042 - DNA, 20 bp, Artificial Sequence
  Description of Artificial Sequence: Synthetic oligonucleotide
  Target: LAMA2; (+) strand; PAM type: YTN; PAM sequence: TTG
tcttatcttttgctaatttt

SEQ ID NO: 335043 - DNA, 20 bp, Artificial Sequence
  Description of Artificial Sequence: Synthetic oligonucleotide
  Target: LAMA2; (+) strand; PAM type: YTN; PAM sequence: CTT
atcttttgctaatttttctt

SEQ ID NO: 335044 - DNA, 20 bp, Artificial Sequence
  Description of Artificial Sequence: Synthetic oligonucleotide
  Target: LAMA2; (+) strand; PAM type: YTN; PAM sequence: TTA
tcttttgctaatttttcttc

SEQ ID NO: 335045 - DNA, 20 bp, Artificial Sequence
  Description of Artificial Sequence: Synthetic oligonucleotide
  Target: LAMA2; (+) strand; PAM type: YTN; PAM sequence: CTT
ttgctaatttttcttcctca

SEQ ID NO: 335046 - DNA, 20 bp, Artificial Sequence
  Description of Artificial Sequence: Synthetic oligonucleotide
  Target: LAMA2; (+) strand; PAM type: YTN; PAM sequence: TTT
tgctaatttttcttcctcat

SEQ ID NO: 335047 - DNA, 20 bp, Artificial Sequence
  Description of Artificial Sequence: Synthetic oligonucleotide
  Target: LAMA2; (+) strand; PAM type: YTN; PAM sequence: TTT
gctaatttttcttcctcata

SEQ ID NO: 335048 - DNA, 20 bp, Artificial Sequence
  Description of Artificial Sequence: Synthetic oligonucleotide
  Target: LAMA2; (+) strand; PAM type: YTN; PAM sequence: TTG
ctaatttttcttcctcataa

SEQ ID NO: 335049 - DNA, 20 bp, Artificial Sequence
  Description of Artificial Sequence: Synthetic oligonucleotide
  Target: LAMA2; (+) strand; PAM type: YTN; PAM sequence: CTA
atttttcttcctcataactt

SEQ ID NO: 335050 - DNA, 20 bp, Artificial Sequence
  Description of Artificial Sequence: Synthetic oligonucleotide
  Target: LAMA2; (+) strand; PAM type: YTN; PAM sequence: TTT
ttcttcctcataactttctt

SEQ ID NO: 335051 - DNA, 20 bp, Artificial Sequence
  Description of Artificial Sequence: Synthetic oligonucleotide
  Target: LAMA2; (+) strand; PAM type: YTN; PAM sequence: TTT
tcttcctcataactttctta

SEQ ID NO: 335052 - DNA, 20 bp, Artificial Sequence
  Description of Artificial Sequence: Synthetic oligonucleotide
  Target: LAMA2; (+) strand; PAM type: YTN; PAM sequence: TTT
cttcctcataactttcttac

SEQ ID NO: 335053 - DNA, 20 bp, Artificial Sequence
  Description of Artificial Sequence: Synthetic oligonucleotide
  Target: LAMA2; (+) strand; PAM type: YTN; PAM sequence: TTC
ttcctcataactttcttact

SEQ ID NO: 335054 - DNA, 20 bp, Artificial Sequence
  Description of Artificial Sequence: Synthetic oligonucleotide
  Target: LAMA2; (+) strand; PAM type: YTN; PAM sequence: CTT
cctcataactttcttacttt

SEQ ID NO: 335055 - DNA, 20 bp, Artificial Sequence
  Description of Artificial Sequence: Synthetic oligonucleotide
  Target: LAMA2; (+) strand; PAM type: YTN; PAM sequence: TTC
ctcataactttcttactttt

SEQ ID NO: 335056 - DNA, 20 bp, Artificial Sequence
  Description of Artificial Sequence: Synthetic oligonucleotide
  Target: LAMA2; (+) strand; PAM type: YTN; PAM sequence: CTC
ataactttcttacttttgga

SEQ ID NO: 335057 - DNA, 20 bp, Artificial Sequence
  Description of Artificial Sequence: Synthetic oligonucleotide
  Target: LAMA2; (+) strand; PAM type: YTN; PAM sequence: CTT
tcttacttttggaatactga

SEQ ID NO: 335058 - DNA, 20 bp, Artificial Sequence
  Description of Artificial Sequence: Synthetic oligonucleotide
  Target: LAMA2; (+) strand; PAM type: YTN; PAM sequence: TTT
cttacttttggaatactgaa

SEQ ID NO: 335059 - DNA, 20 bp, Artificial Sequence
  Description of Artificial Sequence: Synthetic oligonucleotide
  Target: LAMA2; (+) strand; PAM type: YTN; PAM sequence: TTC
ttacttttggaatactgaag

SEQ ID NO: 335060 - DNA, 20 bp, Artificial Sequence
  Description of Artificial Sequence: Synthetic oligonucleotide
  Target: LAMA2; (+) strand; PAM type: YTN; PAM sequence: CTT
acttttggaatactgaaggt

SEQ ID NO: 335061 - DNA, 20 bp, Artificial Sequence
  Description of Artificial Sequence: Synthetic oligonucleotide
  Target: LAMA2; (+) strand; PAM type: YTN; PAM sequence: TTA
cttttggaatactgaaggtt

SEQ ID NO: 335062 - DNA, 20 bp, Artificial Sequence
  Description of Artificial Sequence: Synthetic oligonucleotide
  Target: LAMA2; (+) strand; PAM type: YTN; PAM sequence: CTT
ttggaatactgaaggttttt

SEQ ID NO: 335063 - DNA, 20 bp, Artificial Sequence
  Description of Artificial Sequence: Synthetic oligonucleotide
  Target: LAMA2; (+) strand; PAM type: YTN; PAM sequence: TTT
tggaatactgaaggtttttc

SEQ ID NO: 335064 - DNA, 20 bp, Artificial Sequence
  Description of Artificial Sequence: Synthetic oligonucleotide
  Target: LAMA2; (+) strand; PAM type: YTN; PAM sequence: TTT
ggaatactgaaggtttttcc

SEQ ID NO: 335065 - DNA, 20 bp, Artificial Sequence
  Description of Artificial Sequence: Synthetic oligonucleotide
  Target: LAMA2; (+) strand; PAM type: YTN; PAM sequence: TTG
gaatactgaaggtttttccc

SEQ ID NO: 335066 - DNA, 20 bp, Artificial Sequence
  Description of Artificial Sequence: Synthetic oligonucleotide
  Target: LAMA2; (+) strand; PAM type: YTN; PAM sequence: CTG
aaggtttttccctatttaat

SEQ ID NO: 335067 - DNA, 20 bp, Artificial Sequence
  Description of Artificial Sequence: Synthetic oligonucleotide
  Target: LAMA2; (+) strand; PAM type: YTN; PAM sequence: TTT
ttccctatttaattattcca

SEQ ID NO: 335068 - DNA, 20 bp, Artificial Sequence
  Description of Artificial Sequence: Synthetic oligonucleotide
  Target: LAMA2; (+) strand; PAM type: YTN; PAM sequence: TTT
tccctatttaattattccat

SEQ ID NO: 335069 - DNA, 20 bp, Artificial Sequence
  Description of Artificial Sequence: Synthetic oligonucleotide
  Target: LAMA2; (+) strand; PAM type: YTN; PAM sequence: TTT
ccctatttaattattccatt

SEQ ID NO: 335070 - DNA, 20 bp, Artificial Sequence
  Description of Artificial Sequence: Synthetic oligonucleotide
  Target: LAMA2; (+) strand; PAM type: YTN; PAM sequence: TTC
cctatttaattattccattt

SEQ ID NO: 335071 - DNA, 20 bp, Artificial Sequence
  Description of Artificial Sequence: Synthetic oligonucleotide
  Target: LAMA2; (+) strand; PAM type: YTN; PAM sequence: CTA
tttaattattccatttcttc

SEQ ID NO: 335072 - DNA, 20 bp, Artificial Sequence
  Description of Artificial Sequence: Synthetic oligonucleotide
  Target: LAMA2; (+) strand; PAM type: YTN; PAM sequence: TTT
aattattccatttcttcttt

SEQ ID NO: 335073 - DNA, 20 bp, Artificial Sequence
  Description of Artificial Sequence: Synthetic oligonucleotide
  Target: LAMA2; (+) strand; PAM type: YTN; PAM sequence: TTA
attattccatttcttctttc

SEQ ID NO: 335074 - DNA, 20 bp, Artificial Sequence
  Description of Artificial Sequence: Synthetic oligonucleotide
  Target: LAMA2; (+) strand; PAM type: YTN; PAM sequence: TTA
ttccatttcttctttcatta

SEQ ID NO: 335075 - DNA, 20 bp, Artificial Sequence
  Description of Artificial Sequence: Synthetic oligonucleotide
  Target: LAMA2; (+) strand; PAM type: YTN; PAM sequence: TTC
catttcttctttcattagct

SEQ ID NO: 335076 - DNA, 20 bp, Artificial Sequence
  Description of Artificial Sequence: Synthetic oligonucleotide
  Target: LAMA2; (+) strand; PAM type: YTN; PAM sequence: TTT
cttctttcattagcttgtct

SEQ ID NO: 335077 - DNA, 20 bp, Artificial Sequence
  Description of Artificial Sequence: Synthetic oligonucleotide
  Target: LAMA2; (+) strand; PAM type: YTN; PAM sequence: TTC
ttctttcattagcttgtctt

SEQ ID NO: 335078 - DNA, 20 bp, Artificial Sequence
  Description of Artificial Sequence: Synthetic oligonucleotide
  Target: LAMA2; (+) strand; PAM type: YTN; PAM sequence: CTT
ctttcattagcttgtcttct

SEQ ID NO: 335079 - DNA, 20 bp, Artificial Sequence
  Description of Artificial Sequence: Synthetic oligonucleotide
  Target: LAMA2; (+) strand; PAM type: YTN; PAM sequence: TTC
tttcattagcttgtcttctg

SEQ ID NO: 335080 - DNA, 20 bp, Artificial Sequence
  Description of Artificial Sequence: Synthetic oligonucleotide
  Target: LAMA2; (+) strand; PAM type: YTN; PAM sequence: CTT
tcattagcttgtcttctgtg

SEQ ID NO: 335081 - DNA, 20 bp, Artificial Sequence
  Description of Artificial Sequence: Synthetic oligonucleotide
  Target: LAMA2; (+) strand; PAM type: YTN; PAM sequence: TTT
cattagcttgtcttctgtga

SEQ ID NO: 335082 - DNA, 20 bp, Artificial Sequence
  Description of Artificial Sequence: Synthetic oligonucleotide
  Target: LAMA2; (+) strand; PAM type: YTN; PAM sequence: TTC
attagcttgtcttctgtgaa

SEQ ID NO: 335083 - DNA, 20 bp, Artificial Sequence
  Description of Artificial Sequence: Synthetic oligonucleotide
  Target: LAMA2; (+) strand; PAM type: YTN; PAM sequence: TTA
gcttgtcttctgtgaagtct

SEQ ID NO: 335084 - DNA, 20 bp, Artificial Sequence
  Description of Artificial Sequence: Synthetic oligonucleotide
  Target: LAMA2; (+) strand; PAM type: YTN; PAM sequence: CTT
gtcttctgtgaagtctttta

SEQ ID NO: 335085 - DNA, 20 bp, Artificial Sequence
  Description of Artificial Sequence: Synthetic oligonucleotide
  Target: LAMA2; (+) strand; PAM type: YTN; PAM sequence: TTG
tcttctgtgaagtcttttat

SEQ ID NO: 335086 - DNA, 20 bp, Artificial Sequence
  Description of Artificial Sequence: Synthetic oligonucleotide
  Target: LAMA2; (+) strand; PAM type: YTN; PAM sequence: CTT
ctgtgaagtcttttattact

SEQ ID NO: 335087 - DNA, 20 bp, Artificial Sequence
  Description of Artificial Sequence: Synthetic oligonucleotide
  Target: LAMA2; (+) strand; PAM type: YTN; PAM sequence: TTC
tgtgaagtcttttattactc

SEQ ID NO: 335088 - DNA, 20 bp, Artificial Sequence
  Description of Artificial Sequence: Synthetic oligonucleotide
  Target: LAMA2; (+) strand; PAM type: YTN; PAM sequence: CTG
tgaagtcttttattactcat

SEQ ID NO: 335089 - DNA, 20 bp, Artificial Sequence
  Description of Artificial Sequence: Synthetic oligonucleotide
  Target: LAMA2; (+) strand; PAM type: YTN; PAM sequence: CTT
ttattactcatactaattac

SEQ ID NO: 335090 - DNA, 20 bp, Artificial Sequence
  Description of Artificial Sequence: Synthetic oligonucleotide
  Target: LAMA2; (+) strand; PAM type: YTN; PAM sequence: TTT
tattactcatactaattacc

SEQ ID NO: 335091 - DNA, 20 bp, Artificial Sequence
  Description of Artificial Sequence: Synthetic oligonucleotide
  Target: LAMA2; (+) strand; PAM type: YTN; PAM sequence: TTT
attactcatactaattacca

SEQ ID NO: 335092 - DNA, 20 bp, Artificial Sequence
  Description of Artificial Sequence: Synthetic oligonucleotide
  Target: LAMA2; (+) strand; PAM type: YTN; PAM sequence: TTA
ttactcatactaattaccat

SEQ ID NO: 335093 - DNA, 20 bp, Artificial Sequence
  Description of Artificial Sequence: Synthetic oligonucleotide
  Target: LAMA2; (+) strand; PAM type: YTN; PAM sequence: TTA
ctcatactaattaccataaa

SEQ ID NO: 335094 - DNA, 20 bp, Artificial Sequence
  Description of Artificial Sequence: Synthetic oligonucleotide
  Target: LAMA2; (+) strand; PAM type: YTN; PAM sequence: CTC
atactaattaccataaatat

SEQ ID NO: 335095 - DNA, 20 bp, Artificial Sequence
  Description of Artificial Sequence: Synthetic oligonucleotide
  Target: LAMA2; (+) strand; PAM type: YTN; PAM sequence: CTA
attaccataaatatggtaac

SEQ ID NO: 335096 - DNA, 20 bp, Artificial Sequence
  Description of Artificial Sequence: Synthetic oligonucleotide
  Target: LAMA2; (+) strand; PAM type: YTN; PAM sequence: TTA
ccataaatatggtaacttgc

SEQ ID NO: 335097 - DNA, 20 bp, Artificial Sequence
  Description of Artificial Sequence: Synthetic oligonucleotide
  Target: LAMA2; (+) strand; PAM type: YTN; PAM sequence: CTT
gcgtccttcatttatcagaa

SEQ ID NO: 335098 - DNA, 20 bp, Artificial Sequence
  Description of Artificial Sequence: Synthetic oligonucleotide
  Target: LAMA2; (+) strand; PAM type: YTN; PAM sequence: TTG
cgtccttcatttatcagaac

SEQ ID NO: 335099 - DNA, 20 bp, Artificial Sequence
  Description of Artificial Sequence: Synthetic oligonucleotide
  Target: LAMA2; (+) strand; PAM type: YTN; PAM sequence: CTT
catttatcagaactttgtaa

SEQ ID NO: 335100 - DNA, 20 bp, Artificial Sequence
  Description of Artificial Sequence: Synthetic oligonucleotide
  Target: LAMA2; (+) strand; PAM type: YTN; PAM sequence: TTC
atttatcagaactttgtaat

SEQ ID NO: 335101 - DNA, 20 bp, Artificial Sequence
  Description of Artificial Sequence: Synthetic oligonucleotide
  Target: LAMA2; (+) strand; PAM type: YTN; PAM sequence: TTT
atcagaactttgtaatattt

SEQ ID NO: 335102 - DNA, 20 bp, Artificial Sequence
  Description of Artificial Sequence: Synthetic oligonucleotide
  Target: LAMA2; (+) strand; PAM type: YTN; PAM sequence: TTA
tcagaactttgtaatatttt

SEQ ID NO: 335103 - DNA, 20 bp, Artificial Sequence
  Description of Artificial Sequence: Synthetic oligonucleotide
  Target: LAMA2; (+) strand; PAM type: YTN; PAM sequence: CTT
tgtaatattttacctcagtc

SEQ ID NO: 335104 - DNA, 20 bp, Artificial Sequence
  Description of Artificial Sequence: Synthetic oligonucleotide
  Target: LAMA2; (+) strand; PAM type: YTN; PAM sequence: TTT
gtaatattttacctcagtcc

SEQ ID NO: 335105 - DNA, 20 bp, Artificial Sequence
  Description of Artificial Sequence: Synthetic oligonucleotide
  Target: LAMA2; (+) strand; PAM type: YTN; PAM sequence: TTG
taatattttacctcagtccc

SEQ ID NO: 335106 - DNA, 20 bp, Artificial Sequence
  Description of Artificial Sequence: Synthetic oligonucleotide
  Target: LAMA2; (+) strand; PAM type: YTN; PAM sequence: TTT
tacctcagtcccacctcccc

SEQ ID NO: 335107 - DNA, 20 bp, Artificial Sequence
  Description of Artificial Sequence: Synthetic oligonucleotide
  Target: LAMA2; (+) strand; PAM type: YTN; PAM sequence: TTT
acctcagtcccacctcccca

SEQ ID NO: 335108 - DNA, 20 bp, Artificial Sequence
  Description of Artificial Sequence: Synthetic oligonucleotide
  Target: LAMA2; (+) strand; PAM type: YTN; PAM sequence: TTA
cctcagtcccacctccccat

SEQ ID NO: 335109 - DNA, 20 bp, Artificial Sequence
  Description of Artificial Sequence: Synthetic oligonucleotide
  Target: LAMA2; (+) strand; PAM type: YTN; PAM sequence: CTC
agtcccacctccccatcaga

SEQ ID NO: 335110 - DNA, 20 bp, Artificial Sequence
  Description of Artificial Sequence: Synthetic oligonucleotide
  Target: LAMA2; (+) strand; PAM type: YTN; PAM sequence: CTC
cccatcagatttaattctat

SEQ ID NO: 335111 - DNA, 20 bp, Artificial Sequence
  Description of Artificial Sequence: Synthetic oligonucleotide
  Target: LAMA2; (+) strand; PAM type: YTN; PAM sequence: TTT
aattctatagttctcatatg

SEQ ID NO: 335112 - DNA, 20 bp, Artificial Sequence
  Description of Artificial Sequence: Synthetic oligonucleotide
  Target: LAMA2; (+) strand; PAM type: YTN; PAM sequence: TTA
attctatagttctcatatgt

SEQ ID NO: 335113 - DNA, 20 bp, Artificial Sequence
  Description of Artificial Sequence: Synthetic oligonucleotide
  Target: LAMA2; (+) strand; PAM type: YTN; PAM sequence: TTC
tatagttctcatatgtttaa

SEQ ID NO: 335114 - DNA, 20 bp, Artificial Sequence
  Description of Artificial Sequence: Synthetic oligonucleotide
  Target: LAMA2; (+) strand; PAM type: YTN; PAM sequence: CTA
tagttctcatatgtttaatt

SEQ ID NO: 335115 - DNA, 20 bp, Artificial Sequence
  Description of Artificial Sequence: Synthetic oligonucleotide
  Target: LAMA2; (+) strand; PAM type: YTN; PAM sequence: TTC
tcatatgtttaattctatgt

SEQ ID NO: 335116 - DNA, 20 bp, Artificial Sequence
  Description of Artificial Sequence: Synthetic oligonucleotide
  Target: LAMA2; (+) strand; PAM type: YTN; PAM sequence: CTC
atatgtttaattctatgtat

SEQ ID NO: 335117 - DNA, 20 bp, Artificial Sequence
  Description of Artificial Sequence: Synthetic oligonucleotide
  Target: LAMA2; (+) strand; PAM type: YTN; PAM sequence: TTT
aattctatgtatatattaaa

SEQ ID NO: 335118 - DNA, 20 bp, Artificial Sequence
  Description of Artificial Sequence: Synthetic oligonucleotide
  Target: LAMA2; (+) strand; PAM type: YTN; PAM sequence: TTA
attctatgtatatattaaac

SEQ ID NO: 335119 - DNA, 20 bp, Artificial Sequence
  Description of Artificial Sequence: Synthetic oligonucleotide
  Target: LAMA2; (+) strand; PAM type: YTN; PAM sequence: TTC
tatgtatatattaaactcca

SEQ ID NO: 335120 - DNA, 20 bp, Artificial Sequence
  Description of Artificial Sequence: Synthetic oligonucleotide
  Target: LAMA2; (+) strand; PAM type: YTN; PAM sequence: CTA
tgtatatattaaactccata

SEQ ID NO: 335121 - DNA, 20 bp, Artificial Sequence
  Description of Artificial Sequence: Synthetic oligonucleotide
  Target: LAMA2; (+) strand; PAM type: YTN; PAM sequence: TTA
aactccataggaagtaattg

SEQ ID NO: 335122 - DNA, 20 bp, Artificial Sequence
  Description of Artificial Sequence: Synthetic oligonucleotide
  Target: LAMA2; (+) strand; PAM type: YTN; PAM sequence: CTC
cataggaagtaattgttacc

SEQ ID NO: 335123 - DNA, 20 bp, Artificial Sequence
  Description of Artificial Sequence: Synthetic oligonucleotide
  Target: LAMA2; (+) strand; PAM type: YTN; PAM sequence: TTG
ttaccatcataaacatgcag

SEQ ID NO: 335124 - DNA, 20 bp, Artificial Sequence
  Description of Artificial Sequence: Synthetic oligonucleotide
  Target: LAMA2; (+) strand; PAM type: YTN; PAM sequence: TTA
ccatcataaacatgcagttt

SEQ ID NO: 335125 - DNA, 20 bp, Artificial Sequence
  Description of Artificial Sequence: Synthetic oligonucleotide
  Target: LAMA2; (+) strand; PAM type: YTN; PAM sequence: TTT
tcatctaattttaaacacct

SEQ ID NO: 335126 - DNA, 20 bp, Artificial Sequence
  Description of Artificial Sequence: Synthetic oligonucleotide
  Target: LAMA2; (+) strand; PAM type: YTN; PAM sequence: TTT
catctaattttaaacacctt

SEQ ID NO: 335127 - DNA, 20 bp, Artificial Sequence
  Description of Artificial Sequence: Synthetic oligonucleotide
  Target: LAMA2; (+) strand; PAM type: YTN; PAM sequence: TTC
atctaattttaaacaccttt

SEQ ID NO: 335128 - DNA, 20 bp, Artificial Sequence
  Description of Artificial Sequence: Synthetic oligonucleotide
  Target: LAMA2; (+) strand; PAM type: YTN; PAM sequence: CTA
attttaaacacctttaactt

SEQ ID NO: 335129 - DNA, 20 bp, Artificial Sequence
  Description of Artificial Sequence: Synthetic oligonucleotide
  Target: LAMA2; (+) strand; PAM type: YTN; PAM sequence: TTT
taaacacctttaactttttt

SEQ ID NO: 335130 - DNA, 20 bp, Artificial Sequence
  Description of Artificial Sequence: Synthetic oligonucleotide
  Target: LAMA2; (+) strand; PAM type: YTN; PAM sequence: TTT
aaacacctttaacttttttg

SEQ ID NO: 335131 - DNA, 20 bp, Artificial Sequence
  Description of Artificial Sequence: Synthetic oligonucleotide
  Target: LAMA2; (+) strand; PAM type: YTN; PAM sequence: TTA
aacacctttaacttttttgt

SEQ ID NO: 335132 - DNA, 20 bp, Artificial Sequence
  Description of Artificial Sequence: Synthetic oligonucleotide
  Target: LAMA2; (+) strand; PAM type: YTN; PAM sequence: CTT
taacttttttgtttattttt

SEQ ID NO: 335133 - DNA, 20 bp, Artificial Sequence
  Description of Artificial Sequence: Synthetic oligonucleotide
  Target: LAMA2; (+) strand; PAM type: YTN; PAM sequence: TTT
aacttttttgtttatttttt

SEQ ID NO: 335134 - DNA, 20 bp, Artificial Sequence
  Description of Artificial Sequence: Synthetic oligonucleotide
  Target: LAMA2; (+) strand; PAM type: YTN; PAM sequence: TTA
acttttttgtttattttttg

SEQ ID NO: 335135 - DNA, 20 bp, Artificial Sequence
  Description of Artificial Sequence: Synthetic oligonucleotide
  Target: LAMA2; (+) strand; PAM type: YTN; PAM sequence: CTT
ttttgtttattttttgttag

SEQ ID NO: 335136 - DNA, 20 bp, Artificial Sequence
  Description of Artificial Sequence: Synthetic oligonucleotide
  Target: LAMA2; (+) strand; PAM type: YTN; PAM sequence: TTT
tttgtttattttttgttagt

SEQ ID NO: 335137 - DNA, 20 bp, Artificial Sequence
  Description of Artificial Sequence: Synthetic oligonucleotide
  Target: LAMA2; (+) strand; PAM type: YTN; PAM sequence: TTT
ttgtttattttttgttagta

SEQ ID NO: 335138 - DNA, 20 bp, Artificial Sequence
  Description of Artificial Sequence: Synthetic oligonucleotide
  Target: LAMA2; (+) strand; PAM type: YTN; PAM sequence: TTT
tgtttattttttgttagtat

SEQ ID NO: 335139 - DNA, 20 bp, Artificial Sequence
  Description of Artificial Sequence: Synthetic oligonucleotide
  Target: LAMA2; (+) strand; PAM type: YTN; PAM sequence: TTT
gtttattttttgttagtata

SEQ ID NO: 335140 - DNA, 20 bp, Artificial Sequence
  Description of Artificial Sequence: Synthetic oligonucleotide
  Target: LAMA2; (+) strand; PAM type: YTN; PAM sequence: TTG
tttattttttgttagtatac

SEQ ID NO: 335141 - DNA, 20 bp, Artificial Sequence
  Description of Artificial Sequence: Synthetic oligonucleotide
  Target: LAMA2; (+) strand; PAM type: YTN; PAM sequence: TTT
attttttgttagtatacttt

SEQ ID NO: 335142 - DNA, 20 bp, Artificial Sequence
  Description of Artificial Sequence: Synthetic oligonucleotide
  Target: LAMA2; (+) strand; PAM type: YTN; PAM sequence: TTA
ttttttgttagtatactttg

SEQ ID NO: 335143 - DNA, 20 bp, Artificial Sequence
  Description of Artificial Sequence: Synthetic oligonucleotide
  Target: LAMA2; (+) strand; PAM type: YTN; PAM sequence: TTT
tttgttagtatactttgttt

SEQ ID NO: 335144 - DNA, 20 bp, Artificial Sequence
  Description of Artificial Sequence: Synthetic oligonucleotide
  Target: LAMA2; (+) strand; PAM type: YTN; PAM sequence: TTT
ttgttagtatactttgttta

SEQ ID NO: 335145 - DNA, 20 bp, Artificial Sequence
  Description of Artificial Sequence: Synthetic oligonucleotide
  Target: LAMA2; (+) strand; PAM type: YTN; PAM sequence: TTT
tgttagtatactttgtttat

SEQ ID NO: 335146 - DNA, 20 bp, Artificial Sequence
  Description of Artificial Sequence: Synthetic oligonucleotide
  Target: LAMA2; (+) strand; PAM type: YTN; PAM sequence: TTT
gttagtatactttgtttatt

SEQ ID NO: 335147 - DNA, 20 bp, Artificial Sequence
  Description of Artificial Sequence: Synthetic oligonucleotide
  Target: LAMA2; (+) strand; PAM type: YTN; PAM sequence: TTG
ttagtatactttgtttattt

SEQ ID NO: 335148 - DNA, 20 bp, Artificial Sequence
  Description of Artificial Sequence: Synthetic oligonucleotide
  Target: LAMA2; (+) strand; PAM type: YTN; PAM sequence: TTA
gtatactttgtttatttatt

SEQ ID NO: 335149 - DNA, 20 bp, Artificial Sequence
  Description of Artificial Sequence: Synthetic oligonucleotide
  Target: LAMA2; (+) strand; PAM type: YTN; PAM sequence: CTT
tgtttatttatttatttctg

SEQ ID NO: 335150 - DNA, 20 bp, Artificial Sequence
  Description of Artificial Sequence: Synthetic oligonucleotide
  Target: LAMA2; (+) strand; PAM type: YTN; PAM sequence: TTT
gtttatttatttatttctgt

SEQ ID NO: 335151 - DNA, 20 bp, Artificial Sequence
  Description of Artificial Sequence: Synthetic oligonucleotide
  Target: LAMA2; (+) strand; PAM type: YTN; PAM sequence: TTG
tttatttatttatttctgtt

SEQ ID NO: 335152 - DNA, 20 bp, Artificial Sequence
  Description of Artificial Sequence: Synthetic oligonucleotide
  Target: LAMA2; (+) strand; PAM type: YTN; PAM sequence: TTT
atttatttatttctgttagt

SEQ ID NO: 335153 - DNA, 20 bp, Artificial Sequence
  Description of Artificial Sequence: Synthetic oligonucleotide
  Target: LAMA2; (+) strand; PAM type: YTN; PAM sequence: TTA
tttatttatttctgttagta

SEQ ID NO: 335154 - DNA, 20 bp, Artificial Sequence
  Description of Artificial Sequence: Synthetic oligonucleotide
  Target: LAMA2; (+) strand; PAM type: YTN; PAM sequence: TTT
atttatttctgttagtaaac

SEQ ID NO: 335155 - DNA, 20 bp, Artificial Sequence
  Description of Artificial Sequence: Synthetic oligonucleotide
  Target: LAMA2; (+) strand; PAM type: YTN; PAM sequence: TTA
tttatttctgttagtaaact

SEQ ID NO: 335156 - DNA, 20 bp, Artificial Sequence
  Description of Artificial Sequence: Synthetic oligonucleotide
  Target: LAMA2; (+) strand; PAM type: YTN; PAM sequence: TTT
atttctgttagtaaacttcc

SEQ ID NO: 335157 - DNA, 20 bp, Artificial Sequence
  Description of Artificial Sequence: Synthetic oligonucleotide
  Target: LAMA2; (+) strand; PAM type: YTN; PAM sequence: TTA
tttctgttagtaaacttcca

SEQ ID NO: 335158 - DNA, 20 bp, Artificial Sequence
  Description of Artificial Sequence: Synthetic oligonucleotide
  Target: LAMA2; (+) strand; PAM type: YTN; PAM sequence: TTT
ctgttagtaaacttccatca

SEQ ID NO: 335159 - DNA, 20 bp, Artificial Sequence
  Description of Artificial Sequence: Synthetic oligonucleotide
  Target: LAMA2; (+) strand; PAM type: YTN; PAM sequence: TTC
tgttagtaaacttccatcaa

SEQ ID NO: 335160 - DNA, 20 bp, Artificial Sequence
  Description of Artificial Sequence: Synthetic oligonucleotide
  Target: LAMA2; (+) strand; PAM type: YTN; PAM sequence: CTG
ttagtaaacttccatcaaga

SEQ ID NO: 335161 - DNA, 20 bp, Artificial Sequence
  Description of Artificial Sequence: Synthetic oligonucleotide
  Target: LAMA2; (+) strand; PAM type: YTN; PAM sequence: TTA
gtaaacttccatcaagaaag

SEQ ID NO: 335162 - DNA, 20 bp, Artificial Sequence
  Description of Artificial Sequence: Synthetic oligonucleotide
  Target: LAMA2; (+) strand; PAM type: YTN; PAM sequence: CTT
ccatcaagaaagtatcccat

SEQ ID NO: 335163 - DNA, 20 bp, Artificial Sequence
  Description of Artificial Sequence: Synthetic oligonucleotide
  Target: LAMA2; (+) strand; PAM type: YTN; PAM sequence: TTC
catcaagaaagtatcccatt

SEQ ID NO: 335164 - DNA, 20 bp, Artificial Sequence
  Description of Artificial Sequence: Synthetic oligonucleotide
  Target: LAMA2; (+) strand; PAM type: YTN; PAM sequence: TTT
cttttctgccttttttaaat

SEQ ID NO: 335165 - DNA, 20 bp, Artificial Sequence
  Description of Artificial Sequence: Synthetic oligonucleotide
  Target: LAMA2; (+) strand; PAM type: YTN; PAM sequence: TTC
ttttctgccttttttaaatg

SEQ ID NO: 335166 - DNA, 20 bp, Artificial Sequence
  Description of Artificial Sequence: Synthetic oligonucleotide
  Target: LAMA2; (+) strand; PAM type: YTN; PAM sequence: CTT
ttctgccttttttaaatgaa

SEQ ID NO: 335167 - DNA, 20 bp, Artificial Sequence
  Description of Artificial Sequence: Synthetic oligonucleotide
  Target: LAMA2; (+) strand; PAM type: YTN; PAM sequence: TTT
tctgccttttttaaatgaaa

SEQ ID NO: 335168 - DNA, 20 bp, Artificial Sequence
  Description of Artificial Sequence: Synthetic oligonucleotide
  Target: LAMA2; (+) strand; PAM type: YTN; PAM sequence: TTT
ctgccttttttaaatgaaag

SEQ ID NO: 335169 - DNA, 20 bp, Artificial Sequence
  Description of Artificial Sequence: Synthetic oligonucleotide
  Target: LAMA2; (+) strand; PAM type: YTN; PAM sequence: TTC
tgccttttttaaatgaaagc

SEQ ID NO: 335170 - DNA, 20 bp, Artificial Sequence
  Description of Artificial Sequence: Synthetic oligonucleotide
  Target: LAMA2; (+) strand; PAM type: YTN; PAM sequence: CTG
ccttttttaaatgaaagcct

SEQ ID NO: 335171 - DNA, 20 bp, Artificial Sequence
  Description of Artificial Sequence: Synthetic oligonucleotide
  Target: LAMA2; (+) strand; PAM type: YTN; PAM sequence: CTT
ttttaaatgaaagcctgcta

SEQ ID NO: 335172 - DNA, 20 bp, Artificial Sequence
  Description of Artificial Sequence: Synthetic oligonucleotide
  Target: LAMA2; (+) strand; PAM type: YTN; PAM sequence: TTT
tttaaatgaaagcctgctag

SEQ ID NO: 335173 - DNA, 20 bp, Artificial Sequence
  Description of Artificial Sequence: Synthetic oligonucleotide
  Target: LAMA2; (+) strand; PAM type: YTN; PAM sequence: TTT
ttaaatgaaagcctgctagt

SEQ ID NO: 335174 - DNA, 20 bp, Artificial Sequence
  Description of Artificial Sequence: Synthetic oligonucleotide
  Target: LAMA2; (+) strand; PAM type: YTN; PAM sequence: TTT
taaatgaaagcctgctagtg

SEQ ID NO: 335175 - DNA, 20 bp, Artificial Sequence
  Description of Artificial Sequence: Synthetic oligonucleotide
  Target: LAMA2; (+) strand; PAM type: YTN; PAM sequence: TTT
aaatgaaagcctgctagtga

SEQ ID NO: 335176 - DNA, 20 bp, Artificial Sequence
  Description of Artificial Sequence: Synthetic oligonucleotide
  Target: LAMA2; (+) strand; PAM type: YTN; PAM sequence: TTA
aatgaaagcctgctagtgat

SEQ ID NO: 335177 - DNA, 20 bp, Artificial Sequence
  Description of Artificial Sequence: Synthetic oligonucleotide
  Target: LAMA2; (+) strand; PAM type: YTN; PAM sequence: CTG
ctagtgataaatctctcatc

SEQ ID NO: 335178 - DNA, 20 bp, Artificial Sequence
  Description of Artificial Sequence: Synthetic oligonucleotide
  Target: LAMA2; (+) strand; PAM type: YTN; PAM sequence: CTA
gtgataaatctctcatcttt

SEQ ID NO: 335179 - DNA, 20 bp, Artificial Sequence
  Description of Artificial Sequence: Synthetic oligonucleotide
  Target: LAMA2; (+) strand; PAM type: YTN; PAM sequence: CTC
tcatcttttgtttgtttttt

SEQ ID NO: 335180 - DNA, 20 bp, Artificial Sequence
  Description of Artificial Sequence: Synthetic oligonucleotide
  Target: LAMA2; (+) strand; PAM type: YTN; PAM sequence: CTC
atcttttgtttgttttttca

SEQ ID NO: 335181 - DNA, 20 bp, Artificial Sequence
  Description of Artificial Sequence: Synthetic oligonucleotide
  Target: LAMA2; (+) strand; PAM type: YTN; PAM sequence: CTT
ttgtttgttttttcactttt

SEQ ID NO: 335182 - DNA, 20 bp, Artificial Sequence
  Description of Artificial Sequence: Synthetic oligonucleotide
  Target: LAMA2; (+) strand; PAM type: YTN; PAM sequence: TTT
tgtttgttttttcacttttc

SEQ ID NO: 335183 - DNA, 20 bp, Artificial Sequence
  Description of Artificial Sequence: Synthetic oligonucleotide
  Target: LAMA2; (+) strand; PAM type: YTN; PAM sequence: TTT
gtttgttttttcacttttct

SEQ ID NO: 335184 - DNA, 20 bp, Artificial Sequence
  Description of Artificial Sequence: Synthetic oligonucleotide
  Target: LAMA2; (+) strand; PAM type: YTN; PAM sequence: TTG
tttgttttttcacttttctt

SEQ ID NO: 335185 - DNA, 20 bp, Artificial Sequence
  Description of Artificial Sequence: Synthetic oligonucleotide
  Target: LAMA2; (+) strand; PAM type: YTN; PAM sequence: TTT
gttttttcacttttctttac

SEQ ID NO: 335186 - DNA, 20 bp, Artificial Sequence
  Description of Artificial Sequence: Synthetic oligonucleotide
  Target: LAMA2; (+) strand; PAM type: YTN; PAM sequence: TTG
ttttttcacttttctttact

SEQ ID NO: 335187 - DNA, 20 bp, Artificial Sequence
  Description of Artificial Sequence: Synthetic oligonucleotide
  Target: LAMA2; (+) strand; PAM type: YTN; PAM sequence: TTT
tttcacttttctttactttt

SEQ ID NO: 335188 - DNA, 20 bp, Artificial Sequence
  Description of Artificial Sequence: Synthetic oligonucleotide
  Target: LAMA2; (+) strand; PAM type: YTN; PAM sequence: TTT
ttcacttttctttacttttg

SEQ ID NO: 335189 - DNA, 20 bp, Artificial Sequence
  Description of Artificial Sequence: Synthetic oligonucleotide
  Target: LAMA2; (+) strand; PAM type: YTN; PAM sequence: TTT
tcacttttctttacttttga

SEQ ID NO: 335190 - DNA, 20 bp, Artificial Sequence
  Description of Artificial Sequence: Synthetic oligonucleotide
  Target: LAMA2; (+) strand; PAM type: YTN; PAM sequence: TTT
cacttttctttacttttgag

SEQ ID NO: 335191 - DNA, 20 bp, Artificial Sequence
  Description of Artificial Sequence: Synthetic oligonucleotide
  Target: LAMA2; (+) strand; PAM type: YTN; PAM sequence: TTC
acttttctttacttttgaga

SEQ ID NO: 335192 - DNA, 20 bp, Artificial Sequence
  Description of Artificial Sequence: Synthetic oligonucleotide
  Target: LAMA2; (+) strand; PAM type: YTN; PAM sequence: CTT
ttctttacttttgagactta

SEQ ID NO: 335193 - DNA, 20 bp, Artificial Sequence
  Description of Artificial Sequence: Synthetic oligonucleotide
  Target: LAMA2; (+) strand; PAM type: YTN; PAM sequence: TTT
tctttacttttgagacttat

SEQ ID NO: 335194 - DNA, 20 bp, Artificial Sequence
  Description of Artificial Sequence: Synthetic oligonucleotide
  Target: LAMA2; (+) strand; PAM type: YTN; PAM sequence: TTT
ctttacttttgagacttatt

SEQ ID NO: 335195 - DNA, 20 bp, Artificial Sequence
  Description of Artificial Sequence: Synthetic oligonucleotide
  Target: LAMA2; (+) strand; PAM type: YTN; PAM sequence: TTC
tttacttttgagacttattt

SEQ ID NO: 335196 - DNA, 20 bp, Artificial Sequence
  Description of Artificial Sequence: Synthetic oligonucleotide
  Target: LAMA2; (+) strand; PAM type: YTN; PAM sequence: CTT
tacttttgagacttattttc

SEQ ID NO: 335197 - DNA, 20 bp, Artificial Sequence
  Description of Artificial Sequence: Synthetic oligonucleotide
  Target: LAMA2; (+) strand; PAM type: YTN; PAM sequence: TTT
acttttgagacttattttcc

SEQ ID NO: 335198 - DNA, 20 bp, Artificial Sequence
  Description of Artificial Sequence: Synthetic oligonucleotide
  Target: LAMA2; (+) strand; PAM type: YTN; PAM sequence: TTA
cttttgagacttattttcca

SEQ ID NO: 335199 - DNA, 20 bp, Artificial Sequence
  Description of Artificial Sequence: Synthetic oligonucleotide
  Target: LAMA2; (+) strand; PAM type: YTN; PAM sequence: CTT
ttgagacttattttccacca

SEQ ID NO: 335200 - DNA, 20 bp, Artificial Sequence
  Description of Artificial Sequence: Synthetic oligonucleotide
  Target: LAMA2; (+) strand; PAM type: YTN; PAM sequence: TTT
tgagacttattttccaccaa

SEQ ID NO: 335201 - DNA, 20 bp, Artificial Sequence
  Description of Artificial Sequence: Synthetic oligonucleotide
  Target: LAMA2; (+) strand; PAM type: YTN; PAM sequence: TTT
gagacttattttccaccaag

SEQ ID NO: 335202 - DNA, 20 bp, Artificial Sequence
  Description of Artificial Sequence: Synthetic oligonucleotide
  Target: LAMA2; (+) strand; PAM type: YTN; PAM sequence: TTG
agacttattttccaccaagt

SEQ ID NO: 335203 - DNA, 20 bp, Artificial Sequence
  Description of Artificial Sequence: Synthetic oligonucleotide
  Target: LAMA2; (+) strand; PAM type: YTN; PAM sequence: CTT
attttccaccaagtataaag

SEQ ID NO: 335204 - DNA, 20 bp, Artificial Sequence
  Description of Artificial Sequence: Synthetic oligonucleotide
  Target: LAMA2; (+) strand; PAM type: YTN; PAM sequence: TTA
ttttccaccaagtataaagt

SEQ ID NO: 335205 - DNA, 20 bp, Artificial Sequence
  Description of Artificial Sequence: Synthetic oligonucleotide
  Target: LAMA2; (+) strand; PAM type: YTN; PAM sequence: TTT
tccaccaagtataaagtaga

SEQ ID NO: 335206 - DNA, 20 bp, Artificial Sequence
  Description of Artificial Sequence: Synthetic oligonucleotide
  Target: LAMA2; (+) strand; PAM type: YTN; PAM sequence: TTT
ccaccaagtataaagtagaa

SEQ ID NO: 335207 - DNA, 20 bp, Artificial Sequence
  Description of Artificial Sequence: Synthetic oligonucleotide
  Target: LAMA2; (+) strand; PAM type: YTN; PAM sequence: TTC
caccaagtataaagtagaat

SEQ ID NO: 335208 - DNA, 20 bp, Artificial Sequence
  Description of Artificial Sequence: Synthetic oligonucleotide
  Target: LAMA2; (+) strand; PAM type: YTN; PAM sequence: TTT
cttgcctggttggaattttg

SEQ ID NO: 335209 - DNA, 20 bp, Artificial Sequence
  Description of Artificial Sequence: Synthetic oligonucleotide
  Target: LAMA2; (+) strand; PAM type: YTN; PAM sequence: TTC
ttgcctggttggaattttgt

SEQ ID NO: 335210 - DNA, 20 bp, Artificial Sequence
  Description of Artificial Sequence: Synthetic oligonucleotide
  Target: LAMA2; (+) strand; PAM type: YTN; PAM sequence: CTT
gcctggttggaattttgttt

SEQ ID NO: 335211 - DNA, 20 bp, Artificial Sequence
  Description of Artificial Sequence: Synthetic oligonucleotide
  Target: LAMA2; (+) strand; PAM type: YTN; PAM sequence: TTG
cctggttggaattttgtttt

SEQ ID NO: 335212 - DNA, 20 bp, Artificial Sequence
  Description of Artificial Sequence: Synthetic oligonucleotide
  Target: LAMA2; (+) strand; PAM type: YTN; PAM sequence: CTG
gttggaattttgttttgttt

SEQ ID NO: 335213 - DNA, 20 bp, Artificial Sequence
  Description of Artificial Sequence: Synthetic oligonucleotide
  Target: LAMA2; (+) strand; PAM type: YTN; PAM sequence: TTG
gaattttgttttgttttgtt

SEQ ID NO: 335214 - DNA, 20 bp, Artificial Sequence
  Description of Artificial Sequence: Synthetic oligonucleotide
  Target: LAMA2; (+) strand; PAM type: YTN; PAM sequence: TTT
tgttttgttttgtttttttc

SEQ ID NO: 335215 - DNA, 20 bp, Artificial Sequence
  Description of Artificial Sequence: Synthetic oligonucleotide
  Target: LAMA2; (+) strand; PAM type: YTN; PAM sequence: TTT
gttttgttttgtttttttcc

SEQ ID NO: 335216 - DNA, 20 bp, Artificial Sequence
  Description of Artificial Sequence: Synthetic oligonucleotide
  Target: LAMA2; (+) strand; PAM type: YTN; PAM sequence: TTG
ttttgttttgtttttttcca

SEQ ID NO: 335217 - DNA, 20 bp, Artificial Sequence
  Description of Artificial Sequence: Synthetic oligonucleotide
  Target: LAMA2; (+) strand; PAM type: YTN; PAM sequence: TTT
tgttttgtttttttccagca

SEQ ID NO: 335218 - DNA, 20 bp, Artificial Sequence
  Description of Artificial Sequence: Synthetic oligonucleotide
  Target: LAMA2; (+) strand; PAM type: YTN; PAM sequence: TTT
gttttgtttttttccagcac

SEQ ID NO: 335219 - DNA, 20 bp, Artificial Sequence
  Description of Artificial Sequence: Synthetic oligonucleotide
  Target: LAMA2; (+) strand; PAM type: YTN; PAM sequence: TTG
ttttgtttttttccagcact

SEQ ID NO: 335220 - DNA, 20 bp, Artificial Sequence
  Description of Artificial Sequence: Synthetic oligonucleotide
  Target: LAMA2; (+) strand; PAM type: YTN; PAM sequence: TTT
tgtttttttccagcactcta

SEQ ID NO: 335221 - DNA, 20 bp, Artificial Sequence
  Description of Artificial Sequence: Synthetic oligonucleotide
  Target: LAMA2; (+) strand; PAM type: YTN; PAM sequence: TTT
gtttttttccagcactctaa

SEQ ID NO: 335222 - DNA, 20 bp, Artificial Sequence
  Description of Artificial Sequence: Synthetic oligonucleotide
  Target: LAMA2; (+) strand; PAM type: YTN; PAM sequence: TTG
tttttttccagcactctaaa

SEQ ID NO: 335223 - DNA, 20 bp, Artificial Sequence
  Description of Artificial Sequence: Synthetic oligonucleotide
  Target: LAMA2; (+) strand; PAM type: YTN; PAM sequence: TTT
ttttccagcactctaaatat

SEQ ID NO: 335224 - DNA, 20 bp, Artificial Sequence
  Description of Artificial Sequence: Synthetic oligonucleotide
  Target: LAMA2; (+) strand; PAM type: YTN; PAM sequence: TTT
tttccagcactctaaatata

SEQ ID NO: 335225 - DNA, 20 bp, Artificial Sequence
  Description of Artificial Sequence: Synthetic oligonucleotide
  Target: LAMA2; (+) strand; PAM type: YTN; PAM sequence: TTT
ttccagcactctaaatatat

SEQ ID NO: 335226 - DNA, 20 bp, Artificial Sequence
  Description of Artificial Sequence: Synthetic oligonucleotide
  Target: LAMA2; (+) strand; PAM type: YTN; PAM sequence: TTT
tccagcactctaaatatatc

SEQ ID NO: 335227 - DNA, 20 bp, Artificial Sequence
  Description of Artificial Sequence: Synthetic oligonucleotide
  Target: LAMA2; (+) strand; PAM type: YTN; PAM sequence: TTT
ccagcactctaaatatatcc

SEQ ID NO: 335228 - DNA, 20 bp, Artificial Sequence
  Description of Artificial Sequence: Synthetic oligonucleotide
  Target: LAMA2; (+) strand; PAM type: YTN; PAM sequence: TTC
cagcactctaaatatatcct

SEQ ID NO: 335229 - DNA, 20 bp, Artificial Sequence
  Description of Artificial Sequence: Synthetic oligonucleotide
  Target: LAMA2; (+) strand; PAM type: YTN; PAM sequence: CTC
taaatatatcctatcattat

SEQ ID NO: 335230 - DNA, 20 bp, Artificial Sequence
  Description of Artificial Sequence: Synthetic oligonucleotide
  Target: LAMA2; (+) strand; PAM type: YTN; PAM sequence: CTA
aatatatcctatcattatta

SEQ ID NO: 335231 - DNA, 20 bp, Artificial Sequence
  Description of Artificial Sequence: Synthetic oligonucleotide
  Target: LAMA2; (+) strand; PAM type: YTN; PAM sequence: CTA
tcattattacttgtttttca

SEQ ID NO: 335232 - DNA, 20 bp, Artificial Sequence
  Description of Artificial Sequence: Synthetic oligonucleotide
  Target: LAMA2; (+) strand; PAM type: YTN; PAM sequence: TTA
ttacttgtttttcattattt

SEQ ID NO: 335233 - DNA, 20 bp, Artificial Sequence
  Description of Artificial Sequence: Synthetic oligonucleotide
  Target: LAMA2; (+) strand; PAM type: YTN; PAM sequence: TTA
cttgtttttcattatttcta

SEQ ID NO: 335234 - DNA, 20 bp, Artificial Sequence
  Description of Artificial Sequence: Synthetic oligonucleotide
  Target: LAMA2; (+) strand; PAM type: YTN; PAM sequence: CTT
gtttttcattatttctatca

SEQ ID NO: 335235 - DNA, 20 bp, Artificial Sequence
  Description of Artificial Sequence: Synthetic oligonucleotide
  Target: LAMA2; (+) strand; PAM type: YTN; PAM sequence: TTG
tttttcattatttctatcat

SEQ ID NO: 335236 - DNA, 20 bp, Artificial Sequence
  Description of Artificial Sequence: Synthetic oligonucleotide
  Target: LAMA2; (+) strand; PAM type: YTN; PAM sequence: TTT
ttcattatttctatcatgaa

SEQ ID NO: 335237 - DNA, 20 bp, Artificial Sequence
  Description of Artificial Sequence: Synthetic oligonucleotide
  Target: LAMA2; (+) strand; PAM type: YTN; PAM sequence: TTT
tcattatttctatcatgaag

SEQ ID NO: 335238 - DNA, 20 bp, Artificial Sequence
  Description of Artificial Sequence: Synthetic oligonucleotide
  Target: LAMA2; (+) strand; PAM type: YTN; PAM sequence: TTT
cattatttctatcatgaagt

SEQ ID NO: 335239 - DNA, 20 bp, Artificial Sequence
  Description of Artificial Sequence: Synthetic oligonucleotide
  Target: LAMA2; (+) strand; PAM type: YTN; PAM sequence: TTC
attatttctatcatgaagta

SEQ ID NO: 335240 - DNA, 20 bp, Artificial Sequence
  Description of Artificial Sequence: Synthetic oligonucleotide
  Target: LAMA2; (+) strand; PAM type: YTN; PAM sequence: TTA
tttctatcatgaagtaagcg

SEQ ID NO: 335241 - DNA, 20 bp, Artificial Sequence
  Description of Artificial Sequence: Synthetic oligonucleotide
  Target: LAMA2; (+) strand; PAM type: YTN; PAM sequence: TTT
ctatcatgaagtaagcggaa

SEQ ID NO: 335242 - DNA, 20 bp, Artificial Sequence
  Description of Artificial Sequence: Synthetic oligonucleotide
  Target: LAMA2; (+) strand; PAM type: YTN; PAM sequence: TTC
tatcatgaagtaagcggaaa

SEQ ID NO: 335243 - DNA, 20 bp, Artificial Sequence
  Description of Artificial Sequence: Synthetic oligonucleotide
  Target: LAMA2; (+) strand; PAM type: YTN; PAM sequence: CTA
tcatgaagtaagcggaaagt

SEQ ID NO: 335244 - DNA, 20 bp, Artificial Sequence
  Description of Artificial Sequence: Synthetic oligonucleotide
  Target: LAMA2; (+) strand; PAM type: YTN; PAM sequence: CTT
attgctggttcttggaaaca

SEQ ID NO: 335245 - DNA, 20 bp, Artificial Sequence
  Description of Artificial Sequence: Synthetic oligonucleotide
  Target: LAMA2; (+) strand; PAM type: YTN; PAM sequence: TTA
ttgctggttcttggaaacaa

SEQ ID NO: 335246 - DNA, 20 bp, Artificial Sequence
  Description of Artificial Sequence: Synthetic oligonucleotide
  Target: LAMA2; (+) strand; PAM type: YTN; PAM sequence: TTG
ctggttcttggaaacaagat

SEQ ID NO: 335247 - DNA, 20 bp, Artificial Sequence
  Description of Artificial Sequence: Synthetic oligonucleotide
  Target: LAMA2; (+) strand; PAM type: YTN; PAM sequence: CTG
gttcttggaaacaagatcat

SEQ ID NO: 335248 - DNA, 20 bp, Artificial Sequence
  Description of Artificial Sequence: Synthetic oligonucleotide
  Target: LAMA2; (+) strand; PAM type: YTN; PAM sequence: TTC
ttggaaacaagatcattttt

SEQ ID NO: 335249 - DNA, 20 bp, Artificial Sequence
  Description of Artificial Sequence: Synthetic oligonucleotide
  Target: LAMA2; (+) strand; PAM type: YTN; PAM sequence: CTT
ggaaacaagatcatttttcc

SEQ ID NO: 335250 - DNA, 20 bp, Artificial Sequence
  Description of Artificial Sequence: Synthetic oligonucleotide
  Target: LAMA2; (+) strand; PAM type: YTN; PAM sequence: TTG
gaaacaagatcatttttcct

SEQ ID NO: 335251 - DNA, 20 bp, Artificial Sequence
  Description of Artificial Sequence: Synthetic oligonucleotide
  Target: LAMA2; (+) strand; PAM type: YTN; PAM sequence: TTT
ttcctttcactccattgaag

SEQ ID NO: 335252 - DNA, 20 bp, Artificial Sequence
  Description of Artificial Sequence: Synthetic oligonucleotide
  Target: LAMA2; (+) strand; PAM type: YTN; PAM sequence: TTT
tcctttcactccattgaagg

SEQ ID NO: 335253 - DNA, 20 bp, Artificial Sequence
  Description of Artificial Sequence: Synthetic oligonucleotide
  Target: LAMA2; (+) strand; PAM type: YTN; PAM sequence: TTT
cctttcactccattgaaggc

SEQ ID NO: 335254 - DNA, 20 bp, Artificial Sequence
  Description of Artificial Sequence: Synthetic oligonucleotide
  Target: LAMA2; (+) strand; PAM type: YTN; PAM sequence: TTC
ctttcactccattgaaggct

SEQ ID NO: 335255 - DNA, 20 bp, Artificial Sequence
  Description of Artificial Sequence: Synthetic oligonucleotide
  Target: LAMA2; (+) strand; PAM type: YTN; PAM sequence: CTT
tcactccattgaaggctatt

SEQ ID NO: 335256 - DNA, 20 bp, Artificial Sequence
  Description of Artificial Sequence: Synthetic oligonucleotide
  Target: LAMA2; (+) strand; PAM type: YTN; PAM sequence: TTT
cactccattgaaggctattt

SEQ ID NO: 335257 - DNA, 20 bp, Artificial Sequence
  Description of Artificial Sequence: Synthetic oligonucleotide
  Target: LAMA2; (+) strand; PAM type: YTN; PAM sequence: TTC
actccattgaaggctatttt

SEQ ID NO: 335258 - DNA, 20 bp, Artificial Sequence
  Description of Artificial Sequence: Synthetic oligonucleotide
  Target: LAMA2; (+) strand; PAM type: YTN; PAM sequence: CTC
cattgaaggctatttttttt

SEQ ID NO: 335259 - DNA, 20 bp, Artificial Sequence
  Description of Artificial Sequence: Synthetic oligonucleotide
  Target: LAMA2; (+) strand; PAM type: YTN; PAM sequence: TTG
aaggctattttttttaattt

SEQ ID NO: 335260 - DNA, 20 bp, Artificial Sequence
  Description of Artificial Sequence: Synthetic oligonucleotide
  Target: LAMA2; (+) strand; PAM type: YTN; PAM sequence: CTA
ttttttttaattttgctttt

SEQ ID NO: 335261 - DNA, 20 bp, Artificial Sequence
  Description of Artificial Sequence: Synthetic oligonucleotide
  Target: LAMA2; (+) strand; PAM type: YTN; PAM sequence: TTT
tttttaattttgcttttggt

SEQ ID NO: 335262 - DNA, 20 bp, Artificial Sequence
  Description of Artificial Sequence: Synthetic oligonucleotide
  Target: LAMA2; (+) strand; PAM type: YTN; PAM sequence: TTT
ttttaattttgcttttggtg

SEQ ID NO: 335263 - DNA, 20 bp, Artificial Sequence
  Description of Artificial Sequence: Synthetic oligonucleotide
  Target: LAMA2; (+) strand; PAM type: YTN; PAM sequence: TTT
tttaattttgcttttggtgt

SEQ ID NO: 335264 - DNA, 20 bp, Artificial Sequence
  Description of Artificial Sequence: Synthetic oligonucleotide
  Target: LAMA2; (+) strand; PAM type: YTN; PAM sequence: TTT
ttaattttgcttttggtgtt

SEQ ID NO: 335265 - DNA, 20 bp, Artificial Sequence
  Description of Artificial Sequence: Synthetic oligonucleotide
  Target: LAMA2; (+) strand; PAM type: YTN; PAM sequence: TTT
taattttgcttttggtgttc

SEQ ID NO: 335266 - DNA, 20 bp, Artificial Sequence
  Description of Artificial Sequence: Synthetic oligonucleotide
  Target: LAMA2; (+) strand; PAM type: YTN; PAM sequence: TTT
aattttgcttttggtgttca

SEQ ID NO: 335267 - DNA, 20 bp, Artificial Sequence
  Description of Artificial Sequence: Synthetic oligonucleotide
  Target: LAMA2; (+) strand; PAM type: YTN; PAM sequence: TTA
attttgcttttggtgttcag

SEQ ID NO: 335268 - DNA, 20 bp, Artificial Sequence
  Description of Artificial Sequence: Synthetic oligonucleotide
  Target: LAMA2; (+) strand; PAM type: YTN; PAM sequence: TTT
tgcttttggtgttcaggggt

SEQ ID NO: 335269 - DNA, 20 bp, Artificial Sequence
  Description of Artificial Sequence: Synthetic oligonucleotide
  Target: LAMA2; (+) strand; PAM type: YTN; PAM sequence: TTT
gcttttggtgttcaggggtt

SEQ ID NO: 335270 - DNA, 20 bp, Artificial Sequence
  Description of Artificial Sequence: Synthetic oligonucleotide
  Target: LAMA2; (+) strand; PAM type: YTN; PAM sequence: TTG
cttttggtgttcaggggttt

SEQ ID NO: 335271 - DNA, 20 bp, Artificial Sequence
  Description of Artificial Sequence: Synthetic oligonucleotide
  Target: LAMA2; (+) strand; PAM type: YTN; PAM sequence: CTT
ttggtgttcaggggtttacc

SEQ ID NO: 335272 - DNA, 20 bp, Artificial Sequence
  Description of Artificial Sequence: Synthetic oligonucleotide
  Target: LAMA2; (+) strand; PAM type: YTN; PAM sequence: TTT
tggtgttcaggggtttacca

SEQ ID NO: 335273 - DNA, 20 bp, Artificial Sequence
  Description of Artificial Sequence: Synthetic oligonucleotide
  Target: LAMA2; (+) strand; PAM type: YTN; PAM sequence: TTT
ggtgttcaggggtttaccac

SEQ ID NO: 335274 - DNA, 20 bp, Artificial Sequence
  Description of Artificial Sequence: Synthetic oligonucleotide
  Target: LAMA2; (+) strand; PAM type: YTN; PAM sequence: TTG
gtgttcaggggtttaccaca

SEQ ID NO: 335275 - DNA, 20 bp, Artificial Sequence
  Description of Artificial Sequence: Synthetic oligonucleotide
  Target: LAMA2; (+) strand; PAM type: YTN; PAM sequence: TTC
aggggtttaccacaatgtac

SEQ ID NO: 335276 - DNA, 20 bp, Artificial Sequence
  Description of Artificial Sequence: Synthetic oligonucleotide
  Target: LAMA2; (+) strand; PAM type: YTN; PAM sequence: TTT
accacaatgtacttaggaat

SEQ ID NO: 335277 - DNA, 20 bp, Artificial Sequence
  Description of Artificial Sequence: Synthetic oligonucleotide
  Target: LAMA2; (+) strand; PAM type: YTN; PAM sequence: TTA
ccacaatgtacttaggaatg

SEQ ID NO: 335278 - DNA, 20 bp, Artificial Sequence
  Description of Artificial Sequence: Synthetic oligonucleotide
  Target: LAMA2; (+) strand; PAM type: YTN; PAM sequence: CTT
aggaatgattttattggtat

SEQ ID NO: 335279 - DNA, 20 bp, Artificial Sequence
  Description of Artificial Sequence: Synthetic oligonucleotide
  Target: LAMA2; (+) strand; PAM type: YTN; PAM sequence: TTA
ggaatgattttattggtatt

SEQ ID NO: 335280 - DNA, 20 bp, Artificial Sequence
  Description of Artificial Sequence: Synthetic oligonucleotide
  Target: LAMA2; (+) strand; PAM type: YTN; PAM sequence: TTT
tattggtattaatactattt

SEQ ID NO: 335281 - DNA, 20 bp, Artificial Sequence
  Description of Artificial Sequence: Synthetic oligonucleotide
  Target: LAMA2; (+) strand; PAM type: YTN; PAM sequence: TTT
attggtattaatactatttg

SEQ ID NO: 335282 - DNA, 20 bp, Artificial Sequence
  Description of Artificial Sequence: Synthetic oligonucleotide
  Target: LAMA2; (+) strand; PAM type: YTN; PAM sequence: TTA
ttggtattaatactatttgg

SEQ ID NO: 335283 - DNA, 20 bp, Artificial Sequence
  Description of Artificial Sequence: Synthetic oligonucleotide
  Target: LAMA2; (+) strand; PAM type: YTN; PAM sequence: TTG
gtattaatactatttgggat

SEQ ID NO: 335284 - DNA, 20 bp, Artificial Sequence
  Description of Artificial Sequence: Synthetic oligonucleotide
  Target: LAMA2; (+) strand; PAM type: YTN; PAM sequence: TTA
atactatttgggattcaaaa

SEQ ID NO: 335285 - DNA, 20 bp, Artificial Sequence
  Description of Artificial Sequence: Synthetic oligonucleotide
  Target: LAMA2; (+) strand; PAM type: YTN; PAM sequence: CTA
tttgggattcaaaagcttct

SEQ ID NO: 335286 - DNA, 20 bp, Artificial Sequence
  Description of Artificial Sequence: Synthetic oligonucleotide
  Target: LAMA2; (+) strand; PAM type: YTN; PAM sequence: TTT
gggattcaaaagcttctaga

SEQ ID NO: 335287 - DNA, 20 bp, Artificial Sequence
  Description of Artificial Sequence: Synthetic oligonucleotide
  Target: LAMA2; (+) strand; PAM type: YTN; PAM sequence: TTG
ggattcaaaagcttctagat

SEQ ID NO: 335288 - DNA, 20 bp, Artificial Sequence
  Description of Artificial Sequence: Synthetic oligonucleotide
  Target: LAMA2; (+) strand; PAM type: YTN; PAM sequence: TTC
aaaagcttctagattctgtg

SEQ ID NO: 335289 - DNA, 20 bp, Artificial Sequence
  Description of Artificial Sequence: Synthetic oligonucleotide
  Target: LAMA2; (+) strand; PAM type: YTN; PAM sequence: CTT
ctagattctgtggatcaatg

SEQ ID NO: 335290 - DNA, 20 bp, Artificial Sequence
  Description of Artificial Sequence: Synthetic oligonucleotide
  Target: LAMA2; (+) strand; PAM type: YTN; PAM sequence: TTC
tagattctgtggatcaatgt

SEQ ID NO: 335291 - DNA, 20 bp, Artificial Sequence
  Description of Artificial Sequence: Synthetic oligonucleotide
  Target: LAMA2; (+) strand; PAM type: YTN; PAM sequence: CTA
gattctgtggatcaatgtct

SEQ ID NO: 335292 - DNA, 20 bp, Artificial Sequence
  Description of Artificial Sequence: Synthetic oligonucleotide
  Target: LAMA2; (+) strand; PAM type: YTN; PAM sequence: TTC
tgtggatcaatgtctttcac

SEQ ID NO: 335293 - DNA, 20 bp, Artificial Sequence
  Description of Artificial Sequence: Synthetic oligonucleotide
  Target: LAMA2; (+) strand; PAM type: YTN; PAM sequence: CTG
tggatcaatgtctttcacca

SEQ ID NO: 335294 - DNA, 20 bp, Artificial Sequence
  Description of Artificial Sequence: Synthetic oligonucleotide
  Target: LAMA2; (+) strand; PAM type: YTN; PAM sequence: CTT
tcaccaatttggtaaaattc

SEQ ID NO: 335295 - DNA, 20 bp, Artificial Sequence
  Description of Artificial Sequence: Synthetic oligonucleotide
  Target: LAMA2; (+) strand; PAM type: YTN; PAM sequence: TTT
caccaatttggtaaaattct

SEQ ID NO: 335296 - DNA, 20 bp, Artificial Sequence
  Description of Artificial Sequence: Synthetic oligonucleotide
  Target: LAMA2; (+) strand; PAM type: YTN; PAM sequence: TTC
accaatttggtaaaattctt

SEQ ID NO: 335297 - DNA, 20 bp, Artificial Sequence
  Description of Artificial Sequence: Synthetic oligonucleotide
  Target: LAMA2; (+) strand; PAM type: YTN; PAM sequence: TTT
ggtaaaattcttagccgata

SEQ ID NO: 335298 - DNA, 20 bp, Artificial Sequence
  Description of Artificial Sequence: Synthetic oligonucleotide
  Target: LAMA2; (+) strand; PAM type: YTN; PAM sequence: TTG
gtaaaattcttagccgatat

SEQ ID NO: 335299 - DNA, 20 bp, Artificial Sequence
  Description of Artificial Sequence: Synthetic oligonucleotide
  Target: LAMA2; (+) strand; PAM type: YTN; PAM sequence: TTC
ttagccgatattttctcgaa

SEQ ID NO: 335300 - DNA, 20 bp, Artificial Sequence
  Description of Artificial Sequence: Synthetic oligonucleotide
  Target: LAMA2; (+) strand; PAM type: YTN; PAM sequence: CTT
agccgatattttctcgaatg

SEQ ID NO: 335301 - DNA, 20 bp, Artificial Sequence
  Description of Artificial Sequence: Synthetic oligonucleotide
  Target: LAMA2; (+) strand; PAM type: YTN; PAM sequence: TTA
gccgatattttctcgaatgt

SEQ ID NO: 335302 - DNA, 20 bp, Artificial Sequence
  Description of Artificial Sequence: Synthetic oligonucleotide
  Target: LAMA2; (+) strand; PAM type: YTN; PAM sequence: TTT
tctcgaatgttgttactgtc

SEQ ID NO: 335303 - DNA, 20 bp, Artificial Sequence
  Description of Artificial Sequence: Synthetic oligonucleotide
  Target: LAMA2; (+) strand; PAM type: YTN; PAM sequence: TTT
ctcgaatgttgttactgtcc

SEQ ID NO: 335304 - DNA, 20 bp, Artificial Sequence
  Description of Artificial Sequence: Synthetic oligonucleotide
  Target: LAMA2; (+) strand; PAM type: YTN; PAM sequence: TTC
tcgaatgttgttactgtcca

SEQ ID NO: 335305 - DNA, 20 bp, Artificial Sequence
  Description of Artificial Sequence: Synthetic oligonucleotide
  Target: LAMA2; (+) strand; PAM type: YTN; PAM sequence: CTC
gaatgttgttactgtccatt

SEQ ID NO: 335306 - DNA, 20 bp, Artificial Sequence
  Description of Artificial Sequence: Synthetic oligonucleotide
  Target: LAMA2; (+) strand; PAM type: YTN; PAM sequence: TTG
ttactgtccattctttctct

SEQ ID NO: 335307 - DNA, 20 bp, Artificial Sequence
  Description of Artificial Sequence: Synthetic oligonucleotide
  Target: LAMA2; (+) strand; PAM type: YTN; PAM sequence: TTA
ctgtccattctttctctcca

SEQ ID NO: 335308 - DNA, 20 bp, Artificial Sequence
  Description of Artificial Sequence: Synthetic oligonucleotide
  Target: LAMA2; (+) strand; PAM type: YTN; PAM sequence: CTG
tccattctttctctccactc

SEQ ID NO: 335309 - DNA, 20 bp, Artificial Sequence
  Description of Artificial Sequence: Synthetic oligonucleotide
  Target: LAMA2; (+) strand; PAM type: YTN; PAM sequence: TTC
tttctctccactctccctga

SEQ ID NO: 335310 - DNA, 20 bp, Artificial Sequence
  Description of Artificial Sequence: Synthetic oligonucleotide
  Target: LAMA2; (+) strand; PAM type: YTN; PAM sequence: CTT
tctctccactctccctgaga

SEQ ID NO: 335311 - DNA, 20 bp, Artificial Sequence
  Description of Artificial Sequence: Synthetic oligonucleotide
  Target: LAMA2; (+) strand; PAM type: YTN; PAM sequence: TTT
ctctccactctccctgagac

SEQ ID NO: 335312 - DNA, 20 bp, Artificial Sequence
  Description of Artificial Sequence: Synthetic oligonucleotide
  Target: LAMA2; (+) strand; PAM type: YTN; PAM sequence: TTC
tctccactctccctgagact

SEQ ID NO: 335313 - DNA, 20 bp, Artificial Sequence
  Description of Artificial Sequence: Synthetic oligonucleotide
  Target: LAMA2; (+) strand; PAM type: YTN; PAM sequence: CTC
tccactctccctgagacttc

SEQ ID NO: 335314 - DNA, 20 bp, Artificial Sequence
  Description of Artificial Sequence: Synthetic oligonucleotide
  Target: LAMA2; (+) strand; PAM type: YTN; PAM sequence: CTC
cactctccctgagacttcag

SEQ ID NO: 335315 - DNA, 20 bp, Artificial Sequence
  Description of Artificial Sequence: Synthetic oligonucleotide
  Target: LAMA2; (+) strand; PAM type: YTN; PAM sequence: CTC
tccctgagacttcagtcaca

SEQ ID NO: 335316 - DNA, 20 bp, Artificial Sequence
  Description of Artificial Sequence: Synthetic oligonucleotide
  Target: LAMA2; (+) strand; PAM type: YTN; PAM sequence: CTC
cctgagacttcagtcacatc

SEQ ID NO: 335317 - DNA, 20 bp, Artificial Sequence
  Description of Artificial Sequence: Synthetic oligonucleotide
  Target: LAMA2; (+) strand; PAM type: YTN; PAM sequence: CTG
agacttcagtcacatccctg

SEQ ID NO: 335318 - DNA, 20 bp, Artificial Sequence
  Description of Artificial Sequence: Synthetic oligonucleotide
  Target: LAMA2; (+) strand; PAM type: YTN; PAM sequence: CTT
cagtcacatccctgctagac

SEQ ID NO: 335319 - DNA, 20 bp, Artificial Sequence
  Description of Artificial Sequence: Synthetic oligonucleotide
  Target: LAMA2; (+) strand; PAM type: YTN; PAM sequence: TTC
agtcacatccctgctagacc

SEQ ID NO: 335320 - DNA, 20 bp, Artificial Sequence
  Description of Artificial Sequence: Synthetic oligonucleotide
  Target: LAMA2; (+) strand; PAM type: YTN; PAM sequence: CTG
ctagaccgtttgccgtgctc

SEQ ID NO: 335321 - DNA, 20 bp, Artificial Sequence
  Description of Artificial Sequence: Synthetic oligonucleotide
  Target: LAMA2; (+) strand; PAM type: YTN; PAM sequence: CTA
gaccgtttgccgtgctcatt

SEQ ID NO: 335322 - DNA, 20 bp, Artificial Sequence
  Description of Artificial Sequence: Synthetic oligonucleotide
  Target: LAMA2; (+) strand; PAM type: YTN; PAM sequence: TTT
gccgtgctcattatgtattc

SEQ ID NO: 335323 - DNA, 20 bp, Artificial Sequence
  Description of Artificial Sequence: Synthetic oligonucleotide
  Target: LAMA2; (+) strand; PAM type: YTN; PAM sequence: TTG
ccgtgctcattatgtattct

SEQ ID NO: 335324 - DNA, 20 bp, Artificial Sequence
  Description of Artificial Sequence: Synthetic oligonucleotide
  Target: LAMA2; (+) strand; PAM type: YTN; PAM sequence: CTC
attatgtattctatggcttc

SEQ ID NO: 335325 - DNA, 20 bp, Artificial Sequence
  Description of Artificial Sequence: Synthetic oligonucleotide
  Target: LAMA2; (+) strand; PAM type: YTN; PAM sequence: TTA
tgtattctatggcttctttt

SEQ ID NO: 335326 - DNA, 20 bp, Artificial Sequence
  Description of Artificial Sequence: Synthetic oligonucleotide
  Target: LAMA2; (+) strand; PAM type: YTN; PAM sequence: TTC
tatggcttcttttcatttgt

SEQ ID NO: 335327 - DNA, 20 bp, Artificial Sequence
  Description of Artificial Sequence: Synthetic oligonucleotide
  Target: LAMA2; (+) strand; PAM type: YTN; PAM sequence: CTA
tggcttcttttcatttgtct

SEQ ID NO: 335328 - DNA, 20 bp, Artificial Sequence
  Description of Artificial Sequence: Synthetic oligonucleotide
  Target: LAMA2; (+) strand; PAM type: YTN; PAM sequence: CTT
cttttcatttgtcttctctt

SEQ ID NO: 335329 - DNA, 20 bp, Artificial Sequence
  Description of Artificial Sequence: Synthetic oligonucleotide
  Target: LAMA2; (+) strand; PAM type: YTN; PAM sequence: TTC
ttttcatttgtcttctcttc

SEQ ID NO: 335330 - DNA, 20 bp, Artificial Sequence
  Description of Artificial Sequence: Synthetic oligonucleotide
  Target: LAMA2; (+) strand; PAM type: YTN; PAM sequence: CTT
ttcatttgtcttctcttctt

SEQ ID NO: 335331 - DNA, 20 bp, Artificial Sequence
  Description of Artificial Sequence: Synthetic oligonucleotide
  Target: LAMA2; (+) strand; PAM type: YTN; PAM sequence: TTT
tcatttgtcttctcttcttt

SEQ ID NO: 335332 - DNA, 20 bp, Artificial Sequence
  Description of Artificial Sequence: Synthetic oligonucleotide
  Target: LAMA2; (+) strand; PAM type: YTN; PAM sequence: TTT
catttgtcttctcttctttt

SEQ ID NO: 335333 - DNA, 20 bp, Artificial Sequence
  Description of Artificial Sequence: Synthetic oligonucleotide
  Target: LAMA2; (+) strand; PAM type: YTN; PAM sequence: TTC
atttgtcttctcttcttttg

SEQ ID NO: 335334 - DNA, 20 bp, Artificial Sequence
  Description of Artificial Sequence: Synthetic oligonucleotide
  Target: LAMA2; (+) strand; PAM type: YTN; PAM sequence: TTT
gtcttctcttcttttgaggt

SEQ ID NO: 335335 - DNA, 20 bp, Artificial Sequence
  Description of Artificial Sequence: Synthetic oligonucleotide
  Target: LAMA2; (+) strand; PAM type: YTN; PAM sequence: TTG
tcttctcttcttttgaggtt

SEQ ID NO: 335336 - DNA, 20 bp, Artificial Sequence
  Description of Artificial Sequence: Synthetic oligonucleotide
  Target: LAMA2; (+) strand; PAM type: YTN; PAM sequence: CTT
ctcttcttttgaggtttctc

SEQ ID NO: 335337 - DNA, 20 bp, Artificial Sequence
  Description of Artificial Sequence: Synthetic oligonucleotide
  Target: LAMA2; (+) strand; PAM type: YTN; PAM sequence: TTC
tcttcttttgaggtttctca

SEQ ID NO: 335338 - DNA, 20 bp, Artificial Sequence
  Description of Artificial Sequence: Synthetic oligonucleotide
  Target: LAMA2; (+) strand; PAM type: YTN; PAM sequence: CTC
ttcttttgaggtttctcagt

SEQ ID NO: 335339 - DNA, 20 bp, Artificial Sequence
  Description of Artificial Sequence: Synthetic oligonucleotide
  Target: LAMA2; (+) strand; PAM type: YTN; PAM sequence: CTT
cttttgaggtttctcagtct

SEQ ID NO: 335340 - DNA, 20 bp, Artificial Sequence
  Description of Artificial Sequence: Synthetic oligonucleotide
  Target: LAMA2; (+) strand; PAM type: YTN; PAM sequence: TTC
ttttgaggtttctcagtctg

SEQ ID NO: 335341 - DNA, 20 bp, Artificial Sequence
  Description of Artificial Sequence: Synthetic oligonucleotide
  Target: LAMA2; (+) strand; PAM type: YTN; PAM sequence: CTT
ttgaggtttctcagtctgta

SEQ ID NO: 335342 - DNA, 20 bp, Artificial Sequence
  Description of Artificial Sequence: Synthetic oligonucleotide
  Target: LAMA2; (+) strand; PAM type: YTN; PAM sequence: TTT
tgaggtttctcagtctgtac

SEQ ID NO: 335343 - DNA, 20 bp, Artificial Sequence
  Description of Artificial Sequence: Synthetic oligonucleotide
  Target: LAMA2; (+) strand; PAM type: YTN; PAM sequence: TTT
gaggtttctcagtctgtaca

SEQ ID NO: 335344 - DNA, 20 bp, Artificial Sequence
  Description of Artificial Sequence: Synthetic oligonucleotide
  Target: LAMA2; (+) strand; PAM type: YTN; PAM sequence: TTG
aggtttctcagtctgtacat

SEQ ID NO: 335345 - DNA, 20 bp, Artificial Sequence
  Description of Artificial Sequence: Synthetic oligonucleotide
  Target: LAMA2; (+) strand; PAM type: YTN; PAM sequence: TTT
ctcagtctgtacattttctg

SEQ ID NO: 335346 - DNA, 20 bp, Artificial Sequence
  Description of Artificial Sequence: Synthetic oligonucleotide
  Target: LAMA2; (+) strand; PAM type: YTN; PAM sequence: TTC
tcagtctgtacattttctgg

SEQ ID NO: 335347 - DNA, 20 bp, Artificial Sequence
  Description of Artificial Sequence: Synthetic oligonucleotide
  Target: LAMA2; (+) strand; PAM type: YTN; PAM sequence: CTC
agtctgtacattttctgggt

SEQ ID NO: 335348 - DNA, 20 bp, Artificial Sequence
  Description of Artificial Sequence: Synthetic oligonucleotide
  Target: LAMA2; (+) strand; PAM type: YTN; PAM sequence: CTG
tacattttctgggtgacctg

SEQ ID NO: 335349 - DNA, 20 bp, Artificial Sequence
  Description of Artificial Sequence: Synthetic oligonucleotide
  Target: LAMA2; (+) strand; PAM type: YTN; PAM sequence: TTT
tctgggtgacctgttgtttg

SEQ ID NO: 335350 - DNA, 20 bp, Artificial Sequence
  Description of Artificial Sequence: Synthetic oligonucleotide
  Target: LAMA2; (+) strand; PAM type: YTN; PAM sequence: TTT
ctgggtgacctgttgtttgg

SEQ ID NO: 335351 - DNA, 20 bp, Artificial Sequence
  Description of Artificial Sequence: Synthetic oligonucleotide
  Target: LAMA2; (+) strand; PAM type: YTN; PAM sequence: TTC
tgggtgacctgttgtttggt

SEQ ID NO: 335352 - DNA, 20 bp, Artificial Sequence
  Description of Artificial Sequence: Synthetic oligonucleotide
  Target: LAMA2; (+) strand; PAM type: YTN; PAM sequence: CTG
ggtgacctgttgtttggtat

SEQ ID NO: 335353 - DNA, 20 bp, Artificial Sequence
  Description of Artificial Sequence: Synthetic oligonucleotide
  Target: LAMA2; (+) strand; PAM type: YTN; PAM sequence: CTG
ttgtttggtataaataatcc

SEQ ID NO: 335354 - DNA, 20 bp, Artificial Sequence
  Description of Artificial Sequence: Synthetic oligonucleotide
  Target: LAMA2; (+) strand; PAM type: YTN; PAM sequence: TTG
tttggtataaataatccctt

SEQ ID NO: 335355 - DNA, 20 bp, Artificial Sequence
  Description of Artificial Sequence: Synthetic oligonucleotide
  Target: LAMA2; (+) strand; PAM type: YTN; PAM sequence: TTT
ggtataaataatcccttttt

SEQ ID NO: 335356 - DNA, 20 bp, Artificial Sequence
  Description of Artificial Sequence: Synthetic oligonucleotide
  Target: LAMA2; (+) strand; PAM type: YTN; PAM sequence: TTG
gtataaataatccctttttt

SEQ ID NO: 335357 - DNA, 20 bp, Artificial Sequence
  Description of Artificial Sequence: Synthetic oligonucleotide
  Target: LAMA2; (+) strand; PAM type: YTN; PAM sequence: CTT
ttttctgctggattcaatct

SEQ ID NO: 335358 - DNA, 20 bp, Artificial Sequence
  Description of Artificial Sequence: Synthetic oligonucleotide
  Target: LAMA2; (+) strand; PAM type: YTN; PAM sequence: TTT
tttctgctggattcaatctt

SEQ ID NO: 335359 - DNA, 20 bp, Artificial Sequence
  Description of Artificial Sequence: Synthetic oligonucleotide
  Target: LAMA2; (+) strand; PAM type: YTN; PAM sequence: TTT
ttctgctggattcaatcttc

SEQ ID NO: 335360 - DNA, 20 bp, Artificial Sequence
  Description of Artificial Sequence: Synthetic oligonucleotide
  Target: LAMA2; (+) strand; PAM type: YTN; PAM sequence: TTT
tctgctggattcaatcttct

SEQ ID NO: 335361 - DNA, 20 bp, Artificial Sequence
  Description of Artificial Sequence: Synthetic oligonucleotide
  Target: LAMA2; (+) strand; PAM type: YTN; PAM sequence: TTT
ctgctggattcaatcttcta

SEQ ID NO: 335362 - DNA, 20 bp, Artificial Sequence
  Description of Artificial Sequence: Synthetic oligonucleotide
  Target: LAMA2; (+) strand; PAM type: YTN; PAM sequence: TTC
tgctggattcaatcttctat

SEQ ID NO: 335363 - DNA, 20 bp, Artificial Sequence
  Description of Artificial Sequence: Synthetic oligonucleotide
  Target: LAMA2; (+) strand; PAM type: YTN; PAM sequence: CTG
ctggattcaatcttctatta

SEQ ID NO: 335364 - DNA, 20 bp, Artificial Sequence
  Description of Artificial Sequence: Synthetic oligonucleotide
  Target: LAMA2; (+) strand; PAM type: YTN; PAM sequence: CTG
gattcaatcttctattacat

SEQ ID NO: 335365 - DNA, 20 bp, Artificial Sequence
  Description of Artificial Sequence: Synthetic oligonucleotide
  Target: LAMA2; (+) strand; PAM type: YTN; PAM sequence: TTC
aatcttctattacatacatt

SEQ ID NO: 335366 - DNA, 20 bp, Artificial Sequence
  Description of Artificial Sequence: Synthetic oligonucleotide
  Target: LAMA2; (+) strand; PAM type: YTN; PAM sequence: CTT
ctattacatacatttactgg

SEQ ID NO: 335367 - DNA, 20 bp, Artificial Sequence
  Description of Artificial Sequence: Synthetic oligonucleotide
  Target: LAMA2; (+) strand; PAM type: YTN; PAM sequence: TTC
tattacatacatttactgga

SEQ ID NO: 335368 - DNA, 20 bp, Artificial Sequence
  Description of Artificial Sequence: Synthetic oligonucleotide
  Target: LAMA2; (+) strand; PAM type: YTN; PAM sequence: CTA
ttacatacatttactggatt

SEQ ID NO: 335369 - DNA, 20 bp, Artificial Sequence
  Description of Artificial Sequence: Synthetic oligonucleotide
  Target: LAMA2; (+) strand; PAM type: YTN; PAM sequence: TTA
catacatttactggattttt

SEQ ID NO: 335370 - DNA, 20 bp, Artificial Sequence
  Description of Artificial Sequence: Synthetic oligonucleotide
  Target: LAMA2; (+) strand; PAM type: YTN; PAM sequence: TTT
actggatttttaatttttgt

SEQ ID NO: 335371 - DNA, 20 bp, Artificial Sequence
  Description of Artificial Sequence: Synthetic oligonucleotide
  Target: LAMA2; (+) strand; PAM type: YTN; PAM sequence: TTA
ctggatttttaatttttgta

SEQ ID NO: 335372 - DNA, 20 bp, Artificial Sequence
  Description of Artificial Sequence: Synthetic oligonucleotide
  Target: LAMA2; (+) strand; PAM type: YTN; PAM sequence: CTG
gatttttaatttttgtattt

SEQ ID NO: 335373 - DNA, 20 bp, Artificial Sequence
  Description of Artificial Sequence: Synthetic oligonucleotide
  Target: LAMA2; (+) strand; PAM type: YTN; PAM sequence: TTT
ttaatttttgtatttttatt

SEQ ID NO: 335374 - DNA, 20 bp, Artificial Sequence
  Description of Artificial Sequence: Synthetic oligonucleotide
  Target: LAMA2; (+) strand; PAM type: YTN; PAM sequence: TTT
taatttttgtatttttattt

SEQ ID NO: 335375 - DNA, 20 bp, Artificial Sequence
  Description of Artificial Sequence: Synthetic oligonucleotide
  Target: LAMA2; (+) strand; PAM type: YTN; PAM sequence: TTT
aatttttgtatttttatttt

SEQ ID NO: 335376 - DNA, 20 bp, Artificial Sequence
  Description of Artificial Sequence: Synthetic oligonucleotide
  Target: LAMA2; (+) strand; PAM type: YTN; PAM sequence: TTA
atttttgtatttttattttt

SEQ ID NO: 335377 - DNA, 20 bp, Artificial Sequence
  Description of Artificial Sequence: Synthetic oligonucleotide
  Target: LAMA2; (+) strand; PAM type: YTN; PAM sequence: TTT
ttgtatttttattttttagt

SEQ ID NO: 335378 - DNA, 20 bp, Artificial Sequence
  Description of Artificial Sequence: Synthetic oligonucleotide
  Target: LAMA2; (+) strand; PAM type: YTN; PAM sequence: TTT
tgtatttttattttttagtt

SEQ ID NO: 335379 - DNA, 20 bp, Artificial Sequence
  Description of Artificial Sequence: Synthetic oligonucleotide
  Target: LAMA2; (+) strand; PAM type: YTN; PAM sequence: TTT
gtatttttattttttagttt

SEQ ID NO: 335380 - DNA, 20 bp, Artificial Sequence
  Description of Artificial Sequence: Synthetic oligonucleotide
  Target: LAMA2; (+) strand; PAM type: YTN; PAM sequence: TTG
tatttttattttttagtttt

SEQ ID NO: 335381 - DNA, 20 bp, Artificial Sequence
  Description of Artificial Sequence: Synthetic oligonucleotide
  Target: LAMA2; (+) strand; PAM type: YTN; PAM sequence: TTT
ttattttttagttttagaat

SEQ ID NO: 335382 - DNA, 20 bp, Artificial Sequence
  Description of Artificial Sequence: Synthetic oligonucleotide
  Target: LAMA2; (+) strand; PAM type: YTN; PAM sequence: TTT
tattttttagttttagaata

SEQ ID NO: 335383 - DNA, 20 bp, Artificial Sequence
  Description of Artificial Sequence: Synthetic oligonucleotide
  Target: LAMA2; (+) strand; PAM type: YTN; PAM sequence: TTT
attttttagttttagaatat

SEQ ID NO: 335384 - DNA, 20 bp, Artificial Sequence
  Description of Artificial Sequence: Synthetic oligonucleotide
  Target: LAMA2; (+) strand; PAM type: YTN; PAM sequence: TTA
ttttttagttttagaatatc

SEQ ID NO: 335385 - DNA, 20 bp, Artificial Sequence
  Description of Artificial Sequence: Synthetic oligonucleotide
  Target: LAMA2; (+) strand; PAM type: YTN; PAM sequence: TTT
tttagttttagaatatccat

SEQ ID NO: 335386 - DNA, 20 bp, Artificial Sequence
  Description of Artificial Sequence: Synthetic oligonucleotide
  Target: LAMA2; (+) strand; PAM type: YTN; PAM sequence: TTT
ttagttttagaatatccatt

SEQ ID NO: 335387 - DNA, 20 bp, Artificial Sequence
  Description of Artificial Sequence: Synthetic oligonucleotide
  Target: LAMA2; (+) strand; PAM type: YTN; PAM sequence: TTT
tagttttagaatatccattt

SEQ ID NO: 335388 - DNA, 20 bp, Artificial Sequence
  Description of Artificial Sequence: Synthetic oligonucleotide
  Target: LAMA2; (+) strand; PAM type: YTN; PAM sequence: TTT
agttttagaatatccatttg

SEQ ID NO: 335389 - DNA, 20 bp, Artificial Sequence
  Description of Artificial Sequence: Synthetic oligonucleotide
  Target: LAMA2; (+) strand; PAM type: YTN; PAM sequence: TTA
gttttagaatatccatttga

SEQ ID NO: 335390 - DNA, 20 bp, Artificial Sequence
  Description of Artificial Sequence: Synthetic oligonucleotide
  Target: LAMA2; (+) strand; PAM type: YTN; PAM sequence: TTT
tagaatatccatttgatact

SEQ ID NO: 335391 - DNA, 20 bp, Artificial Sequence
  Description of Artificial Sequence: Synthetic oligonucleotide
  Target: LAMA2; (+) strand; PAM type: YTN; PAM sequence: TTT
agaatatccatttgatactt

SEQ ID NO: 335392 - DNA, 20 bp, Artificial Sequence
  Description of Artificial Sequence: Synthetic oligonucleotide
  Target: LAMA2; (+) strand; PAM type: YTN; PAM sequence: TTA
gaatatccatttgatacttt

SEQ ID NO: 335393 - DNA, 20 bp, Artificial Sequence
  Description of Artificial Sequence: Synthetic oligonucleotide
  Target: LAMA2; (+) strand; PAM type: YTN; PAM sequence: TTT
gatactttaaaaaaattaga

SEQ ID NO: 335394 - DNA, 20 bp, Artificial Sequence
  Description of Artificial Sequence: Synthetic oligonucleotide
  Target: LAMA2; (+) strand; PAM type: YTN; PAM sequence: TTG
atactttaaaaaaattagac

SEQ ID NO: 335395 - DNA, 20 bp, Artificial Sequence
  Description of Artificial Sequence: Synthetic oligonucleotide
  Target: LAMA2; (+) strand; PAM type: YTN; PAM sequence: CTT
taaaaaaattagactccaaa

SEQ ID NO: 335396 - DNA, 20 bp, Artificial Sequence
  Description of Artificial Sequence: Synthetic oligonucleotide
  Target: LAMA2; (+) strand; PAM type: YTN; PAM sequence: TTT
aaaaaaattagactccaaat

SEQ ID NO: 335397 - DNA, 20 bp, Artificial Sequence
  Description of Artificial Sequence: Synthetic oligonucleotide
  Target: LAMA2; (+) strand; PAM type: YTN; PAM sequence: TTA
aaaaaattagactccaaata

SEQ ID NO: 335398 - DNA, 20 bp, Artificial Sequence
  Description of Artificial Sequence: Synthetic oligonucleotide
  Target: LAMA2; (+) strand; PAM type: YTN; PAM sequence: TTA
gactccaaatatctctccac

SEQ ID NO: 335399 - DNA, 20 bp, Artificial Sequence
  Description of Artificial Sequence: Synthetic oligonucleotide
  Target: LAMA2; (+) strand; PAM type: YTN; PAM sequence: CTC
caaatatctctccacttagt

SEQ ID NO: 335400 - DNA, 20 bp, Artificial Sequence
  Description of Artificial Sequence: Synthetic oligonucleotide
  Target: LAMA2; (+) strand; PAM type: YTN; PAM sequence: CTC
tccacttagtcatctggaac

SEQ ID NO: 335401 - DNA, 20 bp, Artificial Sequence
  Description of Artificial Sequence: Synthetic oligonucleotide
  Target: LAMA2; (+) strand; PAM type: YTN; PAM sequence: CTC
cacttagtcatctggaacat

SEQ ID NO: 335402 - DNA, 20 bp, Artificial Sequence
  Description of Artificial Sequence: Synthetic oligonucleotide
  Target: LAMA2; (+) strand; PAM type: YTN; PAM sequence: CTT
agtcatctggaacatattaa

SEQ ID NO: 335403 - DNA, 20 bp, Artificial Sequence
  Description of Artificial Sequence: Synthetic oligonucleotide
  Target: LAMA2; (+) strand; PAM type: YTN; PAM sequence: TTA
gtcatctggaacatattaat

SEQ ID NO: 335404 - DNA, 20 bp, Artificial Sequence
  Description of Artificial Sequence: Synthetic oligonucleotide
  Target: LAMA2; (+) strand; PAM type: YTN; PAM sequence: CTG
gaacatattaataacagtta

SEQ ID NO: 335405 - DNA, 20 bp, Artificial Sequence
  Description of Artificial Sequence: Synthetic oligonucleotide
  Target: LAMA2; (+) strand; PAM type: YTN; PAM sequence: TTA
ataacagttattttaaatta

SEQ ID NO: 335406 - DNA, 20 bp, Artificial Sequence
  Description of Artificial Sequence: Synthetic oligonucleotide
  Target: LAMA2; (+) strand; PAM type: YTN; PAM sequence: TTA
ttttaaattatatgtctgat

SEQ ID NO: 335407 - DNA, 20 bp, Artificial Sequence
  Description of Artificial Sequence: Synthetic oligonucleotide
  Target: LAMA2; (+) strand; PAM type: YTN; PAM sequence: TTT
taaattatatgtctgataac

SEQ ID NO: 335408 - DNA, 20 bp, Artificial Sequence
  Description of Artificial Sequence: Synthetic oligonucleotide
  Target: LAMA2; (+) strand; PAM type: YTN; PAM sequence: TTT
aaattatatgtctgataact

SEQ ID NO: 335409 - DNA, 20 bp, Artificial Sequence
  Description of Artificial Sequence: Synthetic oligonucleotide
  Target: LAMA2; (+) strand; PAM type: YTN; PAM sequence: TTA
aattatatgtctgataactc

SEQ ID NO: 335410 - DNA, 20 bp, Artificial Sequence
  Description of Artificial Sequence: Synthetic oligonucleotide
  Target: LAMA2; (+) strand; PAM type: YTN; PAM sequence: TTA
tatgtctgataactctgacg

SEQ ID NO: 335411 - DNA, 20 bp, Artificial Sequence
  Description of Artificial Sequence: Synthetic oligonucleotide
  Target: LAMA2; (+) strand; PAM type: YTN; PAM sequence: CTG
ataactctgacgttggaaac

SEQ ID NO: 335412 - DNA, 20 bp, Artificial Sequence
  Description of Artificial Sequence: Synthetic oligonucleotide
  Target: LAMA2; (+) strand; PAM type: YTN; PAM sequence: CTC
tgacgttggaaacaactggg

SEQ ID NO: 335413 - DNA, 20 bp, Artificial Sequence
  Description of Artificial Sequence: Synthetic oligonucleotide
  Target: LAMA2; (+) strand; PAM type: YTN; PAM sequence: CTG
acgttggaaacaactgggag

SEQ ID NO: 335414 - DNA, 20 bp, Artificial Sequence
  Description of Artificial Sequence: Synthetic oligonucleotide
  Target: LAMA2; (+) strand; PAM type: YTN; PAM sequence: TTG
gaaacaactgggagtctgtt

SEQ ID NO: 335415 - DNA, 20 bp, Artificial Sequence
  Description of Artificial Sequence: Synthetic oligonucleotide
  Target: LAMA2; (+) strand; PAM type: YTN; PAM sequence: CTG
ggagtctgtttctattgtct

SEQ ID NO: 335416 - DNA, 20 bp, Artificial Sequence
  Description of Artificial Sequence: Synthetic oligonucleotide
  Target: LAMA2; (+) strand; PAM type: YTN; PAM sequence: CTG
tttctattgtcttttcatgc

SEQ ID NO: 335417 - DNA, 20 bp, Artificial Sequence
  Description of Artificial Sequence: Synthetic oligonucleotide
  Target: LAMA2; (+) strand; PAM type: YTN; PAM sequence: TTT
ctattgtcttttcatgcatt

SEQ ID NO: 335418 - DNA, 20 bp, Artificial Sequence
  Description of Artificial Sequence: Synthetic oligonucleotide
  Target: LAMA2; (+) strand; PAM type: YTN; PAM sequence: TTC
tattgtcttttcatgcattc

SEQ ID NO: 335419 - DNA, 20 bp, Artificial Sequence
  Description of Artificial Sequence: Synthetic oligonucleotide
  Target: LAMA2; (+) strand; PAM type: YTN; PAM sequence: CTA
ttgtcttttcatgcattcct

SEQ ID NO: 335420 - DNA, 20 bp, Artificial Sequence
  Description of Artificial Sequence: Synthetic oligonucleotide
  Target: LAMA2; (+) strand; PAM type: YTN; PAM sequence: TTG
tcttttcatgcattcctgtt

SEQ ID NO: 335421 - DNA, 20 bp, Artificial Sequence
  Description of Artificial Sequence: Synthetic oligonucleotide
  Target: LAMA2; (+) strand; PAM type: YTN; PAM sequence: CTT
ttcatgcattcctgttttat

SEQ ID NO: 335422 - DNA, 20 bp, Artificial Sequence
  Description of Artificial Sequence: Synthetic oligonucleotide
  Target: LAMA2; (+) strand; PAM type: YTN; PAM sequence: TTT
tcatgcattcctgttttatg

SEQ ID NO: 335423 - DNA, 20 bp, Artificial Sequence
  Description of Artificial Sequence: Synthetic oligonucleotide
  Target: LAMA2; (+) strand; PAM type: YTN; PAM sequence: TTT
catgcattcctgttttatga

SEQ ID NO: 335424 - DNA, 20 bp, Artificial Sequence
  Description of Artificial Sequence: Synthetic oligonucleotide
  Target: LAMA2; (+) strand; PAM type: YTN; PAM sequence: TTC
atgcattcctgttttatgac

SEQ ID NO: 335425 - DNA, 20 bp, Artificial Sequence
  Description of Artificial Sequence: Synthetic oligonucleotide
  Target: LAMA2; (+) strand; PAM type: YTN; PAM sequence: TTC
ctgttttatgacaagcttgg

SEQ ID NO: 335426 - DNA, 20 bp, Artificial Sequence
  Description of Artificial Sequence: Synthetic oligonucleotide
  Target: LAMA2; (+) strand; PAM type: YTN; PAM sequence: CTG
ttttatgacaagcttggtcg

SEQ ID NO: 335427 - DNA, 20 bp, Artificial Sequence
  Description of Artificial Sequence: Synthetic oligonucleotide
  Target: LAMA2; (+) strand; PAM type: YTN; PAM sequence: TTT
tatgacaagcttggtcgttt

SEQ ID NO: 335428 - DNA, 20 bp, Artificial Sequence
  Description of Artificial Sequence: Synthetic oligonucleotide
  Target: LAMA2; (+) strand; PAM type: YTN; PAM sequence: TTT
atgacaagcttggtcgtttt

SEQ ID NO: 335429 - DNA, 20 bp, Artificial Sequence
  Description of Artificial Sequence: Synthetic oligonucleotide
  Target: LAMA2; (+) strand; PAM type: YTN; PAM sequence: TTA
tgacaagcttggtcgttttt

SEQ ID NO: 335430 - DNA, 20 bp, Artificial Sequence
  Description of Artificial Sequence: Synthetic oligonucleotide
  Target: LAMA2; (+) strand; PAM type: YTN; PAM sequence: CTT
ggtcgtttttgattaaataa

SEQ ID NO: 335431 - DNA, 20 bp, Artificial Sequence
  Description of Artificial Sequence: Synthetic oligonucleotide
  Target: LAMA2; (+) strand; PAM type: YTN; PAM sequence: TTG
gtcgtttttgattaaataat

SEQ ID NO: 335432 - DNA, 20 bp, Artificial Sequence
  Description of Artificial Sequence: Synthetic oligonucleotide
  Target: LAMA2; (+) strand; PAM type: YTN; PAM sequence: TTT
ttgattaaataatgtatgtg

SEQ ID NO: 335433 - DNA, 20 bp, Artificial Sequence
  Description of Artificial Sequence: Synthetic oligonucleotide
  Target: LAMA2; (+) strand; PAM type: YTN; PAM sequence: TTT
tgattaaataatgtatgtgt

SEQ ID NO: 335434 - DNA, 20 bp, Artificial Sequence
  Description of Artificial Sequence: Synthetic oligonucleotide
  Target: LAMA2; (+) strand; PAM type: YTN; PAM sequence: TTT
gattaaataatgtatgtgtc

SEQ ID NO: 335435 - DNA, 20 bp, Artificial Sequence
  Description of Artificial Sequence: Synthetic oligonucleotide
  Target: LAMA2; (+) strand; PAM type: YTN; PAM sequence: TTG
attaaataatgtatgtgtct

SEQ ID NO: 335436 - DNA, 20 bp, Artificial Sequence
  Description of Artificial Sequence: Synthetic oligonucleotide
  Target: LAMA2; (+) strand; PAM type: YTN; PAM sequence: TTA
aataatgtatgtgtctgaaa

SEQ ID NO: 335437 - DNA, 20 bp, Artificial Sequence
  Description of Artificial Sequence: Synthetic oligonucleotide
  Target: LAMA2; (+) strand; PAM type: YTN; PAM sequence: CTG
aaaatgtataaaaattctgg

SEQ ID NO: 335438 - DNA, 20 bp, Artificial Sequence
  Description of Artificial Sequence: Synthetic oligonucleotide
  Target: LAMA2; (+) strand; PAM type: YTN; PAM sequence: TTC
tggaagatgttatttttctc

SEQ ID NO: 335439 - DNA, 20 bp, Artificial Sequence
  Description of Artificial Sequence: Synthetic oligonucleotide
  Target: LAMA2; (+) strand; PAM type: YTN; PAM sequence: CTG
gaagatgttatttttctctt

SEQ ID NO: 335440 - DNA, 20 bp, Artificial Sequence
  Description of Artificial Sequence: Synthetic oligonucleotide
  Target: LAMA2; (+) strand; PAM type: YTN; PAM sequence: TTA
tttttctcttaaaatgattt

SEQ ID NO: 335441 - DNA, 20 bp, Artificial Sequence
  Description of Artificial Sequence: Synthetic oligonucleotide
  Target: LAMA2; (+) strand; PAM type: YTN; PAM sequence: TTT
ttctcttaaaatgatttatt

SEQ ID NO: 335442 - DNA, 20 bp, Artificial Sequence
  Description of Artificial Sequence: Synthetic oligonucleotide
  Target: LAMA2; (+) strand; PAM type: YTN; PAM sequence: TTT
tctcttaaaatgatttattt

SEQ ID NO: 335443 - DNA, 20 bp, Artificial Sequence
  Description of Artificial Sequence: Synthetic oligonucleotide
  Target: LAMA2; (+) strand; PAM type: YTN; PAM sequence: TTT
ctcttaaaatgatttatttt

SEQ ID NO: 335444 - DNA, 20 bp, Artificial Sequence
  Description of Artificial Sequence: Synthetic oligonucleotide
  Target: LAMA2; (+) strand; PAM type: YTN; PAM sequence: TTC
tcttaaaatgatttattttc

SEQ ID NO: 335445 - DNA, 20 bp, Artificial Sequence
  Description of Artificial Sequence: Synthetic oligonucleotide
  Target: LAMA2; (+) strand; PAM type: YTN; PAM sequence: CTC
ttaaaatgatttattttcat

SEQ ID NO: 335446 - DNA, 20 bp, Artificial Sequence
  Description of Artificial Sequence: Synthetic oligonucleotide
  Target: LAMA2; (+) strand; PAM type: YTN; PAM sequence: CTT
aaaatgatttattttcattc

SEQ ID NO: 335447 - DNA, 20 bp, Artificial Sequence
  Description of Artificial Sequence: Synthetic oligonucleotide
  Target: LAMA2; (+) strand; PAM type: YTN; PAM sequence: TTA
aaatgatttattttcattct

SEQ ID NO: 335448 - DNA, 20 bp, Artificial Sequence
  Description of Artificial Sequence: Synthetic oligonucleotide
  Target: LAMA2; (+) strand; PAM type: YTN; PAM sequence: TTT
attttcattctgtcaagagt

SEQ ID NO: 335449 - DNA, 20 bp, Artificial Sequence
  Description of Artificial Sequence: Synthetic oligonucleotide
  Target: LAMA2; (+) strand; PAM type: YTN; PAM sequence: TTA
ttttcattctgtcaagagtt

SEQ ID NO: 335450 - DNA, 20 bp, Artificial Sequence
  Description of Artificial Sequence: Synthetic oligonucleotide
  Target: LAMA2; (+) strand; PAM type: YTN; PAM sequence: TTT
tcattctgtcaagagttagt

SEQ ID NO: 335451 - DNA, 20 bp, Artificial Sequence
  Description of Artificial Sequence: Synthetic oligonucleotide
  Target: LAMA2; (+) strand; PAM type: YTN; PAM sequence: TTT
cattctgtcaagagttagtg

SEQ ID NO: 335452 - DNA, 20 bp, Artificial Sequence
  Description of Artificial Sequence: Synthetic oligonucleotide
  Target: LAMA2; (+) strand; PAM type: YTN; PAM sequence: TTC
attctgtcaagagttagtgt

SEQ ID NO: 335453 - DNA, 20 bp, Artificial Sequence
  Description of Artificial Sequence: Synthetic oligonucleotide
  Target: LAMA2; (+) strand; PAM type: YTN; PAM sequence: TTC
tgtcaagagttagtgtagag

SEQ ID NO: 335454 - DNA, 20 bp, Artificial Sequence
  Description of Artificial Sequence: Synthetic oligonucleotide
  Target: LAMA2; (+) strand; PAM type: YTN; PAM sequence: CTG
tcaagagttagtgtagaggc

SEQ ID NO: 335455 - DNA, 20 bp, Artificial Sequence
  Description of Artificial Sequence: Synthetic oligonucleotide
  Target: LAMA2; (+) strand; PAM type: YTN; PAM sequence: TTA
gtgtagaggcaagttgcttt

SEQ ID NO: 335456 - DNA, 20 bp, Artificial Sequence
  Description of Artificial Sequence: Synthetic oligonucleotide
  Target: LAMA2; (+) strand; PAM type: YTN; PAM sequence: TTG
ctttgcttcagtcagcaact

SEQ ID NO: 335457 - DNA, 20 bp, Artificial Sequence
  Description of Artificial Sequence: Synthetic oligonucleotide
  Target: LAMA2; (+) strand; PAM type: YTN; PAM sequence: CTT
tgcttcagtcagcaactcaa

SEQ ID NO: 335458 - DNA, 20 bp, Artificial Sequence
  Description of Artificial Sequence: Synthetic oligonucleotide
  Target: LAMA2; (+) strand; PAM type: YTN; PAM sequence: TTT
gcttcagtcagcaactcaaa

SEQ ID NO: 335459 - DNA, 20 bp, Artificial Sequence
  Description of Artificial Sequence: Synthetic oligonucleotide
  Target: LAMA2; (+) strand; PAM type: YTN; PAM sequence: TTG
cttcagtcagcaactcaaat

SEQ ID NO: 335460 - DNA, 20 bp, Artificial Sequence
  Description of Artificial Sequence: Synthetic oligonucleotide
  Target: LAMA2; (+) strand; PAM type: YTN; PAM sequence: CTT
cagtcagcaactcaaatgtt

SEQ ID NO: 335461 - DNA, 20 bp, Artificial Sequence
  Description of Artificial Sequence: Synthetic oligonucleotide
  Target: LAMA2; (+) strand; PAM type: YTN; PAM sequence: TTC
agtcagcaactcaaatgttt

SEQ ID NO: 335462 - DNA, 20 bp, Artificial Sequence
  Description of Artificial Sequence: Synthetic oligonucleotide
  Target: LAMA2; (+) strand; PAM type: YTN; PAM sequence: CTC
aaatgttttgtagcttagtt

SEQ ID NO: 335463 - DNA, 20 bp, Artificial Sequence
  Description of Artificial Sequence: Synthetic oligonucleotide
  Target: LAMA2; (+) strand; PAM type: YTN; PAM sequence: TTT
tgtagcttagttagagattc

SEQ ID NO: 335464 - DNA, 20 bp, Artificial Sequence
  Description of Artificial Sequence: Synthetic oligonucleotide
  Target: LAMA2; (+) strand; PAM type: YTN; PAM sequence: TTT
gtagcttagttagagattct

SEQ ID NO: 335465 - DNA, 20 bp, Artificial Sequence
  Description of Artificial Sequence: Synthetic oligonucleotide
  Target: LAMA2; (+) strand; PAM type: YTN; PAM sequence: TTG
tagcttagttagagattctg

SEQ ID NO: 335466 - DNA, 20 bp, Artificial Sequence
  Description of Artificial Sequence: Synthetic oligonucleotide
  Target: LAMA2; (+) strand; PAM type: YTN; PAM sequence: CTT
agttagagattctgatggtt

SEQ ID NO: 335467 - DNA, 20 bp, Artificial Sequence
  Description of Artificial Sequence: Synthetic oligonucleotide
  Target: LAMA2; (+) strand; PAM type: YTN; PAM sequence: TTA
gttagagattctgatggttg

SEQ ID NO: 335468 - DNA, 20 bp, Artificial Sequence
  Description of Artificial Sequence: Synthetic oligonucleotide
  Target: LAMA2; (+) strand; PAM type: YTN; PAM sequence: TTA
gagattctgatggttgtttc

SEQ ID NO: 335469 - DNA, 20 bp, Artificial Sequence
  Description of Artificial Sequence: Synthetic oligonucleotide
  Target: LAMA2; (+) strand; PAM type: YTN; PAM sequence: TTC
tgatggttgtttctagttta

SEQ ID NO: 335470 - DNA, 20 bp, Artificial Sequence
  Description of Artificial Sequence: Synthetic oligonucleotide
  Target: LAMA2; (+) strand; PAM type: YTN; PAM sequence: CTG
atggttgtttctagtttact

SEQ ID NO: 335471 - DNA, 20 bp, Artificial Sequence
  Description of Artificial Sequence: Synthetic oligonucleotide
  Target: LAMA2; (+) strand; PAM type: YTN; PAM sequence: TTG
tttctagtttactcttagtt

SEQ ID NO: 335472 - DNA, 20 bp, Artificial Sequence
  Description of Artificial Sequence: Synthetic oligonucleotide
  Target: LAMA2; (+) strand; PAM type: YTN; PAM sequence: TTT
ctagtttactcttagttcta

SEQ ID NO: 335473 - DNA, 20 bp, Artificial Sequence
  Description of Artificial Sequence: Synthetic oligonucleotide
  Target: LAMA2; (+) strand; PAM type: YTN; PAM sequence: TTC
tagtttactcttagttctag

SEQ ID NO: 335474 - DNA, 20 bp, Artificial Sequence
  Description of Artificial Sequence: Synthetic oligonucleotide
  Target: LAMA2; (+) strand; PAM type: YTN; PAM sequence: CTA
gtttactcttagttctaggg

SEQ ID NO: 335475 - DNA, 20 bp, Artificial Sequence
  Description of Artificial Sequence: Synthetic oligonucleotide
  Target: LAMA2; (+) strand; PAM type: YTN; PAM sequence: TTT
actcttagttctagggatag

SEQ ID NO: 335476 - DNA, 20 bp, Artificial Sequence
  Description of Artificial Sequence: Synthetic oligonucleotide
  Target: LAMA2; (+) strand; PAM type: YTN; PAM sequence: TTA
ctcttagttctagggataga

SEQ ID NO: 335477 - DNA, 20 bp, Artificial Sequence
  Description of Artificial Sequence: Synthetic oligonucleotide
  Target: LAMA2; (+) strand; PAM type: YTN; PAM sequence: CTC
ttagttctagggatagactt

SEQ ID NO: 335478 - DNA, 20 bp, Artificial Sequence
  Description of Artificial Sequence: Synthetic oligonucleotide
  Target: LAMA2; (+) strand; PAM type: YTN; PAM sequence: CTT
agttctagggatagactttc

SEQ ID NO: 335479 - DNA, 20 bp, Artificial Sequence
  Description of Artificial Sequence: Synthetic oligonucleotide
  Target: LAMA2; (+) strand; PAM type: YTN; PAM sequence: TTA
gttctagggatagactttca

SEQ ID NO: 335480 - DNA, 20 bp, Artificial Sequence
  Description of Artificial Sequence: Synthetic oligonucleotide
  Target: LAMA2; (+) strand; PAM type: YTN; PAM sequence: TTC
tagggatagactttcaggac

SEQ ID NO: 335481 - DNA, 20 bp, Artificial Sequence
  Description of Artificial Sequence: Synthetic oligonucleotide
  Target: LAMA2; (+) strand; PAM type: YTN; PAM sequence: CTA
gggatagactttcaggactc

SEQ ID NO: 335482 - DNA, 20 bp, Artificial Sequence
  Description of Artificial Sequence: Synthetic oligonucleotide
  Target: LAMA2; (+) strand; PAM type: YTN; PAM sequence: CTT
tcaggactccagtggaaacc

SEQ ID NO: 335483 - DNA, 20 bp, Artificial Sequence
  Description of Artificial Sequence: Synthetic oligonucleotide
  Target: LAMA2; (+) strand; PAM type: YTN; PAM sequence: TTT
caggactccagtggaaaccc

SEQ ID NO: 335484 - DNA, 20 bp, Artificial Sequence
  Description of Artificial Sequence: Synthetic oligonucleotide
  Target: LAMA2; (+) strand; PAM type: YTN; PAM sequence: TTC
aggactccagtggaaacccc

SEQ ID NO: 335485 - DNA, 20 bp, Artificial Sequence
  Description of Artificial Sequence: Synthetic oligonucleotide
  Target: LAMA2; (+) strand; PAM type: YTN; PAM sequence: CTC
cagtggaaaccccgacttgt

SEQ ID NO: 335486 - DNA, 20 bp, Artificial Sequence
  Description of Artificial Sequence: Synthetic oligonucleotide
  Target: LAMA2; (+) strand; PAM type: YTN; PAM sequence: CTT
gtttaccacactctttcctt

SEQ ID NO: 335487 - DNA, 20 bp, Artificial Sequence
  Description of Artificial Sequence: Synthetic oligonucleotide
  Target: LAMA2; (+) strand; PAM type: YTN; PAM sequence: TTG
tttaccacactctttccttc

SEQ ID NO: 335488 - DNA, 20 bp, Artificial Sequence
  Description of Artificial Sequence: Synthetic oligonucleotide
  Target: LAMA2; (+) strand; PAM type: YTN; PAM sequence: TTT
accacactctttccttcttg

SEQ ID NO: 335489 - DNA, 20 bp, Artificial Sequence
  Description of Artificial Sequence: Synthetic oligonucleotide
  Target: LAMA2; (+) strand; PAM type: YTN; PAM sequence: TTA
ccacactctttccttcttgg

SEQ ID NO: 335490 - DNA, 20 bp, Artificial Sequence
  Description of Artificial Sequence: Synthetic oligonucleotide
  Target: LAMA2; (+) strand; PAM type: YTN; PAM sequence: CTC
tttccttcttggctgactct

SEQ ID NO: 335491 - DNA, 20 bp, Artificial Sequence
  Description of Artificial Sequence: Synthetic oligonucleotide
  Target: LAMA2; (+) strand; PAM type: YTN; PAM sequence: CTT
tccttcttggctgactctta

SEQ ID NO: 335492 - DNA, 20 bp, Artificial Sequence
  Description of Artificial Sequence: Synthetic oligonucleotide
  Target: LAMA2; (+) strand; PAM type: YTN; PAM sequence: TTT
ccttcttggctgactcttaa

SEQ ID NO: 335493 - DNA, 20 bp, Artificial Sequence
  Description of Artificial Sequence: Synthetic oligonucleotide
  Target: LAMA2; (+) strand; PAM type: YTN; PAM sequence: TTC
cttcttggctgactcttaac

SEQ ID NO: 335494 - DNA, 20 bp, Artificial Sequence
  Description of Artificial Sequence: Synthetic oligonucleotide
  Target: LAMA2; (+) strand; PAM type: YTN; PAM sequence: CTT
cttggctgactcttaactcc

SEQ ID NO: 335495 - DNA, 20 bp, Artificial Sequence
  Description of Artificial Sequence: Synthetic oligonucleotide
  Target: LAMA2; (+) strand; PAM type: YTN; PAM sequence: TTC
ttggctgactcttaactcca

SEQ ID NO: 335496 - DNA, 20 bp, Artificial Sequence
  Description of Artificial Sequence: Synthetic oligonucleotide
  Target: LAMA2; (+) strand; PAM type: YTN; PAM sequence: CTT
ggctgactcttaactccaaa

SEQ ID NO: 335497 - DNA, 20 bp, Artificial Sequence
  Description of Artificial Sequence: Synthetic oligonucleotide
  Target: LAMA2; (+) strand; PAM type: YTN; PAM sequence: TTG
gctgactcttaactccaaag

SEQ ID NO: 335498 - DNA, 20 bp, Artificial Sequence
  Description of Artificial Sequence: Synthetic oligonucleotide
  Target: LAMA2; (+) strand; PAM type: YTN; PAM sequence: CTG
actcttaactccaaagtttg

SEQ ID NO: 335499 - DNA, 20 bp, Artificial Sequence
  Description of Artificial Sequence: Synthetic oligonucleotide
  Target: LAMA2; (+) strand; PAM type: YTN; PAM sequence: CTC
ttaactccaaagtttgtctt

SEQ ID NO: 335500 - DNA, 20 bp, Artificial Sequence
  Description of Artificial Sequence: Synthetic oligonucleotide
  Target: LAMA2; (+) strand; PAM type: YTN; PAM sequence: CTT
aactccaaagtttgtcttcc

SEQ ID NO: 335501 - DNA, 20 bp, Artificial Sequence
  Description of Artificial Sequence: Synthetic oligonucleotide
  Target: LAMA2; (+) strand; PAM type: YTN; PAM sequence: TTA
actccaaagtttgtcttccc

SEQ ID NO: 335502 - DNA, 20 bp, Artificial Sequence
  Description of Artificial Sequence: Synthetic oligonucleotide
  Target: LAMA2; (+) strand; PAM type: YTN; PAM sequence: CTC
caaagtttgtcttcccaact

SEQ ID NO: 335503 - DNA, 20 bp, Artificial Sequence
  Description of Artificial Sequence: Synthetic oligonucleotide
  Target: LAMA2; (+) strand; PAM type: YTN; PAM sequence: TTT
gtcttcccaactctgggaga

SEQ ID NO: 335504 - DNA, 20 bp, Artificial Sequence
  Description of Artificial Sequence: Synthetic oligonucleotide
  Target: LAMA2; (+) strand; PAM type: YTN; PAM sequence: TTG
tcttcccaactctgggagac

SEQ ID NO: 335505 - DNA, 20 bp, Artificial Sequence
  Description of Artificial Sequence: Synthetic oligonucleotide
  Target: LAMA2; (+) strand; PAM type: YTN; PAM sequence: CTT
cccaactctgggagacttcc

SEQ ID NO: 335506 - DNA, 20 bp, Artificial Sequence
  Description of Artificial Sequence: Synthetic oligonucleotide
  Target: LAMA2; (+) strand; PAM type: YTN; PAM sequence: TTC
ccaactctgggagacttccc

SEQ ID NO: 335507 - DNA, 20 bp, Artificial Sequence
  Description of Artificial Sequence: Synthetic oligonucleotide
  Target: LAMA2; (+) strand; PAM type: YTN; PAM sequence: CTC
tgggagacttcccaaggatc

SEQ ID NO: 335508 - DNA, 20 bp, Artificial Sequence
  Description of Artificial Sequence: Synthetic oligonucleotide
  Target: LAMA2; (+) strand; PAM type: YTN; PAM sequence: CTG
ggagacttcccaaggatctt

SEQ ID NO: 335509 - DNA, 20 bp, Artificial Sequence
  Description of Artificial Sequence: Synthetic oligonucleotide
  Target: LAMA2; (+) strand; PAM type: YTN; PAM sequence: CTT
cccaaggatcttcttagttt

SEQ ID NO: 335510 - DNA, 20 bp, Artificial Sequence
  Description of Artificial Sequence: Synthetic oligonucleotide
  Target: LAMA2; (+) strand; PAM type: YTN; PAM sequence: TTC
ccaaggatcttcttagtttt

SEQ ID NO: 335511 - DNA, 20 bp, Artificial Sequence
  Description of Artificial Sequence: Synthetic oligonucleotide
  Target: LAMA2; (+) strand; PAM type: YTN; PAM sequence: CTT
cttagtttttcacttctcat

SEQ ID NO: 335512 - DNA, 20 bp, Artificial Sequence
  Description of Artificial Sequence: Synthetic oligonucleotide
  Target: LAMA2; (+) strand; PAM type: YTN; PAM sequence: TTC
ttagtttttcacttctcatg

SEQ ID NO: 335513 - DNA, 20 bp, Artificial Sequence
  Description of Artificial Sequence: Synthetic oligonucleotide
  Target: LAMA2; (+) strand; PAM type: YTN; PAM sequence: CTT
agtttttcacttctcatgag

SEQ ID NO: 335514 - DNA, 20 bp, Artificial Sequence
  Description of Artificial Sequence: Synthetic oligonucleotide
  Target: LAMA2; (+) strand; PAM type: YTN; PAM sequence: TTA
gtttttcacttctcatgagt

SEQ ID NO: 335515 - DNA, 20 bp, Artificial Sequence
  Description of Artificial Sequence: Synthetic oligonucleotide
  Target: LAMA2; (+) strand; PAM type: YTN; PAM sequence: TTT
ttcacttctcatgagttcat

SEQ ID NO: 335516 - DNA, 20 bp, Artificial Sequence
  Description of Artificial Sequence: Synthetic oligonucleotide
  Target: LAMA2; (+) strand; PAM type: YTN; PAM sequence: TTT
tcacttctcatgagttcatt

SEQ ID NO: 335517 - DNA, 20 bp, Artificial Sequence
  Description of Artificial Sequence: Synthetic oligonucleotide
  Target: LAMA2; (+) strand; PAM type: YTN; PAM sequence: TTT
cacttctcatgagttcattt

SEQ ID NO: 335518 - DNA, 20 bp, Artificial Sequence
  Description of Artificial Sequence: Synthetic oligonucleotide
  Target: LAMA2; (+) strand; PAM type: YTN; PAM sequence: TTC
acttctcatgagttcatttt

SEQ ID NO: 335519 - DNA, 20 bp, Artificial Sequence
  Description of Artificial Sequence: Synthetic oligonucleotide
  Target: LAMA2; (+) strand; PAM type: YTN; PAM sequence: CTT
ctcatgagttcatttttgca

SEQ ID NO: 335520 - DNA, 20 bp, Artificial Sequence
  Description of Artificial Sequence: Synthetic oligonucleotide
  Target: LAMA2; (+) strand; PAM type: YTN; PAM sequence: TTC
tcatgagttcatttttgcat

SEQ ID NO: 335521 - DNA, 20 bp, Artificial Sequence
  Description of Artificial Sequence: Synthetic oligonucleotide
  Target: LAMA2; (+) strand; PAM type: YTN; PAM sequence: CTC
atgagttcatttttgcatga

SEQ ID NO: 335522 - DNA, 20 bp, Artificial Sequence
  Description of Artificial Sequence: Synthetic oligonucleotide
  Target: LAMA2; (+) strand; PAM type: YTN; PAM sequence: TTC
atttttgcatgatgtttatc

SEQ ID NO: 335523 - DNA, 20 bp, Artificial Sequence
  Description of Artificial Sequence: Synthetic oligonucleotide
  Target: LAMA2; (+) strand; PAM type: YTN; PAM sequence: TTT
ttgcatgatgtttatcttct

SEQ ID NO: 335524 - DNA, 20 bp, Artificial Sequence
  Description of Artificial Sequence: Synthetic oligonucleotide
  Target: LAMA2; (+) strand; PAM type: YTN; PAM sequence: TTT
tgcatgatgtttatcttctg

SEQ ID NO: 335525 - DNA, 20 bp, Artificial Sequence
  Description of Artificial Sequence: Synthetic oligonucleotide
  Target: LAMA2; (+) strand; PAM type: YTN; PAM sequence: TTT
gcatgatgtttatcttctgg

SEQ ID NO: 335526 - DNA, 20 bp, Artificial Sequence
  Description of Artificial Sequence: Synthetic oligonucleotide
  Target: LAMA2; (+) strand; PAM type: YTN; PAM sequence: TTG
catgatgtttatcttctggc

SEQ ID NO: 335527 - DNA, 20 bp, Artificial Sequence
  Description of Artificial Sequence: Synthetic oligonucleotide
  Target: LAMA2; (+) strand; PAM type: YTN; PAM sequence: TTT
atcttctggctccttcacca

SEQ ID NO: 335528 - DNA, 20 bp, Artificial Sequence
  Description of Artificial Sequence: Synthetic oligonucleotide
  Target: LAMA2; (+) strand; PAM type: YTN; PAM sequence: TTA
tcttctggctccttcaccac

SEQ ID NO: 335529 - DNA, 20 bp, Artificial Sequence
  Description of Artificial Sequence: Synthetic oligonucleotide
  Target: LAMA2; (+) strand; PAM type: YTN; PAM sequence: CTT
ctggctccttcaccacttag

SEQ ID NO: 335530 - DNA, 20 bp, Artificial Sequence
  Description of Artificial Sequence: Synthetic oligonucleotide
  Target: LAMA2; (+) strand; PAM type: YTN; PAM sequence: TTC
tggctccttcaccacttaga

SEQ ID NO: 335531 - DNA, 20 bp, Artificial Sequence
  Description of Artificial Sequence: Synthetic oligonucleotide
  Target: LAMA2; (+) strand; PAM type: YTN; PAM sequence: CTG
gctccttcaccacttagaaa

SEQ ID NO: 335532 - DNA, 20 bp, Artificial Sequence
  Description of Artificial Sequence: Synthetic oligonucleotide
  Target: LAMA2; (+) strand; PAM type: YTN; PAM sequence: CTC
cttcaccacttagaaattgg

SEQ ID NO: 335533 - DNA, 20 bp, Artificial Sequence
  Description of Artificial Sequence: Synthetic oligonucleotide
  Target: LAMA2; (+) strand; PAM type: YTN; PAM sequence: CTT
caccacttagaaattggcaa

SEQ ID NO: 335534 - DNA, 20 bp, Artificial Sequence
  Description of Artificial Sequence: Synthetic oligonucleotide
  Target: LAMA2; (+) strand; PAM type: YTN; PAM sequence: TTC
accacttagaaattggcaaa

SEQ ID NO: 335535 - DNA, 20 bp, Artificial Sequence
  Description of Artificial Sequence: Synthetic oligonucleotide
  Target: LAMA2; (+) strand; PAM type: YTN; PAM sequence: CTT
agaaattggcaaatctcttg

SEQ ID NO: 335536 - DNA, 20 bp, Artificial Sequence
  Description of Artificial Sequence: Synthetic oligonucleotide
  Target: LAMA2; (+) strand; PAM type: YTN; PAM sequence: TTA
gaaattggcaaatctcttga

SEQ ID NO: 335537 - DNA, 20 bp, Artificial Sequence
  Description of Artificial Sequence: Synthetic oligonucleotide
  Target: LAMA2; (+) strand; PAM type: YTN; PAM sequence: TTG
gcaaatctcttgaaggcaaa

SEQ ID NO: 335538 - DNA, 20 bp, Artificial Sequence
  Description of Artificial Sequence: Synthetic oligonucleotide
  Target: LAMA2; (+) strand; PAM type: YTN; PAM sequence: CTC
ttgaaggcaaaagctgtgaa

SEQ ID NO: 335539 - DNA, 20 bp, Artificial Sequence
  Description of Artificial Sequence: Synthetic oligonucleotide
  Target: LAMA2; (+) strand; PAM type: YTN; PAM sequence: CTT
gaaggcaaaagctgtgaaga

SEQ ID NO: 335540 - DNA, 20 bp, Artificial Sequence
  Description of Artificial Sequence: Synthetic oligonucleotide
  Target: LAMA2; (+) strand; PAM type: YTN; PAM sequence: TTG
aaggcaaaagctgtgaagaa

SEQ ID NO: 335541 - DNA, 20 bp, Artificial Sequence
  Description of Artificial Sequence: Synthetic oligonucleotide
  Target: LAMA2; (+) strand; PAM type: YTN; PAM sequence: CTG
tgaagaatgtaggtctcatt

SEQ ID NO: 335542 - DNA, 20 bp, Artificial Sequence
  Description of Artificial Sequence: Synthetic oligonucleotide
  Target: LAMA2; (+) strand; PAM type: YTN; PAM sequence: CTC
atttctctatgaattatggt

SEQ ID NO: 335543 - DNA, 20 bp, Artificial Sequence
  Description of Artificial Sequence: Synthetic oligonucleotide
  Target: LAMA2; (+) strand; PAM type: YTN; PAM sequence: TTT
ctctatgaattatggtccct

SEQ ID NO: 335544 - DNA, 20 bp, Artificial Sequence
  Description of Artificial Sequence: Synthetic oligonucleotide
  Target: LAMA2; (+) strand; PAM type: YTN; PAM sequence: TTC
tctatgaattatggtccctc

SEQ ID NO: 335545 - DNA, 20 bp, Artificial Sequence
  Description of Artificial Sequence: Synthetic oligonucleotide
  Target: LAMA2; (+) strand; PAM type: YTN; PAM sequence: CTC
tatgaattatggtccctcac

SEQ ID NO: 335546 - DNA, 20 bp, Artificial Sequence
  Description of Artificial Sequence: Synthetic oligonucleotide
  Target: LAMA2; (+) strand; PAM type: YTN; PAM sequence: CTA
tgaattatggtccctcacat

SEQ ID NO: 335547 - DNA, 20 bp, Artificial Sequence
  Description of Artificial Sequence: Synthetic oligonucleotide
  Target: LAMA2; (+) strand; PAM type: YTN; PAM sequence: TTA
tggtccctcacatcctagct

SEQ ID NO: 335548 - DNA, 20 bp, Artificial Sequence
  Description of Artificial Sequence: Synthetic oligonucleotide
  Target: LAMA2; (+) strand; PAM type: YTN; PAM sequence: CTC
acatcctagctgacttcata

SEQ ID NO: 335549 - DNA, 20 bp, Artificial Sequence
  Description of Artificial Sequence: Synthetic oligonucleotide
  Target: LAMA2; (+) strand; PAM type: YTN; PAM sequence: CTA
gctgacttcatagccctgaa

SEQ ID NO: 335550 - DNA, 20 bp, Artificial Sequence
  Description of Artificial Sequence: Synthetic oligonucleotide
  Target: LAMA2; (+) strand; PAM type: YTN; PAM sequence: CTG
acttcatagccctgaattct

SEQ ID NO: 335551 - DNA, 20 bp, Artificial Sequence
  Description of Artificial Sequence: Synthetic oligonucleotide
  Target: LAMA2; (+) strand; PAM type: YTN; PAM sequence: CTT
catagccctgaattctaatg

SEQ ID NO: 335552 - DNA, 20 bp, Artificial Sequence
  Description of Artificial Sequence: Synthetic oligonucleotide
  Target: LAMA2; (+) strand; PAM type: YTN; PAM sequence: TTC
atagccctgaattctaatgt

SEQ ID NO: 335553 - DNA, 20 bp, Artificial Sequence
  Description of Artificial Sequence: Synthetic oligonucleotide
  Target: LAMA2; (+) strand; PAM type: YTN; PAM sequence: CTG
aattctaatgtttatcttct

SEQ ID NO: 335554 - DNA, 20 bp, Artificial Sequence
  Description of Artificial Sequence: Synthetic oligonucleotide
  Target: LAMA2; (+) strand; PAM type: YTN; PAM sequence: TTC
taatgtttatcttcttatcc

SEQ ID NO: 335555 - DNA, 20 bp, Artificial Sequence
  Description of Artificial Sequence: Synthetic oligonucleotide
  Target: LAMA2; (+) strand; PAM type: YTN; PAM sequence: CTA
atgtttatcttcttatcctg

SEQ ID NO: 335556 - DNA, 20 bp, Artificial Sequence
  Description of Artificial Sequence: Synthetic oligonucleotide
  Target: LAMA2; (+) strand; PAM type: YTN; PAM sequence: TTT
atcttcttatcctgtgagat

SEQ ID NO: 335557 - DNA, 20 bp, Artificial Sequence
  Description of Artificial Sequence: Synthetic oligonucleotide
  Target: LAMA2; (+) strand; PAM type: YTN; PAM sequence: TTA
tcttcttatcctgtgagatt

SEQ ID NO: 335558 - DNA, 20 bp, Artificial Sequence
  Description of Artificial Sequence: Synthetic oligonucleotide
  Target: LAMA2; (+) strand; PAM type: YTN; PAM sequence: CTT
cttatcctgtgagattgctg

SEQ ID NO: 335559 - DNA, 20 bp, Artificial Sequence
  Description of Artificial Sequence: Synthetic oligonucleotide
  Target: LAMA2; (+) strand; PAM type: YTN; PAM sequence: TTC
ttatcctgtgagattgctga

SEQ ID NO: 335560 - DNA, 20 bp, Artificial Sequence
  Description of Artificial Sequence: Synthetic oligonucleotide
  Target: LAMA2; (+) strand; PAM type: YTN; PAM sequence: CTT
atcctgtgagattgctgaac

SEQ ID NO: 335561 - DNA, 20 bp, Artificial Sequence
  Description of Artificial Sequence: Synthetic oligonucleotide
  Target: LAMA2; (+) strand; PAM type: YTN; PAM sequence: TTA
tcctgtgagattgctgaaca

SEQ ID NO: 335562 - DNA, 20 bp, Artificial Sequence
  Description of Artificial Sequence: Synthetic oligonucleotide
  Target: LAMA2; (+) strand; PAM type: YTN; PAM sequence: CTG
tgagattgctgaacacacta

SEQ ID NO: 335563 - DNA, 20 bp, Artificial Sequence
  Description of Artificial Sequence: Synthetic oligonucleotide
  Target: LAMA2; (+) strand; PAM type: YTN; PAM sequence: TTG
ctgaacacactaagatgtag

SEQ ID NO: 335564 - DNA, 20 bp, Artificial Sequence
  Description of Artificial Sequence: Synthetic oligonucleotide
  Target: LAMA2; (+) strand; PAM type: YTN; PAM sequence: CTG
aacacactaagatgtagctt

SEQ ID NO: 335565 - DNA, 20 bp, Artificial Sequence
  Description of Artificial Sequence: Synthetic oligonucleotide
  Target: LAMA2; (+) strand; PAM type: YTN; PAM sequence: CTA
agatgtagctttctctataa

SEQ ID NO: 335566 - DNA, 20 bp, Artificial Sequence
  Description of Artificial Sequence: Synthetic oligonucleotide
  Target: LAMA2; (+) strand; PAM type: YTN; PAM sequence: CTT
tctctataacctcctattca

SEQ ID NO: 335567 - DNA, 20 bp, Artificial Sequence
  Description of Artificial Sequence: Synthetic oligonucleotide
  Target: LAMA2; (+) strand; PAM type: YTN; PAM sequence: TTT
ctctataacctcctattcaa

SEQ ID NO: 335568 - DNA, 20 bp, Artificial Sequence
  Description of Artificial Sequence: Synthetic oligonucleotide
  Target: LAMA2; (+) strand; PAM type: YTN; PAM sequence: TTC
tctataacctcctattcaac

SEQ ID NO: 335569 - DNA, 20 bp, Artificial Sequence
  Description of Artificial Sequence: Synthetic oligonucleotide
  Target: LAMA2; (+) strand; PAM type: YTN; PAM sequence: CTC
tataacctcctattcaactg

SEQ ID NO: 335570 - DNA, 20 bp, Artificial Sequence
  Description of Artificial Sequence: Synthetic oligonucleotide
  Target: LAMA2; (+) strand; PAM type: YTN; PAM sequence: CTA
taacctcctattcaactgtc

SEQ ID NO: 335571 - DNA, 20 bp, Artificial Sequence
  Description of Artificial Sequence: Synthetic oligonucleotide
  Target: LAMA2; (+) strand; PAM type: YTN; PAM sequence: CTC
ctattcaactgtcagcaaat

SEQ ID NO: 335572 - DNA, 20 bp, Artificial Sequence
  Description of Artificial Sequence: Synthetic oligonucleotide
  Target: LAMA2; (+) strand; PAM type: YTN; PAM sequence: CTA
ttcaactgtcagcaaatcaa

SEQ ID NO: 335573 - DNA, 20 bp, Artificial Sequence
  Description of Artificial Sequence: Synthetic oligonucleotide
  Target: LAMA2; (+) strand; PAM type: YTN; PAM sequence: TTC
aactgtcagcaaatcaataa

SEQ ID NO: 335574 - DNA, 20 bp, Artificial Sequence
  Description of Artificial Sequence: Synthetic oligonucleotide
  Target: LAMA2; (+) strand; PAM type: YTN; PAM sequence: CTG
tcagcaaatcaataaaagta

SEQ ID NO: 335575 - DNA, 20 bp, Artificial Sequence
  Description of Artificial Sequence: Synthetic oligonucleotide
  Target: LAMA2; (+) strand; PAM type: YTN; PAM sequence: CTG
agaggaaaatggctagctta

SEQ ID NO: 335576 - DNA, 20 bp, Artificial Sequence
  Description of Artificial Sequence: Synthetic oligonucleotide
  Target: LAMA2; (+) strand; PAM type: YTN; PAM sequence: CTA
gcttaccttaatttgcttcc

SEQ ID NO: 335577 - DNA, 20 bp, Artificial Sequence
  Description of Artificial Sequence: Synthetic oligonucleotide
  Target: LAMA2; (+) strand; PAM type: YTN; PAM sequence: CTT
accttaatttgcttcccttt

SEQ ID NO: 335578 - DNA, 20 bp, Artificial Sequence
  Description of Artificial Sequence: Synthetic oligonucleotide
  Target: LAMA2; (+) strand; PAM type: YTN; PAM sequence: TTA
ccttaatttgcttcccttta

SEQ ID NO: 335579 - DNA, 20 bp, Artificial Sequence
  Description of Artificial Sequence: Synthetic oligonucleotide
  Target: LAMA2; (+) strand; PAM type: YTN; PAM sequence: CTT
aatttgcttccctttactta

SEQ ID NO: 335580 - DNA, 20 bp, Artificial Sequence
  Description of Artificial Sequence: Synthetic oligonucleotide
  Target: LAMA2; (+) strand; PAM type: YTN; PAM sequence: TTA
atttgcttccctttacttaa

SEQ ID NO: 335581 - DNA, 20 bp, Artificial Sequence
  Description of Artificial Sequence: Synthetic oligonucleotide
  Target: LAMA2; (+) strand; PAM type: YTN; PAM sequence: TTT
gcttccctttacttaagtct

SEQ ID NO: 335582 - DNA, 20 bp, Artificial Sequence
  Description of Artificial Sequence: Synthetic oligonucleotide
  Target: LAMA2; (+) strand; PAM type: YTN; PAM sequence: TTG
cttccctttacttaagtctg

SEQ ID NO: 335583 - DNA, 20 bp, Artificial Sequence
  Description of Artificial Sequence: Synthetic oligonucleotide
  Target: LAMA2; (+) strand; PAM type: YTN; PAM sequence: CTT
ccctttacttaagtctggct

SEQ ID NO: 335584 - DNA, 20 bp, Artificial Sequence
  Description of Artificial Sequence: Synthetic oligonucleotide
  Target: LAMA2; (+) strand; PAM type: YTN; PAM sequence: TTC
cctttacttaagtctggctg

SEQ ID NO: 335585 - DNA, 20 bp, Artificial Sequence
  Description of Artificial Sequence: Synthetic oligonucleotide
  Target: LAMA2; (+) strand; PAM type: YTN; PAM sequence: CTT
tacttaagtctggctgcctt

SEQ ID NO: 335586 - DNA, 20 bp, Artificial Sequence
  Description of Artificial Sequence: Synthetic oligonucleotide
  Target: LAMA2; (+) strand; PAM type: YTN; PAM sequence: TTT
acttaagtctggctgccttg

SEQ ID NO: 335587 - DNA, 20 bp, Artificial Sequence
  Description of Artificial Sequence: Synthetic oligonucleotide
  Target: LAMA2; (+) strand; PAM type: YTN; PAM sequence: TTA
cttaagtctggctgccttgg

SEQ ID NO: 335588 - DNA, 20 bp, Artificial Sequence
  Description of Artificial Sequence: Synthetic oligonucleotide
  Target: LAMA2; (+) strand; PAM type: YTN; PAM sequence: CTT
aagtctggctgccttggttg

SEQ ID NO: 335589 - DNA, 20 bp, Artificial Sequence
  Description of Artificial Sequence: Synthetic oligonucleotide
  Target: LAMA2; (+) strand; PAM type: YTN; PAM sequence: TTA
agtctggctgccttggttgc

SEQ ID NO: 335590 - DNA, 20 bp, Artificial Sequence
  Description of Artificial Sequence: Synthetic oligonucleotide
  Target: LAMA2; (+) strand; PAM type: YTN; PAM sequence: CTG
gctgccttggttgcttgctg

SEQ ID NO: 335591 - DNA, 20 bp, Artificial Sequence
  Description of Artificial Sequence: Synthetic oligonucleotide
  Target: LAMA2; (+) strand; PAM type: YTN; PAM sequence: CTG
ccttggttgcttgctgatgc

SEQ ID NO: 335592 - DNA, 20 bp, Artificial Sequence
  Description of Artificial Sequence: Synthetic oligonucleotide
  Target: LAMA2; (+) strand; PAM type: YTN; PAM sequence: CTT
ggttgcttgctgatgccttc

SEQ ID NO: 335593 - DNA, 20 bp, Artificial Sequence
  Description of Artificial Sequence: Synthetic oligonucleotide
  Target: LAMA2; (+) strand; PAM type: YTN; PAM sequence: TTG
gttgcttgctgatgccttca

SEQ ID NO: 335594 - DNA, 20 bp, Artificial Sequence
  Description of Artificial Sequence: Synthetic oligonucleotide
  Target: LAMA2; (+) strand; PAM type: YTN; PAM sequence: TTG
cttgctgatgccttcaaact

SEQ ID NO: 335595 - DNA, 20 bp, Artificial Sequence
  Description of Artificial Sequence: Synthetic oligonucleotide
  Target: LAMA2; (+) strand; PAM type: YTN; PAM sequence: CTT
gctgatgccttcaaactgct

SEQ ID NO: 335596 - DNA, 20 bp, Artificial Sequence
  Description of Artificial Sequence: Synthetic oligonucleotide
  Target: LAMA2; (+) strand; PAM type: YTN; PAM sequence: TTG
ctgatgccttcaaactgctg

SEQ ID NO: 335597 - DNA, 20 bp, Artificial Sequence
  Description of Artificial Sequence: Synthetic oligonucleotide
  Target: LAMA2; (+) strand; PAM type: YTN; PAM sequence: CTG
atgccttcaaactgctgttt

SEQ ID NO: 335598 - DNA, 20 bp, Artificial Sequence
  Description of Artificial Sequence: Synthetic oligonucleotide
  Target: LAMA2; (+) strand; PAM type: YTN; PAM sequence: CTT
caaactgctgtttttagtat

SEQ ID NO: 335599 - DNA, 20 bp, Artificial Sequence
  Description of Artificial Sequence: Synthetic oligonucleotide
  Target: LAMA2; (+) strand; PAM type: YTN; PAM sequence: TTC
aaactgctgtttttagtatt

SEQ ID NO: 335600 - DNA, 20 bp, Artificial Sequence
  Description of Artificial Sequence: Synthetic oligonucleotide
  Target: LAMA2; (+) strand; PAM type: YTN; PAM sequence: CTG
ctgtttttagtattttatcc

SEQ ID NO: 335601 - DNA, 20 bp, Artificial Sequence
  Description of Artificial Sequence: Synthetic oligonucleotide
  Target: LAMA2; (+) strand; PAM type: YTN; PAM sequence: CTG
tttttagtattttatccagc

SEQ ID NO: 335602 - DNA, 20 bp, Artificial Sequence
  Description of Artificial Sequence: Synthetic oligonucleotide
  Target: LAMA2; (+) strand; PAM type: YTN; PAM sequence: TTT
ttagtattttatccagcttt

SEQ ID NO: 335603 - DNA, 20 bp, Artificial Sequence
  Description of Artificial Sequence: Synthetic oligonucleotide
  Target: LAMA2; (+) strand; PAM type: YTN; PAM sequence: TTT
tagtattttatccagctttt

SEQ ID NO: 335604 - DNA, 20 bp, Artificial Sequence
  Description of Artificial Sequence: Synthetic oligonucleotide
  Target: LAMA2; (+) strand; PAM type: YTN; PAM sequence: TTT
agtattttatccagctttta

SEQ ID NO: 335605 - DNA, 20 bp, Artificial Sequence
  Description of Artificial Sequence: Synthetic oligonucleotide
  Target: LAMA2; (+) strand; PAM type: YTN; PAM sequence: TTA
gtattttatccagcttttat

SEQ ID NO: 335606 - DNA, 20 bp, Artificial Sequence
  Description of Artificial Sequence: Synthetic oligonucleotide
  Target: LAMA2; (+) strand; PAM type: YTN; PAM sequence: TTT
tatccagcttttatggttgt

SEQ ID NO: 335607 - DNA, 20 bp, Artificial Sequence
  Description of Artificial Sequence: Synthetic oligonucleotide
  Target: LAMA2; (+) strand; PAM type: YTN; PAM sequence: TTT
atccagcttttatggttgtt

SEQ ID NO: 335608 - DNA, 20 bp, Artificial Sequence
  Description of Artificial Sequence: Synthetic oligonucleotide
  Target: LAMA2; (+) strand; PAM type: YTN; PAM sequence: TTA
tccagcttttatggttgttg

SEQ ID NO: 335609 - DNA, 20 bp, Artificial Sequence
  Description of Artificial Sequence: Synthetic oligonucleotide
  Target: LAMA2; (+) strand; PAM type: YTN; PAM sequence: CTT
ttatggttgttgtctttgag

SEQ ID NO: 335610 - DNA, 20 bp, Artificial Sequence
  Description of Artificial Sequence: Synthetic oligonucleotide
  Target: LAMA2; (+) strand; PAM type: YTN; PAM sequence: TTT
tatggttgttgtctttgaga

SEQ ID NO: 335611 - DNA, 20 bp, Artificial Sequence
  Description of Artificial Sequence: Synthetic oligonucleotide
  Target: LAMA2; (+) strand; PAM type: YTN; PAM sequence: TTT
atggttgttgtctttgagag

SEQ ID NO: 335612 - DNA, 20 bp, Artificial Sequence
  Description of Artificial Sequence: Synthetic oligonucleotide
  Target: LAMA2; (+) strand; PAM type: YTN; PAM sequence: TTA
tggttgttgtctttgagaga

SEQ ID NO: 335613 - DNA, 20 bp, Artificial Sequence
  Description of Artificial Sequence: Synthetic oligonucleotide
  Target: LAMA2; (+) strand; PAM type: YTN; PAM sequence: TTG
ttgtctttgagagaaaatgg

SEQ ID NO: 335614 - DNA, 20 bp, Artificial Sequence
  Description of Artificial Sequence: Synthetic oligonucleotide
  Target: LAMA2; (+) strand; PAM type: YTN; PAM sequence: TTG
tctttgagagaaaatggaaa

SEQ ID NO: 335615 - DNA, 20 bp, Artificial Sequence
  Description of Artificial Sequence: Synthetic oligonucleotide
  Target: LAMA2; (+) strand; PAM type: YTN; PAM sequence: CTT
tgagagaaaatggaaaggga

SEQ ID NO: 335616 - DNA, 20 bp, Artificial Sequence
  Description of Artificial Sequence: Synthetic oligonucleotide
  Target: LAMA2; (+) strand; PAM type: YTN; PAM sequence: TTT
gagagaaaatggaaagggaa

SEQ ID NO: 335617 - DNA, 20 bp, Artificial Sequence
  Description of Artificial Sequence: Synthetic oligonucleotide
  Target: LAMA2; (+) strand; PAM type: YTN; PAM sequence: TTG
agagaaaatggaaagggaaa

SEQ ID NO: 335618 - DNA, 20 bp, Artificial Sequence
  Description of Artificial Sequence: Synthetic oligonucleotide
  Target: LAMA2; (+) strand; PAM type: YTN; PAM sequence: TTT
attttatttacagttttaaa

SEQ ID NO: 335619 - DNA, 20 bp, Artificial Sequence
  Description of Artificial Sequence: Synthetic oligonucleotide
  Target: LAMA2; (+) strand; PAM type: YTN; PAM sequence: TTA
ttttatttacagttttaaaa

SEQ ID NO: 335620 - DNA, 20 bp, Artificial Sequence
  Description of Artificial Sequence: Synthetic oligonucleotide
  Target: LAMA2; (+) strand; PAM type: YTN; PAM sequence: TTT
tatttacagttttaaaaaca

SEQ ID NO: 335621 - DNA, 20 bp, Artificial Sequence
  Description of Artificial Sequence: Synthetic oligonucleotide
  Target: LAMA2; (+) strand; PAM type: YTN; PAM sequence: TTT
atttacagttttaaaaacaa

SEQ ID NO: 335622 - DNA, 20 bp, Artificial Sequence
  Description of Artificial Sequence: Synthetic oligonucleotide
  Target: LAMA2; (+) strand; PAM type: YTN; PAM sequence: TTA
tttacagttttaaaaacaaa

SEQ ID NO: 335623 - DNA, 20 bp, Artificial Sequence
  Description of Artificial Sequence: Synthetic oligonucleotide
  Target: LAMA2; (+) strand; PAM type: YTN; PAM sequence: TTT
acagttttaaaaacaaaaat

SEQ ID NO: 335624 - DNA, 20 bp, Artificial Sequence
  Description of Artificial Sequence: Synthetic oligonucleotide
  Target: LAMA2; (+) strand; PAM type: YTN; PAM sequence: TTA
cagttttaaaaacaaaaatc

SEQ ID NO: 335625 - DNA, 20 bp, Artificial Sequence
  Description of Artificial Sequence: Synthetic oligonucleotide
  Target: LAMA2; (+) strand; PAM type: YTN; PAM sequence: TTT
taaaaacaaaaatcagcata

SEQ ID NO: 335626 - DNA, 20 bp, Artificial Sequence
  Description of Artificial Sequence: Synthetic oligonucleotide
  Target: LAMA2; (+) strand; PAM type: YTN; PAM sequence: TTT
aaaaacaaaaatcagcatat

SEQ ID NO: 335627 - DNA, 20 bp, Artificial Sequence
  Description of Artificial Sequence: Synthetic oligonucleotide
  Target: LAMA2; (+) strand; PAM type: YTN; PAM sequence: TTA
aaaacaaaaatcagcatatt

SEQ ID NO: 335628 - DNA, 20 bp, Artificial Sequence
  Description of Artificial Sequence: Synthetic oligonucleotide
  Target: LAMA2; (+) strand; PAM type: YTN; PAM sequence: TTA
tctgataaaattattattgc

SEQ ID NO: 335629 - DNA, 20 bp, Artificial Sequence
  Description of Artificial Sequence: Synthetic oligonucleotide
  Target: LAMA2; (+) strand; PAM type: YTN; PAM sequence: CTG
ataaaattattattgctttt

SEQ ID NO: 335630 - DNA, 20 bp, Artificial Sequence
  Description of Artificial Sequence: Synthetic oligonucleotide
  Target: LAMA2; (+) strand; PAM type: YTN; PAM sequence: TTA
ttattgctttttgtgaattt

SEQ ID NO: 335631 - DNA, 20 bp, Artificial Sequence
  Description of Artificial Sequence: Synthetic oligonucleotide
  Target: LAMA2; (+) strand; PAM type: YTN; PAM sequence: TTA
ttgctttttgtgaatttaag

SEQ ID NO: 335632 - DNA, 20 bp, Artificial Sequence
  Description of Artificial Sequence: Synthetic oligonucleotide
  Target: LAMA2; (+) strand; PAM type: YTN; PAM sequence: TTG
ctttttgtgaatttaaggaa

SEQ ID NO: 335633 - DNA, 20 bp, Artificial Sequence
  Description of Artificial Sequence: Synthetic oligonucleotide
  Target: LAMA2; (+) strand; PAM type: YTN; PAM sequence: CTT
tttgtgaatttaaggaatgt

SEQ ID NO: 335634 - DNA, 20 bp, Artificial Sequence
  Description of Artificial Sequence: Synthetic oligonucleotide
  Target: LAMA2; (+) strand; PAM type: YTN; PAM sequence: TTT
ttgtgaatttaaggaatgtt

SEQ ID NO: 335635 - DNA, 20 bp, Artificial Sequence
  Description of Artificial Sequence: Synthetic oligonucleotide
  Target: LAMA2; (+) strand; PAM type: YTN; PAM sequence: TTT
tgtgaatttaaggaatgttc

SEQ ID NO: 335636 - DNA, 20 bp, Artificial Sequence
  Description of Artificial Sequence: Synthetic oligonucleotide
  Target: LAMA2; (+) strand; PAM type: YTN; PAM sequence: TTT
gtgaatttaaggaatgttct

SEQ ID NO: 335637 - DNA, 20 bp, Artificial Sequence
  Description of Artificial Sequence: Synthetic oligonucleotide
  Target: LAMA2; (+) strand; PAM type: YTN; PAM sequence: TTG
tgaatttaaggaatgttctg

SEQ ID NO: 335638 - DNA, 20 bp, Artificial Sequence
  Description of Artificial Sequence: Synthetic oligonucleotide
  Target: LAMA2; (+) strand; PAM type: YTN; PAM sequence: TTT
aaggaatgttctgaattatt

SEQ ID NO: 335639 - DNA, 20 bp, Artificial Sequence
  Description of Artificial Sequence: Synthetic oligonucleotide
  Target: LAMA2; (+) strand; PAM type: YTN; PAM sequence: TTA
aggaatgttctgaattattg

SEQ ID NO: 335640 - DNA, 20 bp, Artificial Sequence
  Description of Artificial Sequence: Synthetic oligonucleotide
  Target: LAMA2; (+) strand; PAM type: YTN; PAM sequence: TTC
tgaattattgcttcaatatt

SEQ ID NO: 335641 - DNA, 20 bp, Artificial Sequence
  Description of Artificial Sequence: Synthetic oligonucleotide
  Target: LAMA2; (+) strand; PAM type: YTN; PAM sequence: CTG
aattattgcttcaatattaa

SEQ ID NO: 335642 - DNA, 20 bp, Artificial Sequence
  Description of Artificial Sequence: Synthetic oligonucleotide
  Target: LAMA2; (+) strand; PAM type: YTN; PAM sequence: TTA
ttgcttcaatattaaaacaa

SEQ ID NO: 335643 - DNA, 20 bp, Artificial Sequence
  Description of Artificial Sequence: Synthetic oligonucleotide
  Target: LAMA2; (+) strand; PAM type: YTN; PAM sequence: TTG
cttcaatattaaaacaataa

SEQ ID NO: 335644 - DNA, 20 bp, Artificial Sequence
  Description of Artificial Sequence: Synthetic oligonucleotide
  Target: LAMA2; (+) strand; PAM type: YTN; PAM sequence: CTT
caatattaaaacaataatta

SEQ ID NO: 335645 - DNA, 20 bp, Artificial Sequence
  Description of Artificial Sequence: Synthetic oligonucleotide
  Target: LAMA2; (+) strand; PAM type: YTN; PAM sequence: TTC
aatattaaaacaataattat

SEQ ID NO: 335646 - DNA, 20 bp, Artificial Sequence
  Description of Artificial Sequence: Synthetic oligonucleotide
  Target: LAMA2; (+) strand; PAM type: YTN; PAM sequence: TTA
aaacaataattattggaaca

SEQ ID NO: 335647 - DNA, 20 bp, Artificial Sequence
  Description of Artificial Sequence: Synthetic oligonucleotide
  Target: LAMA2; (+) strand; PAM type: YTN; PAM sequence: TTA
ttggaacattttgatggatt

SEQ ID NO: 335648 - DNA, 20 bp, Artificial Sequence
  Description of Artificial Sequence: Synthetic oligonucleotide
  Target: LAMA2; (+) strand; PAM type: YTN; PAM sequence: TTG
gaacattttgatggattatg

SEQ ID NO: 335649 - DNA, 20 bp, Artificial Sequence
  Description of Artificial Sequence: Synthetic oligonucleotide
  Target: LAMA2; (+) strand; PAM type: YTN; PAM sequence: TTT
tgatggattatgaagaaaga

SEQ ID NO: 335650 - DNA, 20 bp, Artificial Sequence
  Description of Artificial Sequence: Synthetic oligonucleotide
  Target: LAMA2; (+) strand; PAM type: YTN; PAM sequence: TTT
gatggattatgaagaaagaa

SEQ ID NO: 335651 - DNA, 20 bp, Artificial Sequence
  Description of Artificial Sequence: Synthetic oligonucleotide
  Target: LAMA2; (+) strand; PAM type: YTN; PAM sequence: TTG
atggattatgaagaaagaat

SEQ ID NO: 335652 - DNA, 20 bp, Artificial Sequence
  Description of Artificial Sequence: Synthetic oligonucleotide
  Target: LAMA2; (+) strand; PAM type: YTN; PAM sequence: TTA
tgaagaaagaatatgtaaaa

SEQ ID NO: 335653 - DNA, 20 bp, Artificial Sequence
  Description of Artificial Sequence: Synthetic oligonucleotide
  Target: LAMA2; (+) strand; PAM type: YTN; PAM sequence: TTG
ggatcgtgtggaaaatctgg

SEQ ID NO: 335654 - DNA, 20 bp, Artificial Sequence
  Description of Artificial Sequence: Synthetic oligonucleotide
  Target: LAMA2; (+) strand; PAM type: YTN; PAM sequence: CTG
gtatgcatgaaattggcata

SEQ ID NO: 335655 - DNA, 20 bp, Artificial Sequence
  Description of Artificial Sequence: Synthetic oligonucleotide
  Target: LAMA2; (+) strand; PAM type: YTN; PAM sequence: TTG
gcatataaagtaggcctaaa

SEQ ID NO: 335656 - DNA, 20 bp, Artificial Sequence
  Description of Artificial Sequence: Synthetic oligonucleotide
  Target: LAMA2; (+) strand; PAM type: YTN; PAM sequence: CTA
aacaaagcaggtgctattct

SEQ ID NO: 335657 - DNA, 20 bp, Artificial Sequence
  Description of Artificial Sequence: Synthetic oligonucleotide
  Target: LAMA2; (+) strand; PAM type: YTN; PAM sequence: CTA
ttcttagtaagaagcttcat

SEQ ID NO: 335658 - DNA, 20 bp, Artificial Sequence
  Description of Artificial Sequence: Synthetic oligonucleotide
  Target: LAMA2; (+) strand; PAM type: YTN; PAM sequence: TTC
ttagtaagaagcttcatgcc

SEQ ID NO: 335659 - DNA, 20 bp, Artificial Sequence
  Description of Artificial Sequence: Synthetic oligonucleotide
  Target: LAMA2; (+) strand; PAM type: YTN; PAM sequence: CTT
agtaagaagcttcatgcccc

SEQ ID NO: 335660 - DNA, 20 bp, Artificial Sequence
  Description of Artificial Sequence: Synthetic oligonucleotide
  Target: LAMA2; (+) strand; PAM type: YTN; PAM sequence: TTA
gtaagaagcttcatgcccct

SEQ ID NO: 335661 - DNA, 20 bp, Artificial Sequence
  Description of Artificial Sequence: Synthetic oligonucleotide
  Target: LAMA2; (+) strand; PAM type: YTN; PAM sequence: CTT
catgccccttatggcatatc

SEQ ID NO: 335662 - DNA, 20 bp, Artificial Sequence
  Description of Artificial Sequence: Synthetic oligonucleotide
  Target: LAMA2; (+) strand; PAM type: YTN; PAM sequence: TTC
atgccccttatggcatatct

SEQ ID NO: 335663 - DNA, 20 bp, Artificial Sequence
  Description of Artificial Sequence: Synthetic oligonucleotide
  Target: LAMA2; (+) strand; PAM type: YTN; PAM sequence: CTT
atggcatatctgccctgaat

SEQ ID NO: 335664 - DNA, 20 bp, Artificial Sequence
  Description of Artificial Sequence: Synthetic oligonucleotide
  Target: LAMA2; (+) strand; PAM type: YTN; PAM sequence: TTA
tggcatatctgccctgaata

SEQ ID NO: 335665 - DNA, 20 bp, Artificial Sequence
  Description of Artificial Sequence: Synthetic oligonucleotide
  Target: LAMA2; (+) strand; PAM type: YTN; PAM sequence: CTG
ccctgaataatacataaaga

SEQ ID NO: 335666 - DNA, 20 bp, Artificial Sequence
  Description of Artificial Sequence: Synthetic oligonucleotide
  Target: LAMA2; (+) strand; PAM type: YTN; PAM sequence: CTG
aataatacataaagaaaata

SEQ ID NO: 335667 - DNA, 20 bp, Artificial Sequence
  Description of Artificial Sequence: Synthetic oligonucleotide
  Target: LAMA2; (+) strand; PAM type: YTN; PAM sequence: TTT
aacaatatgcgtttgaaaaa

SEQ ID NO: 335668 - DNA, 20 bp, Artificial Sequence
  Description of Artificial Sequence: Synthetic oligonucleotide
  Target: LAMA2; (+) strand; PAM type: YTN; PAM sequence: TTA
acaatatgcgtttgaaaaat

SEQ ID NO: 335669 - DNA, 20 bp, Artificial Sequence
  Description of Artificial Sequence: Synthetic oligonucleotide
  Target: LAMA2; (+) strand; PAM type: YTN; PAM sequence: TTT
gaaaaatatttgttgagcaa

SEQ ID NO: 335670 - DNA, 20 bp, Artificial Sequence
  Description of Artificial Sequence: Synthetic oligonucleotide
  Target: LAMA2; (+) strand; PAM type: YTN; PAM sequence: TTG
aaaaatatttgttgagcaac

SEQ ID NO: 335671 - DNA, 20 bp, Artificial Sequence
  Description of Artificial Sequence: Synthetic oligonucleotide
  Target: LAMA2; (+) strand; PAM type: YTN; PAM sequence: TTT
gttgagcaactactgttttt

SEQ ID NO: 335672 - DNA, 20 bp, Artificial Sequence
  Description of Artificial Sequence: Synthetic oligonucleotide
  Target: LAMA2; (+) strand; PAM type: YTN; PAM sequence: TTG
ttgagcaactactgtttttt

SEQ ID NO: 335673 - DNA, 20 bp, Artificial Sequence
  Description of Artificial Sequence: Synthetic oligonucleotide
  Target: LAMA2; (+) strand; PAM type: YTN; PAM sequence: TTG
agcaactactgttttttaag

SEQ ID NO: 335674 - DNA, 20 bp, Artificial Sequence
  Description of Artificial Sequence: Synthetic oligonucleotide
  Target: LAMA2; (+) strand; PAM type: YTN; PAM sequence: CTA
ctgttttttaagcagtgttc

SEQ ID NO: 335675 - DNA, 20 bp, Artificial Sequence
  Description of Artificial Sequence: Synthetic oligonucleotide
  Target: LAMA2; (+) strand; PAM type: YTN; PAM sequence: CTG
ttttttaagcagtgttctaa

SEQ ID NO: 335676 - DNA, 20 bp, Artificial Sequence
  Description of Artificial Sequence: Synthetic oligonucleotide
  Target: LAMA2; (+) strand; PAM type: YTN; PAM sequence: TTT
tttaagcagtgttctaagcc

SEQ ID NO: 335677 - DNA, 20 bp, Artificial Sequence
  Description of Artificial Sequence: Synthetic oligonucleotide
  Target: LAMA2; (+) strand; PAM type: YTN; PAM sequence: TTT
ttaagcagtgttctaagcct

SEQ ID NO: 335678 - DNA, 20 bp, Artificial Sequence
  Description of Artificial Sequence: Synthetic oligonucleotide
  Target: LAMA2; (+) strand; PAM type: YTN; PAM sequence: TTT
taagcagtgttctaagcctg

SEQ ID NO: 335679 - DNA, 20 bp, Artificial Sequence
  Description of Artificial Sequence: Synthetic oligonucleotide
  Target: LAMA2; (+) strand; PAM type: YTN; PAM sequence: TTT
aagcagtgttctaagcctgt

SEQ ID NO: 335680 - DNA, 20 bp, Artificial Sequence
  Description of Artificial Sequence: Synthetic oligonucleotide
  Target: LAMA2; (+) strand; PAM type: YTN; PAM sequence: TTA
agcagtgttctaagcctgta

SEQ ID NO: 335681 - DNA, 20 bp, Artificial Sequence
  Description of Artificial Sequence: Synthetic oligonucleotide
  Target: LAMA2; (+) strand; PAM type: YTN; PAM sequence: TTC
taagcctgtaggtctgtcca

SEQ ID NO: 335682 - DNA, 20 bp, Artificial Sequence
  Description of Artificial Sequence: Synthetic oligonucleotide
  Target: LAMA2; (+) strand; PAM type: YTN; PAM sequence: CTA
agcctgtaggtctgtccatg

SEQ ID NO: 335683 - DNA, 20 bp, Artificial Sequence
  Description of Artificial Sequence: Synthetic oligonucleotide
  Target: LAMA2; (+) strand; PAM type: YTN; PAM sequence: CTG
taggtctgtccatgaaggag

SEQ ID NO: 335684 - DNA, 20 bp, Artificial Sequence
  Description of Artificial Sequence: Synthetic oligonucleotide
  Target: LAMA2; (+) strand; PAM type: YTN; PAM sequence: CTG
tccatgaaggagacaggagt

SEQ ID NO: 335685 - DNA, 20 bp, Artificial Sequence
  Description of Artificial Sequence: Synthetic oligonucleotide
  Target: LAMA2; (+) strand; PAM type: YTN; PAM sequence: CTT
gcattccagggttttcaagt

SEQ ID NO: 335686 - DNA, 20 bp, Artificial Sequence
  Description of Artificial Sequence: Synthetic oligonucleotide
  Target: LAMA2; (+) strand; PAM type: YTN; PAM sequence: TTG
cattccagggttttcaagta

SEQ ID NO: 335687 - DNA, 20 bp, Artificial Sequence
  Description of Artificial Sequence: Synthetic oligonucleotide
  Target: LAMA2; (+) strand; PAM type: YTN; PAM sequence: TTC
cagggttttcaagtaaacaa

SEQ ID NO: 335688 - DNA, 20 bp, Artificial Sequence
  Description of Artificial Sequence: Synthetic oligonucleotide
  Target: LAMA2; (+) strand; PAM type: YTN; PAM sequence: TTT
tcaagtaaacaatttagaat

SEQ ID NO: 335689 - DNA, 20 bp, Artificial Sequence
  Description of Artificial Sequence: Synthetic oligonucleotide
  Target: LAMA2; (+) strand; PAM type: YTN; PAM sequence: TTT
caagtaaacaatttagaata

SEQ ID NO: 335690 - DNA, 20 bp, Artificial Sequence
  Description of Artificial Sequence: Synthetic oligonucleotide
  Target: LAMA2; (+) strand; PAM type: YTN; PAM sequence: TTC
aagtaaacaatttagaatag

SEQ ID NO: 335691 - DNA, 20 bp, Artificial Sequence
  Description of Artificial Sequence: Synthetic oligonucleotide
  Target: LAMA2; (+) strand; PAM type: YTN; PAM sequence: TTT
agaatagtgcaagttcatga

SEQ ID NO: 335692 - DNA, 20 bp, Artificial Sequence
  Description of Artificial Sequence: Synthetic oligonucleotide
  Target: LAMA2; (+) strand; PAM type: YTN; PAM sequence: TTA
gaatagtgcaagttcatgaa

SEQ ID NO: 335693 - DNA, 20 bp, Artificial Sequence
  Description of Artificial Sequence: Synthetic oligonucleotide
  Target: LAMA2; (+) strand; PAM type: YTN; PAM sequence: TTC
atgaaaaaaaaagcataaga

SEQ ID NO: 335694 - DNA, 20 bp, Artificial Sequence
  Description of Artificial Sequence: Synthetic oligonucleotide
  Target: LAMA2; (+) strand; PAM type: YTN; PAM sequence: TTA
taataagattatagacggtg

SEQ ID NO: 335695 - DNA, 20 bp, Artificial Sequence
  Description of Artificial Sequence: Synthetic oligonucleotide
  Target: LAMA2; (+) strand; PAM type: YTN; PAM sequence: TTA
tagacggtgatgaaagagct

SEQ ID NO: 335696 - DNA, 20 bp, Artificial Sequence
  Description of Artificial Sequence: Synthetic oligonucleotide
  Target: LAMA2; (+) strand; PAM type: YTN; PAM sequence: CTA
atttacatgtatgttctatg

SEQ ID NO: 335697 - DNA, 20 bp, Artificial Sequence
  Description of Artificial Sequence: Synthetic oligonucleotide
  Target: LAMA2; (+) strand; PAM type: YTN; PAM sequence: TTT
acatgtatgttctatgtatg

SEQ ID NO: 335698 - DNA, 20 bp, Artificial Sequence
  Description of Artificial Sequence: Synthetic oligonucleotide
  Target: LAMA2; (+) strand; PAM type: YTN; PAM sequence: TTA
catgtatgttctatgtatgc

SEQ ID NO: 335699 - DNA, 20 bp, Artificial Sequence
  Description of Artificial Sequence: Synthetic oligonucleotide
  Target: LAMA2; (+) strand; PAM type: YTN; PAM sequence: TTC
tatgtatgcatttttcagga

SEQ ID NO: 335700 - DNA, 20 bp, Artificial Sequence
  Description of Artificial Sequence: Synthetic oligonucleotide
  Target: LAMA2; (+) strand; PAM type: YTN; PAM sequence: CTA
tgtatgcatttttcaggaag

SEQ ID NO: 335701 - DNA, 20 bp, Artificial Sequence
  Description of Artificial Sequence: Synthetic oligonucleotide
  Target: LAMA2; (+) strand; PAM type: YTN; PAM sequence: TTT
ttcaggaagtgatatttgag

SEQ ID NO: 335702 - DNA, 20 bp, Artificial Sequence
  Description of Artificial Sequence: Synthetic oligonucleotide
  Target: LAMA2; (+) strand; PAM type: YTN; PAM sequence: TTT
tcaggaagtgatatttgagc

SEQ ID NO: 335703 - DNA, 20 bp, Artificial Sequence
  Description of Artificial Sequence: Synthetic oligonucleotide
  Target: LAMA2; (+) strand; PAM type: YTN; PAM sequence: TTT
caggaagtgatatttgagct

SEQ ID NO: 335704 - DNA, 20 bp, Artificial Sequence
  Description of Artificial Sequence: Synthetic oligonucleotide
  Target: LAMA2; (+) strand; PAM type: YTN; PAM sequence: TTC
aggaagtgatatttgagctg

SEQ ID NO: 335705 - DNA, 20 bp, Artificial Sequence
  Description of Artificial Sequence: Synthetic oligonucleotide
  Target: LAMA2; (+) strand; PAM type: YTN; PAM sequence: TTT
gagctgagaattaaaaacca

SEQ ID NO: 335706 - DNA, 20 bp, Artificial Sequence
  Description of Artificial Sequence: Synthetic oligonucleotide
  Target: LAMA2; (+) strand; PAM type: YTN; PAM sequence: TTG
agctgagaattaaaaaccag

SEQ ID NO: 335707 - DNA, 20 bp, Artificial Sequence
  Description of Artificial Sequence: Synthetic oligonucleotide
  Target: LAMA2; (+) strand; PAM type: YTN; PAM sequence: CTG
agaattaaaaaccagaaaat

SEQ ID NO: 335708 - DNA, 20 bp, Artificial Sequence
  Description of Artificial Sequence: Synthetic oligonucleotide
  Target: LAMA2; (+) strand; PAM type: YTN; PAM sequence: TTA
aaaaccagaaaataccagtc

SEQ ID NO: 335709 - DNA, 20 bp, Artificial Sequence
  Description of Artificial Sequence: Synthetic oligonucleotide
  Target: LAMA2; (+) strand; PAM type: YTN; PAM sequence: CTG
ggtagagtttattaccagca

SEQ ID NO: 335710 - DNA, 20 bp, Artificial Sequence
  Description of Artificial Sequence: Synthetic oligonucleotide
  Target: LAMA2; (+) strand; PAM type: YTN; PAM sequence: TTT
attaccagcaggaataaatg

SEQ ID NO: 335711 - DNA, 20 bp, Artificial Sequence
  Description of Artificial Sequence: Synthetic oligonucleotide
  Target: LAMA2; (+) strand; PAM type: YTN; PAM sequence: TTA
ttaccagcaggaataaatgt

SEQ ID NO: 335712 - DNA, 20 bp, Artificial Sequence
  Description of Artificial Sequence: Synthetic oligonucleotide
  Target: LAMA2; (+) strand; PAM type: YTN; PAM sequence: TTA
ccagcaggaataaatgtggg

SEQ ID NO: 335713 - DNA, 20 bp, Artificial Sequence
  Description of Artificial Sequence: Synthetic oligonucleotide
  Target: LAMA2; (+) strand; PAM type: YTN; PAM sequence: CTG
aggaaaggaaagaaggccaa

SEQ ID NO: 335714 - DNA, 20 bp, Artificial Sequence
  Description of Artificial Sequence: Synthetic oligonucleotide
  Target: LAMA2; (+) strand; PAM type: YTN; PAM sequence: CTG
gaacctagtgatcaagagca

SEQ ID NO: 335715 - DNA, 20 bp, Artificial Sequence
  Description of Artificial Sequence: Synthetic oligonucleotide
  Target: LAMA2; (+) strand; PAM type: YTN; PAM sequence: CTA
gtgatcaagagcaaaggtgg

SEQ ID NO: 335716 - DNA, 20 bp, Artificial Sequence
  Description of Artificial Sequence: Synthetic oligonucleotide
  Target: LAMA2; (+) strand; PAM type: YTN; PAM sequence: CTG
tcacggaggtctccaggtct

SEQ ID NO: 335717 - DNA, 20 bp, Artificial Sequence
  Description of Artificial Sequence: Synthetic oligonucleotide
  Target: LAMA2; (+) strand; PAM type: YTN; PAM sequence: CTC
caggtcttcttagctcctga

SEQ ID NO: 335718 - DNA, 20 bp, Artificial Sequence
  Description of Artificial Sequence: Synthetic oligonucleotide
  Target: LAMA2; (+) strand; PAM type: YTN; PAM sequence: CTT
cttagctcctgaagggagta

SEQ ID NO: 335719 - DNA, 20 bp, Artificial Sequence
  Description of Artificial Sequence: Synthetic oligonucleotide
  Target: LAMA2; (+) strand; PAM type: YTN; PAM sequence: TTC
ttagctcctgaagggagtag

SEQ ID NO: 335720 - DNA, 20 bp, Artificial Sequence
  Description of Artificial Sequence: Synthetic oligonucleotide
  Target: LAMA2; (+) strand; PAM type: YTN; PAM sequence: CTT
agctcctgaagggagtagtc

SEQ ID NO: 335721 - DNA, 20 bp, Artificial Sequence
  Description of Artificial Sequence: Synthetic oligonucleotide
  Target: LAMA2; (+) strand; PAM type: YTN; PAM sequence: TTA
gctcctgaagggagtagtca

SEQ ID NO: 335722 - DNA, 20 bp, Artificial Sequence
  Description of Artificial Sequence: Synthetic oligonucleotide
  Target: LAMA2; (+) strand; PAM type: YTN; PAM sequence: CTC
ctgaagggagtagtcagtca

SEQ ID NO: 335723 - DNA, 20 bp, Artificial Sequence
  Description of Artificial Sequence: Synthetic oligonucleotide
  Target: LAMA2; (+) strand; PAM type: YTN; PAM sequence: CTG
aagggagtagtcagtcatga

SEQ ID NO: 335724 - DNA, 20 bp, Artificial Sequence
  Description of Artificial Sequence: Synthetic oligonucleotide
  Target: LAMA2; (+) strand; PAM type: YTN; PAM sequence: TTT
atattgaattctgggtataa

SEQ ID NO: 335725 - DNA, 20 bp, Artificial Sequence
  Description of Artificial Sequence: Synthetic oligonucleotide
  Target: LAMA2; (+) strand; PAM type: YTN; PAM sequence: TTA
tattgaattctgggtataat

SEQ ID NO: 335726 - DNA, 20 bp, Artificial Sequence
  Description of Artificial Sequence: Synthetic oligonucleotide
  Target: LAMA2; (+) strand; PAM type: YTN; PAM sequence: TTG
aattctgggtataatgagaa

SEQ ID NO: 335727 - DNA, 20 bp, Artificial Sequence
  Description of Artificial Sequence: Synthetic oligonucleotide
  Target: LAMA2; (+) strand; PAM type: YTN; PAM sequence: TTC
tgggtataatgagaaacccg

SEQ ID NO: 335728 - DNA, 20 bp, Artificial Sequence
  Description of Artificial Sequence: Synthetic oligonucleotide
  Target: LAMA2; (+) strand; PAM type: YTN; PAM sequence: CTG
ggtataatgagaaacccgca

SEQ ID NO: 335729 - DNA, 20 bp, Artificial Sequence
  Description of Artificial Sequence: Synthetic oligonucleotide
  Target: LAMA2; (+) strand; PAM type: YTN; PAM sequence: TTT
aagcaggtgtaacatgattt

SEQ ID NO: 335730 - DNA, 20 bp, Artificial Sequence
  Description of Artificial Sequence: Synthetic oligonucleotide
  Target: LAMA2; (+) strand; PAM type: YTN; PAM sequence: TTA
agcaggtgtaacatgatttc

SEQ ID NO: 335731 - DNA, 20 bp, Artificial Sequence
  Description of Artificial Sequence: Synthetic oligonucleotide
  Target: LAMA2; (+) strand; PAM type: YTN; PAM sequence: TTT
cctttatctcattagaagta

SEQ ID NO: 335732 - DNA, 20 bp, Artificial Sequence
  Description of Artificial Sequence: Synthetic oligonucleotide
  Target: LAMA2; (+) strand; PAM type: YTN; PAM sequence: TTC
ctttatctcattagaagtaa

SEQ ID NO: 335733 - DNA, 20 bp, Artificial Sequence
  Description of Artificial Sequence: Synthetic oligonucleotide
  Target: LAMA2; (+) strand; PAM type: YTN; PAM sequence: CTT
tatctcattagaagtaacat

SEQ ID NO: 335734 - DNA, 20 bp, Artificial Sequence
  Description of Artificial Sequence: Synthetic oligonucleotide
  Target: LAMA2; (+) strand; PAM type: YTN; PAM sequence: TTT
atctcattagaagtaacatt

SEQ ID NO: 335735 - DNA, 20 bp, Artificial Sequence
  Description of Artificial Sequence: Synthetic oligonucleotide
  Target: LAMA2; (+) strand; PAM type: YTN; PAM sequence: TTA
tctcattagaagtaacattc

SEQ ID NO: 335736 - DNA, 20 bp, Artificial Sequence
  Description of Artificial Sequence: Synthetic oligonucleotide
  Target: LAMA2; (+) strand; PAM type: YTN; PAM sequence: CTC
attagaagtaacattctgct

SEQ ID NO: 335737 - DNA, 20 bp, Artificial Sequence
  Description of Artificial Sequence: Synthetic oligonucleotide
  Target: LAMA2; (+) strand; PAM type: YTN; PAM sequence: TTA
gaagtaacattctgctaaat

SEQ ID NO: 335738 - DNA, 20 bp, Artificial Sequence
  Description of Artificial Sequence: Synthetic oligonucleotide
  Target: LAMA2; (+) strand; PAM type: YTN; PAM sequence: TTC
tgctaaatggagaatgatta

SEQ ID NO: 335739 - DNA, 20 bp, Artificial Sequence
  Description of Artificial Sequence: Synthetic oligonucleotide
  Target: LAMA2; (+) strand; PAM type: YTN; PAM sequence: CTG
ctaaatggagaatgattata

SEQ ID NO: 335740 - DNA, 20 bp, Artificial Sequence
  Description of Artificial Sequence: Synthetic oligonucleotide
  Target: LAMA2; (+) strand; PAM type: YTN; PAM sequence: CTA
aatggagaatgattatagtg

SEQ ID NO: 335741 - DNA, 20 bp, Artificial Sequence
  Description of Artificial Sequence: Synthetic oligonucleotide
  Target: LAMA2; (+) strand; PAM type: YTN; PAM sequence: TTA
tagtgagataagtgtgaaaa

SEQ ID NO: 335742 - DNA, 20 bp, Artificial Sequence
  Description of Artificial Sequence: Synthetic oligonucleotide
  Target: LAMA2; (+) strand; PAM type: YTN; PAM sequence: CTA
ggtggcagtcaggaaaccat

SEQ ID NO: 335743 - DNA, 20 bp, Artificial Sequence
  Description of Artificial Sequence: Synthetic oligonucleotide
  Target: LAMA2; (+) strand; PAM type: YTN; PAM sequence: CTT
ttttagcaaagagatgatgg

SEQ ID NO: 335744 - DNA, 20 bp, Artificial Sequence
  Description of Artificial Sequence: Synthetic oligonucleotide
  Target: LAMA2; (+) strand; PAM type: YTN; PAM sequence: TTT
tttagcaaagagatgatggt

SEQ ID NO: 335745 - DNA, 20 bp, Artificial Sequence
  Description of Artificial Sequence: Synthetic oligonucleotide
  Target: LAMA2; (+) strand; PAM type: YTN; PAM sequence: TTT
ttagcaaagagatgatggta

SEQ ID NO: 335746 - DNA, 20 bp, Artificial Sequence
  Description of Artificial Sequence: Synthetic oligonucleotide
  Target: LAMA2; (+) strand; PAM type: YTN; PAM sequence: TTT
tagcaaagagatgatggtaa

SEQ ID NO: 335747 - DNA, 20 bp, Artificial Sequence
  Description of Artificial Sequence: Synthetic oligonucleotide
  Target: LAMA2; (+) strand; PAM type: YTN; PAM sequence: TTT
agcaaagagatgatggtaac

SEQ ID NO: 335748 - DNA, 20 bp, Artificial Sequence
  Description of Artificial Sequence: Synthetic oligonucleotide
  Target: LAMA2; (+) strand; PAM type: YTN; PAM sequence: TTA
gcaaagagatgatggtaact

SEQ ID NO: 335749 - DNA, 20 bp, Artificial Sequence
  Description of Artificial Sequence: Synthetic oligonucleotide
  Target: LAMA2; (+) strand; PAM type: YTN; PAM sequence: CTT
ggaatagagtggtagtagca

SEQ ID NO: 335750 - DNA, 20 bp, Artificial Sequence
  Description of Artificial Sequence: Synthetic oligonucleotide
  Target: LAMA2; (+) strand; PAM type: YTN; PAM sequence: TTG
gaatagagtggtagtagcag

SEQ ID NO: 335751 - DNA, 20 bp, Artificial Sequence
  Description of Artificial Sequence: Synthetic oligonucleotide
  Target: LAMA2; (+) strand; PAM type: YTN; PAM sequence: CTG
agatttatctggagttcggc

SEQ ID NO: 335752 - DNA, 20 bp, Artificial Sequence
  Description of Artificial Sequence: Synthetic oligonucleotide
  Target: LAMA2; (+) strand; PAM type: YTN; PAM sequence: TTT
atctggagttcggcatcacc

SEQ ID NO: 335753 - DNA, 20 bp, Artificial Sequence
  Description of Artificial Sequence: Synthetic oligonucleotide
  Target: LAMA2; (+) strand; PAM type: YTN; PAM sequence: TTA
tctggagttcggcatcaccc

SEQ ID NO: 335754 - DNA, 20 bp, Artificial Sequence
  Description of Artificial Sequence: Synthetic oligonucleotide
  Target: LAMA2; (+) strand; PAM type: YTN; PAM sequence: CTG
gagttcggcatcacccgaat

SEQ ID NO: 335755 - DNA, 20 bp, Artificial Sequence
  Description of Artificial Sequence: Synthetic oligonucleotide
  Target: LAMA2; (+) strand; PAM type: YTN; PAM sequence: TTC
ggcatcacccgaattgatgg

SEQ ID NO: 335756 - DNA, 20 bp, Artificial Sequence
  Description of Artificial Sequence: Synthetic oligonucleotide
  Target: LAMA2; (+) strand; PAM type: YTN; PAM sequence: TTG
atggtggaacaaatgtggag

SEQ ID NO: 335757 - DNA, 20 bp, Artificial Sequence
  Description of Artificial Sequence: Synthetic oligonucleotide
  Target: LAMA2; (+) strand; PAM type: YTN; PAM sequence: TTG
actcctaggagtttggcctg

SEQ ID NO: 335758 - DNA, 20 bp, Artificial Sequence
  Description of Artificial Sequence: Synthetic oligonucleotide
  Target: LAMA2; (+) strand; PAM type: YTN; PAM sequence: CTC
ctaggagtttggcctgaaga

SEQ ID NO: 335759 - DNA, 20 bp, Artificial Sequence
  Description of Artificial Sequence: Synthetic oligonucleotide
  Target: LAMA2; (+) strand; PAM type: YTN; PAM sequence: CTA
ggagtttggcctgaagaaat

SEQ ID NO: 335760 - DNA, 20 bp, Artificial Sequence
  Description of Artificial Sequence: Synthetic oligonucleotide
  Target: LAMA2; (+) strand; PAM type: YTN; PAM sequence: TTT
ggcctgaagaaattttcctg

SEQ ID NO: 335761 - DNA, 20 bp, Artificial Sequence
  Description of Artificial Sequence: Synthetic oligonucleotide
  Target: LAMA2; (+) strand; PAM type: YTN; PAM sequence: TTG
gcctgaagaaattttcctga

SEQ ID NO: 335762 - DNA, 20 bp, Artificial Sequence
  Description of Artificial Sequence: Synthetic oligonucleotide
  Target: LAMA2; (+) strand; PAM type: YTN; PAM sequence: CTG
aagaaattttcctgaaatag

SEQ ID NO: 335763 - DNA, 20 bp, Artificial Sequence
  Description of Artificial Sequence: Synthetic oligonucleotide
  Target: LAMA2; (+) strand; PAM type: YTN; PAM sequence: TTT
tcctgaaatagtatggatta

SEQ ID NO: 335764 - DNA, 20 bp, Artificial Sequence
  Description of Artificial Sequence: Synthetic oligonucleotide
  Target: LAMA2; (+) strand; PAM type: YTN; PAM sequence: TTT
cctgaaatagtatggattaa

SEQ ID NO: 335765 - DNA, 20 bp, Artificial Sequence
  Description of Artificial Sequence: Synthetic oligonucleotide
  Target: LAMA2; (+) strand; PAM type: YTN; PAM sequence: TTC
ctgaaatagtatggattaaa

SEQ ID NO: 335766 - DNA, 20 bp, Artificial Sequence
  Description of Artificial Sequence: Synthetic oligonucleotide
  Target: LAMA2; (+) strand; PAM type: YTN; PAM sequence: CTG
aaatagtatggattaaagga

SEQ ID NO: 335767 - DNA, 20 bp, Artificial Sequence
  Description of Artificial Sequence: Synthetic oligonucleotide
  Target: LAMA2; (+) strand; PAM type: YTN; PAM sequence: TTA
aaggaggagcagaatggaga

SEQ ID NO: 335768 - DNA, 20 bp, Artificial Sequence
  Description of Artificial Sequence: Synthetic oligonucleotide
  Target: LAMA2; (+) strand; PAM type: YTN; PAM sequence: CTG
ggtggcaattaagggtctgt

SEQ ID NO: 335769 - DNA, 20 bp, Artificial Sequence
  Description of Artificial Sequence: Synthetic oligonucleotide
  Target: LAMA2; (+) strand; PAM type: YTN; PAM sequence: TTA
agggtctgttttaacgtgtt

SEQ ID NO: 335770 - DNA, 20 bp, Artificial Sequence
  Description of Artificial Sequence: Synthetic oligonucleotide
  Target: LAMA2; (+) strand; PAM type: YTN; PAM sequence: CTG
ttttaacgtgttatctttga

SEQ ID NO: 335771 - DNA, 20 bp, Artificial Sequence
  Description of Artificial Sequence: Synthetic oligonucleotide
  Target: LAMA2; (+) strand; PAM type: YTN; PAM sequence: TTT
taacgtgttatctttgaagc

SEQ ID NO: 335772 - DNA, 20 bp, Artificial Sequence
  Description of Artificial Sequence: Synthetic oligonucleotide
  Target: LAMA2; (+) strand; PAM type: YTN; PAM sequence: TTT
aacgtgttatctttgaagca

SEQ ID NO: 335773 - DNA, 20 bp, Artificial Sequence
  Description of Artificial Sequence: Synthetic oligonucleotide
  Target: LAMA2; (+) strand; PAM type: YTN; PAM sequence: TTA
acgtgttatctttgaagcat

SEQ ID NO: 335774 - DNA, 20 bp, Artificial Sequence
  Description of Artificial Sequence: Synthetic oligonucleotide
  Target: LAMA2; (+) strand; PAM type: YTN; PAM sequence: TTA
tctttgaagcattcgagtgg

SEQ ID NO: 335775 - DNA, 20 bp, Artificial Sequence
  Description of Artificial Sequence: Synthetic oligonucleotide
  Target: LAMA2; (+) strand; PAM type: YTN; PAM sequence: CTT
tgaagcattcgagtggtgcc

SEQ ID NO: 335776 - DNA, 20 bp, Artificial Sequence
  Description of Artificial Sequence: Synthetic oligonucleotide
  Target: LAMA2; (+) strand; PAM type: YTN; PAM sequence: TTT
gaagcattcgagtggtgcca

SEQ ID NO: 335777 - DNA, 20 bp, Artificial Sequence
  Description of Artificial Sequence: Synthetic oligonucleotide
  Target: LAMA2; (+) strand; PAM type: YTN; PAM sequence: TTG
aagcattcgagtggtgccag

SEQ ID NO: 335778 - DNA, 20 bp, Artificial Sequence
  Description of Artificial Sequence: Synthetic oligonucleotide
  Target: LAMA2; (+) strand; PAM type: YTN; PAM sequence: TTC
gagtggtgccaggcatggtg

SEQ ID NO: 335779 - DNA, 20 bp, Artificial Sequence
  Description of Artificial Sequence: Synthetic oligonucleotide
  Target: LAMA2; (+) strand; PAM type: YTN; PAM sequence: CTC
actcctgtaagcccagcact

SEQ ID NO: 335780 - DNA, 20 bp, Artificial Sequence
  Description of Artificial Sequence: Synthetic oligonucleotide
  Target: LAMA2; (+) strand; PAM type: YTN; PAM sequence: CTC
ctgtaagcccagcactttgg

SEQ ID NO: 335781 - DNA, 20 bp, Artificial Sequence
  Description of Artificial Sequence: Synthetic oligonucleotide
  Target: LAMA2; (+) strand; PAM type: YTN; PAM sequence: CTG
taagcccagcactttgggag

SEQ ID NO: 335782 - DNA, 20 bp, Artificial Sequence
  Description of Artificial Sequence: Synthetic oligonucleotide
  Target: LAMA2; (+) strand; PAM type: YTN; PAM sequence: CTT
tgggaggttgaggtgggagg

SEQ ID NO: 335783 - DNA, 20 bp, Artificial Sequence
  Description of Artificial Sequence: Synthetic oligonucleotide
  Target: LAMA2; (+) strand; PAM type: YTN; PAM sequence: TTT
gggaggttgaggtgggagga

SEQ ID NO: 335784 - DNA, 20 bp, Artificial Sequence
  Description of Artificial Sequence: Synthetic oligonucleotide
  Target: LAMA2; (+) strand; PAM type: YTN; PAM sequence: TTG
ggaggttgaggtgggaggat

SEQ ID NO: 335785 - DNA, 20 bp, Artificial Sequence
  Description of Artificial Sequence: Synthetic oligonucleotide
  Target: LAMA2; (+) strand; PAM type: YTN; PAM sequence: TTG
aggtgggaggattgcttaag

SEQ ID NO: 335786 - DNA, 20 bp, Artificial Sequence
  Description of Artificial Sequence: Synthetic oligonucleotide
  Target: LAMA2; (+) strand; PAM type: YTN; PAM sequence: TTG
cttaagcccaggtattcgag

SEQ ID NO: 335787 - DNA, 20 bp, Artificial Sequence
  Description of Artificial Sequence: Synthetic oligonucleotide
  Target: LAMA2; (+) strand; PAM type: YTN; PAM sequence: CTT
aagcccaggtattcgagacc

SEQ ID NO: 335788 - DNA, 20 bp, Artificial Sequence
  Description of Artificial Sequence: Synthetic oligonucleotide
  Target: LAMA2; (+) strand; PAM type: YTN; PAM sequence: TTA
agcccaggtattcgagacca

SEQ ID NO: 335789 - DNA, 20 bp, Artificial Sequence
  Description of Artificial Sequence: Synthetic oligonucleotide
  Target: LAMA2; (+) strand; PAM type: YTN; PAM sequence: TTC
gagaccagcaaccagcccgg

SEQ ID NO: 335790 - DNA, 20 bp, Artificial Sequence
  Description of Artificial Sequence: Synthetic oligonucleotide
  Target: LAMA2; (+) strand; PAM type: YTN; PAM sequence: CTA
tctctacaaaaaaaagcaaa

SEQ ID NO: 335791 - DNA, 20 bp, Artificial Sequence
  Description of Artificial Sequence: Synthetic oligonucleotide
  Target: LAMA2; (+) strand; PAM type: YTN; PAM sequence: CTC
tacaaaaaaaagcaaaaaat

SEQ ID NO: 335792 - DNA, 20 bp, Artificial Sequence
  Description of Artificial Sequence: Synthetic oligonucleotide
  Target: LAMA2; (+) strand; PAM type: YTN; PAM sequence: CTA
caaaaaaaagcaaaaaatta

SEQ ID NO: 335793 - DNA, 20 bp, Artificial Sequence
  Description of Artificial Sequence: Synthetic oligonucleotide
  Target: LAMA2; (+) strand; PAM type: YTN; PAM sequence: TTA
gccaggcatagtagtcccag

SEQ ID NO: 335794 - DNA, 20 bp, Artificial Sequence
  Description of Artificial Sequence: Synthetic oligonucleotide
  Target: LAMA2; (+) strand; PAM type: YTN; PAM sequence: CTA
ctcaggaggttgaggcagga

SEQ ID NO: 335795 - DNA, 20 bp, Artificial Sequence
  Description of Artificial Sequence: Synthetic oligonucleotide
  Target: LAMA2; (+) strand; PAM type: YTN; PAM sequence: CTC
aggaggttgaggcaggagaa

SEQ ID NO: 335796 - DNA, 20 bp, Artificial Sequence
  Description of Artificial Sequence: Synthetic oligonucleotide
  Target: LAMA2; (+) strand; PAM type: YTN; PAM sequence: TTG
aggcaggagaatcacttggg

SEQ ID NO: 335797 - DNA, 20 bp, Artificial Sequence
  Description of Artificial Sequence: Synthetic oligonucleotide
  Target: LAMA2; (+) strand; PAM type: YTN; PAM sequence: CTT
gggtccaggaggtcaaggct

SEQ ID NO: 335798 - DNA, 20 bp, Artificial Sequence
  Description of Artificial Sequence: Synthetic oligonucleotide
  Target: LAMA2; (+) strand; PAM type: YTN; PAM sequence: TTG
ggtccaggaggtcaaggctg

SEQ ID NO: 335799 - DNA, 20 bp, Artificial Sequence
  Description of Artificial Sequence: Synthetic oligonucleotide
  Target: LAMA2; (+) strand; PAM type: YTN; PAM sequence: CTG
cagtgagccatattcatgtc

SEQ ID NO: 335800 - DNA, 20 bp, Artificial Sequence
  Description of Artificial Sequence: Synthetic oligonucleotide
  Target: LAMA2; (+) strand; PAM type: YTN; PAM sequence: TTC
atgtctctgcactccagcct

SEQ ID NO: 335801 - DNA, 20 bp, Artificial Sequence
  Description of Artificial Sequence: Synthetic oligonucleotide
  Target: LAMA2; (+) strand; PAM type: YTN; PAM sequence: CTC
tgcactccagcctgggagac

SEQ ID NO: 335802 - DNA, 20 bp, Artificial Sequence
  Description of Artificial Sequence: Synthetic oligonucleotide
  Target: LAMA2; (+) strand; PAM type: YTN; PAM sequence: CTG
cactccagcctgggagacag

SEQ ID NO: 335803 - DNA, 20 bp, Artificial Sequence
  Description of Artificial Sequence: Synthetic oligonucleotide
  Target: LAMA2; (+) strand; PAM type: YTN; PAM sequence: CTC
cagcctgggagacagagcaa

SEQ ID NO: 335804 - DNA, 20 bp, Artificial Sequence
  Description of Artificial Sequence: Synthetic oligonucleotide
  Target: LAMA2; (+) strand; PAM type: YTN; PAM sequence: CTG
ggagacagagcaagacgctg

SEQ ID NO: 335805 - DNA, 20 bp, Artificial Sequence
  Description of Artificial Sequence: Synthetic oligonucleotide
  Target: LAMA2; (+) strand; PAM type: YTN; PAM sequence: CTG
tctcaaaacaaaacaaaaaa

SEQ ID NO: 335806 - DNA, 20 bp, Artificial Sequence
  Description of Artificial Sequence: Synthetic oligonucleotide
  Target: LAMA2; (+) strand; PAM type: YTN; PAM sequence: CTC
aaaacaaaacaaaaaaatta

SEQ ID NO: 335807 - DNA, 20 bp, Artificial Sequence
  Description of Artificial Sequence: Synthetic oligonucleotide
  Target: LAMA2; (+) strand; PAM type: YTN; PAM sequence: TTA
ttcaagtggaaatattaaag

SEQ ID NO: 335808 - DNA, 20 bp, Artificial Sequence
  Description of Artificial Sequence: Synthetic oligonucleotide
  Target: LAMA2; (+) strand; PAM type: YTN; PAM sequence: TTC
aagtggaaatattaaaggga

SEQ ID NO: 335809 - DNA, 20 bp, Artificial Sequence
  Description of Artificial Sequence: Synthetic oligonucleotide
  Target: LAMA2; (+) strand; PAM type: YTN; PAM sequence: TTA
aagggacaattggatttatg

SEQ ID NO: 335810 - DNA, 20 bp, Artificial Sequence
  Description of Artificial Sequence: Synthetic oligonucleotide
  Target: LAMA2; (+) strand; PAM type: YTN; PAM sequence: TTG
gatttatgagtctggagttg

SEQ ID NO: 335811 - DNA, 20 bp, Artificial Sequence
  Description of Artificial Sequence: Synthetic oligonucleotide
  Target: LAMA2; (+) strand; PAM type: YTN; PAM sequence: TTT
atgagtctggagttgagtga

SEQ ID NO: 335812 - DNA, 20 bp, Artificial Sequence
  Description of Artificial Sequence: Synthetic oligonucleotide
  Target: LAMA2; (+) strand; PAM type: YTN; PAM sequence: TTA
tgagtctggagttgagtgat

SEQ ID NO: 335813 - DNA, 20 bp, Artificial Sequence
  Description of Artificial Sequence: Synthetic oligonucleotide
  Target: LAMA2; (+) strand; PAM type: YTN; PAM sequence: CTG
gagttgagtgatgtgcactg

SEQ ID NO: 335814 - DNA, 20 bp, Artificial Sequence
  Description of Artificial Sequence: Synthetic oligonucleotide
  Target: LAMA2; (+) strand; PAM type: YTN; PAM sequence: TTG
agtgatgtgcactgggaaag

SEQ ID NO: 335815 - DNA, 20 bp, Artificial Sequence
  Description of Artificial Sequence: Synthetic oligonucleotide
  Target: LAMA2; (+) strand; PAM type: YTN; PAM sequence: CTG
ggaaagagactgtacttaac

SEQ ID NO: 335816 - DNA, 20 bp, Artificial Sequence
  Description of Artificial Sequence: Synthetic oligonucleotide
  Target: LAMA2; (+) strand; PAM type: YTN; PAM sequence: CTG
tacttaacagtaaaggcctg

SEQ ID NO: 335817 - DNA, 20 bp, Artificial Sequence
  Description of Artificial Sequence: Synthetic oligonucleotide
  Target: LAMA2; (+) strand; PAM type: YTN; PAM sequence: CTT
aacagtaaaggcctgtttaa

SEQ ID NO: 335818 - DNA, 20 bp, Artificial Sequence
  Description of Artificial Sequence: Synthetic oligonucleotide
  Target: LAMA2; (+) strand; PAM type: YTN; PAM sequence: TTA
acagtaaaggcctgtttaag

SEQ ID NO: 335819 - DNA, 20 bp, Artificial Sequence
  Description of Artificial Sequence: Synthetic oligonucleotide
  Target: LAMA2; (+) strand; PAM type: YTN; PAM sequence: CTG
tttaagatcatttagaaagc

SEQ ID NO: 335820 - DNA, 20 bp, Artificial Sequence
  Description of Artificial Sequence: Synthetic oligonucleotide
  Target: LAMA2; (+) strand; PAM type: YTN; PAM sequence: TTT
aagatcatttagaaagcagg

SEQ ID NO: 335821 - DNA, 20 bp, Artificial Sequence
  Description of Artificial Sequence: Synthetic oligonucleotide
  Target: LAMA2; (+) strand; PAM type: YTN; PAM sequence: TTA
agatcatttagaaagcaggt

SEQ ID NO: 335822 - DNA, 20 bp, Artificial Sequence
  Description of Artificial Sequence: Synthetic oligonucleotide
  Target: LAMA2; (+) strand; PAM type: YTN; PAM sequence: TTT
agaaagcaggtatagagata

SEQ ID NO: 335823 - DNA, 20 bp, Artificial Sequence
  Description of Artificial Sequence: Synthetic oligonucleotide
  Target: LAMA2; (+) strand; PAM type: YTN; PAM sequence: TTA
gaaagcaggtatagagataa

SEQ ID NO: 335824 - DNA, 20 bp, Artificial Sequence
  Description of Artificial Sequence: Synthetic oligonucleotide
  Target: LAMA2; (+) strand; PAM type: YTN; PAM sequence: CTA
taattgaatcctaggcactt

SEQ ID NO: 335825 - DNA, 20 bp, Artificial Sequence
  Description of Artificial Sequence: Synthetic oligonucleotide
  Target: LAMA2; (+) strand; PAM type: YTN; PAM sequence: TTG
aatcctaggcacttcaaatt

SEQ ID NO: 335826 - DNA, 20 bp, Artificial Sequence
  Description of Artificial Sequence: Synthetic oligonucleotide
  Target: LAMA2; (+) strand; PAM type: YTN; PAM sequence: CTA
ggcacttcaaatttaaaggt

SEQ ID NO: 335827 - DNA, 20 bp, Artificial Sequence
  Description of Artificial Sequence: Synthetic oligonucleotide
  Target: LAMA2; (+) strand; PAM type: YTN; PAM sequence: CTT
caaatttaaaggtggtaaga

SEQ ID NO: 335828 - DNA, 20 bp, Artificial Sequence
  Description of Artificial Sequence: Synthetic oligonucleotide
  Target: LAMA2; (+) strand; PAM type: YTN; PAM sequence: TTC
aaatttaaaggtggtaagat

SEQ ID NO: 335829 - DNA, 20 bp, Artificial Sequence
  Description of Artificial Sequence: Synthetic oligonucleotide
  Target: LAMA2; (+) strand; PAM type: YTN; PAM sequence: TTT
aaaggtggtaagatcaaata

SEQ ID NO: 335830 - DNA, 20 bp, Artificial Sequence
  Description of Artificial Sequence: Synthetic oligonucleotide
  Target: LAMA2; (+) strand; PAM type: YTN; PAM sequence: TTA
aaggtggtaagatcaaatac

SEQ ID NO: 335831 - DNA, 20 bp, Artificial Sequence
  Description of Artificial Sequence: Synthetic oligonucleotide
  Target: LAMA2; (+) strand; PAM type: YTN; PAM sequence: CTT
cagctatggcaatgcagatg

SEQ ID NO: 335832 - DNA, 20 bp, Artificial Sequence
  Description of Artificial Sequence: Synthetic oligonucleotide
  Target: LAMA2; (+) strand; PAM type: YTN; PAM sequence: TTC
agctatggcaatgcagatgc

SEQ ID NO: 335833 - DNA, 20 bp, Artificial Sequence
  Description of Artificial Sequence: Synthetic oligonucleotide
  Target: LAMA2; (+) strand; PAM type: YTN; PAM sequence: CTA
tggcaatgcagatgctgtga

SEQ ID NO: 335834 - DNA, 20 bp, Artificial Sequence
  Description of Artificial Sequence: Synthetic oligonucleotide
  Target: LAMA2; (+) strand; PAM type: YTN; PAM sequence: CTG
tgaggtacaaattaaaccac

SEQ ID NO: 335835 - DNA, 20 bp, Artificial Sequence
  Description of Artificial Sequence: Synthetic oligonucleotide
  Target: LAMA2; (+) strand; PAM type: YTN; PAM sequence: TTA
aaccactcaggtcttggaaa

SEQ ID NO: 335836 - DNA, 20 bp, Artificial Sequence
  Description of Artificial Sequence: Synthetic oligonucleotide
  Target: LAMA2; (+) strand; PAM type: YTN; PAM sequence: CTC
aggtcttggaaatacctaaa

SEQ ID NO: 335837 - DNA, 20 bp, Artificial Sequence
  Description of Artificial Sequence: Synthetic oligonucleotide
  Target: LAMA2; (+) strand; PAM type: YTN; PAM sequence: CTT
ggaaatacctaaacataggg

SEQ ID NO: 335838 - DNA, 20 bp, Artificial Sequence
  Description of Artificial Sequence: Synthetic oligonucleotide
  Target: LAMA2; (+) strand; PAM type: YTN; PAM sequence: TTG
gaaatacctaaacatagggg

SEQ ID NO: 335839 - DNA, 20 bp, Artificial Sequence
  Description of Artificial Sequence: Synthetic oligonucleotide
  Target: LAMA2; (+) strand; PAM type: YTN; PAM sequence: CTA
aacatagggggaaaaaacac

SEQ ID NO: 335840 - DNA, 20 bp, Artificial Sequence
  Description of Artificial Sequence: Synthetic oligonucleotide
  Target: LAMA2; (+) strand; PAM type: YTN; PAM sequence: CTA
aattgtaatgagtatatgtg

SEQ ID NO: 335841 - DNA, 20 bp, Artificial Sequence
  Description of Artificial Sequence: Synthetic oligonucleotide
  Target: LAMA2; (+) strand; PAM type: YTN; PAM sequence: TTG
taatgagtatatgtgtgtat

SEQ ID NO: 335842 - DNA, 20 bp, Artificial Sequence
  Description of Artificial Sequence: Synthetic oligonucleotide
  Target: LAMA2; (+) strand; PAM type: YTN; PAM sequence: TTA
tatataatatataatacata

SEQ ID NO: 335843 - DNA, 20 bp, Artificial Sequence
  Description of Artificial Sequence: Synthetic oligonucleotide
  Target: LAMA2; (+) strand; PAM type: YTN; PAM sequence: CTT
atatattatatataaatata

SEQ ID NO: 335844 - DNA, 20 bp, Artificial Sequence
  Description of Artificial Sequence: Synthetic oligonucleotide
  Target: LAMA2; (+) strand; PAM type: YTN; PAM sequence: TTA
tatattatatataaatatat

SEQ ID NO: 335845 - DNA, 20 bp, Artificial Sequence
  Description of Artificial Sequence: Synthetic oligonucleotide
  Target: LAMA2; (+) strand; PAM type: YTN; PAM sequence: TTA
tatataaatatatatatata

SEQ ID NO: 335846 - DNA, 20 bp, Artificial Sequence
  Description of Artificial Sequence: Synthetic oligonucleotide
  Target: LAMA2; (+) strand; PAM type: YTN; PAM sequence: TTA
gagaatctttaataagaggt

SEQ ID NO: 335847 - DNA, 20 bp, Artificial Sequence
  Description of Artificial Sequence: Synthetic oligonucleotide
  Target: LAMA2; (+) strand; PAM type: YTN; PAM sequence: CTT
taataagaggtgaatggctc

SEQ ID NO: 335848 - DNA, 20 bp, Artificial Sequence
  Description of Artificial Sequence: Synthetic oligonucleotide
  Target: LAMA2; (+) strand; PAM type: YTN; PAM sequence: TTT
aataagaggtgaatggctcc

SEQ ID NO: 335849 - DNA, 20 bp, Artificial Sequence
  Description of Artificial Sequence: Synthetic oligonucleotide
  Target: LAMA2; (+) strand; PAM type: YTN; PAM sequence: TTA
ataagaggtgaatggctcca

SEQ ID NO: 335850 - DNA, 20 bp, Artificial Sequence
  Description of Artificial Sequence: Synthetic oligonucleotide
  Target: LAMA2; (+) strand; PAM type: YTN; PAM sequence: CTC
caaacacagatttaatttgg

SEQ ID NO: 335851 - DNA, 20 bp, Artificial Sequence
  Description of Artificial Sequence: Synthetic oligonucleotide
  Target: LAMA2; (+) strand; PAM type: YTN; PAM sequence: TTT
aatttggaagctcccaccct

SEQ ID NO: 335852 - DNA, 20 bp, Artificial Sequence
  Description of Artificial Sequence: Synthetic oligonucleotide
  Target: LAMA2; (+) strand; PAM type: YTN; PAM sequence: TTA
atttggaagctcccacccta

SEQ ID NO: 335853 - DNA, 20 bp, Artificial Sequence
  Description of Artificial Sequence: Synthetic oligonucleotide
  Target: LAMA2; (+) strand; PAM type: YTN; PAM sequence: TTT
ggaagctcccaccctagcaa

SEQ ID NO: 335854 - DNA, 20 bp, Artificial Sequence
  Description of Artificial Sequence: Synthetic oligonucleotide
  Target: LAMA2; (+) strand; PAM type: YTN; PAM sequence: TTG
gaagctcccaccctagcaat

SEQ ID NO: 335855 - DNA, 20 bp, Artificial Sequence
  Description of Artificial Sequence: Synthetic oligonucleotide
  Target: LAMA2; (+) strand; PAM type: YTN; PAM sequence: CTC
ccaccctagcaatacctact

SEQ ID NO: 335856 - DNA, 20 bp, Artificial Sequence
  Description of Artificial Sequence: Synthetic oligonucleotide
  Target: LAMA2; (+) strand; PAM type: YTN; PAM sequence: CTA
gcaatacctactggtgttca

SEQ ID NO: 335857 - DNA, 20 bp, Artificial Sequence
  Description of Artificial Sequence: Synthetic oligonucleotide
  Target: LAMA2; (+) strand; PAM type: YTN; PAM sequence: CTA
ctggtgttcattttatttat

SEQ ID NO: 335858 - DNA, 20 bp, Artificial Sequence
  Description of Artificial Sequence: Synthetic oligonucleotide
  Target: LAMA2; (+) strand; PAM type: YTN; PAM sequence: CTG
gtgttcattttatttatgta

SEQ ID NO: 335859 - DNA, 20 bp, Artificial Sequence
  Description of Artificial Sequence: Synthetic oligonucleotide
  Target: LAMA2; (+) strand; PAM type: YTN; PAM sequence: TTC
attttatttatgtaaacaca

SEQ ID NO: 335860 - DNA, 20 bp, Artificial Sequence
  Description of Artificial Sequence: Synthetic oligonucleotide
  Target: LAMA2; (+) strand; PAM type: YTN; PAM sequence: TTT
tatttatgtaaacacacaaa

SEQ ID NO: 335861 - DNA, 20 bp, Artificial Sequence
  Description of Artificial Sequence: Synthetic oligonucleotide
  Target: LAMA2; (+) strand; PAM type: YTN; PAM sequence: TTT
atttatgtaaacacacaaat

SEQ ID NO: 335862 - DNA, 20 bp, Artificial Sequence
  Description of Artificial Sequence: Synthetic oligonucleotide
  Target: LAMA2; (+) strand; PAM type: YTN; PAM sequence: TTA
tttatgtaaacacacaaatg

SEQ ID NO: 335863 - DNA, 20 bp, Artificial Sequence
  Description of Artificial Sequence: Synthetic oligonucleotide
  Target: LAMA2; (+) strand; PAM type: YTN; PAM sequence: TTT
atgtaaacacacaaatgttg

SEQ ID NO: 335864 - DNA, 20 bp, Artificial Sequence
  Description of Artificial Sequence: Synthetic oligonucleotide
  Target: LAMA2; (+) strand; PAM type: YTN; PAM sequence: TTA
tgtaaacacacaaatgttga

SEQ ID NO: 335865 - DNA, 20 bp, Artificial Sequence
  Description of Artificial Sequence: Synthetic oligonucleotide
  Target: LAMA2; (+) strand; PAM type: YTN; PAM sequence: TTG
actatgtaatttttcaatta

SEQ ID NO: 335866 - DNA, 20 bp, Artificial Sequence
  Description of Artificial Sequence: Synthetic oligonucleotide
  Target: LAMA2; (+) strand; PAM type: YTN; PAM sequence: CTA
tgtaatttttcaattaagga

SEQ ID NO: 335867 - DNA, 20 bp, Artificial Sequence
  Description of Artificial Sequence: Synthetic oligonucleotide
  Target: LAMA2; (+) strand; PAM type: YTN; PAM sequence: TTT
ttcaattaaggaaatagcca

SEQ ID NO: 335868 - DNA, 20 bp, Artificial Sequence
  Description of Artificial Sequence: Synthetic oligonucleotide
  Target: LAMA2; (+) strand; PAM type: YTN; PAM sequence: TTT
tcaattaaggaaatagccaa

SEQ ID NO: 335869 - DNA, 20 bp, Artificial Sequence
  Description of Artificial Sequence: Synthetic oligonucleotide
  Target: LAMA2; (+) strand; PAM type: YTN; PAM sequence: TTT
caattaaggaaatagccaat

SEQ ID NO: 335870 - DNA, 20 bp, Artificial Sequence
  Description of Artificial Sequence: Synthetic oligonucleotide
  Target: LAMA2; (+) strand; PAM type: YTN; PAM sequence: TTC
aattaaggaaatagccaata

SEQ ID NO: 335871 - DNA, 20 bp, Artificial Sequence
  Description of Artificial Sequence: Synthetic oligonucleotide
  Target: LAMA2; (+) strand; PAM type: YTN; PAM sequence: TTA
aggaaatagccaataaaatt

SEQ ID NO: 335872 - DNA, 20 bp, Artificial Sequence
  Description of Artificial Sequence: Synthetic oligonucleotide
  Target: LAMA2; (+) strand; PAM type: YTN; PAM sequence: TTG
tgtggaaaaaagatagcggt

SEQ ID NO: 335873 - DNA, 20 bp, Artificial Sequence
  Description of Artificial Sequence: Synthetic oligonucleotide
  Target: LAMA2; (+) strand; PAM type: YTN; PAM sequence: CTT
ttacttactaaagagattgt

SEQ ID NO: 335874 - DNA, 20 bp, Artificial Sequence
  Description of Artificial Sequence: Synthetic oligonucleotide
  Target: LAMA2; (+) strand; PAM type: YTN; PAM sequence: TTT
tacttactaaagagattgtg

SEQ ID NO: 335875 - DNA, 20 bp, Artificial Sequence
  Description of Artificial Sequence: Synthetic oligonucleotide
  Target: LAMA2; (+) strand; PAM type: YTN; PAM sequence: TTT
acttactaaagagattgtgt

SEQ ID NO: 335876 - DNA, 20 bp, Artificial Sequence
  Description of Artificial Sequence: Synthetic oligonucleotide
  Target: LAMA2; (+) strand; PAM type: YTN; PAM sequence: TTA
cttactaaagagattgtgtc

SEQ ID NO: 335877 - DNA, 20 bp, Artificial Sequence
  Description of Artificial Sequence: Synthetic oligonucleotide
  Target: LAMA2; (+) strand; PAM type: YTN; PAM sequence: CTT
actaaagagattgtgtctaa

SEQ ID NO: 335878 - DNA, 20 bp, Artificial Sequence
  Description of Artificial Sequence: Synthetic oligonucleotide
  Target: LAMA2; (+) strand; PAM type: YTN; PAM sequence: TTA
ctaaagagattgtgtctaaa

SEQ ID NO: 335879 - DNA, 20 bp, Artificial Sequence
  Description of Artificial Sequence: Synthetic oligonucleotide
  Target: LAMA2; (+) strand; PAM type: YTN; PAM sequence: CTA
aagagattgtgtctaaatat

SEQ ID NO: 335880 - DNA, 20 bp, Artificial Sequence
  Description of Artificial Sequence: Synthetic oligonucleotide
  Target: LAMA2; (+) strand; PAM type: YTN; PAM sequence: TTG
tgtctaaatattaaaagtaa

SEQ ID NO: 335881 - DNA, 20 bp, Artificial Sequence
  Description of Artificial Sequence: Synthetic oligonucleotide
  Target: LAMA2; (+) strand; PAM type: YTN; PAM sequence: CTA
aatattaaaagtaatacatt

SEQ ID NO: 335882 - DNA, 20 bp, Artificial Sequence
  Description of Artificial Sequence: Synthetic oligonucleotide
  Target: LAMA2; (+) strand; PAM type: YTN; PAM sequence: TTA
aaagtaatacattcccttgt

SEQ ID NO: 335883 - DNA, 20 bp, Artificial Sequence
  Description of Artificial Sequence: Synthetic oligonucleotide
  Target: LAMA2; (+) strand; PAM type: YTN; PAM sequence: TTC
ccttgtcaaaacacttcatt

SEQ ID NO: 335884 - DNA, 20 bp, Artificial Sequence
  Description of Artificial Sequence: Synthetic oligonucleotide
  Target: LAMA2; (+) strand; PAM type: YTN; PAM sequence: CTT
gtcaaaacacttcatttttg

SEQ ID NO: 335885 - DNA, 20 bp, Artificial Sequence
  Description of Artificial Sequence: Synthetic oligonucleotide
  Target: LAMA2; (+) strand; PAM type: YTN; PAM sequence: TTG
tcaaaacacttcatttttgt

SEQ ID NO: 335886 - DNA, 20 bp, Artificial Sequence
  Description of Artificial Sequence: Synthetic oligonucleotide
  Target: LAMA2; (+) strand; PAM type: YTN; PAM sequence: CTT
catttttgtttgttttcaca

SEQ ID NO: 335887 - DNA, 20 bp, Artificial Sequence
  Description of Artificial Sequence: Synthetic oligonucleotide
  Target: LAMA2; (+) strand; PAM type: YTN; PAM sequence: TTC
atttttgtttgttttcacaa

SEQ ID NO: 335888 - DNA, 20 bp, Artificial Sequence
  Description of Artificial Sequence: Synthetic oligonucleotide
  Target: LAMA2; (+) strand; PAM type: YTN; PAM sequence: TTT
ttgtttgttttcacaaatat

SEQ ID NO: 335889 - DNA, 20 bp, Artificial Sequence
  Description of Artificial Sequence: Synthetic oligonucleotide
  Target: LAMA2; (+) strand; PAM type: YTN; PAM sequence: TTT
tgtttgttttcacaaatatt

SEQ ID NO: 335890 - DNA, 20 bp, Artificial Sequence
  Description of Artificial Sequence: Synthetic oligonucleotide
  Target: LAMA2; (+) strand; PAM type: YTN; PAM sequence: TTT
gtttgttttcacaaatattt

SEQ ID NO: 335891 - DNA, 20 bp, Artificial Sequence
  Description of Artificial Sequence: Synthetic oligonucleotide
  Target: LAMA2; (+) strand; PAM type: YTN; PAM sequence: TTG
tttgttttcacaaatatttt

SEQ ID NO: 335892 - DNA, 20 bp, Artificial Sequence
  Description of Artificial Sequence: Synthetic oligonucleotide
  Target: LAMA2; (+) strand; PAM type: YTN; PAM sequence: TTT
gttttcacaaatattttaat

SEQ ID NO: 335893 - DNA, 20 bp, Artificial Sequence
  Description of Artificial Sequence: Synthetic oligonucleotide
  Target: LAMA2; (+) strand; PAM type: YTN; PAM sequence: TTG
ttttcacaaatattttaatg

SEQ ID NO: 335894 - DNA, 20 bp, Artificial Sequence
  Description of Artificial Sequence: Synthetic oligonucleotide
  Target: LAMA2; (+) strand; PAM type: YTN; PAM sequence: TTT
tcacaaatattttaatgtgg

SEQ ID NO: 335895 - DNA, 20 bp, Artificial Sequence
  Description of Artificial Sequence: Synthetic oligonucleotide
  Target: LAMA2; (+) strand; PAM type: YTN; PAM sequence: TTT
cacaaatattttaatgtgga

SEQ ID NO: 335896 - DNA, 20 bp, Artificial Sequence
  Description of Artificial Sequence: Synthetic oligonucleotide
  Target: LAMA2; (+) strand; PAM type: YTN; PAM sequence: TTC
acaaatattttaatgtggat

SEQ ID NO: 335897 - DNA, 20 bp, Artificial Sequence
  Description of Artificial Sequence: Synthetic oligonucleotide
  Target: LAMA2; (+) strand; PAM type: YTN; PAM sequence: TTT
taatgtggattttgagtcaa

SEQ ID NO: 335898 - DNA, 20 bp, Artificial Sequence
  Description of Artificial Sequence: Synthetic oligonucleotide
  Target: LAMA2; (+) strand; PAM type: YTN; PAM sequence: TTT
aatgtggattttgagtcaaa

SEQ ID NO: 335899 - DNA, 20 bp, Artificial Sequence
  Description of Artificial Sequence: Synthetic oligonucleotide
  Target: LAMA2; (+) strand; PAM type: YTN; PAM sequence: TTA
atgtggattttgagtcaaat

SEQ ID NO: 335900 - DNA, 20 bp, Artificial Sequence
  Description of Artificial Sequence: Synthetic oligonucleotide
  Target: LAMA2; (+) strand; PAM type: YTN; PAM sequence: TTT
tgagtcaaattttctgtagg

SEQ ID NO: 335901 - DNA, 20 bp, Artificial Sequence
  Description of Artificial Sequence: Synthetic oligonucleotide
  Target: LAMA2; (+) strand; PAM type: YTN; PAM sequence: TTT
gagtcaaattttctgtagga

SEQ ID NO: 335902 - DNA, 20 bp, Artificial Sequence
  Description of Artificial Sequence: Synthetic oligonucleotide
  Target: LAMA2; (+) strand; PAM type: YTN; PAM sequence: TTG
agtcaaattttctgtaggaa

SEQ ID NO: 335903 - DNA, 20 bp, Artificial Sequence
  Description of Artificial Sequence: Synthetic oligonucleotide
  Target: LAMA2; (+) strand; PAM type: YTN; PAM sequence: TTT
tctgtaggaaggtcatggta

SEQ ID NO: 335904 - DNA, 20 bp, Artificial Sequence
  Description of Artificial Sequence: Synthetic oligonucleotide
  Target: LAMA2; (+) strand; PAM type: YTN; PAM sequence: TTT
ctgtaggaaggtcatggtag

SEQ ID NO: 335905 - DNA, 20 bp, Artificial Sequence
  Description of Artificial Sequence: Synthetic oligonucleotide
  Target: LAMA2; (+) strand; PAM type: YTN; PAM sequence: TTC
tgtaggaaggtcatggtaga

SEQ ID NO: 335906 - DNA, 20 bp, Artificial Sequence
  Description of Artificial Sequence: Synthetic oligonucleotide
  Target: LAMA2; (+) strand; PAM type: YTN; PAM sequence: CTG
taggaaggtcatggtagatt

SEQ ID NO: 335907 - DNA, 20 bp, Artificial Sequence
  Description of Artificial Sequence: Synthetic oligonucleotide
  Target: LAMA2; (+) strand; PAM type: YTN; PAM sequence: TTA
atgtcaaattagctgaaaca

SEQ ID NO: 335908 - DNA, 20 bp, Artificial Sequence
  Description of Artificial Sequence: Synthetic oligonucleotide
  Target: LAMA2; (+) strand; PAM type: YTN; PAM sequence: TTA
gctgaaacaataaacacaat

SEQ ID NO: 335909 - DNA, 20 bp, Artificial Sequence
  Description of Artificial Sequence: Synthetic oligonucleotide
  Target: LAMA2; (+) strand; PAM type: YTN; PAM sequence: CTG
aaacaataaacacaatgaaa

SEQ ID NO: 335910 - DNA, 20 bp, Artificial Sequence
  Description of Artificial Sequence: Synthetic oligonucleotide
  Target: LAMA2; (+) strand; PAM type: YTN; PAM sequence: CTT
gtaagacagtacaactaagg

SEQ ID NO: 335911 - DNA, 20 bp, Artificial Sequence
  Description of Artificial Sequence: Synthetic oligonucleotide
  Target: LAMA2; (+) strand; PAM type: YTN; PAM sequence: TTG
taagacagtacaactaagga

SEQ ID NO: 335912 - DNA, 20 bp, Artificial Sequence
  Description of Artificial Sequence: Synthetic oligonucleotide
  Target: LAMA2; (+) strand; PAM type: YTN; PAM sequence: CTA
aggagatcagtttaaaacac

SEQ ID NO: 335913 - DNA, 20 bp, Artificial Sequence
  Description of Artificial Sequence: Synthetic oligonucleotide
  Target: LAMA2; (+) strand; PAM type: YTN; PAM sequence: TTT
aaaacactaatgaggagttg

SEQ ID NO: 335914 - DNA, 20 bp, Artificial Sequence
  Description of Artificial Sequence: Synthetic oligonucleotide
  Target: LAMA2; (+) strand; PAM type: YTN; PAM sequence: TTA
aaacactaatgaggagttgc

SEQ ID NO: 335915 - DNA, 20 bp, Artificial Sequence
  Description of Artificial Sequence: Synthetic oligonucleotide
  Target: LAMA2; (+) strand; PAM type: YTN; PAM sequence: CTA
atgaggagttgcctctcagc

SEQ ID NO: 335916 - DNA, 20 bp, Artificial Sequence
  Description of Artificial Sequence: Synthetic oligonucleotide
  Target: LAMA2; (+) strand; PAM type: YTN; PAM sequence: TTG
cctctcagcactgggtcatt

SEQ ID NO: 335917 - DNA, 20 bp, Artificial Sequence
  Description of Artificial Sequence: Synthetic oligonucleotide
  Target: LAMA2; (+) strand; PAM type: YTN; PAM sequence: CTC
tcagcactgggtcattatga

SEQ ID NO: 335918 - DNA, 20 bp, Artificial Sequence
  Description of Artificial Sequence: Synthetic oligonucleotide
  Target: LAMA2; (+) strand; PAM type: YTN; PAM sequence: CTC
agcactgggtcattatgatt

SEQ ID NO: 335919 - DNA, 20 bp, Artificial Sequence
  Description of Artificial Sequence: Synthetic oligonucleotide
  Target: LAMA2; (+) strand; PAM type: YTN; PAM sequence: CTG
ggtcattatgattatactaa

SEQ ID NO: 335920 - DNA, 20 bp, Artificial Sequence
  Description of Artificial Sequence: Synthetic oligonucleotide
  Target: LAMA2; (+) strand; PAM type: YTN; PAM sequence: TTA
tgattatactaatataataa

SEQ ID NO: 335921 - DNA, 20 bp, Artificial Sequence
  Description of Artificial Sequence: Synthetic oligonucleotide
  Target: LAMA2; (+) strand; PAM type: YTN; PAM sequence: TTA
tactaatataataagttagg

SEQ ID NO: 335922 - DNA, 20 bp, Artificial Sequence
  Description of Artificial Sequence: Synthetic oligonucleotide
  Target: LAMA2; (+) strand; PAM type: YTN; PAM sequence: CTA
atataataagttaggttcag

SEQ ID NO: 335923 - DNA, 20 bp, Artificial Sequence
  Description of Artificial Sequence: Synthetic oligonucleotide
  Target: LAMA2; (+) strand; PAM type: YTN; PAM sequence: TTA
ggttcaggttagaaagcaaa

SEQ ID NO: 335924 - DNA, 20 bp, Artificial Sequence
  Description of Artificial Sequence: Synthetic oligonucleotide
  Target: LAMA2; (+) strand; PAM type: YTN; PAM sequence: TTC
aggttagaaagcaaagatga

SEQ ID NO: 335925 - DNA, 20 bp, Artificial Sequence
  Description of Artificial Sequence: Synthetic oligonucleotide
  Target: LAMA2; (+) strand; PAM type: YTN; PAM sequence: TTA
gaaagcaaagatgaataatc

SEQ ID NO: 335926 - DNA, 20 bp, Artificial Sequence
  Description of Artificial Sequence: Synthetic oligonucleotide
  Target: LAMA2; (+) strand; PAM type: YTN; PAM sequence: CTT
caaaaggcacagtaaatagt

SEQ ID NO: 335927 - DNA, 20 bp, Artificial Sequence
  Description of Artificial Sequence: Synthetic oligonucleotide
  Target: LAMA2; (+) strand; PAM type: YTN; PAM sequence: TTC
aaaaggcacagtaaatagtc

SEQ ID NO: 335928 - DNA, 20 bp, Artificial Sequence
  Description of Artificial Sequence: Synthetic oligonucleotide
  Target: LAMA2; (+) strand; PAM type: YTN; PAM sequence: TTT
agttgtctaccttcataata

SEQ ID NO: 335929 - DNA, 20 bp, Artificial Sequence
  Description of Artificial Sequence: Synthetic oligonucleotide
  Target: LAMA2; (+) strand; PAM type: YTN; PAM sequence: TTA
gttgtctaccttcataatat

SEQ ID NO: 335930 - DNA, 20 bp, Artificial Sequence
  Description of Artificial Sequence: Synthetic oligonucleotide
  Target: LAMA2; (+) strand; PAM type: YTN; PAM sequence: TTG
tctaccttcataatatttac

SEQ ID NO: 335931 - DNA, 20 bp, Artificial Sequence
  Description of Artificial Sequence: Synthetic oligonucleotide
  Target: LAMA2; (+) strand; PAM type: YTN; PAM sequence: CTA
ccttcataatatttactatt

SEQ ID NO: 335932 - DNA, 20 bp, Artificial Sequence
  Description of Artificial Sequence: Synthetic oligonucleotide
  Target: LAMA2; (+) strand; PAM type: YTN; PAM sequence: CTT
cataatatttactatttcca

SEQ ID NO: 335933 - DNA, 20 bp, Artificial Sequence
  Description of Artificial Sequence: Synthetic oligonucleotide
  Target: LAMA2; (+) strand; PAM type: YTN; PAM sequence: TTC
ataatatttactatttccat

SEQ ID NO: 335934 - DNA, 20 bp, Artificial Sequence
  Description of Artificial Sequence: Synthetic oligonucleotide
  Target: LAMA2; (+) strand; PAM type: YTN; PAM sequence: TTT
actatttccatactaaaagc

SEQ ID NO: 335935 - DNA, 20 bp, Artificial Sequence
  Description of Artificial Sequence: Synthetic oligonucleotide
  Target: LAMA2; (+) strand; PAM type: YTN; PAM sequence: TTA
ctatttccatactaaaagct

SEQ ID NO: 335936 - DNA, 20 bp, Artificial Sequence
  Description of Artificial Sequence: Synthetic oligonucleotide
  Target: LAMA2; (+) strand; PAM type: YTN; PAM sequence: CTA
tttccatactaaaagcttac

SEQ ID NO: 335937 - DNA, 20 bp, Artificial Sequence
  Description of Artificial Sequence: Synthetic oligonucleotide
  Target: LAMA2; (+) strand; PAM type: YTN; PAM sequence: TTT
ccatactaaaagcttacagt

SEQ ID NO: 335938 - DNA, 20 bp, Artificial Sequence
  Description of Artificial Sequence: Synthetic oligonucleotide
  Target: LAMA2; (+) strand; PAM type: YTN; PAM sequence: TTC
catactaaaagcttacagtt

SEQ ID NO: 335939 - DNA, 20 bp, Artificial Sequence
  Description of Artificial Sequence: Synthetic oligonucleotide
  Target: LAMA2; (+) strand; PAM type: YTN; PAM sequence: CTA
aaagcttacagttgtgggct

SEQ ID NO: 335940 - DNA, 20 bp, Artificial Sequence
  Description of Artificial Sequence: Synthetic oligonucleotide
  Target: LAMA2; (+) strand; PAM type: YTN; PAM sequence: CTT
acagttgtgggctagaatat

SEQ ID NO: 335941 - DNA, 20 bp, Artificial Sequence
  Description of Artificial Sequence: Synthetic oligonucleotide
  Target: LAMA2; (+) strand; PAM type: YTN; PAM sequence: TTA
cagttgtgggctagaatata

SEQ ID NO: 335942 - DNA, 20 bp, Artificial Sequence
  Description of Artificial Sequence: Synthetic oligonucleotide
  Target: LAMA2; (+) strand; PAM type: YTN; PAM sequence: TTG
tgggctagaatatatgatat

SEQ ID NO: 335943 - DNA, 20 bp, Artificial Sequence
  Description of Artificial Sequence: Synthetic oligonucleotide
  Target: LAMA2; (+) strand; PAM type: YTN; PAM sequence: CTA
gaatatatgatattcacgta

SEQ ID NO: 335944 - DNA, 20 bp, Artificial Sequence
  Description of Artificial Sequence: Synthetic oligonucleotide
  Target: LAMA2; (+) strand; PAM type: YTN; PAM sequence: TTC
acgtaataatatttaaattg

SEQ ID NO: 335945 - DNA, 20 bp, Artificial Sequence
  Description of Artificial Sequence: Synthetic oligonucleotide
  Target: LAMA2; (+) strand; PAM type: YTN; PAM sequence: TTT
aaattgaatttcattttttt

SEQ ID NO: 335946 - DNA, 20 bp, Artificial Sequence
  Description of Artificial Sequence: Synthetic oligonucleotide
  Target: LAMA2; (+) strand; PAM type: YTN; PAM sequence: TTA
aattgaatttcatttttttg

SEQ ID NO: 335947 - DNA, 20 bp, Artificial Sequence
  Description of Artificial Sequence: Synthetic oligonucleotide
  Target: LAMA2; (+) strand; PAM type: YTN; PAM sequence: TTG
aatttcatttttttgcttct

SEQ ID NO: 335948 - DNA, 20 bp, Artificial Sequence
  Description of Artificial Sequence: Synthetic oligonucleotide
  Target: LAMA2; (+) strand; PAM type: YTN; PAM sequence: TTT
catttttttgcttcttcatt

SEQ ID NO: 335949 - DNA, 20 bp, Artificial Sequence
  Description of Artificial Sequence: Synthetic oligonucleotide
  Target: LAMA2; (+) strand; PAM type: YTN; PAM sequence: TTC
atttttttgcttcttcatta

SEQ ID NO: 335950 - DNA, 20 bp, Artificial Sequence
  Description of Artificial Sequence: Synthetic oligonucleotide
  Target: LAMA2; (+) strand; PAM type: YTN; PAM sequence: TTT
ttttgcttcttcattatcct

SEQ ID NO: 335951 - DNA, 20 bp, Artificial Sequence
  Description of Artificial Sequence: Synthetic oligonucleotide
  Target: LAMA2; (+) strand; PAM type: YTN; PAM sequence: TTT
tttgcttcttcattatcctt

SEQ ID NO: 335952 - DNA, 20 bp, Artificial Sequence
  Description of Artificial Sequence: Synthetic oligonucleotide
  Target: LAMA2; (+) strand; PAM type: YTN; PAM sequence: TTT
ttgcttcttcattatcctta

SEQ ID NO: 335953 - DNA, 20 bp, Artificial Sequence
  Description of Artificial Sequence: Synthetic oligonucleotide
  Target: LAMA2; (+) strand; PAM type: YTN; PAM sequence: TTT
tgcttcttcattatccttac

SEQ ID NO: 335954 - DNA, 20 bp, Artificial Sequence
  Description of Artificial Sequence: Synthetic oligonucleotide
  Target: LAMA2; (+) strand; PAM type: YTN; PAM sequence: TTT
gcttcttcattatccttacc

SEQ ID NO: 335955 - DNA, 20 bp, Artificial Sequence
  Description of Artificial Sequence: Synthetic oligonucleotide
  Target: LAMA2; (+) strand; PAM type: YTN; PAM sequence: TTG
cttcttcattatccttacct

SEQ ID NO: 335956 - DNA, 20 bp, Artificial Sequence
  Description of Artificial Sequence: Synthetic oligonucleotide
  Target: LAMA2; (+) strand; PAM type: YTN; PAM sequence: CTT
cttcattatccttacctcta

SEQ ID NO: 335957 - DNA, 20 bp, Artificial Sequence
  Description of Artificial Sequence: Synthetic oligonucleotide
  Target: LAMA2; (+) strand; PAM type: YTN; PAM sequence: TTC
ttcattatccttacctctac

SEQ ID NO: 335958 - DNA, 20 bp, Artificial Sequence
  Description of Artificial Sequence: Synthetic oligonucleotide
  Target: LAMA2; (+) strand; PAM type: YTN; PAM sequence: CTT
cattatccttacctctaccc

SEQ ID NO: 335959 - DNA, 20 bp, Artificial Sequence
  Description of Artificial Sequence: Synthetic oligonucleotide
  Target: LAMA2; (+) strand; PAM type: YTN; PAM sequence: TTC
attatccttacctctaccct

SEQ ID NO: 335960 - DNA, 20 bp, Artificial Sequence
  Description of Artificial Sequence: Synthetic oligonucleotide
  Target: LAMA2; (+) strand; PAM type: YTN; PAM sequence: TTA
tccttacctctaccctcctc

SEQ ID NO: 335961 - DNA, 20 bp, Artificial Sequence
  Description of Artificial Sequence: Synthetic oligonucleotide
  Target: LAMA2; (+) strand; PAM type: YTN; PAM sequence: CTT
acctctaccctcctcaataa

SEQ ID NO: 335962 - DNA, 20 bp, Artificial Sequence
  Description of Artificial Sequence: Synthetic oligonucleotide
  Target: LAMA2; (+) strand; PAM type: YTN; PAM sequence: TTA
cctctaccctcctcaataaa

SEQ ID NO: 335963 - DNA, 20 bp, Artificial Sequence
  Description of Artificial Sequence: Synthetic oligonucleotide
  Target: LAMA2; (+) strand; PAM type: YTN; PAM sequence: CTC
taccctcctcaataaattca

SEQ ID NO: 335964 - DNA, 20 bp, Artificial Sequence
  Description of Artificial Sequence: Synthetic oligonucleotide
  Target: LAMA2; (+) strand; PAM type: YTN; PAM sequence: CTA
ccctcctcaataaattcatc

SEQ ID NO: 335965 - DNA, 20 bp, Artificial Sequence
  Description of Artificial Sequence: Synthetic oligonucleotide
  Target: LAMA2; (+) strand; PAM type: YTN; PAM sequence: CTC
ctcaataaattcatctcaaa

SEQ ID NO: 335966 - DNA, 20 bp, Artificial Sequence
  Description of Artificial Sequence: Synthetic oligonucleotide
  Target: LAMA2; (+) strand; PAM type: YTN; PAM sequence: CTC
aataaattcatctcaaatga

SEQ ID NO: 335967 - DNA, 20 bp, Artificial Sequence
  Description of Artificial Sequence: Synthetic oligonucleotide
  Target: LAMA2; (+) strand; PAM type: YTN; PAM sequence: TTC
atctcaaatgataagatttt

SEQ ID NO: 335968 - DNA, 20 bp, Artificial Sequence
  Description of Artificial Sequence: Synthetic oligonucleotide
  Target: LAMA2; (+) strand; PAM type: YTN; PAM sequence: CTC
aaatgataagattttccatc

SEQ ID NO: 335969 - DNA, 20 bp, Artificial Sequence
  Description of Artificial Sequence: Synthetic oligonucleotide
  Target: LAMA2; (+) strand; PAM type: YTN; PAM sequence: TTT
tccatccatcattgtgaaga

SEQ ID NO: 335970 - DNA, 20 bp, Artificial Sequence
  Description of Artificial Sequence: Synthetic oligonucleotide
  Target: LAMA2; (+) strand; PAM type: YTN; PAM sequence: TTT
ccatccatcattgtgaagaa

SEQ ID NO: 335971 - DNA, 20 bp, Artificial Sequence
  Description of Artificial Sequence: Synthetic oligonucleotide
  Target: LAMA2; (+) strand; PAM type: YTN; PAM sequence: TTC
catccatcattgtgaagaat

SEQ ID NO: 335972 - DNA, 20 bp, Artificial Sequence
  Description of Artificial Sequence: Synthetic oligonucleotide
  Target: LAMA2; (+) strand; PAM type: YTN; PAM sequence: TTG
tgaagaataatttatttact

SEQ ID NO: 335973 - DNA, 20 bp, Artificial Sequence
  Description of Artificial Sequence: Synthetic oligonucleotide
  Target: LAMA2; (+) strand; PAM type: YTN; PAM sequence: TTT
atttacttaatgattctgga

SEQ ID NO: 335974 - DNA, 20 bp, Artificial Sequence
  Description of Artificial Sequence: Synthetic oligonucleotide
  Target: LAMA2; (+) strand; PAM type: YTN; PAM sequence: TTA
tttacttaatgattctggaa

SEQ ID NO: 335975 - DNA, 20 bp, Artificial Sequence
  Description of Artificial Sequence: Synthetic oligonucleotide
  Target: LAMA2; (+) strand; PAM type: YTN; PAM sequence: TTT
acttaatgattctggaaata

SEQ ID NO: 335976 - DNA, 20 bp, Artificial Sequence
  Description of Artificial Sequence: Synthetic oligonucleotide
  Target: LAMA2; (+) strand; PAM type: YTN; PAM sequence: TTA
cttaatgattctggaaatat

SEQ ID NO: 335977 - DNA, 20 bp, Artificial Sequence
  Description of Artificial Sequence: Synthetic oligonucleotide
  Target: LAMA2; (+) strand; PAM type: YTN; PAM sequence: CTT
aatgattctggaaatatggg

SEQ ID NO: 335978 - DNA, 20 bp, Artificial Sequence
  Description of Artificial Sequence: Synthetic oligonucleotide
  Target: LAMA2; (+) strand; PAM type: YTN; PAM sequence: TTA
atgattctggaaatatggga

SEQ ID NO: 335979 - DNA, 20 bp, Artificial Sequence
  Description of Artificial Sequence: Synthetic oligonucleotide
  Target: LAMA2; (+) strand; PAM type: YTN; PAM sequence: TTC
tggaaatatgggaatgttta

SEQ ID NO: 335980 - DNA, 20 bp, Artificial Sequence
  Description of Artificial Sequence: Synthetic oligonucleotide
  Target: LAMA2; (+) strand; PAM type: YTN; PAM sequence: CTG
gaaatatgggaatgtttata

SEQ ID NO: 335981 - DNA, 20 bp, Artificial Sequence
  Description of Artificial Sequence: Synthetic oligonucleotide
  Target: LAMA2; (+) strand; PAM type: YTN; PAM sequence: TTT
ataaaacgaaatacaaaaat

SEQ ID NO: 335982 - DNA, 20 bp, Artificial Sequence
  Description of Artificial Sequence: Synthetic oligonucleotide
  Target: LAMA2; (+) strand; PAM type: YTN; PAM sequence: TTA
taaaacgaaatacaaaaatt

SEQ ID NO: 335983 - DNA, 20 bp, Artificial Sequence
  Description of Artificial Sequence: Synthetic oligonucleotide
  Target: LAMA2; (+) strand; PAM type: YTN; PAM sequence: TTA
agaaatggagtgggcaagta

SEQ ID NO: 335984 - DNA, 20 bp, Artificial Sequence
  Description of Artificial Sequence: Synthetic oligonucleotide
  Target: LAMA2; (+) strand; PAM type: YTN; PAM sequence: TTT
tcccactgattttagaatat

SEQ ID NO: 335985 - DNA, 20 bp, Artificial Sequence
  Description of Artificial Sequence: Synthetic oligonucleotide
  Target: LAMA2; (+) strand; PAM type: YTN; PAM sequence: TTT
cccactgattttagaatata

SEQ ID NO: 335986 - DNA, 20 bp, Artificial Sequence
  Description of Artificial Sequence: Synthetic oligonucleotide
  Target: LAMA2; (+) strand; PAM type: YTN; PAM sequence: TTC
ccactgattttagaatatac

SEQ ID NO: 335987 - DNA, 20 bp, Artificial Sequence
  Description of Artificial Sequence: Synthetic oligonucleotide
  Target: LAMA2; (+) strand; PAM type: YTN; PAM sequence: CTG
attttagaatatactcaaga

SEQ ID NO: 335988 - DNA, 20 bp, Artificial Sequence
  Description of Artificial Sequence: Synthetic oligonucleotide
  Target: LAMA2; (+) strand; PAM type: YTN; PAM sequence: TTT
tagaatatactcaagaaaat

SEQ ID NO: 335989 - DNA, 20 bp, Artificial Sequence
  Description of Artificial Sequence: Synthetic oligonucleotide
  Target: LAMA2; (+) strand; PAM type: YTN; PAM sequence: TTT
agaatatactcaagaaaatt

SEQ ID NO: 335990 - DNA, 20 bp, Artificial Sequence
  Description of Artificial Sequence: Synthetic oligonucleotide
  Target: LAMA2; (+) strand; PAM type: YTN; PAM sequence: TTA
gaatatactcaagaaaatta

SEQ ID NO: 335991 - DNA, 20 bp, Artificial Sequence
  Description of Artificial Sequence: Synthetic oligonucleotide
  Target: LAMA2; (+) strand; PAM type: YTN; PAM sequence: CTC
aagaaaattaaactagtgac

SEQ ID NO: 335992 - DNA, 20 bp, Artificial Sequence
  Description of Artificial Sequence: Synthetic oligonucleotide
  Target: LAMA2; (+) strand; PAM type: YTN; PAM sequence: TTA
aactagtgacaaaatagatt

SEQ ID NO: 335993 - DNA, 20 bp, Artificial Sequence
  Description of Artificial Sequence: Synthetic oligonucleotide
  Target: LAMA2; (+) strand; PAM type: YTN; PAM sequence: CTA
gtgacaaaatagatttattt

SEQ ID NO: 335994 - DNA, 20 bp, Artificial Sequence
  Description of Artificial Sequence: Synthetic oligonucleotide
  Target: LAMA2; (+) strand; PAM type: YTN; PAM sequence: TTT
atttaacttataagctaatt

SEQ ID NO: 335995 - DNA, 20 bp, Artificial Sequence
  Description of Artificial Sequence: Synthetic oligonucleotide
  Target: LAMA2; (+) strand; PAM type: YTN; PAM sequence: TTA
tttaacttataagctaattc

SEQ ID NO: 335996 - DNA, 20 bp, Artificial Sequence
  Description of Artificial Sequence: Synthetic oligonucleotide
  Target: LAMA2; (+) strand; PAM type: YTN; PAM sequence: TTT
aacttataagctaattcata

SEQ ID NO: 335997 - DNA, 20 bp, Artificial Sequence
  Description of Artificial Sequence: Synthetic oligonucleotide
  Target: LAMA2; (+) strand; PAM type: YTN; PAM sequence: TTA
acttataagctaattcataa

SEQ ID NO: 335998 - DNA, 20 bp, Artificial Sequence
  Description of Artificial Sequence: Synthetic oligonucleotide
  Target: LAMA2; (+) strand; PAM type: YTN; PAM sequence: CTT
ataagctaattcataaatta

SEQ ID NO: 335999 - DNA, 20 bp, Artificial Sequence
  Description of Artificial Sequence: Synthetic oligonucleotide
  Target: LAMA2; (+) strand; PAM type: YTN; PAM sequence: TTA
taagctaattcataaattaa

SEQ ID NO: 336000 - DNA, 20 bp, Artificial Sequence
  Description of Artificial Sequence: Synthetic oligonucleotide
  Target: LAMA2; (+) strand; PAM type: YTN; PAM sequence: CTA
attcataaattaatggcaaa

SEQ ID NO: 336001 - DNA, 20 bp, Artificial Sequence
  Description of Artificial Sequence: Synthetic oligonucleotide
  Target: LAMA2; (+) strand; PAM type: YTN; PAM sequence: TTC
ataaattaatggcaaaattt

SEQ ID NO: 336002 - DNA, 20 bp, Artificial Sequence
  Description of Artificial Sequence: Synthetic oligonucleotide
  Target: LAMA2; (+) strand; PAM type: YTN; PAM sequence: TTA
atggcaaaatttatcacagt

SEQ ID NO: 336003 - DNA, 20 bp, Artificial Sequence
  Description of Artificial Sequence: Synthetic oligonucleotide
  Target: LAMA2; (+) strand; PAM type: YTN; PAM sequence: TTT
atcacagtatacataactga

SEQ ID NO: 336004 - DNA, 20 bp, Artificial Sequence
  Description of Artificial Sequence: Synthetic oligonucleotide
  Target: LAMA2; (+) strand; PAM type: YTN; PAM sequence: TTA
tcacagtatacataactgag

SEQ ID NO: 336005 - DNA, 20 bp, Artificial Sequence
  Description of Artificial Sequence: Synthetic oligonucleotide
  Target: LAMA2; (+) strand; PAM type: YTN; PAM sequence: CTG
agactttgcagatttttttg

SEQ ID NO: 336006 - DNA, 20 bp, Artificial Sequence
  Description of Artificial Sequence: Synthetic oligonucleotide
  Target: LAMA2; (+) strand; PAM type: YTN; PAM sequence: CTT
tgcagatttttttgtaaata

SEQ ID NO: 336007 - DNA, 20 bp, Artificial Sequence
  Description of Artificial Sequence: Synthetic oligonucleotide
  Target: LAMA2; (+) strand; PAM type: YTN; PAM sequence: TTT
gcagatttttttgtaaatag

SEQ ID NO: 336008 - DNA, 20 bp, Artificial Sequence
  Description of Artificial Sequence: Synthetic oligonucleotide
  Target: LAMA2; (+) strand; PAM type: YTN; PAM sequence: TTG
cagatttttttgtaaataga

SEQ ID NO: 336009 - DNA, 20 bp, Artificial Sequence
  Description of Artificial Sequence: Synthetic oligonucleotide
  Target: LAMA2; (+) strand; PAM type: YTN; PAM sequence: TTT
ttttgtaaatagataacatt

SEQ ID NO: 336010 - DNA, 20 bp, Artificial Sequence
  Description of Artificial Sequence: Synthetic oligonucleotide
  Target: LAMA2; (+) strand; PAM type: YTN; PAM sequence: TTT
tttgtaaatagataacattc

SEQ ID NO: 336011 - DNA, 20 bp, Artificial Sequence
  Description of Artificial Sequence: Synthetic oligonucleotide
  Target: LAMA2; (+) strand; PAM type: YTN; PAM sequence: TTT
ttgtaaatagataacattct

SEQ ID NO: 336012 - DNA, 20 bp, Artificial Sequence
  Description of Artificial Sequence: Synthetic oligonucleotide
  Target: LAMA2; (+) strand; PAM type: YTN; PAM sequence: TTT
tgtaaatagataacattctg

SEQ ID NO: 336013 - DNA, 20 bp, Artificial Sequence
  Description of Artificial Sequence: Synthetic oligonucleotide
  Target: LAMA2; (+) strand; PAM type: YTN; PAM sequence: TTT
gtaaatagataacattctga

SEQ ID NO: 336014 - DNA, 20 bp, Artificial Sequence
  Description of Artificial Sequence: Synthetic oligonucleotide
  Target: LAMA2; (+) strand; PAM type: YTN; PAM sequence: TTG
taaatagataacattctgat

SEQ ID NO: 336015 - DNA, 20 bp, Artificial Sequence
  Description of Artificial Sequence: Synthetic oligonucleotide
  Target: LAMA2; (+) strand; PAM type: YTN; PAM sequence: TTC
tgatacaattaacagatctc

SEQ ID NO: 336016 - DNA, 20 bp, Artificial Sequence
  Description of Artificial Sequence: Synthetic oligonucleotide
  Target: LAMA2; (+) strand; PAM type: YTN; PAM sequence: CTG
atacaattaacagatctcca

SEQ ID NO: 336017 - DNA, 20 bp, Artificial Sequence
  Description of Artificial Sequence: Synthetic oligonucleotide
  Target: LAMA2; (+) strand; PAM type: YTN; PAM sequence: TTA
acagatctccatcagctgca

SEQ ID NO: 336018 - DNA, 20 bp, Artificial Sequence
  Description of Artificial Sequence: Synthetic oligonucleotide
  Target: LAMA2; (+) strand; PAM type: YTN; PAM sequence: CTC
catcagctgcattagatttc

SEQ ID NO: 336019 - DNA, 20 bp, Artificial Sequence
  Description of Artificial Sequence: Synthetic oligonucleotide
  Target: LAMA2; (+) strand; PAM type: YTN; PAM sequence: CTG
cattagatttcaagttgccc

SEQ ID NO: 336020 - DNA, 20 bp, Artificial Sequence
  Description of Artificial Sequence: Synthetic oligonucleotide
  Target: LAMA2; (+) strand; PAM type: YTN; PAM sequence: TTA
gatttcaagttgccctgcta

SEQ ID NO: 336021 - DNA, 20 bp, Artificial Sequence
  Description of Artificial Sequence: Synthetic oligonucleotide
  Target: LAMA2; (+) strand; PAM type: YTN; PAM sequence: TTT
caagttgccctgctaccact

SEQ ID NO: 336022 - DNA, 20 bp, Artificial Sequence
  Description of Artificial Sequence: Synthetic oligonucleotide
  Target: LAMA2; (+) strand; PAM type: YTN; PAM sequence: TTC
aagttgccctgctaccactg

SEQ ID NO: 336023 - DNA, 20 bp, Artificial Sequence
  Description of Artificial Sequence: Synthetic oligonucleotide
  Target: LAMA2; (+) strand; PAM type: YTN; PAM sequence: TTG
ccctgctaccactgtatata

SEQ ID NO: 336024 - DNA, 20 bp, Artificial Sequence
  Description of Artificial Sequence: Synthetic oligonucleotide
  Target: LAMA2; (+) strand; PAM type: YTN; PAM sequence: CTG
ctaccactgtatatatgcac

SEQ ID NO: 336025 - DNA, 20 bp, Artificial Sequence
  Description of Artificial Sequence: Synthetic oligonucleotide
  Target: LAMA2; (+) strand; PAM type: YTN; PAM sequence: CTA
ccactgtatatatgcacata

SEQ ID NO: 336026 - DNA, 20 bp, Artificial Sequence
  Description of Artificial Sequence: Synthetic oligonucleotide
  Target: LAMA2; (+) strand; PAM type: YTN; PAM sequence: CTG
tatatatgcacatagataaa

SEQ ID NO: 336027 - DNA, 20 bp, Artificial Sequence
  Description of Artificial Sequence: Synthetic oligonucleotide
  Target: LAMA2; (+) strand; PAM type: YTN; PAM sequence: TTG
ttttattttgttcgaatatg

SEQ ID NO: 336028 - DNA, 20 bp, Artificial Sequence
  Description of Artificial Sequence: Synthetic oligonucleotide
  Target: LAMA2; (+) strand; PAM type: YTN; PAM sequence: TTT
tattttgttcgaatatgtat

SEQ ID NO: 336029 - DNA, 20 bp, Artificial Sequence
  Description of Artificial Sequence: Synthetic oligonucleotide
  Target: LAMA2; (+) strand; PAM type: YTN; PAM sequence: TTT
attttgttcgaatatgtatt

SEQ ID NO: 336030 - DNA, 20 bp, Artificial Sequence
  Description of Artificial Sequence: Synthetic oligonucleotide
  Target: LAMA2; (+) strand; PAM type: YTN; PAM sequence: TTA
ttttgttcgaatatgtatta

SEQ ID NO: 336031 - DNA, 20 bp, Artificial Sequence
  Description of Artificial Sequence: Synthetic oligonucleotide
  Target: LAMA2; (+) strand; PAM type: YTN; PAM sequence: TTT
tgttcgaatatgtattacag

SEQ ID NO: 336032 - DNA, 20 bp, Artificial Sequence
  Description of Artificial Sequence: Synthetic oligonucleotide
  Target: LAMA2; (+) strand; PAM type: YTN; PAM sequence: TTT
gttcgaatatgtattacaga

SEQ ID NO: 336033 - DNA, 20 bp, Artificial Sequence
  Description of Artificial Sequence: Synthetic oligonucleotide
  Target: LAMA2; (+) strand; PAM type: YTN; PAM sequence: TTG
ttcgaatatgtattacagag

SEQ ID NO: 336034 - DNA, 20 bp, Artificial Sequence
  Description of Artificial Sequence: Synthetic oligonucleotide
  Target: LAMA2; (+) strand; PAM type: YTN; PAM sequence: TTC
gaatatgtattacagagaac

SEQ ID NO: 336035 - DNA, 20 bp, Artificial Sequence
  Description of Artificial Sequence: Synthetic oligonucleotide
  Target: LAMA2; (+) strand; PAM type: YTN; PAM sequence: TTA
cagagaaccctatgtgctgt

SEQ ID NO: 336036 - DNA, 20 bp, Artificial Sequence
  Description of Artificial Sequence: Synthetic oligonucleotide
  Target: LAMA2; (+) strand; PAM type: YTN; PAM sequence: CTA
tgtgctgtatagcaccttat

SEQ ID NO: 336037 - DNA, 20 bp, Artificial Sequence
  Description of Artificial Sequence: Synthetic oligonucleotide
  Target: LAMA2; (+) strand; PAM type: YTN; PAM sequence: CTG
tatagcaccttatatatctt

SEQ ID NO: 336038 - DNA, 20 bp, Artificial Sequence
  Description of Artificial Sequence: Synthetic oligonucleotide
  Target: LAMA2; (+) strand; PAM type: YTN; PAM sequence: CTT
atatatctttcttttaagag

SEQ ID NO: 336039 - DNA, 20 bp, Artificial Sequence
  Description of Artificial Sequence: Synthetic oligonucleotide
  Target: LAMA2; (+) strand; PAM type: YTN; PAM sequence: TTA
tatatctttcttttaagaga

SEQ ID NO: 336040 - DNA, 20 bp, Artificial Sequence
  Description of Artificial Sequence: Synthetic oligonucleotide
  Target: LAMA2; (+) strand; PAM type: YTN; PAM sequence: CTT
tcttttaagagaacctcata

SEQ ID NO: 336041 - DNA, 20 bp, Artificial Sequence
  Description of Artificial Sequence: Synthetic oligonucleotide
  Target: LAMA2; (+) strand; PAM type: YTN; PAM sequence: TTT
cttttaagagaacctcatag

SEQ ID NO: 336042 - DNA, 20 bp, Artificial Sequence
  Description of Artificial Sequence: Synthetic oligonucleotide
  Target: LAMA2; (+) strand; PAM type: YTN; PAM sequence: TTC
ttttaagagaacctcatagg

SEQ ID NO: 336043 - DNA, 20 bp, Artificial Sequence
  Description of Artificial Sequence: Synthetic oligonucleotide
  Target: LAMA2; (+) strand; PAM type: YTN; PAM sequence: CTT
ttaagagaacctcataggac

SEQ ID NO: 336044 - DNA, 20 bp, Artificial Sequence
  Description of Artificial Sequence: Synthetic oligonucleotide
  Target: LAMA2; (+) strand; PAM type: YTN; PAM sequence: TTT
taagagaacctcataggact

SEQ ID NO: 336045 - DNA, 20 bp, Artificial Sequence
  Description of Artificial Sequence: Synthetic oligonucleotide
  Target: LAMA2; (+) strand; PAM type: YTN; PAM sequence: TTT
aagagaacctcataggactt

SEQ ID NO: 336046 - DNA, 20 bp, Artificial Sequence
  Description of Artificial Sequence: Synthetic oligonucleotide
  Target: LAMA2; (+) strand; PAM type: YTN; PAM sequence: TTA
agagaacctcataggacttc

SEQ ID NO: 336047 - DNA, 20 bp, Artificial Sequence
  Description of Artificial Sequence: Synthetic oligonucleotide
  Target: LAMA2; (+) strand; PAM type: YTN; PAM sequence: CTC
ataggacttccaaattcttc

SEQ ID NO: 336048 - DNA, 20 bp, Artificial Sequence
  Description of Artificial Sequence: Synthetic oligonucleotide
  Target: LAMA2; (+) strand; PAM type: YTN; PAM sequence: CTT
ccaaattcttcactgaaata

SEQ ID NO: 336049 - DNA, 20 bp, Artificial Sequence
  Description of Artificial Sequence: Synthetic oligonucleotide
  Target: LAMA2; (+) strand; PAM type: YTN; PAM sequence: TTC
caaattcttcactgaaatag

SEQ ID NO: 336050 - DNA, 20 bp, Artificial Sequence
  Description of Artificial Sequence: Synthetic oligonucleotide
  Target: LAMA2; (+) strand; PAM type: YTN; PAM sequence: TTC
ttcactgaaatagctcctac

SEQ ID NO: 336051 - DNA, 20 bp, Artificial Sequence
  Description of Artificial Sequence: Synthetic oligonucleotide
  Target: LAMA2; (+) strand; PAM type: YTN; PAM sequence: CTT
cactgaaatagctcctactt

SEQ ID NO: 336052 - DNA, 20 bp, Artificial Sequence
  Description of Artificial Sequence: Synthetic oligonucleotide
  Target: LAMA2; (+) strand; PAM type: YTN; PAM sequence: TTC
actgaaatagctcctacttc

SEQ ID NO: 336053 - DNA, 20 bp, Artificial Sequence
  Description of Artificial Sequence: Synthetic oligonucleotide
  Target: LAMA2; (+) strand; PAM type: YTN; PAM sequence: CTG
aaatagctcctacttcttat

SEQ ID NO: 336054 - DNA, 20 bp, Artificial Sequence
  Description of Artificial Sequence: Synthetic oligonucleotide
  Target: LAMA2; (+) strand; PAM type: YTN; PAM sequence: CTC
ctacttcttatattaccttt

SEQ ID NO: 336055 - DNA, 20 bp, Artificial Sequence
  Description of Artificial Sequence: Synthetic oligonucleotide
  Target: LAMA2; (+) strand; PAM type: YTN; PAM sequence: CTA
cttcttatattacctttcga

SEQ ID NO: 336056 - DNA, 20 bp, Artificial Sequence
  Description of Artificial Sequence: Synthetic oligonucleotide
  Target: LAMA2; (+) strand; PAM type: YTN; PAM sequence: CTT
cttatattacctttcgatat

SEQ ID NO: 336057 - DNA, 20 bp, Artificial Sequence
  Description of Artificial Sequence: Synthetic oligonucleotide
  Target: LAMA2; (+) strand; PAM type: YTN; PAM sequence: TTC
ttatattacctttcgatatg

SEQ ID NO: 336058 - DNA, 20 bp, Artificial Sequence
  Description of Artificial Sequence: Synthetic oligonucleotide
  Target: LAMA2; (+) strand; PAM type: YTN; PAM sequence: CTT
atattacctttcgatatgtc

SEQ ID NO: 336059 - DNA, 20 bp, Artificial Sequence
  Description of Artificial Sequence: Synthetic oligonucleotide
  Target: LAMA2; (+) strand; PAM type: YTN; PAM sequence: TTA
tattacctttcgatatgtca

SEQ ID NO: 336060 - DNA, 20 bp, Artificial Sequence
  Description of Artificial Sequence: Synthetic oligonucleotide
  Target: LAMA2; (+) strand; PAM type: YTN; PAM sequence: TTA
cctttcgatatgtcagaaag

SEQ ID NO: 336061 - DNA, 20 bp, Artificial Sequence
  Description of Artificial Sequence: Synthetic oligonucleotide
  Target: LAMA2; (+) strand; PAM type: YTN; PAM sequence: CTT
tcgatatgtcagaaagattc

SEQ ID NO: 336062 - DNA, 20 bp, Artificial Sequence
  Description of Artificial Sequence: Synthetic oligonucleotide
  Target: LAMA2; (+) strand; PAM type: YTN; PAM sequence: TTT
cgatatgtcagaaagattct

SEQ ID NO: 336063 - DNA, 20 bp, Artificial Sequence
  Description of Artificial Sequence: Synthetic oligonucleotide
  Target: LAMA2; (+) strand; PAM type: YTN; PAM sequence: TTC
gatatgtcagaaagattctt

SEQ ID NO: 336064 - DNA, 20 bp, Artificial Sequence
  Description of Artificial Sequence: Synthetic oligonucleotide
  Target: LAMA2; (+) strand; PAM type: YTN; PAM sequence: TTC
tttttctggaagctgttgtt

SEQ ID NO: 336065 - DNA, 20 bp, Artificial Sequence
  Description of Artificial Sequence: Synthetic oligonucleotide
  Target: LAMA2; (+) strand; PAM type: YTN; PAM sequence: CTT
tttctggaagctgttgttct

SEQ ID NO: 336066 - DNA, 20 bp, Artificial Sequence
  Description of Artificial Sequence: Synthetic oligonucleotide
  Target: LAMA2; (+) strand; PAM type: YTN; PAM sequence: TTT
ttctggaagctgttgttctc

SEQ ID NO: 336067 - DNA, 20 bp, Artificial Sequence
  Description of Artificial Sequence: Synthetic oligonucleotide
  Target: LAMA2; (+) strand; PAM type: YTN; PAM sequence: TTT
tctggaagctgttgttctca

SEQ ID NO: 336068 - DNA, 20 bp, Artificial Sequence
  Description of Artificial Sequence: Synthetic oligonucleotide
  Target: LAMA2; (+) strand; PAM type: YTN; PAM sequence: TTT
ctggaagctgttgttctcat

SEQ ID NO: 336069 - DNA, 20 bp, Artificial Sequence
  Description of Artificial Sequence: Synthetic oligonucleotide
  Target: LAMA2; (+) strand; PAM type: YTN; PAM sequence: TTC
tggaagctgttgttctcatc

SEQ ID NO: 336070 - DNA, 20 bp, Artificial Sequence
  Description of Artificial Sequence: Synthetic oligonucleotide
  Target: LAMA2; (+) strand; PAM type: YTN; PAM sequence: CTG
gaagctgttgttctcatcca

SEQ ID NO: 336071 - DNA, 20 bp, Artificial Sequence
  Description of Artificial Sequence: Synthetic oligonucleotide
  Target: LAMA2; (+) strand; PAM type: YTN; PAM sequence: CTG
ttgttctcatccacatcatt

SEQ ID NO: 336072 - DNA, 20 bp, Artificial Sequence
  Description of Artificial Sequence: Synthetic oligonucleotide
  Target: LAMA2; (+) strand; PAM type: YTN; PAM sequence: TTG
ttctcatccacatcattgca

SEQ ID NO: 336073 - DNA, 20 bp, Artificial Sequence
  Description of Artificial Sequence: Synthetic oligonucleotide
  Target: LAMA2; (+) strand; PAM type: YTN; PAM sequence: TTC
tcatccacatcattgcacag

SEQ ID NO: 336074 - DNA, 20 bp, Artificial Sequence
  Description of Artificial Sequence: Synthetic oligonucleotide
  Target: LAMA2; (+) strand; PAM type: YTN; PAM sequence: CTC
atccacatcattgcacaggc

SEQ ID NO: 336075 - DNA, 20 bp, Artificial Sequence
  Description of Artificial Sequence: Synthetic oligonucleotide
  Target: LAMA2; (+) strand; PAM type: YTN; PAM sequence: TTG
cacaggctgacaatcaagac

SEQ ID NO: 336076 - DNA, 20 bp, Artificial Sequence
  Description of Artificial Sequence: Synthetic oligonucleotide
  Target: LAMA2; (+) strand; PAM type: YTN; PAM sequence: CTG
acaatcaagacactatttct

SEQ ID NO: 336077 - DNA, 20 bp, Artificial Sequence
  Description of Artificial Sequence: Synthetic oligonucleotide
  Target: LAMA2; (+) strand; PAM type: YTN; PAM sequence: CTA
tttctcactttctttaaaac

SEQ ID NO: 336078 - DNA, 20 bp, Artificial Sequence
  Description of Artificial Sequence: Synthetic oligonucleotide
  Target: LAMA2; (+) strand; PAM type: YTN; PAM sequence: TTT
ctcactttctttaaaactaa

SEQ ID NO: 336079 - DNA, 20 bp, Artificial Sequence
  Description of Artificial Sequence: Synthetic oligonucleotide
  Target: LAMA2; (+) strand; PAM type: YTN; PAM sequence: TTC
tcactttctttaaaactaaa

SEQ ID NO: 336080 - DNA, 20 bp, Artificial Sequence
  Description of Artificial Sequence: Synthetic oligonucleotide
  Target: LAMA2; (+) strand; PAM type: YTN; PAM sequence: CTC
actttctttaaaactaaatc

SEQ ID NO: 336081 - DNA, 20 bp, Artificial Sequence
  Description of Artificial Sequence: Synthetic oligonucleotide
  Target: LAMA2; (+) strand; PAM type: YTN; PAM sequence: CTT
tctttaaaactaaatcagga

SEQ ID NO: 336082 - DNA, 20 bp, Artificial Sequence
  Description of Artificial Sequence: Synthetic oligonucleotide
  Target: LAMA2; (+) strand; PAM type: YTN; PAM sequence: TTT
ctttaaaactaaatcaggat

SEQ ID NO: 336083 - DNA, 20 bp, Artificial Sequence
  Description of Artificial Sequence: Synthetic oligonucleotide
  Target: LAMA2; (+) strand; PAM type: YTN; PAM sequence: TTC
tttaaaactaaatcaggatt

SEQ ID NO: 336084 - DNA, 20 bp, Artificial Sequence
  Description of Artificial Sequence: Synthetic oligonucleotide
  Target: LAMA2; (+) strand; PAM type: YTN; PAM sequence: CTT
taaaactaaatcaggatttg

SEQ ID NO: 336085 - DNA, 20 bp, Artificial Sequence
  Description of Artificial Sequence: Synthetic oligonucleotide
  Target: LAMA2; (+) strand; PAM type: YTN; PAM sequence: TTT
aaaactaaatcaggatttga

SEQ ID NO: 336086 - DNA, 20 bp, Artificial Sequence
  Description of Artificial Sequence: Synthetic oligonucleotide
  Target: LAMA2; (+) strand; PAM type: YTN; PAM sequence: TTA
aaactaaatcaggatttgag

SEQ ID NO: 336087 - DNA, 20 bp, Artificial Sequence
  Description of Artificial Sequence: Synthetic oligonucleotide
  Target: LAMA2; (+) strand; PAM type: YTN; PAM sequence: CTA
aatcaggatttgagggagtg

SEQ ID NO: 336088 - DNA, 20 bp, Artificial Sequence
  Description of Artificial Sequence: Synthetic oligonucleotide
  Target: LAMA2; (+) strand; PAM type: YTN; PAM sequence: TTT
gagggagtggagggatgact

SEQ ID NO: 336089 - DNA, 20 bp, Artificial Sequence
  Description of Artificial Sequence: Synthetic oligonucleotide
  Target: LAMA2; (+) strand; PAM type: YTN; PAM sequence: TTG
agggagtggagggatgacta

SEQ ID NO: 336090 - DNA, 20 bp, Artificial Sequence
  Description of Artificial Sequence: Synthetic oligonucleotide
  Target: LAMA2; (+) strand; PAM type: YTN; PAM sequence: CTA
ggcagagcaaaaggattttt

SEQ ID NO: 336091 - DNA, 20 bp, Artificial Sequence
  Description of Artificial Sequence: Synthetic oligonucleotide
  Target: LAMA2; (+) strand; PAM type: YTN; PAM sequence: TTT
ttaaggcagtgaaaatactc

SEQ ID NO: 336092 - DNA, 20 bp, Artificial Sequence
  Description of Artificial Sequence: Synthetic oligonucleotide
  Target: LAMA2; (+) strand; PAM type: YTN; PAM sequence: TTT
taaggcagtgaaaatactct

SEQ ID NO: 336093 - DNA, 20 bp, Artificial Sequence
  Description of Artificial Sequence: Synthetic oligonucleotide
  Target: LAMA2; (+) strand; PAM type: YTN; PAM sequence: TTT
aaggcagtgaaaatactctg

SEQ ID NO: 336094 - DNA, 20 bp, Artificial Sequence
  Description of Artificial Sequence: Synthetic oligonucleotide
  Target: LAMA2; (+) strand; PAM type: YTN; PAM sequence: TTA
aggcagtgaaaatactctgt

SEQ ID NO: 336095 - DNA, 20 bp, Artificial Sequence
  Description of Artificial Sequence: Synthetic oligonucleotide
  Target: LAMA2; (+) strand; PAM type: YTN; PAM sequence: CTC
tgtaggatagtataatgatg

SEQ ID NO: 336096 - DNA, 20 bp, Artificial Sequence
  Description of Artificial Sequence: Synthetic oligonucleotide
  Target: LAMA2; (+) strand; PAM type: YTN; PAM sequence: CTG
taggatagtataatgatggg

SEQ ID NO: 336097 - DNA, 20 bp, Artificial Sequence
  Description of Artificial Sequence: Synthetic oligonucleotide
  Target: LAMA2; (+) strand; PAM type: YTN; PAM sequence: CTA
taggctttgggtaattttga

SEQ ID NO: 336098 - DNA, 20 bp, Artificial Sequence
  Description of Artificial Sequence: Synthetic oligonucleotide
  Target: LAMA2; (+) strand; PAM type: YTN; PAM sequence: CTT
tgggtaattttgacgtgtca

SEQ ID NO: 336099 - DNA, 20 bp, Artificial Sequence
  Description of Artificial Sequence: Synthetic oligonucleotide
  Target: LAMA2; (+) strand; PAM type: YTN; PAM sequence: TTT
gggtaattttgacgtgtcaa

SEQ ID NO: 336100 - DNA, 20 bp, Artificial Sequence
  Description of Artificial Sequence: Synthetic oligonucleotide
  Target: LAMA2; (+) strand; PAM type: YTN; PAM sequence: TTG
ggtaattttgacgtgtcaat

SEQ ID NO: 336101 - DNA, 20 bp, Artificial Sequence
  Description of Artificial Sequence: Synthetic oligonucleotide
  Target: LAMA2; (+) strand; PAM type: YTN; PAM sequence: TTT
tgacgtgtcaatgtcatttc

SEQ ID NO: 336102 - DNA, 20 bp, Artificial Sequence
  Description of Artificial Sequence: Synthetic oligonucleotide
  Target: LAMA2; (+) strand; PAM type: YTN; PAM sequence: TTT
gacgtgtcaatgtcatttca

SEQ ID NO: 336103 - DNA, 20 bp, Artificial Sequence
  Description of Artificial Sequence: Synthetic oligonucleotide
  Target: LAMA2; (+) strand; PAM type: YTN; PAM sequence: TTG
acgtgtcaatgtcatttcat

SEQ ID NO: 336104 - DNA, 20 bp, Artificial Sequence
  Description of Artificial Sequence: Synthetic oligonucleotide
  Target: LAMA2; (+) strand; PAM type: YTN; PAM sequence: TTT
catcagtcattacaaatgta

SEQ ID NO: 336105 - DNA, 20 bp, Artificial Sequence
  Description of Artificial Sequence: Synthetic oligonucleotide
  Target: LAMA2; (+) strand; PAM type: YTN; PAM sequence: TTC
atcagtcattacaaatgtac

SEQ ID NO: 336106 - DNA, 20 bp, Artificial Sequence
  Description of Artificial Sequence: Synthetic oligonucleotide
  Target: LAMA2; (+) strand; PAM type: YTN; PAM sequence: TTA
caaatgtactactctactgg

SEQ ID NO: 336107 - DNA, 20 bp, Artificial Sequence
  Description of Artificial Sequence: Synthetic oligonucleotide
  Target: LAMA2; (+) strand; PAM type: YTN; PAM sequence: CTA
ctctactgggggatagtgat

SEQ ID NO: 336108 - DNA, 20 bp, Artificial Sequence
  Description of Artificial Sequence: Synthetic oligonucleotide
  Target: LAMA2; (+) strand; PAM type: YTN; PAM sequence: CTC
tactgggggatagtgataat

SEQ ID NO: 336109 - DNA, 20 bp, Artificial Sequence
  Description of Artificial Sequence: Synthetic oligonucleotide
  Target: LAMA2; (+) strand; PAM type: YTN; PAM sequence: CTA
ctgggggatagtgataatag

SEQ ID NO: 336110 - DNA, 20 bp, Artificial Sequence
  Description of Artificial Sequence: Synthetic oligonucleotide
  Target: LAMA2; (+) strand; PAM type: YTN; PAM sequence: CTG
ggggatagtgataatagggg

SEQ ID NO: 336111 - DNA, 20 bp, Artificial Sequence
  Description of Artificial Sequence: Synthetic oligonucleotide
  Target: LAMA2; (+) strand; PAM type: YTN; PAM sequence: TTA
tatgtttatgggggcagtga

SEQ ID NO: 336112 - DNA, 20 bp, Artificial Sequence
  Description of Artificial Sequence: Synthetic oligonucleotide
  Target: LAMA2; (+) strand; PAM type: YTN; PAM sequence: TTT
atgggggcagtgagcgtatg

SEQ ID NO: 336113 - DNA, 20 bp, Artificial Sequence
  Description of Artificial Sequence: Synthetic oligonucleotide
  Target: LAMA2; (+) strand; PAM type: YTN; PAM sequence: TTA
tgggggcagtgagcgtatgg

SEQ ID NO: 336114 - DNA, 20 bp, Artificial Sequence
  Description of Artificial Sequence: Synthetic oligonucleotide
  Target: LAMA2; (+) strand; PAM type: YTN; PAM sequence: CTC
tgtatttttttttttttctt

SEQ ID NO: 336115 - DNA, 20 bp, Artificial Sequence
  Description of Artificial Sequence: Synthetic oligonucleotide
  Target: LAMA2; (+) strand; PAM type: YTN; PAM sequence: CTG
tatttttttttttttctttt

SEQ ID NO: 336116 - DNA, 20 bp, Artificial Sequence
  Description of Artificial Sequence: Synthetic oligonucleotide
  Target: LAMA2; (+) strand; PAM type: YTN; PAM sequence: TTT
ttttttttttcttttttgag

SEQ ID NO: 336117 - DNA, 20 bp, Artificial Sequence
  Description of Artificial Sequence: Synthetic oligonucleotide
  Target: LAMA2; (+) strand; PAM type: YTN; PAM sequence: TTT
tttttttttcttttttgaga

SEQ ID NO: 336118 - DNA, 20 bp, Artificial Sequence
  Description of Artificial Sequence: Synthetic oligonucleotide
  Target: LAMA2; (+) strand; PAM type: YTN; PAM sequence: TTT
ttttttttcttttttgagac

SEQ ID NO: 336119 - DNA, 20 bp, Artificial Sequence
  Description of Artificial Sequence: Synthetic oligonucleotide
  Target: LAMA2; (+) strand; PAM type: YTN; PAM sequence: TTT
tttttttcttttttgagaca

SEQ ID NO: 336120 - DNA, 20 bp, Artificial Sequence
  Description of Artificial Sequence: Synthetic oligonucleotide
  Target: LAMA2; (+) strand; PAM type: YTN; PAM sequence: TTT
ttttttcttttttgagacaa

SEQ ID NO: 336121 - DNA, 20 bp, Artificial Sequence
  Description of Artificial Sequence: Synthetic oligonucleotide
  Target: LAMA2; (+) strand; PAM type: YTN; PAM sequence: TTT
tttttcttttttgagacaaa

SEQ ID NO: 336122 - DNA, 20 bp, Artificial Sequence
  Description of Artificial Sequence: Synthetic oligonucleotide
  Target: LAMA2; (+) strand; PAM type: YTN; PAM sequence: TTT
ttttcttttttgagacaaag

SEQ ID NO: 336123 - DNA, 20 bp, Artificial Sequence
  Description of Artificial Sequence: Synthetic oligonucleotide
  Target: LAMA2; (+) strand; PAM type: YTN; PAM sequence: TTT
tttcttttttgagacaaagt

SEQ ID NO: 336124 - DNA, 20 bp, Artificial Sequence
  Description of Artificial Sequence: Synthetic oligonucleotide
  Target: LAMA2; (+) strand; PAM type: YTN; PAM sequence: TTT
ttcttttttgagacaaagtc

SEQ ID NO: 336125 - DNA, 20 bp, Artificial Sequence
  Description of Artificial Sequence: Synthetic oligonucleotide
  Target: LAMA2; (+) strand; PAM type: YTN; PAM sequence: TTT
tcttttttgagacaaagtct

SEQ ID NO: 336126 - DNA, 20 bp, Artificial Sequence
  Description of Artificial Sequence: Synthetic oligonucleotide
  Target: LAMA2; (+) strand; PAM type: YTN; PAM sequence: TTT
cttttttgagacaaagtctt

SEQ ID NO: 336127 - DNA, 20 bp, Artificial Sequence
  Description of Artificial Sequence: Synthetic oligonucleotide
  Target: LAMA2; (+) strand; PAM type: YTN; PAM sequence: TTC
ttttttgagacaaagtcttg

SEQ ID NO: 336128 - DNA, 20 bp, Artificial Sequence
  Description of Artificial Sequence: Synthetic oligonucleotide
  Target: LAMA2; (+) strand; PAM type: YTN; PAM sequence: CTT
ttttgagacaaagtcttgct

SEQ ID NO: 336129 - DNA, 20 bp, Artificial Sequence
  Description of Artificial Sequence: Synthetic oligonucleotide
  Target: LAMA2; (+) strand; PAM type: YTN; PAM sequence: TTT
tttgagacaaagtcttgctg

SEQ ID NO: 336130 - DNA, 20 bp, Artificial Sequence
  Description of Artificial Sequence: Synthetic oligonucleotide
  Target: LAMA2; (+) strand; PAM type: YTN; PAM sequence: TTT
ttgagacaaagtcttgctgt

SEQ ID NO: 336131 - DNA, 20 bp, Artificial Sequence
  Description of Artificial Sequence: Synthetic oligonucleotide
  Target: LAMA2; (+) strand; PAM type: YTN; PAM sequence: TTT
tgagacaaagtcttgctgtg

SEQ ID NO: 336132 - DNA, 20 bp, Artificial Sequence
  Description of Artificial Sequence: Synthetic oligonucleotide
  Target: LAMA2; (+) strand; PAM type: YTN; PAM sequence: TTT
gagacaaagtcttgctgtgt

SEQ ID NO: 336133 - DNA, 20 bp, Artificial Sequence
  Description of Artificial Sequence: Synthetic oligonucleotide
  Target: LAMA2; (+) strand; PAM type: YTN; PAM sequence: TTG
agacaaagtcttgctgtgtc

SEQ ID NO: 336134 - DNA, 20 bp, Artificial Sequence
  Description of Artificial Sequence: Synthetic oligonucleotide
  Target: LAMA2; (+) strand; PAM type: YTN; PAM sequence: CTT
gctgtgtcgctcagactgga

SEQ ID NO: 336135 - DNA, 20 bp, Artificial Sequence
  Description of Artificial Sequence: Synthetic oligonucleotide
  Target: LAMA2; (+) strand; PAM type: YTN; PAM sequence: TTG
ctgtgtcgctcagactggag

SEQ ID NO: 336136 - DNA, 20 bp, Artificial Sequence
  Description of Artificial Sequence: Synthetic oligonucleotide
  Target: LAMA2; (+) strand; PAM type: YTN; PAM sequence: CTG
tgtcgctcagactggagtgc

SEQ ID NO: 336137 - DNA, 20 bp, Artificial Sequence
  Description of Artificial Sequence: Synthetic oligonucleotide
  Target: LAMA2; (+) strand; PAM type: YTN; PAM sequence: CTC
agactggagtgcagtggcac

SEQ ID NO: 336138 - DNA, 20 bp, Artificial Sequence
  Description of Artificial Sequence: Synthetic oligonucleotide
  Target: LAMA2; (+) strand; PAM type: YTN; PAM sequence: CTG
gagtgcagtggcacaatgtc

SEQ ID NO: 336139 - DNA, 20 bp, Artificial Sequence
  Description of Artificial Sequence: Synthetic oligonucleotide
  Target: LAMA2; (+) strand; PAM type: YTN; PAM sequence: CTC
actgcagcctccgcctctag

SEQ ID NO: 336140 - DNA, 20 bp, Artificial Sequence
  Description of Artificial Sequence: Synthetic oligonucleotide
  Target: LAMA2; (+) strand; PAM type: YTN; PAM sequence: CTG
cagcctccgcctctagcatt

SEQ ID NO: 336141 - DNA, 20 bp, Artificial Sequence
  Description of Artificial Sequence: Synthetic oligonucleotide
  Target: LAMA2; (+) strand; PAM type: YTN; PAM sequence: CTC
cgcctctagcattcaagcga

SEQ ID NO: 336142 - DNA, 20 bp, Artificial Sequence
  Description of Artificial Sequence: Synthetic oligonucleotide
  Target: LAMA2; (+) strand; PAM type: YTN; PAM sequence: CTC
tagcattcaagcgattctcc

SEQ ID NO: 336143 - DNA, 20 bp, Artificial Sequence
  Description of Artificial Sequence: Synthetic oligonucleotide
  Target: LAMA2; (+) strand; PAM type: YTN; PAM sequence: CTA
gcattcaagcgattctcctg

SEQ ID NO: 336144 - DNA, 20 bp, Artificial Sequence
  Description of Artificial Sequence: Synthetic oligonucleotide
  Target: LAMA2; (+) strand; PAM type: YTN; PAM sequence: TTC
aagcgattctcctgcctcgg

SEQ ID NO: 336145 - DNA, 20 bp, Artificial Sequence
  Description of Artificial Sequence: Synthetic oligonucleotide
  Target: LAMA2; (+) strand; PAM type: YTN; PAM sequence: TTC
tcctgcctcggcttcctgag

SEQ ID NO: 336146 - DNA, 20 bp, Artificial Sequence
  Description of Artificial Sequence: Synthetic oligonucleotide
  Target: LAMA2; (+) strand; PAM type: YTN; PAM sequence: CTC
ctgcctcggcttcctgagta

SEQ ID NO: 336147 - DNA, 20 bp, Artificial Sequence
  Description of Artificial Sequence: Synthetic oligonucleotide
  Target: LAMA2; (+) strand; PAM type: YTN; PAM sequence: CTG
cctcggcttcctgagtacct

SEQ ID NO: 336148 - DNA, 20 bp, Artificial Sequence
  Description of Artificial Sequence: Synthetic oligonucleotide
  Target: LAMA2; (+) strand; PAM type: YTN; PAM sequence: CTC
ggcttcctgagtacctggaa

SEQ ID NO: 336149 - DNA, 20 bp, Artificial Sequence
  Description of Artificial Sequence: Synthetic oligonucleotide
  Target: LAMA2; (+) strand; PAM type: YTN; PAM sequence: CTT
cctgagtacctggaactaca

SEQ ID NO: 336150 - DNA, 20 bp, Artificial Sequence
  Description of Artificial Sequence: Synthetic oligonucleotide
  Target: LAMA2; (+) strand; PAM type: YTN; PAM sequence: TTC
ctgagtacctggaactacag

SEQ ID NO: 336151 - DNA, 20 bp, Artificial Sequence
  Description of Artificial Sequence: Synthetic oligonucleotide
  Target: LAMA2; (+) strand; PAM type: YTN; PAM sequence: CTG
agtacctggaactacaggtg

SEQ ID NO: 336152 - DNA, 20 bp, Artificial Sequence
  Description of Artificial Sequence: Synthetic oligonucleotide
  Target: LAMA2; (+) strand; PAM type: YTN; PAM sequence: CTG
gaactacaggtgcgcgccac

SEQ ID NO: 336153 - DNA, 20 bp, Artificial Sequence
  Description of Artificial Sequence: Synthetic oligonucleotide
  Target: LAMA2; (+) strand; PAM type: YTN; PAM sequence: CTA
caggtgcgcgccactatacc

SEQ ID NO: 336154 - DNA, 20 bp, Artificial Sequence
  Description of Artificial Sequence: Synthetic oligonucleotide
  Target: LAMA2; (+) strand; PAM type: YTN; PAM sequence: CTA
taccccgctaatttttgtgt

SEQ ID NO: 336155 - DNA, 20 bp, Artificial Sequence
  Description of Artificial Sequence: Synthetic oligonucleotide
  Target: LAMA2; (+) strand; PAM type: YTN; PAM sequence: CTA
atttttgtgtttttagtaga

SEQ ID NO: 336156 - DNA, 20 bp, Artificial Sequence
  Description of Artificial Sequence: Synthetic oligonucleotide
  Target: LAMA2; (+) strand; PAM type: YTN; PAM sequence: TTT
ttgtgtttttagtagagaca

SEQ ID NO: 336157 - DNA, 20 bp, Artificial Sequence
  Description of Artificial Sequence: Synthetic oligonucleotide
  Target: LAMA2; (+) strand; PAM type: YTN; PAM sequence: TTT
tgtgtttttagtagagacaa

SEQ ID NO: 336158 - DNA, 20 bp, Artificial Sequence
  Description of Artificial Sequence: Synthetic oligonucleotide
  Target: LAMA2; (+) strand; PAM type: YTN; PAM sequence: TTT
gtgtttttagtagagacaag

SEQ ID NO: 336159 - DNA, 20 bp, Artificial Sequence
  Description of Artificial Sequence: Synthetic oligonucleotide
  Target: LAMA2; (+) strand; PAM type: YTN; PAM sequence: TTG
tgtttttagtagagacaagg

SEQ ID NO: 336160 - DNA, 20 bp, Artificial Sequence
  Description of Artificial Sequence: Synthetic oligonucleotide
  Target: LAMA2; (+) strand; PAM type: YTN; PAM sequence: TTT
ttagtagagacaaggtttca

SEQ ID NO: 336161 - DNA, 20 bp, Artificial Sequence
  Description of Artificial Sequence: Synthetic oligonucleotide
  Target: LAMA2; (+) strand; PAM type: YTN; PAM sequence: TTT
tagtagagacaaggtttcac

SEQ ID NO: 336162 - DNA, 20 bp, Artificial Sequence
  Description of Artificial Sequence: Synthetic oligonucleotide
  Target: LAMA2; (+) strand; PAM type: YTN; PAM sequence: TTT
agtagagacaaggtttcacc

SEQ ID NO: 336163 - DNA, 20 bp, Artificial Sequence
  Description of Artificial Sequence: Synthetic oligonucleotide
  Target: LAMA2; (+) strand; PAM type: YTN; PAM sequence: TTA
gtagagacaaggtttcacca

SEQ ID NO: 336164 - DNA, 20 bp, Artificial Sequence
  Description of Artificial Sequence: Synthetic oligonucleotide
  Target: LAMA2; (+) strand; PAM type: YTN; PAM sequence: TTT
caccatgttgcccaggctgg

SEQ ID NO: 336165 - DNA, 20 bp, Artificial Sequence
  Description of Artificial Sequence: Synthetic oligonucleotide
  Target: LAMA2; (+) strand; PAM type: YTN; PAM sequence: TTC
accatgttgcccaggctggt

SEQ ID NO: 336166 - DNA, 20 bp, Artificial Sequence
  Description of Artificial Sequence: Synthetic oligonucleotide
  Target: LAMA2; (+) strand; PAM type: YTN; PAM sequence: TTG
cccaggctggtcttgaactc

SEQ ID NO: 336167 - DNA, 20 bp, Artificial Sequence
  Description of Artificial Sequence: Synthetic oligonucleotide
  Target: LAMA2; (+) strand; PAM type: YTN; PAM sequence: CTG
gtcttgaactcctgacctta

SEQ ID NO: 336168 - DNA, 20 bp, Artificial Sequence
  Description of Artificial Sequence: Synthetic oligonucleotide
  Target: LAMA2; (+) strand; PAM type: YTN; PAM sequence: CTT
gaactcctgaccttaagtgg

SEQ ID NO: 336169 - DNA, 20 bp, Artificial Sequence
  Description of Artificial Sequence: Synthetic oligonucleotide
  Target: LAMA2; (+) strand; PAM type: YTN; PAM sequence: TTG
aactcctgaccttaagtggt

SEQ ID NO: 336170 - DNA, 20 bp, Artificial Sequence
  Description of Artificial Sequence: Synthetic oligonucleotide
  Target: LAMA2; (+) strand; PAM type: YTN; PAM sequence: CTC
ctgaccttaagtggtctgcc

SEQ ID NO: 336171 - DNA, 20 bp, Artificial Sequence
  Description of Artificial Sequence: Synthetic oligonucleotide
  Target: LAMA2; (+) strand; PAM type: YTN; PAM sequence: CTG
accttaagtggtctgcccat

SEQ ID NO: 336172 - DNA, 20 bp, Artificial Sequence
  Description of Artificial Sequence: Synthetic oligonucleotide
  Target: LAMA2; (+) strand; PAM type: YTN; PAM sequence: CTT
aagtggtctgcccatgtcag

SEQ ID NO: 336173 - DNA, 20 bp, Artificial Sequence
  Description of Artificial Sequence: Synthetic oligonucleotide
  Target: LAMA2; (+) strand; PAM type: YTN; PAM sequence: TTA
agtggtctgcccatgtcagc

SEQ ID NO: 336174 - DNA, 20 bp, Artificial Sequence
  Description of Artificial Sequence: Synthetic oligonucleotide
  Target: LAMA2; (+) strand; PAM type: YTN; PAM sequence: CTG
cccatgtcagcctcccaaag

SEQ ID NO: 336175 - DNA, 20 bp, Artificial Sequence
  Description of Artificial Sequence: Synthetic oligonucleotide
  Target: LAMA2; (+) strand; PAM type: YTN; PAM sequence: CTC
ccaaagtgctaggattacag

SEQ ID NO: 336176 - DNA, 20 bp, Artificial Sequence
  Description of Artificial Sequence: Synthetic oligonucleotide
  Target: LAMA2; (+) strand; PAM type: YTN; PAM sequence: CTA
ggattacaggtatgagccac

SEQ ID NO: 336177 - DNA, 20 bp, Artificial Sequence
  Description of Artificial Sequence: Synthetic oligonucleotide
  Target: LAMA2; (+) strand; PAM type: YTN; PAM sequence: TTA
caggtatgagccactgcacc

SEQ ID NO: 336178 - DNA, 20 bp, Artificial Sequence
  Description of Artificial Sequence: Synthetic oligonucleotide
  Target: LAMA2; (+) strand; PAM type: YTN; PAM sequence: CTG
cacctggccaaaatctctgt

SEQ ID NO: 336179 - DNA, 20 bp, Artificial Sequence
  Description of Artificial Sequence: Synthetic oligonucleotide
  Target: LAMA2; (+) strand; PAM type: YTN; PAM sequence: CTG
gccaaaatctctgtatcttc

SEQ ID NO: 336180 - DNA, 20 bp, Artificial Sequence
  Description of Artificial Sequence: Synthetic oligonucleotide
  Target: LAMA2; (+) strand; PAM type: YTN; PAM sequence: CTC
tgtatcttcctttcaatttt

SEQ ID NO: 336181 - DNA, 20 bp, Artificial Sequence
  Description of Artificial Sequence: Synthetic oligonucleotide
  Target: LAMA2; (+) strand; PAM type: YTN; PAM sequence: CTG
tatcttcctttcaattttgc

SEQ ID NO: 336182 - DNA, 20 bp, Artificial Sequence
  Description of Artificial Sequence: Synthetic oligonucleotide
  Target: LAMA2; (+) strand; PAM type: YTN; PAM sequence: CTT
cctttcaattttgctttgaa

SEQ ID NO: 336183 - DNA, 20 bp, Artificial Sequence
  Description of Artificial Sequence: Synthetic oligonucleotide
  Target: LAMA2; (+) strand; PAM type: YTN; PAM sequence: TTC
ctttcaattttgctttgaac

SEQ ID NO: 336184 - DNA, 20 bp, Artificial Sequence
  Description of Artificial Sequence: Synthetic oligonucleotide
  Target: LAMA2; (+) strand; PAM type: YTN; PAM sequence: CTT
tcaattttgctttgaaccta

SEQ ID NO: 336185 - DNA, 20 bp, Artificial Sequence
  Description of Artificial Sequence: Synthetic oligonucleotide
  Target: LAMA2; (+) strand; PAM type: YTN; PAM sequence: TTT
caattttgctttgaacctaa

SEQ ID NO: 336186 - DNA, 20 bp, Artificial Sequence
  Description of Artificial Sequence: Synthetic oligonucleotide
  Target: LAMA2; (+) strand; PAM type: YTN; PAM sequence: TTC
aattttgctttgaacctaaa

SEQ ID NO: 336187 - DNA, 20 bp, Artificial Sequence
  Description of Artificial Sequence: Synthetic oligonucleotide
  Target: LAMA2; (+) strand; PAM type: YTN; PAM sequence: TTT
tgctttgaacctaaaattct

SEQ ID NO: 336188 - DNA, 20 bp, Artificial Sequence
  Description of Artificial Sequence: Synthetic oligonucleotide
  Target: LAMA2; (+) strand; PAM type: YTN; PAM sequence: TTT
gctttgaacctaaaattctc

SEQ ID NO: 336189 - DNA, 20 bp, Artificial Sequence
  Description of Artificial Sequence: Synthetic oligonucleotide
  Target: LAMA2; (+) strand; PAM type: YTN; PAM sequence: TTG
ctttgaacctaaaattctcc

SEQ ID NO: 336190 - DNA, 20 bp, Artificial Sequence
  Description of Artificial Sequence: Synthetic oligonucleotide
  Target: LAMA2; (+) strand; PAM type: YTN; PAM sequence: CTT
tgaacctaaaattctcccta

SEQ ID NO: 336191 - DNA, 20 bp, Artificial Sequence
  Description of Artificial Sequence: Synthetic oligonucleotide
  Target: LAMA2; (+) strand; PAM type: YTN; PAM sequence: TTT
gaacctaaaattctccctaa

SEQ ID NO: 336192 - DNA, 20 bp, Artificial Sequence
  Description of Artificial Sequence: Synthetic oligonucleotide
  Target: LAMA2; (+) strand; PAM type: YTN; PAM sequence: TTG
aacctaaaattctccctaaa

SEQ ID NO: 336193 - DNA, 20 bp, Artificial Sequence
  Description of Artificial Sequence: Synthetic oligonucleotide
  Target: LAMA2; (+) strand; PAM type: YTN; PAM sequence: CTA
aaattctccctaaaaaataa

SEQ ID NO: 336194 - DNA, 20 bp, Artificial Sequence
  Description of Artificial Sequence: Synthetic oligonucleotide
  Target: LAMA2; (+) strand; PAM type: YTN; PAM sequence: TTC
tccctaaaaaataaaatatt

SEQ ID NO: 336195 - DNA, 20 bp, Artificial Sequence
  Description of Artificial Sequence: Synthetic oligonucleotide
  Target: LAMA2; (+) strand; PAM type: YTN; PAM sequence: CTC
cctaaaaaataaaatattaa

SEQ ID NO: 336196 - DNA, 20 bp, Artificial Sequence
  Description of Artificial Sequence: Synthetic oligonucleotide
  Target: LAMA2; (+) strand; PAM type: YTN; PAM sequence: CTA
aaaaataaaatattaaaaaa

SEQ ID NO: 336197 - DNA, 20 bp, Artificial Sequence
  Description of Artificial Sequence: Synthetic oligonucleotide
  Target: LAMA2; (+) strand; PAM type: YTN; PAM sequence: TTA
aaaaataaaagaaactctat

SEQ ID NO: 336198 - DNA, 20 bp, Artificial Sequence
  Description of Artificial Sequence: Synthetic oligonucleotide
  Target: LAMA2; (+) strand; PAM type: YTN; PAM sequence: CTC
tatgtaccctactgactctt

SEQ ID NO: 336199 - DNA, 20 bp, Artificial Sequence
  Description of Artificial Sequence: Synthetic oligonucleotide
  Target: LAMA2; (+) strand; PAM type: YTN; PAM sequence: CTA
tgtaccctactgactctttg

SEQ ID NO: 336200 - DNA, 20 bp, Artificial Sequence
  Description of Artificial Sequence: Synthetic oligonucleotide
  Target: LAMA2; (+) strand; PAM type: YTN; PAM sequence: CTA
ctgactctttgtcaaagatt

SEQ ID NO: 336201 - DNA, 20 bp, Artificial Sequence
  Description of Artificial Sequence: Synthetic oligonucleotide
  Target: LAMA2; (+) strand; PAM type: YTN; PAM sequence: CTG
actctttgtcaaagattatc

SEQ ID NO: 336202 - DNA, 20 bp, Artificial Sequence
  Description of Artificial Sequence: Synthetic oligonucleotide
  Target: LAMA2; (+) strand; PAM type: YTN; PAM sequence: CTC
tttgtcaaagattatctatt

SEQ ID NO: 336203 - DNA, 20 bp, Artificial Sequence
  Description of Artificial Sequence: Synthetic oligonucleotide
  Target: LAMA2; (+) strand; PAM type: YTN; PAM sequence: CTT
tgtcaaagattatctatttt

SEQ ID NO: 336204 - DNA, 20 bp, Artificial Sequence
  Description of Artificial Sequence: Synthetic oligonucleotide
  Target: LAMA2; (+) strand; PAM type: YTN; PAM sequence: TTT
gtcaaagattatctattttt

SEQ ID NO: 336205 - DNA, 20 bp, Artificial Sequence
  Description of Artificial Sequence: Synthetic oligonucleotide
  Target: LAMA2; (+) strand; PAM type: YTN; PAM sequence: TTG
tcaaagattatctatttttt

SEQ ID NO: 336206 - DNA, 20 bp, Artificial Sequence
  Description of Artificial Sequence: Synthetic oligonucleotide
  Target: LAMA2; (+) strand; PAM type: YTN; PAM sequence: TTA
tctattttttttctcaactc

SEQ ID NO: 336207 - DNA, 20 bp, Artificial Sequence
  Description of Artificial Sequence: Synthetic oligonucleotide
  Target: LAMA2; (+) strand; PAM type: YTN; PAM sequence: CTA
ttttttttctcaactcatgc

SEQ ID NO: 336208 - DNA, 20 bp, Artificial Sequence
  Description of Artificial Sequence: Synthetic oligonucleotide
  Target: LAMA2; (+) strand; PAM type: YTN; PAM sequence: TTT
tttttctcaactcatgcaat

SEQ ID NO: 336209 - DNA, 20 bp, Artificial Sequence
  Description of Artificial Sequence: Synthetic oligonucleotide
  Target: LAMA2; (+) strand; PAM type: YTN; PAM sequence: TTT
ttttctcaactcatgcaatg

SEQ ID NO: 336210 - DNA, 20 bp, Artificial Sequence
  Description of Artificial Sequence: Synthetic oligonucleotide
  Target: LAMA2; (+) strand; PAM type: YTN; PAM sequence: TTT
tttctcaactcatgcaatgt

SEQ ID NO: 336211 - DNA, 20 bp, Artificial Sequence
  Description of Artificial Sequence: Synthetic oligonucleotide
  Target: LAMA2; (+) strand; PAM type: YTN; PAM sequence: TTT
ttctcaactcatgcaatgtt

SEQ ID NO: 336212 - DNA, 20 bp, Artificial Sequence
  Description of Artificial Sequence: Synthetic oligonucleotide
  Target: LAMA2; (+) strand; PAM type: YTN; PAM sequence: TTT
tctcaactcatgcaatgttt

SEQ ID NO: 336213 - DNA, 20 bp, Artificial Sequence
  Description of Artificial Sequence: Synthetic oligonucleotide
  Target: LAMA2; (+) strand; PAM type: YTN; PAM sequence: TTT
ctcaactcatgcaatgttta

SEQ ID NO: 336214 - DNA, 20 bp, Artificial Sequence
  Description of Artificial Sequence: Synthetic oligonucleotide
  Target: LAMA2; (+) strand; PAM type: YTN; PAM sequence: TTC
tcaactcatgcaatgtttaa

SEQ ID NO: 336215 - DNA, 20 bp, Artificial Sequence
  Description of Artificial Sequence: Synthetic oligonucleotide
  Target: LAMA2; (+) strand; PAM type: YTN; PAM sequence: CTC
aactcatgcaatgtttaaca

SEQ ID NO: 336216 - DNA, 20 bp, Artificial Sequence
  Description of Artificial Sequence: Synthetic oligonucleotide
  Target: LAMA2; (+) strand; PAM type: YTN; PAM sequence: CTC
atgcaatgtttaacactttg

SEQ ID NO: 336217 - DNA, 20 bp, Artificial Sequence
  Description of Artificial Sequence: Synthetic oligonucleotide
  Target: LAMA2; (+) strand; PAM type: YTN; PAM sequence: TTT
aacactttggaccatattat

SEQ ID NO: 336218 - DNA, 20 bp, Artificial Sequence
  Description of Artificial Sequence: Synthetic oligonucleotide
  Target: LAMA2; (+) strand; PAM type: YTN; PAM sequence: TTA
acactttggaccatattatc

SEQ ID NO: 336219 - DNA, 20 bp, Artificial Sequence
  Description of Artificial Sequence: Synthetic oligonucleotide
  Target: LAMA2; (+) strand; PAM type: YTN; PAM sequence: CTT
tggaccatattatcacttat

SEQ ID NO: 336220 - DNA, 20 bp, Artificial Sequence
  Description of Artificial Sequence: Synthetic oligonucleotide
  Target: LAMA2; (+) strand; PAM type: YTN; PAM sequence: TTT
ggaccatattatcacttatg

SEQ ID NO: 336221 - DNA, 20 bp, Artificial Sequence
  Description of Artificial Sequence: Synthetic oligonucleotide
  Target: LAMA2; (+) strand; PAM type: YTN; PAM sequence: TTG
gaccatattatcacttatgg

SEQ ID NO: 336222 - DNA, 20 bp, Artificial Sequence
  Description of Artificial Sequence: Synthetic oligonucleotide
  Target: LAMA2; (+) strand; PAM type: YTN; PAM sequence: TTA
tcacttatggttagcctctt

SEQ ID NO: 336223 - DNA, 20 bp, Artificial Sequence
  Description of Artificial Sequence: Synthetic oligonucleotide
  Target: LAMA2; (+) strand; PAM type: YTN; PAM sequence: CTT
atggttagcctcttataata

SEQ ID NO: 336224 - DNA, 20 bp, Artificial Sequence
  Description of Artificial Sequence: Synthetic oligonucleotide
  Target: LAMA2; (+) strand; PAM type: YTN; PAM sequence: TTA
tggttagcctcttataatat

SEQ ID NO: 336225 - DNA, 20 bp, Artificial Sequence
  Description of Artificial Sequence: Synthetic oligonucleotide
  Target: LAMA2; (+) strand; PAM type: YTN; PAM sequence: TTA
gcctcttataatatggtatg

SEQ ID NO: 336226 - DNA, 20 bp, Artificial Sequence
  Description of Artificial Sequence: Synthetic oligonucleotide
  Target: LAMA2; (+) strand; PAM type: YTN; PAM sequence: CTC
ttataatatggtatggctat

SEQ ID NO: 336227 - DNA, 20 bp, Artificial Sequence
  Description of Artificial Sequence: Synthetic oligonucleotide
  Target: LAMA2; (+) strand; PAM type: YTN; PAM sequence: CTT
ataatatggtatggctattt

SEQ ID NO: 336228 - DNA, 20 bp, Artificial Sequence
  Description of Artificial Sequence: Synthetic oligonucleotide
  Target: LAMA2; (+) strand; PAM type: YTN; PAM sequence: TTA
taatatggtatggctatttt

SEQ ID NO: 336229 - DNA, 20 bp, Artificial Sequence
  Description of Artificial Sequence: Synthetic oligonucleotide
  Target: LAMA2; (+) strand; PAM type: YTN; PAM sequence: CTA
tttttttaaaaagtcatggt

SEQ ID NO: 336230 - DNA, 20 bp, Artificial Sequence
  Description of Artificial Sequence: Synthetic oligonucleotide
  Target: LAMA2; (+) strand; PAM type: YTN; PAM sequence: TTT
ttttaaaaagtcatggtaaa

SEQ ID NO: 336231 - DNA, 20 bp, Artificial Sequence
  Description of Artificial Sequence: Synthetic oligonucleotide
  Target: LAMA2; (+) strand; PAM type: YTN; PAM sequence: TTT
tttaaaaagtcatggtaaaa

SEQ ID NO: 336232 - DNA, 20 bp, Artificial Sequence
  Description of Artificial Sequence: Synthetic oligonucleotide
  Target: LAMA2; (+) strand; PAM type: YTN; PAM sequence: TTT
ttaaaaagtcatggtaaaat

SEQ ID NO: 336233 - DNA, 20 bp, Artificial Sequence
  Description of Artificial Sequence: Synthetic oligonucleotide
  Target: LAMA2; (+) strand; PAM type: YTN; PAM sequence: TTT
taaaaagtcatggtaaaatg

SEQ ID NO: 336234 - DNA, 20 bp, Artificial Sequence
  Description of Artificial Sequence: Synthetic oligonucleotide
  Target: LAMA2; (+) strand; PAM type: YTN; PAM sequence: TTT
aaaaagtcatggtaaaatga

SEQ ID NO: 336235 - DNA, 20 bp, Artificial Sequence
  Description of Artificial Sequence: Synthetic oligonucleotide
  Target: LAMA2; (+) strand; PAM type: YTN; PAM sequence: TTA
aaaagtcatggtaaaatgac

SEQ ID NO: 336236 - DNA, 20 bp, Artificial Sequence
  Description of Artificial Sequence: Synthetic oligonucleotide
  Target: LAMA2; (+) strand; PAM type: YTN; PAM sequence: TTT
tttatcttagccacttttaa

SEQ ID NO: 336237 - DNA, 20 bp, Artificial Sequence
  Description of Artificial Sequence: Synthetic oligonucleotide
  Target: LAMA2; (+) strand; PAM type: YTN; PAM sequence: TTT
ttatcttagccacttttaag

SEQ ID NO: 336238 - DNA, 20 bp, Artificial Sequence
  Description of Artificial Sequence: Synthetic oligonucleotide
  Target: LAMA2; (+) strand; PAM type: YTN; PAM sequence: TTT
tatcttagccacttttaagt

SEQ ID NO: 336239 - DNA, 20 bp, Artificial Sequence
  Description of Artificial Sequence: Synthetic oligonucleotide
  Target: LAMA2; (+) strand; PAM type: YTN; PAM sequence: TTT
atcttagccacttttaagtg

SEQ ID NO: 336240 - DNA, 20 bp, Artificial Sequence
  Description of Artificial Sequence: Synthetic oligonucleotide
  Target: LAMA2; (+) strand; PAM type: YTN; PAM sequence: TTA
tcttagccacttttaagtgt

SEQ ID NO: 336241 - DNA, 20 bp, Artificial Sequence
  Description of Artificial Sequence: Synthetic oligonucleotide
  Target: LAMA2; (+) strand; PAM type: YTN; PAM sequence: CTT
agccacttttaagtgtacat

SEQ ID NO: 336242 - DNA, 20 bp, Artificial Sequence
  Description of Artificial Sequence: Synthetic oligonucleotide
  Target: LAMA2; (+) strand; PAM type: YTN; PAM sequence: TTA
gccacttttaagtgtacatt

SEQ ID NO: 336243 - DNA, 20 bp, Artificial Sequence
  Description of Artificial Sequence: Synthetic oligonucleotide
  Target: LAMA2; (+) strand; PAM type: YTN; PAM sequence: CTT
ttaagtgtacattgttgtgc

SEQ ID NO: 336244 - DNA, 20 bp, Artificial Sequence
  Description of Artificial Sequence: Synthetic oligonucleotide
  Target: LAMA2; (+) strand; PAM type: YTN; PAM sequence: TTT
taagtgtacattgttgtgca

SEQ ID NO: 336245 - DNA, 20 bp, Artificial Sequence
  Description of Artificial Sequence: Synthetic oligonucleotide
  Target: LAMA2; (+) strand; PAM type: YTN; PAM sequence: TTT
aagtgtacattgttgtgcaa

SEQ ID NO: 336246 - DNA, 20 bp, Artificial Sequence
  Description of Artificial Sequence: Synthetic oligonucleotide
  Target: LAMA2; (+) strand; PAM type: YTN; PAM sequence: TTA
agtgtacattgttgtgcaac

SEQ ID NO: 336247 - DNA, 20 bp, Artificial Sequence
  Description of Artificial Sequence: Synthetic oligonucleotide
  Target: LAMA2; (+) strand; PAM type: YTN; PAM sequence: TTG
ttgtgcaaccatcatcacca

SEQ ID NO: 336248 - DNA, 20 bp, Artificial Sequence
  Description of Artificial Sequence: Synthetic oligonucleotide
  Target: LAMA2; (+) strand; PAM type: YTN; PAM sequence: TTG
tgcaaccatcatcaccattc

SEQ ID NO: 336249 - DNA, 20 bp, Artificial Sequence
  Description of Artificial Sequence: Synthetic oligonucleotide
  Target: LAMA2; (+) strand; PAM type: YTN; PAM sequence: TTC
agctctacaatgcttttcat

SEQ ID NO: 336250 - DNA, 20 bp, Artificial Sequence
  Description of Artificial Sequence: Synthetic oligonucleotide
  Target: LAMA2; (+) strand; PAM type: YTN; PAM sequence: CTC
tacaatgcttttcatcttgt

SEQ ID NO: 336251 - DNA, 20 bp, Artificial Sequence
  Description of Artificial Sequence: Synthetic oligonucleotide
  Target: LAMA2; (+) strand; PAM type: YTN; PAM sequence: CTA
caatgcttttcatcttgtaa

SEQ ID NO: 336252 - DNA, 20 bp, Artificial Sequence
  Description of Artificial Sequence: Synthetic oligonucleotide
  Target: LAMA2; (+) strand; PAM type: YTN; PAM sequence: CTT
ttcatcttgtaaaatttgaa

SEQ ID NO: 336253 - DNA, 20 bp, Artificial Sequence
  Description of Artificial Sequence: Synthetic oligonucleotide
  Target: LAMA2; (+) strand; PAM type: YTN; PAM sequence: TTT
tcatcttgtaaaatttgaaa

SEQ ID NO: 336254 - DNA, 20 bp, Artificial Sequence
  Description of Artificial Sequence: Synthetic oligonucleotide
  Target: LAMA2; (+) strand; PAM type: YTN; PAM sequence: TTT
catcttgtaaaatttgaaat

SEQ ID NO: 336255 - DNA, 20 bp, Artificial Sequence
  Description of Artificial Sequence: Synthetic oligonucleotide
  Target: LAMA2; (+) strand; PAM type: YTN; PAM sequence: TTC
atcttgtaaaatttgaaata

SEQ ID NO: 336256 - DNA, 20 bp, Artificial Sequence
  Description of Artificial Sequence: Synthetic oligonucleotide
  Target: LAMA2; (+) strand; PAM type: YTN; PAM sequence: CTT
gtaaaatttgaaatactgca

SEQ ID NO: 336257 - DNA, 20 bp, Artificial Sequence
  Description of Artificial Sequence: Synthetic oligonucleotide
  Target: LAMA2; (+) strand; PAM type: YTN; PAM sequence: TTG
taaaatttgaaatactgcac

SEQ ID NO: 336258 - DNA, 20 bp, Artificial Sequence
  Description of Artificial Sequence: Synthetic oligonucleotide
  Target: LAMA2; (+) strand; PAM type: YTN; PAM sequence: TTT
gaaatactgcacccattaaa

SEQ ID NO: 336259 - DNA, 20 bp, Artificial Sequence
  Description of Artificial Sequence: Synthetic oligonucleotide
  Target: LAMA2; (+) strand; PAM type: YTN; PAM sequence: TTG
aaatactgcacccattaaat

SEQ ID NO: 336260 - DNA, 20 bp, Artificial Sequence
  Description of Artificial Sequence: Synthetic oligonucleotide
  Target: LAMA2; (+) strand; PAM type: YTN; PAM sequence: CTG
cacccattaaataataactc

SEQ ID NO: 336261 - DNA, 20 bp, Artificial Sequence
  Description of Artificial Sequence: Synthetic oligonucleotide
  Target: LAMA2; (+) strand; PAM type: YTN; PAM sequence: TTA
aataataactccccattctc

SEQ ID NO: 336262 - DNA, 20 bp, Artificial Sequence
  Description of Artificial Sequence: Synthetic oligonucleotide
  Target: LAMA2; (+) strand; PAM type: YTN; PAM sequence: CTC
cccattctctctcccccagt

SEQ ID NO: 336263 - DNA, 20 bp, Artificial Sequence
  Description of Artificial Sequence: Synthetic oligonucleotide
  Target: LAMA2; (+) strand; PAM type: YTN; PAM sequence: TTC
tctctcccccagtccctggc

SEQ ID NO: 336264 - DNA, 20 bp, Artificial Sequence
  Description of Artificial Sequence: Synthetic oligonucleotide
  Target: LAMA2; (+) strand; PAM type: YTN; PAM sequence: CTC
tctcccccagtccctggcaa

SEQ ID NO: 336265 - DNA, 20 bp, Artificial Sequence
  Description of Artificial Sequence: Synthetic oligonucleotide
  Target: LAMA2; (+) strand; PAM type: YTN; PAM sequence: CTC
tcccccagtccctggcaaac

SEQ ID NO: 336266 - DNA, 20 bp, Artificial Sequence
  Description of Artificial Sequence: Synthetic oligonucleotide
  Target: LAMA2; (+) strand; PAM type: YTN; PAM sequence: CTC
ccccagtccctggcaaacac

SEQ ID NO: 336267 - DNA, 20 bp, Artificial Sequence
  Description of Artificial Sequence: Synthetic oligonucleotide
  Target: LAMA2; (+) strand; PAM type: YTN; PAM sequence: CTG
gcaaacactattctaccttc

SEQ ID NO: 336268 - DNA, 20 bp, Artificial Sequence
  Description of Artificial Sequence: Synthetic oligonucleotide
  Target: LAMA2; (+) strand; PAM type: YTN; PAM sequence: CTA
ttctaccttctgtctctata

SEQ ID NO: 336269 - DNA, 20 bp, Artificial Sequence
  Description of Artificial Sequence: Synthetic oligonucleotide
  Target: LAMA2; (+) strand; PAM type: YTN; PAM sequence: TTC
taccttctgtctctataaat

SEQ ID NO: 336270 - DNA, 20 bp, Artificial Sequence
  Description of Artificial Sequence: Synthetic oligonucleotide
  Target: LAMA2; (+) strand; PAM type: YTN; PAM sequence: CTA
ccttctgtctctataaattt

SEQ ID NO: 336271 - DNA, 20 bp, Artificial Sequence
  Description of Artificial Sequence: Synthetic oligonucleotide
  Target: LAMA2; (+) strand; PAM type: YTN; PAM sequence: CTT
ctgtctctataaatttgatc

SEQ ID NO: 336272 - DNA, 20 bp, Artificial Sequence
  Description of Artificial Sequence: Synthetic oligonucleotide
  Target: LAMA2; (+) strand; PAM type: YTN; PAM sequence: TTC
tgtctctataaatttgatca

SEQ ID NO: 336273 - DNA, 20 bp, Artificial Sequence
  Description of Artificial Sequence: Synthetic oligonucleotide
  Target: LAMA2; (+) strand; PAM type: YTN; PAM sequence: CTG
tctctataaatttgatcatt

SEQ ID NO: 336274 - DNA, 20 bp, Artificial Sequence
  Description of Artificial Sequence: Synthetic oligonucleotide
  Target: LAMA2; (+) strand; PAM type: YTN; PAM sequence: CTC
tataaatttgatcattctgg

SEQ ID NO: 336275 - DNA, 20 bp, Artificial Sequence
  Description of Artificial Sequence: Synthetic oligonucleotide
  Target: LAMA2; (+) strand; PAM type: YTN; PAM sequence: CTA
taaatttgatcattctgggc

SEQ ID NO: 336276 - DNA, 20 bp, Artificial Sequence
  Description of Artificial Sequence: Synthetic oligonucleotide
  Target: LAMA2; (+) strand; PAM type: YTN; PAM sequence: TTT
gatcattctgggcacgtcat

SEQ ID NO: 336277 - DNA, 20 bp, Artificial Sequence
  Description of Artificial Sequence: Synthetic oligonucleotide
  Target: LAMA2; (+) strand; PAM type: YTN; PAM sequence: TTG
atcattctgggcacgtcata

SEQ ID NO: 336278 - DNA, 20 bp, Artificial Sequence
  Description of Artificial Sequence: Synthetic oligonucleotide
  Target: LAMA2; (+) strand; PAM type: YTN; PAM sequence: TTC
tgggcacgtcatataagtgg

SEQ ID NO: 336279 - DNA, 20 bp, Artificial Sequence
  Description of Artificial Sequence: Synthetic oligonucleotide
  Target: LAMA2; (+) strand; PAM type: YTN; PAM sequence: CTG
ggcacgtcatataagtggaa

SEQ ID NO: 336280 - DNA, 20 bp, Artificial Sequence
  Description of Artificial Sequence: Synthetic oligonucleotide
  Target: LAMA2; (+) strand; PAM type: YTN; PAM sequence: TTT
gtccttttgtaactggctta

SEQ ID NO: 336281 - DNA, 20 bp, Artificial Sequence
  Description of Artificial Sequence: Synthetic oligonucleotide
  Target: LAMA2; (+) strand; PAM type: YTN; PAM sequence: TTG
tccttttgtaactggcttat

SEQ ID NO: 336282 - DNA, 20 bp, Artificial Sequence
  Description of Artificial Sequence: Synthetic oligonucleotide
  Target: LAMA2; (+) strand; PAM type: YTN; PAM sequence: CTT
ttgtaactggcttatttcat

SEQ ID NO: 336283 - DNA, 20 bp, Artificial Sequence
  Description of Artificial Sequence: Synthetic oligonucleotide
  Target: LAMA2; (+) strand; PAM type: YTN; PAM sequence: TTT
tgtaactggcttatttcatt

SEQ ID NO: 336284 - DNA, 20 bp, Artificial Sequence
  Description of Artificial Sequence: Synthetic oligonucleotide
  Target: LAMA2; (+) strand; PAM type: YTN; PAM sequence: TTT
gtaactggcttatttcattc

SEQ ID NO: 336285 - DNA, 20 bp, Artificial Sequence
  Description of Artificial Sequence: Synthetic oligonucleotide
  Target: LAMA2; (+) strand; PAM type: YTN; PAM sequence: TTG
taactggcttatttcattca

SEQ ID NO: 336286 - DNA, 20 bp, Artificial Sequence
  Description of Artificial Sequence: Synthetic oligonucleotide
  Target: LAMA2; (+) strand; PAM type: YTN; PAM sequence: CTG
gcttatttcattcaacatag

SEQ ID NO: 336287 - DNA, 20 bp, Artificial Sequence
  Description of Artificial Sequence: Synthetic oligonucleotide
  Target: LAMA2; (+) strand; PAM type: YTN; PAM sequence: CTT
atttcattcaacatagtgtc

SEQ ID NO: 336288 - DNA, 20 bp, Artificial Sequence
  Description of Artificial Sequence: Synthetic oligonucleotide
  Target: LAMA2; (+) strand; PAM type: YTN; PAM sequence: TTA
tttcattcaacatagtgtct

SEQ ID NO: 336289 - DNA, 20 bp, Artificial Sequence
  Description of Artificial Sequence: Synthetic oligonucleotide
  Target: LAMA2; (+) strand; PAM type: YTN; PAM sequence: TTT
cattcaacatagtgtcttcg

SEQ ID NO: 336290 - DNA, 20 bp, Artificial Sequence
  Description of Artificial Sequence: Synthetic oligonucleotide
  Target: LAMA2; (+) strand; PAM type: YTN; PAM sequence: TTC
attcaacatagtgtcttcga

SEQ ID NO: 336291 - DNA, 20 bp, Artificial Sequence
  Description of Artificial Sequence: Synthetic oligonucleotide
  Target: LAMA2; (+) strand; PAM type: YTN; PAM sequence: TTC
aacatagtgtcttcgagatt

SEQ ID NO: 336292 - DNA, 20 bp, Artificial Sequence
  Description of Artificial Sequence: Synthetic oligonucleotide
  Target: LAMA2; (+) strand; PAM type: YTN; PAM sequence: CTT
cgagattcttccacgttgta

SEQ ID NO: 336293 - DNA, 20 bp, Artificial Sequence
  Description of Artificial Sequence: Synthetic oligonucleotide
  Target: LAMA2; (+) strand; PAM type: YTN; PAM sequence: TTC
gagattcttccacgttgtag

SEQ ID NO: 336294 - DNA, 20 bp, Artificial Sequence
  Description of Artificial Sequence: Synthetic oligonucleotide
  Target: LAMA2; (+) strand; PAM type: YTN; PAM sequence: TTC
ttccacgttgtagcatatat

SEQ ID NO: 336295 - DNA, 20 bp, Artificial Sequence
  Description of Artificial Sequence: Synthetic oligonucleotide
  Target: LAMA2; (+) strand; PAM type: YTN; PAM sequence: CTT
ccacgttgtagcatatatca

SEQ ID NO: 336296 - DNA, 20 bp, Artificial Sequence
  Description of Artificial Sequence: Synthetic oligonucleotide
  Target: LAMA2; (+) strand; PAM type: YTN; PAM sequence: TTC
cacgttgtagcatatatcag

SEQ ID NO: 336297 - DNA, 20 bp, Artificial Sequence
  Description of Artificial Sequence: Synthetic oligonucleotide
  Target: LAMA2; (+) strand; PAM type: YTN; PAM sequence: TTG
tagcatatatcagagtttcc

SEQ ID NO: 336298 - DNA, 20 bp, Artificial Sequence
  Description of Artificial Sequence: Synthetic oligonucleotide
  Target: LAMA2; (+) strand; PAM type: YTN; PAM sequence: TTT
ccttcatttttaaggctgaa

SEQ ID NO: 336299 - DNA, 20 bp, Artificial Sequence
  Description of Artificial Sequence: Synthetic oligonucleotide
  Target: LAMA2; (+) strand; PAM type: YTN; PAM sequence: TTC
cttcatttttaaggctgaat

SEQ ID NO: 336300 - DNA, 20 bp, Artificial Sequence
  Description of Artificial Sequence: Synthetic oligonucleotide
  Target: LAMA2; (+) strand; PAM type: YTN; PAM sequence: CTT
catttttaaggctgaataat

SEQ ID NO: 336301 - DNA, 20 bp, Artificial Sequence
  Description of Artificial Sequence: Synthetic oligonucleotide
  Target: LAMA2; (+) strand; PAM type: YTN; PAM sequence: TTC
atttttaaggctgaataata

SEQ ID NO: 336302 - DNA, 20 bp, Artificial Sequence
  Description of Artificial Sequence: Synthetic oligonucleotide
  Target: LAMA2; (+) strand; PAM type: YTN; PAM sequence: TTT
ttaaggctgaataatattcc

SEQ ID NO: 336303 - DNA, 20 bp, Artificial Sequence
  Description of Artificial Sequence: Synthetic oligonucleotide
  Target: LAMA2; (+) strand; PAM type: YTN; PAM sequence: TTT
taaggctgaataatattcca

SEQ ID NO: 336304 - DNA, 20 bp, Artificial Sequence
  Description of Artificial Sequence: Synthetic oligonucleotide
  Target: LAMA2; (+) strand; PAM type: YTN; PAM sequence: TTT
aaggctgaataatattccaa

SEQ ID NO: 336305 - DNA, 20 bp, Artificial Sequence
  Description of Artificial Sequence: Synthetic oligonucleotide
  Target: LAMA2; (+) strand; PAM type: YTN; PAM sequence: TTA
aggctgaataatattccaat

SEQ ID NO: 336306 - DNA, 20 bp, Artificial Sequence
  Description of Artificial Sequence: Synthetic oligonucleotide
  Target: LAMA2; (+) strand; PAM type: YTN; PAM sequence: CTG
aataatattccaatgtctat

SEQ ID NO: 336307 - DNA, 20 bp, Artificial Sequence
  Description of Artificial Sequence: Synthetic oligonucleotide
  Target: LAMA2; (+) strand; PAM type: YTN; PAM sequence: TTC
caatgtctatgtataagtag

SEQ ID NO: 336308 - DNA, 20 bp, Artificial Sequence
  Description of Artificial Sequence: Synthetic oligonucleotide
  Target: LAMA2; (+) strand; PAM type: YTN; PAM sequence: CTA
tgtataagtagactcacaca

SEQ ID NO: 336309 - DNA, 20 bp, Artificial Sequence
  Description of Artificial Sequence: Synthetic oligonucleotide
  Target: LAMA2; (+) strand; PAM type: YTN; PAM sequence: CTC
acacacacgtacatatatgg

SEQ ID NO: 336310 - DNA, 20 bp, Artificial Sequence
  Description of Artificial Sequence: Synthetic oligonucleotide
  Target: LAMA2; (+) strand; PAM type: YTN; PAM sequence: TTT
tttgtccattaatccattga

SEQ ID NO: 336311 - DNA, 20 bp, Artificial Sequence
  Description of Artificial Sequence: Synthetic oligonucleotide
  Target: LAMA2; (+) strand; PAM type: YTN; PAM sequence: TTT
ttgtccattaatccattgat

SEQ ID NO: 336312 - DNA, 20 bp, Artificial Sequence
  Description of Artificial Sequence: Synthetic oligonucleotide
  Target: LAMA2; (+) strand; PAM type: YTN; PAM sequence: TTT
tgtccattaatccattgatg

SEQ ID NO: 336313 - DNA, 20 bp, Artificial Sequence
  Description of Artificial Sequence: Synthetic oligonucleotide
  Target: LAMA2; (+) strand; PAM type: YTN; PAM sequence: TTT
gtccattaatccattgatga

SEQ ID NO: 336314 - DNA, 20 bp, Artificial Sequence
  Description of Artificial Sequence: Synthetic oligonucleotide
  Target: LAMA2; (+) strand; PAM type: YTN; PAM sequence: TTG
tccattaatccattgatgaa

SEQ ID NO: 336315 - DNA, 20 bp, Artificial Sequence
  Description of Artificial Sequence: Synthetic oligonucleotide
  Target: LAMA2; (+) strand; PAM type: YTN; PAM sequence: TTA
atccattgatgaacacaggt

SEQ ID NO: 336316 - DNA, 20 bp, Artificial Sequence
  Description of Artificial Sequence: Synthetic oligonucleotide
  Target: LAMA2; (+) strand; PAM type: YTN; PAM sequence: TTG
atgaacacaggttaattcca

SEQ ID NO: 336317 - DNA, 20 bp, Artificial Sequence
  Description of Artificial Sequence: Synthetic oligonucleotide
  Target: LAMA2; (+) strand; PAM type: YTN; PAM sequence: TTA
attccaccttctggctattg

SEQ ID NO: 336318 - DNA, 20 bp, Artificial Sequence
  Description of Artificial Sequence: Synthetic oligonucleotide
  Target: LAMA2; (+) strand; PAM type: YTN; PAM sequence: TTC
caccttctggctattgttct

SEQ ID NO: 336319 - DNA, 20 bp, Artificial Sequence
  Description of Artificial Sequence: Synthetic oligonucleotide
  Target: LAMA2; (+) strand; PAM type: YTN; PAM sequence: CTT
ctggctattgttcttaatgc

SEQ ID NO: 336320 - DNA, 20 bp, Artificial Sequence
  Description of Artificial Sequence: Synthetic oligonucleotide
  Target: LAMA2; (+) strand; PAM type: YTN; PAM sequence: TTC
tggctattgttcttaatgct

SEQ ID NO: 336321 - DNA, 20 bp, Artificial Sequence
  Description of Artificial Sequence: Synthetic oligonucleotide
  Target: LAMA2; (+) strand; PAM type: YTN; PAM sequence: CTG
gctattgttcttaatgctat

SEQ ID NO: 336322 - DNA, 20 bp, Artificial Sequence
  Description of Artificial Sequence: Synthetic oligonucleotide
  Target: LAMA2; (+) strand; PAM type: YTN; PAM sequence: CTA
ttgttcttaatgctatgaac

SEQ ID NO: 336323 - DNA, 20 bp, Artificial Sequence
  Description of Artificial Sequence: Synthetic oligonucleotide
  Target: LAMA2; (+) strand; PAM type: YTN; PAM sequence: TTG
ttcttaatgctatgaacatg

SEQ ID NO: 336324 - DNA, 20 bp, Artificial Sequence
  Description of Artificial Sequence: Synthetic oligonucleotide
  Target: LAMA2; (+) strand; PAM type: YTN; PAM sequence: TTC
ttaatgctatgaacatgggc

SEQ ID NO: 336325 - DNA, 20 bp, Artificial Sequence
  Description of Artificial Sequence: Synthetic oligonucleotide
  Target: LAMA2; (+) strand; PAM type: YTN; PAM sequence: CTT
aatgctatgaacatgggcat

SEQ ID NO: 336326 - DNA, 20 bp, Artificial Sequence
  Description of Artificial Sequence: Synthetic oligonucleotide
  Target: LAMA2; (+) strand; PAM type: YTN; PAM sequence: TTA
atgctatgaacatgggcata

SEQ ID NO: 336327 - DNA, 20 bp, Artificial Sequence
  Description of Artificial Sequence: Synthetic oligonucleotide
  Target: LAMA2; (+) strand; PAM type: YTN; PAM sequence: CTA
tgaacatgggcatatgggct

SEQ ID NO: 336328 - DNA, 20 bp, Artificial Sequence
  Description of Artificial Sequence: Synthetic oligonucleotide
  Target: LAMA2; (+) strand; PAM type: YTN; PAM sequence: CTT
caatctttaaggtttcagtt

SEQ ID NO: 336329 - DNA, 20 bp, Artificial Sequence
  Description of Artificial Sequence: Synthetic oligonucleotide
  Target: LAMA2; (+) strand; PAM type: YTN; PAM sequence: TTC
aatctttaaggtttcagtta

SEQ ID NO: 336330 - DNA, 20 bp, Artificial Sequence
  Description of Artificial Sequence: Synthetic oligonucleotide
  Target: LAMA2; (+) strand; PAM type: YTN; PAM sequence: CTT
taaggtttcagttactcatg

SEQ ID NO: 336331 - DNA, 20 bp, Artificial Sequence
  Description of Artificial Sequence: Synthetic oligonucleotide
  Target: LAMA2; (+) strand; PAM type: YTN; PAM sequence: TTT
aaggtttcagttactcatgg

SEQ ID NO: 336332 - DNA, 20 bp, Artificial Sequence
  Description of Artificial Sequence: Synthetic oligonucleotide
  Target: LAMA2; (+) strand; PAM type: YTN; PAM sequence: TTA
aggtttcagttactcatggt

SEQ ID NO: 336333 - DNA, 20 bp, Artificial Sequence
  Description of Artificial Sequence: Synthetic oligonucleotide
  Target: LAMA2; (+) strand; PAM type: YTN; PAM sequence: TTT
cagttactcatggtaaactg

SEQ ID NO: 336334 - DNA, 20 bp, Artificial Sequence
  Description of Artificial Sequence: Synthetic oligonucleotide
  Target: LAMA2; (+) strand; PAM type: YTN; PAM sequence: TTC
agttactcatggtaaactga

SEQ ID NO: 336335 - DNA, 20 bp, Artificial Sequence
  Description of Artificial Sequence: Synthetic oligonucleotide
  Target: LAMA2; (+) strand; PAM type: YTN; PAM sequence: TTA
ctcatggtaaactgaagtct

SEQ ID NO: 336336 - DNA, 20 bp, Artificial Sequence
  Description of Artificial Sequence: Synthetic oligonucleotide
  Target: LAMA2; (+) strand; PAM type: YTN; PAM sequence: CTC
atggtaaactgaagtctgaa

SEQ ID NO: 336337 - DNA, 20 bp, Artificial Sequence
  Description of Artificial Sequence: Synthetic oligonucleotide
  Target: LAMA2; (+) strand; PAM type: YTN; PAM sequence: CTG
aagtctgaaaatattacata

SEQ ID NO: 336338 - DNA, 20 bp, Artificial Sequence
  Description of Artificial Sequence: Synthetic oligonucleotide
  Target: LAMA2; (+) strand; PAM type: YTN; PAM sequence: CTG
aaaatattacatacaaaaac

SEQ ID NO: 336339 - DNA, 20 bp, Artificial Sequence
  Description of Artificial Sequence: Synthetic oligonucleotide
  Target: LAMA2; (+) strand; PAM type: YTN; PAM sequence: TTA
catacaaaaacattttaaga

SEQ ID NO: 336340 - DNA, 20 bp, Artificial Sequence
  Description of Artificial Sequence: Synthetic oligonucleotide
  Target: LAMA2; (+) strand; PAM type: YTN; PAM sequence: TTT
taagagagagagagggagaa

SEQ ID NO: 336341 - DNA, 20 bp, Artificial Sequence
  Description of Artificial Sequence: Synthetic oligonucleotide
  Target: LAMA2; (+) strand; PAM type: YTN; PAM sequence: TTT
aagagagagagagggagaag

SEQ ID NO: 336342 - DNA, 20 bp, Artificial Sequence
  Description of Artificial Sequence: Synthetic oligonucleotide
  Target: LAMA2; (+) strand; PAM type: YTN; PAM sequence: TTA
agagagagagagggagaagc

SEQ ID NO: 336343 - DNA, 20 bp, Artificial Sequence
  Description of Artificial Sequence: Synthetic oligonucleotide
  Target: LAMA2; (+) strand; PAM type: YTN; PAM sequence: CTA
cattcacataacttttatta

SEQ ID NO: 336344 - DNA, 20 bp, Artificial Sequence
  Description of Artificial Sequence: Synthetic oligonucleotide
  Target: LAMA2; (+) strand; PAM type: YTN; PAM sequence: TTC
acataacttttattatatta

SEQ ID NO: 336345 - DNA, 20 bp, Artificial Sequence
  Description of Artificial Sequence: Synthetic oligonucleotide
  Target: LAMA2; (+) strand; PAM type: YTN; PAM sequence: CTT
ttattatattatattgttgt

SEQ ID NO: 336346 - DNA, 20 bp, Artificial Sequence
  Description of Artificial Sequence: Synthetic oligonucleotide
  Target: LAMA2; (+) strand; PAM type: YTN; PAM sequence: TTT
tattatattatattgttgta

SEQ ID NO: 336347 - DNA, 20 bp, Artificial Sequence
  Description of Artificial Sequence: Synthetic oligonucleotide
  Target: LAMA2; (+) strand; PAM type: YTN; PAM sequence: TTT
attatattatattgttgtat

SEQ ID NO: 336348 - DNA, 20 bp, Artificial Sequence
  Description of Artificial Sequence: Synthetic oligonucleotide
  Target: LAMA2; (+) strand; PAM type: YTN; PAM sequence: TTA
ttatattatattgttgtatt

SEQ ID NO: 336349 - DNA, 20 bp, Artificial Sequence
  Description of Artificial Sequence: Synthetic oligonucleotide
  Target: LAMA2; (+) strand; PAM type: YTN; PAM sequence: TTA
tattatattgttgtattttt

SEQ ID NO: 336350 - DNA, 20 bp, Artificial Sequence
  Description of Artificial Sequence: Synthetic oligonucleotide
  Target: LAMA2; (+) strand; PAM type: YTN; PAM sequence: TTA
tattgttgtattttttatta

SEQ ID NO: 336351 - DNA, 20 bp, Artificial Sequence
  Description of Artificial Sequence: Synthetic oligonucleotide
  Target: LAMA2; (+) strand; PAM type: YTN; PAM sequence: TTG
ttgtattttttattagttat

SEQ ID NO: 336352 - DNA, 20 bp, Artificial Sequence
  Description of Artificial Sequence: Synthetic oligonucleotide
  Target: LAMA2; (+) strand; PAM type: YTN; PAM sequence: TTG
tattttttattagttattgt

SEQ ID NO: 336353 - DNA, 20 bp, Artificial Sequence
  Description of Artificial Sequence: Synthetic oligonucleotide
  Target: LAMA2; (+) strand; PAM type: YTN; PAM sequence: TTT
tttattagttattgttgtta

SEQ ID NO: 336354 - DNA, 20 bp, Artificial Sequence
  Description of Artificial Sequence: Synthetic oligonucleotide
  Target: LAMA2; (+) strand; PAM type: YTN; PAM sequence: TTT
ttattagttattgttgttaa

SEQ ID NO: 336355 - DNA, 20 bp, Artificial Sequence
  Description of Artificial Sequence: Synthetic oligonucleotide
  Target: LAMA2; (+) strand; PAM type: YTN; PAM sequence: TTT
tattagttattgttgttaaa

SEQ ID NO: 336356 - DNA, 20 bp, Artificial Sequence
  Description of Artificial Sequence: Synthetic oligonucleotide
  Target: LAMA2; (+) strand; PAM type: YTN; PAM sequence: TTT
attagttattgttgttaaat

SEQ ID NO: 336357 - DNA, 20 bp, Artificial Sequence
  Description of Artificial Sequence: Synthetic oligonucleotide
  Target: LAMA2; (+) strand; PAM type: YTN; PAM sequence: TTA
ttagttattgttgttaaatc

SEQ ID NO: 336358 - DNA, 20 bp, Artificial Sequence
  Description of Artificial Sequence: Synthetic oligonucleotide
  Target: LAMA2; (+) strand; PAM type: YTN; PAM sequence: TTA
gttattgttgttaaatctct

SEQ ID NO: 336359 - DNA, 20 bp, Artificial Sequence
  Description of Artificial Sequence: Synthetic oligonucleotide
  Target: LAMA2; (+) strand; PAM type: YTN; PAM sequence: TTA
ttgttgttaaatctcttact

SEQ ID NO: 336360 - DNA, 20 bp, Artificial Sequence
  Description of Artificial Sequence: Synthetic oligonucleotide
  Target: LAMA2; (+) strand; PAM type: YTN; PAM sequence: TTG
ttgttaaatctcttactgtg

SEQ ID NO: 336361 - DNA, 20 bp, Artificial Sequence
  Description of Artificial Sequence: Synthetic oligonucleotide
  Target: LAMA2; (+) strand; PAM type: YTN; PAM sequence: TTG
ttaaatctcttactgtgcct

SEQ ID NO: 336362 - DNA, 20 bp, Artificial Sequence
  Description of Artificial Sequence: Synthetic oligonucleotide
  Target: LAMA2; (+) strand; PAM type: YTN; PAM sequence: TTA
aatctcttactgtgcctatt

SEQ ID NO: 336363 - DNA, 20 bp, Artificial Sequence
  Description of Artificial Sequence: Synthetic oligonucleotide
  Target: LAMA2; (+) strand; PAM type: YTN; PAM sequence: CTC
ttactgtgcctattttataa

SEQ ID NO: 336364 - DNA, 20 bp, Artificial Sequence
  Description of Artificial Sequence: Synthetic oligonucleotide
  Target: LAMA2; (+) strand; PAM type: YTN; PAM sequence: CTT
actgtgcctattttataaat

SEQ ID NO: 336365 - DNA, 20 bp, Artificial Sequence
  Description of Artificial Sequence: Synthetic oligonucleotide
  Target: LAMA2; (+) strand; PAM type: YTN; PAM sequence: TTA
ctgtgcctattttataaatt

SEQ ID NO: 336366 - DNA, 20 bp, Artificial Sequence
  Description of Artificial Sequence: Synthetic oligonucleotide
  Target: LAMA2; (+) strand; PAM type: YTN; PAM sequence: CTG
tgcctattttataaattaaa

SEQ ID NO: 336367 - DNA, 20 bp, Artificial Sequence
  Description of Artificial Sequence: Synthetic oligonucleotide
  Target: LAMA2; (+) strand; PAM type: YTN; PAM sequence: CTA
ttttataaattaaacttcat

SEQ ID NO: 336368 - DNA, 20 bp, Artificial Sequence
  Description of Artificial Sequence: Synthetic oligonucleotide
  Target: LAMA2; (+) strand; PAM type: YTN; PAM sequence: TTT
tataaattaaacttcatcaa

SEQ ID NO: 336369 - DNA, 20 bp, Artificial Sequence
  Description of Artificial Sequence: Synthetic oligonucleotide
  Target: LAMA2; (+) strand; PAM type: YTN; PAM sequence: TTT
ataaattaaacttcatcaaa

SEQ ID NO: 336370 - DNA, 20 bp, Artificial Sequence
  Description of Artificial Sequence: Synthetic oligonucleotide
  Target: LAMA2; (+) strand; PAM type: YTN; PAM sequence: TTA
taaattaaacttcatcaaag

SEQ ID NO: 336371 - DNA, 20 bp, Artificial Sequence
  Description of Artificial Sequence: Synthetic oligonucleotide
  Target: LAMA2; (+) strand; PAM type: YTN; PAM sequence: TTA
aacttcatcaaagatgtgtg

SEQ ID NO: 336372 - DNA, 20 bp, Artificial Sequence
  Description of Artificial Sequence: Synthetic oligonucleotide
  Target: LAMA2; (+) strand; PAM type: YTN; PAM sequence: CTT
catcaaagatgtgtgtgtat

SEQ ID NO: 336373 - DNA, 20 bp, Artificial Sequence
  Description of Artificial Sequence: Synthetic oligonucleotide
  Target: LAMA2; (+) strand; PAM type: YTN; PAM sequence: TTC
atcaaagatgtgtgtgtata

SEQ ID NO: 336374 - DNA, 20 bp, Artificial Sequence
  Description of Artificial Sequence: Synthetic oligonucleotide
  Target: LAMA2; (+) strand; PAM type: YTN; PAM sequence: TTG
tatatatgggcttcacgcat

SEQ ID NO: 336375 - DNA, 20 bp, Artificial Sequence
  Description of Artificial Sequence: Synthetic oligonucleotide
  Target: LAMA2; (+) strand; PAM type: YTN; PAM sequence: CTT
cacgcattgaatgagggtct

SEQ ID NO: 336376 - DNA, 20 bp, Artificial Sequence
  Description of Artificial Sequence: Synthetic oligonucleotide
  Target: LAMA2; (+) strand; PAM type: YTN; PAM sequence: TTC
acgcattgaatgagggtctt

SEQ ID NO: 336377 - DNA, 20 bp, Artificial Sequence
  Description of Artificial Sequence: Synthetic oligonucleotide
  Target: LAMA2; (+) strand; PAM type: YTN; PAM sequence: TTG
aatgagggtcttaggatgta

SEQ ID NO: 336378 - DNA, 20 bp, Artificial Sequence
  Description of Artificial Sequence: Synthetic oligonucleotide
  Target: LAMA2; (+) strand; PAM type: YTN; PAM sequence: CTT
aggatgtatcccctgaggat

SEQ ID NO: 336379 - DNA, 20 bp, Artificial Sequence
  Description of Artificial Sequence: Synthetic oligonucleotide
  Target: LAMA2; (+) strand; PAM type: YTN; PAM sequence: TTA
ggatgtatcccctgaggata

SEQ ID NO: 336380 - DNA, 20 bp, Artificial Sequence
  Description of Artificial Sequence: Synthetic oligonucleotide
  Target: LAMA2; (+) strand; PAM type: YTN; PAM sequence: CTG
aggataaggagggactacta

SEQ ID NO: 336381 - DNA, 20 bp, Artificial Sequence
  Description of Artificial Sequence: Synthetic oligonucleotide
  Target: LAMA2; (+) strand; PAM type: YTN; PAM sequence: CTA
ctataattctactgttaatt

SEQ ID NO: 336382 - DNA, 20 bp, Artificial Sequence
  Description of Artificial Sequence: Synthetic oligonucleotide
  Target: LAMA2; (+) strand; PAM type: YTN; PAM sequence: CTA
taattctactgttaattctt

SEQ ID NO: 336383 - DNA, 20 bp, Artificial Sequence
  Description of Artificial Sequence: Synthetic oligonucleotide
  Target: LAMA2; (+) strand; PAM type: YTN; PAM sequence: TTC
tactgttaattctttgagga

SEQ ID NO: 336384 - DNA, 20 bp, Artificial Sequence
  Description of Artificial Sequence: Synthetic oligonucleotide
  Target: LAMA2; (+) strand; PAM type: YTN; PAM sequence: CTA
ctgttaattctttgaggaac

SEQ ID NO: 336385 - DNA, 20 bp, Artificial Sequence
  Description of Artificial Sequence: Synthetic oligonucleotide
  Target: LAMA2; (+) strand; PAM type: YTN; PAM sequence: CTG
ttaattctttgaggaaccac

SEQ ID NO: 336386 - DNA, 20 bp, Artificial Sequence
  Description of Artificial Sequence: Synthetic oligonucleotide
  Target: LAMA2; (+) strand; PAM type: YTN; PAM sequence: TTA
attctttgaggaaccactat

SEQ ID NO: 336387 - DNA, 20 bp, Artificial Sequence
  Description of Artificial Sequence: Synthetic oligonucleotide
  Target: LAMA2; (+) strand; PAM type: YTN; PAM sequence: TTC
tttgaggaaccactatattg

SEQ ID NO: 336388 - DNA, 20 bp, Artificial Sequence
  Description of Artificial Sequence: Synthetic oligonucleotide
  Target: LAMA2; (+) strand; PAM type: YTN; PAM sequence: CTT
tgaggaaccactatattgtt

SEQ ID NO: 336389 - DNA, 20 bp, Artificial Sequence
  Description of Artificial Sequence: Synthetic oligonucleotide
  Target: LAMA2; (+) strand; PAM type: YTN; PAM sequence: TTT
gaggaaccactatattgttt

SEQ ID NO: 336390 - DNA, 20 bp, Artificial Sequence
  Description of Artificial Sequence: Synthetic oligonucleotide
  Target: LAMA2; (+) strand; PAM type: YTN; PAM sequence: TTG
aggaaccactatattgtttt

SEQ ID NO: 336391 - DNA, 20 bp, Artificial Sequence
  Description of Artificial Sequence: Synthetic oligonucleotide
  Target: LAMA2; (+) strand; PAM type: YTN; PAM sequence: CTA
tattgttttccatagtggct

SEQ ID NO: 336392 - DNA, 20 bp, Artificial Sequence
  Description of Artificial Sequence: Synthetic oligonucleotide
  Target: LAMA2; (+) strand; PAM type: YTN; PAM sequence: TTG
ttttccatagtggctgcacc

SEQ ID NO: 336393 - DNA, 20 bp, Artificial Sequence
  Description of Artificial Sequence: Synthetic oligonucleotide
  Target: LAMA2; (+) strand; PAM type: YTN; PAM sequence: TTT
tccatagtggctgcaccatt

SEQ ID NO: 336394 - DNA, 20 bp, Artificial Sequence
  Description of Artificial Sequence: Synthetic oligonucleotide
  Target: LAMA2; (+) strand; PAM type: YTN; PAM sequence: TTT
ccatagtggctgcaccattt

SEQ ID NO: 336395 - DNA, 20 bp, Artificial Sequence
  Description of Artificial Sequence: Synthetic oligonucleotide
  Target: LAMA2; (+) strand; PAM type: YTN; PAM sequence: TTC
catagtggctgcaccatttt

SEQ ID NO: 336396 - DNA, 20 bp, Artificial Sequence
  Description of Artificial Sequence: Synthetic oligonucleotide
  Target: LAMA2; (+) strand; PAM type: YTN; PAM sequence: CTG
caccattttacattcccatc

SEQ ID NO: 336397 - DNA, 20 bp, Artificial Sequence
  Description of Artificial Sequence: Synthetic oligonucleotide
  Target: LAMA2; (+) strand; PAM type: YTN; PAM sequence: TTT
tacattcccatcggccatac

SEQ ID NO: 336398 - DNA, 20 bp, Artificial Sequence
  Description of Artificial Sequence: Synthetic oligonucleotide
  Target: LAMA2; (+) strand; PAM type: YTN; PAM sequence: TTT
acattcccatcggccataca

SEQ ID NO: 336399 - DNA, 20 bp, Artificial Sequence
  Description of Artificial Sequence: Synthetic oligonucleotide
  Target: LAMA2; (+) strand; PAM type: YTN; PAM sequence: TTA
cattcccatcggccatacac

SEQ ID NO: 336400 - DNA, 20 bp, Artificial Sequence
  Description of Artificial Sequence: Synthetic oligonucleotide
  Target: LAMA2; (+) strand; PAM type: YTN; PAM sequence: TTC
ccatcggccatacacaagga

SEQ ID NO: 336401 - DNA, 20 bp, Artificial Sequence
  Description of Artificial Sequence: Synthetic oligonucleotide
  Target: LAMA2; (+) strand; PAM type: YTN; PAM sequence: TTC
taatttctccacacccttgc

SEQ ID NO: 336402 - DNA, 20 bp, Artificial Sequence
  Description of Artificial Sequence: Synthetic oligonucleotide
  Target: LAMA2; (+) strand; PAM type: YTN; PAM sequence: CTA
atttctccacacccttgcca

SEQ ID NO: 336403 - DNA, 20 bp, Artificial Sequence
  Description of Artificial Sequence: Synthetic oligonucleotide
  Target: LAMA2; (+) strand; PAM type: YTN; PAM sequence: TTT
ctccacacccttgccaacac

SEQ ID NO: 336404 - DNA, 20 bp, Artificial Sequence
  Description of Artificial Sequence: Synthetic oligonucleotide
  Target: LAMA2; (+) strand; PAM type: YTN; PAM sequence: TTC
tccacacccttgccaacact

SEQ ID NO: 336405 - DNA, 20 bp, Artificial Sequence
  Description of Artificial Sequence: Synthetic oligonucleotide
  Target: LAMA2; (+) strand; PAM type: YTN; PAM sequence: CTC
cacacccttgccaacacttc

SEQ ID NO: 336406 - DNA, 20 bp, Artificial Sequence
  Description of Artificial Sequence: Synthetic oligonucleotide
  Target: LAMA2; (+) strand; PAM type: YTN; PAM sequence: CTT
gccaacacttctttttctgt

SEQ ID NO: 336407 - DNA, 20 bp, Artificial Sequence
  Description of Artificial Sequence: Synthetic oligonucleotide
  Target: LAMA2; (+) strand; PAM type: YTN; PAM sequence: TTG
ccaacacttctttttctgtt

SEQ ID NO: 336408 - DNA, 20 bp, Artificial Sequence
  Description of Artificial Sequence: Synthetic oligonucleotide
  Target: LAMA2; (+) strand; PAM type: YTN; PAM sequence: CTT
ctttttctgttttttttttt

SEQ ID NO: 336409 - DNA, 20 bp, Artificial Sequence
  Description of Artificial Sequence: Synthetic oligonucleotide
  Target: LAMA2; (+) strand; PAM type: YTN; PAM sequence: TTC
tttttctgtttttttttttt

SEQ ID NO: 336410 - DNA, 20 bp, Artificial Sequence
  Description of Artificial Sequence: Synthetic oligonucleotide
  Target: LAMA2; (+) strand; PAM type: YTN; PAM sequence: CTT
tttctgtttttttttttttc

SEQ ID NO: 336411 - DNA, 20 bp, Artificial Sequence
  Description of Artificial Sequence: Synthetic oligonucleotide
  Target: LAMA2; (+) strand; PAM type: YTN; PAM sequence: TTT
ttctgtttttttttttttct

SEQ ID NO: 336412 - DNA, 20 bp, Artificial Sequence
  Description of Artificial Sequence: Synthetic oligonucleotide
  Target: LAMA2; (+) strand; PAM type: YTN; PAM sequence: TTT
tctgtttttttttttttctt

SEQ ID NO: 336413 - DNA, 20 bp, Artificial Sequence
  Description of Artificial Sequence: Synthetic oligonucleotide
  Target: LAMA2; (+) strand; PAM type: YTN; PAM sequence: TTT
ctgtttttttttttttcttt

SEQ ID NO: 336414 - DNA, 20 bp, Artificial Sequence
  Description of Artificial Sequence: Synthetic oligonucleotide
  Target: LAMA2; (+) strand; PAM type: YTN; PAM sequence: TTC
tgtttttttttttttctttt

SEQ ID NO: 336415 - DNA, 20 bp, Artificial Sequence
  Description of Artificial Sequence: Synthetic oligonucleotide
  Target: LAMA2; (+) strand; PAM type: YTN; PAM sequence: CTG
tttttttttttttcttttta

SEQ ID NO: 336416 - DNA, 20 bp, Artificial Sequence
  Description of Artificial Sequence: Synthetic oligonucleotide
  Target: LAMA2; (+) strand; PAM type: YTN; PAM sequence: TTT
ttttttttttctttttaaat

SEQ ID NO: 336417 - DNA, 20 bp, Artificial Sequence
  Description of Artificial Sequence: Synthetic oligonucleotide
  Target: LAMA2; (+) strand; PAM type: YTN; PAM sequence: TTT
tttttttttctttttaaata

SEQ ID NO: 336418 - DNA, 20 bp, Artificial Sequence
  Description of Artificial Sequence: Synthetic oligonucleotide
  Target: LAMA2; (+) strand; PAM type: YTN; PAM sequence: TTT
ttttttttctttttaaatag

SEQ ID NO: 336419 - DNA, 20 bp, Artificial Sequence
  Description of Artificial Sequence: Synthetic oligonucleotide
  Target: LAMA2; (+) strand; PAM type: YTN; PAM sequence: TTT
tttttttctttttaaatagt

SEQ ID NO: 336420 - DNA, 20 bp, Artificial Sequence
  Description of Artificial Sequence: Synthetic oligonucleotide
  Target: LAMA2; (+) strand; PAM type: YTN; PAM sequence: TTT
ttttttctttttaaatagtt

SEQ ID NO: 336421 - DNA, 20 bp, Artificial Sequence
  Description of Artificial Sequence: Synthetic oligonucleotide
  Target: LAMA2; (+) strand; PAM type: YTN; PAM sequence: TTT
tttttctttttaaatagtta

SEQ ID NO: 336422 - DNA, 20 bp, Artificial Sequence
  Description of Artificial Sequence: Synthetic oligonucleotide
  Target: LAMA2; (+) strand; PAM type: YTN; PAM sequence: TTT
ttttctttttaaatagttag

SEQ ID NO: 336423 - DNA, 20 bp, Artificial Sequence
  Description of Artificial Sequence: Synthetic oligonucleotide
  Target: LAMA2; (+) strand; PAM type: YTN; PAM sequence: TTT
tttctttttaaatagttagc

SEQ ID NO: 336424 - DNA, 20 bp, Artificial Sequence
  Description of Artificial Sequence: Synthetic oligonucleotide
  Target: LAMA2; (+) strand; PAM type: YTN; PAM sequence: TTT
ttctttttaaatagttagca

SEQ ID NO: 336425 - DNA, 20 bp, Artificial Sequence
  Description of Artificial Sequence: Synthetic oligonucleotide
  Target: LAMA2; (+) strand; PAM type: YTN; PAM sequence: TTT
tctttttaaatagttagcat

SEQ ID NO: 336426 - DNA, 20 bp, Artificial Sequence
  Description of Artificial Sequence: Synthetic oligonucleotide
  Target: LAMA2; (+) strand; PAM type: YTN; PAM sequence: TTT
ctttttaaatagttagcatc

SEQ ID NO: 336427 - DNA, 20 bp, Artificial Sequence
  Description of Artificial Sequence: Synthetic oligonucleotide
  Target: LAMA2; (+) strand; PAM type: YTN; PAM sequence: TTC
tttttaaatagttagcatca

SEQ ID NO: 336428 - DNA, 20 bp, Artificial Sequence
  Description of Artificial Sequence: Synthetic oligonucleotide
  Target: LAMA2; (+) strand; PAM type: YTN; PAM sequence: CTT
tttaaatagttagcatcaaa

SEQ ID NO: 336429 - DNA, 20 bp, Artificial Sequence
  Description of Artificial Sequence: Synthetic oligonucleotide
  Target: LAMA2; (+) strand; PAM type: YTN; PAM sequence: TTT
ttaaatagttagcatcaaat

SEQ ID NO: 336430 - DNA, 20 bp, Artificial Sequence
  Description of Artificial Sequence: Synthetic oligonucleotide
  Target: LAMA2; (+) strand; PAM type: YTN; PAM sequence: TTT
taaatagttagcatcaaatg

SEQ ID NO: 336431 - DNA, 20 bp, Artificial Sequence
  Description of Artificial Sequence: Synthetic oligonucleotide
  Target: LAMA2; (+) strand; PAM type: YTN; PAM sequence: TTT
aaatagttagcatcaaatgc

SEQ ID NO: 336432 - DNA, 20 bp, Artificial Sequence
  Description of Artificial Sequence: Synthetic oligonucleotide
  Target: LAMA2; (+) strand; PAM type: YTN; PAM sequence: TTA
aatagttagcatcaaatgcg

SEQ ID NO: 336433 - DNA, 20 bp, Artificial Sequence
  Description of Artificial Sequence: Synthetic oligonucleotide
  Target: LAMA2; (+) strand; PAM type: YTN; PAM sequence: TTA
gcatcaaatgcgtatgaagt

SEQ ID NO: 336434 - DNA, 20 bp, Artificial Sequence
  Description of Artificial Sequence: Synthetic oligonucleotide
  Target: LAMA2; (+) strand; PAM type: YTN; PAM sequence: TTC
atattttcagtcatcgtttc

SEQ ID NO: 336435 - DNA, 20 bp, Artificial Sequence
  Description of Artificial Sequence: Synthetic oligonucleotide
  Target: LAMA2; (+) strand; PAM type: YTN; PAM sequence: TTT
tcagtcatcgtttcccagta

SEQ ID NO: 336436 - DNA, 20 bp, Artificial Sequence
  Description of Artificial Sequence: Synthetic oligonucleotide
  Target: LAMA2; (+) strand; PAM type: YTN; PAM sequence: TTT
cagtcatcgtttcccagtat

SEQ ID NO: 336437 - DNA, 20 bp, Artificial Sequence
  Description of Artificial Sequence: Synthetic oligonucleotide
  Target: LAMA2; (+) strand; PAM type: YTN; PAM sequence: TTC
agtcatcgtttcccagtatt

SEQ ID NO: 336438 - DNA, 20 bp, Artificial Sequence
  Description of Artificial Sequence: Synthetic oligonucleotide
  Target: LAMA2; (+) strand; PAM type: YTN; PAM sequence: TTT
cccagtatttcttgagacaa

SEQ ID NO: 336439 - DNA, 20 bp, Artificial Sequence
  Description of Artificial Sequence: Synthetic oligonucleotide
  Target: LAMA2; (+) strand; PAM type: YTN; PAM sequence: TTC
ccagtatttcttgagacaat

SEQ ID NO: 336440 - DNA, 20 bp, Artificial Sequence
  Description of Artificial Sequence: Synthetic oligonucleotide
  Target: LAMA2; (+) strand; PAM type: YTN; PAM sequence: TTT
cttgagacaattttgaaata

SEQ ID NO: 336441 - DNA, 20 bp, Artificial Sequence
  Description of Artificial Sequence: Synthetic oligonucleotide
  Target: LAMA2; (+) strand; PAM type: YTN; PAM sequence: TTC
ttgagacaattttgaaatat

SEQ ID NO: 336442 - DNA, 20 bp, Artificial Sequence
  Description of Artificial Sequence: Synthetic oligonucleotide
  Target: LAMA2; (+) strand; PAM type: YTN; PAM sequence: CTT
gagacaattttgaaatattg

SEQ ID NO: 336443 - DNA, 20 bp, Artificial Sequence
  Description of Artificial Sequence: Synthetic oligonucleotide
  Target: LAMA2; (+) strand; PAM type: YTN; PAM sequence: TTG
agacaattttgaaatattgt

SEQ ID NO: 336444 - DNA, 20 bp, Artificial Sequence
  Description of Artificial Sequence: Synthetic oligonucleotide
  Target: LAMA2; (+) strand; PAM type: YTN; PAM sequence: TTT
tgaaatattgtaagagatat

SEQ ID NO: 336445 - DNA, 20 bp, Artificial Sequence
  Description of Artificial Sequence: Synthetic oligonucleotide
  Target: LAMA2; (+) strand; PAM type: YTN; PAM sequence: TTT
gaaatattgtaagagatata

SEQ ID NO: 336446 - DNA, 20 bp, Artificial Sequence
  Description of Artificial Sequence: Synthetic oligonucleotide
  Target: LAMA2; (+) strand; PAM type: YTN; PAM sequence: TTG
aaatattgtaagagatataa

SEQ ID NO: 336447 - DNA, 20 bp, Artificial Sequence
  Description of Artificial Sequence: Synthetic oligonucleotide
  Target: LAMA2; (+) strand; PAM type: YTN; PAM sequence: TTG
taagagatataaaataactt

SEQ ID NO: 336448 - DNA, 20 bp, Artificial Sequence
  Description of Artificial Sequence: Synthetic oligonucleotide
  Target: LAMA2; (+) strand; PAM type: YTN; PAM sequence: CTT
tgatgttggaaagaatagca

SEQ ID NO: 336449 - DNA, 20 bp, Artificial Sequence
  Description of Artificial Sequence: Synthetic oligonucleotide
  Target: LAMA2; (+) strand; PAM type: YTN; PAM sequence: TTT
gatgttggaaagaatagcag

SEQ ID NO: 336450 - DNA, 20 bp, Artificial Sequence
  Description of Artificial Sequence: Synthetic oligonucleotide
  Target: LAMA2; (+) strand; PAM type: YTN; PAM sequence: TTG
atgttggaaagaatagcagt

SEQ ID NO: 336451 - DNA, 20 bp, Artificial Sequence
  Description of Artificial Sequence: Synthetic oligonucleotide
  Target: LAMA2; (+) strand; PAM type: YTN; PAM sequence: TTG
gaaagaatagcagtgaagaa

SEQ ID NO: 336452 - DNA, 20 bp, Artificial Sequence
  Description of Artificial Sequence: Synthetic oligonucleotide
  Target: LAMA2; (+) strand; PAM type: YTN; PAM sequence: TTT
gagaatcttgaaacatgaca

SEQ ID NO: 336453 - DNA, 20 bp, Artificial Sequence
  Description of Artificial Sequence: Synthetic oligonucleotide
  Target: LAMA2; (+) strand; PAM type: YTN; PAM sequence: TTG
agaatcttgaaacatgacag

SEQ ID NO: 336454 - DNA, 20 bp, Artificial Sequence
  Description of Artificial Sequence: Synthetic oligonucleotide
  Target: LAMA2; (+) strand; PAM type: YTN; PAM sequence: CTT
gaaacatgacagatacaaca

SEQ ID NO: 336455 - DNA, 20 bp, Artificial Sequence
  Description of Artificial Sequence: Synthetic oligonucleotide
  Target: LAMA2; (+) strand; PAM type: YTN; PAM sequence: TTG
aaacatgacagatacaacat

SEQ ID NO: 336456 - DNA, 20 bp, Artificial Sequence
  Description of Artificial Sequence: Synthetic oligonucleotide
  Target: LAMA2; (+) strand; PAM type: YTN; PAM sequence: TTG
cattaaaggaaattaaatcc

SEQ ID NO: 336457 - DNA, 20 bp, Artificial Sequence
  Description of Artificial Sequence: Synthetic oligonucleotide
  Target: LAMA2; (+) strand; PAM type: YTN; PAM sequence: TTA
aaggaaattaaatcctggac

SEQ ID NO: 336458 - DNA, 20 bp, Artificial Sequence
  Description of Artificial Sequence: Synthetic oligonucleotide
  Target: LAMA2; (+) strand; PAM type: YTN; PAM sequence: TTA
aatcctggacaattttgctt

SEQ ID NO: 336459 - DNA, 20 bp, Artificial Sequence
  Description of Artificial Sequence: Synthetic oligonucleotide
  Target: LAMA2; (+) strand; PAM type: YTN; PAM sequence: CTG
gacaattttgcttagcttgt

SEQ ID NO: 336460 - DNA, 20 bp, Artificial Sequence
  Description of Artificial Sequence: Synthetic oligonucleotide
  Target: LAMA2; (+) strand; PAM type: YTN; PAM sequence: TTT
tgcttagcttgtaagtacat

SEQ ID NO: 336461 - DNA, 20 bp, Artificial Sequence
  Description of Artificial Sequence: Synthetic oligonucleotide
  Target: LAMA2; (+) strand; PAM type: YTN; PAM sequence: TTT
gcttagcttgtaagtacata

SEQ ID NO: 336462 - DNA, 20 bp, Artificial Sequence
  Description of Artificial Sequence: Synthetic oligonucleotide
  Target: LAMA2; (+) strand; PAM type: YTN; PAM sequence: TTG
cttagcttgtaagtacatat

SEQ ID NO: 336463 - DNA, 20 bp, Artificial Sequence
  Description of Artificial Sequence: Synthetic oligonucleotide
  Target: LAMA2; (+) strand; PAM type: YTN; PAM sequence: CTT
agcttgtaagtacatataca

SEQ ID NO: 336464 - DNA, 20 bp, Artificial Sequence
  Description of Artificial Sequence: Synthetic oligonucleotide
  Target: LAMA2; (+) strand; PAM type: YTN; PAM sequence: TTA
gcttgtaagtacatatacaa

SEQ ID NO: 336465 - DNA, 20 bp, Artificial Sequence
  Description of Artificial Sequence: Synthetic oligonucleotide
  Target: LAMA2; (+) strand; PAM type: YTN; PAM sequence: CTT
gtaagtacatatacaacaca

SEQ ID NO: 336466 - DNA, 20 bp, Artificial Sequence
  Description of Artificial Sequence: Synthetic oligonucleotide
  Target: LAMA2; (+) strand; PAM type: YTN; PAM sequence: TTG
taagtacatatacaacacat

SEQ ID NO: 336467 - DNA, 20 bp, Artificial Sequence
  Description of Artificial Sequence: Synthetic oligonucleotide
  Target: LAMA2; (+) strand; PAM type: YTN; PAM sequence: CTA
taagtacatataaaatatat

SEQ ID NO: 336468 - DNA, 20 bp, Artificial Sequence
  Description of Artificial Sequence: Synthetic oligonucleotide
  Target: LAMA2; (+) strand; PAM type: YTN; PAM sequence: CTT
tctaaatttggctatattgt

SEQ ID NO: 336469 - DNA, 20 bp, Artificial Sequence
  Description of Artificial Sequence: Synthetic oligonucleotide
  Target: LAMA2; (+) strand; PAM type: YTN; PAM sequence: TTT
ctaaatttggctatattgtc

SEQ ID NO: 336470 - DNA, 20 bp, Artificial Sequence
  Description of Artificial Sequence: Synthetic oligonucleotide
  Target: LAMA2; (+) strand; PAM type: YTN; PAM sequence: TTC
taaatttggctatattgtca

SEQ ID NO: 336471 - DNA, 20 bp, Artificial Sequence
  Description of Artificial Sequence: Synthetic oligonucleotide
  Target: LAMA2; (+) strand; PAM type: YTN; PAM sequence: CTA
aatttggctatattgtcaga

SEQ ID NO: 336472 - DNA, 20 bp, Artificial Sequence
  Description of Artificial Sequence: Synthetic oligonucleotide
  Target: LAMA2; (+) strand; PAM type: YTN; PAM sequence: TTT
ggctatattgtcagatacct

SEQ ID NO: 336473 - DNA, 20 bp, Artificial Sequence
  Description of Artificial Sequence: Synthetic oligonucleotide
  Target: LAMA2; (+) strand; PAM type: YTN; PAM sequence: TTG
gctatattgtcagatacctg

SEQ ID NO: 336474 - DNA, 20 bp, Artificial Sequence
  Description of Artificial Sequence: Synthetic oligonucleotide
  Target: LAMA2; (+) strand; PAM type: YTN; PAM sequence: CTA
tattgtcagatacctgagaa

SEQ ID NO: 336475 - DNA, 20 bp, Artificial Sequence
  Description of Artificial Sequence: Synthetic oligonucleotide
  Target: LAMA2; (+) strand; PAM type: YTN; PAM sequence: TTG
tcagatacctgagaaaatta

SEQ ID NO: 336476 - DNA, 20 bp, Artificial Sequence
  Description of Artificial Sequence: Synthetic oligonucleotide
  Target: LAMA2; (+) strand; PAM type: YTN; PAM sequence: CTG
agaaaattattatctttata

SEQ ID NO: 336477 - DNA, 20 bp, Artificial Sequence
  Description of Artificial Sequence: Synthetic oligonucleotide
  Target: LAMA2; (+) strand; PAM type: YTN; PAM sequence: TTA
ttatctttatagcctctgtg

SEQ ID NO: 336478 - DNA, 20 bp, Artificial Sequence
  Description of Artificial Sequence: Synthetic oligonucleotide
  Target: LAMA2; (+) strand; PAM type: YTN; PAM sequence: TTA
tctttatagcctctgtgata

SEQ ID NO: 336479 - DNA, 20 bp, Artificial Sequence
  Description of Artificial Sequence: Synthetic oligonucleotide
  Target: LAMA2; (+) strand; PAM type: YTN; PAM sequence: CTT
tatagcctctgtgatatgtc

SEQ ID NO: 336480 - DNA, 20 bp, Artificial Sequence
  Description of Artificial Sequence: Synthetic oligonucleotide
  Target: LAMA2; (+) strand; PAM type: YTN; PAM sequence: TTT
atagcctctgtgatatgtcg

SEQ ID NO: 336481 - DNA, 20 bp, Artificial Sequence
  Description of Artificial Sequence: Synthetic oligonucleotide
  Target: LAMA2; (+) strand; PAM type: YTN; PAM sequence: TTA
tagcctctgtgatatgtcgc

SEQ ID NO: 336482 - DNA, 20 bp, Artificial Sequence
  Description of Artificial Sequence: Synthetic oligonucleotide
  Target: LAMA2; (+) strand; PAM type: YTN; PAM sequence: CTC
tgtgatatgtcgccaatgca

SEQ ID NO: 336483 - DNA, 20 bp, Artificial Sequence
  Description of Artificial Sequence: Synthetic oligonucleotide
  Target: LAMA2; (+) strand; PAM type: YTN; PAM sequence: CTG
tgatatgtcgccaatgcaag

SEQ ID NO: 336484 - DNA, 20 bp, Artificial Sequence
  Description of Artificial Sequence: Synthetic oligonucleotide
  Target: LAMA2; (+) strand; PAM type: YTN; PAM sequence: CTC
aaaaagagtcagttagtaaa

SEQ ID NO: 336485 - DNA, 20 bp, Artificial Sequence
  Description of Artificial Sequence: Synthetic oligonucleotide
  Target: LAMA2; (+) strand; PAM type: YTN; PAM sequence: TTA
gtaaatgaactcttttatta

SEQ ID NO: 336486 - DNA, 20 bp, Artificial Sequence
  Description of Artificial Sequence: Synthetic oligonucleotide
  Target: LAMA2; (+) strand; PAM type: YTN; PAM sequence: CTC
ttttattatttgtataaatt

SEQ ID NO: 336487 - DNA, 20 bp, Artificial Sequence
  Description of Artificial Sequence: Synthetic oligonucleotide
  Target: LAMA2; (+) strand; PAM type: YTN; PAM sequence: CTT
ttattatttgtataaattat

SEQ ID NO: 336488 - DNA, 20 bp, Artificial Sequence
  Description of Artificial Sequence: Synthetic oligonucleotide
  Target: LAMA2; (+) strand; PAM type: YTN; PAM sequence: TTT
tattatttgtataaattata

SEQ ID NO: 336489 - DNA, 20 bp, Artificial Sequence
  Description of Artificial Sequence: Synthetic oligonucleotide
  Target: LAMA2; (+) strand; PAM type: YTN; PAM sequence: TTT
attatttgtataaattatag

SEQ ID NO: 336490 - DNA, 20 bp, Artificial Sequence
  Description of Artificial Sequence: Synthetic oligonucleotide
  Target: LAMA2; (+) strand; PAM type: YTN; PAM sequence: TTA
ttatttgtataaattatagt

SEQ ID NO: 336491 - DNA, 20 bp, Artificial Sequence
  Description of Artificial Sequence: Synthetic oligonucleotide
  Target: LAMA2; (+) strand; PAM type: YTN; PAM sequence: TTA
tttgtataaattatagtttt

SEQ ID NO: 336492 - DNA, 20 bp, Artificial Sequence
  Description of Artificial Sequence: Synthetic oligonucleotide
  Target: LAMA2; (+) strand; PAM type: YTN; PAM sequence: TTT
gtataaattatagtttttat

SEQ ID NO: 336493 - DNA, 20 bp, Artificial Sequence
  Description of Artificial Sequence: Synthetic oligonucleotide
  Target: LAMA2; (+) strand; PAM type: YTN; PAM sequence: TTG
tataaattatagtttttata

SEQ ID NO: 336494 - DNA, 20 bp, Artificial Sequence
  Description of Artificial Sequence: Synthetic oligonucleotide
  Target: LAMA2; (+) strand; PAM type: YTN; PAM sequence: TTA
tagtttttataatttaaatg

SEQ ID NO: 336495 - DNA, 20 bp, Artificial Sequence
  Description of Artificial Sequence: Synthetic oligonucleotide
  Target: LAMA2; (+) strand; PAM type: YTN; PAM sequence: TTT
ttataatttaaatgtaacat

SEQ ID NO: 336496 - DNA, 20 bp, Artificial Sequence
  Description of Artificial Sequence: Synthetic oligonucleotide
  Target: LAMA2; (+) strand; PAM type: YTN; PAM sequence: TTT
tataatttaaatgtaacata

SEQ ID NO: 336497 - DNA, 20 bp, Artificial Sequence
  Description of Artificial Sequence: Synthetic oligonucleotide
  Target: LAMA2; (+) strand; PAM type: YTN; PAM sequence: TTT
ataatttaaatgtaacatat

SEQ ID NO: 336498 - DNA, 20 bp, Artificial Sequence
  Description of Artificial Sequence: Synthetic oligonucleotide
  Target: LAMA2; (+) strand; PAM type: YTN; PAM sequence: TTA
taatttaaatgtaacatatg

SEQ ID NO: 336499 - DNA, 20 bp, Artificial Sequence
  Description of Artificial Sequence: Synthetic oligonucleotide
  Target: LAMA2; (+) strand; PAM type: YTN; PAM sequence: TTT
aaatgtaacatatgaatact

SEQ ID NO: 336500 - DNA, 20 bp, Artificial Sequence
  Description of Artificial Sequence: Synthetic oligonucleotide
  Target: LAMA2; (+) strand; PAM type: YTN; PAM sequence: TTA
aatgtaacatatgaatactt

SEQ ID NO: 336501 - DNA, 20 bp, Artificial Sequence
  Description of Artificial Sequence: Synthetic oligonucleotide
  Target: LAMA2; (+) strand; PAM type: YTN; PAM sequence: CTT
gtgtctggaattacaataga

SEQ ID NO: 336502 - DNA, 20 bp, Artificial Sequence
  Description of Artificial Sequence: Synthetic oligonucleotide
  Target: LAMA2; (+) strand; PAM type: YTN; PAM sequence: TTG
tgtctggaattacaatagac

SEQ ID NO: 336503 - DNA, 20 bp, Artificial Sequence
  Description of Artificial Sequence: Synthetic oligonucleotide
  Target: LAMA2; (+) strand; PAM type: YTN; PAM sequence: CTG
gaattacaatagacacattt

SEQ ID NO: 336504 - DNA, 20 bp, Artificial Sequence
  Description of Artificial Sequence: Synthetic oligonucleotide
  Target: LAMA2; (+) strand; PAM type: YTN; PAM sequence: TTA
caatagacacatttttatct

SEQ ID NO: 336505 - DNA, 20 bp, Artificial Sequence
  Description of Artificial Sequence: Synthetic oligonucleotide
  Target: LAMA2; (+) strand; PAM type: YTN; PAM sequence: TTT
ttatctccagagagttacta

SEQ ID NO: 336506 - DNA, 20 bp, Artificial Sequence
  Description of Artificial Sequence: Synthetic oligonucleotide
  Target: LAMA2; (+) strand; PAM type: YTN; PAM sequence: TTT
tatctccagagagttactac

SEQ ID NO: 336507 - DNA, 20 bp, Artificial Sequence
  Description of Artificial Sequence: Synthetic oligonucleotide
  Target: LAMA2; (+) strand; PAM type: YTN; PAM sequence: TTT
atctccagagagttactact

SEQ ID NO: 336508 - DNA, 20 bp, Artificial Sequence
  Description of Artificial Sequence: Synthetic oligonucleotide
  Target: LAMA2; (+) strand; PAM type: YTN; PAM sequence: TTA
tctccagagagttactactg

SEQ ID NO: 336509 - DNA, 20 bp, Artificial Sequence
  Description of Artificial Sequence: Synthetic oligonucleotide
  Target: LAMA2; (+) strand; PAM type: YTN; PAM sequence: CTC
cagagagttactactggcac

SEQ ID NO: 336510 - DNA, 20 bp, Artificial Sequence
  Description of Artificial Sequence: Synthetic oligonucleotide
  Target: LAMA2; (+) strand; PAM type: YTN; PAM sequence: TTA
ctactggcactttttgaaat

SEQ ID NO: 336511 - DNA, 20 bp, Artificial Sequence
  Description of Artificial Sequence: Synthetic oligonucleotide
  Target: LAMA2; (+) strand; PAM type: YTN; PAM sequence: CTA
ctggcactttttgaaatcct

SEQ ID NO: 336512 - DNA, 20 bp, Artificial Sequence
  Description of Artificial Sequence: Synthetic oligonucleotide
  Target: LAMA2; (+) strand; PAM type: YTN; PAM sequence: CTG
gcactttttgaaatcctgtt

SEQ ID NO: 336513 - DNA, 20 bp, Artificial Sequence
  Description of Artificial Sequence: Synthetic oligonucleotide
  Target: LAMA2; (+) strand; PAM type: YTN; PAM sequence: CTT
tttgaaatcctgttttgtcc

SEQ ID NO: 336514 - DNA, 20 bp, Artificial Sequence
  Description of Artificial Sequence: Synthetic oligonucleotide
  Target: LAMA2; (+) strand; PAM type: YTN; PAM sequence: TTT
ttgaaatcctgttttgtcct

SEQ ID NO: 336515 - DNA, 20 bp, Artificial Sequence
  Description of Artificial Sequence: Synthetic oligonucleotide
  Target: LAMA2; (+) strand; PAM type: YTN; PAM sequence: TTT
tgaaatcctgttttgtccta

SEQ ID NO: 336516 - DNA, 20 bp, Artificial Sequence
  Description of Artificial Sequence: Synthetic oligonucleotide
  Target: LAMA2; (+) strand; PAM type: YTN; PAM sequence: TTT
gaaatcctgttttgtcctag

SEQ ID NO: 336517 - DNA, 20 bp, Artificial Sequence
  Description of Artificial Sequence: Synthetic oligonucleotide
  Target: LAMA2; (+) strand; PAM type: YTN; PAM sequence: TTG
aaatcctgttttgtcctaga

SEQ ID NO: 336518 - DNA, 20 bp, Artificial Sequence
  Description of Artificial Sequence: Synthetic oligonucleotide
  Target: LAMA2; (+) strand; PAM type: YTN; PAM sequence: CTG
ttttgtcctagacactggac

SEQ ID NO: 336519 - DNA, 20 bp, Artificial Sequence
  Description of Artificial Sequence: Synthetic oligonucleotide
  Target: LAMA2; (+) strand; PAM type: YTN; PAM sequence: TTT
tgtcctagacactggacaaa

SEQ ID NO: 336520 - DNA, 20 bp, Artificial Sequence
  Description of Artificial Sequence: Synthetic oligonucleotide
  Target: LAMA2; (+) strand; PAM type: YTN; PAM sequence: TTT
gtcctagacactggacaaaa

SEQ ID NO: 336521 - DNA, 20 bp, Artificial Sequence
  Description of Artificial Sequence: Synthetic oligonucleotide
  Target: LAMA2; (+) strand; PAM type: YTN; PAM sequence: TTG
tcctagacactggacaaaat

SEQ ID NO: 336522 - DNA, 20 bp, Artificial Sequence
  Description of Artificial Sequence: Synthetic oligonucleotide
  Target: LAMA2; (+) strand; PAM type: YTN; PAM sequence: CTA
gacactggacaaaatatttt

SEQ ID NO: 336523 - DNA, 20 bp, Artificial Sequence
  Description of Artificial Sequence: Synthetic oligonucleotide
  Target: LAMA2; (+) strand; PAM type: YTN; PAM sequence: CTG
gacaaaatattttacataaa

SEQ ID NO: 336524 - DNA, 20 bp, Artificial Sequence
  Description of Artificial Sequence: Synthetic oligonucleotide
  Target: LAMA2; (+) strand; PAM type: YTN; PAM sequence: TTT
tacataaattatcttataga

SEQ ID NO: 336525 - DNA, 20 bp, Artificial Sequence
  Description of Artificial Sequence: Synthetic oligonucleotide
  Target: LAMA2; (+) strand; PAM type: YTN; PAM sequence: TTT
acataaattatcttatagaa

SEQ ID NO: 336526 - DNA, 20 bp, Artificial Sequence
  Description of Artificial Sequence: Synthetic oligonucleotide
  Target: LAMA2; (+) strand; PAM type: YTN; PAM sequence: TTA
cataaattatcttatagaac

SEQ ID NO: 336527 - DNA, 20 bp, Artificial Sequence
  Description of Artificial Sequence: Synthetic oligonucleotide
  Target: LAMA2; (+) strand; PAM type: YTN; PAM sequence: TTA
tcttatagaacttttcaact

SEQ ID NO: 336528 - DNA, 20 bp, Artificial Sequence
  Description of Artificial Sequence: Synthetic oligonucleotide
  Target: LAMA2; (+) strand; PAM type: YTN; PAM sequence: CTT
atagaacttttcaactccgt

SEQ ID NO: 336529 - DNA, 20 bp, Artificial Sequence
  Description of Artificial Sequence: Synthetic oligonucleotide
  Target: LAMA2; (+) strand; PAM type: YTN; PAM sequence: TTA
tagaacttttcaactccgta

SEQ ID NO: 336530 - DNA, 20 bp, Artificial Sequence
  Description of Artificial Sequence: Synthetic oligonucleotide
  Target: LAMA2; (+) strand; PAM type: YTN; PAM sequence: CTT
ttcaactccgtaagaaagat

SEQ ID NO: 336531 - DNA, 20 bp, Artificial Sequence
  Description of Artificial Sequence: Synthetic oligonucleotide
  Target: LAMA2; (+) strand; PAM type: YTN; PAM sequence: TTT
tcaactccgtaagaaagata

SEQ ID NO: 336532 - DNA, 20 bp, Artificial Sequence
  Description of Artificial Sequence: Synthetic oligonucleotide
  Target: LAMA2; (+) strand; PAM type: YTN; PAM sequence: TTT
caactccgtaagaaagatac

SEQ ID NO: 336533 - DNA, 20 bp, Artificial Sequence
  Description of Artificial Sequence: Synthetic oligonucleotide
  Target: LAMA2; (+) strand; PAM type: YTN; PAM sequence: TTC
aactccgtaagaaagatact

SEQ ID NO: 336534 - DNA, 20 bp, Artificial Sequence
  Description of Artificial Sequence: Synthetic oligonucleotide
  Target: LAMA2; (+) strand; PAM type: YTN; PAM sequence: CTC
cgtaagaaagatactattat

SEQ ID NO: 336535 - DNA, 20 bp, Artificial Sequence
  Description of Artificial Sequence: Synthetic oligonucleotide
  Target: LAMA2; (+) strand; PAM type: YTN; PAM sequence: CTA
ttataattagtacattttgt

SEQ ID NO: 336536 - DNA, 20 bp, Artificial Sequence
  Description of Artificial Sequence: Synthetic oligonucleotide
  Target: LAMA2; (+) strand; PAM type: YTN; PAM sequence: TTA
taattagtacattttgtatc

SEQ ID NO: 336537 - DNA, 20 bp, Artificial Sequence
  Description of Artificial Sequence: Synthetic oligonucleotide
  Target: LAMA2; (+) strand; PAM type: YTN; PAM sequence: TTA
gtacattttgtatcacagaa

SEQ ID NO: 336538 - DNA, 20 bp, Artificial Sequence
  Description of Artificial Sequence: Synthetic oligonucleotide
  Target: LAMA2; (+) strand; PAM type: YTN; PAM sequence: TTT
tgtatcacagaaattaaaca

SEQ ID NO: 336539 - DNA, 20 bp, Artificial Sequence
  Description of Artificial Sequence: Synthetic oligonucleotide
  Target: LAMA2; (+) strand; PAM type: YTN; PAM sequence: TTT
gtatcacagaaattaaacaa

SEQ ID NO: 336540 - DNA, 20 bp, Artificial Sequence
  Description of Artificial Sequence: Synthetic oligonucleotide
  Target: LAMA2; (+) strand; PAM type: YTN; PAM sequence: TTG
tatcacagaaattaaacaac

SEQ ID NO: 336541 - DNA, 20 bp, Artificial Sequence
  Description of Artificial Sequence: Synthetic oligonucleotide
  Target: LAMA2; (+) strand; PAM type: YTN; PAM sequence: TTA
aacaacttcctcaaaatgac

SEQ ID NO: 336542 - DNA, 20 bp, Artificial Sequence
  Description of Artificial Sequence: Synthetic oligonucleotide
  Target: LAMA2; (+) strand; PAM type: YTN; PAM sequence: CTT
cctcaaaatgacacagttag

SEQ ID NO: 336543 - DNA, 20 bp, Artificial Sequence
  Description of Artificial Sequence: Synthetic oligonucleotide
  Target: LAMA2; (+) strand; PAM type: YTN; PAM sequence: TTC
ctcaaaatgacacagttaga

SEQ ID NO: 336544 - DNA, 20 bp, Artificial Sequence
  Description of Artificial Sequence: Synthetic oligonucleotide
  Target: LAMA2; (+) strand; PAM type: YTN; PAM sequence: CTC
aaaatgacacagttagaaaa

SEQ ID NO: 336545 - DNA, 20 bp, Artificial Sequence
  Description of Artificial Sequence: Synthetic oligonucleotide
  Target: LAMA2; (+) strand; PAM type: YTN; PAM sequence: TTA
gaaaacaatagagcacaaga

SEQ ID NO: 336546 - DNA, 20 bp, Artificial Sequence
  Description of Artificial Sequence: Synthetic oligonucleotide
  Target: LAMA2; (+) strand; PAM type: YTN; PAM sequence: TTC
tttctgatgtcaaagcctgc

SEQ ID NO: 336547 - DNA, 20 bp, Artificial Sequence
  Description of Artificial Sequence: Synthetic oligonucleotide
  Target: LAMA2; (+) strand; PAM type: YTN; PAM sequence: CTT
tctgatgtcaaagcctgccg

SEQ ID NO: 336548 - DNA, 20 bp, Artificial Sequence
  Description of Artificial Sequence: Synthetic oligonucleotide
  Target: LAMA2; (+) strand; PAM type: YTN; PAM sequence: TTT
ctgatgtcaaagcctgccgt

SEQ ID NO: 336549 - DNA, 20 bp, Artificial Sequence
  Description of Artificial Sequence: Synthetic oligonucleotide
  Target: LAMA2; (+) strand; PAM type: YTN; PAM sequence: TTC
tgatgtcaaagcctgccgtg

SEQ ID NO: 336550 - DNA, 20 bp, Artificial Sequence
  Description of Artificial Sequence: Synthetic oligonucleotide
  Target: LAMA2; (+) strand; PAM type: YTN; PAM sequence: CTG
atgtcaaagcctgccgtgta

SEQ ID NO: 336551 - DNA, 20 bp, Artificial Sequence
  Description of Artificial Sequence: Synthetic oligonucleotide
  Target: LAMA2; (+) strand; PAM type: YTN; PAM sequence: CTG
ccgtgtatactccagatgac

SEQ ID NO: 336552 - DNA, 20 bp, Artificial Sequence
  Description of Artificial Sequence: Synthetic oligonucleotide
  Target: LAMA2; (+) strand; PAM type: YTN; PAM sequence: CTC
cagatgacctgaaccttaga

SEQ ID NO: 336553 - DNA, 20 bp, Artificial Sequence
  Description of Artificial Sequence: Synthetic oligonucleotide
  Target: LAMA2; (+) strand; PAM type: YTN; PAM sequence: CTG
aaccttagagtaactaaaag

SEQ ID NO: 336554 - DNA, 20 bp, Artificial Sequence
  Description of Artificial Sequence: Synthetic oligonucleotide
  Target: LAMA2; (+) strand; PAM type: YTN; PAM sequence: CTT
agagtaactaaaagcatcag

SEQ ID NO: 336555 - DNA, 20 bp, Artificial Sequence
  Description of Artificial Sequence: Synthetic oligonucleotide
  Target: LAMA2; (+) strand; PAM type: YTN; PAM sequence: TTA
gagtaactaaaagcatcagg

SEQ ID NO: 336556 - DNA, 20 bp, Artificial Sequence
  Description of Artificial Sequence: Synthetic oligonucleotide
  Target: LAMA2; (+) strand; PAM type: YTN; PAM sequence: CTA
aaagcatcagggcttctctg

SEQ ID NO: 336557 - DNA, 20 bp, Artificial Sequence
  Description of Artificial Sequence: Synthetic oligonucleotide
  Target: LAMA2; (+) strand; PAM type: YTN; PAM sequence: CTT
ctctgatatataattgtgag

SEQ ID NO: 336558 - DNA, 20 bp, Artificial Sequence
  Description of Artificial Sequence: Synthetic oligonucleotide
  Target: LAMA2; (+) strand; PAM type: YTN; PAM sequence: TTC
tctgatatataattgtgaga

SEQ ID NO: 336559 - DNA, 20 bp, Artificial Sequence
  Description of Artificial Sequence: Synthetic oligonucleotide
  Target: LAMA2; (+) strand; PAM type: YTN; PAM sequence: CTC
tgatatataattgtgagaat

SEQ ID NO: 336560 - DNA, 20 bp, Artificial Sequence
  Description of Artificial Sequence: Synthetic oligonucleotide
  Target: LAMA2; (+) strand; PAM type: YTN; PAM sequence: CTG
atatataattgtgagaatct

SEQ ID NO: 336561 - DNA, 20 bp, Artificial Sequence
  Description of Artificial Sequence: Synthetic oligonucleotide
  Target: LAMA2; (+) strand; PAM type: YTN; PAM sequence: TTG
tgagaatctcactaaaaaca

SEQ ID NO: 336562 - DNA, 20 bp, Artificial Sequence
  Description of Artificial Sequence: Synthetic oligonucleotide
  Target: LAMA2; (+) strand; PAM type: YTN; PAM sequence: CTC
actaaaaacaagattaaatt

SEQ ID NO: 336563 - DNA, 20 bp, Artificial Sequence
  Description of Artificial Sequence: Synthetic oligonucleotide
  Target: LAMA2; (+) strand; PAM type: YTN; PAM sequence: CTA
aaaacaagattaaattacta

SEQ ID NO: 336564 - DNA, 20 bp, Artificial Sequence
  Description of Artificial Sequence: Synthetic oligonucleotide
  Target: LAMA2; (+) strand; PAM type: YTN; PAM sequence: TTA
aattactacagaggagtctt

SEQ ID NO: 336565 - DNA, 20 bp, Artificial Sequence
  Description of Artificial Sequence: Synthetic oligonucleotide
  Target: LAMA2; (+) strand; PAM type: YTN; PAM sequence: TTA
ctacagaggagtcttagaat

SEQ ID NO: 336566 - DNA, 20 bp, Artificial Sequence
  Description of Artificial Sequence: Synthetic oligonucleotide
  Target: LAMA2; (+) strand; PAM type: YTN; PAM sequence: CTA
cagaggagtcttagaattta

SEQ ID NO: 336567 - DNA, 20 bp, Artificial Sequence
  Description of Artificial Sequence: Synthetic oligonucleotide
  Target: LAMA2; (+) strand; PAM type: YTN; PAM sequence: CTT
agaatttaaaactctaaaaa

SEQ ID NO: 336568 - DNA, 20 bp, Artificial Sequence
  Description of Artificial Sequence: Synthetic oligonucleotide
  Target: LAMA2; (+) strand; PAM type: YTN; PAM sequence: TTA
gaatttaaaactctaaaaag

SEQ ID NO: 336569 - DNA, 20 bp, Artificial Sequence
  Description of Artificial Sequence: Synthetic oligonucleotide
  Target: LAMA2; (+) strand; PAM type: YTN; PAM sequence: TTT
aaaactctaaaaagtgaaac

SEQ ID NO: 336570 - DNA, 20 bp, Artificial Sequence
  Description of Artificial Sequence: Synthetic oligonucleotide
  Target: LAMA2; (+) strand; PAM type: YTN; PAM sequence: TTA
aaactctaaaaagtgaaact

SEQ ID NO: 336571 - DNA, 20 bp, Artificial Sequence
  Description of Artificial Sequence: Synthetic oligonucleotide
  Target: LAMA2; (+) strand; PAM type: YTN; PAM sequence: CTC
taaaaagtgaaacttaggat

SEQ ID NO: 336572 - DNA, 20 bp, Artificial Sequence
  Description of Artificial Sequence: Synthetic oligonucleotide
  Target: LAMA2; (+) strand; PAM type: YTN; PAM sequence: CTA
aaaagtgaaacttaggattt

SEQ ID NO: 336573 - DNA, 20 bp, Artificial Sequence
  Description of Artificial Sequence: Synthetic oligonucleotide
  Target: LAMA2; (+) strand; PAM type: YTN; PAM sequence: CTT
aggatttaccaaaaatgttt

SEQ ID NO: 336574 - DNA, 20 bp, Artificial Sequence
  Description of Artificial Sequence: Synthetic oligonucleotide
  Target: LAMA2; (+) strand; PAM type: YTN; PAM sequence: TTA
ggatttaccaaaaatgtttc

SEQ ID NO: 336575 - DNA, 20 bp, Artificial Sequence
  Description of Artificial Sequence: Synthetic oligonucleotide
  Target: LAMA2; (+) strand; PAM type: YTN; PAM sequence: TTT
accaaaaatgtttctaactt

SEQ ID NO: 336576 - DNA, 20 bp, Artificial Sequence
  Description of Artificial Sequence: Synthetic oligonucleotide
  Target: LAMA2; (+) strand; PAM type: YTN; PAM sequence: TTA
ccaaaaatgtttctaacttc

SEQ ID NO: 336577 - DNA, 20 bp, Artificial Sequence
  Description of Artificial Sequence: Synthetic oligonucleotide
  Target: LAMA2; (+) strand; PAM type: YTN; PAM sequence: TTT
ctaacttctcatatacatgt

SEQ ID NO: 336578 - DNA, 20 bp, Artificial Sequence
  Description of Artificial Sequence: Synthetic oligonucleotide
  Target: LAMA2; (+) strand; PAM type: YTN; PAM sequence: TTC
taacttctcatatacatgta

SEQ ID NO: 336579 - DNA, 20 bp, Artificial Sequence
  Description of Artificial Sequence: Synthetic oligonucleotide
  Target: LAMA2; (+) strand; PAM type: YTN; PAM sequence: CTA
acttctcatatacatgtatg

SEQ ID NO: 336580 - DNA, 20 bp, Artificial Sequence
  Description of Artificial Sequence: Synthetic oligonucleotide
  Target: LAMA2; (+) strand; PAM type: YTN; PAM sequence: CTT
ctcatatacatgtatggatg

SEQ ID NO: 336581 - DNA, 20 bp, Artificial Sequence
  Description of Artificial Sequence: Synthetic oligonucleotide
  Target: LAMA2; (+) strand; PAM type: YTN; PAM sequence: TTC
tcatatacatgtatggatgt

SEQ ID NO: 336582 - DNA, 20 bp, Artificial Sequence
  Description of Artificial Sequence: Synthetic oligonucleotide
  Target: LAMA2; (+) strand; PAM type: YTN; PAM sequence: CTC
atatacatgtatggatgtaa

SEQ ID NO: 336583 - DNA, 20 bp, Artificial Sequence
  Description of Artificial Sequence: Synthetic oligonucleotide
  Target: LAMA2; (+) strand; PAM type: YTN; PAM sequence: CTG
aaatgctgggttgattattg

SEQ ID NO: 336584 - DNA, 20 bp, Artificial Sequence
  Description of Artificial Sequence: Synthetic oligonucleotide
  Target: LAMA2; (+) strand; PAM type: YTN; PAM sequence: CTG
ggttgattattgaaatgtcc

SEQ ID NO: 336585 - DNA, 20 bp, Artificial Sequence
  Description of Artificial Sequence: Synthetic oligonucleotide
  Target: LAMA2; (+) strand; PAM type: YTN; PAM sequence: TTG
attattgaaatgtccatatg

SEQ ID NO: 336586 - DNA, 20 bp, Artificial Sequence
  Description of Artificial Sequence: Synthetic oligonucleotide
  Target: LAMA2; (+) strand; PAM type: YTN; PAM sequence: TTA
ttgaaatgtccatatgaact

SEQ ID NO: 336587 - DNA, 20 bp, Artificial Sequence
  Description of Artificial Sequence: Synthetic oligonucleotide
  Target: LAMA2; (+) strand; PAM type: YTN; PAM sequence: TTG
aaatgtccatatgaacttac

SEQ ID NO: 336588 - DNA, 20 bp, Artificial Sequence
  Description of Artificial Sequence: Synthetic oligonucleotide
  Target: LAMA2; (+) strand; PAM type: YTN; PAM sequence: CTT
acaaatttaccagaaaaaaa

SEQ ID NO: 336589 - DNA, 20 bp, Artificial Sequence
  Description of Artificial Sequence: Synthetic oligonucleotide
  Target: LAMA2; (+) strand; PAM type: YTN; PAM sequence: TTA
caaatttaccagaaaaaaat

SEQ ID NO: 336590 - DNA, 20 bp, Artificial Sequence
  Description of Artificial Sequence: Synthetic oligonucleotide
  Target: LAMA2; (+) strand; PAM type: YTN; PAM sequence: TTT
accagaaaaaaatcaaacta

SEQ ID NO: 336591 - DNA, 20 bp, Artificial Sequence
  Description of Artificial Sequence: Synthetic oligonucleotide
  Target: LAMA2; (+) strand; PAM type: YTN; PAM sequence: TTA
ccagaaaaaaatcaaactac

SEQ ID NO: 336592 - DNA, 20 bp, Artificial Sequence
  Description of Artificial Sequence: Synthetic oligonucleotide
  Target: LAMA2; (+) strand; PAM type: YTN; PAM sequence: CTA
ccccatcaaaaagtgggcaa

SEQ ID NO: 336593 - DNA, 20 bp, Artificial Sequence
  Description of Artificial Sequence: Synthetic oligonucleotide
  Target: LAMA2; (+) strand; PAM type: YTN; PAM sequence: CTT
ctcaaaagaagacatttatg

SEQ ID NO: 336594 - DNA, 20 bp, Artificial Sequence
  Description of Artificial Sequence: Synthetic oligonucleotide
  Target: LAMA2; (+) strand; PAM type: YTN; PAM sequence: TTC
tcaaaagaagacatttatgc

SEQ ID NO: 336595 - DNA, 20 bp, Artificial Sequence
  Description of Artificial Sequence: Synthetic oligonucleotide
  Target: LAMA2; (+) strand; PAM type: YTN; PAM sequence: CTC
aaaagaagacatttatgcag

SEQ ID NO: 336596 - DNA, 20 bp, Artificial Sequence
  Description of Artificial Sequence: Synthetic oligonucleotide
  Target: LAMA2; (+) strand; PAM type: YTN; PAM sequence: TTT
atgcagccaacagacacatg

SEQ ID NO: 336597 - DNA, 20 bp, Artificial Sequence
  Description of Artificial Sequence: Synthetic oligonucleotide
  Target: LAMA2; (+) strand; PAM type: YTN; PAM sequence: TTA
tgcagccaacagacacatga

SEQ ID NO: 336598 - DNA, 20 bp, Artificial Sequence
  Description of Artificial Sequence: Synthetic oligonucleotide
  Target: LAMA2; (+) strand; PAM type: YTN; PAM sequence: CTC
gtcatcactggccttcagag

SEQ ID NO: 336599 - DNA, 20 bp, Artificial Sequence
  Description of Artificial Sequence: Synthetic oligonucleotide
  Target: LAMA2; (+) strand; PAM type: YTN; PAM sequence: CTG
gccttcagagaaatgcaaat

SEQ ID NO: 336600 - DNA, 20 bp, Artificial Sequence
  Description of Artificial Sequence: Synthetic oligonucleotide
  Target: LAMA2; (+) strand; PAM type: YTN; PAM sequence: CTT
cagagaaatgcaaatcaaaa

SEQ ID NO: 336601 - DNA, 20 bp, Artificial Sequence
  Description of Artificial Sequence: Synthetic oligonucleotide
  Target: LAMA2; (+) strand; PAM type: YTN; PAM sequence: TTC
agagaaatgcaaatcaaaac

SEQ ID NO: 336602 - DNA, 20 bp, Artificial Sequence
  Description of Artificial Sequence: Synthetic oligonucleotide
  Target: LAMA2; (+) strand; PAM type: YTN; PAM sequence: TTA
gaatggcgatcattaaaaag

SEQ ID NO: 336603 - DNA, 20 bp, Artificial Sequence
  Description of Artificial Sequence: Synthetic oligonucleotide
  Target: LAMA2; (+) strand; PAM type: YTN; PAM sequence: TTA
aaaagtcaggaaacaacagg

SEQ ID NO: 336604 - DNA, 20 bp, Artificial Sequence
  Description of Artificial Sequence: Synthetic oligonucleotide
  Target: LAMA2; (+) strand; PAM type: YTN; PAM sequence: CTG
gagaggatgtggagaaatag

SEQ ID NO: 336605 - DNA, 20 bp, Artificial Sequence
  Description of Artificial Sequence: Synthetic oligonucleotide
  Target: LAMA2; (+) strand; PAM type: YTN; PAM sequence: CTT
ttacaccgttggcgggactg

SEQ ID NO: 336606 - DNA, 20 bp, Artificial Sequence
  Description of Artificial Sequence: Synthetic oligonucleotide
  Target: LAMA2; (+) strand; PAM type: YTN; PAM sequence: TTT
tacaccgttggcgggactgt

SEQ ID NO: 336607 - DNA, 20 bp, Artificial Sequence
  Description of Artificial Sequence: Synthetic oligonucleotide
  Target: LAMA2; (+) strand; PAM type: YTN; PAM sequence: TTT
acaccgttggcgggactgta

SEQ ID NO: 336608 - DNA, 20 bp, Artificial Sequence
  Description of Artificial Sequence: Synthetic oligonucleotide
  Target: LAMA2; (+) strand; PAM type: YTN; PAM sequence: TTA
caccgttggcgggactgtaa

SEQ ID NO: 336609 - DNA, 20 bp, Artificial Sequence
  Description of Artificial Sequence: Synthetic oligonucleotide
  Target: LAMA2; (+) strand; PAM type: YTN; PAM sequence: TTG
gcgggactgtaaactagtta

SEQ ID NO: 336610 - DNA, 20 bp, Artificial Sequence
  Description of Artificial Sequence: Synthetic oligonucleotide
  Target: LAMA2; (+) strand; PAM type: YTN; PAM sequence: CTG
taaactagttaaaccattgt

SEQ ID NO: 336611 - DNA, 20 bp, Artificial Sequence
  Description of Artificial Sequence: Synthetic oligonucleotide
  Target: LAMA2; (+) strand; PAM type: YTN; PAM sequence: CTA
gttaaaccattgtggaagac

SEQ ID NO: 336612 - DNA, 20 bp, Artificial Sequence
  Description of Artificial Sequence: Synthetic oligonucleotide
  Target: LAMA2; (+) strand; PAM type: YTN; PAM sequence: TTA
aaccattgtggaagacagtg

SEQ ID NO: 336613 - DNA, 20 bp, Artificial Sequence
  Description of Artificial Sequence: Synthetic oligonucleotide
  Target: LAMA2; (+) strand; PAM type: YTN; PAM sequence: TTG
tggaagacagtgtggcgatt

SEQ ID NO: 336614 - DNA, 20 bp, Artificial Sequence
  Description of Artificial Sequence: Synthetic oligonucleotide
  Target: LAMA2; (+) strand; PAM type: YTN; PAM sequence: TTC
ctcaaggatctagaactaga

SEQ ID NO: 336615 - DNA, 20 bp, Artificial Sequence
  Description of Artificial Sequence: Synthetic oligonucleotide
  Target: LAMA2; (+) strand; PAM type: YTN; PAM sequence: CTC
aaggatctagaactagaaat

SEQ ID NO: 336616 - DNA, 20 bp, Artificial Sequence
  Description of Artificial Sequence: Synthetic oligonucleotide
  Target: LAMA2; (+) strand; PAM type: YTN; PAM sequence: CTA
gaactagaaataccatttga

SEQ ID NO: 336617 - DNA, 20 bp, Artificial Sequence
  Description of Artificial Sequence: Synthetic oligonucleotide
  Target: LAMA2; (+) strand; PAM type: YTN; PAM sequence: CTA
gaaataccatttgacccagc

SEQ ID NO: 336618 - DNA, 20 bp, Artificial Sequence
  Description of Artificial Sequence: Synthetic oligonucleotide
  Target: LAMA2; (+) strand; PAM type: YTN; PAM sequence: TTT
gacccagccatcccattact

SEQ ID NO: 336619 - DNA, 20 bp, Artificial Sequence
  Description of Artificial Sequence: Synthetic oligonucleotide
  Target: LAMA2; (+) strand; PAM type: YTN; PAM sequence: TTG
acccagccatcccattactg

SEQ ID NO: 336620 - DNA, 20 bp, Artificial Sequence
  Description of Artificial Sequence: Synthetic oligonucleotide
  Target: LAMA2; (+) strand; PAM type: YTN; PAM sequence: TTA
ctgggtatatacccaaagga

SEQ ID NO: 336621 - DNA, 20 bp, Artificial Sequence
  Description of Artificial Sequence: Synthetic oligonucleotide
  Target: LAMA2; (+) strand; PAM type: YTN; PAM sequence: CTG
ggtatatacccaaaggatta

SEQ ID NO: 336622 - DNA, 20 bp, Artificial Sequence
  Description of Artificial Sequence: Synthetic oligonucleotide
  Target: LAMA2; (+) strand; PAM type: YTN; PAM sequence: TTA
taaatcatgctgctataaag

SEQ ID NO: 336623 - DNA, 20 bp, Artificial Sequence
  Description of Artificial Sequence: Synthetic oligonucleotide
  Target: LAMA2; (+) strand; PAM type: YTN; PAM sequence: CTG
ctataaagacacatgcacac

SEQ ID NO: 336624 - DNA, 20 bp, Artificial Sequence
  Description of Artificial Sequence: Synthetic oligonucleotide
  Target: LAMA2; (+) strand; PAM type: YTN; PAM sequence: CTA
taaagacacatgcacacata

SEQ ID NO: 336625 - DNA, 20 bp, Artificial Sequence
  Description of Artificial Sequence: Synthetic oligonucleotide
  Target: LAMA2; (+) strand; PAM type: YTN; PAM sequence: TTT
attgtggcactattcacaat

SEQ ID NO: 336626 - DNA, 20 bp, Artificial Sequence
  Description of Artificial Sequence: Synthetic oligonucleotide
  Target: LAMA2; (+) strand; PAM type: YTN; PAM sequence: TTA
ttgtggcactattcacaata

SEQ ID NO: 336627 - DNA, 20 bp, Artificial Sequence
  Description of Artificial Sequence: Synthetic oligonucleotide
  Target: LAMA2; (+) strand; PAM type: YTN; PAM sequence: TTG
tggcactattcacaatagca

SEQ ID NO: 336628 - DNA, 20 bp, Artificial Sequence
  Description of Artificial Sequence: Synthetic oligonucleotide
  Target: LAMA2; (+) strand; PAM type: YTN; PAM sequence: CTA
ttcacaatagcaaagacttg

SEQ ID NO: 336629 - DNA, 20 bp, Artificial Sequence
  Description of Artificial Sequence: Synthetic oligonucleotide
  Target: LAMA2; (+) strand; PAM type: YTN; PAM sequence: TTC
acaatagcaaagacttggaa

SEQ ID NO: 336630 - DNA, 20 bp, Artificial Sequence
  Description of Artificial Sequence: Synthetic oligonucleotide
  Target: LAMA2; (+) strand; PAM type: YTN; PAM sequence: CTT
ggaaccaacccaaatgtcca

SEQ ID NO: 336631 - DNA, 20 bp, Artificial Sequence
  Description of Artificial Sequence: Synthetic oligonucleotide
  Target: LAMA2; (+) strand; PAM type: YTN; PAM sequence: TTG
gaaccaacccaaatgtccat

SEQ ID NO: 336632 - DNA, 20 bp, Artificial Sequence
  Description of Artificial Sequence: Synthetic oligonucleotide
  Target: LAMA2; (+) strand; PAM type: YTN; PAM sequence: CTG
gtttaagaaaatgtggcaca

SEQ ID NO: 336633 - DNA, 20 bp, Artificial Sequence
  Description of Artificial Sequence: Synthetic oligonucleotide
  Target: LAMA2; (+) strand; PAM type: YTN; PAM sequence: TTT
aagaaaatgtggcacatata

SEQ ID NO: 336634 - DNA, 20 bp, Artificial Sequence
  Description of Artificial Sequence: Synthetic oligonucleotide
  Target: LAMA2; (+) strand; PAM type: YTN; PAM sequence: TTA
agaaaatgtggcacatatat

SEQ ID NO: 336635 - DNA, 20 bp, Artificial Sequence
  Description of Artificial Sequence: Synthetic oligonucleotide
  Target: LAMA2; (+) strand; PAM type: YTN; PAM sequence: CTA
tgtagccataaaaaatgaag

SEQ ID NO: 336636 - DNA, 20 bp, Artificial Sequence
  Description of Artificial Sequence: Synthetic oligonucleotide
  Target: LAMA2; (+) strand; PAM type: YTN; PAM sequence: TTC
atgtcctttgtagggatatg

SEQ ID NO: 336637 - DNA, 20 bp, Artificial Sequence
  Description of Artificial Sequence: Synthetic oligonucleotide
  Target: LAMA2; (+) strand; PAM type: YTN; PAM sequence: CTT
tgtagggatatggatgaagc

SEQ ID NO: 336638 - DNA, 20 bp, Artificial Sequence
  Description of Artificial Sequence: Synthetic oligonucleotide
  Target: LAMA2; (+) strand; PAM type: YTN; PAM sequence: TTT
gtagggatatggatgaagct

SEQ ID NO: 336639 - DNA, 20 bp, Artificial Sequence
  Description of Artificial Sequence: Synthetic oligonucleotide
  Target: LAMA2; (+) strand; PAM type: YTN; PAM sequence: TTG
tagggatatggatgaagctg

SEQ ID NO: 336640 - DNA, 20 bp, Artificial Sequence
  Description of Artificial Sequence: Synthetic oligonucleotide
  Target: LAMA2; (+) strand; PAM type: YTN; PAM sequence: CTG
gaaaccatcattctcagcaa

SEQ ID NO: 336641 - DNA, 20 bp, Artificial Sequence
  Description of Artificial Sequence: Synthetic oligonucleotide
  Target: LAMA2; (+) strand; PAM type: YTN; PAM sequence: TTC
tcagcaaactatagcaagga

SEQ ID NO: 336642 - DNA, 20 bp, Artificial Sequence
  Description of Artificial Sequence: Synthetic oligonucleotide
  Target: LAMA2; (+) strand; PAM type: YTN; PAM sequence: CTC
agcaaactatagcaaggaca

SEQ ID NO: 336643 - DNA, 20 bp, Artificial Sequence
  Description of Artificial Sequence: Synthetic oligonucleotide
  Target: LAMA2; (+) strand; PAM type: YTN; PAM sequence: CTA
tagcaaggacaggaaaccaa

SEQ ID NO: 336644 - DNA, 20 bp, Artificial Sequence
  Description of Artificial Sequence: Synthetic oligonucleotide
  Target: LAMA2; (+) strand; PAM type: YTN; PAM sequence: TTC
tcactcataggtgggaaacg

SEQ ID NO: 336645 - DNA, 20 bp, Artificial Sequence
  Description of Artificial Sequence: Synthetic oligonucleotide
  Target: LAMA2; (+) strand; PAM type: YTN; PAM sequence: CTC
actcataggtgggaaacgaa

SEQ ID NO: 336646 - DNA, 20 bp, Artificial Sequence
  Description of Artificial Sequence: Synthetic oligonucleotide
  Target: LAMA2; (+) strand; PAM type: YTN; PAM sequence: CTC
ataggtgggaaacgaacaat

SEQ ID NO: 336647 - DNA, 20 bp, Artificial Sequence
  Description of Artificial Sequence: Synthetic oligonucleotide
  Target: LAMA2; (+) strand; PAM type: YTN; PAM sequence: CTT
ggacacagggtgggtaacat

SEQ ID NO: 336648 - DNA, 20 bp, Artificial Sequence
  Description of Artificial Sequence: Synthetic oligonucleotide
  Target: LAMA2; (+) strand; PAM type: YTN; PAM sequence: TTG
gacacagggtgggtaacatc

SEQ ID NO: 336649 - DNA, 20 bp, Artificial Sequence
  Description of Artificial Sequence: Synthetic oligonucleotide
  Target: LAMA2; (+) strand; PAM type: YTN; PAM sequence: CTG
ttgtggggtggggtgagggg

SEQ ID NO: 336650 - DNA, 20 bp, Artificial Sequence
  Description of Artificial Sequence: Synthetic oligonucleotide
  Target: LAMA2; (+) strand; PAM type: YTN; PAM sequence: TTG
tggggtggggtgagggggga

SEQ ID NO: 336651 - DNA, 20 bp, Artificial Sequence
  Description of Artificial Sequence: Synthetic oligonucleotide
  Target: LAMA2; (+) strand; PAM type: YTN; PAM sequence: TTA
ggagatacacctaatgtaaa

SEQ ID NO: 336652 - DNA, 20 bp, Artificial Sequence
  Description of Artificial Sequence: Synthetic oligonucleotide
  Target: LAMA2; (+) strand; PAM type: YTN; PAM sequence: CTA
atgtaaatgacgagttaatg

SEQ ID NO: 336653 - DNA, 20 bp, Artificial Sequence
  Description of Artificial Sequence: Synthetic oligonucleotide
  Target: LAMA2; (+) strand; PAM type: YTN; PAM sequence: TTA
atggatgcagcacaccaaca

SEQ ID NO: 336654 - DNA, 20 bp, Artificial Sequence
  Description of Artificial Sequence: Synthetic oligonucleotide
  Target: LAMA2; (+) strand; PAM type: YTN; PAM sequence: CTG
cacattgtgcacatgtatcc

SEQ ID NO: 336655 - DNA, 20 bp, Artificial Sequence
  Description of Artificial Sequence: Synthetic oligonucleotide
  Target: LAMA2; (+) strand; PAM type: YTN; PAM sequence: TTG
tgcacatgtatcctataact

SEQ ID NO: 336656 - DNA, 20 bp, Artificial Sequence
  Description of Artificial Sequence: Synthetic oligonucleotide
  Target: LAMA2; (+) strand; PAM type: YTN; PAM sequence: CTA
taacttaaagcataataata

SEQ ID NO: 336657 - DNA, 20 bp, Artificial Sequence
  Description of Artificial Sequence: Synthetic oligonucleotide
  Target: LAMA2; (+) strand; PAM type: YTN; PAM sequence: CTT
aaagcataataataaaaaaa

SEQ ID NO: 336658 - DNA, 20 bp, Artificial Sequence
  Description of Artificial Sequence: Synthetic oligonucleotide
  Target: LAMA2; (+) strand; PAM type: YTN; PAM sequence: TTA
aagcataataataaaaaaag

SEQ ID NO: 336659 - DNA, 20 bp, Artificial Sequence
  Description of Artificial Sequence: Synthetic oligonucleotide
  Target: LAMA2; (+) strand; PAM type: YTN; PAM sequence: CTT
aaaaaaaatgaaatgtccgt

SEQ ID NO: 336660 - DNA, 20 bp, Artificial Sequence
  Description of Artificial Sequence: Synthetic oligonucleotide
  Target: LAMA2; (+) strand; PAM type: YTN; PAM sequence: TTA
aaaaaaatgaaatgtccgta

SEQ ID NO: 336661 - DNA, 20 bp, Artificial Sequence
  Description of Artificial Sequence: Synthetic oligonucleotide
  Target: LAMA2; (+) strand; PAM type: YTN; PAM sequence: TTT
tcttgattttttccaaatgt

SEQ ID NO: 336662 - DNA, 20 bp, Artificial Sequence
  Description of Artificial Sequence: Synthetic oligonucleotide
  Target: LAMA2; (+) strand; PAM type: YTN; PAM sequence: TTT
cttgattttttccaaatgtt

SEQ ID NO: 336663 - DNA, 20 bp, Artificial Sequence
  Description of Artificial Sequence: Synthetic oligonucleotide
  Target: LAMA2; (+) strand; PAM type: YTN; PAM sequence: TTC
ttgattttttccaaatgttt

SEQ ID NO: 336664 - DNA, 20 bp, Artificial Sequence
  Description of Artificial Sequence: Synthetic oligonucleotide
  Target: LAMA2; (+) strand; PAM type: YTN; PAM sequence: CTT
gattttttccaaatgttttg

SEQ ID NO: 336665 - DNA, 20 bp, Artificial Sequence
  Description of Artificial Sequence: Synthetic oligonucleotide
  Target: LAMA2; (+) strand; PAM type: YTN; PAM sequence: TTG
attttttccaaatgttttga

SEQ ID NO: 336666 - DNA, 20 bp, Artificial Sequence
  Description of Artificial Sequence: Synthetic oligonucleotide
  Target: LAMA2; (+) strand; PAM type: YTN; PAM sequence: TTT
tttccaaatgttttgaagaa

SEQ ID NO: 336667 - DNA, 20 bp, Artificial Sequence
  Description of Artificial Sequence: Synthetic oligonucleotide
  Target: LAMA2; (+) strand; PAM type: YTN; PAM sequence: TTT
ttccaaatgttttgaagaaa

SEQ ID NO: 336668 - DNA, 20 bp, Artificial Sequence
  Description of Artificial Sequence: Synthetic oligonucleotide
  Target: LAMA2; (+) strand; PAM type: YTN; PAM sequence: TTT
tccaaatgttttgaagaaag

SEQ ID NO: 336669 - DNA, 20 bp, Artificial Sequence
  Description of Artificial Sequence: Synthetic oligonucleotide
  Target: LAMA2; (+) strand; PAM type: YTN; PAM sequence: TTT
ccaaatgttttgaagaaagt

SEQ ID NO: 336670 - DNA, 20 bp, Artificial Sequence
  Description of Artificial Sequence: Synthetic oligonucleotide
  Target: LAMA2; (+) strand; PAM type: YTN; PAM sequence: TTC
caaatgttttgaagaaagtt

SEQ ID NO: 336671 - DNA, 20 bp, Artificial Sequence
  Description of Artificial Sequence: Synthetic oligonucleotide
  Target: LAMA2; (+) strand; PAM type: YTN; PAM sequence: TTT
tgaagaaagtttttgtatta

SEQ ID NO: 336672 - DNA, 20 bp, Artificial Sequence
  Description of Artificial Sequence: Synthetic oligonucleotide
  Target: LAMA2; (+) strand; PAM type: YTN; PAM sequence: TTT
gaagaaagtttttgtattat

SEQ ID NO: 336673 - DNA, 20 bp, Artificial Sequence
  Description of Artificial Sequence: Synthetic oligonucleotide
  Target: LAMA2; (+) strand; PAM type: YTN; PAM sequence: TTG
aagaaagtttttgtattatt

SEQ ID NO: 336674 - DNA, 20 bp, Artificial Sequence
  Description of Artificial Sequence: Synthetic oligonucleotide
  Target: LAMA2; (+) strand; PAM type: YTN; PAM sequence: TTT
ttgtattattaaatgctatt

SEQ ID NO: 336675 - DNA, 20 bp, Artificial Sequence
  Description of Artificial Sequence: Synthetic oligonucleotide
  Target: LAMA2; (+) strand; PAM type: YTN; PAM sequence: TTT
tgtattattaaatgctattc

SEQ ID NO: 336676 - DNA, 20 bp, Artificial Sequence
  Description of Artificial Sequence: Synthetic oligonucleotide
  Target: LAMA2; (+) strand; PAM type: YTN; PAM sequence: TTT
gtattattaaatgctattca

SEQ ID NO: 336677 - DNA, 20 bp, Artificial Sequence
  Description of Artificial Sequence: Synthetic oligonucleotide
  Target: LAMA2; (+) strand; PAM type: YTN; PAM sequence: TTG
tattattaaatgctattcat

SEQ ID NO: 336678 - DNA, 20 bp, Artificial Sequence
  Description of Artificial Sequence: Synthetic oligonucleotide
  Target: LAMA2; (+) strand; PAM type: YTN; PAM sequence: TTA
ttaaatgctattcattggtc

SEQ ID NO: 336679 - DNA, 20 bp, Artificial Sequence
  Description of Artificial Sequence: Synthetic oligonucleotide
  Target: LAMA2; (+) strand; PAM type: YTN; PAM sequence: TTA
aatgctattcattggtcaat

SEQ ID NO: 336680 - DNA, 20 bp, Artificial Sequence
  Description of Artificial Sequence: Synthetic oligonucleotide
  Target: LAMA2; (+) strand; PAM type: YTN; PAM sequence: CTA
ttcattggtcaatttaagta

SEQ ID NO: 336681 - DNA, 20 bp, Artificial Sequence
  Description of Artificial Sequence: Synthetic oligonucleotide
  Target: LAMA2; (+) strand; PAM type: YTN; PAM sequence: TTC
attggtcaatttaagtaatc

SEQ ID NO: 336682 - DNA, 20 bp, Artificial Sequence
  Description of Artificial Sequence: Synthetic oligonucleotide
  Target: LAMA2; (+) strand; PAM type: YTN; PAM sequence: TTG
gtcaatttaagtaatcttct

SEQ ID NO: 336683 - DNA, 20 bp, Artificial Sequence
  Description of Artificial Sequence: Synthetic oligonucleotide
  Target: LAMA2; (+) strand; PAM type: YTN; PAM sequence: TTT
aagtaatcttcttttaagaa

SEQ ID NO: 336684 - DNA, 20 bp, Artificial Sequence
  Description of Artificial Sequence: Synthetic oligonucleotide
  Target: LAMA2; (+) strand; PAM type: YTN; PAM sequence: TTA
agtaatcttcttttaagaaa

SEQ ID NO: 336685 - DNA, 20 bp, Artificial Sequence
  Description of Artificial Sequence: Synthetic oligonucleotide
  Target: LAMA2; (+) strand; PAM type: YTN; PAM sequence: CTT
cttttaagaaatcattcaga

SEQ ID NO: 336686 - DNA, 20 bp, Artificial Sequence
  Description of Artificial Sequence: Synthetic oligonucleotide
  Target: LAMA2; (+) strand; PAM type: YTN; PAM sequence: TTC
ttttaagaaatcattcagaa

SEQ ID NO: 336687 - DNA, 20 bp, Artificial Sequence
  Description of Artificial Sequence: Synthetic oligonucleotide
  Target: LAMA2; (+) strand; PAM type: YTN; PAM sequence: CTT
ttaagaaatcattcagaaat

SEQ ID NO: 336688 - DNA, 20 bp, Artificial Sequence
  Description of Artificial Sequence: Synthetic oligonucleotide
  Target: LAMA2; (+) strand; PAM type: YTN; PAM sequence: TTT
taagaaatcattcagaaatt

SEQ ID NO: 336689 - DNA, 20 bp, Artificial Sequence
  Description of Artificial Sequence: Synthetic oligonucleotide
  Target: LAMA2; (+) strand; PAM type: YTN; PAM sequence: TTT
aagaaatcattcagaaattg

SEQ ID NO: 336690 - DNA, 20 bp, Artificial Sequence
  Description of Artificial Sequence: Synthetic oligonucleotide
  Target: LAMA2; (+) strand; PAM type: YTN; PAM sequence: TTA
agaaatcattcagaaattgt

SEQ ID NO: 336691 - DNA, 20 bp, Artificial Sequence
  Description of Artificial Sequence: Synthetic oligonucleotide
  Target: LAMA2; (+) strand; PAM type: YTN; PAM sequence: TTC
agaaattgtaggtccttgat

SEQ ID NO: 336692 - DNA, 20 bp, Artificial Sequence
  Description of Artificial Sequence: Synthetic oligonucleotide
  Target: LAMA2; (+) strand; PAM type: YTN; PAM sequence: TTG
taggtccttgatcgtaattc

SEQ ID NO: 336693 - DNA, 20 bp, Artificial Sequence
  Description of Artificial Sequence: Synthetic oligonucleotide
  Target: LAMA2; (+) strand; PAM type: YTN; PAM sequence: CTT
gatcgtaattctttttgggt

SEQ ID NO: 336694 - DNA, 20 bp, Artificial Sequence
  Description of Artificial Sequence: Synthetic oligonucleotide
  Target: LAMA2; (+) strand; PAM type: YTN; PAM sequence: TTG
atcgtaattctttttgggta

SEQ ID NO: 336695 - DNA, 20 bp, Artificial Sequence
  Description of Artificial Sequence: Synthetic oligonucleotide
  Target: LAMA2; (+) strand; PAM type: YTN; PAM sequence: TTC
tttttgggtaatttcaattg

SEQ ID NO: 336696 - DNA, 20 bp, Artificial Sequence
  Description of Artificial Sequence: Synthetic oligonucleotide
  Target: LAMA2; (+) strand; PAM type: YTN; PAM sequence: CTT
tttgggtaatttcaattgca

SEQ ID NO: 336697 - DNA, 20 bp, Artificial Sequence
  Description of Artificial Sequence: Synthetic oligonucleotide
  Target: LAMA2; (+) strand; PAM type: YTN; PAM sequence: TTT
ttgggtaatttcaattgcaa

SEQ ID NO: 336698 - DNA, 20 bp, Artificial Sequence
  Description of Artificial Sequence: Synthetic oligonucleotide
  Target: LAMA2; (+) strand; PAM type: YTN; PAM sequence: TTT
tgggtaatttcaattgcaat

SEQ ID NO: 336699 - DNA, 20 bp, Artificial Sequence
  Description of Artificial Sequence: Synthetic oligonucleotide
  Target: LAMA2; (+) strand; PAM type: YTN; PAM sequence: TTT
gggtaatttcaattgcaata

SEQ ID NO: 336700 - DNA, 20 bp, Artificial Sequence
  Description of Artificial Sequence: Synthetic oligonucleotide
  Target: LAMA2; (+) strand; PAM type: YTN; PAM sequence: TTG
ggtaatttcaattgcaatag

SEQ ID NO: 336701 - DNA, 20 bp, Artificial Sequence
  Description of Artificial Sequence: Synthetic oligonucleotide
  Target: LAMA2; (+) strand; PAM type: YTN; PAM sequence: TTT
caattgcaataggttaaaca

SEQ ID NO: 336702 - DNA, 20 bp, Artificial Sequence
  Description of Artificial Sequence: Synthetic oligonucleotide
  Target: LAMA2; (+) strand; PAM type: YTN; PAM sequence: TTC
aattgcaataggttaaacac

SEQ ID NO: 336703 - DNA, 20 bp, Artificial Sequence
  Description of Artificial Sequence: Synthetic oligonucleotide
  Target: LAMA2; (+) strand; PAM type: YTN; PAM sequence: TTG
caataggttaaacactgtgc

SEQ ID NO: 336704 - DNA, 20 bp, Artificial Sequence
  Description of Artificial Sequence: Synthetic oligonucleotide
  Target: LAMA2; (+) strand; PAM type: YTN; PAM sequence: TTA
aacactgtgctggaagattt

SEQ ID NO: 336705 - DNA, 20 bp, Artificial Sequence
  Description of Artificial Sequence: Synthetic oligonucleotide
  Target: LAMA2; (+) strand; PAM type: YTN; PAM sequence: CTG
tgctggaagatttgagaaag

SEQ ID NO: 336706 - DNA, 20 bp, Artificial Sequence
  Description of Artificial Sequence: Synthetic oligonucleotide
  Target: LAMA2; (+) strand; PAM type: YTN; PAM sequence: CTG
gaagatttgagaaagattat

SEQ ID NO: 336707 - DNA, 20 bp, Artificial Sequence
  Description of Artificial Sequence: Synthetic oligonucleotide
  Target: LAMA2; (+) strand; PAM type: YTN; PAM sequence: TTT
gagaaagattatcattggtc

SEQ ID NO: 336708 - DNA, 20 bp, Artificial Sequence
  Description of Artificial Sequence: Synthetic oligonucleotide
  Target: LAMA2; (+) strand; PAM type: YTN; PAM sequence: TTG
agaaagattatcattggtcc

SEQ ID NO: 336709 - DNA, 20 bp, Artificial Sequence
  Description of Artificial Sequence: Synthetic oligonucleotide
  Target: LAMA2; (+) strand; PAM type: YTN; PAM sequence: TTA
tcattggtccattttgtcaa

SEQ ID NO: 336710 - DNA, 20 bp, Artificial Sequence
  Description of Artificial Sequence: Synthetic oligonucleotide
  Target: LAMA2; (+) strand; PAM type: YTN; PAM sequence: TTG
gtccattttgtcaaaatcat

SEQ ID NO: 336711 - DNA, 20 bp, Artificial Sequence
  Description of Artificial Sequence: Synthetic oligonucleotide
  Target: LAMA2; (+) strand; PAM type: YTN; PAM sequence: TTT
tgtcaaaatcatttccagaa

SEQ ID NO: 336712 - DNA, 20 bp, Artificial Sequence
  Description of Artificial Sequence: Synthetic oligonucleotide
  Target: LAMA2; (+) strand; PAM type: YTN; PAM sequence: TTT
gtcaaaatcatttccagaag

SEQ ID NO: 336713 - DNA, 20 bp, Artificial Sequence
  Description of Artificial Sequence: Synthetic oligonucleotide
  Target: LAMA2; (+) strand; PAM type: YTN; PAM sequence: TTG
tcaaaatcatttccagaagt

SEQ ID NO: 336714 - DNA, 20 bp, Artificial Sequence
  Description of Artificial Sequence: Synthetic oligonucleotide
  Target: LAMA2; (+) strand; PAM type: YTN; PAM sequence: TTT
ccagaagtttaagtcctttt

SEQ ID NO: 336715 - DNA, 20 bp, Artificial Sequence
  Description of Artificial Sequence: Synthetic oligonucleotide
  Target: LAMA2; (+) strand; PAM type: YTN; PAM sequence: TTC
cagaagtttaagtccttttt

SEQ ID NO: 336716 - DNA, 20 bp, Artificial Sequence
  Description of Artificial Sequence: Synthetic oligonucleotide
  Target: LAMA2; (+) strand; PAM type: YTN; PAM sequence: TTT
aagtccttttttcttcattt

SEQ ID NO: 336717 - DNA, 20 bp, Artificial Sequence
  Description of Artificial Sequence: Synthetic oligonucleotide
  Target: LAMA2; (+) strand; PAM type: YTN; PAM sequence: TTA
agtccttttttcttcatttt

SEQ ID NO: 336718 - DNA, 20 bp, Artificial Sequence
  Description of Artificial Sequence: Synthetic oligonucleotide
  Target: LAMA2; (+) strand; PAM type: YTN; PAM sequence: CTT
ttttcttcatttttagtgtg

SEQ ID NO: 336719 - DNA, 20 bp, Artificial Sequence
  Description of Artificial Sequence: Synthetic oligonucleotide
  Target: LAMA2; (+) strand; PAM type: YTN; PAM sequence: TTT
tttcttcatttttagtgtga

SEQ ID NO: 336720 - DNA, 20 bp, Artificial Sequence
  Description of Artificial Sequence: Synthetic oligonucleotide
  Target: LAMA2; (+) strand; PAM type: YTN; PAM sequence: TTT
ttcttcatttttagtgtgat

SEQ ID NO: 336721 - DNA, 20 bp, Artificial Sequence
  Description of Artificial Sequence: Synthetic oligonucleotide
  Target: LAMA2; (+) strand; PAM type: YTN; PAM sequence: TTT
tcttcatttttagtgtgatt

SEQ ID NO: 336722 - DNA, 20 bp, Artificial Sequence
  Description of Artificial Sequence: Synthetic oligonucleotide
  Target: LAMA2; (+) strand; PAM type: YTN; PAM sequence: TTT
cttcatttttagtgtgattc

SEQ ID NO: 336723 - DNA, 20 bp, Artificial Sequence
  Description of Artificial Sequence: Synthetic oligonucleotide
  Target: LAMA2; (+) strand; PAM type: YTN; PAM sequence: TTC
ttcatttttagtgtgattca

SEQ ID NO: 336724 - DNA, 20 bp, Artificial Sequence
  Description of Artificial Sequence: Synthetic oligonucleotide
  Target: LAMA2; (+) strand; PAM type: YTN; PAM sequence: CTT
catttttagtgtgattcatt

SEQ ID NO: 336725 - DNA, 20 bp, Artificial Sequence
  Description of Artificial Sequence: Synthetic oligonucleotide
  Target: LAMA2; (+) strand; PAM type: YTN; PAM sequence: TTC
atttttagtgtgattcattg

SEQ ID NO: 336726 - DNA, 20 bp, Artificial Sequence
  Description of Artificial Sequence: Synthetic oligonucleotide
  Target: LAMA2; (+) strand; PAM type: YTN; PAM sequence: TTT
ttagtgtgattcattgattt

SEQ ID NO: 336727 - DNA, 20 bp, Artificial Sequence
  Description of Artificial Sequence: Synthetic oligonucleotide
  Target: LAMA2; (+) strand; PAM type: YTN; PAM sequence: TTT
tagtgtgattcattgatttt

SEQ ID NO: 336728 - DNA, 20 bp, Artificial Sequence
  Description of Artificial Sequence: Synthetic oligonucleotide
  Target: LAMA2; (+) strand; PAM type: YTN; PAM sequence: TTT
agtgtgattcattgattttc

SEQ ID NO: 336729 - DNA, 20 bp, Artificial Sequence
  Description of Artificial Sequence: Synthetic oligonucleotide
  Target: LAMA2; (+) strand; PAM type: YTN; PAM sequence: TTA
gtgtgattcattgattttcc

SEQ ID NO: 336730 - DNA, 20 bp, Artificial Sequence
  Description of Artificial Sequence: Synthetic oligonucleotide
  Target: LAMA2; (+) strand; PAM type: YTN; PAM sequence: TTC
attgattttcctaaggaaga

SEQ ID NO: 336731 - DNA, 20 bp, Artificial Sequence
  Description of Artificial Sequence: Synthetic oligonucleotide
  Target: LAMA2; (+) strand; PAM type: YTN; PAM sequence: TTG
attttcctaaggaagaacat

SEQ ID NO: 336732 - DNA, 20 bp, Artificial Sequence
  Description of Artificial Sequence: Synthetic oligonucleotide
  Target: LAMA2; (+) strand; PAM type: YTN; PAM sequence: TTT
tcctaaggaagaacatttaa

SEQ ID NO: 336733 - DNA, 20 bp, Artificial Sequence
  Description of Artificial Sequence: Synthetic oligonucleotide
  Target: LAMA2; (+) strand; PAM type: YTN; PAM sequence: TTT
cctaaggaagaacatttaac

SEQ ID NO: 336734 - DNA, 20 bp, Artificial Sequence
  Description of Artificial Sequence: Synthetic oligonucleotide
  Target: LAMA2; (+) strand; PAM type: YTN; PAM sequence: TTC
ctaaggaagaacatttaact

SEQ ID NO: 336735 - DNA, 20 bp, Artificial Sequence
  Description of Artificial Sequence: Synthetic oligonucleotide
  Target: LAMA2; (+) strand; PAM type: YTN; PAM sequence: CTA
aggaagaacatttaacttct

SEQ ID NO: 336736 - DNA, 20 bp, Artificial Sequence
  Description of Artificial Sequence: Synthetic oligonucleotide
  Target: LAMA2; (+) strand; PAM type: YTN; PAM sequence: TTT
aacttctctcagtattcaca

SEQ ID NO: 336737 - DNA, 20 bp, Artificial Sequence
  Description of Artificial Sequence: Synthetic oligonucleotide
  Target: LAMA2; (+) strand; PAM type: YTN; PAM sequence: TTA
acttctctcagtattcacaa

SEQ ID NO: 336738 - DNA, 20 bp, Artificial Sequence
  Description of Artificial Sequence: Synthetic oligonucleotide
  Target: LAMA2; (+) strand; PAM type: YTN; PAM sequence: CTT
ctctcagtattcacaaggaa

SEQ ID NO: 336739 - DNA, 20 bp, Artificial Sequence
  Description of Artificial Sequence: Synthetic oligonucleotide
  Target: LAMA2; (+) strand; PAM type: YTN; PAM sequence: TTC
tctcagtattcacaaggaat

SEQ ID NO: 336740 - DNA, 20 bp, Artificial Sequence
  Description of Artificial Sequence: Synthetic oligonucleotide
  Target: LAMA2; (+) strand; PAM type: YTN; PAM sequence: CTC
tcagtattcacaaggaatac

SEQ ID NO: 336741 - DNA, 20 bp, Artificial Sequence
  Description of Artificial Sequence: Synthetic oligonucleotide
  Target: LAMA2; (+) strand; PAM type: YTN; PAM sequence: CTC
agtattcacaaggaatacct

SEQ ID NO: 336742 - DNA, 20 bp, Artificial Sequence
  Description of Artificial Sequence: Synthetic oligonucleotide
  Target: LAMA2; (+) strand; PAM type: YTN; PAM sequence: TTC
acaaggaatacctgcttgaa

SEQ ID NO: 336743 - DNA, 20 bp, Artificial Sequence
  Description of Artificial Sequence: Synthetic oligonucleotide
  Target: LAMA2; (+) strand; PAM type: YTN; PAM sequence: CTG
cttgaatgtttaagtaccaa

SEQ ID NO: 336744 - DNA, 20 bp, Artificial Sequence
  Description of Artificial Sequence: Synthetic oligonucleotide
  Target: LAMA2; (+) strand; PAM type: YTN; PAM sequence: CTT
gaatgtttaagtaccaacag

SEQ ID NO: 336745 - DNA, 20 bp, Artificial Sequence
  Description of Artificial Sequence: Synthetic oligonucleotide
  Target: LAMA2; (+) strand; PAM type: YTN; PAM sequence: TTG
aatgtttaagtaccaacaga

SEQ ID NO: 336746 - DNA, 20 bp, Artificial Sequence
  Description of Artificial Sequence: Synthetic oligonucleotide
  Target: LAMA2; (+) strand; PAM type: YTN; PAM sequence: TTT
aagtaccaacagaggattta

SEQ ID NO: 336747 - DNA, 20 bp, Artificial Sequence
  Description of Artificial Sequence: Synthetic oligonucleotide
  Target: LAMA2; (+) strand; PAM type: YTN; PAM sequence: TTA
agtaccaacagaggatttaa

SEQ ID NO: 336748 - DNA, 20 bp, Artificial Sequence
  Description of Artificial Sequence: Synthetic oligonucleotide
  Target: LAMA2; (+) strand; PAM type: YTN; PAM sequence: TTT
aaagttcttattacttatga

SEQ ID NO: 336749 - DNA, 20 bp, Artificial Sequence
  Description of Artificial Sequence: Synthetic oligonucleotide
  Target: LAMA2; (+) strand; PAM type: YTN; PAM sequence: TTA
aagttcttattacttatgag

SEQ ID NO: 336750 - DNA, 20 bp, Artificial Sequence
  Description of Artificial Sequence: Synthetic oligonucleotide
  Target: LAMA2; (+) strand; PAM type: YTN; PAM sequence: TTC
ttattacttatgagcattaa

SEQ ID NO: 336751 - DNA, 20 bp, Artificial Sequence
  Description of Artificial Sequence: Synthetic oligonucleotide
  Target: LAMA2; (+) strand; PAM type: YTN; PAM sequence: CTT
attacttatgagcattaaat

SEQ ID NO: 336752 - DNA, 20 bp, Artificial Sequence
  Description of Artificial Sequence: Synthetic oligonucleotide
  Target: LAMA2; (+) strand; PAM type: YTN; PAM sequence: TTA
ttacttatgagcattaaatg

SEQ ID NO: 336753 - DNA, 20 bp, Artificial Sequence
  Description of Artificial Sequence: Synthetic oligonucleotide
  Target: LAMA2; (+) strand; PAM type: YTN; PAM sequence: TTA
cttatgagcattaaatgaat

SEQ ID NO: 336754 - DNA, 20 bp, Artificial Sequence
  Description of Artificial Sequence: Synthetic oligonucleotide
  Target: LAMA2; (+) strand; PAM type: YTN; PAM sequence: CTT
atgagcattaaatgaattca

SEQ ID NO: 336755 - DNA, 20 bp, Artificial Sequence
  Description of Artificial Sequence: Synthetic oligonucleotide
  Target: LAMA2; (+) strand; PAM type: YTN; PAM sequence: TTA
tgagcattaaatgaattcaa

SEQ ID NO: 336756 - DNA, 20 bp, Artificial Sequence
  Description of Artificial Sequence: Synthetic oligonucleotide
  Target: LAMA2; (+) strand; PAM type: YTN; PAM sequence: TTA
aatgaattcaatactccaaa

SEQ ID NO: 336757 - DNA, 20 bp, Artificial Sequence
  Description of Artificial Sequence: Synthetic oligonucleotide
  Target: LAMA2; (+) strand; PAM type: YTN; PAM sequence: TTC
aatactccaaattttataga

SEQ ID NO: 336758 - DNA, 20 bp, Artificial Sequence
  Description of Artificial Sequence: Synthetic oligonucleotide
  Target: LAMA2; (+) strand; PAM type: YTN; PAM sequence: CTC
caaattttatagaagaagca

SEQ ID NO: 336759 - DNA, 20 bp, Artificial Sequence
  Description of Artificial Sequence: Synthetic oligonucleotide
  Target: LAMA2; (+) strand; PAM type: YTN; PAM sequence: TTT
tatagaagaagcatttctga

SEQ ID NO: 336760 - DNA, 20 bp, Artificial Sequence
  Description of Artificial Sequence: Synthetic oligonucleotide
  Target: LAMA2; (+) strand; PAM type: YTN; PAM sequence: TTT
atagaagaagcatttctgaa

SEQ ID NO: 336761 - DNA, 20 bp, Artificial Sequence
  Description of Artificial Sequence: Synthetic oligonucleotide
  Target: LAMA2; (+) strand; PAM type: YTN; PAM sequence: TTA
tagaagaagcatttctgaag

SEQ ID NO: 336762 - DNA, 20 bp, Artificial Sequence
  Description of Artificial Sequence: Synthetic oligonucleotide
  Target: LAMA2; (+) strand; PAM type: YTN; PAM sequence: TTT
ctgaagatagaaaataagga

SEQ ID NO: 336763 - DNA, 20 bp, Artificial Sequence
  Description of Artificial Sequence: Synthetic oligonucleotide
  Target: LAMA2; (+) strand; PAM type: YTN; PAM sequence: TTC
tgaagatagaaaataaggat

SEQ ID NO: 336764 - DNA, 20 bp, Artificial Sequence
  Description of Artificial Sequence: Synthetic oligonucleotide
  Target: LAMA2; (+) strand; PAM type: YTN; PAM sequence: CTG
aagatagaaaataaggataa

SEQ ID NO: 336765 - DNA, 20 bp, Artificial Sequence
  Description of Artificial Sequence: Synthetic oligonucleotide
  Target: LAMA2; (+) strand; PAM type: YTN; PAM sequence: TTT
ttaaacacaagaaatcacat

SEQ ID NO: 336766 - DNA, 20 bp, Artificial Sequence
  Description of Artificial Sequence: Synthetic oligonucleotide
  Target: LAMA2; (+) strand; PAM type: YTN; PAM sequence: TTT
taaacacaagaaatcacatg

SEQ ID NO: 336767 - DNA, 20 bp, Artificial Sequence
  Description of Artificial Sequence: Synthetic oligonucleotide
  Target: LAMA2; (+) strand; PAM type: YTN; PAM sequence: TTT
aaacacaagaaatcacatgc

SEQ ID NO: 336768 - DNA, 20 bp, Artificial Sequence
  Description of Artificial Sequence: Synthetic oligonucleotide
  Target: LAMA2; (+) strand; PAM type: YTN; PAM sequence: TTA
aacacaagaaatcacatgct

SEQ ID NO: 336769 - DNA, 20 bp, Artificial Sequence
  Description of Artificial Sequence: Synthetic oligonucleotide
  Target: LAMA2; (+) strand; PAM type: YTN; PAM sequence: CTT
ttcatatcattatcaatgtg

SEQ ID NO: 336770 - DNA, 20 bp, Artificial Sequence
  Description of Artificial Sequence: Synthetic oligonucleotide
  Target: LAMA2; (+) strand; PAM type: YTN; PAM sequence: TTT
tcatatcattatcaatgtgg

SEQ ID NO: 336771 - DNA, 20 bp, Artificial Sequence
  Description of Artificial Sequence: Synthetic oligonucleotide
  Target: LAMA2; (+) strand; PAM type: YTN; PAM sequence: TTT
catatcattatcaatgtgga

SEQ ID NO: 336772 - DNA, 20 bp, Artificial Sequence
  Description of Artificial Sequence: Synthetic oligonucleotide
  Target: LAMA2; (+) strand; PAM type: YTN; PAM sequence: TTC
atatcattatcaatgtggaa

SEQ ID NO: 336773 - DNA, 20 bp, Artificial Sequence
  Description of Artificial Sequence: Synthetic oligonucleotide
  Target: LAMA2; (+) strand; PAM type: YTN; PAM sequence: TTA
tcaatgtggaaaatgctaaa

SEQ ID NO: 336774 - DNA, 20 bp, Artificial Sequence
  Description of Artificial Sequence: Synthetic oligonucleotide
  Target: LAMA2; (+) strand; PAM type: YTN; PAM sequence: CTA
aaacaacttgctattaaaaa

SEQ ID NO: 336775 - DNA, 20 bp, Artificial Sequence
  Description of Artificial Sequence: Synthetic oligonucleotide
  Target: LAMA2; (+) strand; PAM type: YTN; PAM sequence: CTT
gctattaaaaaccatttatc

SEQ ID NO: 336776 - DNA, 20 bp, Artificial Sequence
  Description of Artificial Sequence: Synthetic oligonucleotide
  Target: LAMA2; (+) strand; PAM type: YTN; PAM sequence: TTG
ctattaaaaaccatttatca

SEQ ID NO: 336777 - DNA, 20 bp, Artificial Sequence
  Description of Artificial Sequence: Synthetic oligonucleotide
  Target: LAMA2; (+) strand; PAM type: YTN; PAM sequence: CTA
ttaaaaaccatttatcagaa

SEQ ID NO: 336778 - DNA, 20 bp, Artificial Sequence
  Description of Artificial Sequence: Synthetic oligonucleotide
  Target: LAMA2; (+) strand; PAM type: YTN; PAM sequence: TTA
aaaaccatttatcagaaact

SEQ ID NO: 336779 - DNA, 20 bp, Artificial Sequence
  Description of Artificial Sequence: Synthetic oligonucleotide
  Target: LAMA2; (+) strand; PAM type: YTN; PAM sequence: TTT
atcagaaacttgtttaatta

SEQ ID NO: 336780 - DNA, 20 bp, Artificial Sequence
  Description of Artificial Sequence: Synthetic oligonucleotide
  Target: LAMA2; (+) strand; PAM type: YTN; PAM sequence: TTA
tcagaaacttgtttaattaa

SEQ ID NO: 336781 - DNA, 20 bp, Artificial Sequence
  Description of Artificial Sequence: Synthetic oligonucleotide
  Target: LAMA2; (+) strand; PAM type: YTN; PAM sequence: CTT
gtttaattaatatgtcaaat

SEQ ID NO: 336782 - DNA, 20 bp, Artificial Sequence
  Description of Artificial Sequence: Synthetic oligonucleotide
  Target: LAMA2; (+) strand; PAM type: YTN; PAM sequence: TTG
tttaattaatatgtcaaata

SEQ ID NO: 336783 - DNA, 20 bp, Artificial Sequence
  Description of Artificial Sequence: Synthetic oligonucleotide
  Target: LAMA2; (+) strand; PAM type: YTN; PAM sequence: TTT
aattaatatgtcaaatatct

SEQ ID NO: 336784 - DNA, 20 bp, Artificial Sequence
  Description of Artificial Sequence: Synthetic oligonucleotide
  Target: LAMA2; (+) strand; PAM type: YTN; PAM sequence: TTA
attaatatgtcaaatatctg

SEQ ID NO: 336785 - DNA, 20 bp, Artificial Sequence
  Description of Artificial Sequence: Synthetic oligonucleotide
  Target: LAMA2; (+) strand; PAM type: YTN; PAM sequence: TTA
atatgtcaaatatctgggtt

SEQ ID NO: 336786 - DNA, 20 bp, Artificial Sequence
  Description of Artificial Sequence: Synthetic oligonucleotide
  Target: LAMA2; (+) strand; PAM type: YTN; PAM sequence: CTG
ggtttttaaatcatgtataa

SEQ ID NO: 336787 - DNA, 20 bp, Artificial Sequence
  Description of Artificial Sequence: Synthetic oligonucleotide
  Target: LAMA2; (+) strand; PAM type: YTN; PAM sequence: TTT
ttaaatcatgtataacaatc

SEQ ID NO: 336788 - DNA, 20 bp, Artificial Sequence
  Description of Artificial Sequence: Synthetic oligonucleotide
  Target: LAMA2; (+) strand; PAM type: YTN; PAM sequence: TTT
taaatcatgtataacaatca

SEQ ID NO: 336789 - DNA, 20 bp, Artificial Sequence
  Description of Artificial Sequence: Synthetic oligonucleotide
  Target: LAMA2; (+) strand; PAM type: YTN; PAM sequence: TTT
aaatcatgtataacaatcaa

SEQ ID NO: 336790 - DNA, 20 bp, Artificial Sequence
  Description of Artificial Sequence: Synthetic oligonucleotide
  Target: LAMA2; (+) strand; PAM type: YTN; PAM sequence: TTA
aatcatgtataacaatcaaa

SEQ ID NO: 336791 - DNA, 20 bp, Artificial Sequence
  Description of Artificial Sequence: Synthetic oligonucleotide
  Target: LAMA2; (+) strand; PAM type: YTN; PAM sequence: TTC
ctaaaaacatattgagaact

SEQ ID NO: 336792 - DNA, 20 bp, Artificial Sequence
  Description of Artificial Sequence: Synthetic oligonucleotide
  Target: LAMA2; (+) strand; PAM type: YTN; PAM sequence: CTA
aaaacatattgagaacttta

SEQ ID NO: 336793 - DNA, 20 bp, Artificial Sequence
  Description of Artificial Sequence: Synthetic oligonucleotide
  Target: LAMA2; (+) strand; PAM type: YTN; PAM sequence: TTG
agaactttaacaaaacattt

SEQ ID NO: 336794 - DNA, 20 bp, Artificial Sequence
  Description of Artificial Sequence: Synthetic oligonucleotide
  Target: LAMA2; (+) strand; PAM type: YTN; PAM sequence: CTT
taacaaaacattttacagtt

SEQ ID NO: 336795 - DNA, 20 bp, Artificial Sequence
  Description of Artificial Sequence: Synthetic oligonucleotide
  Target: LAMA2; (+) strand; PAM type: YTN; PAM sequence: TTT
aacaaaacattttacagttg

SEQ ID NO: 336796 - DNA, 20 bp, Artificial Sequence
  Description of Artificial Sequence: Synthetic oligonucleotide
  Target: LAMA2; (+) strand; PAM type: YTN; PAM sequence: TTA
acaaaacattttacagttgg

SEQ ID NO: 336797 - DNA, 20 bp, Artificial Sequence
  Description of Artificial Sequence: Synthetic oligonucleotide
  Target: LAMA2; (+) strand; PAM type: YTN; PAM sequence: TTT
tacagttggaatgaaattag

SEQ ID NO: 336798 - DNA, 20 bp, Artificial Sequence
  Description of Artificial Sequence: Synthetic oligonucleotide
  Target: LAMA2; (+) strand; PAM type: YTN; PAM sequence: TTT
acagttggaatgaaattagt

SEQ ID NO: 336799 - DNA, 20 bp, Artificial Sequence
  Description of Artificial Sequence: Synthetic oligonucleotide
  Target: LAMA2; (+) strand; PAM type: YTN; PAM sequence: TTA
cagttggaatgaaattagta

SEQ ID NO: 336800 - DNA, 20 bp, Artificial Sequence
  Description of Artificial Sequence: Synthetic oligonucleotide
  Target: LAMA2; (+) strand; PAM type: YTN; PAM sequence: TTG
gaatgaaattagtactggat

SEQ ID NO: 336801 - DNA, 20 bp, Artificial Sequence
  Description of Artificial Sequence: Synthetic oligonucleotide
  Target: LAMA2; (+) strand; PAM type: YTN; PAM sequence: TTA
gtactggatgattggattaa

SEQ ID NO: 336802 - DNA, 20 bp, Artificial Sequence
  Description of Artificial Sequence: Synthetic oligonucleotide
  Target: LAMA2; (+) strand; PAM type: YTN; PAM sequence: CTG
gatgattggattaaaagcca

SEQ ID NO: 336803 - DNA, 20 bp, Artificial Sequence
  Description of Artificial Sequence: Synthetic oligonucleotide
  Target: LAMA2; (+) strand; PAM type: YTN; PAM sequence: TTG
gattaaaagccagtagaaat

SEQ ID NO: 336804 - DNA, 20 bp, Artificial Sequence
  Description of Artificial Sequence: Synthetic oligonucleotide
  Target: LAMA2; (+) strand; PAM type: YTN; PAM sequence: TTA
aaagccagtagaaattatat

SEQ ID NO: 336805 - DNA, 20 bp, Artificial Sequence
  Description of Artificial Sequence: Synthetic oligonucleotide
  Target: LAMA2; (+) strand; PAM type: YTN; PAM sequence: TTA
tatattatcctatttaaatg

SEQ ID NO: 336806 - DNA, 20 bp, Artificial Sequence
  Description of Artificial Sequence: Synthetic oligonucleotide
  Target: LAMA2; (+) strand; PAM type: YTN; PAM sequence: TTA
tcctatttaaatgtaggact

SEQ ID NO: 336807 - DNA, 20 bp, Artificial Sequence
  Description of Artificial Sequence: Synthetic oligonucleotide
  Target: LAMA2; (+) strand; PAM type: YTN; PAM sequence: CTA
tttaaatgtaggactatata

SEQ ID NO: 336808 - DNA, 20 bp, Artificial Sequence
  Description of Artificial Sequence: Synthetic oligonucleotide
  Target: LAMA2; (+) strand; PAM type: YTN; PAM sequence: TTT
aaatgtaggactatataagt

SEQ ID NO: 336809 - DNA, 20 bp, Artificial Sequence
  Description of Artificial Sequence: Synthetic oligonucleotide
  Target: LAMA2; (+) strand; PAM type: YTN; PAM sequence: TTA
aatgtaggactatataagtt

SEQ ID NO: 336810 - DNA, 20 bp, Artificial Sequence
  Description of Artificial Sequence: Synthetic oligonucleotide
  Target: LAMA2; (+) strand; PAM type: YTN; PAM sequence: CTA
tataagttattggtaatcct

SEQ ID NO: 336811 - DNA, 20 bp, Artificial Sequence
  Description of Artificial Sequence: Synthetic oligonucleotide
  Target: LAMA2; (+) strand; PAM type: YTN; PAM sequence: TTA
ttggtaatcctttttcgtaa

SEQ ID NO: 336812 - DNA, 20 bp, Artificial Sequence
  Description of Artificial Sequence: Synthetic oligonucleotide
  Target: LAMA2; (+) strand; PAM type: YTN; PAM sequence: TTG
gtaatcctttttcgtaattt

SEQ ID NO: 336813 - DNA, 20 bp, Artificial Sequence
  Description of Artificial Sequence: Synthetic oligonucleotide
  Target: LAMA2; (+) strand; PAM type: YTN; PAM sequence: CTT
tttcgtaattttattacttt

SEQ ID NO: 336814 - DNA, 20 bp, Artificial Sequence
  Description of Artificial Sequence: Synthetic oligonucleotide
  Target: LAMA2; (+) strand; PAM type: YTN; PAM sequence: TTT
ttcgtaattttattactttt

SEQ ID NO: 336815 - DNA, 20 bp, Artificial Sequence
  Description of Artificial Sequence: Synthetic oligonucleotide
  Target: LAMA2; (+) strand; PAM type: YTN; PAM sequence: TTT
tcgtaattttattacttttt

SEQ ID NO: 336816 - DNA, 20 bp, Artificial Sequence
  Description of Artificial Sequence: Synthetic oligonucleotide
  Target: LAMA2; (+) strand; PAM type: YTN; PAM sequence: TTT
cgtaattttattactttttc

SEQ ID NO: 336817 - DNA, 20 bp, Artificial Sequence
  Description of Artificial Sequence: Synthetic oligonucleotide
  Target: LAMA2; (+) strand; PAM type: YTN; PAM sequence: TTC
gtaattttattactttttcc

SEQ ID NO: 336818 - DNA, 20 bp, Artificial Sequence
  Description of Artificial Sequence: Synthetic oligonucleotide
  Target: LAMA2; (+) strand; PAM type: YTN; PAM sequence: TTT
tattactttttccagtacct

SEQ ID NO: 336819 - DNA, 20 bp, Artificial Sequence
  Description of Artificial Sequence: Synthetic oligonucleotide
  Target: LAMA2; (+) strand; PAM type: YTN; PAM sequence: TTT
attactttttccagtaccta

SEQ ID NO: 336820 - DNA, 20 bp, Artificial Sequence
  Description of Artificial Sequence: Synthetic oligonucleotide
  Target: LAMA2; (+) strand; PAM type: YTN; PAM sequence: TTA
ttactttttccagtacctaa

SEQ ID NO: 336821 - DNA, 20 bp, Artificial Sequence
  Description of Artificial Sequence: Synthetic oligonucleotide
  Target: LAMA2; (+) strand; PAM type: YTN; PAM sequence: TTA
ctttttccagtacctaagtg

SEQ ID NO: 336822 - DNA, 20 bp, Artificial Sequence
  Description of Artificial Sequence: Synthetic oligonucleotide
  Target: LAMA2; (+) strand; PAM type: YTN; PAM sequence: CTT
tttccagtacctaagtggat

SEQ ID NO: 336823 - DNA, 20 bp, Artificial Sequence
  Description of Artificial Sequence: Synthetic oligonucleotide
  Target: LAMA2; (+) strand; PAM type: YTN; PAM sequence: TTT
ttccagtacctaagtggata

SEQ ID NO: 336824 - DNA, 20 bp, Artificial Sequence
  Description of Artificial Sequence: Synthetic oligonucleotide
  Target: LAMA2; (+) strand; PAM type: YTN; PAM sequence: TTT
tccagtacctaagtggatac

SEQ ID NO: 336825 - DNA, 20 bp, Artificial Sequence
  Description of Artificial Sequence: Synthetic oligonucleotide
  Target: LAMA2; (+) strand; PAM type: YTN; PAM sequence: TTT
ccagtacctaagtggatact

SEQ ID NO: 336826 - DNA, 20 bp, Artificial Sequence
  Description of Artificial Sequence: Synthetic oligonucleotide
  Target: LAMA2; (+) strand; PAM type: YTN; PAM sequence: TTC
cagtacctaagtggatactg

SEQ ID NO: 336827 - DNA, 20 bp, Artificial Sequence
  Description of Artificial Sequence: Synthetic oligonucleotide
  Target: LAMA2; (+) strand; PAM type: YTN; PAM sequence: CTA
agtggatactggtgactggt

SEQ ID NO: 336828 - DNA, 20 bp, Artificial Sequence
  Description of Artificial Sequence: Synthetic oligonucleotide
  Target: LAMA2; (+) strand; PAM type: YTN; PAM sequence: CTG
gtgactggtatataataagt

SEQ ID NO: 336829 - DNA, 20 bp, Artificial Sequence
  Description of Artificial Sequence: Synthetic oligonucleotide
  Target: LAMA2; (+) strand; PAM type: YTN; PAM sequence: CTG
gtatataataagtaaccaat

SEQ ID NO: 336830 - DNA, 20 bp, Artificial Sequence
  Description of Artificial Sequence: Synthetic oligonucleotide
  Target: LAMA2; (+) strand; PAM type: YTN; PAM sequence: TTG
aataatgcattgctttgctc

SEQ ID NO: 336831 - DNA, 20 bp, Artificial Sequence
  Description of Artificial Sequence: Synthetic oligonucleotide
  Target: LAMA2; (+) strand; PAM type: YTN; PAM sequence: TTG
ctttgctcaattttctcatc

SEQ ID NO: 336832 - DNA, 20 bp, Artificial Sequence
  Description of Artificial Sequence: Synthetic oligonucleotide
  Target: LAMA2; (+) strand; PAM type: YTN; PAM sequence: CTT
tgctcaattttctcatctct

SEQ ID NO: 336833 - DNA, 20 bp, Artificial Sequence
  Description of Artificial Sequence: Synthetic oligonucleotide
  Target: LAMA2; (+) strand; PAM type: YTN; PAM sequence: TTT
gctcaattttctcatctctg

SEQ ID NO: 336834 - DNA, 20 bp, Artificial Sequence
  Description of Artificial Sequence: Synthetic oligonucleotide
  Target: LAMA2; (+) strand; PAM type: YTN; PAM sequence: TTG
ctcaattttctcatctctga

SEQ ID NO: 336835 - DNA, 20 bp, Artificial Sequence
  Description of Artificial Sequence: Synthetic oligonucleotide
  Target: LAMA2; (+) strand; PAM type: YTN; PAM sequence: CTC
aattttctcatctctgagct

SEQ ID NO: 336836 - DNA, 20 bp, Artificial Sequence
  Description of Artificial Sequence: Synthetic oligonucleotide
  Target: LAMA2; (+) strand; PAM type: YTN; PAM sequence: TTT
tctcatctctgagctttcct

SEQ ID NO: 336837 - DNA, 20 bp, Artificial Sequence
  Description of Artificial Sequence: Synthetic oligonucleotide
  Target: LAMA2; (+) strand; PAM type: YTN; PAM sequence: TTT
ctcatctctgagctttcctg

SEQ ID NO: 336838 - DNA, 20 bp, Artificial Sequence
  Description of Artificial Sequence: Synthetic oligonucleotide
  Target: LAMA2; (+) strand; PAM type: YTN; PAM sequence: TTC
tcatctctgagctttcctgt

SEQ ID NO: 336839 - DNA, 20 bp, Artificial Sequence
  Description of Artificial Sequence: Synthetic oligonucleotide
  Target: LAMA2; (+) strand; PAM type: YTN; PAM sequence: CTC
atctctgagctttcctgtct

SEQ ID NO: 336840 - DNA, 20 bp, Artificial Sequence
  Description of Artificial Sequence: Synthetic oligonucleotide
  Target: LAMA2; (+) strand; PAM type: YTN; PAM sequence: CTC
tgagctttcctgtctgtgct

SEQ ID NO: 336841 - DNA, 20 bp, Artificial Sequence
  Description of Artificial Sequence: Synthetic oligonucleotide
  Target: LAMA2; (+) strand; PAM type: YTN; PAM sequence: CTG
agctttcctgtctgtgctac

SEQ ID NO: 336842 - DNA, 20 bp, Artificial Sequence
  Description of Artificial Sequence: Synthetic oligonucleotide
  Target: LAMA2; (+) strand; PAM type: YTN; PAM sequence: CTT
tcctgtctgtgctactgcaa

SEQ ID NO: 336843 - DNA, 20 bp, Artificial Sequence
  Description of Artificial Sequence: Synthetic oligonucleotide
  Target: LAMA2; (+) strand; PAM type: YTN; PAM sequence: TTT
cctgtctgtgctactgcaac

SEQ ID NO: 336844 - DNA, 20 bp, Artificial Sequence
  Description of Artificial Sequence: Synthetic oligonucleotide
  Target: LAMA2; (+) strand; PAM type: YTN; PAM sequence: TTC
ctgtctgtgctactgcaaca

SEQ ID NO: 336845 - DNA, 20 bp, Artificial Sequence
  Description of Artificial Sequence: Synthetic oligonucleotide
  Target: LAMA2; (+) strand; PAM type: YTN; PAM sequence: CTG
tctgtgctactgcaacatta

SEQ ID NO: 336846 - DNA, 20 bp, Artificial Sequence
  Description of Artificial Sequence: Synthetic oligonucleotide
  Target: LAMA2; (+) strand; PAM type: YTN; PAM sequence: CTG
tgctactgcaacattacttt

SEQ ID NO: 336847 - DNA, 20 bp, Artificial Sequence
  Description of Artificial Sequence: Synthetic oligonucleotide
  Target: LAMA2; (+) strand; PAM type: YTN; PAM sequence: CTA
ctgcaacattactttcttaa

SEQ ID NO: 336848 - DNA, 20 bp, Artificial Sequence
  Description of Artificial Sequence: Synthetic oligonucleotide
  Target: LAMA2; (+) strand; PAM type: YTN; PAM sequence: CTG
caacattactttcttaatta

SEQ ID NO: 336849 - DNA, 20 bp, Artificial Sequence
  Description of Artificial Sequence: Synthetic oligonucleotide
  Target: LAMA2; (+) strand; PAM type: YTN; PAM sequence: TTA
ctttcttaattatattctct

SEQ ID NO: 336850 - DNA, 20 bp, Artificial Sequence
  Description of Artificial Sequence: Synthetic oligonucleotide
  Target: LAMA2; (+) strand; PAM type: YTN; PAM sequence: CTT
tcttaattatattctctcac

SEQ ID NO: 336851 - DNA, 20 bp, Artificial Sequence
  Description of Artificial Sequence: Synthetic oligonucleotide
  Target: LAMA2; (+) strand; PAM type: YTN; PAM sequence: TTT
cttaattatattctctcact

SEQ ID NO: 336852 - DNA, 20 bp, Artificial Sequence
  Description of Artificial Sequence: Synthetic oligonucleotide
  Target: LAMA2; (+) strand; PAM type: YTN; PAM sequence: TTC
ttaattatattctctcactc

SEQ ID NO: 336853 - DNA, 20 bp, Artificial Sequence
  Description of Artificial Sequence: Synthetic oligonucleotide
  Target: LAMA2; (+) strand; PAM type: YTN; PAM sequence: CTT
aattatattctctcactcca

SEQ ID NO: 336854 - DNA, 20 bp, Artificial Sequence
  Description of Artificial Sequence: Synthetic oligonucleotide
  Target: LAMA2; (+) strand; PAM type: YTN; PAM sequence: TTA
attatattctctcactccac

SEQ ID NO: 336855 - DNA, 20 bp, Artificial Sequence
  Description of Artificial Sequence: Synthetic oligonucleotide
  Target: LAMA2; (+) strand; PAM type: YTN; PAM sequence: TTA
tattctctcactccactgca

SEQ ID NO: 336856 - DNA, 20 bp, Artificial Sequence
  Description of Artificial Sequence: Synthetic oligonucleotide
  Target: LAMA2; (+) strand; PAM type: YTN; PAM sequence: TTC
tctcactccactgcaataat

SEQ ID NO: 336857 - DNA, 20 bp, Artificial Sequence
  Description of Artificial Sequence: Synthetic oligonucleotide
  Target: LAMA2; (+) strand; PAM type: YTN; PAM sequence: CTC
tcactccactgcaataatat

SEQ ID NO: 336858 - DNA, 20 bp, Artificial Sequence
  Description of Artificial Sequence: Synthetic oligonucleotide
  Target: LAMA2; (+) strand; PAM type: YTN; PAM sequence: CTC
actccactgcaataatatta

SEQ ID NO: 336859 - DNA, 20 bp, Artificial Sequence
  Description of Artificial Sequence: Synthetic oligonucleotide
  Target: LAMA2; (+) strand; PAM type: YTN; PAM sequence: CTC
cactgcaataatattacaga

SEQ ID NO: 336860 - DNA, 20 bp, Artificial Sequence
  Description of Artificial Sequence: Synthetic oligonucleotide
  Target: LAMA2; (+) strand; PAM type: YTN; PAM sequence: CTG
caataatattacagatgtta

SEQ ID NO: 336861 - DNA, 20 bp, Artificial Sequence
  Description of Artificial Sequence: Synthetic oligonucleotide
  Target: LAMA2; (+) strand; PAM type: YTN; PAM sequence: TTA
cagatgttattccctgatta

SEQ ID NO: 336862 - DNA, 20 bp, Artificial Sequence
  Description of Artificial Sequence: Synthetic oligonucleotide
  Target: LAMA2; (+) strand; PAM type: YTN; PAM sequence: TTA
ttccctgattaagaatagta

SEQ ID NO: 336863 - DNA, 20 bp, Artificial Sequence
  Description of Artificial Sequence: Synthetic oligonucleotide
  Target: LAMA2; (+) strand; PAM type: YTN; PAM sequence: TTC
cctgattaagaatagtataa

SEQ ID NO: 336864 - DNA, 20 bp, Artificial Sequence
  Description of Artificial Sequence: Synthetic oligonucleotide
  Target: LAMA2; (+) strand; PAM type: YTN; PAM sequence: CTG
attaagaatagtataaattg

SEQ ID NO: 336865 - DNA, 20 bp, Artificial Sequence
  Description of Artificial Sequence: Synthetic oligonucleotide
  Target: LAMA2; (+) strand; PAM type: YTN; PAM sequence: TTA
agaatagtataaattgacaa

SEQ ID NO: 336866 - DNA, 20 bp, Artificial Sequence
  Description of Artificial Sequence: Synthetic oligonucleotide
  Target: LAMA2; (+) strand; PAM type: YTN; PAM sequence: TTG
acaatccaacccctcaaatg

SEQ ID NO: 336867 - DNA, 20 bp, Artificial Sequence
  Description of Artificial Sequence: Synthetic oligonucleotide
  Target: LAMA2; (+) strand; PAM type: YTN; PAM sequence: CTC
aaatgaaattttttggtgat

SEQ ID NO: 336868 - DNA, 20 bp, Artificial Sequence
  Description of Artificial Sequence: Synthetic oligonucleotide
  Target: LAMA2; (+) strand; PAM type: YTN; PAM sequence: TTT
tttggtgatccaaacgtttt

SEQ ID NO: 336869 - DNA, 20 bp, Artificial Sequence
  Description of Artificial Sequence: Synthetic oligonucleotide
  Target: LAMA2; (+) strand; PAM type: YTN; PAM sequence: TTT
ttggtgatccaaacgtttta

SEQ ID NO: 336870 - DNA, 20 bp, Artificial Sequence
  Description of Artificial Sequence: Synthetic oligonucleotide
  Target: LAMA2; (+) strand; PAM type: YTN; PAM sequence: TTT
tggtgatccaaacgttttaa

SEQ ID NO: 336871 - DNA, 20 bp, Artificial Sequence
  Description of Artificial Sequence: Synthetic oligonucleotide
  Target: LAMA2; (+) strand; PAM type: YTN; PAM sequence: TTT
ggtgatccaaacgttttaaa

SEQ ID NO: 336872 - DNA, 20 bp, Artificial Sequence
  Description of Artificial Sequence: Synthetic oligonucleotide
  Target: LAMA2; (+) strand; PAM type: YTN; PAM sequence: TTG
gtgatccaaacgttttaaac

SEQ ID NO: 336873 - DNA, 20 bp, Artificial Sequence
  Description of Artificial Sequence: Synthetic oligonucleotide
  Target: LAMA2; (+) strand; PAM type: YTN; PAM sequence: TTT
taaacatccaataaagatat

SEQ ID NO: 336874 - DNA, 20 bp, Artificial Sequence
  Description of Artificial Sequence: Synthetic oligonucleotide
  Target: LAMA2; (+) strand; PAM type: YTN; PAM sequence: TTT
aaacatccaataaagatata

SEQ ID NO: 336875 - DNA, 20 bp, Artificial Sequence
  Description of Artificial Sequence: Synthetic oligonucleotide
  Target: LAMA2; (+) strand; PAM type: YTN; PAM sequence: TTA
aacatccaataaagatataa

SEQ ID NO: 336876 - DNA, 20 bp, Artificial Sequence
  Description of Artificial Sequence: Synthetic oligonucleotide
  Target: LAMA2; (+) strand; PAM type: YTN; PAM sequence: CTA
gttctctagtaggcacccat

SEQ ID NO: 336877 - DNA, 20 bp, Artificial Sequence
  Description of Artificial Sequence: Synthetic oligonucleotide
  Target: LAMA2; (+) strand; PAM type: YTN; PAM sequence: TTC
tctagtaggcacccatttcc

SEQ ID NO: 336878 - DNA, 20 bp, Artificial Sequence
  Description of Artificial Sequence: Synthetic oligonucleotide
  Target: LAMA2; (+) strand; PAM type: YTN; PAM sequence: CTC
tagtaggcacccatttccag

SEQ ID NO: 336879 - DNA, 20 bp, Artificial Sequence
  Description of Artificial Sequence: Synthetic oligonucleotide
  Target: LAMA2; (+) strand; PAM type: YTN; PAM sequence: CTA
gtaggcacccatttccaggt

SEQ ID NO: 336880 - DNA, 20 bp, Artificial Sequence
  Description of Artificial Sequence: Synthetic oligonucleotide
  Target: LAMA2; (+) strand; PAM type: YTN; PAM sequence: TTT
ccaggtttccaaacgtttca

SEQ ID NO: 336881 - DNA, 20 bp, Artificial Sequence
  Description of Artificial Sequence: Synthetic oligonucleotide
  Target: LAMA2; (+) strand; PAM type: YTN; PAM sequence: TTC
caggtttccaaacgtttcaa

SEQ ID NO: 336882 - DNA, 20 bp, Artificial Sequence
  Description of Artificial Sequence: Synthetic oligonucleotide
  Target: LAMA2; (+) strand; PAM type: YTN; PAM sequence: TTT
ccaaacgtttcaacaaaaac

SEQ ID NO: 336883 - DNA, 20 bp, Artificial Sequence
  Description of Artificial Sequence: Synthetic oligonucleotide
  Target: LAMA2; (+) strand; PAM type: YTN; PAM sequence: TTC
caaacgtttcaacaaaaaca

SEQ ID NO: 336884 - DNA, 20 bp, Artificial Sequence
  Description of Artificial Sequence: Synthetic oligonucleotide
  Target: LAMA2; (+) strand; PAM type: YTN; PAM sequence: TTT
caacaaaaacatttatatat

SEQ ID NO: 336885 - DNA, 20 bp, Artificial Sequence
  Description of Artificial Sequence: Synthetic oligonucleotide
  Target: LAMA2; (+) strand; PAM type: YTN; PAM sequence: TTC
aacaaaaacatttatatatt

SEQ ID NO: 336886 - DNA, 20 bp, Artificial Sequence
  Description of Artificial Sequence: Synthetic oligonucleotide
  Target: LAMA2; (+) strand; PAM type: YTN; PAM sequence: TTT
atatatttctctattgattg

SEQ ID NO: 336887 - DNA, 20 bp, Artificial Sequence
  Description of Artificial Sequence: Synthetic oligonucleotide
  Target: LAMA2; (+) strand; PAM type: YTN; PAM sequence: TTA
tatatttctctattgattgc

SEQ ID NO: 336888 - DNA, 20 bp, Artificial Sequence
  Description of Artificial Sequence: Synthetic oligonucleotide
  Target: LAMA2; (+) strand; PAM type: YTN; PAM sequence: TTT
ctctattgattgcataatgt

SEQ ID NO: 336889 - DNA, 20 bp, Artificial Sequence
  Description of Artificial Sequence: Synthetic oligonucleotide
  Target: LAMA2; (+) strand; PAM type: YTN; PAM sequence: TTC
tctattgattgcataatgtg

SEQ ID NO: 336890 - DNA, 20 bp, Artificial Sequence
  Description of Artificial Sequence: Synthetic oligonucleotide
  Target: LAMA2; (+) strand; PAM type: YTN; PAM sequence: CTC
tattgattgcataatgtgga

SEQ ID NO: 336891 - DNA, 20 bp, Artificial Sequence
  Description of Artificial Sequence: Synthetic oligonucleotide
  Target: LAMA2; (+) strand; PAM type: YTN; PAM sequence: CTA
ttgattgcataatgtggaga

SEQ ID NO: 336892 - DNA, 20 bp, Artificial Sequence
  Description of Artificial Sequence: Synthetic oligonucleotide
  Target: LAMA2; (+) strand; PAM type: YTN; PAM sequence: TTG
attgcataatgtggagattc

SEQ ID NO: 336893 - DNA, 20 bp, Artificial Sequence
  Description of Artificial Sequence: Synthetic oligonucleotide
  Target: LAMA2; (+) strand; PAM type: YTN; PAM sequence: TTG
cataatgtggagattctgtt

SEQ ID NO: 336894 - DNA, 20 bp, Artificial Sequence
  Description of Artificial Sequence: Synthetic oligonucleotide
  Target: LAMA2; (+) strand; PAM type: YTN; PAM sequence: TTC
tgttttgagaatgcacataa

SEQ ID NO: 336895 - DNA, 20 bp, Artificial Sequence
  Description of Artificial Sequence: Synthetic oligonucleotide
  Target: LAMA2; (+) strand; PAM type: YTN; PAM sequence: CTG
ttttgagaatgcacataaag

SEQ ID NO: 336896 - DNA, 20 bp, Artificial Sequence
  Description of Artificial Sequence: Synthetic oligonucleotide
  Target: LAMA2; (+) strand; PAM type: YTN; PAM sequence: TTT
tgagaatgcacataaagtat

SEQ ID NO: 336897 - DNA, 20 bp, Artificial Sequence
  Description of Artificial Sequence: Synthetic oligonucleotide
  Target: LAMA2; (+) strand; PAM type: YTN; PAM sequence: TTT
gagaatgcacataaagtata

SEQ ID NO: 336898 - DNA, 20 bp, Artificial Sequence
  Description of Artificial Sequence: Synthetic oligonucleotide
  Target: LAMA2; (+) strand; PAM type: YTN; PAM sequence: TTG
agaatgcacataaagtatat

SEQ ID NO: 336899 - DNA, 20 bp, Artificial Sequence
  Description of Artificial Sequence: Synthetic oligonucleotide
  Target: LAMA2; (+) strand; PAM type: YTN; PAM sequence: TTA
tattctgaactgtaacaaaa

SEQ ID NO: 336900 - DNA, 20 bp, Artificial Sequence
  Description of Artificial Sequence: Synthetic oligonucleotide
  Target: LAMA2; (+) strand; PAM type: YTN; PAM sequence: TTC
tgaactgtaacaaaatgaga

SEQ ID NO: 336901 - DNA, 20 bp, Artificial Sequence
  Description of Artificial Sequence: Synthetic oligonucleotide
  Target: LAMA2; (+) strand; PAM type: YTN; PAM sequence: CTG
aactgtaacaaaatgagact

SEQ ID NO: 336902 - DNA, 20 bp, Artificial Sequence
  Description of Artificial Sequence: Synthetic oligonucleotide
  Target: LAMA2; (+) strand; PAM type: YTN; PAM sequence: CTG
taacaaaatgagactctaat

SEQ ID NO: 336903 - DNA, 20 bp, Artificial Sequence
  Description of Artificial Sequence: Synthetic oligonucleotide
  Target: LAMA2; (+) strand; PAM type: YTN; PAM sequence: CTC
taatttattcacagtccttt

SEQ ID NO: 336904 - DNA, 20 bp, Artificial Sequence
  Description of Artificial Sequence: Synthetic oligonucleotide
  Target: LAMA2; (+) strand; PAM type: YTN; PAM sequence: CTA
atttattcacagtccttttt

SEQ ID NO: 336905 - DNA, 20 bp, Artificial Sequence
  Description of Artificial Sequence: Synthetic oligonucleotide
  Target: LAMA2; (+) strand; PAM type: YTN; PAM sequence: TTT
attcacagtcctttttaaat

SEQ ID NO: 336906 - DNA, 20 bp, Artificial Sequence
  Description of Artificial Sequence: Synthetic oligonucleotide
  Target: LAMA2; (+) strand; PAM type: YTN; PAM sequence: TTA
ttcacagtcctttttaaatt

SEQ ID NO: 336907 - DNA, 20 bp, Artificial Sequence
  Description of Artificial Sequence: Synthetic oligonucleotide
  Target: LAMA2; (+) strand; PAM type: YTN; PAM sequence: TTC
acagtcctttttaaatttgt

SEQ ID NO: 336908 - DNA, 20 bp, Artificial Sequence
  Description of Artificial Sequence: Synthetic oligonucleotide
  Target: LAMA2; (+) strand; PAM type: YTN; PAM sequence: CTT
tttaaatttgtctgtatttt

SEQ ID NO: 336909 - DNA, 20 bp, Artificial Sequence
  Description of Artificial Sequence: Synthetic oligonucleotide
  Target: LAMA2; (+) strand; PAM type: YTN; PAM sequence: TTT
ttaaatttgtctgtattttt

SEQ ID NO: 336910 - DNA, 20 bp, Artificial Sequence
  Description of Artificial Sequence: Synthetic oligonucleotide
  Target: LAMA2; (+) strand; PAM type: YTN; PAM sequence: TTT
taaatttgtctgtatttttg

SEQ ID NO: 336911 - DNA, 20 bp, Artificial Sequence
  Description of Artificial Sequence: Synthetic oligonucleotide
  Target: LAMA2; (+) strand; PAM type: YTN; PAM sequence: TTT
aaatttgtctgtatttttgt

SEQ ID NO: 336912 - DNA, 20 bp, Artificial Sequence
  Description of Artificial Sequence: Synthetic oligonucleotide
  Target: LAMA2; (+) strand; PAM type: YTN; PAM sequence: TTA
aatttgtctgtatttttgtt

SEQ ID NO: 336913 - DNA, 20 bp, Artificial Sequence
  Description of Artificial Sequence: Synthetic oligonucleotide
  Target: LAMA2; (+) strand; PAM type: YTN; PAM sequence: TTT
gtctgtatttttgttttcct

SEQ ID NO: 336914 - DNA, 20 bp, Artificial Sequence
  Description of Artificial Sequence: Synthetic oligonucleotide
  Target: LAMA2; (+) strand; PAM type: YTN; PAM sequence: TTG
tctgtatttttgttttcctg

SEQ ID NO: 336915 - DNA, 20 bp, Artificial Sequence
  Description of Artificial Sequence: Synthetic oligonucleotide
  Target: LAMA2; (+) strand; PAM type: YTN; PAM sequence: CTG
tatttttgttttcctgagaa

SEQ ID NO: 336916 - DNA, 20 bp, Artificial Sequence
  Description of Artificial Sequence: Synthetic oligonucleotide
  Target: LAMA2; (+) strand; PAM type: YTN; PAM sequence: TTT
ttgttttcctgagaaaaatc

SEQ ID NO: 336917 - DNA, 20 bp, Artificial Sequence
  Description of Artificial Sequence: Synthetic oligonucleotide
  Target: LAMA2; (+) strand; PAM type: YTN; PAM sequence: TTT
tgttttcctgagaaaaatct

SEQ ID NO: 336918 - DNA, 20 bp, Artificial Sequence
  Description of Artificial Sequence: Synthetic oligonucleotide
  Target: LAMA2; (+) strand; PAM type: YTN; PAM sequence: TTT
gttttcctgagaaaaatctt

SEQ ID NO: 336919 - DNA, 20 bp, Artificial Sequence
  Description of Artificial Sequence: Synthetic oligonucleotide
  Target: LAMA2; (+) strand; PAM type: YTN; PAM sequence: TTG
ttttcctgagaaaaatctta

SEQ ID NO: 336920 - DNA, 20 bp, Artificial Sequence
  Description of Artificial Sequence: Synthetic oligonucleotide
  Target: LAMA2; (+) strand; PAM type: YTN; PAM sequence: TTT
tcctgagaaaaatcttatct

SEQ ID NO: 336921 - DNA, 20 bp, Artificial Sequence
  Description of Artificial Sequence: Synthetic oligonucleotide
  Target: LAMA2; (+) strand; PAM type: YTN; PAM sequence: TTT
cctgagaaaaatcttatctt

SEQ ID NO: 336922 - DNA, 20 bp, Artificial Sequence
  Description of Artificial Sequence: Synthetic oligonucleotide
  Target: LAMA2; (+) strand; PAM type: YTN; PAM sequence: TTC
ctgagaaaaatcttatcttt

SEQ ID NO: 336923 - DNA, 20 bp, Artificial Sequence
  Description of Artificial Sequence: Synthetic oligonucleotide
  Target: LAMA2; (+) strand; PAM type: YTN; PAM sequence: CTG
agaaaaatcttatctttata

SEQ ID NO: 336924 - DNA, 20 bp, Artificial Sequence
  Description of Artificial Sequence: Synthetic oligonucleotide
  Target: LAMA2; (+) strand; PAM type: YTN; PAM sequence: CTT
atctttatagcctctctgga

SEQ ID NO: 336925 - DNA, 20 bp, Artificial Sequence
  Description of Artificial Sequence: Synthetic oligonucleotide
  Target: LAMA2; (+) strand; PAM type: YTN; PAM sequence: TTA
tctttatagcctctctggat

SEQ ID NO: 336926 - DNA, 20 bp, Artificial Sequence
  Description of Artificial Sequence: Synthetic oligonucleotide
  Target: LAMA2; (+) strand; PAM type: YTN; PAM sequence: CTT
tatagcctctctggatattg

SEQ ID NO: 336927 - DNA, 20 bp, Artificial Sequence
  Description of Artificial Sequence: Synthetic oligonucleotide
  Target: LAMA2; (+) strand; PAM type: YTN; PAM sequence: TTT
atagcctctctggatattga

SEQ ID NO: 336928 - DNA, 20 bp, Artificial Sequence
  Description of Artificial Sequence: Synthetic oligonucleotide
  Target: LAMA2; (+) strand; PAM type: YTN; PAM sequence: TTA
tagcctctctggatattgaa

SEQ ID NO: 336929 - DNA, 20 bp, Artificial Sequence
  Description of Artificial Sequence: Synthetic oligonucleotide
  Target: LAMA2; (+) strand; PAM type: YTN; PAM sequence: CTC
tctggatattgaatatcttg

SEQ ID NO: 336930 - DNA, 20 bp, Artificial Sequence
  Description of Artificial Sequence: Synthetic oligonucleotide
  Target: LAMA2; (+) strand; PAM type: YTN; PAM sequence: CTC
tggatattgaatatcttgag

SEQ ID NO: 336931 - DNA, 20 bp, Artificial Sequence
  Description of Artificial Sequence: Synthetic oligonucleotide
  Target: LAMA2; (+) strand; PAM type: YTN; PAM sequence: CTG
gatattgaatatcttgagac

SEQ ID NO: 336932 - DNA, 20 bp, Artificial Sequence
  Description of Artificial Sequence: Synthetic oligonucleotide
  Target: LAMA2; (+) strand; PAM type: YTN; PAM sequence: TTG
aatatcttgagactagcttt

SEQ ID NO: 336933 - DNA, 20 bp, Artificial Sequence
  Description of Artificial Sequence: Synthetic oligonucleotide
  Target: LAMA2; (+) strand; PAM type: YTN; PAM sequence: CTT
gagactagctttaattctct

SEQ ID NO: 336934 - DNA, 20 bp, Artificial Sequence
  Description of Artificial Sequence: Synthetic oligonucleotide
  Target: LAMA2; (+) strand; PAM type: YTN; PAM sequence: TTG
agactagctttaattctctt

SEQ ID NO: 336935 - DNA, 20 bp, Artificial Sequence
  Description of Artificial Sequence: Synthetic oligonucleotide
  Target: LAMA2; (+) strand; PAM type: YTN; PAM sequence: CTA
gctttaattctcttgatttt

SEQ ID NO: 336936 - DNA, 20 bp, Artificial Sequence
  Description of Artificial Sequence: Synthetic oligonucleotide
  Target: LAMA2; (+) strand; PAM type: YTN; PAM sequence: CTT
taattctcttgatttttatt

SEQ ID NO: 336937 - DNA, 20 bp, Artificial Sequence
  Description of Artificial Sequence: Synthetic oligonucleotide
  Target: LAMA2; (+) strand; PAM type: YTN; PAM sequence: TTT
aattctcttgatttttatta

SEQ ID NO: 336938 - DNA, 20 bp, Artificial Sequence
  Description of Artificial Sequence: Synthetic oligonucleotide
  Target: LAMA2; (+) strand; PAM type: YTN; PAM sequence: TTA
attctcttgatttttattaa

SEQ ID NO: 336939 - DNA, 20 bp, Artificial Sequence
  Description of Artificial Sequence: Synthetic oligonucleotide
  Target: LAMA2; (+) strand; PAM type: YTN; PAM sequence: TTC
tcttgatttttattaaaact

SEQ ID NO: 336940 - DNA, 20 bp, Artificial Sequence
  Description of Artificial Sequence: Synthetic oligonucleotide
  Target: LAMA2; (+) strand; PAM type: YTN; PAM sequence: CTC
ttgatttttattaaaacttc

SEQ ID NO: 336941 - DNA, 20 bp, Artificial Sequence
  Description of Artificial Sequence: Synthetic oligonucleotide
  Target: LAMA2; (+) strand; PAM type: YTN; PAM sequence: CTT
gatttttattaaaacttcta

SEQ ID NO: 336942 - DNA, 20 bp, Artificial Sequence
  Description of Artificial Sequence: Synthetic oligonucleotide
  Target: LAMA2; (+) strand; PAM type: YTN; PAM sequence: TTG
atttttattaaaacttctaa

SEQ ID NO: 336943 - DNA, 20 bp, Artificial Sequence
  Description of Artificial Sequence: Synthetic oligonucleotide
  Target: LAMA2; (+) strand; PAM type: YTN; PAM sequence: TTT
ttattaaaacttctaattcc

SEQ ID NO: 336944 - DNA, 20 bp, Artificial Sequence
  Description of Artificial Sequence: Synthetic oligonucleotide
  Target: LAMA2; (+) strand; PAM type: YTN; PAM sequence: TTT
tattaaaacttctaattcca

SEQ ID NO: 336945 - DNA, 20 bp, Artificial Sequence
  Description of Artificial Sequence: Synthetic oligonucleotide
  Target: LAMA2; (+) strand; PAM type: YTN; PAM sequence: TTT
attaaaacttctaattccaa

SEQ ID NO: 336946 - DNA, 20 bp, Artificial Sequence
  Description of Artificial Sequence: Synthetic oligonucleotide
  Target: LAMA2; (+) strand; PAM type: YTN; PAM sequence: TTA
ttaaaacttctaattccaac

SEQ ID NO: 336947 - DNA, 20 bp, Artificial Sequence
  Description of Artificial Sequence: Synthetic oligonucleotide
  Target: LAMA2; (+) strand; PAM type: YTN; PAM sequence: TTA
aaacttctaattccaacttt

SEQ ID NO: 336948 - DNA, 20 bp, Artificial Sequence
  Description of Artificial Sequence: Synthetic oligonucleotide
  Target: LAMA2; (+) strand; PAM type: YTN; PAM sequence: CTT
ctaattccaactttattcgt

SEQ ID NO: 336949 - DNA, 20 bp, Artificial Sequence
  Description of Artificial Sequence: Synthetic oligonucleotide
  Target: LAMA2; (+) strand; PAM type: YTN; PAM sequence: TTC
taattccaactttattcgtg

SEQ ID NO: 336950 - DNA, 20 bp, Artificial Sequence
  Description of Artificial Sequence: Synthetic oligonucleotide
  Target: LAMA2; (+) strand; PAM type: YTN; PAM sequence: CTA
attccaactttattcgtgaa

SEQ ID NO: 336951 - DNA, 20 bp, Artificial Sequence
  Description of Artificial Sequence: Synthetic oligonucleotide
  Target: LAMA2; (+) strand; PAM type: YTN; PAM sequence: TTC
caactttattcgtgaactac

SEQ ID NO: 336952 - DNA, 20 bp, Artificial Sequence
  Description of Artificial Sequence: Synthetic oligonucleotide
  Target: LAMA2; (+) strand; PAM type: YTN; PAM sequence: CTT
tattcgtgaactacatgctt

SEQ ID NO: 336953 - DNA, 20 bp, Artificial Sequence
  Description of Artificial Sequence: Synthetic oligonucleotide
  Target: LAMA2; (+) strand; PAM type: YTN; PAM sequence: TTT
attcgtgaactacatgctta

SEQ ID NO: 336954 - DNA, 20 bp, Artificial Sequence
  Description of Artificial Sequence: Synthetic oligonucleotide
  Target: LAMA2; (+) strand; PAM type: YTN; PAM sequence: TTA
ttcgtgaactacatgcttat

SEQ ID NO: 336955 - DNA, 20 bp, Artificial Sequence
  Description of Artificial Sequence: Synthetic oligonucleotide
  Target: LAMA2; (+) strand; PAM type: YTN; PAM sequence: TTC
gtgaactacatgcttatata

SEQ ID NO: 336956 - DNA, 20 bp, Artificial Sequence
  Description of Artificial Sequence: Synthetic oligonucleotide
  Target: LAMA2; (+) strand; PAM type: YTN; PAM sequence: CTA
catgcttatataaaagtacg

SEQ ID NO: 336957 - DNA, 20 bp, Artificial Sequence
  Description of Artificial Sequence: Synthetic oligonucleotide
  Target: LAMA2; (+) strand; PAM type: YTN; PAM sequence: CTT
atataaaagtacgtttcatc

SEQ ID NO: 336958 - DNA, 20 bp, Artificial Sequence
  Description of Artificial Sequence: Synthetic oligonucleotide
  Target: LAMA2; (+) strand; PAM type: YTN; PAM sequence: TTA
tataaaagtacgtttcatca

SEQ ID NO: 336959 - DNA, 20 bp, Artificial Sequence
  Description of Artificial Sequence: Synthetic oligonucleotide
  Target: LAMA2; (+) strand; PAM type: YTN; PAM sequence: TTT
catcaaacagctttctcttt

SEQ ID NO: 336960 - DNA, 20 bp, Artificial Sequence
  Description of Artificial Sequence: Synthetic oligonucleotide
  Target: LAMA2; (+) strand; PAM type: YTN; PAM sequence: TTC
atcaaacagctttctcttta

SEQ ID NO: 336961 - DNA, 20 bp, Artificial Sequence
  Description of Artificial Sequence: Synthetic oligonucleotide
  Target: LAMA2; (+) strand; PAM type: YTN; PAM sequence: CTT
tctctttatctctttaaaat

SEQ ID NO: 336962 - DNA, 20 bp, Artificial Sequence
  Description of Artificial Sequence: Synthetic oligonucleotide
  Target: LAMA2; (+) strand; PAM type: YTN; PAM sequence: TTT
ctctttatctctttaaaatc

SEQ ID NO: 336963 - DNA, 20 bp, Artificial Sequence
  Description of Artificial Sequence: Synthetic oligonucleotide
  Target: LAMA2; (+) strand; PAM type: YTN; PAM sequence: TTC
tctttatctctttaaaatca

SEQ ID NO: 336964 - DNA, 20 bp, Artificial Sequence
  Description of Artificial Sequence: Synthetic oligonucleotide
  Target: LAMA2; (+) strand; PAM type: YTN; PAM sequence: CTC
tttatctctttaaaatcatt

SEQ ID NO: 336965 - DNA, 20 bp, Artificial Sequence
  Description of Artificial Sequence: Synthetic oligonucleotide
  Target: LAMA2; (+) strand; PAM type: YTN; PAM sequence: CTT
tatctctttaaaatcattac

SEQ ID NO: 336966 - DNA, 20 bp, Artificial Sequence
  Description of Artificial Sequence: Synthetic oligonucleotide
  Target: LAMA2; (+) strand; PAM type: YTN; PAM sequence: TTT
atctctttaaaatcattacc

SEQ ID NO: 336967 - DNA, 20 bp, Artificial Sequence
  Description of Artificial Sequence: Synthetic oligonucleotide
  Target: LAMA2; (+) strand; PAM type: YTN; PAM sequence: TTA
tctctttaaaatcattacct

SEQ ID NO: 336968 - DNA, 20 bp, Artificial Sequence
  Description of Artificial Sequence: Synthetic oligonucleotide
  Target: LAMA2; (+) strand; PAM type: YTN; PAM sequence: CTC
tttaaaatcattacctttta

SEQ ID NO: 336969 - DNA, 20 bp, Artificial Sequence
  Description of Artificial Sequence: Synthetic oligonucleotide
  Target: LAMA2; (+) strand; PAM type: YTN; PAM sequence: CTT
taaaatcattaccttttatt

SEQ ID NO: 336970 - DNA, 20 bp, Artificial Sequence
  Description of Artificial Sequence: Synthetic oligonucleotide
  Target: LAMA2; (+) strand; PAM type: YTN; PAM sequence: TTT
aaaatcattaccttttatta

SEQ ID NO: 336971 - DNA, 20 bp, Artificial Sequence
  Description of Artificial Sequence: Synthetic oligonucleotide
  Target: LAMA2; (+) strand; PAM type: YTN; PAM sequence: TTA
aaatcattaccttttattat

SEQ ID NO: 336972 - DNA, 20 bp, Artificial Sequence
  Description of Artificial Sequence: Synthetic oligonucleotide
  Target: LAMA2; (+) strand; PAM type: YTN; PAM sequence: TTA
ccttttattattttcagtat

SEQ ID NO: 336973 - DNA, 20 bp, Artificial Sequence
  Description of Artificial Sequence: Synthetic oligonucleotide
  Target: LAMA2; (+) strand; PAM type: YTN; PAM sequence: CTT
ttattattttcagtatgctt

SEQ ID NO: 336974 - DNA, 20 bp, Artificial Sequence
  Description of Artificial Sequence: Synthetic oligonucleotide
  Target: LAMA2; (+) strand; PAM type: YTN; PAM sequence: TTT
tattattttcagtatgcttt

SEQ ID NO: 336975 - DNA, 20 bp, Artificial Sequence
  Description of Artificial Sequence: Synthetic oligonucleotide
  Target: LAMA2; (+) strand; PAM type: YTN; PAM sequence: TTT
attattttcagtatgcttta

SEQ ID NO: 336976 - DNA, 20 bp, Artificial Sequence
  Description of Artificial Sequence: Synthetic oligonucleotide
  Target: LAMA2; (+) strand; PAM type: YTN; PAM sequence: TTA
ttattttcagtatgctttaa

SEQ ID NO: 336977 - DNA, 20 bp, Artificial Sequence
  Description of Artificial Sequence: Synthetic oligonucleotide
  Target: LAMA2; (+) strand; PAM type: YTN; PAM sequence: TTA
ttttcagtatgctttaatgc

SEQ ID NO: 336978 - DNA, 20 bp, Artificial Sequence
  Description of Artificial Sequence: Synthetic oligonucleotide
  Target: LAMA2; (+) strand; PAM type: YTN; PAM sequence: TTT
tcagtatgctttaatgcttt

SEQ ID NO: 336979 - DNA, 20 bp, Artificial Sequence
  Description of Artificial Sequence: Synthetic oligonucleotide
  Target: LAMA2; (+) strand; PAM type: YTN; PAM sequence: TTT
cagtatgctttaatgcttta

SEQ ID NO: 336980 - DNA, 20 bp, Artificial Sequence
  Description of Artificial Sequence: Synthetic oligonucleotide
  Target: LAMA2; (+) strand; PAM type: YTN; PAM sequence: TTC
agtatgctttaatgctttaa

SEQ ID NO: 336981 - DNA, 20 bp, Artificial Sequence
  Description of Artificial Sequence: Synthetic oligonucleotide
  Target: LAMA2; (+) strand; PAM type: YTN; PAM sequence: CTT
taatgctttaaaattttatt

SEQ ID NO: 336982 - DNA, 20 bp, Artificial Sequence
  Description of Artificial Sequence: Synthetic oligonucleotide
  Target: LAMA2; (+) strand; PAM type: YTN; PAM sequence: TTT
aatgctttaaaattttattc

SEQ ID NO: 336983 - DNA, 20 bp, Artificial Sequence
  Description of Artificial Sequence: Synthetic oligonucleotide
  Target: LAMA2; (+) strand; PAM type: YTN; PAM sequence: TTA
atgctttaaaattttattct

SEQ ID NO: 336984 - DNA, 20 bp, Artificial Sequence
  Description of Artificial Sequence: Synthetic oligonucleotide
  Target: LAMA2; (+) strand; PAM type: YTN; PAM sequence: CTT
taaaattttattcttgaaac

SEQ ID NO: 336985 - DNA, 20 bp, Artificial Sequence
  Description of Artificial Sequence: Synthetic oligonucleotide
  Target: LAMA2; (+) strand; PAM type: YTN; PAM sequence: TTT
aaaattttattcttgaaaca

SEQ ID NO: 336986 - DNA, 20 bp, Artificial Sequence
  Description of Artificial Sequence: Synthetic oligonucleotide
  Target: LAMA2; (+) strand; PAM type: YTN; PAM sequence: TTA
aaattttattcttgaaacat

SEQ ID NO: 336987 - DNA, 20 bp, Artificial Sequence
  Description of Artificial Sequence: Synthetic oligonucleotide
  Target: LAMA2; (+) strand; PAM type: YTN; PAM sequence: TTT
tattcttgaaacatttggtt

SEQ ID NO: 336988 - DNA, 20 bp, Artificial Sequence
  Description of Artificial Sequence: Synthetic oligonucleotide
  Target: LAMA2; (+) strand; PAM type: YTN; PAM sequence: TTT
attcttgaaacatttggttt

SEQ ID NO: 336989 - DNA, 20 bp, Artificial Sequence
  Description of Artificial Sequence: Synthetic oligonucleotide
  Target: LAMA2; (+) strand; PAM type: YTN; PAM sequence: TTA
ttcttgaaacatttggtttt

SEQ ID NO: 336990 - DNA, 20 bp, Artificial Sequence
  Description of Artificial Sequence: Synthetic oligonucleotide
  Target: LAMA2; (+) strand; PAM type: YTN; PAM sequence: TTC
ttgaaacatttggtttttcc

SEQ ID NO: 336991 - DNA, 20 bp, Artificial Sequence
  Description of Artificial Sequence: Synthetic oligonucleotide
  Target: LAMA2; (+) strand; PAM type: YTN; PAM sequence: CTT
gaaacatttggtttttccat

SEQ ID NO: 336992 - DNA, 20 bp, Artificial Sequence
  Description of Artificial Sequence: Synthetic oligonucleotide
  Target: LAMA2; (+) strand; PAM type: YTN; PAM sequence: TTG
aaacatttggtttttccatt

SEQ ID NO: 336993 - DNA, 20 bp, Artificial Sequence
  Description of Artificial Sequence: Synthetic oligonucleotide
  Target: LAMA2; (+) strand; PAM type: YTN; PAM sequence: TTT
ggtttttccattgctacttt

SEQ ID NO: 336994 - DNA, 20 bp, Artificial Sequence
  Description of Artificial Sequence: Synthetic oligonucleotide
  Target: LAMA2; (+) strand; PAM type: YTN; PAM sequence: TTG
gtttttccattgctactttc

SEQ ID NO: 336995 - DNA, 20 bp, Artificial Sequence
  Description of Artificial Sequence: Synthetic oligonucleotide
  Target: LAMA2; (+) strand; PAM type: YTN; PAM sequence: TTT
ttccattgctactttcctat

SEQ ID NO: 336996 - DNA, 20 bp, Artificial Sequence
  Description of Artificial Sequence: Synthetic oligonucleotide
  Target: LAMA2; (+) strand; PAM type: YTN; PAM sequence: TTT
tccattgctactttcctatt

SEQ ID NO: 336997 - DNA, 20 bp, Artificial Sequence
  Description of Artificial Sequence: Synthetic oligonucleotide
  Target: LAMA2; (+) strand; PAM type: YTN; PAM sequence: TTT
ccattgctactttcctattg

SEQ ID NO: 336998 - DNA, 20 bp, Artificial Sequence
  Description of Artificial Sequence: Synthetic oligonucleotide
  Target: LAMA2; (+) strand; PAM type: YTN; PAM sequence: TTC
cattgctactttcctattga

SEQ ID NO: 336999 - DNA, 20 bp, Artificial Sequence
  Description of Artificial Sequence: Synthetic oligonucleotide
  Target: LAMA2; (+) strand; PAM type: YTN; PAM sequence: TTG
ctactttcctattgattgtt

SEQ ID NO: 337000 - DNA, 20 bp, Artificial Sequence
  Description of Artificial Sequence: Synthetic oligonucleotide
  Target: LAMA2; (+) strand; PAM type: YTN; PAM sequence: CTA
ctttcctattgattgttttc

SEQ ID NO: 337001 - DNA, 20 bp, Artificial Sequence
  Description of Artificial Sequence: Synthetic oligonucleotide
  Target: LAMA2; (+) strand; PAM type: YTN; PAM sequence: CTT
tcctattgattgttttcctc

SEQ ID NO: 337002 - DNA, 20 bp, Artificial Sequence
  Description of Artificial Sequence: Synthetic oligonucleotide
  Target: LAMA2; (+) strand; PAM type: YTN; PAM sequence: TTT
cctattgattgttttcctca

SEQ ID NO: 337003 - DNA, 20 bp, Artificial Sequence
  Description of Artificial Sequence: Synthetic oligonucleotide
  Target: LAMA2; (+) strand; PAM type: YTN; PAM sequence: TTC
ctattgattgttttcctcat

SEQ ID NO: 337004 - DNA, 20 bp, Artificial Sequence
  Description of Artificial Sequence: Synthetic oligonucleotide
  Target: LAMA2; (+) strand; PAM type: YTN; PAM sequence: CTA
ttgattgttttcctcatatg

SEQ ID NO: 337005 - DNA, 20 bp, Artificial Sequence
  Description of Artificial Sequence: Synthetic oligonucleotide
  Target: LAMA2; (+) strand; PAM type: YTN; PAM sequence: TTG
attgttttcctcatatgtat

SEQ ID NO: 337006 - DNA, 20 bp, Artificial Sequence
  Description of Artificial Sequence: Synthetic oligonucleotide
  Target: LAMA2; (+) strand; PAM type: YTN; PAM sequence: TTG
ttttcctcatatgtatcttg

SEQ ID NO: 337007 - DNA, 20 bp, Artificial Sequence
  Description of Artificial Sequence: Synthetic oligonucleotide
  Target: LAMA2; (+) strand; PAM type: YTN; PAM sequence: TTT
tcctcatatgtatcttgaga

SEQ ID NO: 337008 - DNA, 20 bp, Artificial Sequence
  Description of Artificial Sequence: Synthetic oligonucleotide
  Target: LAMA2; (+) strand; PAM type: YTN; PAM sequence: TTT
cctcatatgtatcttgagat

SEQ ID NO: 337009 - DNA, 20 bp, Artificial Sequence
  Description of Artificial Sequence: Synthetic oligonucleotide
  Target: LAMA2; (+) strand; PAM type: YTN; PAM sequence: TTC
ctcatatgtatcttgagatt

SEQ ID NO: 337010 - DNA, 20 bp, Artificial Sequence
  Description of Artificial Sequence: Synthetic oligonucleotide
  Target: LAMA2; (+) strand; PAM type: YTN; PAM sequence: CTC
atatgtatcttgagatttta

SEQ ID NO: 337011 - DNA, 20 bp, Artificial Sequence
  Description of Artificial Sequence: Synthetic oligonucleotide
  Target: LAMA2; (+) strand; PAM type: YTN; PAM sequence: CTT
gagattttagtctaggtttt

SEQ ID NO: 337012 - DNA, 20 bp, Artificial Sequence
  Description of Artificial Sequence: Synthetic oligonucleotide
  Target: LAMA2; (+) strand; PAM type: YTN; PAM sequence: TTG
agattttagtctaggtttta

SEQ ID NO: 337013 - DNA, 20 bp, Artificial Sequence
  Description of Artificial Sequence: Synthetic oligonucleotide
  Target: LAMA2; (+) strand; PAM type: YTN; PAM sequence: TTT
tagtctaggttttataacaa

SEQ ID NO: 337014 - DNA, 20 bp, Artificial Sequence
  Description of Artificial Sequence: Synthetic oligonucleotide
  Target: LAMA2; (+) strand; PAM type: YTN; PAM sequence: TTT
agtctaggttttataacaag

SEQ ID NO: 337015 - DNA, 20 bp, Artificial Sequence
  Description of Artificial Sequence: Synthetic oligonucleotide
  Target: LAMA2; (+) strand; PAM type: YTN; PAM sequence: TTA
gtctaggttttataacaagc

SEQ ID NO: 337016 - DNA, 20 bp, Artificial Sequence
  Description of Artificial Sequence: Synthetic oligonucleotide
  Target: LAMA2; (+) strand; PAM type: YTN; PAM sequence: CTA
ggttttataacaagcatagc

SEQ ID NO: 337017 - DNA, 20 bp, Artificial Sequence
  Description of Artificial Sequence: Synthetic oligonucleotide
  Target: LAMA2; (+) strand; PAM type: YTN; PAM sequence: TTT
tataacaagcatagctatat

SEQ ID NO: 337018 - DNA, 20 bp, Artificial Sequence
  Description of Artificial Sequence: Synthetic oligonucleotide
  Target: LAMA2; (+) strand; PAM type: YTN; PAM sequence: TTT
ataacaagcatagctatatt

SEQ ID NO: 337019 - DNA, 20 bp, Artificial Sequence
  Description of Artificial Sequence: Synthetic oligonucleotide
  Target: LAMA2; (+) strand; PAM type: YTN; PAM sequence: TTA
taacaagcatagctatattt

SEQ ID NO: 337020 - DNA, 20 bp, Artificial Sequence
  Description of Artificial Sequence: Synthetic oligonucleotide
  Target: LAMA2; (+) strand; PAM type: YTN; PAM sequence: CTA
tatttacagatattttttct

SEQ ID NO: 337021 - DNA, 20 bp, Artificial Sequence
  Description of Artificial Sequence: Synthetic oligonucleotide
  Target: LAMA2; (+) strand; PAM type: YTN; PAM sequence: TTT
acagatattttttctataaa

SEQ ID NO: 337022 - DNA, 20 bp, Artificial Sequence
  Description of Artificial Sequence: Synthetic oligonucleotide
  Target: LAMA2; (+) strand; PAM type: YTN; PAM sequence: TTA
cagatattttttctataaag

SEQ ID NO: 337023 - DNA, 20 bp, Artificial Sequence
  Description of Artificial Sequence: Synthetic oligonucleotide
  Target: LAMA2; (+) strand; PAM type: YTN; PAM sequence: TTT
tttctataaagttttcaata

SEQ ID NO: 337024 - DNA, 20 bp, Artificial Sequence
  Description of Artificial Sequence: Synthetic oligonucleotide
  Target: LAMA2; (+) strand; PAM type: YTN; PAM sequence: TTT
ttctataaagttttcaatat

SEQ ID NO: 337025 - DNA, 20 bp, Artificial Sequence
  Description of Artificial Sequence: Synthetic oligonucleotide
  Target: LAMA2; (+) strand; PAM type: YTN; PAM sequence: TTT
tctataaagttttcaatata

SEQ ID NO: 337026 - DNA, 20 bp, Artificial Sequence
  Description of Artificial Sequence: Synthetic oligonucleotide
  Target: LAMA2; (+) strand; PAM type: YTN; PAM sequence: TTT
ctataaagttttcaatatag

SEQ ID NO: 337027 - DNA, 20 bp, Artificial Sequence
  Description of Artificial Sequence: Synthetic oligonucleotide
  Target: LAMA2; (+) strand; PAM type: YTN; PAM sequence: TTC
tataaagttttcaatataga

SEQ ID NO: 337028 - DNA, 20 bp, Artificial Sequence
  Description of Artificial Sequence: Synthetic oligonucleotide
  Target: LAMA2; (+) strand; PAM type: YTN; PAM sequence: CTA
taaagttttcaatatagatt

SEQ ID NO: 337029 - DNA, 20 bp, Artificial Sequence
  Description of Artificial Sequence: Synthetic oligonucleotide
  Target: LAMA2; (+) strand; PAM type: YTN; PAM sequence: TTT
tcaatatagattctgatttt

SEQ ID NO: 337030 - DNA, 20 bp, Artificial Sequence
  Description of Artificial Sequence: Synthetic oligonucleotide
  Target: LAMA2; (+) strand; PAM type: YTN; PAM sequence: TTT
caatatagattctgattttt

SEQ ID NO: 337031 - DNA, 20 bp, Artificial Sequence
  Description of Artificial Sequence: Synthetic oligonucleotide
  Target: LAMA2; (+) strand; PAM type: YTN; PAM sequence: TTC
aatatagattctgatttttt

SEQ ID NO: 337032 - DNA, 20 bp, Artificial Sequence
  Description of Artificial Sequence: Synthetic oligonucleotide
  Target: LAMA2; (+) strand; PAM type: YTN; PAM sequence: TTC
tgatttttttatcttataaa

SEQ ID NO: 337033 - DNA, 20 bp, Artificial Sequence
  Description of Artificial Sequence: Synthetic oligonucleotide
  Target: LAMA2; (+) strand; PAM type: YTN; PAM sequence: CTG
atttttttatcttataaaaa

SEQ ID NO: 337034 - DNA, 20 bp, Artificial Sequence
  Description of Artificial Sequence: Synthetic oligonucleotide
  Target: LAMA2; (+) strand; PAM type: YTN; PAM sequence: TTT
ttttatcttataaaaaatag

SEQ ID NO: 337035 - DNA, 20 bp, Artificial Sequence
  Description of Artificial Sequence: Synthetic oligonucleotide
  Target: LAMA2; (+) strand; PAM type: YTN; PAM sequence: TTT
tttatcttataaaaaatagt

SEQ ID NO: 337036 - DNA, 20 bp, Artificial Sequence
  Description of Artificial Sequence: Synthetic oligonucleotide
  Target: LAMA2; (+) strand; PAM type: YTN; PAM sequence: TTT
ttatcttataaaaaatagtt

SEQ ID NO: 337037 - DNA, 20 bp, Artificial Sequence
  Description of Artificial Sequence: Synthetic oligonucleotide
  Target: LAMA2; (+) strand; PAM type: YTN; PAM sequence: TTT
tatcttataaaaaatagtta

SEQ ID NO: 337038 - DNA, 20 bp, Artificial Sequence
  Description of Artificial Sequence: Synthetic oligonucleotide
  Target: LAMA2; (+) strand; PAM type: YTN; PAM sequence: TTT
atcttataaaaaatagttaa

SEQ ID NO: 337039 - DNA, 20 bp, Artificial Sequence
  Description of Artificial Sequence: Synthetic oligonucleotide
  Target: LAMA2; (+) strand; PAM type: YTN; PAM sequence: TTA
tcttataaaaaatagttaac

SEQ ID NO: 337040 - DNA, 20 bp, Artificial Sequence
  Description of Artificial Sequence: Synthetic oligonucleotide
  Target: LAMA2; (+) strand; PAM type: YTN; PAM sequence: CTT
ataaaaaatagttaacacca

SEQ ID NO: 337041 - DNA, 20 bp, Artificial Sequence
  Description of Artificial Sequence: Synthetic oligonucleotide
  Target: LAMA2; (+) strand; PAM type: YTN; PAM sequence: TTA
taaaaaatagttaacaccat

SEQ ID NO: 337042 - DNA, 20 bp, Artificial Sequence
  Description of Artificial Sequence: Synthetic oligonucleotide
  Target: LAMA2; (+) strand; PAM type: YTN; PAM sequence: TTA
acaccattaacgtttggatt

SEQ ID NO: 337043 - DNA, 20 bp, Artificial Sequence
  Description of Artificial Sequence: Synthetic oligonucleotide
  Target: LAMA2; (+) strand; PAM type: YTN; PAM sequence: TTA
acgtttggatttatttctgt

SEQ ID NO: 337044 - DNA, 20 bp, Artificial Sequence
  Description of Artificial Sequence: Synthetic oligonucleotide
  Target: LAMA2; (+) strand; PAM type: YTN; PAM sequence: TTT
ggatttatttctgtctagtt

SEQ ID NO: 337045 - DNA, 20 bp, Artificial Sequence
  Description of Artificial Sequence: Synthetic oligonucleotide
  Target: LAMA2; (+) strand; PAM type: YTN; PAM sequence: TTG
gatttatttctgtctagttc

SEQ ID NO: 337046 - DNA, 20 bp, Artificial Sequence
  Description of Artificial Sequence: Synthetic oligonucleotide
  Target: LAMA2; (+) strand; PAM type: YTN; PAM sequence: TTT
atttctgtctagttctcctc

SEQ ID NO: 337047 - DNA, 20 bp, Artificial Sequence
  Description of Artificial Sequence: Synthetic oligonucleotide
  Target: LAMA2; (+) strand; PAM type: YTN; PAM sequence: TTA
tttctgtctagttctcctct

SEQ ID NO: 337048 - DNA, 20 bp, Artificial Sequence
  Description of Artificial Sequence: Synthetic oligonucleotide
  Target: LAMA2; (+) strand; PAM type: YTN; PAM sequence: TTT
ctgtctagttctcctctgct

SEQ ID NO: 337049 - DNA, 20 bp, Artificial Sequence
  Description of Artificial Sequence: Synthetic oligonucleotide
  Target: LAMA2; (+) strand; PAM type: YTN; PAM sequence: TTC
tgtctagttctcctctgctc

SEQ ID NO: 337050 - DNA, 20 bp, Artificial Sequence
  Description of Artificial Sequence: Synthetic oligonucleotide
  Target: LAMA2; (+) strand; PAM type: YTN; PAM sequence: CTG
tctagttctcctctgctcac

SEQ ID NO: 337051 - DNA, 20 bp, Artificial Sequence
  Description of Artificial Sequence: Synthetic oligonucleotide
  Target: LAMA2; (+) strand; PAM type: YTN; PAM sequence: CTA
gttctcctctgctcacacac

SEQ ID NO: 337052 - DNA, 20 bp, Artificial Sequence
  Description of Artificial Sequence: Synthetic oligonucleotide
  Target: LAMA2; (+) strand; PAM type: YTN; PAM sequence: TTC
tcctctgctcacacacacac

SEQ ID NO: 337053 - DNA, 20 bp, Artificial Sequence
  Description of Artificial Sequence: Synthetic oligonucleotide
  Target: LAMA2; (+) strand; PAM type: YTN; PAM sequence: CTC
ctctgctcacacacacacac

SEQ ID NO: 337054 - DNA, 20 bp, Artificial Sequence
  Description of Artificial Sequence: Synthetic oligonucleotide
  Target: LAMA2; (+) strand; PAM type: YTN; PAM sequence: CTC
tgctcacacacacacacaca

SEQ ID NO: 337055 - DNA, 20 bp, Artificial Sequence
  Description of Artificial Sequence: Synthetic oligonucleotide
  Target: LAMA2; (+) strand; PAM type: YTN; PAM sequence: CTG
ctcacacacacacacacaca

SEQ ID NO: 337056 - DNA, 20 bp, Artificial Sequence
  Description of Artificial Sequence: Synthetic oligonucleotide
  Target: LAMA2; (+) strand; PAM type: YTN; PAM sequence: CTC
acacacacacacacacacac

SEQ ID NO: 337057 - DNA, 20 bp, Artificial Sequence
  Description of Artificial Sequence: Synthetic oligonucleotide
  Target: LAMA2; (+) strand; PAM type: YTN; PAM sequence: CTA
ataaagataaaaataaactt

SEQ ID NO: 337058 - DNA, 20 bp, Artificial Sequence
  Description of Artificial Sequence: Synthetic oligonucleotide
  Target: LAMA2; (+) strand; PAM type: YTN; PAM sequence: CTT
tataaagttttacattttgt

SEQ ID NO: 337059 - DNA, 20 bp, Artificial Sequence
  Description of Artificial Sequence: Synthetic oligonucleotide
  Target: LAMA2; (+) strand; PAM type: YTN; PAM sequence: TTT
ataaagttttacattttgta

SEQ ID NO: 337060 - DNA, 20 bp, Artificial Sequence
  Description of Artificial Sequence: Synthetic oligonucleotide
  Target: LAMA2; (+) strand; PAM type: YTN; PAM sequence: TTA
taaagttttacattttgtaa

SEQ ID NO: 337061 - DNA, 20 bp, Artificial Sequence
  Description of Artificial Sequence: Synthetic oligonucleotide
  Target: LAMA2; (+) strand; PAM type: YTN; PAM sequence: TTT
tacattttgtaactggatat

SEQ ID NO: 337062 - DNA, 20 bp, Artificial Sequence
  Description of Artificial Sequence: Synthetic oligonucleotide
  Target: LAMA2; (+) strand; PAM type: YTN; PAM sequence: TTT
acattttgtaactggatatt

SEQ ID NO: 337063 - DNA, 20 bp, Artificial Sequence
  Description of Artificial Sequence: Synthetic oligonucleotide
  Target: LAMA2; (+) strand; PAM type: YTN; PAM sequence: TTA
cattttgtaactggatatta

SEQ ID NO: 337064 - DNA, 20 bp, Artificial Sequence
  Description of Artificial Sequence: Synthetic oligonucleotide
  Target: LAMA2; (+) strand; PAM type: YTN; PAM sequence: TTT
tgtaactggatattatattg

SEQ ID NO: 337065 - DNA, 20 bp, Artificial Sequence
  Description of Artificial Sequence: Synthetic oligonucleotide
  Target: LAMA2; (+) strand; PAM type: YTN; PAM sequence: TTT
gtaactggatattatattgt

SEQ ID NO: 337066 - DNA, 20 bp, Artificial Sequence
  Description of Artificial Sequence: Synthetic oligonucleotide
  Target: LAMA2; (+) strand; PAM type: YTN; PAM sequence: TTG
taactggatattatattgtg

SEQ ID NO: 337067 - DNA, 20 bp, Artificial Sequence
  Description of Artificial Sequence: Synthetic oligonucleotide
  Target: LAMA2; (+) strand; PAM type: YTN; PAM sequence: CTG
gatattatattgtgaacatc

SEQ ID NO: 337068 - DNA, 20 bp, Artificial Sequence
  Description of Artificial Sequence: Synthetic oligonucleotide
  Target: LAMA2; (+) strand; PAM type: YTN; PAM sequence: TTA
tattgtgaacatccccatgt

SEQ ID NO: 337069 - DNA, 20 bp, Artificial Sequence
  Description of Artificial Sequence: Synthetic oligonucleotide
  Target: LAMA2; (+) strand; PAM type: YTN; PAM sequence: TTG
tgaacatccccatgtaactg

SEQ ID NO: 337070 - DNA, 20 bp, Artificial Sequence
  Description of Artificial Sequence: Synthetic oligonucleotide
  Target: LAMA2; (+) strand; PAM type: YTN; PAM sequence: CTG
tgtagtatttgaaacttagt

SEQ ID NO: 337071 - DNA, 20 bp, Artificial Sequence
  Description of Artificial Sequence: Synthetic oligonucleotide
  Target: LAMA2; (+) strand; PAM type: YTN; PAM sequence: TTT
gaaacttagttatttaaaaa

SEQ ID NO: 337072 - DNA, 20 bp, Artificial Sequence
  Description of Artificial Sequence: Synthetic oligonucleotide
  Target: LAMA2; (+) strand; PAM type: YTN; PAM sequence: TTG
aaacttagttatttaaaaat

SEQ ID NO: 337073 - DNA, 20 bp, Artificial Sequence
  Description of Artificial Sequence: Synthetic oligonucleotide
  Target: LAMA2; (+) strand; PAM type: YTN; PAM sequence: CTT
agttatttaaaaattaaatt

SEQ ID NO: 337074 - DNA, 20 bp, Artificial Sequence
  Description of Artificial Sequence: Synthetic oligonucleotide
  Target: LAMA2; (+) strand; PAM type: YTN; PAM sequence: TTA
gttatttaaaaattaaattg

SEQ ID NO: 337075 - DNA, 20 bp, Artificial Sequence
  Description of Artificial Sequence: Synthetic oligonucleotide
  Target: LAMA2; (+) strand; PAM type: YTN; PAM sequence: TTA
tttaaaaattaaattgcaaa

SEQ ID NO: 337076 - DNA, 20 bp, Artificial Sequence
  Description of Artificial Sequence: Synthetic oligonucleotide
  Target: LAMA2; (+) strand; PAM type: YTN; PAM sequence: TTT
aaaaattaaattgcaaatgt

SEQ ID NO: 337077 - DNA, 20 bp, Artificial Sequence
  Description of Artificial Sequence: Synthetic oligonucleotide
  Target: LAMA2; (+) strand; PAM type: YTN; PAM sequence: TTA
aaaattaaattgcaaatgta

SEQ ID NO: 337078 - DNA, 20 bp, Artificial Sequence
  Description of Artificial Sequence: Synthetic oligonucleotide
  Target: LAMA2; (+) strand; PAM type: YTN; PAM sequence: TTA
aattgcaaatgtatgatctt

SEQ ID NO: 337079 - DNA, 20 bp, Artificial Sequence
  Description of Artificial Sequence: Synthetic oligonucleotide
  Target: LAMA2; (+) strand; PAM type: YTN; PAM sequence: TTG
caaatgtatgatcttataga

SEQ ID NO: 337080 - DNA, 20 bp, Artificial Sequence
  Description of Artificial Sequence: Synthetic oligonucleotide
  Target: LAMA2; (+) strand; PAM type: YTN; PAM sequence: CTT
atagactattttcctgcttc

SEQ ID NO: 337081 - DNA, 20 bp, Artificial Sequence
  Description of Artificial Sequence: Synthetic oligonucleotide
  Target: LAMA2; (+) strand; PAM type: YTN; PAM sequence: TTA
tagactattttcctgcttcc

SEQ ID NO: 337082 - DNA, 20 bp, Artificial Sequence
  Description of Artificial Sequence: Synthetic oligonucleotide
  Target: LAMA2; (+) strand; PAM type: YTN; PAM sequence: CTA
ttttcctgcttccaagactt

SEQ ID NO: 337083 - DNA, 20 bp, Artificial Sequence
  Description of Artificial Sequence: Synthetic oligonucleotide
  Target: LAMA2; (+) strand; PAM type: YTN; PAM sequence: TTT
tcctgcttccaagacttctt

SEQ ID NO: 337084 - DNA, 20 bp, Artificial Sequence
  Description of Artificial Sequence: Synthetic oligonucleotide
  Target: LAMA2; (+) strand; PAM type: YTN; PAM sequence: TTT
cctgcttccaagacttcttt

SEQ ID NO: 337085 - DNA, 20 bp, Artificial Sequence
  Description of Artificial Sequence: Synthetic oligonucleotide
  Target: LAMA2; (+) strand; PAM type: YTN; PAM sequence: TTC
ctgcttccaagacttctttg

SEQ ID NO: 337086 - DNA, 20 bp, Artificial Sequence
  Description of Artificial Sequence: Synthetic oligonucleotide
  Target: LAMA2; (+) strand; PAM type: YTN; PAM sequence: CTG
cttccaagacttctttggaa

SEQ ID NO: 337087 - DNA, 20 bp, Artificial Sequence
  Description of Artificial Sequence: Synthetic oligonucleotide
  Target: LAMA2; (+) strand; PAM type: YTN; PAM sequence: CTT
ccaagacttctttggaactg

SEQ ID NO: 337088 - DNA, 20 bp, Artificial Sequence
  Description of Artificial Sequence: Synthetic oligonucleotide
  Target: LAMA2; (+) strand; PAM type: YTN; PAM sequence: TTC
caagacttctttggaactgt

SEQ ID NO: 337089 - DNA, 20 bp, Artificial Sequence
  Description of Artificial Sequence: Synthetic oligonucleotide
  Target: LAMA2; (+) strand; PAM type: YTN; PAM sequence: CTT
ctttggaactgtggactccc

SEQ ID NO: 337090 - DNA, 20 bp, Artificial Sequence
  Description of Artificial Sequence: Synthetic oligonucleotide
  Target: LAMA2; (+) strand; PAM type: YTN; PAM sequence: TTC
tttggaactgtggactccct

SEQ ID NO: 337091 - DNA, 20 bp, Artificial Sequence
  Description of Artificial Sequence: Synthetic oligonucleotide
  Target: LAMA2; (+) strand; PAM type: YTN; PAM sequence: CTT
tggaactgtggactccctga

SEQ ID NO: 337092 - DNA, 20 bp, Artificial Sequence
  Description of Artificial Sequence: Synthetic oligonucleotide
  Target: LAMA2; (+) strand; PAM type: YTN; PAM sequence: TTT
ggaactgtggactccctgaa

SEQ ID NO: 337093 - DNA, 20 bp, Artificial Sequence
  Description of Artificial Sequence: Synthetic oligonucleotide
  Target: LAMA2; (+) strand; PAM type: YTN; PAM sequence: TTG
gaactgtggactccctgaaa

SEQ ID NO: 337094 - DNA, 20 bp, Artificial Sequence
  Description of Artificial Sequence: Synthetic oligonucleotide
  Target: LAMA2; (+) strand; PAM type: YTN; PAM sequence: CTG
tggactccctgaaatgccag

SEQ ID NO: 337095 - DNA, 20 bp, Artificial Sequence
  Description of Artificial Sequence: Synthetic oligonucleotide
  Target: LAMA2; (+) strand; PAM type: YTN; PAM sequence: CTC
cctgaaatgccagggtaaca

SEQ ID NO: 337096 - DNA, 20 bp, Artificial Sequence
  Description of Artificial Sequence: Synthetic oligonucleotide
  Target: LAMA2; (+) strand; PAM type: YTN; PAM sequence: CTG
aaatgccagggtaacataag

SEQ ID NO: 337097 - DNA, 20 bp, Artificial Sequence
  Description of Artificial Sequence: Synthetic oligonucleotide
  Target: LAMA2; (+) strand; PAM type: YTN; PAM sequence: CTA
gcagaacctcagggaatacc

SEQ ID NO: 337098 - DNA, 20 bp, Artificial Sequence
  Description of Artificial Sequence: Synthetic oligonucleotide
  Target: LAMA2; (+) strand; PAM type: YTN; PAM sequence: CTC
agggaataccactgacttta

SEQ ID NO: 337099 - DNA, 20 bp, Artificial Sequence
  Description of Artificial Sequence: Synthetic oligonucleotide
  Target: LAMA2; (+) strand; PAM type: YTN; PAM sequence: CTG
actttatggtgtcagccagt

SEQ ID NO: 337100 - DNA, 20 bp, Artificial Sequence
  Description of Artificial Sequence: Synthetic oligonucleotide
  Target: LAMA2; (+) strand; PAM type: YTN; PAM sequence: CTT
tatggtgtcagccagtatca

SEQ ID NO: 337101 - DNA, 20 bp, Artificial Sequence
  Description of Artificial Sequence: Synthetic oligonucleotide
  Target: LAMA2; (+) strand; PAM type: YTN; PAM sequence: TTT
atggtgtcagccagtatcat

SEQ ID NO: 337102 - DNA, 20 bp, Artificial Sequence
  Description of Artificial Sequence: Synthetic oligonucleotide
  Target: LAMA2; (+) strand; PAM type: YTN; PAM sequence: TTA
tggtgtcagccagtatcatg

SEQ ID NO: 337103 - DNA, 20 bp, Artificial Sequence
  Description of Artificial Sequence: Synthetic oligonucleotide
  Target: LAMA2; (+) strand; PAM type: YTN; PAM sequence: TTG
cctttcaaaccaagtgatac

SEQ ID NO: 337104 - DNA, 20 bp, Artificial Sequence
  Description of Artificial Sequence: Synthetic oligonucleotide
  Target: LAMA2; (+) strand; PAM type: YTN; PAM sequence: CTT
tcaaaccaagtgatacattt

SEQ ID NO: 337105 - DNA, 20 bp, Artificial Sequence
  Description of Artificial Sequence: Synthetic oligonucleotide
  Target: LAMA2; (+) strand; PAM type: YTN; PAM sequence: TTT
caaaccaagtgatacatttc

SEQ ID NO: 337106 - DNA, 20 bp, Artificial Sequence
  Description of Artificial Sequence: Synthetic oligonucleotide
  Target: LAMA2; (+) strand; PAM type: YTN; PAM sequence: TTC
aaaccaagtgatacatttct

SEQ ID NO: 337107 - DNA, 20 bp, Artificial Sequence
  Description of Artificial Sequence: Synthetic oligonucleotide
  Target: LAMA2; (+) strand; PAM type: YTN; PAM sequence: TTT
ctatcaataattaaataaat

SEQ ID NO: 337108 - DNA, 20 bp, Artificial Sequence
  Description of Artificial Sequence: Synthetic oligonucleotide
  Target: LAMA2; (+) strand; PAM type: YTN; PAM sequence: TTC
tatcaataattaaataaatt

SEQ ID NO: 337109 - DNA, 20 bp, Artificial Sequence
  Description of Artificial Sequence: Synthetic oligonucleotide
  Target: LAMA2; (+) strand; PAM type: YTN; PAM sequence: CTA
tcaataattaaataaatttg

SEQ ID NO: 337110 - DNA, 20 bp, Artificial Sequence
  Description of Artificial Sequence: Synthetic oligonucleotide
  Target: LAMA2; (+) strand; PAM type: YTN; PAM sequence: TTA
aataaatttgaaagtacact

SEQ ID NO: 337111 - DNA, 20 bp, Artificial Sequence
  Description of Artificial Sequence: Synthetic oligonucleotide
  Target: LAMA2; (+) strand; PAM type: YTN; PAM sequence: TTT
gaaagtacactgccattgca

SEQ ID NO: 337112 - DNA, 20 bp, Artificial Sequence
  Description of Artificial Sequence: Synthetic oligonucleotide
  Target: LAMA2; (+) strand; PAM type: YTN; PAM sequence: TTG
aaagtacactgccattgcat

SEQ ID NO: 337113 - DNA, 20 bp, Artificial Sequence
  Description of Artificial Sequence: Synthetic oligonucleotide
  Target: LAMA2; (+) strand; PAM type: YTN; PAM sequence: CTG
ccattgcatttgcaatcttc

SEQ ID NO: 337114 - DNA, 20 bp, Artificial Sequence
  Description of Artificial Sequence: Synthetic oligonucleotide
  Target: LAMA2; (+) strand; PAM type: YTN; PAM sequence: TTG
catttgcaatcttctttctt

SEQ ID NO: 337115 - DNA, 20 bp, Artificial Sequence
  Description of Artificial Sequence: Synthetic oligonucleotide
  Target: LAMA2; (+) strand; PAM type: YTN; PAM sequence: TTT
gcaatcttctttctttgttc

SEQ ID NO: 337116 - DNA, 20 bp, Artificial Sequence
  Description of Artificial Sequence: Synthetic oligonucleotide
  Target: LAMA2; (+) strand; PAM type: YTN; PAM sequence: TTG
caatcttctttctttgttct

SEQ ID NO: 337117 - DNA, 20 bp, Artificial Sequence
  Description of Artificial Sequence: Synthetic oligonucleotide
  Target: LAMA2; (+) strand; PAM type: YTN; PAM sequence: CTT
ctttctttgttctttattca

SEQ ID NO: 337118 - DNA, 20 bp, Artificial Sequence
  Description of Artificial Sequence: Synthetic oligonucleotide
  Target: LAMA2; (+) strand; PAM type: YTN; PAM sequence: TTC
tttctttgttctttattcat

SEQ ID NO: 337119 - DNA, 20 bp, Artificial Sequence
  Description of Artificial Sequence: Synthetic oligonucleotide
  Target: LAMA2; (+) strand; PAM type: YTN; PAM sequence: CTT
tctttgttctttattcattg

SEQ ID NO: 337120 - DNA, 20 bp, Artificial Sequence
  Description of Artificial Sequence: Synthetic oligonucleotide
  Target: LAMA2; (+) strand; PAM type: YTN; PAM sequence: TTT
ctttgttctttattcattgc

SEQ ID NO: 337121 - DNA, 20 bp, Artificial Sequence
  Description of Artificial Sequence: Synthetic oligonucleotide
  Target: LAMA2; (+) strand; PAM type: YTN; PAM sequence: TTC
tttgttctttattcattgca

SEQ ID NO: 337122 - DNA, 20 bp, Artificial Sequence
  Description of Artificial Sequence: Synthetic oligonucleotide
  Target: LAMA2; (+) strand; PAM type: YTN; PAM sequence: CTT
tgttctttattcattgcaat

SEQ ID NO: 337123 - DNA, 20 bp, Artificial Sequence
  Description of Artificial Sequence: Synthetic oligonucleotide
  Target: LAMA2; (+) strand; PAM type: YTN; PAM sequence: TTT
gttctttattcattgcaata

SEQ ID NO: 337124 - DNA, 20 bp, Artificial Sequence
  Description of Artificial Sequence: Synthetic oligonucleotide
  Target: LAMA2; (+) strand; PAM type: YTN; PAM sequence: TTG
ttctttattcattgcaataa

SEQ ID NO: 337125 - DNA, 20 bp, Artificial Sequence
  Description of Artificial Sequence: Synthetic oligonucleotide
  Target: LAMA2; (+) strand; PAM type: YTN; PAM sequence: TTC
tttattcattgcaataataa

SEQ ID NO: 337126 - DNA, 20 bp, Artificial Sequence
  Description of Artificial Sequence: Synthetic oligonucleotide
  Target: LAMA2; (+) strand; PAM type: YTN; PAM sequence: CTT
tattcattgcaataataaaa

SEQ ID NO: 337127 - DNA, 20 bp, Artificial Sequence
  Description of Artificial Sequence: Synthetic oligonucleotide
  Target: LAMA2; (+) strand; PAM type: YTN; PAM sequence: TTT
attcattgcaataataaaaa

SEQ ID NO: 337128 - DNA, 20 bp, Artificial Sequence
  Description of Artificial Sequence: Synthetic oligonucleotide
  Target: LAMA2; (+) strand; PAM type: YTN; PAM sequence: TTA
ttcattgcaataataaaaac

SEQ ID NO: 337129 - DNA, 20 bp, Artificial Sequence
  Description of Artificial Sequence: Synthetic oligonucleotide
  Target: LAMA2; (+) strand; PAM type: YTN; PAM sequence: TTC
attgcaataataaaaacaaa

SEQ ID NO: 337130 - DNA, 20 bp, Artificial Sequence
  Description of Artificial Sequence: Synthetic oligonucleotide
  Target: LAMA2; (+) strand; PAM type: YTN; PAM sequence: TTG
caataataaaaacaaacaaa

SEQ ID NO: 337131 - DNA, 20 bp, Artificial Sequence
  Description of Artificial Sequence: Synthetic oligonucleotide
  Target: LAMA2; (+) strand; PAM type: YTN; PAM sequence: CTG
ttgatgggggaattataaga

SEQ ID NO: 337132 - DNA, 20 bp, Artificial Sequence
  Description of Artificial Sequence: Synthetic oligonucleotide
  Target: LAMA2; (+) strand; PAM type: YTN; PAM sequence: TTG
atgggggaattataagaata

SEQ ID NO: 337133 - DNA, 20 bp, Artificial Sequence
  Description of Artificial Sequence: Synthetic oligonucleotide
  Target: LAMA2; (+) strand; PAM type: YTN; PAM sequence: TTA
taagaatagatgggagtgaa

SEQ ID NO: 337134 - DNA, 20 bp, Artificial Sequence
  Description of Artificial Sequence: Synthetic oligonucleotide
  Target: LAMA2; (+) strand; PAM type: YTN; PAM sequence: CTG
actttacctccaactcaaag

SEQ ID NO: 337135 - DNA, 20 bp, Artificial Sequence
  Description of Artificial Sequence: Synthetic oligonucleotide
  Target: LAMA2; (+) strand; PAM type: YTN; PAM sequence: CTT
tacctccaactcaaagattt

SEQ ID NO: 337136 - DNA, 20 bp, Artificial Sequence
  Description of Artificial Sequence: Synthetic oligonucleotide
  Target: LAMA2; (+) strand; PAM type: YTN; PAM sequence: TTT
acctccaactcaaagatttt

SEQ ID NO: 337137 - DNA, 20 bp, Artificial Sequence
  Description of Artificial Sequence: Synthetic oligonucleotide
  Target: LAMA2; (+) strand; PAM type: YTN; PAM sequence: TTA
cctccaactcaaagattttt

SEQ ID NO: 337138 - DNA, 20 bp, Artificial Sequence
  Description of Artificial Sequence: Synthetic oligonucleotide
  Target: LAMA2; (+) strand; PAM type: YTN; PAM sequence: CTC
caactcaaagatttttgtcc

SEQ ID NO: 337139 - DNA, 20 bp, Artificial Sequence
  Description of Artificial Sequence: Synthetic oligonucleotide
  Target: LAMA2; (+) strand; PAM type: YTN; PAM sequence: CTC
aaagatttttgtccactaat

SEQ ID NO: 337140 - DNA, 20 bp, Artificial Sequence
  Description of Artificial Sequence: Synthetic oligonucleotide
  Target: LAMA2; (+) strand; PAM type: YTN; PAM sequence: TTT
ttgtccactaatctaatttc

SEQ ID NO: 337141 - DNA, 20 bp, Artificial Sequence
  Description of Artificial Sequence: Synthetic oligonucleotide
  Target: LAMA2; (+) strand; PAM type: YTN; PAM sequence: TTT
tgtccactaatctaatttct

SEQ ID NO: 337142 - DNA, 20 bp, Artificial Sequence
  Description of Artificial Sequence: Synthetic oligonucleotide
  Target: LAMA2; (+) strand; PAM type: YTN; PAM sequence: TTT
gtccactaatctaatttctc

SEQ ID NO: 337143 - DNA, 20 bp, Artificial Sequence
  Description of Artificial Sequence: Synthetic oligonucleotide
  Target: LAMA2; (+) strand; PAM type: YTN; PAM sequence: TTG
tccactaatctaatttctct

SEQ ID NO: 337144 - DNA, 20 bp, Artificial Sequence
  Description of Artificial Sequence: Synthetic oligonucleotide
  Target: LAMA2; (+) strand; PAM type: YTN; PAM sequence: CTA
atctaatttctctttctctc

SEQ ID NO: 337145 - DNA, 20 bp, Artificial Sequence
  Description of Artificial Sequence: Synthetic oligonucleotide
  Target: LAMA2; (+) strand; PAM type: YTN; PAM sequence: CTA
atttctctttctctctgtgt

SEQ ID NO: 337146 - DNA, 20 bp, Artificial Sequence
  Description of Artificial Sequence: Synthetic oligonucleotide
  Target: LAMA2; (+) strand; PAM type: YTN; PAM sequence: TTT
ctctttctctctgtgtttgt

SEQ ID NO: 337147 - DNA, 20 bp, Artificial Sequence
  Description of Artificial Sequence: Synthetic oligonucleotide
  Target: LAMA2; (+) strand; PAM type: YTN; PAM sequence: TTC
tctttctctctgtgtttgtt

SEQ ID NO: 337148 - DNA, 20 bp, Artificial Sequence
  Description of Artificial Sequence: Synthetic oligonucleotide
  Target: LAMA2; (+) strand; PAM type: YTN; PAM sequence: CTC
tttctctctgtgtttgttaa

SEQ ID NO: 337149 - DNA, 20 bp, Artificial Sequence
  Description of Artificial Sequence: Synthetic oligonucleotide
  Target: LAMA2; (+) strand; PAM type: YTN; PAM sequence: CTT
tctctctgtgtttgttaaaa

SEQ ID NO: 337150 - DNA, 20 bp, Artificial Sequence
  Description of Artificial Sequence: Synthetic oligonucleotide
  Target: LAMA2; (+) strand; PAM type: YTN; PAM sequence: TTT
ctctctgtgtttgttaaaag

SEQ ID NO: 337151 - DNA, 20 bp, Artificial Sequence
  Description of Artificial Sequence: Synthetic oligonucleotide
  Target: LAMA2; (+) strand; PAM type: YTN; PAM sequence: TTC
tctctgtgtttgttaaaagt

SEQ ID NO: 337152 - DNA, 20 bp, Artificial Sequence
  Description of Artificial Sequence: Synthetic oligonucleotide
  Target: LAMA2; (+) strand; PAM type: YTN; PAM sequence: CTC
tctgtgtttgttaaaagttt

SEQ ID NO: 337153 - DNA, 20 bp, Artificial Sequence
  Description of Artificial Sequence: Synthetic oligonucleotide
  Target: LAMA2; (+) strand; PAM type: YTN; PAM sequence: CTC
tgtgtttgttaaaagtttca

SEQ ID NO: 337154 - DNA, 20 bp, Artificial Sequence
  Description of Artificial Sequence: Synthetic oligonucleotide
  Target: LAMA2; (+) strand; PAM type: YTN; PAM sequence: CTG
tgtttgttaaaagtttcaaa

SEQ ID NO: 337155 - DNA, 20 bp, Artificial Sequence
  Description of Artificial Sequence: Synthetic oligonucleotide
  Target: LAMA2; (+) strand; PAM type: YTN; PAM sequence: TTT
gttaaaagtttcaaagtaga

SEQ ID NO: 337156 - DNA, 20 bp, Artificial Sequence
  Description of Artificial Sequence: Synthetic oligonucleotide
  Target: LAMA2; (+) strand; PAM type: YTN; PAM sequence: TTG
ttaaaagtttcaaagtagat

SEQ ID NO: 337157 - DNA, 20 bp, Artificial Sequence
  Description of Artificial Sequence: Synthetic oligonucleotide
  Target: LAMA2; (+) strand; PAM type: YTN; PAM sequence: TTA
aaagtttcaaagtagatgta

SEQ ID NO: 337158 - DNA, 20 bp, Artificial Sequence
  Description of Artificial Sequence: Synthetic oligonucleotide
  Target: LAMA2; (+) strand; PAM type: YTN; PAM sequence: TTT
caaagtagatgtaggttctc

SEQ ID NO: 337159 - DNA, 20 bp, Artificial Sequence
  Description of Artificial Sequence: Synthetic oligonucleotide
  Target: LAMA2; (+) strand; PAM type: YTN; PAM sequence: TTC
aaagtagatgtaggttctct

SEQ ID NO: 337160 - DNA, 20 bp, Artificial Sequence
  Description of Artificial Sequence: Synthetic oligonucleotide
  Target: LAMA2; (+) strand; PAM type: YTN; PAM sequence: TTC
tcttgccaagttgatactcg

SEQ ID NO: 337161 - DNA, 20 bp, Artificial Sequence
  Description of Artificial Sequence: Synthetic oligonucleotide
  Target: LAMA2; (+) strand; PAM type: YTN; PAM sequence: CTC
ttgccaagttgatactcgtg

SEQ ID NO: 337162 - DNA, 20 bp, Artificial Sequence
  Description of Artificial Sequence: Synthetic oligonucleotide
  Target: LAMA2; (+) strand; PAM type: YTN; PAM sequence: CTT
gccaagttgatactcgtgtt

SEQ ID NO: 337163 - DNA, 20 bp, Artificial Sequence
  Description of Artificial Sequence: Synthetic oligonucleotide
  Target: LAMA2; (+) strand; PAM type: YTN; PAM sequence: TTG
ccaagttgatactcgtgttc

SEQ ID NO: 337164 - DNA, 20 bp, Artificial Sequence
  Description of Artificial Sequence: Synthetic oligonucleotide
  Target: LAMA2; (+) strand; PAM type: YTN; PAM sequence: TTG
atactcgtgttctttccttt

SEQ ID NO: 337165 - DNA, 20 bp, Artificial Sequence
  Description of Artificial Sequence: Synthetic oligonucleotide
  Target: LAMA2; (+) strand; PAM type: YTN; PAM sequence: CTC
gtgttctttccttttcaaga

SEQ ID NO: 337166 - DNA, 20 bp, Artificial Sequence
  Description of Artificial Sequence: Synthetic oligonucleotide
  Target: LAMA2; (+) strand; PAM type: YTN; PAM sequence: TTC
tttccttttcaagattacat

SEQ ID NO: 337167 - DNA, 20 bp, Artificial Sequence
  Description of Artificial Sequence: Synthetic oligonucleotide
  Target: LAMA2; (+) strand; PAM type: YTN; PAM sequence: CTT
tccttttcaagattacataa

SEQ ID NO: 337168 - DNA, 20 bp, Artificial Sequence
  Description of Artificial Sequence: Synthetic oligonucleotide
  Target: LAMA2; (+) strand; PAM type: YTN; PAM sequence: TTT
ccttttcaagattacataaa

SEQ ID NO: 337169 - DNA, 20 bp, Artificial Sequence
  Description of Artificial Sequence: Synthetic oligonucleotide
  Target: LAMA2; (+) strand; PAM type: YTN; PAM sequence: TTC
cttttcaagattacataaaa

SEQ ID NO: 337170 - DNA, 20 bp, Artificial Sequence
  Description of Artificial Sequence: Synthetic oligonucleotide
  Target: LAMA2; (+) strand; PAM type: YTN; PAM sequence: CTT
ttcaagattacataaaaagt

SEQ ID NO: 337171 - DNA, 20 bp, Artificial Sequence
  Description of Artificial Sequence: Synthetic oligonucleotide
  Target: LAMA2; (+) strand; PAM type: YTN; PAM sequence: TTT
tcaagattacataaaaagta

SEQ ID NO: 337172 - DNA, 20 bp, Artificial Sequence
  Description of Artificial Sequence: Synthetic oligonucleotide
  Target: LAMA2; (+) strand; PAM type: YTN; PAM sequence: TTT
caagattacataaaaagtat

SEQ ID NO: 337173 - DNA, 20 bp, Artificial Sequence
  Description of Artificial Sequence: Synthetic oligonucleotide
  Target: LAMA2; (+) strand; PAM type: YTN; PAM sequence: TTC
aagattacataaaaagtata

SEQ ID NO: 337174 - DNA, 20 bp, Artificial Sequence
  Description of Artificial Sequence: Synthetic oligonucleotide
  Target: LAMA2; (+) strand; PAM type: YTN; PAM sequence: TTA
cataaaaagtatagcttaga

SEQ ID NO: 337175 - DNA, 20 bp, Artificial Sequence
  Description of Artificial Sequence: Synthetic oligonucleotide
  Target: LAMA2; (+) strand; PAM type: YTN; PAM sequence: CTT
agatccaacgtatcaacctg

SEQ ID NO: 337176 - DNA, 20 bp, Artificial Sequence
  Description of Artificial Sequence: Synthetic oligonucleotide
  Target: LAMA2; (+) strand; PAM type: YTN; PAM sequence: TTA
gatccaacgtatcaacctgg

SEQ ID NO: 337177 - DNA, 20 bp, Artificial Sequence
  Description of Artificial Sequence: Synthetic oligonucleotide
  Target: LAMA2; (+) strand; PAM type: YTN; PAM sequence: CTG
gaataggtgaaaatatcact

SEQ ID NO: 337178 - DNA, 20 bp, Artificial Sequence
  Description of Artificial Sequence: Synthetic oligonucleotide
  Target: LAMA2; (+) strand; PAM type: YTN; PAM sequence: CTA
ttgattataactagtattta

SEQ ID NO: 337179 - DNA, 20 bp, Artificial Sequence
  Description of Artificial Sequence: Synthetic oligonucleotide
  Target: LAMA2; (+) strand; PAM type: YTN; PAM sequence: TTG
attataactagtatttaacg

SEQ ID NO: 337180 - DNA, 20 bp, Artificial Sequence
  Description of Artificial Sequence: Synthetic oligonucleotide
  Target: LAMA2; (+) strand; PAM type: YTN; PAM sequence: TTA
taactagtatttaacgaggc

SEQ ID NO: 337181 - DNA, 20 bp, Artificial Sequence
  Description of Artificial Sequence: Synthetic oligonucleotide
  Target: LAMA2; (+) strand; PAM type: YTN; PAM sequence: CTA
gtatttaacgaggcttaata

SEQ ID NO: 337182 - DNA, 20 bp, Artificial Sequence
  Description of Artificial Sequence: Synthetic oligonucleotide
  Target: LAMA2; (+) strand; PAM type: YTN; PAM sequence: TTT
aacgaggcttaatatggacc

SEQ ID NO: 337183 - DNA, 20 bp, Artificial Sequence
  Description of Artificial Sequence: Synthetic oligonucleotide
  Target: LAMA2; (+) strand; PAM type: YTN; PAM sequence: TTA
acgaggcttaatatggacca

SEQ ID NO: 337184 - DNA, 20 bp, Artificial Sequence
  Description of Artificial Sequence: Synthetic oligonucleotide
  Target: LAMA2; (+) strand; PAM type: YTN; PAM sequence: CTT
aatatggaccaaacactgat

SEQ ID NO: 337185 - DNA, 20 bp, Artificial Sequence
  Description of Artificial Sequence: Synthetic oligonucleotide
  Target: LAMA2; (+) strand; PAM type: YTN; PAM sequence: TTA
atatggaccaaacactgatc

SEQ ID NO: 337186 - DNA, 20 bp, Artificial Sequence
  Description of Artificial Sequence: Synthetic oligonucleotide
  Target: LAMA2; (+) strand; PAM type: YTN; PAM sequence: CTG
atctaggtatttcacatgta

SEQ ID NO: 337187 - DNA, 20 bp, Artificial Sequence
  Description of Artificial Sequence: Synthetic oligonucleotide
  Target: LAMA2; (+) strand; PAM type: YTN; PAM sequence: CTA
ggtatttcacatgtattatg

SEQ ID NO: 337188 - DNA, 20 bp, Artificial Sequence
  Description of Artificial Sequence: Synthetic oligonucleotide
  Target: LAMA2; (+) strand; PAM type: YTN; PAM sequence: TTT
cacatgtattatgttttgta

SEQ ID NO: 337189 - DNA, 20 bp, Artificial Sequence
  Description of Artificial Sequence: Synthetic oligonucleotide
  Target: LAMA2; (+) strand; PAM type: YTN; PAM sequence: TTC
acatgtattatgttttgtaa

SEQ ID NO: 337190 - DNA, 20 bp, Artificial Sequence
  Description of Artificial Sequence: Synthetic oligonucleotide
  Target: LAMA2; (+) strand; PAM type: YTN; PAM sequence: TTA
tgttttgtaatcctcacaac

SEQ ID NO: 337191 - DNA, 20 bp, Artificial Sequence
  Description of Artificial Sequence: Synthetic oligonucleotide
  Target: LAMA2; (+) strand; PAM type: YTN; PAM sequence: TTT
tgtaatcctcacaactttat

SEQ ID NO: 337192 - DNA, 20 bp, Artificial Sequence
  Description of Artificial Sequence: Synthetic oligonucleotide
  Target: LAMA2; (+) strand; PAM type: YTN; PAM sequence: TTT
gtaatcctcacaactttatg

SEQ ID NO: 337193 - DNA, 20 bp, Artificial Sequence
  Description of Artificial Sequence: Synthetic oligonucleotide
  Target: LAMA2; (+) strand; PAM type: YTN; PAM sequence: TTG
taatcctcacaactttatga

SEQ ID NO: 337194 - DNA, 20 bp, Artificial Sequence
  Description of Artificial Sequence: Synthetic oligonucleotide
  Target: LAMA2; (+) strand; PAM type: YTN; PAM sequence: CTC
acaactttatgaaggaagta

SEQ ID NO: 337195 - DNA, 20 bp, Artificial Sequence
  Description of Artificial Sequence: Synthetic oligonucleotide
  Target: LAMA2; (+) strand; PAM type: YTN; PAM sequence: CTT
tatgaaggaagtatatgtgt

SEQ ID NO: 337196 - DNA, 20 bp, Artificial Sequence
  Description of Artificial Sequence: Synthetic oligonucleotide
  Target: LAMA2; (+) strand; PAM type: YTN; PAM sequence: TTT
atgaaggaagtatatgtgtg

SEQ ID NO: 337197 - DNA, 20 bp, Artificial Sequence
  Description of Artificial Sequence: Synthetic oligonucleotide
  Target: LAMA2; (+) strand; PAM type: YTN; PAM sequence: TTA
tgaaggaagtatatgtgtga

SEQ ID NO: 337198 - DNA, 20 bp, Artificial Sequence
  Description of Artificial Sequence: Synthetic oligonucleotide
  Target: LAMA2; (+) strand; PAM type: YTN; PAM sequence: TTA
gattttgagagccagtgcaa

SEQ ID NO: 337199 - DNA, 20 bp, Artificial Sequence
  Description of Artificial Sequence: Synthetic oligonucleotide
  Target: LAMA2; (+) strand; PAM type: YTN; PAM sequence: TTT
tgagagccagtgcaaactgc

SEQ ID NO: 337200 - DNA, 20 bp, Artificial Sequence
  Description of Artificial Sequence: Synthetic oligonucleotide
  Target: LAMA2; (+) strand; PAM type: YTN; PAM sequence: TTT
gagagccagtgcaaactgca

SEQ ID NO: 337201 - DNA, 20 bp, Artificial Sequence
  Description of Artificial Sequence: Synthetic oligonucleotide
  Target: LAMA2; (+) strand; PAM type: YTN; PAM sequence: TTG
agagccagtgcaaactgcac

SEQ ID NO: 337202 - DNA, 20 bp, Artificial Sequence
  Description of Artificial Sequence: Synthetic oligonucleotide
  Target: LAMA2; (+) strand; PAM type: YTN; PAM sequence: CTG
caccgcaggtgtattgcctg

SEQ ID NO: 337203 - DNA, 20 bp, Artificial Sequence
  Description of Artificial Sequence: Synthetic oligonucleotide
  Target: LAMA2; (+) strand; PAM type: YTN; PAM sequence: TTG
cctgttcaaatttttcttta

SEQ ID NO: 337204 - DNA, 20 bp, Artificial Sequence
  Description of Artificial Sequence: Synthetic oligonucleotide
  Target: LAMA2; (+) strand; PAM type: YTN; PAM sequence: CTG
ttcaaatttttctttaccac

SEQ ID NO: 337205 - DNA, 20 bp, Artificial Sequence
  Description of Artificial Sequence: Synthetic oligonucleotide
  Target: LAMA2; (+) strand; PAM type: YTN; PAM sequence: TTC
aaatttttctttaccactct

SEQ ID NO: 337206 - DNA, 20 bp, Artificial Sequence
  Description of Artificial Sequence: Synthetic oligonucleotide
  Target: LAMA2; (+) strand; PAM type: YTN; PAM sequence: TTT
ttctttaccactctatatta

SEQ ID NO: 337207 - DNA, 20 bp, Artificial Sequence
  Description of Artificial Sequence: Synthetic oligonucleotide
  Target: LAMA2; (+) strand; PAM type: YTN; PAM sequence: TTT
tctttaccactctatattaa

SEQ ID NO: 337208 - DNA, 20 bp, Artificial Sequence
  Description of Artificial Sequence: Synthetic oligonucleotide
  Target: LAMA2; (+) strand; PAM type: YTN; PAM sequence: TTT
ctttaccactctatattaac

SEQ ID NO: 337209 - DNA, 20 bp, Artificial Sequence
  Description of Artificial Sequence: Synthetic oligonucleotide
  Target: LAMA2; (+) strand; PAM type: YTN; PAM sequence: TTC
tttaccactctatattaaca

SEQ ID NO: 337210 - DNA, 20 bp, Artificial Sequence
  Description of Artificial Sequence: Synthetic oligonucleotide
  Target: LAMA2; (+) strand; PAM type: YTN; PAM sequence: CTT
taccactctatattaacacc

SEQ ID NO: 337211 - DNA, 20 bp, Artificial Sequence
  Description of Artificial Sequence: Synthetic oligonucleotide
  Target: LAMA2; (+) strand; PAM type: YTN; PAM sequence: TTT
accactctatattaacacct

SEQ ID NO: 337212 - DNA, 20 bp, Artificial Sequence
  Description of Artificial Sequence: Synthetic oligonucleotide
  Target: LAMA2; (+) strand; PAM type: YTN; PAM sequence: TTA
ccactctatattaacaccta

SEQ ID NO: 337213 - DNA, 20 bp, Artificial Sequence
  Description of Artificial Sequence: Synthetic oligonucleotide
  Target: LAMA2; (+) strand; PAM type: YTN; PAM sequence: CTC
tatattaacacctaagttaa

SEQ ID NO: 337214 - DNA, 20 bp, Artificial Sequence
  Description of Artificial Sequence: Synthetic oligonucleotide
  Target: LAMA2; (+) strand; PAM type: YTN; PAM sequence: CTA
tattaacacctaagttaaag

SEQ ID NO: 337215 - DNA, 20 bp, Artificial Sequence
  Description of Artificial Sequence: Synthetic oligonucleotide
  Target: LAMA2; (+) strand; PAM type: YTN; PAM sequence: TTA
acacctaagttaaaggccgg

SEQ ID NO: 337216 - DNA, 20 bp, Artificial Sequence
  Description of Artificial Sequence: Synthetic oligonucleotide
  Target: LAMA2; (+) strand; PAM type: YTN; PAM sequence: CTA
agttaaaggccggcacaata

SEQ ID NO: 337217 - DNA, 20 bp, Artificial Sequence
  Description of Artificial Sequence: Synthetic oligonucleotide
  Target: LAMA2; (+) strand; PAM type: YTN; PAM sequence: TTA
aaggccggcacaataagcaa

SEQ ID NO: 337218 - DNA, 20 bp, Artificial Sequence
  Description of Artificial Sequence: Synthetic oligonucleotide
  Target: LAMA2; (+) strand; PAM type: YTN; PAM sequence: TTG
cttgataatatttgtaaaac

SEQ ID NO: 337219 - DNA, 20 bp, Artificial Sequence
  Description of Artificial Sequence: Synthetic oligonucleotide
  Target: LAMA2; (+) strand; PAM type: YTN; PAM sequence: CTT
gataatatttgtaaaacaaa

SEQ ID NO: 337220 - DNA, 20 bp, Artificial Sequence
  Description of Artificial Sequence: Synthetic oligonucleotide
  Target: LAMA2; (+) strand; PAM type: YTN; PAM sequence: TTG
ataatatttgtaaaacaaat

SEQ ID NO: 337221 - DNA, 20 bp, Artificial Sequence
  Description of Artificial Sequence: Synthetic oligonucleotide
  Target: LAMA2; (+) strand; PAM type: YTN; PAM sequence: TTT
gtaaaacaaatggattagtg

SEQ ID NO: 337222 - DNA, 20 bp, Artificial Sequence
  Description of Artificial Sequence: Synthetic oligonucleotide
  Target: LAMA2; (+) strand; PAM type: YTN; PAM sequence: TTG
taaaacaaatggattagtga

SEQ ID NO: 337223 - DNA, 20 bp, Artificial Sequence
  Description of Artificial Sequence: Synthetic oligonucleotide
  Target: LAMA2; (+) strand; PAM type: YTN; PAM sequence: TTA
gtgaacaagttaatatgtca

SEQ ID NO: 337224 - DNA, 20 bp, Artificial Sequence
  Description of Artificial Sequence: Synthetic oligonucleotide
  Target: LAMA2; (+) strand; PAM type: YTN; PAM sequence: TTA
atatgtcactctgtggtctt

SEQ ID NO: 337225 - DNA, 20 bp, Artificial Sequence
  Description of Artificial Sequence: Synthetic oligonucleotide
  Target: LAMA2; (+) strand; PAM type: YTN; PAM sequence: CTC
tgtggtctttaaaatatata

SEQ ID NO: 337226 - DNA, 20 bp, Artificial Sequence
  Description of Artificial Sequence: Synthetic oligonucleotide
  Target: LAMA2; (+) strand; PAM type: YTN; PAM sequence: CTG
tggtctttaaaatatatatg

SEQ ID NO: 337227 - DNA, 20 bp, Artificial Sequence
  Description of Artificial Sequence: Synthetic oligonucleotide
  Target: LAMA2; (+) strand; PAM type: YTN; PAM sequence: CTT
taaaatatatatggaaatgc

SEQ ID NO: 337228 - DNA, 20 bp, Artificial Sequence
  Description of Artificial Sequence: Synthetic oligonucleotide
  Target: LAMA2; (+) strand; PAM type: YTN; PAM sequence: TTT
aaaatatatatggaaatgca

SEQ ID NO: 337229 - DNA, 20 bp, Artificial Sequence
  Description of Artificial Sequence: Synthetic oligonucleotide
  Target: LAMA2; (+) strand; PAM type: YTN; PAM sequence: TTA
aaatatatatggaaatgcag

SEQ ID NO: 337230 - DNA, 20 bp, Artificial Sequence
  Description of Artificial Sequence: Synthetic oligonucleotide
  Target: LAMA2; (+) strand; PAM type: YTN; PAM sequence: TTA
aaatctgcaatacatatttt

SEQ ID NO: 337231 - DNA, 20 bp, Artificial Sequence
  Description of Artificial Sequence: Synthetic oligonucleotide
  Target: LAMA2; (+) strand; PAM type: YTN; PAM sequence: CTG
caatacatattttgaaaaac

SEQ ID NO: 337232 - DNA, 20 bp, Artificial Sequence
  Description of Artificial Sequence: Synthetic oligonucleotide
  Target: LAMA2; (+) strand; PAM type: YTN; PAM sequence: TTT
tgaaaaacaaaggtgagagt

SEQ ID NO: 337233 - DNA, 20 bp, Artificial Sequence
  Description of Artificial Sequence: Synthetic oligonucleotide
  Target: LAMA2; (+) strand; PAM type: YTN; PAM sequence: TTT
gaaaaacaaaggtgagagta

SEQ ID NO: 337234 - DNA, 20 bp, Artificial Sequence
  Description of Artificial Sequence: Synthetic oligonucleotide
  Target: LAMA2; (+) strand; PAM type: YTN; PAM sequence: TTG
aaaaacaaaggtgagagtaa

SEQ ID NO: 337235 - DNA, 20 bp, Artificial Sequence
  Description of Artificial Sequence: Synthetic oligonucleotide
  Target: LAMA2; (+) strand; PAM type: YTN; PAM sequence: CTA
gccaaagcaggtttgactgc

SEQ ID NO: 337236 - DNA, 20 bp, Artificial Sequence
  Description of Artificial Sequence: Synthetic oligonucleotide
  Target: LAMA2; (+) strand; PAM type: YTN; PAM sequence: TTT
gactgcaggcacaactgtcc

SEQ ID NO: 337237 - DNA, 20 bp, Artificial Sequence
  Description of Artificial Sequence: Synthetic oligonucleotide
  Target: LAMA2; (+) strand; PAM type: YTN; PAM sequence: TTG
actgcaggcacaactgtcct

SEQ ID NO: 337238 - DNA, 20 bp, Artificial Sequence
  Description of Artificial Sequence: Synthetic oligonucleotide
  Target: LAMA2; (+) strand; PAM type: YTN; PAM sequence: CTG
caggcacaactgtccttccc

SEQ ID NO: 337239 - DNA, 20 bp, Artificial Sequence
  Description of Artificial Sequence: Synthetic oligonucleotide
  Target: LAMA2; (+) strand; PAM type: YTN; PAM sequence: CTG
tccttcccactcttcttaat

SEQ ID NO: 337240 - DNA, 20 bp, Artificial Sequence
  Description of Artificial Sequence: Synthetic oligonucleotide
  Target: LAMA2; (+) strand; PAM type: YTN; PAM sequence: CTT
cccactcttcttaattgaag

SEQ ID NO: 337241 - DNA, 20 bp, Artificial Sequence
  Description of Artificial Sequence: Synthetic oligonucleotide
  Target: LAMA2; (+) strand; PAM type: YTN; PAM sequence: TTC
ccactcttcttaattgaaga

SEQ ID NO: 337242 - DNA, 20 bp, Artificial Sequence
  Description of Artificial Sequence: Synthetic oligonucleotide
  Target: LAMA2; (+) strand; PAM type: YTN; PAM sequence: CTC
ttcttaattgaagagtcacc

SEQ ID NO: 337243 - DNA, 20 bp, Artificial Sequence
  Description of Artificial Sequence: Synthetic oligonucleotide
  Target: LAMA2; (+) strand; PAM type: YTN; PAM sequence: CTT
cttaattgaagagtcacctc

SEQ ID NO: 337244 - DNA, 20 bp, Artificial Sequence
  Description of Artificial Sequence: Synthetic oligonucleotide
  Target: LAMA2; (+) strand; PAM type: YTN; PAM sequence: TTC
ttaattgaagagtcacctca

SEQ ID NO: 337245 - DNA, 20 bp, Artificial Sequence
  Description of Artificial Sequence: Synthetic oligonucleotide
  Target: LAMA2; (+) strand; PAM type: YTN; PAM sequence: CTT
aattgaagagtcacctcaat

SEQ ID NO: 337246 - DNA, 20 bp, Artificial Sequence
  Description of Artificial Sequence: Synthetic oligonucleotide
  Target: LAMA2; (+) strand; PAM type: YTN; PAM sequence: TTA
attgaagagtcacctcaatc

SEQ ID NO: 337247 - DNA, 20 bp, Artificial Sequence
  Description of Artificial Sequence: Synthetic oligonucleotide
  Target: LAMA2; (+) strand; PAM type: YTN; PAM sequence: TTG
aagagtcacctcaatcccca

SEQ ID NO: 337248 - DNA, 20 bp, Artificial Sequence
  Description of Artificial Sequence: Synthetic oligonucleotide
  Target: LAMA2; (+) strand; PAM type: YTN; PAM sequence: CTC
aatccccatttgaatgttct

SEQ ID NO: 337249 - DNA, 20 bp, Artificial Sequence
  Description of Artificial Sequence: Synthetic oligonucleotide
  Target: LAMA2; (+) strand; PAM type: YTN; PAM sequence: TTT
gaatgttctcttttcaacct

SEQ ID NO: 337250 - DNA, 20 bp, Artificial Sequence
  Description of Artificial Sequence: Synthetic oligonucleotide
  Target: LAMA2; (+) strand; PAM type: YTN; PAM sequence: TTG
aatgttctcttttcaacctc

SEQ ID NO: 337251 - DNA, 20 bp, Artificial Sequence
  Description of Artificial Sequence: Synthetic oligonucleotide
  Target: LAMA2; (+) strand; PAM type: YTN; PAM sequence: TTC
tcttttcaacctcctaaaaa

SEQ ID NO: 337252 - DNA, 20 bp, Artificial Sequence
  Description of Artificial Sequence: Synthetic oligonucleotide
  Target: LAMA2; (+) strand; PAM type: YTN; PAM sequence: CTC
ttttcaacctcctaaaaaga

SEQ ID NO: 337253 - DNA, 20 bp, Artificial Sequence
  Description of Artificial Sequence: Synthetic oligonucleotide
  Target: LAMA2; (+) strand; PAM type: YTN; PAM sequence: CTT
ttcaacctcctaaaaagatt

SEQ ID NO: 337254 - DNA, 20 bp, Artificial Sequence
  Description of Artificial Sequence: Synthetic oligonucleotide
  Target: LAMA2; (+) strand; PAM type: YTN; PAM sequence: TTT
tcaacctcctaaaaagatta

SEQ ID NO: 337255 - DNA, 20 bp, Artificial Sequence
  Description of Artificial Sequence: Synthetic oligonucleotide
  Target: LAMA2; (+) strand; PAM type: YTN; PAM sequence: TTT
caacctcctaaaaagattac

SEQ ID NO: 337256 - DNA, 20 bp, Artificial Sequence
  Description of Artificial Sequence: Synthetic oligonucleotide
  Target: LAMA2; (+) strand; PAM type: YTN; PAM sequence: TTC
aacctcctaaaaagattact

SEQ ID NO: 337257 - DNA, 20 bp, Artificial Sequence
  Description of Artificial Sequence: Synthetic oligonucleotide
  Target: LAMA2; (+) strand; PAM type: YTN; PAM sequence: CTC
ctaaaaagattactgagaat

SEQ ID NO: 337258 - DNA, 20 bp, Artificial Sequence
  Description of Artificial Sequence: Synthetic oligonucleotide
  Target: LAMA2; (+) strand; PAM type: YTN; PAM sequence: CTA
aaaagattactgagaatgta

SEQ ID NO: 337259 - DNA, 20 bp, Artificial Sequence
  Description of Artificial Sequence: Synthetic oligonucleotide
  Target: LAMA2; (+) strand; PAM type: YTN; PAM sequence: TTA
ctgagaatgtagatatttaa

SEQ ID NO: 337260 - DNA, 20 bp, Artificial Sequence
  Description of Artificial Sequence: Synthetic oligonucleotide
  Target: LAMA2; (+) strand; PAM type: YTN; PAM sequence: CTG
agaatgtagatatttaaatg

SEQ ID NO: 337261 - DNA, 20 bp, Artificial Sequence
  Description of Artificial Sequence: Synthetic oligonucleotide
  Target: LAMA2; (+) strand; PAM type: YTN; PAM sequence: TTT
aaatgtattctgttcatctt

SEQ ID NO: 337262 - DNA, 20 bp, Artificial Sequence
  Description of Artificial Sequence: Synthetic oligonucleotide
  Target: LAMA2; (+) strand; PAM type: YTN; PAM sequence: TTA
aatgtattctgttcatcttt

SEQ ID NO: 337263 - DNA, 20 bp, Artificial Sequence
  Description of Artificial Sequence: Synthetic oligonucleotide
  Target: LAMA2; (+) strand; PAM type: YTN; PAM sequence: TTC
tgttcatctttaaataattt

SEQ ID NO: 337264 - DNA, 20 bp, Artificial Sequence
  Description of Artificial Sequence: Synthetic oligonucleotide
  Target: LAMA2; (+) strand; PAM type: YTN; PAM sequence: CTG
ttcatctttaaataatttca

SEQ ID NO: 337265 - DNA, 20 bp, Artificial Sequence
  Description of Artificial Sequence: Synthetic oligonucleotide
  Target: LAMA2; (+) strand; PAM type: YTN; PAM sequence: TTC
atctttaaataatttcattt

SEQ ID NO: 337266 - DNA, 20 bp, Artificial Sequence
  Description of Artificial Sequence: Synthetic oligonucleotide
  Target: LAMA2; (+) strand; PAM type: YTN; PAM sequence: CTT
taaataatttcatttatgtt

SEQ ID NO: 337267 - DNA, 20 bp, Artificial Sequence
  Description of Artificial Sequence: Synthetic oligonucleotide
  Target: LAMA2; (+) strand; PAM type: YTN; PAM sequence: TTT
aaataatttcatttatgttt

SEQ ID NO: 337268 - DNA, 20 bp, Artificial Sequence
  Description of Artificial Sequence: Synthetic oligonucleotide
  Target: LAMA2; (+) strand; PAM type: YTN; PAM sequence: TTA
aataatttcatttatgttta

SEQ ID NO: 337269 - DNA, 20 bp, Artificial Sequence
  Description of Artificial Sequence: Synthetic oligonucleotide
  Target: LAMA2; (+) strand; PAM type: YTN; PAM sequence: TTT
catttatgtttaagctgcaa

SEQ ID NO: 337270 - DNA, 20 bp, Artificial Sequence
  Description of Artificial Sequence: Synthetic oligonucleotide
  Target: LAMA2; (+) strand; PAM type: YTN; PAM sequence: TTC
atttatgtttaagctgcaaa

SEQ ID NO: 337271 - DNA, 20 bp, Artificial Sequence
  Description of Artificial Sequence: Synthetic oligonucleotide
  Target: LAMA2; (+) strand; PAM type: YTN; PAM sequence: TTT
atgtttaagctgcaaaaatt

SEQ ID NO: 337272 - DNA, 20 bp, Artificial Sequence
  Description of Artificial Sequence: Synthetic oligonucleotide
  Target: LAMA2; (+) strand; PAM type: YTN; PAM sequence: TTA
tgtttaagctgcaaaaattg

SEQ ID NO: 337273 - DNA, 20 bp, Artificial Sequence
  Description of Artificial Sequence: Synthetic oligonucleotide
  Target: LAMA2; (+) strand; PAM type: YTN; PAM sequence: TTT
aagctgcaaaaattgatctg

SEQ ID NO: 337274 - DNA, 20 bp, Artificial Sequence
  Description of Artificial Sequence: Synthetic oligonucleotide
  Target: LAMA2; (+) strand; PAM type: YTN; PAM sequence: TTA
agctgcaaaaattgatctga

SEQ ID NO: 337275 - DNA, 20 bp, Artificial Sequence
  Description of Artificial Sequence: Synthetic oligonucleotide
  Target: LAMA2; (+) strand; PAM type: YTN; PAM sequence: CTG
caaaaattgatctgaagtta

SEQ ID NO: 337276 - DNA, 20 bp, Artificial Sequence
  Description of Artificial Sequence: Synthetic oligonucleotide
  Target: LAMA2; (+) strand; PAM type: YTN; PAM sequence: TTG
atctgaagttagtctggtat

SEQ ID NO: 337277 - DNA, 20 bp, Artificial Sequence
  Description of Artificial Sequence: Synthetic oligonucleotide
  Target: LAMA2; (+) strand; PAM type: YTN; PAM sequence: CTG
aagttagtctggtatattgt

SEQ ID NO: 337278 - DNA, 20 bp, Artificial Sequence
  Description of Artificial Sequence: Synthetic oligonucleotide
  Target: LAMA2; (+) strand; PAM type: YTN; PAM sequence: TTA
gtctggtatattgtgtactt

SEQ ID NO: 337279 - DNA, 20 bp, Artificial Sequence
  Description of Artificial Sequence: Synthetic oligonucleotide
  Target: LAMA2; (+) strand; PAM type: YTN; PAM sequence: CTG
gtatattgtgtactttaagc

SEQ ID NO: 337280 - DNA, 20 bp, Artificial Sequence
  Description of Artificial Sequence: Synthetic oligonucleotide
  Target: LAMA2; (+) strand; PAM type: YTN; PAM sequence: TTG
tgtactttaagcatgtgata

SEQ ID NO: 337281 - DNA, 20 bp, Artificial Sequence
  Description of Artificial Sequence: Synthetic oligonucleotide
  Target: LAMA2; (+) strand; PAM type: YTN; PAM sequence: CTT
taagcatgtgatacatttct

SEQ ID NO: 337282 - DNA, 20 bp, Artificial Sequence
  Description of Artificial Sequence: Synthetic oligonucleotide
  Target: LAMA2; (+) strand; PAM type: YTN; PAM sequence: TTT
aagcatgtgatacatttcta

SEQ ID NO: 337283 - DNA, 20 bp, Artificial Sequence
  Description of Artificial Sequence: Synthetic oligonucleotide
  Target: LAMA2; (+) strand; PAM type: YTN; PAM sequence: TTA
agcatgtgatacatttctaa

SEQ ID NO: 337284 - DNA, 20 bp, Artificial Sequence
  Description of Artificial Sequence: Synthetic oligonucleotide
  Target: LAMA2; (+) strand; PAM type: YTN; PAM sequence: TTT
ctaaaatgttgttcatgtca

SEQ ID NO: 337285 - DNA, 20 bp, Artificial Sequence
  Description of Artificial Sequence: Synthetic oligonucleotide
  Target: LAMA2; (+) strand; PAM type: YTN; PAM sequence: TTC
taaaatgttgttcatgtcaa

SEQ ID NO: 337286 - DNA, 20 bp, Artificial Sequence
  Description of Artificial Sequence: Synthetic oligonucleotide
  Target: LAMA2; (+) strand; PAM type: YTN; PAM sequence: CTA
aaatgttgttcatgtcaaga

SEQ ID NO: 337287 - DNA, 20 bp, Artificial Sequence
  Description of Artificial Sequence: Synthetic oligonucleotide
  Target: LAMA2; (+) strand; PAM type: YTN; PAM sequence: TTG
ttcatgtcaagaatatctac

SEQ ID NO: 337288 - DNA, 20 bp, Artificial Sequence
  Description of Artificial Sequence: Synthetic oligonucleotide
  Target: LAMA2; (+) strand; PAM type: YTN; PAM sequence: TTC
atgtcaagaatatctacaat

SEQ ID NO: 337289 - DNA, 20 bp, Artificial Sequence
  Description of Artificial Sequence: Synthetic oligonucleotide
  Target: LAMA2; (+) strand; PAM type: YTN; PAM sequence: CTA
caattcaaatcatgaccttc

SEQ ID NO: 337290 - DNA, 20 bp, Artificial Sequence
  Description of Artificial Sequence: Synthetic oligonucleotide
  Target: LAMA2; (+) strand; PAM type: YTN; PAM sequence: TTC
aaatcatgaccttcttttgg

SEQ ID NO: 337291 - DNA, 20 bp, Artificial Sequence
  Description of Artificial Sequence: Synthetic oligonucleotide
  Target: LAMA2; (+) strand; PAM type: YTN; PAM sequence: CTT
cttttggcttgtattctaat

SEQ ID NO: 337292 - DNA, 20 bp, Artificial Sequence
  Description of Artificial Sequence: Synthetic oligonucleotide
  Target: LAMA2; (+) strand; PAM type: YTN; PAM sequence: TTC
ttttggcttgtattctaatt

SEQ ID NO: 337293 - DNA, 20 bp, Artificial Sequence
  Description of Artificial Sequence: Synthetic oligonucleotide
  Target: LAMA2; (+) strand; PAM type: YTN; PAM sequence: CTT
ttggcttgtattctaatttt

SEQ ID NO: 337294 - DNA, 20 bp, Artificial Sequence
  Description of Artificial Sequence: Synthetic oligonucleotide
  Target: LAMA2; (+) strand; PAM type: YTN; PAM sequence: TTT
tggcttgtattctaattttg

SEQ ID NO: 337295 - DNA, 20 bp, Artificial Sequence
  Description of Artificial Sequence: Synthetic oligonucleotide
  Target: LAMA2; (+) strand; PAM type: YTN; PAM sequence: TTT
ggcttgtattctaattttga

SEQ ID NO: 337296 - DNA, 20 bp, Artificial Sequence
  Description of Artificial Sequence: Synthetic oligonucleotide
  Target: LAMA2; (+) strand; PAM type: YTN; PAM sequence: TTG
gcttgtattctaattttgaa

SEQ ID NO: 337297 - DNA, 20 bp, Artificial Sequence
  Description of Artificial Sequence: Synthetic oligonucleotide
  Target: LAMA2; (+) strand; PAM type: YTN; PAM sequence: CTT
gtattctaattttgaagttt

SEQ ID NO: 337298 - DNA, 20 bp, Artificial Sequence
  Description of Artificial Sequence: Synthetic oligonucleotide
  Target: LAMA2; (+) strand; PAM type: YTN; PAM sequence: TTG
tattctaattttgaagtttc

SEQ ID NO: 337299 - DNA, 20 bp, Artificial Sequence
  Description of Artificial Sequence: Synthetic oligonucleotide
  Target: LAMA2; (+) strand; PAM type: YTN; PAM sequence: TTC
taattttgaagtttctgacc

SEQ ID NO: 337300 - DNA, 20 bp, Artificial Sequence
  Description of Artificial Sequence: Synthetic oligonucleotide
  Target: LAMA2; (+) strand; PAM type: YTN; PAM sequence: CTA
attttgaagtttctgaccta

SEQ ID NO: 337301 - DNA, 20 bp, Artificial Sequence
  Description of Artificial Sequence: Synthetic oligonucleotide
  Target: LAMA2; (+) strand; PAM type: YTN; PAM sequence: TTT
tgaagtttctgacctagaca

SEQ ID NO: 337302 - DNA, 20 bp, Artificial Sequence
  Description of Artificial Sequence: Synthetic oligonucleotide
  Target: LAMA2; (+) strand; PAM type: YTN; PAM sequence: TTT
gaagtttctgacctagacac

SEQ ID NO: 337303 - DNA, 20 bp, Artificial Sequence
  Description of Artificial Sequence: Synthetic oligonucleotide
  Target: LAMA2; (+) strand; PAM type: YTN; PAM sequence: TTG
aagtttctgacctagacaca

SEQ ID NO: 337304 - DNA, 20 bp, Artificial Sequence
  Description of Artificial Sequence: Synthetic oligonucleotide
  Target: LAMA2; (+) strand; PAM type: YTN; PAM sequence: TTT
ctgacctagacacaaaaatg

SEQ ID NO: 337305 - DNA, 20 bp, Artificial Sequence
  Description of Artificial Sequence: Synthetic oligonucleotide
  Target: LAMA2; (+) strand; PAM type: YTN; PAM sequence: TTC
tgacctagacacaaaaatga

SEQ ID NO: 337306 - DNA, 20 bp, Artificial Sequence
  Description of Artificial Sequence: Synthetic oligonucleotide
  Target: LAMA2; (+) strand; PAM type: YTN; PAM sequence: CTG
acctagacacaaaaatgatt

SEQ ID NO: 337307 - DNA, 20 bp, Artificial Sequence
  Description of Artificial Sequence: Synthetic oligonucleotide
  Target: LAMA2; (+) strand; PAM type: YTN; PAM sequence: CTA
gacacaaaaatgattaactg

SEQ ID NO: 337308 - DNA, 20 bp, Artificial Sequence
  Description of Artificial Sequence: Synthetic oligonucleotide
  Target: LAMA2; (+) strand; PAM type: YTN; PAM sequence: TTA
actgaagaattttaatagtt

SEQ ID NO: 337309 - DNA, 20 bp, Artificial Sequence
  Description of Artificial Sequence: Synthetic oligonucleotide
  Target: LAMA2; (+) strand; PAM type: YTN; PAM sequence: CTG
aagaattttaatagttgtac

SEQ ID NO: 337310 - DNA, 20 bp, Artificial Sequence
  Description of Artificial Sequence: Synthetic oligonucleotide
  Target: LAMA2; (+) strand; PAM type: YTN; PAM sequence: TTT
taatagttgtactgttgttc

SEQ ID NO: 337311 - DNA, 20 bp, Artificial Sequence
  Description of Artificial Sequence: Synthetic oligonucleotide
  Target: LAMA2; (+) strand; PAM type: YTN; PAM sequence: TTT
aatagttgtactgttgttct

SEQ ID NO: 337312 - DNA, 20 bp, Artificial Sequence
  Description of Artificial Sequence: Synthetic oligonucleotide
  Target: LAMA2; (+) strand; PAM type: YTN; PAM sequence: TTA
atagttgtactgttgttctt

SEQ ID NO: 337313 - DNA, 20 bp, Artificial Sequence
  Description of Artificial Sequence: Synthetic oligonucleotide
  Target: LAMA2; (+) strand; PAM type: YTN; PAM sequence: TTG
tactgttgttcttcacttct

SEQ ID NO: 337314 - DNA, 20 bp, Artificial Sequence
  Description of Artificial Sequence: Synthetic oligonucleotide
  Target: LAMA2; (+) strand; PAM type: YTN; PAM sequence: CTG
ttgttcttcacttctatcag

SEQ ID NO: 337315 - DNA, 20 bp, Artificial Sequence
  Description of Artificial Sequence: Synthetic oligonucleotide
  Target: LAMA2; (+) strand; PAM type: YTN; PAM sequence: TTG
ttcttcacttctatcagtga

SEQ ID NO: 337316 - DNA, 20 bp, Artificial Sequence
  Description of Artificial Sequence: Synthetic oligonucleotide
  Target: LAMA2; (+) strand; PAM type: YTN; PAM sequence: TTC
ttcacttctatcagtgatga

SEQ ID NO: 337317 - DNA, 20 bp, Artificial Sequence
  Description of Artificial Sequence: Synthetic oligonucleotide
  Target: LAMA2; (+) strand; PAM type: YTN; PAM sequence: CTT
cacttctatcagtgatgata

SEQ ID NO: 337318 - DNA, 20 bp, Artificial Sequence
  Description of Artificial Sequence: Synthetic oligonucleotide
  Target: LAMA2; (+) strand; PAM type: YTN; PAM sequence: TTC
acttctatcagtgatgatat

SEQ ID NO: 337319 - DNA, 20 bp, Artificial Sequence
  Description of Artificial Sequence: Synthetic oligonucleotide
  Target: LAMA2; (+) strand; PAM type: YTN; PAM sequence: CTT
ctatcagtgatgatatttga

SEQ ID NO: 337320 - DNA, 20 bp, Artificial Sequence
  Description of Artificial Sequence: Synthetic oligonucleotide
  Target: LAMA2; (+) strand; PAM type: YTN; PAM sequence: TTC
tatcagtgatgatatttgat

SEQ ID NO: 337321 - DNA, 20 bp, Artificial Sequence
  Description of Artificial Sequence: Synthetic oligonucleotide
  Target: LAMA2; (+) strand; PAM type: YTN; PAM sequence: CTA
tcagtgatgatatttgatag

SEQ ID NO: 337322 - DNA, 20 bp, Artificial Sequence
  Description of Artificial Sequence: Synthetic oligonucleotide
  Target: LAMA2; (+) strand; PAM type: YTN; PAM sequence: TTT
gatagtgtaatatgctgagc

SEQ ID NO: 337323 - DNA, 20 bp, Artificial Sequence
  Description of Artificial Sequence: Synthetic oligonucleotide
  Target: LAMA2; (+) strand; PAM type: YTN; PAM sequence: TTG
atagtgtaatatgctgagca

SEQ ID NO: 337324 - DNA, 20 bp, Artificial Sequence
  Description of Artificial Sequence: Synthetic oligonucleotide
  Target: LAMA2; (+) strand; PAM type: YTN; PAM sequence: CTG
agcaggcaaacaatgaaaaa

SEQ ID NO: 337325 - DNA, 20 bp, Artificial Sequence
  Description of Artificial Sequence: Synthetic oligonucleotide
  Target: LAMA2; (+) strand; PAM type: YTN; PAM sequence: CTC
catgcaaaatgtatgtaaaa

SEQ ID NO: 337326 - DNA, 20 bp, Artificial Sequence
  Description of Artificial Sequence: Synthetic oligonucleotide
  Target: LAMA2; (+) strand; PAM type: YTN; PAM sequence: CTT
tcaataagtgaacagtattt

SEQ ID NO: 337327 - DNA, 20 bp, Artificial Sequence
  Description of Artificial Sequence: Synthetic oligonucleotide
  Target: LAMA2; (+) strand; PAM type: YTN; PAM sequence: TTT
caataagtgaacagtattta

SEQ ID NO: 337328 - DNA, 20 bp, Artificial Sequence
  Description of Artificial Sequence: Synthetic oligonucleotide
  Target: LAMA2; (+) strand; PAM type: YTN; PAM sequence: TTC
aataagtgaacagtatttac

SEQ ID NO: 337329 - DNA, 20 bp, Artificial Sequence
  Description of Artificial Sequence: Synthetic oligonucleotide
  Target: LAMA2; (+) strand; PAM type: YTN; PAM sequence: TTT
actacctgctgttccttttc

SEQ ID NO: 337330 - DNA, 20 bp, Artificial Sequence
  Description of Artificial Sequence: Synthetic oligonucleotide
  Target: LAMA2; (+) strand; PAM type: YTN; PAM sequence: TTA
ctacctgctgttccttttca

SEQ ID NO: 337331 - DNA, 20 bp, Artificial Sequence
  Description of Artificial Sequence: Synthetic oligonucleotide
  Target: LAMA2; (+) strand; PAM type: YTN; PAM sequence: CTA
cctgctgttccttttcacca

SEQ ID NO: 337332 - DNA, 20 bp, Artificial Sequence
  Description of Artificial Sequence: Synthetic oligonucleotide
  Target: LAMA2; (+) strand; PAM type: YTN; PAM sequence: CTG
ctgttccttttcaccatttg

SEQ ID NO: 337333 - DNA, 20 bp, Artificial Sequence
  Description of Artificial Sequence: Synthetic oligonucleotide
  Target: LAMA2; (+) strand; PAM type: YTN; PAM sequence: CTG
ttccttttcaccatttgcag

SEQ ID NO: 337334 - DNA, 20 bp, Artificial Sequence
  Description of Artificial Sequence: Synthetic oligonucleotide
  Target: LAMA2; (+) strand; PAM type: YTN; PAM sequence: TTC
cttttcaccatttgcagtac

SEQ ID NO: 337335 - DNA, 20 bp, Artificial Sequence
  Description of Artificial Sequence: Synthetic oligonucleotide
  Target: LAMA2; (+) strand; PAM type: YTN; PAM sequence: CTT
ttcaccatttgcagtaccat

SEQ ID NO: 337336 - DNA, 20 bp, Artificial Sequence
  Description of Artificial Sequence: Synthetic oligonucleotide
  Target: LAMA2; (+) strand; PAM type: YTN; PAM sequence: TTT
tcaccatttgcagtaccatt

SEQ ID NO: 337337 - DNA, 20 bp, Artificial Sequence
  Description of Artificial Sequence: Synthetic oligonucleotide
  Target: LAMA2; (+) strand; PAM type: YTN; PAM sequence: TTT
caccatttgcagtaccattc

SEQ ID NO: 337338 - DNA, 20 bp, Artificial Sequence
  Description of Artificial Sequence: Synthetic oligonucleotide
  Target: LAMA2; (+) strand; PAM type: YTN; PAM sequence: TTC
accatttgcagtaccattct

SEQ ID NO: 337339 - DNA, 20 bp, Artificial Sequence
  Description of Artificial Sequence: Synthetic oligonucleotide
  Target: LAMA2; (+) strand; PAM type: YTN; PAM sequence: TTT
gcagtaccattcttagactc

SEQ ID NO: 337340 - DNA, 20 bp, Artificial Sequence
  Description of Artificial Sequence: Synthetic oligonucleotide
  Target: LAMA2; (+) strand; PAM type: YTN; PAM sequence: TTG
cagtaccattcttagactca

SEQ ID NO: 337341 - DNA, 20 bp, Artificial Sequence
  Description of Artificial Sequence: Synthetic oligonucleotide
  Target: LAMA2; (+) strand; PAM type: YTN; PAM sequence: TTC
ttagactcactgcaggcata

SEQ ID NO: 337342 - DNA, 20 bp, Artificial Sequence
  Description of Artificial Sequence: Synthetic oligonucleotide
  Target: LAMA2; (+) strand; PAM type: YTN; PAM sequence: CTT
agactcactgcaggcataaa

SEQ ID NO: 337343 - DNA, 20 bp, Artificial Sequence
  Description of Artificial Sequence: Synthetic oligonucleotide
  Target: LAMA2; (+) strand; PAM type: YTN; PAM sequence: TTA
gactcactgcaggcataaac

SEQ ID NO: 337344 - DNA, 20 bp, Artificial Sequence
  Description of Artificial Sequence: Synthetic oligonucleotide
  Target: LAMA2; (+) strand; PAM type: YTN; PAM sequence: CTC
actgcaggcataaaccctgg

SEQ ID NO: 337345 - DNA, 20 bp, Artificial Sequence
  Description of Artificial Sequence: Synthetic oligonucleotide
  Target: LAMA2; (+) strand; PAM type: YTN; PAM sequence: CTG
caggcataaaccctgggata

SEQ ID NO: 337346 - DNA, 20 bp, Artificial Sequence
  Description of Artificial Sequence: Synthetic oligonucleotide
  Target: LAMA2; (+) strand; PAM type: YTN; PAM sequence: CTG
ggataaggaaaagttaagcc

SEQ ID NO: 337347 - DNA, 20 bp, Artificial Sequence
  Description of Artificial Sequence: Synthetic oligonucleotide
  Target: LAMA2; (+) strand; PAM type: YTN; PAM sequence: TTA
agcctccattcttcatacct

SEQ ID NO: 337348 - DNA, 20 bp, Artificial Sequence
  Description of Artificial Sequence: Synthetic oligonucleotide
  Target: LAMA2; (+) strand; PAM type: YTN; PAM sequence: CTC
cattcttcatacctctaata

SEQ ID NO: 337349 - DNA, 20 bp, Artificial Sequence
  Description of Artificial Sequence: Synthetic oligonucleotide
  Target: LAMA2; (+) strand; PAM type: YTN; PAM sequence: TTC
ttcatacctctaataaggct

SEQ ID NO: 337350 - DNA, 20 bp, Artificial Sequence
  Description of Artificial Sequence: Synthetic oligonucleotide
  Target: LAMA2; (+) strand; PAM type: YTN; PAM sequence: CTT
catacctctaataaggcttt

SEQ ID NO: 337351 - DNA, 20 bp, Artificial Sequence
  Description of Artificial Sequence: Synthetic oligonucleotide
  Target: LAMA2; (+) strand; PAM type: YTN; PAM sequence: TTC
atacctctaataaggctttg

SEQ ID NO: 337352 - DNA, 20 bp, Artificial Sequence
  Description of Artificial Sequence: Synthetic oligonucleotide
  Target: LAMA2; (+) strand; PAM type: YTN; PAM sequence: CTC
taataaggctttgccaatgg

SEQ ID NO: 337353 - DNA, 20 bp, Artificial Sequence
  Description of Artificial Sequence: Synthetic oligonucleotide
  Target: LAMA2; (+) strand; PAM type: YTN; PAM sequence: CTA
ataaggctttgccaatggct

SEQ ID NO: 337354 - DNA, 20 bp, Artificial Sequence
  Description of Artificial Sequence: Synthetic oligonucleotide
  Target: LAMA2; (+) strand; PAM type: YTN; PAM sequence: CTT
tgccaatggctgcaatcatt

SEQ ID NO: 337355 - DNA, 20 bp, Artificial Sequence
  Description of Artificial Sequence: Synthetic oligonucleotide
  Target: LAMA2; (+) strand; PAM type: YTN; PAM sequence: TTT
gccaatggctgcaatcattt

SEQ ID NO: 337356 - DNA, 20 bp, Artificial Sequence
  Description of Artificial Sequence: Synthetic oligonucleotide
  Target: LAMA2; (+) strand; PAM type: YTN; PAM sequence: TTG
ccaatggctgcaatcatttt

SEQ ID NO: 337357 - DNA, 20 bp, Artificial Sequence
  Description of Artificial Sequence: Synthetic oligonucleotide
  Target: LAMA2; (+) strand; PAM type: YTN; PAM sequence: CTG
caatcattttacaaccatcc

SEQ ID NO: 337358 - DNA, 20 bp, Artificial Sequence
  Description of Artificial Sequence: Synthetic oligonucleotide
  Target: LAMA2; (+) strand; PAM type: YTN; PAM sequence: TTT
tacaaccatccacttatgtt

SEQ ID NO: 337359 - DNA, 20 bp, Artificial Sequence
  Description of Artificial Sequence: Synthetic oligonucleotide
  Target: LAMA2; (+) strand; PAM type: YTN; PAM sequence: TTT
acaaccatccacttatgttt

SEQ ID NO: 337360 - DNA, 20 bp, Artificial Sequence
  Description of Artificial Sequence: Synthetic oligonucleotide
  Target: LAMA2; (+) strand; PAM type: YTN; PAM sequence: TTA
caaccatccacttatgttta

SEQ ID NO: 337361 - DNA, 20 bp, Artificial Sequence
  Description of Artificial Sequence: Synthetic oligonucleotide
  Target: LAMA2; (+) strand; PAM type: YTN; PAM sequence: CTT
atgtttaggtttaacagagt

SEQ ID NO: 337362 - DNA, 20 bp, Artificial Sequence
  Description of Artificial Sequence: Synthetic oligonucleotide
  Target: LAMA2; (+) strand; PAM type: YTN; PAM sequence: TTA
tgtttaggtttaacagagtc

SEQ ID NO: 337363 - DNA, 20 bp, Artificial Sequence
  Description of Artificial Sequence: Synthetic oligonucleotide
  Target: LAMA2; (+) strand; PAM type: YTN; PAM sequence: TTT
aggtttaacagagtcttggc

SEQ ID NO: 337364 - DNA, 20 bp, Artificial Sequence
  Description of Artificial Sequence: Synthetic oligonucleotide
  Target: LAMA2; (+) strand; PAM type: YTN; PAM sequence: TTA
ggtttaacagagtcttggct

SEQ ID NO: 337365 - DNA, 20 bp, Artificial Sequence
  Description of Artificial Sequence: Synthetic oligonucleotide
  Target: LAMA2; (+) strand; PAM type: YTN; PAM sequence: TTT
aacagagtcttggcttcata

SEQ ID NO: 337366 - DNA, 20 bp, Artificial Sequence
  Description of Artificial Sequence: Synthetic oligonucleotide
  Target: LAMA2; (+) strand; PAM type: YTN; PAM sequence: TTA
acagagtcttggcttcataa

SEQ ID NO: 337367 - DNA, 20 bp, Artificial Sequence
  Description of Artificial Sequence: Synthetic oligonucleotide
  Target: LAMA2; (+) strand; PAM type: YTN; PAM sequence: CTT
ggcttcataatgaaatactt

SEQ ID NO: 337368 - DNA, 20 bp, Artificial Sequence
  Description of Artificial Sequence: Synthetic oligonucleotide
  Target: LAMA2; (+) strand; PAM type: YTN; PAM sequence: TTG
gcttcataatgaaatacttc

SEQ ID NO: 337369 - DNA, 20 bp, Artificial Sequence
  Description of Artificial Sequence: Synthetic oligonucleotide
  Target: LAMA2; (+) strand; PAM type: YTN; PAM sequence: CTT
cataatgaaatacttcatta

SEQ ID NO: 337370 - DNA, 20 bp, Artificial Sequence
  Description of Artificial Sequence: Synthetic oligonucleotide
  Target: LAMA2; (+) strand; PAM type: YTN; PAM sequence: TTC
ataatgaaatacttcattaa

SEQ ID NO: 337371 - DNA, 20 bp, Artificial Sequence
  Description of Artificial Sequence: Synthetic oligonucleotide
  Target: LAMA2; (+) strand; PAM type: YTN; PAM sequence: CTT
cattaaagtatttttatgat

SEQ ID NO: 337372 - DNA, 20 bp, Artificial Sequence
  Description of Artificial Sequence: Synthetic oligonucleotide
  Target: LAMA2; (+) strand; PAM type: YTN; PAM sequence: TTC
attaaagtatttttatgata

SEQ ID NO: 337373 - DNA, 20 bp, Artificial Sequence
  Description of Artificial Sequence: Synthetic oligonucleotide
  Target: LAMA2; (+) strand; PAM type: YTN; PAM sequence: TTA
aagtatttttatgatatctg

SEQ ID NO: 337374 - DNA, 20 bp, Artificial Sequence
  Description of Artificial Sequence: Synthetic oligonucleotide
  Target: LAMA2; (+) strand; PAM type: YTN; PAM sequence: TTT
ttatgatatctgtttacaca

SEQ ID NO: 337375 - DNA, 20 bp, Artificial Sequence
  Description of Artificial Sequence: Synthetic oligonucleotide
  Target: LAMA2; (+) strand; PAM type: YTN; PAM sequence: TTT
tatgatatctgtttacacat

SEQ ID NO: 337376 - DNA, 20 bp, Artificial Sequence
  Description of Artificial Sequence: Synthetic oligonucleotide
  Target: LAMA2; (+) strand; PAM type: YTN; PAM sequence: TTT
atgatatctgtttacacata

SEQ ID NO: 337377 - DNA, 20 bp, Artificial Sequence
  Description of Artificial Sequence: Synthetic oligonucleotide
  Target: LAMA2; (+) strand; PAM type: YTN; PAM sequence: TTA
tgatatctgtttacacatat

SEQ ID NO: 337378 - DNA, 20 bp, Artificial Sequence
  Description of Artificial Sequence: Synthetic oligonucleotide
  Target: LAMA2; (+) strand; PAM type: YTN; PAM sequence: CTG
tttacacatatgttcatagt

SEQ ID NO: 337379 - DNA, 20 bp, Artificial Sequence
  Description of Artificial Sequence: Synthetic oligonucleotide
  Target: LAMA2; (+) strand; PAM type: YTN; PAM sequence: TTT
acacatatgttcatagtaga

SEQ ID NO: 337380 - DNA, 20 bp, Artificial Sequence
  Description of Artificial Sequence: Synthetic oligonucleotide
  Target: LAMA2; (+) strand; PAM type: YTN; PAM sequence: TTA
cacatatgttcatagtagaa

SEQ ID NO: 337381 - DNA, 20 bp, Artificial Sequence
  Description of Artificial Sequence: Synthetic oligonucleotide
  Target: LAMA2; (+) strand; PAM type: YTN; PAM sequence: TTC
atagtagaattacatggtgt

SEQ ID NO: 337382 - DNA, 20 bp, Artificial Sequence
  Description of Artificial Sequence: Synthetic oligonucleotide
  Target: LAMA2; (+) strand; PAM type: YTN; PAM sequence: TTA
catggtgttctgttatccag

SEQ ID NO: 337383 - DNA, 20 bp, Artificial Sequence
  Description of Artificial Sequence: Synthetic oligonucleotide
  Target: LAMA2; (+) strand; PAM type: YTN; PAM sequence: TTC
tgttatccagtctttgccat

SEQ ID NO: 337384 - DNA, 20 bp, Artificial Sequence
  Description of Artificial Sequence: Synthetic oligonucleotide
  Target: LAMA2; (+) strand; PAM type: YTN; PAM sequence: CTG
ttatccagtctttgccattc

SEQ ID NO: 337385 - DNA, 20 bp, Artificial Sequence
  Description of Artificial Sequence: Synthetic oligonucleotide
  Target: LAMA2; (+) strand; PAM type: YTN; PAM sequence: TTA
tccagtctttgccattcaca

SEQ ID NO: 337386 - DNA, 20 bp, Artificial Sequence
  Description of Artificial Sequence: Synthetic oligonucleotide
  Target: LAMA2; (+) strand; PAM type: YTN; PAM sequence: CTT
tgccattcacatggactcag

SEQ ID NO: 337387 - DNA, 20 bp, Artificial Sequence
  Description of Artificial Sequence: Synthetic oligonucleotide
  Target: LAMA2; (+) strand; PAM type: YTN; PAM sequence: TTT
gccattcacatggactcagt

SEQ ID NO: 337388 - DNA, 20 bp, Artificial Sequence
  Description of Artificial Sequence: Synthetic oligonucleotide
  Target: LAMA2; (+) strand; PAM type: YTN; PAM sequence: TTG
ccattcacatggactcagtt

SEQ ID NO: 337389 - DNA, 20 bp, Artificial Sequence
  Description of Artificial Sequence: Synthetic oligonucleotide
  Target: LAMA2; (+) strand; PAM type: YTN; PAM sequence: TTC
acatggactcagtttatagt

SEQ ID NO: 337390 - DNA, 20 bp, Artificial Sequence
  Description of Artificial Sequence: Synthetic oligonucleotide
  Target: LAMA2; (+) strand; PAM type: YTN; PAM sequence: CTC
agtttatagtgtctggttat

SEQ ID NO: 337391 - DNA, 20 bp, Artificial Sequence
  Description of Artificial Sequence: Synthetic oligonucleotide
  Target: LAMA2; (+) strand; PAM type: YTN; PAM sequence: TTT
atagtgtctggttatgctac

SEQ ID NO: 337392 - DNA, 20 bp, Artificial Sequence
  Description of Artificial Sequence: Synthetic oligonucleotide
  Target: LAMA2; (+) strand; PAM type: YTN; PAM sequence: TTA
tagtgtctggttatgctact

SEQ ID NO: 337393 - DNA, 20 bp, Artificial Sequence
  Description of Artificial Sequence: Synthetic oligonucleotide
  Target: LAMA2; (+) strand; PAM type: YTN; PAM sequence: CTG
gttatgctactgaagatctt

SEQ ID NO: 337394 - DNA, 20 bp, Artificial Sequence
  Description of Artificial Sequence: Synthetic oligonucleotide
  Target: LAMA2; (+) strand; PAM type: YTN; PAM sequence: TTA
tgctactgaagatcttcctg

SEQ ID NO: 337395 - DNA, 20 bp, Artificial Sequence
  Description of Artificial Sequence: Synthetic oligonucleotide
  Target: LAMA2; (+) strand; PAM type: YTN; PAM sequence: CTA
ctgaagatcttcctgcttta

SEQ ID NO: 337396 - DNA, 20 bp, Artificial Sequence
  Description of Artificial Sequence: Synthetic oligonucleotide
  Target: LAMA2; (+) strand; PAM type: YTN; PAM sequence: CTG
aagatcttcctgctttacca

SEQ ID NO: 337397 - DNA, 20 bp, Artificial Sequence
  Description of Artificial Sequence: Synthetic oligonucleotide
  Target: LAMA2; (+) strand; PAM type: YTN; PAM sequence: CTT
cctgctttaccatttgctgt

SEQ ID NO: 337398 - DNA, 20 bp, Artificial Sequence
  Description of Artificial Sequence: Synthetic oligonucleotide
  Target: LAMA2; (+) strand; PAM type: YTN; PAM sequence: TTC
ctgctttaccatttgctgtt

SEQ ID NO: 337399 - DNA, 20 bp, Artificial Sequence
  Description of Artificial Sequence: Synthetic oligonucleotide
  Target: LAMA2; (+) strand; PAM type: YTN; PAM sequence: CTG
ctttaccatttgctgttaag

SEQ ID NO: 337400 - DNA, 20 bp, Artificial Sequence
  Description of Artificial Sequence: Synthetic oligonucleotide
  Target: LAMA2; (+) strand; PAM type: YTN; PAM sequence: CTT
taccatttgctgttaagtaa

SEQ ID NO: 337401 - DNA, 20 bp, Artificial Sequence
  Description of Artificial Sequence: Synthetic oligonucleotide
  Target: LAMA2; (+) strand; PAM type: YTN; PAM sequence: TTT
accatttgctgttaagtaat

SEQ ID NO: 337402 - DNA, 20 bp, Artificial Sequence
  Description of Artificial Sequence: Synthetic oligonucleotide
  Target: LAMA2; (+) strand; PAM type: YTN; PAM sequence: TTA
ccatttgctgttaagtaatt

SEQ ID NO: 337403 - DNA, 20 bp, Artificial Sequence
  Description of Artificial Sequence: Synthetic oligonucleotide
  Target: LAMA2; (+) strand; PAM type: YTN; PAM sequence: TTT
gctgttaagtaattgtagtc

SEQ ID NO: 337404 - DNA, 20 bp, Artificial Sequence
  Description of Artificial Sequence: Synthetic oligonucleotide
  Target: LAMA2; (+) strand; PAM type: YTN; PAM sequence: TTG
ctgttaagtaattgtagtca

SEQ ID NO: 337405 - DNA, 20 bp, Artificial Sequence
  Description of Artificial Sequence: Synthetic oligonucleotide
  Target: LAMA2; (+) strand; PAM type: YTN; PAM sequence: CTG
ttaagtaattgtagtcagac

SEQ ID NO: 337406 - DNA, 20 bp, Artificial Sequence
  Description of Artificial Sequence: Synthetic oligonucleotide
  Target: LAMA2; (+) strand; PAM type: YTN; PAM sequence: TTA
agtaattgtagtcagacaga

SEQ ID NO: 337407 - DNA, 20 bp, Artificial Sequence
  Description of Artificial Sequence: Synthetic oligonucleotide
  Target: LAMA2; (+) strand; PAM type: YTN; PAM sequence: TTG
tagtcagacagactgcccag

SEQ ID NO: 337408 - DNA, 20 bp, Artificial Sequence
  Description of Artificial Sequence: Synthetic oligonucleotide
  Target: LAMA2; (+) strand; PAM type: YTN; PAM sequence: CTG
cccaggaagccccatggact

SEQ ID NO: 337409 - DNA, 20 bp, Artificial Sequence
  Description of Artificial Sequence: Synthetic oligonucleotide
  Target: LAMA2; (+) strand; PAM type: YTN; PAM sequence: CTC
agttttatcccttgggtatc

SEQ ID NO: 337410 - DNA, 20 bp, Artificial Sequence
  Description of Artificial Sequence: Synthetic oligonucleotide
  Target: LAMA2; (+) strand; PAM type: YTN; PAM sequence: TTT
tatcccttgggtatcacaaa

SEQ ID NO: 337411 - DNA, 20 bp, Artificial Sequence
  Description of Artificial Sequence: Synthetic oligonucleotide
  Target: LAMA2; (+) strand; PAM type: YTN; PAM sequence: TTT
atcccttgggtatcacaaat

SEQ ID NO: 337412 - DNA, 20 bp, Artificial Sequence
  Description of Artificial Sequence: Synthetic oligonucleotide
  Target: LAMA2; (+) strand; PAM type: YTN; PAM sequence: TTA
tcccttgggtatcacaaatg

SEQ ID NO: 337413 - DNA, 20 bp, Artificial Sequence
  Description of Artificial Sequence: Synthetic oligonucleotide
  Target: LAMA2; (+) strand; PAM type: YTN; PAM sequence: CTT
gggtatcacaaatgaggaag

SEQ ID NO: 337414 - DNA, 20 bp, Artificial Sequence
  Description of Artificial Sequence: Synthetic oligonucleotide
  Target: LAMA2; (+) strand; PAM type: YTN; PAM sequence: TTG
ggtatcacaaatgaggaaga

SEQ ID NO: 337415 - DNA, 20 bp, Artificial Sequence
  Description of Artificial Sequence: Synthetic oligonucleotide
  Target: LAMA2; (+) strand; PAM type: YTN; PAM sequence: TTT
gattccatattggtgaaata

SEQ ID NO: 337416 - DNA, 20 bp, Artificial Sequence
  Description of Artificial Sequence: Synthetic oligonucleotide
  Target: LAMA2; (+) strand; PAM type: YTN; PAM sequence: TTG
attccatattggtgaaatac

SEQ ID NO: 337417 - DNA, 20 bp, Artificial Sequence
  Description of Artificial Sequence: Synthetic oligonucleotide
  Target: LAMA2; (+) strand; PAM type: YTN; PAM sequence: TTC
catattggtgaaatactact

SEQ ID NO: 337418 - DNA, 20 bp, Artificial Sequence
  Description of Artificial Sequence: Synthetic oligonucleotide
  Target: LAMA2; (+) strand; PAM type: YTN; PAM sequence: TTG
gtgaaatactacttctgttt

SEQ ID NO: 337419 - DNA, 20 bp, Artificial Sequence
  Description of Artificial Sequence: Synthetic oligonucleotide
  Target: LAMA2; (+) strand; PAM type: YTN; PAM sequence: CTA
cttctgtttcctaaagatat

SEQ ID NO: 337420 - DNA, 20 bp, Artificial Sequence
  Description of Artificial Sequence: Synthetic oligonucleotide
  Target: LAMA2; (+) strand; PAM type: YTN; PAM sequence: CTT
ctgtttcctaaagatatgtt

SEQ ID NO: 337421 - DNA, 20 bp, Artificial Sequence
  Description of Artificial Sequence: Synthetic oligonucleotide
  Target: LAMA2; (+) strand; PAM type: YTN; PAM sequence: TTC
tgtttcctaaagatatgttg

SEQ ID NO: 337422 - DNA, 20 bp, Artificial Sequence
  Description of Artificial Sequence: Synthetic oligonucleotide
  Target: LAMA2; (+) strand; PAM type: YTN; PAM sequence: CTG
tttcctaaagatatgttgtt

SEQ ID NO: 337423 - DNA, 20 bp, Artificial Sequence
  Description of Artificial Sequence: Synthetic oligonucleotide
  Target: LAMA2; (+) strand; PAM type: YTN; PAM sequence: TTT
cctaaagatatgttgttttc

SEQ ID NO: 337424 - DNA, 20 bp, Artificial Sequence
  Description of Artificial Sequence: Synthetic oligonucleotide
  Target: LAMA2; (+) strand; PAM type: YTN; PAM sequence: TTC
ctaaagatatgttgttttct

SEQ ID NO: 337425 - DNA, 20 bp, Artificial Sequence
  Description of Artificial Sequence: Synthetic oligonucleotide
  Target: LAMA2; (+) strand; PAM type: YTN; PAM sequence: CTA
aagatatgttgttttctaag

SEQ ID NO: 337426 - DNA, 20 bp, Artificial Sequence
  Description of Artificial Sequence: Synthetic oligonucleotide
  Target: LAMA2; (+) strand; PAM type: YTN; PAM sequence: TTG
ttttctaagatttgcttcta

SEQ ID NO: 337427 - DNA, 20 bp, Artificial Sequence
  Description of Artificial Sequence: Synthetic oligonucleotide
  Target: LAMA2; (+) strand; PAM type: YTN; PAM sequence: TTT
tctaagatttgcttctagat

SEQ ID NO: 337428 - DNA, 20 bp, Artificial Sequence
  Description of Artificial Sequence: Synthetic oligonucleotide
  Target: LAMA2; (+) strand; PAM type: YTN; PAM sequence: TTT
ctaagatttgcttctagatt

SEQ ID NO: 337429 - DNA, 20 bp, Artificial Sequence
  Description of Artificial Sequence: Synthetic oligonucleotide
  Target: LAMA2; (+) strand; PAM type: YTN; PAM sequence: TTC
taagatttgcttctagattt

SEQ ID NO: 337430 - DNA, 20 bp, Artificial Sequence
  Description of Artificial Sequence: Synthetic oligonucleotide
  Target: LAMA2; (+) strand; PAM type: YTN; PAM sequence: CTA
agatttgcttctagattttg

SEQ ID NO: 337431 - DNA, 20 bp, Artificial Sequence
  Description of Artificial Sequence: Synthetic oligonucleotide
  Target: LAMA2; (+) strand; PAM type: YTN; PAM sequence: TTT
gcttctagattttgtgatta

SEQ ID NO: 337432 - DNA, 20 bp, Artificial Sequence
  Description of Artificial Sequence: Synthetic oligonucleotide
  Target: LAMA2; (+) strand; PAM type: YTN; PAM sequence: TTG
cttctagattttgtgattaa

SEQ ID NO: 337433 - DNA, 20 bp, Artificial Sequence
  Description of Artificial Sequence: Synthetic oligonucleotide
  Target: LAMA2; (+) strand; PAM type: YTN; PAM sequence: CTT
ctagattttgtgattaaatg

SEQ ID NO: 337434 - DNA, 20 bp, Artificial Sequence
  Description of Artificial Sequence: Synthetic oligonucleotide
  Target: LAMA2; (+) strand; PAM type: YTN; PAM sequence: TTC
tagattttgtgattaaatgt

SEQ ID NO: 337435 - DNA, 20 bp, Artificial Sequence
  Description of Artificial Sequence: Synthetic oligonucleotide
  Target: LAMA2; (+) strand; PAM type: YTN; PAM sequence: CTA
gattttgtgattaaatgttt

SEQ ID NO: 337436 - DNA, 20 bp, Artificial Sequence
  Description of Artificial Sequence: Synthetic oligonucleotide
  Target: LAMA2; (+) strand; PAM type: YTN; PAM sequence: TTT
tgtgattaaatgttttattg

SEQ ID NO: 337437 - DNA, 20 bp, Artificial Sequence
  Description of Artificial Sequence: Synthetic oligonucleotide
  Target: LAMA2; (+) strand; PAM type: YTN; PAM sequence: TTT
gtgattaaatgttttattgg

SEQ ID NO: 337438 - DNA, 20 bp, Artificial Sequence
  Description of Artificial Sequence: Synthetic oligonucleotide
  Target: LAMA2; (+) strand; PAM type: YTN; PAM sequence: TTG
tgattaaatgttttattgga

SEQ ID NO: 337439 - DNA, 20 bp, Artificial Sequence
  Description of Artificial Sequence: Synthetic oligonucleotide
  Target: LAMA2; (+) strand; PAM type: YTN; PAM sequence: TTA
aatgttttattggacaggga

SEQ ID NO: 337440 - DNA, 20 bp, Artificial Sequence
  Description of Artificial Sequence: Synthetic oligonucleotide
  Target: LAMA2; (+) strand; PAM type: YTN; PAM sequence: TTT
tattggacagggatttaaga

SEQ ID NO: 337441 - DNA, 20 bp, Artificial Sequence
  Description of Artificial Sequence: Synthetic oligonucleotide
  Target: LAMA2; (+) strand; PAM type: YTN; PAM sequence: TTT
attggacagggatttaagaa

SEQ ID NO: 337442 - DNA, 20 bp, Artificial Sequence
  Description of Artificial Sequence: Synthetic oligonucleotide
  Target: LAMA2; (+) strand; PAM type: YTN; PAM sequence: TTA
ttggacagggatttaagaat

SEQ ID NO: 337443 - DNA, 20 bp, Artificial Sequence
  Description of Artificial Sequence: Synthetic oligonucleotide
  Target: LAMA2; (+) strand; PAM type: YTN; PAM sequence: TTG
gacagggatttaagaatcag

SEQ ID NO: 337444 - DNA, 20 bp, Artificial Sequence
  Description of Artificial Sequence: Synthetic oligonucleotide
  Target: LAMA2; (+) strand; PAM type: YTN; PAM sequence: TTT
aagaatcagaatttcatgac

SEQ ID NO: 337445 - DNA, 20 bp, Artificial Sequence
  Description of Artificial Sequence: Synthetic oligonucleotide
  Target: LAMA2; (+) strand; PAM type: YTN; PAM sequence: TTA
agaatcagaatttcatgaca

SEQ ID NO: 337446 - DNA, 20 bp, Artificial Sequence
  Description of Artificial Sequence: Synthetic oligonucleotide
  Target: LAMA2; (+) strand; PAM type: YTN; PAM sequence: TTT
catgacattttgtcctactt

SEQ ID NO: 337447 - DNA, 20 bp, Artificial Sequence
  Description of Artificial Sequence: Synthetic oligonucleotide
  Target: LAMA2; (+) strand; PAM type: YTN; PAM sequence: TTC
atgacattttgtcctacttt

SEQ ID NO: 337448 - DNA, 20 bp, Artificial Sequence
  Description of Artificial Sequence: Synthetic oligonucleotide
  Target: LAMA2; (+) strand; PAM type: YTN; PAM sequence: TTT
tgtcctactttaaatggaaa

SEQ ID NO: 337449 - DNA, 20 bp, Artificial Sequence
  Description of Artificial Sequence: Synthetic oligonucleotide
  Target: LAMA2; (+) strand; PAM type: YTN; PAM sequence: TTT
gtcctactttaaatggaaat

SEQ ID NO: 337450 - DNA, 20 bp, Artificial Sequence
  Description of Artificial Sequence: Synthetic oligonucleotide
  Target: LAMA2; (+) strand; PAM type: YTN; PAM sequence: TTG
tcctactttaaatggaaatg

SEQ ID NO: 337451 - DNA, 20 bp, Artificial Sequence
  Description of Artificial Sequence: Synthetic oligonucleotide
  Target: LAMA2; (+) strand; PAM type: YTN; PAM sequence: CTA
ctttaaatggaaatgtctat

SEQ ID NO: 337452 - DNA, 20 bp, Artificial Sequence
  Description of Artificial Sequence: Synthetic oligonucleotide
  Target: LAMA2; (+) strand; PAM type: YTN; PAM sequence: CTT
taaatggaaatgtctataga

SEQ ID NO: 337453 - DNA, 20 bp, Artificial Sequence
  Description of Artificial Sequence: Synthetic oligonucleotide
  Target: LAMA2; (+) strand; PAM type: YTN; PAM sequence: TTT
aaatggaaatgtctatagac

SEQ ID NO: 337454 - DNA, 20 bp, Artificial Sequence
  Description of Artificial Sequence: Synthetic oligonucleotide
  Target: LAMA2; (+) strand; PAM type: YTN; PAM sequence: TTA
aatggaaatgtctatagact

SEQ ID NO: 337455 - DNA, 20 bp, Artificial Sequence
  Description of Artificial Sequence: Synthetic oligonucleotide
  Target: LAMA2; (+) strand; PAM type: YTN; PAM sequence: CTA
tagacttttctagtgaaggc

SEQ ID NO: 337456 - DNA, 20 bp, Artificial Sequence
  Description of Artificial Sequence: Synthetic oligonucleotide
  Target: LAMA2; (+) strand; PAM type: YTN; PAM sequence: CTT
ttctagtgaaggcttttaca

SEQ ID NO: 337457 - DNA, 20 bp, Artificial Sequence
  Description of Artificial Sequence: Synthetic oligonucleotide
  Target: LAMA2; (+) strand; PAM type: YTN; PAM sequence: TTT
tctagtgaaggcttttacaa

SEQ ID NO: 337458 - DNA, 20 bp, Artificial Sequence
  Description of Artificial Sequence: Synthetic oligonucleotide
  Target: LAMA2; (+) strand; PAM type: YTN; PAM sequence: TTT
ctagtgaaggcttttacaaa

SEQ ID NO: 337459 - DNA, 20 bp, Artificial Sequence
  Description of Artificial Sequence: Synthetic oligonucleotide
  Target: LAMA2; (+) strand; PAM type: YTN; PAM sequence: TTC
tagtgaaggcttttacaaat

SEQ ID NO: 337460 - DNA, 20 bp, Artificial Sequence
  Description of Artificial Sequence: Synthetic oligonucleotide
  Target: LAMA2; (+) strand; PAM type: YTN; PAM sequence: CTA
gtgaaggcttttacaaatgt

SEQ ID NO: 337461 - DNA, 20 bp, Artificial Sequence
  Description of Artificial Sequence: Synthetic oligonucleotide
  Target: LAMA2; (+) strand; PAM type: YTN; PAM sequence: CTT
ttacaaatgttaagggatga

SEQ ID NO: 337462 - DNA, 20 bp, Artificial Sequence
  Description of Artificial Sequence: Synthetic oligonucleotide
  Target: LAMA2; (+) strand; PAM type: YTN; PAM sequence: TTT
tacaaatgttaagggatgat

SEQ ID NO: 337463 - DNA, 20 bp, Artificial Sequence
  Description of Artificial Sequence: Synthetic oligonucleotide
  Target: LAMA2; (+) strand; PAM type: YTN; PAM sequence: TTT
acaaatgttaagggatgatt

SEQ ID NO: 337464 - DNA, 20 bp, Artificial Sequence
  Description of Artificial Sequence: Synthetic oligonucleotide
  Target: LAMA2; (+) strand; PAM type: YTN; PAM sequence: TTA
caaatgttaagggatgattg

SEQ ID NO: 337465 - DNA, 20 bp, Artificial Sequence
  Description of Artificial Sequence: Synthetic oligonucleotide
  Target: LAMA2; (+) strand; PAM type: YTN; PAM sequence: TTA
agggatgattgaatgctcac

SEQ ID NO: 337466 - DNA, 20 bp, Artificial Sequence
  Description of Artificial Sequence: Synthetic oligonucleotide
  Target: LAMA2; (+) strand; PAM type: YTN; PAM sequence: TTG
aatgctcacagcaggacaca

SEQ ID NO: 337467 - DNA, 20 bp, Artificial Sequence
  Description of Artificial Sequence: Synthetic oligonucleotide
  Target: LAMA2; (+) strand; PAM type: YTN; PAM sequence: CTC
acagcaggacacatggcatt

SEQ ID NO: 337468 - DNA, 20 bp, Artificial Sequence
  Description of Artificial Sequence: Synthetic oligonucleotide
  Target: LAMA2; (+) strand; PAM type: YTN; PAM sequence: TTA
cagaaagtctccaaaattat

SEQ ID NO: 337469 - DNA, 20 bp, Artificial Sequence
  Description of Artificial Sequence: Synthetic oligonucleotide
  Target: LAMA2; (+) strand; PAM type: YTN; PAM sequence: CTC
caaaattattcatccttttg

SEQ ID NO: 337470 - DNA, 20 bp, Artificial Sequence
  Description of Artificial Sequence: Synthetic oligonucleotide
  Target: LAMA2; (+) strand; PAM type: YTN; PAM sequence: TTA
ttcatccttttggggacaac

SEQ ID NO: 337471 - DNA, 20 bp, Artificial Sequence
  Description of Artificial Sequence: Synthetic oligonucleotide
  Target: LAMA2; (+) strand; PAM type: YTN; PAM sequence: TTC
atccttttggggacaactat

SEQ ID NO: 337472 - DNA, 20 bp, Artificial Sequence
  Description of Artificial Sequence: Synthetic oligonucleotide
  Target: LAMA2; (+) strand; PAM type: YTN; PAM sequence: CTT
ttggggacaactataaccat

SEQ ID NO: 337473 - DNA, 20 bp, Artificial Sequence
  Description of Artificial Sequence: Synthetic oligonucleotide
  Target: LAMA2; (+) strand; PAM type: YTN; PAM sequence: TTT
tggggacaactataaccatg

SEQ ID NO: 337474 - DNA, 20 bp, Artificial Sequence
  Description of Artificial Sequence: Synthetic oligonucleotide
  Target: LAMA2; (+) strand; PAM type: YTN; PAM sequence: TTT
ggggacaactataaccatga

SEQ ID NO: 337475 - DNA, 20 bp, Artificial Sequence
  Description of Artificial Sequence: Synthetic oligonucleotide
  Target: LAMA2; (+) strand; PAM type: YTN; PAM sequence: TTG
gggacaactataaccatgat

SEQ ID NO: 337476 - DNA, 20 bp, Artificial Sequence
  Description of Artificial Sequence: Synthetic oligonucleotide
  Target: LAMA2; (+) strand; PAM type: YTN; PAM sequence: CTA
taaccatgattttttgtgac

SEQ ID NO: 337477 - DNA, 20 bp, Artificial Sequence
  Description of Artificial Sequence: Synthetic oligonucleotide
  Target: LAMA2; (+) strand; PAM type: YTN; PAM sequence: TTT
tttgtgacactcataacctg

SEQ ID NO: 337478 - DNA, 20 bp, Artificial Sequence
  Description of Artificial Sequence: Synthetic oligonucleotide
  Target: LAMA2; (+) strand; PAM type: YTN; PAM sequence: TTT
ttgtgacactcataacctgt

SEQ ID NO: 337479 - DNA, 20 bp, Artificial Sequence
  Description of Artificial Sequence: Synthetic oligonucleotide
  Target: LAMA2; (+) strand; PAM type: YTN; PAM sequence: TTT
tgtgacactcataacctgtt

SEQ ID NO: 337480 - DNA, 20 bp, Artificial Sequence
  Description of Artificial Sequence: Synthetic oligonucleotide
  Target: LAMA2; (+) strand; PAM type: YTN; PAM sequence: TTT
gtgacactcataacctgttg

SEQ ID NO: 337481 - DNA, 20 bp, Artificial Sequence
  Description of Artificial Sequence: Synthetic oligonucleotide
  Target: LAMA2; (+) strand; PAM type: YTN; PAM sequence: TTG
tgacactcataacctgttga

SEQ ID NO: 337482 - DNA, 20 bp, Artificial Sequence
  Description of Artificial Sequence: Synthetic oligonucleotide
  Target: LAMA2; (+) strand; PAM type: YTN; PAM sequence: CTC
ataacctgttgaattggaaa

SEQ ID NO: 337483 - DNA, 20 bp, Artificial Sequence
  Description of Artificial Sequence: Synthetic oligonucleotide
  Target: LAMA2; (+) strand; PAM type: YTN; PAM sequence: CTG
ttgaattggaaaaatattaa

SEQ ID NO: 337484 - DNA, 20 bp, Artificial Sequence
  Description of Artificial Sequence: Synthetic oligonucleotide
  Target: LAMA2; (+) strand; PAM type: YTN; PAM sequence: TTG
aattggaaaaatattaatgt

SEQ ID NO: 337485 - DNA, 20 bp, Artificial Sequence
  Description of Artificial Sequence: Synthetic oligonucleotide
  Target: LAMA2; (+) strand; PAM type: YTN; PAM sequence: TTG
gaaaaatattaatgttagaa

SEQ ID NO: 337486 - DNA, 20 bp, Artificial Sequence
  Description of Artificial Sequence: Synthetic oligonucleotide
  Target: LAMA2; (+) strand; PAM type: YTN; PAM sequence: TTA
atgttagaaatctgttctca

SEQ ID NO: 337487 - DNA, 20 bp, Artificial Sequence
  Description of Artificial Sequence: Synthetic oligonucleotide
  Target: LAMA2; (+) strand; PAM type: YTN; PAM sequence: TTA
gaaatctgttctcatgtcac

SEQ ID NO: 337488 - DNA, 20 bp, Artificial Sequence
  Description of Artificial Sequence: Synthetic oligonucleotide
  Target: LAMA2; (+) strand; PAM type: YTN; PAM sequence: CTG
ttctcatgtcacttttaaaa

SEQ ID NO: 337489 - DNA, 20 bp, Artificial Sequence
  Description of Artificial Sequence: Synthetic oligonucleotide
  Target: LAMA2; (+) strand; PAM type: YTN; PAM sequence: TTC
tcatgtcacttttaaaattc

SEQ ID NO: 337490 - DNA, 20 bp, Artificial Sequence
  Description of Artificial Sequence: Synthetic oligonucleotide
  Target: LAMA2; (+) strand; PAM type: YTN; PAM sequence: CTC
atgtcacttttaaaattctt

SEQ ID NO: 337491 - DNA, 20 bp, Artificial Sequence
  Description of Artificial Sequence: Synthetic oligonucleotide
  Target: LAMA2; (+) strand; PAM type: YTN; PAM sequence: CTT
ttaaaattcttctccttttt

SEQ ID NO: 337492 - DNA, 20 bp, Artificial Sequence
  Description of Artificial Sequence: Synthetic oligonucleotide
  Target: LAMA2; (+) strand; PAM type: YTN; PAM sequence: TTT
taaaattcttctcctttttt

SEQ ID NO: 337493 - DNA, 20 bp, Artificial Sequence
  Description of Artificial Sequence: Synthetic oligonucleotide
  Target: LAMA2; (+) strand; PAM type: YTN; PAM sequence: TTT
aaaattcttctccttttttg

SEQ ID NO: 337494 - DNA, 20 bp, Artificial Sequence
  Description of Artificial Sequence: Synthetic oligonucleotide
  Target: LAMA2; (+) strand; PAM type: YTN; PAM sequence: TTA
aaattcttctccttttttgc

SEQ ID NO: 337495 - DNA, 20 bp, Artificial Sequence
  Description of Artificial Sequence: Synthetic oligonucleotide
  Target: LAMA2; (+) strand; PAM type: YTN; PAM sequence: TTC
ttctccttttttgcctcctg

SEQ ID NO: 337496 - DNA, 20 bp, Artificial Sequence
  Description of Artificial Sequence: Synthetic oligonucleotide
  Target: LAMA2; (+) strand; PAM type: YTN; PAM sequence: CTT
ctccttttttgcctcctgta

SEQ ID NO: 337497 - DNA, 20 bp, Artificial Sequence
  Description of Artificial Sequence: Synthetic oligonucleotide
  Target: LAMA2; (+) strand; PAM type: YTN; PAM sequence: TTC
tccttttttgcctcctgtag

SEQ ID NO: 337498 - DNA, 20 bp, Artificial Sequence
  Description of Artificial Sequence: Synthetic oligonucleotide
  Target: LAMA2; (+) strand; PAM type: YTN; PAM sequence: CTC
cttttttgcctcctgtagca

SEQ ID NO: 337499 - DNA, 20 bp, Artificial Sequence
  Description of Artificial Sequence: Synthetic oligonucleotide
  Target: LAMA2; (+) strand; PAM type: YTN; PAM sequence: CTT
ttttgcctcctgtagcatga

SEQ ID NO: 337500 - DNA, 20 bp, Artificial Sequence
  Description of Artificial Sequence: Synthetic oligonucleotide
  Target: LAMA2; (+) strand; PAM type: YTN; PAM sequence: TTT
tttgcctcctgtagcatgag

SEQ ID NO: 337501 - DNA, 20 bp, Artificial Sequence
  Description of Artificial Sequence: Synthetic oligonucleotide
  Target: LAMA2; (+) strand; PAM type: YTN; PAM sequence: TTT
ttgcctcctgtagcatgagt

SEQ ID NO: 337502 - DNA, 20 bp, Artificial Sequence
  Description of Artificial Sequence: Synthetic oligonucleotide
  Target: LAMA2; (+) strand; PAM type: YTN; PAM sequence: TTT
tgcctcctgtagcatgagtc

SEQ ID NO: 337503 - DNA, 20 bp, Artificial Sequence
  Description of Artificial Sequence: Synthetic oligonucleotide
  Target: LAMA2; (+) strand; PAM type: YTN; PAM sequence: TTT
gcctcctgtagcatgagtcc

SEQ ID NO: 337504 - DNA, 20 bp, Artificial Sequence
  Description of Artificial Sequence: Synthetic oligonucleotide
  Target: LAMA2; (+) strand; PAM type: YTN; PAM sequence: TTG
cctcctgtagcatgagtcct

SEQ ID NO: 337505 - DNA, 20 bp, Artificial Sequence
  Description of Artificial Sequence: Synthetic oligonucleotide
  Target: LAMA2; (+) strand; PAM type: YTN; PAM sequence: CTC
ctgtagcatgagtcctagtt

SEQ ID NO: 337506 - DNA, 20 bp, Artificial Sequence
  Description of Artificial Sequence: Synthetic oligonucleotide
  Target: LAMA2; (+) strand; PAM type: YTN; PAM sequence: CTG
tagcatgagtcctagtttga

SEQ ID NO: 337507 - DNA, 20 bp, Artificial Sequence
  Description of Artificial Sequence: Synthetic oligonucleotide
  Target: LAMA2; (+) strand; PAM type: YTN; PAM sequence: CTA
gtttgattaaactagacact

SEQ ID NO: 337508 - DNA, 20 bp, Artificial Sequence
  Description of Artificial Sequence: Synthetic oligonucleotide
  Target: LAMA2; (+) strand; PAM type: YTN; PAM sequence: TTT
gattaaactagacacttgat

SEQ ID NO: 337509 - DNA, 20 bp, Artificial Sequence
  Description of Artificial Sequence: Synthetic oligonucleotide
  Target: LAMA2; (+) strand; PAM type: YTN; PAM sequence: TTG
attaaactagacacttgatt

SEQ ID NO: 337510 - DNA, 20 bp, Artificial Sequence
  Description of Artificial Sequence: Synthetic oligonucleotide
  Target: LAMA2; (+) strand; PAM type: YTN; PAM sequence: TTA
aactagacacttgattttct

SEQ ID NO: 337511 - DNA, 20 bp, Artificial Sequence
  Description of Artificial Sequence: Synthetic oligonucleotide
  Target: LAMA2; (+) strand; PAM type: YTN; PAM sequence: CTA
gacacttgattttctccaat

SEQ ID NO: 337512 - DNA, 20 bp, Artificial Sequence
  Description of Artificial Sequence: Synthetic oligonucleotide
  Target: LAMA2; (+) strand; PAM type: YTN; PAM sequence: CTT
gattttctccaatggtaaca

SEQ ID NO: 337513 - DNA, 20 bp, Artificial Sequence
  Description of Artificial Sequence: Synthetic oligonucleotide
  Target: LAMA2; (+) strand; PAM type: YTN; PAM sequence: TTG
attttctccaatggtaacat

SEQ ID NO: 337514 - DNA, 20 bp, Artificial Sequence
  Description of Artificial Sequence: Synthetic oligonucleotide
  Target: LAMA2; (+) strand; PAM type: YTN; PAM sequence: TTT
tctccaatggtaacatgttt

SEQ ID NO: 337515 - DNA, 20 bp, Artificial Sequence
  Description of Artificial Sequence: Synthetic oligonucleotide
  Target: LAMA2; (+) strand; PAM type: YTN; PAM sequence: TTT
ctccaatggtaacatgtttt

SEQ ID NO: 337516 - DNA, 20 bp, Artificial Sequence
  Description of Artificial Sequence: Synthetic oligonucleotide
  Target: LAMA2; (+) strand; PAM type: YTN; PAM sequence: TTC
tccaatggtaacatgttttt

SEQ ID NO: 337517 - DNA, 20 bp, Artificial Sequence
  Description of Artificial Sequence: Synthetic oligonucleotide
  Target: LAMA2; (+) strand; PAM type: YTN; PAM sequence: CTC
caatggtaacatgtttttaa

SEQ ID NO: 337518 - DNA, 20 bp, Artificial Sequence
  Description of Artificial Sequence: Synthetic oligonucleotide
  Target: LAMA2; (+) strand; PAM type: YTN; PAM sequence: TTT
ttaaaaaaggacttttactc

SEQ ID NO: 337519 - DNA, 20 bp, Artificial Sequence
  Description of Artificial Sequence: Synthetic oligonucleotide
  Target: LAMA2; (+) strand; PAM type: YTN; PAM sequence: TTT
taaaaaaggacttttactct

SEQ ID NO: 337520 - DNA, 20 bp, Artificial Sequence
  Description of Artificial Sequence: Synthetic oligonucleotide
  Target: LAMA2; (+) strand; PAM type: YTN; PAM sequence: TTT
aaaaaaggacttttactctg

SEQ ID NO: 337521 - DNA, 20 bp, Artificial Sequence
  Description of Artificial Sequence: Synthetic oligonucleotide
  Target: LAMA2; (+) strand; PAM type: YTN; PAM sequence: TTA
aaaaaggacttttactctgt

SEQ ID NO: 337522 - DNA, 20 bp, Artificial Sequence
  Description of Artificial Sequence: Synthetic oligonucleotide
  Target: LAMA2; (+) strand; PAM type: YTN; PAM sequence: CTT
ttactctgttggaaccaatt

SEQ ID NO: 337523 - DNA, 20 bp, Artificial Sequence
  Description of Artificial Sequence: Synthetic oligonucleotide
  Target: LAMA2; (+) strand; PAM type: YTN; PAM sequence: TTT
tactctgttggaaccaatta

SEQ ID NO: 337524 - DNA, 20 bp, Artificial Sequence
  Description of Artificial Sequence: Synthetic oligonucleotide
  Target: LAMA2; (+) strand; PAM type: YTN; PAM sequence: TTT
actctgttggaaccaattag

SEQ ID NO: 337525 - DNA, 20 bp, Artificial Sequence
  Description of Artificial Sequence: Synthetic oligonucleotide
  Target: LAMA2; (+) strand; PAM type: YTN; PAM sequence: TTA
ctctgttggaaccaattagg

SEQ ID NO: 337526 - DNA, 20 bp, Artificial Sequence
  Description of Artificial Sequence: Synthetic oligonucleotide
  Target: LAMA2; (+) strand; PAM type: YTN; PAM sequence: CTC
tgttggaaccaattaggcca

SEQ ID NO: 337527 - DNA, 20 bp, Artificial Sequence
  Description of Artificial Sequence: Synthetic oligonucleotide
  Target: LAMA2; (+) strand; PAM type: YTN; PAM sequence: CTG
ttggaaccaattaggccaat

SEQ ID NO: 337528 - DNA, 20 bp, Artificial Sequence
  Description of Artificial Sequence: Synthetic oligonucleotide
  Target: LAMA2; (+) strand; PAM type: YTN; PAM sequence: TTG
gaaccaattaggccaatgtg

SEQ ID NO: 337529 - DNA, 20 bp, Artificial Sequence
  Description of Artificial Sequence: Synthetic oligonucleotide
  Target: LAMA2; (+) strand; PAM type: YTN; PAM sequence: TTA
ggccaatgtgaggaactttg

SEQ ID NO: 337530 - DNA, 20 bp, Artificial Sequence
  Description of Artificial Sequence: Synthetic oligonucleotide
  Target: LAMA2; (+) strand; PAM type: YTN; PAM sequence: CTT
tggaaggaacatgagcagcc

SEQ ID NO: 337531 - DNA, 20 bp, Artificial Sequence
  Description of Artificial Sequence: Synthetic oligonucleotide
  Target: LAMA2; (+) strand; PAM type: YTN; PAM sequence: TTT
ggaaggaacatgagcagcca

SEQ ID NO: 337532 - DNA, 20 bp, Artificial Sequence
  Description of Artificial Sequence: Synthetic oligonucleotide
  Target: LAMA2; (+) strand; PAM type: YTN; PAM sequence: TTG
gaaggaacatgagcagccaa

SEQ ID NO: 337533 - DNA, 20 bp, Artificial Sequence
  Description of Artificial Sequence: Synthetic oligonucleotide
  Target: LAMA2; (+) strand; PAM type: YTN; PAM sequence: CTT
gctaacagcaaaacgtattt

SEQ ID NO: 337534 - DNA, 20 bp, Artificial Sequence
  Description of Artificial Sequence: Synthetic oligonucleotide
  Target: LAMA2; (+) strand; PAM type: YTN; PAM sequence: TTG
ctaacagcaaaacgtatttt

SEQ ID NO: 337535 - DNA, 20 bp, Artificial Sequence
  Description of Artificial Sequence: Synthetic oligonucleotide
  Target: LAMA2; (+) strand; PAM type: YTN; PAM sequence: CTA
acagcaaaacgtatttttct

SEQ ID NO: 337536 - DNA, 20 bp, Artificial Sequence
  Description of Artificial Sequence: Synthetic oligonucleotide
  Target: LAMA2; (+) strand; PAM type: YTN; PAM sequence: TTT
ttctgaaggcagcatgaaaa

SEQ ID NO: 337537 - DNA, 20 bp, Artificial Sequence
  Description of Artificial Sequence: Synthetic oligonucleotide
  Target: LAMA2; (+) strand; PAM type: YTN; PAM sequence: TTT
tctgaaggcagcatgaaaag

SEQ ID NO: 337538 - DNA, 20 bp, Artificial Sequence
  Description of Artificial Sequence: Synthetic oligonucleotide
  Target: LAMA2; (+) strand; PAM type: YTN; PAM sequence: TTT
ctgaaggcagcatgaaaagg

SEQ ID NO: 337539 - DNA, 20 bp, Artificial Sequence
  Description of Artificial Sequence: Synthetic oligonucleotide
  Target: LAMA2; (+) strand; PAM type: YTN; PAM sequence: TTC
tgaaggcagcatgaaaagga

SEQ ID NO: 337540 - DNA, 20 bp, Artificial Sequence
  Description of Artificial Sequence: Synthetic oligonucleotide
  Target: LAMA2; (+) strand; PAM type: YTN; PAM sequence: CTG
aaggcagcatgaaaaggacg

SEQ ID NO: 337541 - DNA, 20 bp, Artificial Sequence
  Description of Artificial Sequence: Synthetic oligonucleotide
  Target: LAMA2; (+) strand; PAM type: YTN; PAM sequence: TTC
tctaaggactgtgagttcca

SEQ ID NO: 337542 - DNA, 20 bp, Artificial Sequence
  Description of Artificial Sequence: Synthetic oligonucleotide
  Target: LAMA2; (+) strand; PAM type: YTN; PAM sequence: CTC
taaggactgtgagttccacg

SEQ ID NO: 337543 - DNA, 20 bp, Artificial Sequence
  Description of Artificial Sequence: Synthetic oligonucleotide
  Target: LAMA2; (+) strand; PAM type: YTN; PAM sequence: CTA
aggactgtgagttccacggg

SEQ ID NO: 337544 - DNA, 20 bp, Artificial Sequence
  Description of Artificial Sequence: Synthetic oligonucleotide
  Target: LAMA2; (+) strand; PAM type: YTN; PAM sequence: CTG
tgagttccacgggtcctttt

SEQ ID NO: 337545 - DNA, 20 bp, Artificial Sequence
  Description of Artificial Sequence: Synthetic oligonucleotide
  Target: LAMA2; (+) strand; PAM type: YTN; PAM sequence: TTC
cacgggtccttttgagcttc

SEQ ID NO: 337546 - DNA, 20 bp, Artificial Sequence
  Description of Artificial Sequence: Synthetic oligonucleotide
  Target: LAMA2; (+) strand; PAM type: YTN; PAM sequence: CTT
ttgagcttcagaaatccagc

SEQ ID NO: 337547 - DNA, 20 bp, Artificial Sequence
  Description of Artificial Sequence: Synthetic oligonucleotide
  Target: LAMA2; (+) strand; PAM type: YTN; PAM sequence: TTT
tgagcttcagaaatccagct

SEQ ID NO: 337548 - DNA, 20 bp, Artificial Sequence
  Description of Artificial Sequence: Synthetic oligonucleotide
  Target: LAMA2; (+) strand; PAM type: YTN; PAM sequence: TTT
gagcttcagaaatccagctc

SEQ ID NO: 337549 - DNA, 20 bp, Artificial Sequence
  Description of Artificial Sequence: Synthetic oligonucleotide
  Target: LAMA2; (+) strand; PAM type: YTN; PAM sequence: TTG
agcttcagaaatccagctct

SEQ ID NO: 337550 - DNA, 20 bp, Artificial Sequence
  Description of Artificial Sequence: Synthetic oligonucleotide
  Target: LAMA2; (+) strand; PAM type: YTN; PAM sequence: CTT
cagaaatccagctctcagca

SEQ ID NO: 337551 - DNA, 20 bp, Artificial Sequence
  Description of Artificial Sequence: Synthetic oligonucleotide
  Target: LAMA2; (+) strand; PAM type: YTN; PAM sequence: TTC
agaaatccagctctcagcac

SEQ ID NO: 337552 - DNA, 20 bp, Artificial Sequence
  Description of Artificial Sequence: Synthetic oligonucleotide
  Target: LAMA2; (+) strand; PAM type: YTN; PAM sequence: CTC
tcagcacttcataaatcatt

SEQ ID NO: 337553 - DNA, 20 bp, Artificial Sequence
  Description of Artificial Sequence: Synthetic oligonucleotide
  Target: LAMA2; (+) strand; PAM type: YTN; PAM sequence: CTC
agcacttcataaatcatttc

SEQ ID NO: 337554 - DNA, 20 bp, Artificial Sequence
  Description of Artificial Sequence: Synthetic oligonucleotide
  Target: LAMA2; (+) strand; PAM type: YTN; PAM sequence: CTT
cataaatcatttctgacctg

SEQ ID NO: 337555 - DNA, 20 bp, Artificial Sequence
  Description of Artificial Sequence: Synthetic oligonucleotide
  Target: LAMA2; (+) strand; PAM type: YTN; PAM sequence: TTC
ataaatcatttctgacctga

SEQ ID NO: 337556 - DNA, 20 bp, Artificial Sequence
  Description of Artificial Sequence: Synthetic oligonucleotide
  Target: LAMA2; (+) strand; PAM type: YTN; PAM sequence: TTT
ctgacctgatgtcactgaag

SEQ ID NO: 337557 - DNA, 20 bp, Artificial Sequence
  Description of Artificial Sequence: Synthetic oligonucleotide
  Target: LAMA2; (+) strand; PAM type: YTN; PAM sequence: TTC
tgacctgatgtcactgaagt

SEQ ID NO: 337558 - DNA, 20 bp, Artificial Sequence
  Description of Artificial Sequence: Synthetic oligonucleotide
  Target: LAMA2; (+) strand; PAM type: YTN; PAM sequence: CTG
acctgatgtcactgaagttg

SEQ ID NO: 337559 - DNA, 20 bp, Artificial Sequence
  Description of Artificial Sequence: Synthetic oligonucleotide
  Target: LAMA2; (+) strand; PAM type: YTN; PAM sequence: CTG
atgtcactgaagttgtatta

SEQ ID NO: 337560 - DNA, 20 bp, Artificial Sequence
  Description of Artificial Sequence: Synthetic oligonucleotide
  Target: LAMA2; (+) strand; PAM type: YTN; PAM sequence: CTG
aagttgtattattatgtggt

SEQ ID NO: 337561 - DNA, 20 bp, Artificial Sequence
  Description of Artificial Sequence: Synthetic oligonucleotide
  Target: LAMA2; (+) strand; PAM type: YTN; PAM sequence: TTG
tattattatgtggttagtat

SEQ ID NO: 337562 - DNA, 20 bp, Artificial Sequence
  Description of Artificial Sequence: Synthetic oligonucleotide
  Target: LAMA2; (+) strand; PAM type: YTN; PAM sequence: TTA
ttatgtggttagtataaaat

SEQ ID NO: 337563 - DNA, 20 bp, Artificial Sequence
  Description of Artificial Sequence: Synthetic oligonucleotide
  Target: LAMA2; (+) strand; PAM type: YTN; PAM sequence: TTA
tgtggttagtataaaattca

SEQ ID NO: 337564 - DNA, 20 bp, Artificial Sequence
  Description of Artificial Sequence: Synthetic oligonucleotide
  Target: LAMA2; (+) strand; PAM type: YTN; PAM sequence: TTA
gtataaaattcagaaaaatt

SEQ ID NO: 337565 - DNA, 20 bp, Artificial Sequence
  Description of Artificial Sequence: Synthetic oligonucleotide
  Target: LAMA2; (+) strand; PAM type: YTN; PAM sequence: TTC
agaaaaattgggagaaaata

SEQ ID NO: 337566 - DNA, 20 bp, Artificial Sequence
  Description of Artificial Sequence: Synthetic oligonucleotide
  Target: LAMA2; (+) strand; PAM type: YTN; PAM sequence: TTG
ggagaaaatacaaggagaag

SEQ ID NO: 337567 - DNA, 20 bp, Artificial Sequence
  Description of Artificial Sequence: Synthetic oligonucleotide
  Target: LAMA2; (+) strand; PAM type: YTN; PAM sequence: TTT
gcagggtgattgttgtaaga

SEQ ID NO: 337568 - DNA, 20 bp, Artificial Sequence
  Description of Artificial Sequence: Synthetic oligonucleotide
  Target: LAMA2; (+) strand; PAM type: YTN; PAM sequence: TTG
cagggtgattgttgtaagat

SEQ ID NO: 337569 - DNA, 20 bp, Artificial Sequence
  Description of Artificial Sequence: Synthetic oligonucleotide
  Target: LAMA2; (+) strand; PAM type: YTN; PAM sequence: TTG
ttgtaagatttttatcatgt

SEQ ID NO: 337570 - DNA, 20 bp, Artificial Sequence
  Description of Artificial Sequence: Synthetic oligonucleotide
  Target: LAMA2; (+) strand; PAM type: YTN; PAM sequence: TTG
taagatttttatcatgtcct

SEQ ID NO: 337571 - DNA, 20 bp, Artificial Sequence
  Description of Artificial Sequence: Synthetic oligonucleotide
  Target: LAMA2; (+) strand; PAM type: YTN; PAM sequence: TTT
ttatcatgtcctcttaaaaa

SEQ ID NO: 337572 - DNA, 20 bp, Artificial Sequence
  Description of Artificial Sequence: Synthetic oligonucleotide
  Target: LAMA2; (+) strand; PAM type: YTN; PAM sequence: TTT
tatcatgtcctcttaaaaat

SEQ ID NO: 337573 - DNA, 20 bp, Artificial Sequence
  Description of Artificial Sequence: Synthetic oligonucleotide
  Target: LAMA2; (+) strand; PAM type: YTN; PAM sequence: TTT
atcatgtcctcttaaaaatg

SEQ ID NO: 337574 - DNA, 20 bp, Artificial Sequence
  Description of Artificial Sequence: Synthetic oligonucleotide
  Target: LAMA2; (+) strand; PAM type: YTN; PAM sequence: TTA
tcatgtcctcttaaaaatgg

SEQ ID NO: 337575 - DNA, 20 bp, Artificial Sequence
  Description of Artificial Sequence: Synthetic oligonucleotide
  Target: LAMA2; (+) strand; PAM type: YTN; PAM sequence: CTC
ttaaaaatggtagcttttca

SEQ ID NO: 337576 - DNA, 20 bp, Artificial Sequence
  Description of Artificial Sequence: Synthetic oligonucleotide
  Target: LAMA2; (+) strand; PAM type: YTN; PAM sequence: CTT
aaaaatggtagcttttcaga

SEQ ID NO: 337577 - DNA, 20 bp, Artificial Sequence
  Description of Artificial Sequence: Synthetic oligonucleotide
  Target: LAMA2; (+) strand; PAM type: YTN; PAM sequence: TTA
aaaatggtagcttttcagaa

SEQ ID NO: 337578 - DNA, 20 bp, Artificial Sequence
  Description of Artificial Sequence: Synthetic oligonucleotide
  Target: LAMA2; (+) strand; PAM type: YTN; PAM sequence: CTT
ttcagaaacttttgttaact

SEQ ID NO: 337579 - DNA, 20 bp, Artificial Sequence
  Description of Artificial Sequence: Synthetic oligonucleotide
  Target: LAMA2; (+) strand; PAM type: YTN; PAM sequence: TTT
tcagaaacttttgttaactg

SEQ ID NO: 337580 - DNA, 20 bp, Artificial Sequence
  Description of Artificial Sequence: Synthetic oligonucleotide
  Target: LAMA2; (+) strand; PAM type: YTN; PAM sequence: TTT
cagaaacttttgttaactgc

SEQ ID NO: 337581 - DNA, 20 bp, Artificial Sequence
  Description of Artificial Sequence: Synthetic oligonucleotide
  Target: LAMA2; (+) strand; PAM type: YTN; PAM sequence: TTC
agaaacttttgttaactgct

SEQ ID NO: 337582 - DNA, 20 bp, Artificial Sequence
  Description of Artificial Sequence: Synthetic oligonucleotide
  Target: LAMA2; (+) strand; PAM type: YTN; PAM sequence: CTT
ttgttaactgctttgcattc

SEQ ID NO: 337583 - DNA, 20 bp, Artificial Sequence
  Description of Artificial Sequence: Synthetic oligonucleotide
  Target: LAMA2; (+) strand; PAM type: YTN; PAM sequence: TTT
tgttaactgctttgcattcc

SEQ ID NO: 337584 - DNA, 20 bp, Artificial Sequence
  Description of Artificial Sequence: Synthetic oligonucleotide
  Target: LAMA2; (+) strand; PAM type: YTN; PAM sequence: TTT
gttaactgctttgcattcca

SEQ ID NO: 337585 - DNA, 20 bp, Artificial Sequence
  Description of Artificial Sequence: Synthetic oligonucleotide
  Target: LAMA2; (+) strand; PAM type: YTN; PAM sequence: TTG
ttaactgctttgcattccat

SEQ ID NO: 337586 - DNA, 20 bp, Artificial Sequence
  Description of Artificial Sequence: Synthetic oligonucleotide
  Target: LAMA2; (+) strand; PAM type: YTN; PAM sequence: TTA
actgctttgcattccatctt

SEQ ID NO: 337587 - DNA, 20 bp, Artificial Sequence
  Description of Artificial Sequence: Synthetic oligonucleotide
  Target: LAMA2; (+) strand; PAM type: YTN; PAM sequence: CTG
ctttgcattccatcttgaga

SEQ ID NO: 337588 - DNA, 20 bp, Artificial Sequence
  Description of Artificial Sequence: Synthetic oligonucleotide
  Target: LAMA2; (+) strand; PAM type: YTN; PAM sequence: CTT
tgcattccatcttgagaaaa

SEQ ID NO: 337589 - DNA, 20 bp, Artificial Sequence
  Description of Artificial Sequence: Synthetic oligonucleotide
  Target: LAMA2; (+) strand; PAM type: YTN; PAM sequence: TTT
gcattccatcttgagaaaat

SEQ ID NO: 337590 - DNA, 20 bp, Artificial Sequence
  Description of Artificial Sequence: Synthetic oligonucleotide
  Target: LAMA2; (+) strand; PAM type: YTN; PAM sequence: TTG
cattccatcttgagaaaatg

SEQ ID NO: 337591 - DNA, 20 bp, Artificial Sequence
  Description of Artificial Sequence: Synthetic oligonucleotide
  Target: LAMA2; (+) strand; PAM type: YTN; PAM sequence: TTC
catcttgagaaaatgtctgt

SEQ ID NO: 337592 - DNA, 20 bp, Artificial Sequence
  Description of Artificial Sequence: Synthetic oligonucleotide
  Target: LAMA2; (+) strand; PAM type: YTN; PAM sequence: CTT
gagaaaatgtctgtatagtt

SEQ ID NO: 337593 - DNA, 20 bp, Artificial Sequence
  Description of Artificial Sequence: Synthetic oligonucleotide
  Target: LAMA2; (+) strand; PAM type: YTN; PAM sequence: TTG
agaaaatgtctgtatagtta

SEQ ID NO: 337594 - DNA, 20 bp, Artificial Sequence
  Description of Artificial Sequence: Synthetic oligonucleotide
  Target: LAMA2; (+) strand; PAM type: YTN; PAM sequence: CTG
tatagttagatgagcatcat

SEQ ID NO: 337595 - DNA, 20 bp, Artificial Sequence
  Description of Artificial Sequence: Synthetic oligonucleotide
  Target: LAMA2; (+) strand; PAM type: YTN; PAM sequence: TTA
gatgagcatcatctcctctc

SEQ ID NO: 337596 - DNA, 20 bp, Artificial Sequence
  Description of Artificial Sequence: Synthetic oligonucleotide
  Target: LAMA2; (+) strand; PAM type: YTN; PAM sequence: CTC
ctctccttgtttttaaatca

SEQ ID NO: 337597 - DNA, 20 bp, Artificial Sequence
  Description of Artificial Sequence: Synthetic oligonucleotide
  Target: LAMA2; (+) strand; PAM type: YTN; PAM sequence: CTC
tccttgtttttaaatcacat

SEQ ID NO: 337598 - DNA, 20 bp, Artificial Sequence
  Description of Artificial Sequence: Synthetic oligonucleotide
  Target: LAMA2; (+) strand; PAM type: YTN; PAM sequence: CTC
cttgtttttaaatcacatcc

SEQ ID NO: 337599 - DNA, 20 bp, Artificial Sequence
  Description of Artificial Sequence: Synthetic oligonucleotide
  Target: LAMA2; (+) strand; PAM type: YTN; PAM sequence: CTT
gtttttaaatcacatccaaa

SEQ ID NO: 337600 - DNA, 20 bp, Artificial Sequence
  Description of Artificial Sequence: Synthetic oligonucleotide
  Target: LAMA2; (+) strand; PAM type: YTN; PAM sequence: TTG
tttttaaatcacatccaaaa

SEQ ID NO: 337601 - DNA, 20 bp, Artificial Sequence
  Description of Artificial Sequence: Synthetic oligonucleotide
  Target: LAMA2; (+) strand; PAM type: YTN; PAM sequence: TTT
ttaaatcacatccaaaatga

SEQ ID NO: 337602 - DNA, 20 bp, Artificial Sequence
  Description of Artificial Sequence: Synthetic oligonucleotide
  Target: LAMA2; (+) strand; PAM type: YTN; PAM sequence: TTT
taaatcacatccaaaatgac

SEQ ID NO: 337603 - DNA, 20 bp, Artificial Sequence
  Description of Artificial Sequence: Synthetic oligonucleotide
  Target: LAMA2; (+) strand; PAM type: YTN; PAM sequence: TTT
aaatcacatccaaaatgaca

SEQ ID NO: 337604 - DNA, 20 bp, Artificial Sequence
  Description of Artificial Sequence: Synthetic oligonucleotide
  Target: LAMA2; (+) strand; PAM type: YTN; PAM sequence: TTA
aatcacatccaaaatgacat

SEQ ID NO: 337605 - DNA, 20 bp, Artificial Sequence
  Description of Artificial Sequence: Synthetic oligonucleotide
  Target: LAMA2; (+) strand; PAM type: YTN; PAM sequence: CTT
gcagccgtctcattttttcc

SEQ ID NO: 337606 - DNA, 20 bp, Artificial Sequence
  Description of Artificial Sequence: Synthetic oligonucleotide
  Target: LAMA2; (+) strand; PAM type: YTN; PAM sequence: TTG
cagccgtctcattttttcct

SEQ ID NO: 337607 - DNA, 20 bp, Artificial Sequence
  Description of Artificial Sequence: Synthetic oligonucleotide
  Target: LAMA2; (+) strand; PAM type: YTN; PAM sequence: CTC
attttttccttttatttaca

SEQ ID NO: 337608 - DNA, 20 bp, Artificial Sequence
  Description of Artificial Sequence: Synthetic oligonucleotide
  Target: LAMA2; (+) strand; PAM type: YTN; PAM sequence: TTT
tttccttttatttacactct

SEQ ID NO: 337609 - DNA, 20 bp, Artificial Sequence
  Description of Artificial Sequence: Synthetic oligonucleotide
  Target: LAMA2; (+) strand; PAM type: YTN; PAM sequence: TTT
ttccttttatttacactctt

SEQ ID NO: 337610 - DNA, 20 bp, Artificial Sequence
  Description of Artificial Sequence: Synthetic oligonucleotide
  Target: LAMA2; (+) strand; PAM type: YTN; PAM sequence: TTT
tccttttatttacactcttc

SEQ ID NO: 337611 - DNA, 20 bp, Artificial Sequence
  Description of Artificial Sequence: Synthetic oligonucleotide
  Target: LAMA2; (+) strand; PAM type: YTN; PAM sequence: TTT
ccttttatttacactcttca

SEQ ID NO: 337612 - DNA, 20 bp, Artificial Sequence
  Description of Artificial Sequence: Synthetic oligonucleotide
  Target: LAMA2; (+) strand; PAM type: YTN; PAM sequence: TTC
cttttatttacactcttcac

SEQ ID NO: 337613 - DNA, 20 bp, Artificial Sequence
  Description of Artificial Sequence: Synthetic oligonucleotide
  Target: LAMA2; (+) strand; PAM type: YTN; PAM sequence: CTT
ttatttacactcttcacact

SEQ ID NO: 337614 - DNA, 20 bp, Artificial Sequence
  Description of Artificial Sequence: Synthetic oligonucleotide
  Target: LAMA2; (+) strand; PAM type: YTN; PAM sequence: TTT
tatttacactcttcacactt

SEQ ID NO: 337615 - DNA, 20 bp, Artificial Sequence
  Description of Artificial Sequence: Synthetic oligonucleotide
  Target: LAMA2; (+) strand; PAM type: YTN; PAM sequence: TTT
atttacactcttcacacttc

SEQ ID NO: 337616 - DNA, 20 bp, Artificial Sequence
  Description of Artificial Sequence: Synthetic oligonucleotide
  Target: LAMA2; (+) strand; PAM type: YTN; PAM sequence: TTA
tttacactcttcacacttca

SEQ ID NO: 337617 - DNA, 20 bp, Artificial Sequence
  Description of Artificial Sequence: Synthetic oligonucleotide
  Target: LAMA2; (+) strand; PAM type: YTN; PAM sequence: TTT
acactcttcacacttcattg

SEQ ID NO: 337618 - DNA, 20 bp, Artificial Sequence
  Description of Artificial Sequence: Synthetic oligonucleotide
  Target: LAMA2; (+) strand; PAM type: YTN; PAM sequence: TTA
cactcttcacacttcattgg

SEQ ID NO: 337619 - DNA, 20 bp, Artificial Sequence
  Description of Artificial Sequence: Synthetic oligonucleotide
  Target: LAMA2; (+) strand; PAM type: YTN; PAM sequence: CTC
ttcacacttcattggcaatt

SEQ ID NO: 337620 - DNA, 20 bp, Artificial Sequence
  Description of Artificial Sequence: Synthetic oligonucleotide
  Target: LAMA2; (+) strand; PAM type: YTN; PAM sequence: CTT
cacacttcattggcaattga

SEQ ID NO: 337621 - DNA, 20 bp, Artificial Sequence
  Description of Artificial Sequence: Synthetic oligonucleotide
  Target: LAMA2; (+) strand; PAM type: YTN; PAM sequence: TTC
acacttcattggcaattgag

SEQ ID NO: 337622 - DNA, 20 bp, Artificial Sequence
  Description of Artificial Sequence: Synthetic oligonucleotide
  Target: LAMA2; (+) strand; PAM type: YTN; PAM sequence: CTT
cattggcaattgaggtcacc

SEQ ID NO: 337623 - DNA, 20 bp, Artificial Sequence
  Description of Artificial Sequence: Synthetic oligonucleotide
  Target: LAMA2; (+) strand; PAM type: YTN; PAM sequence: TTC
attggcaattgaggtcacca

SEQ ID NO: 337624 - DNA, 20 bp, Artificial Sequence
  Description of Artificial Sequence: Synthetic oligonucleotide
  Target: LAMA2; (+) strand; PAM type: YTN; PAM sequence: TTG
gcaattgaggtcaccacttt

SEQ ID NO: 337625 - DNA, 20 bp, Artificial Sequence
  Description of Artificial Sequence: Synthetic oligonucleotide
  Target: LAMA2; (+) strand; PAM type: YTN; PAM sequence: TTG
aggtcaccactttaaaattt

SEQ ID NO: 337626 - DNA, 20 bp, Artificial Sequence
  Description of Artificial Sequence: Synthetic oligonucleotide
  Target: LAMA2; (+) strand; PAM type: YTN; PAM sequence: CTT
taaaatttagggtgaaggct

SEQ ID NO: 337627 - DNA, 20 bp, Artificial Sequence
  Description of Artificial Sequence: Synthetic oligonucleotide
  Target: LAMA2; (+) strand; PAM type: YTN; PAM sequence: TTT
aaaatttagggtgaaggcta

SEQ ID NO: 337628 - DNA, 20 bp, Artificial Sequence
  Description of Artificial Sequence: Synthetic oligonucleotide
  Target: LAMA2; (+) strand; PAM type: YTN; PAM sequence: TTA
aaatttagggtgaaggctaa

SEQ ID NO: 337629 - DNA, 20 bp, Artificial Sequence
  Description of Artificial Sequence: Synthetic oligonucleotide
  Target: LAMA2; (+) strand; PAM type: YTN; PAM sequence: TTT
agggtgaaggctaaagacca

SEQ ID NO: 337630 - DNA, 20 bp, Artificial Sequence
  Description of Artificial Sequence: Synthetic oligonucleotide
  Target: LAMA2; (+) strand; PAM type: YTN; PAM sequence: TTA
gggtgaaggctaaagaccag

SEQ ID NO: 337631 - DNA, 20 bp, Artificial Sequence
  Description of Artificial Sequence: Synthetic oligonucleotide
  Target: LAMA2; (+) strand; PAM type: YTN; PAM sequence: CTA
aagaccagcttgacaaactg

SEQ ID NO: 337632 - DNA, 20 bp, Artificial Sequence
  Description of Artificial Sequence: Synthetic oligonucleotide
  Target: LAMA2; (+) strand; PAM type: YTN; PAM sequence: CTT
gacaaactgttggcggaatg

SEQ ID NO: 337633 - DNA, 20 bp, Artificial Sequence
  Description of Artificial Sequence: Synthetic oligonucleotide
  Target: LAMA2; (+) strand; PAM type: YTN; PAM sequence: TTG
acaaactgttggcggaatgc

SEQ ID NO: 337634 - DNA, 20 bp, Artificial Sequence
  Description of Artificial Sequence: Synthetic oligonucleotide
  Target: LAMA2; (+) strand; PAM type: YTN; PAM sequence: CTG
ttggcggaatgctctctttt

SEQ ID NO: 337635 - DNA, 20 bp, Artificial Sequence
  Description of Artificial Sequence: Synthetic oligonucleotide
  Target: LAMA2; (+) strand; PAM type: YTN; PAM sequence: TTG
gcggaatgctctcttttgca

SEQ ID NO: 337636 - DNA, 20 bp, Artificial Sequence
  Description of Artificial Sequence: Synthetic oligonucleotide
  Target: LAMA2; (+) strand; PAM type: YTN; PAM sequence: CTC
tcttttgcaagtcttcgttt

SEQ ID NO: 337637 - DNA, 20 bp, Artificial Sequence
  Description of Artificial Sequence: Synthetic oligonucleotide
  Target: LAMA2; (+) strand; PAM type: YTN; PAM sequence: CTC
ttttgcaagtcttcgttttg

SEQ ID NO: 337638 - DNA, 20 bp, Artificial Sequence
  Description of Artificial Sequence: Synthetic oligonucleotide
  Target: LAMA2; (+) strand; PAM type: YTN; PAM sequence: CTT
ttgcaagtcttcgttttgaa

SEQ ID NO: 337639 - DNA, 20 bp, Artificial Sequence
  Description of Artificial Sequence: Synthetic oligonucleotide
  Target: LAMA2; (+) strand; PAM type: YTN; PAM sequence: TTT
tgcaagtcttcgttttgaag

SEQ ID NO: 337640 - DNA, 20 bp, Artificial Sequence
  Description of Artificial Sequence: Synthetic oligonucleotide
  Target: LAMA2; (+) strand; PAM type: YTN; PAM sequence: TTT
gcaagtcttcgttttgaaga

SEQ ID NO: 337641 - DNA, 20 bp, Artificial Sequence
  Description of Artificial Sequence: Synthetic oligonucleotide
  Target: LAMA2; (+) strand; PAM type: YTN; PAM sequence: TTG
caagtcttcgttttgaagaa

SEQ ID NO: 337642 - DNA, 20 bp, Artificial Sequence
  Description of Artificial Sequence: Synthetic oligonucleotide
  Target: LAMA2; (+) strand; PAM type: YTN; PAM sequence: CTT
cgttttgaagaaagaatgtg

SEQ ID NO: 337643 - DNA, 20 bp, Artificial Sequence
  Description of Artificial Sequence: Synthetic oligonucleotide
  Target: LAMA2; (+) strand; PAM type: YTN; PAM sequence: TTC
gttttgaagaaagaatgtgt

SEQ ID NO: 337644 - DNA, 20 bp, Artificial Sequence
  Description of Artificial Sequence: Synthetic oligonucleotide
  Target: LAMA2; (+) strand; PAM type: YTN; PAM sequence: TTT
tgaagaaagaatgtgtgatt

SEQ ID NO: 337645 - DNA, 20 bp, Artificial Sequence
  Description of Artificial Sequence: Synthetic oligonucleotide
  Target: LAMA2; (+) strand; PAM type: YTN; PAM sequence: TTT
gaagaaagaatgtgtgattt

SEQ ID NO: 337646 - DNA, 20 bp, Artificial Sequence
  Description of Artificial Sequence: Synthetic oligonucleotide
  Target: LAMA2; (+) strand; PAM type: YTN; PAM sequence: TTG
aagaaagaatgtgtgattta

SEQ ID NO: 337647 - DNA, 20 bp, Artificial Sequence
  Description of Artificial Sequence: Synthetic oligonucleotide
  Target: LAMA2; (+) strand; PAM type: YTN; PAM sequence: TTT
agaaatatttaagattgtca

SEQ ID NO: 337648 - DNA, 20 bp, Artificial Sequence
  Description of Artificial Sequence: Synthetic oligonucleotide
  Target: LAMA2; (+) strand; PAM type: YTN; PAM sequence: TTA
gaaatatttaagattgtcat

SEQ ID NO: 337649 - DNA, 20 bp, Artificial Sequence
  Description of Artificial Sequence: Synthetic oligonucleotide
  Target: LAMA2; (+) strand; PAM type: YTN; PAM sequence: TTT
aagattgtcattttggtaga

SEQ ID NO: 337650 - DNA, 20 bp, Artificial Sequence
  Description of Artificial Sequence: Synthetic oligonucleotide
  Target: LAMA2; (+) strand; PAM type: YTN; PAM sequence: TTA
agattgtcattttggtagaa

SEQ ID NO: 337651 - DNA, 20 bp, Artificial Sequence
  Description of Artificial Sequence: Synthetic oligonucleotide
  Target: LAMA2; (+) strand; PAM type: YTN; PAM sequence: TTG
tcattttggtagaacttctc

SEQ ID NO: 337652 - DNA, 20 bp, Artificial Sequence
  Description of Artificial Sequence: Synthetic oligonucleotide
  Target: LAMA2; (+) strand; PAM type: YTN; PAM sequence: TTT
tggtagaacttctcatctat

SEQ ID NO: 337653 - DNA, 20 bp, Artificial Sequence
  Description of Artificial Sequence: Synthetic oligonucleotide
  Target: LAMA2; (+) strand; PAM type: YTN; PAM sequence: TTT
ggtagaacttctcatctatc

SEQ ID NO: 337654 - DNA, 20 bp, Artificial Sequence
  Description of Artificial Sequence: Synthetic oligonucleotide
  Target: LAMA2; (+) strand; PAM type: YTN; PAM sequence: TTG
gtagaacttctcatctatca

SEQ ID NO: 337655 - DNA, 20 bp, Artificial Sequence
  Description of Artificial Sequence: Synthetic oligonucleotide
  Target: LAMA2; (+) strand; PAM type: YTN; PAM sequence: CTT
ctcatctatcaatgcagggt

SEQ ID NO: 337656 - DNA, 20 bp, Artificial Sequence
  Description of Artificial Sequence: Synthetic oligonucleotide
  Target: LAMA2; (+) strand; PAM type: YTN; PAM sequence: TTC
tcatctatcaatgcagggtg

SEQ ID NO: 337657 - DNA, 20 bp, Artificial Sequence
  Description of Artificial Sequence: Synthetic oligonucleotide
  Target: LAMA2; (+) strand; PAM type: YTN; PAM sequence: CTC
atctatcaatgcagggtgca

SEQ ID NO: 337658 - DNA, 20 bp, Artificial Sequence
  Description of Artificial Sequence: Synthetic oligonucleotide
  Target: LAMA2; (+) strand; PAM type: YTN; PAM sequence: CTA
tcaatgcagggtgcagcatc

SEQ ID NO: 337659 - DNA, 20 bp, Artificial Sequence
  Description of Artificial Sequence: Synthetic oligonucleotide
  Target: LAMA2; (+) strand; PAM type: YTN; PAM sequence: CTA
tttattaatgttgtgttggt

SEQ ID NO: 337660 - DNA, 20 bp, Artificial Sequence
  Description of Artificial Sequence: Synthetic oligonucleotide
  Target: LAMA2; (+) strand; PAM type: YTN; PAM sequence: TTT
attaatgttgtgttggttag

SEQ ID NO: 337661 - DNA, 20 bp, Artificial Sequence
  Description of Artificial Sequence: Synthetic oligonucleotide
  Target: LAMA2; (+) strand; PAM type: YTN; PAM sequence: TTA
ttaatgttgtgttggttaga

SEQ ID NO: 337662 - DNA, 20 bp, Artificial Sequence
  Description of Artificial Sequence: Synthetic oligonucleotide
  Target: LAMA2; (+) strand; PAM type: YTN; PAM sequence: TTA
atgttgtgttggttagatat

SEQ ID NO: 337663 - DNA, 20 bp, Artificial Sequence
  Description of Artificial Sequence: Synthetic oligonucleotide
  Target: LAMA2; (+) strand; PAM type: YTN; PAM sequence: TTG
tgttggttagatatgttcac

SEQ ID NO: 337664 - DNA, 20 bp, Artificial Sequence
  Description of Artificial Sequence: Synthetic oligonucleotide
  Target: LAMA2; (+) strand; PAM type: YTN; PAM sequence: TTG
gttagatatgttcacccatt

SEQ ID NO: 337665 - DNA, 20 bp, Artificial Sequence
  Description of Artificial Sequence: Synthetic oligonucleotide
  Target: LAMA2; (+) strand; PAM type: YTN; PAM sequence: TTA
gatatgttcacccattaggt

SEQ ID NO: 337666 - DNA, 20 bp, Artificial Sequence
  Description of Artificial Sequence: Synthetic oligonucleotide
  Target: LAMA2; (+) strand; PAM type: YTN; PAM sequence: TTC
acccattaggtacgtgcaga

SEQ ID NO: 337667 - DNA, 20 bp, Artificial Sequence
  Description of Artificial Sequence: Synthetic oligonucleotide
  Target: LAMA2; (+) strand; PAM type: YTN; PAM sequence: TTA
ggtacgtgcagaggtacctg

SEQ ID NO: 337668 - DNA, 20 bp, Artificial Sequence
  Description of Artificial Sequence: Synthetic oligonucleotide
  Target: LAMA2; (+) strand; PAM type: YTN; PAM sequence: CTG
aaaccatctgagaggtggta

SEQ ID NO: 337669 - DNA, 20 bp, Artificial Sequence
  Description of Artificial Sequence: Synthetic oligonucleotide
  Target: LAMA2; (+) strand; PAM type: YTN; PAM sequence: CTG
agaggtggtatcccattttt

SEQ ID NO: 337670 - DNA, 20 bp, Artificial Sequence
  Description of Artificial Sequence: Synthetic oligonucleotide
  Target: LAMA2; (+) strand; PAM type: YTN; PAM sequence: TTT
ttcataatctattcaattga

SEQ ID NO: 337671 - DNA, 20 bp, Artificial Sequence
  Description of Artificial Sequence: Synthetic oligonucleotide
  Target: LAMA2; (+) strand; PAM type: YTN; PAM sequence: TTT
tcataatctattcaattgaa

SEQ ID NO: 337672 - DNA, 20 bp, Artificial Sequence
  Description of Artificial Sequence: Synthetic oligonucleotide
  Target: LAMA2; (+) strand; PAM type: YTN; PAM sequence: TTT
cataatctattcaattgaac

SEQ ID NO: 337673 - DNA, 20 bp, Artificial Sequence
  Description of Artificial Sequence: Synthetic oligonucleotide
  Target: LAMA2; (+) strand; PAM type: YTN; PAM sequence: TTC
ataatctattcaattgaact

SEQ ID NO: 337674 - DNA, 20 bp, Artificial Sequence
  Description of Artificial Sequence: Synthetic oligonucleotide
  Target: LAMA2; (+) strand; PAM type: YTN; PAM sequence: CTA
ttcaattgaactttaaaaat

SEQ ID NO: 337675 - DNA, 20 bp, Artificial Sequence
  Description of Artificial Sequence: Synthetic oligonucleotide
  Target: LAMA2; (+) strand; PAM type: YTN; PAM sequence: TTC
aattgaactttaaaaataac

SEQ ID NO: 337676 - DNA, 20 bp, Artificial Sequence
  Description of Artificial Sequence: Synthetic oligonucleotide
  Target: LAMA2; (+) strand; PAM type: YTN; PAM sequence: TTG
aactttaaaaataactgagc

SEQ ID NO: 337677 - DNA, 20 bp, Artificial Sequence
  Description of Artificial Sequence: Synthetic oligonucleotide
  Target: LAMA2; (+) strand; PAM type: YTN; PAM sequence: CTT
taaaaataactgagcatctt

SEQ ID NO: 337678 - DNA, 20 bp, Artificial Sequence
  Description of Artificial Sequence: Synthetic oligonucleotide
  Target: LAMA2; (+) strand; PAM type: YTN; PAM sequence: TTT
aaaaataactgagcatcttt

SEQ ID NO: 337679 - DNA, 20 bp, Artificial Sequence
  Description of Artificial Sequence: Synthetic oligonucleotide
  Target: LAMA2; (+) strand; PAM type: YTN; PAM sequence: TTA
aaaataactgagcatctttt

SEQ ID NO: 337680 - DNA, 20 bp, Artificial Sequence
  Description of Artificial Sequence: Synthetic oligonucleotide
  Target: LAMA2; (+) strand; PAM type: YTN; PAM sequence: CTG
agcatcttttatatacaaga

SEQ ID NO: 337681 - DNA, 20 bp, Artificial Sequence
  Description of Artificial Sequence: Synthetic oligonucleotide
  Target: LAMA2; (+) strand; PAM type: YTN; PAM sequence: CTT
ttatatacaagacattaaca

SEQ ID NO: 337682 - DNA, 20 bp, Artificial Sequence
  Description of Artificial Sequence: Synthetic oligonucleotide
  Target: LAMA2; (+) strand; PAM type: YTN; PAM sequence: TTT
tatatacaagacattaacag

SEQ ID NO: 337683 - DNA, 20 bp, Artificial Sequence
  Description of Artificial Sequence: Synthetic oligonucleotide
  Target: LAMA2; (+) strand; PAM type: YTN; PAM sequence: TTT
atatacaagacattaacaga

SEQ ID NO: 337684 - DNA, 20 bp, Artificial Sequence
  Description of Artificial Sequence: Synthetic oligonucleotide
  Target: LAMA2; (+) strand; PAM type: YTN; PAM sequence: TTA
tatacaagacattaacagac

SEQ ID NO: 337685 - DNA, 20 bp, Artificial Sequence
  Description of Artificial Sequence: Synthetic oligonucleotide
  Target: LAMA2; (+) strand; PAM type: YTN; PAM sequence: TTA
acagacatttatattctatg

SEQ ID NO: 337686 - DNA, 20 bp, Artificial Sequence
  Description of Artificial Sequence: Synthetic oligonucleotide
  Target: LAMA2; (+) strand; PAM type: YTN; PAM sequence: TTT
atattctatggtatctactg

SEQ ID NO: 337687 - DNA, 20 bp, Artificial Sequence
  Description of Artificial Sequence: Synthetic oligonucleotide
  Target: LAMA2; (+) strand; PAM type: YTN; PAM sequence: TTA
tattctatggtatctactgc

SEQ ID NO: 337688 - DNA, 20 bp, Artificial Sequence
  Description of Artificial Sequence: Synthetic oligonucleotide
  Target: LAMA2; (+) strand; PAM type: YTN; PAM sequence: TTC
tatggtatctactgctagca

SEQ ID NO: 337689 - DNA, 20 bp, Artificial Sequence
  Description of Artificial Sequence: Synthetic oligonucleotide
  Target: LAMA2; (+) strand; PAM type: YTN; PAM sequence: CTA
tggtatctactgctagcaac

SEQ ID NO: 337690 - DNA, 20 bp, Artificial Sequence
  Description of Artificial Sequence: Synthetic oligonucleotide
  Target: LAMA2; (+) strand; PAM type: YTN; PAM sequence: CTA
ctgctagcaacttataacag

SEQ ID NO: 337691 - DNA, 20 bp, Artificial Sequence
  Description of Artificial Sequence: Synthetic oligonucleotide
  Target: LAMA2; (+) strand; PAM type: YTN; PAM sequence: CTG
ctagcaacttataacagttt

SEQ ID NO: 337692 - DNA, 20 bp, Artificial Sequence
  Description of Artificial Sequence: Synthetic oligonucleotide
  Target: LAMA2; (+) strand; PAM type: YTN; PAM sequence: CTA
gcaacttataacagttttgg

SEQ ID NO: 337693 - DNA, 20 bp, Artificial Sequence
  Description of Artificial Sequence: Synthetic oligonucleotide
  Target: LAMA2; (+) strand; PAM type: YTN; PAM sequence: CTT
ataacagttttggtggtaaa

SEQ ID NO: 337694 - DNA, 20 bp, Artificial Sequence
  Description of Artificial Sequence: Synthetic oligonucleotide
  Target: LAMA2; (+) strand; PAM type: YTN; PAM sequence: TTA
taacagttttggtggtaaaa

SEQ ID NO: 337695 - DNA, 20 bp, Artificial Sequence
  Description of Artificial Sequence: Synthetic oligonucleotide
  Target: LAMA2; (+) strand; PAM type: YTN; PAM sequence: TTT
tggtggtaaaataaaggcaa

SEQ ID NO: 337696 - DNA, 20 bp, Artificial Sequence
  Description of Artificial Sequence: Synthetic oligonucleotide
  Target: LAMA2; (+) strand; PAM type: YTN; PAM sequence: TTT
ggtggtaaaataaaggcaaa

SEQ ID NO: 337697 - DNA, 20 bp, Artificial Sequence
  Description of Artificial Sequence: Synthetic oligonucleotide
  Target: LAMA2; (+) strand; PAM type: YTN; PAM sequence: TTG
gtggtaaaataaaggcaaac

SEQ ID NO: 337698 - DNA, 20 bp, Artificial Sequence
  Description of Artificial Sequence: Synthetic oligonucleotide
  Target: LAMA2; (+) strand; PAM type: YTN; PAM sequence: CTT
gcttcataacaaaacaaaat

SEQ ID NO: 337699 - DNA, 20 bp, Artificial Sequence
  Description of Artificial Sequence: Synthetic oligonucleotide
  Target: LAMA2; (+) strand; PAM type: YTN; PAM sequence: TTG
cttcataacaaaacaaaatt

SEQ ID NO: 337700 - DNA, 20 bp, Artificial Sequence
  Description of Artificial Sequence: Synthetic oligonucleotide
  Target: LAMA2; (+) strand; PAM type: YTN; PAM sequence: CTT
cataacaaaacaaaattaaa

SEQ ID NO: 337701 - DNA, 20 bp, Artificial Sequence
  Description of Artificial Sequence: Synthetic oligonucleotide
  Target: LAMA2; (+) strand; PAM type: YTN; PAM sequence: TTC
ataacaaaacaaaattaaat

SEQ ID NO: 337702 - DNA, 20 bp, Artificial Sequence
  Description of Artificial Sequence: Synthetic oligonucleotide
  Target: LAMA2; (+) strand; PAM type: YTN; PAM sequence: TTA
aattatcaaaaagaaatgct

SEQ ID NO: 337703 - DNA, 20 bp, Artificial Sequence
  Description of Artificial Sequence: Synthetic oligonucleotide
  Target: LAMA2; (+) strand; PAM type: YTN; PAM sequence: TTA
tcaaaaagaaatgctcagtt

SEQ ID NO: 337704 - DNA, 20 bp, Artificial Sequence
  Description of Artificial Sequence: Synthetic oligonucleotide
  Target: LAMA2; (+) strand; PAM type: YTN; PAM sequence: CTC
agttgttaatttaaaatata

SEQ ID NO: 337705 - DNA, 20 bp, Artificial Sequence
  Description of Artificial Sequence: Synthetic oligonucleotide
  Target: LAMA2; (+) strand; PAM type: YTN; PAM sequence: TTG
ttaatttaaaatataaaatg

SEQ ID NO: 337706 - DNA, 20 bp, Artificial Sequence
  Description of Artificial Sequence: Synthetic oligonucleotide
  Target: LAMA2; (+) strand; PAM type: YTN; PAM sequence: TTA
atttaaaatataaaatgaga

SEQ ID NO: 337707 - DNA, 20 bp, Artificial Sequence
  Description of Artificial Sequence: Synthetic oligonucleotide
  Target: LAMA2; (+) strand; PAM type: YTN; PAM sequence: TTT
aaaatataaaatgagacatg

SEQ ID NO: 337708 - DNA, 20 bp, Artificial Sequence
  Description of Artificial Sequence: Synthetic oligonucleotide
  Target: LAMA2; (+) strand; PAM type: YTN; PAM sequence: TTA
aaatataaaatgagacatga

SEQ ID NO: 337709 - DNA, 20 bp, Artificial Sequence
  Description of Artificial Sequence: Synthetic oligonucleotide
  Target: LAMA2; (+) strand; PAM type: YTN; PAM sequence: CTT
aggttagaaattcagatgta

SEQ ID NO: 337710 - DNA, 20 bp, Artificial Sequence
  Description of Artificial Sequence: Synthetic oligonucleotide
  Target: LAMA2; (+) strand; PAM type: YTN; PAM sequence: TTA
ggttagaaattcagatgtag

SEQ ID NO: 337711 - DNA, 20 bp, Artificial Sequence
  Description of Artificial Sequence: Synthetic oligonucleotide
  Target: LAMA2; (+) strand; PAM type: YTN; PAM sequence: TTA
gaaattcagatgtagaaaat

SEQ ID NO: 337712 - DNA, 20 bp, Artificial Sequence
  Description of Artificial Sequence: Synthetic oligonucleotide
  Target: LAMA2; (+) strand; PAM type: YTN; PAM sequence: TTC
agatgtagaaaatatctgta

SEQ ID NO: 337713 - DNA, 20 bp, Artificial Sequence
  Description of Artificial Sequence: Synthetic oligonucleotide
  Target: LAMA2; (+) strand; PAM type: YTN; PAM sequence: CTG
tataaagaagttagttgaaa

SEQ ID NO: 337714 - DNA, 20 bp, Artificial Sequence
  Description of Artificial Sequence: Synthetic oligonucleotide
  Target: LAMA2; (+) strand; PAM type: YTN; PAM sequence: TTA
gttgaaatactcataggcat

SEQ ID NO: 337715 - DNA, 20 bp, Artificial Sequence
  Description of Artificial Sequence: Synthetic oligonucleotide
  Target: LAMA2; (+) strand; PAM type: YTN; PAM sequence: TTG
aaatactcataggcatgaaa

SEQ ID NO: 337716 - DNA, 20 bp, Artificial Sequence
  Description of Artificial Sequence: Synthetic oligonucleotide
  Target: LAMA2; (+) strand; PAM type: YTN; PAM sequence: CTC
ataggcatgaaaggtatttt

SEQ ID NO: 337717 - DNA, 20 bp, Artificial Sequence
  Description of Artificial Sequence: Synthetic oligonucleotide
  Target: LAMA2; (+) strand; PAM type: YTN; PAM sequence: TTT
tgcaaaaagcaaaagtaggc

SEQ ID NO: 337718 - DNA, 20 bp, Artificial Sequence
  Description of Artificial Sequence: Synthetic oligonucleotide
  Target: LAMA2; (+) strand; PAM type: YTN; PAM sequence: TTT
gcaaaaagcaaaagtaggca

SEQ ID NO: 337719 - DNA, 20 bp, Artificial Sequence
  Description of Artificial Sequence: Synthetic oligonucleotide
  Target: LAMA2; (+) strand; PAM type: YTN; PAM sequence: TTG
caaaaagcaaaagtaggcaa

SEQ ID NO: 337720 - DNA, 20 bp, Artificial Sequence
  Description of Artificial Sequence: Synthetic oligonucleotide
  Target: LAMA2; (+) strand; PAM type: YTN; PAM sequence: CTG
gatctatgaagttgctccat

SEQ ID NO: 337721 - DNA, 20 bp, Artificial Sequence
  Description of Artificial Sequence: Synthetic oligonucleotide
  Target: LAMA2; (+) strand; PAM type: YTN; PAM sequence: CTA
tgaagttgctccataatgta

SEQ ID NO: 337722 - DNA, 20 bp, Artificial Sequence
  Description of Artificial Sequence: Synthetic oligonucleotide
  Target: LAMA2; (+) strand; PAM type: YTN; PAM sequence: TTG
ctccataatgtactagtcag

SEQ ID NO: 337723 - DNA, 20 bp, Artificial Sequence
  Description of Artificial Sequence: Synthetic oligonucleotide
  Target: LAMA2; (+) strand; PAM type: YTN; PAM sequence: CTC
cataatgtactagtcaggtg

SEQ ID NO: 337724 - DNA, 20 bp, Artificial Sequence
  Description of Artificial Sequence: Synthetic oligonucleotide
  Target: LAMA2; (+) strand; PAM type: YTN; PAM sequence: CTA
gtcaggtgaagtagcacaaa

SEQ ID NO: 337725 - DNA, 20 bp, Artificial Sequence
  Description of Artificial Sequence: Synthetic oligonucleotide
  Target: LAMA2; (+) strand; PAM type: YTN; PAM sequence: TTA
cctagtgtatcagttttctt

SEQ ID NO: 337726 - DNA, 20 bp, Artificial Sequence
  Description of Artificial Sequence: Synthetic oligonucleotide
  Target: LAMA2; (+) strand; PAM type: YTN; PAM sequence: CTA
gtgtatcagttttcttttgt

SEQ ID NO: 337727 - DNA, 20 bp, Artificial Sequence
  Description of Artificial Sequence: Synthetic oligonucleotide
  Target: LAMA2; (+) strand; PAM type: YTN; PAM sequence: TTT
tcttttgttaacacaacata

SEQ ID NO: 337728 - DNA, 20 bp, Artificial Sequence
  Description of Artificial Sequence: Synthetic oligonucleotide
  Target: LAMA2; (+) strand; PAM type: YTN; PAM sequence: TTT
cttttgttaacacaacatat

SEQ ID NO: 337729 - DNA, 20 bp, Artificial Sequence
  Description of Artificial Sequence: Synthetic oligonucleotide
  Target: LAMA2; (+) strand; PAM type: YTN; PAM sequence: TTC
ttttgttaacacaacatatt

SEQ ID NO: 337730 - DNA, 20 bp, Artificial Sequence
  Description of Artificial Sequence: Synthetic oligonucleotide
  Target: LAMA2; (+) strand; PAM type: YTN; PAM sequence: CTT
ttgttaacacaacatattac

SEQ ID NO: 337731 - DNA, 20 bp, Artificial Sequence
  Description of Artificial Sequence: Synthetic oligonucleotide
  Target: LAMA2; (+) strand; PAM type: YTN; PAM sequence: TTT
tgttaacacaacatattacc

SEQ ID NO: 337732 - DNA, 20 bp, Artificial Sequence
  Description of Artificial Sequence: Synthetic oligonucleotide
  Target: LAMA2; (+) strand; PAM type: YTN; PAM sequence: TTT
gttaacacaacatattacca

SEQ ID NO: 337733 - DNA, 20 bp, Artificial Sequence
  Description of Artificial Sequence: Synthetic oligonucleotide
  Target: LAMA2; (+) strand; PAM type: YTN; PAM sequence: TTG
ttaacacaacatattaccac

SEQ ID NO: 337734 - DNA, 20 bp, Artificial Sequence
  Description of Artificial Sequence: Synthetic oligonucleotide
  Target: LAMA2; (+) strand; PAM type: YTN; PAM sequence: TTA
acacaacatattaccacaaa

SEQ ID NO: 337735 - DNA, 20 bp, Artificial Sequence
  Description of Artificial Sequence: Synthetic oligonucleotide
  Target: LAMA2; (+) strand; PAM type: YTN; PAM sequence: TTA
ccacaaacttaatggcttaa

SEQ ID NO: 337736 - DNA, 20 bp, Artificial Sequence
  Description of Artificial Sequence: Synthetic oligonucleotide
  Target: LAMA2; (+) strand; PAM type: YTN; PAM sequence: CTT
aatggcttaaaacctcacaa

SEQ ID NO: 337737 - DNA, 20 bp, Artificial Sequence
  Description of Artificial Sequence: Synthetic oligonucleotide
  Target: LAMA2; (+) strand; PAM type: YTN; PAM sequence: TTA
atggcttaaaacctcacaaa

SEQ ID NO: 337738 - DNA, 20 bp, Artificial Sequence
  Description of Artificial Sequence: Synthetic oligonucleotide
  Target: LAMA2; (+) strand; PAM type: YTN; PAM sequence: CTT
aaaacctcacaaatttatct

SEQ ID NO: 337739 - DNA, 20 bp, Artificial Sequence
  Description of Artificial Sequence: Synthetic oligonucleotide
  Target: LAMA2; (+) strand; PAM type: YTN; PAM sequence: TTA
aaacctcacaaatttatctc

SEQ ID NO: 337740 - DNA, 20 bp, Artificial Sequence
  Description of Artificial Sequence: Synthetic oligonucleotide
  Target: LAMA2; (+) strand; PAM type: YTN; PAM sequence: CTC
acaaatttatctcacagttt

SEQ ID NO: 337741 - DNA, 20 bp, Artificial Sequence
  Description of Artificial Sequence: Synthetic oligonucleotide
  Target: LAMA2; (+) strand; PAM type: YTN; PAM sequence: TTT
atctcacagtttaataggtt

SEQ ID NO: 337742 - DNA, 20 bp, Artificial Sequence
  Description of Artificial Sequence: Synthetic oligonucleotide
  Target: LAMA2; (+) strand; PAM type: YTN; PAM sequence: TTA
tctcacagtttaataggtta

SEQ ID NO: 337743 - DNA, 20 bp, Artificial Sequence
  Description of Artificial Sequence: Synthetic oligonucleotide
  Target: LAMA2; (+) strand; PAM type: YTN; PAM sequence: CTC
acagtttaataggttagtag

SEQ ID NO: 337744 - DNA, 20 bp, Artificial Sequence
  Description of Artificial Sequence: Synthetic oligonucleotide
  Target: LAMA2; (+) strand; PAM type: YTN; PAM sequence: TTT
aataggttagtagtctgaca

SEQ ID NO: 337745 - DNA, 20 bp, Artificial Sequence
  Description of Artificial Sequence: Synthetic oligonucleotide
  Target: LAMA2; (+) strand; PAM type: YTN; PAM sequence: TTA
ataggttagtagtctgacac

SEQ ID NO: 337746 - DNA, 20 bp, Artificial Sequence
  Description of Artificial Sequence: Synthetic oligonucleotide
  Target: LAMA2; (+) strand; PAM type: YTN; PAM sequence: TTA
gtagtctgacacaagtctca

SEQ ID NO: 337747 - DNA, 20 bp, Artificial Sequence
  Description of Artificial Sequence: Synthetic oligonucleotide
  Target: LAMA2; (+) strand; PAM type: YTN; PAM sequence: CTG
acacaagtctcactgagcta

SEQ ID NO: 337748 - DNA, 20 bp, Artificial Sequence
  Description of Artificial Sequence: Synthetic oligonucleotide
  Target: LAMA2; (+) strand; PAM type: YTN; PAM sequence: CTC
actgagctaaagtccaggtg

SEQ ID NO: 337749 - DNA, 20 bp, Artificial Sequence
  Description of Artificial Sequence: Synthetic oligonucleotide
  Target: LAMA2; (+) strand; PAM type: YTN; PAM sequence: CTG
agctaaagtccaggtgtggg

SEQ ID NO: 337750 - DNA, 20 bp, Artificial Sequence
  Description of Artificial Sequence: Synthetic oligonucleotide
  Target: LAMA2; (+) strand; PAM type: YTN; PAM sequence: CTA
aagtccaggtgtgggtagta

SEQ ID NO: 337751 - DNA, 20 bp, Artificial Sequence
  Description of Artificial Sequence: Synthetic oligonucleotide
  Target: LAMA2; (+) strand; PAM type: YTN; PAM sequence: TTG
catttctttctggaggctct

SEQ ID NO: 337752 - DNA, 20 bp, Artificial Sequence
  Description of Artificial Sequence: Synthetic oligonucleotide
  Target: LAMA2; (+) strand; PAM type: YTN; PAM sequence: TTT
ctttctggaggctctaaggt

SEQ ID NO: 337753 - DNA, 20 bp, Artificial Sequence
  Description of Artificial Sequence: Synthetic oligonucleotide
  Target: LAMA2; (+) strand; PAM type: YTN; PAM sequence: TTC
tttctggaggctctaaggta

SEQ ID NO: 337754 - DNA, 20 bp, Artificial Sequence
  Description of Artificial Sequence: Synthetic oligonucleotide
  Target: LAMA2; (+) strand; PAM type: YTN; PAM sequence: CTT
tctggaggctctaaggtaga

SEQ ID NO: 337755 - DNA, 20 bp, Artificial Sequence
  Description of Artificial Sequence: Synthetic oligonucleotide
  Target: LAMA2; (+) strand; PAM type: YTN; PAM sequence: TTT
ctggaggctctaaggtagaa

SEQ ID NO: 337756 - DNA, 20 bp, Artificial Sequence
  Description of Artificial Sequence: Synthetic oligonucleotide
  Target: LAMA2; (+) strand; PAM type: YTN; PAM sequence: TTC
tggaggctctaaggtagaat

SEQ ID NO: 337757 - DNA, 20 bp, Artificial Sequence
  Description of Artificial Sequence: Synthetic oligonucleotide
  Target: LAMA2; (+) strand; PAM type: YTN; PAM sequence: CTG
gaggctctaaggtagaattc

SEQ ID NO: 337758 - DNA, 20 bp, Artificial Sequence
  Description of Artificial Sequence: Synthetic oligonucleotide
  Target: LAMA2; (+) strand; PAM type: YTN; PAM sequence: CTC
taaggtagaattcattttct

SEQ ID NO: 337759 - DNA, 20 bp, Artificial Sequence
  Description of Artificial Sequence: Synthetic oligonucleotide
  Target: LAMA2; (+) strand; PAM type: YTN; PAM sequence: CTA
aggtagaattcattttctaa

SEQ ID NO: 337760 - DNA, 20 bp, Artificial Sequence
  Description of Artificial Sequence: Synthetic oligonucleotide
  Target: LAMA2; (+) strand; PAM type: YTN; PAM sequence: TTC
attttctaaaattcattcat

SEQ ID NO: 337761 - DNA, 20 bp, Artificial Sequence
  Description of Artificial Sequence: Synthetic oligonucleotide
  Target: LAMA2; (+) strand; PAM type: YTN; PAM sequence: TTT
tctaaaattcattcatttag

SEQ ID NO: 337762 - DNA, 20 bp, Artificial Sequence
  Description of Artificial Sequence: Synthetic oligonucleotide
  Target: LAMA2; (+) strand; PAM type: YTN; PAM sequence: TTT
ctaaaattcattcatttagg

SEQ ID NO: 337763 - DNA, 20 bp, Artificial Sequence
  Description of Artificial Sequence: Synthetic oligonucleotide
  Target: LAMA2; (+) strand; PAM type: YTN; PAM sequence: TTC
taaaattcattcatttagga

SEQ ID NO: 337764 - DNA, 20 bp, Artificial Sequence
  Description of Artificial Sequence: Synthetic oligonucleotide
  Target: LAMA2; (+) strand; PAM type: YTN; PAM sequence: CTA
aaattcattcatttaggata

SEQ ID NO: 337765 - DNA, 20 bp, Artificial Sequence
  Description of Artificial Sequence: Synthetic oligonucleotide
  Target: LAMA2; (+) strand; PAM type: YTN; PAM sequence: TTC
attcatttaggatagaagct

SEQ ID NO: 337766 - DNA, 20 bp, Artificial Sequence
  Description of Artificial Sequence: Synthetic oligonucleotide
  Target: LAMA2; (+) strand; PAM type: YTN; PAM sequence: TTC
atttaggatagaagctgaaa

SEQ ID NO: 337767 - DNA, 20 bp, Artificial Sequence
  Description of Artificial Sequence: Synthetic oligonucleotide
  Target: LAMA2; (+) strand; PAM type: YTN; PAM sequence: TTT
aggatagaagctgaaagaat

SEQ ID NO: 337768 - DNA, 20 bp, Artificial Sequence
  Description of Artificial Sequence: Synthetic oligonucleotide
  Target: LAMA2; (+) strand; PAM type: YTN; PAM sequence: TTA
ggatagaagctgaaagaatc

SEQ ID NO: 337769 - DNA, 20 bp, Artificial Sequence
  Description of Artificial Sequence: Synthetic oligonucleotide
  Target: LAMA2; (+) strand; PAM type: YTN; PAM sequence: CTG
aaagaatcagtttctacagg

SEQ ID NO: 337770 - DNA, 20 bp, Artificial Sequence
  Description of Artificial Sequence: Synthetic oligonucleotide
  Target: LAMA2; (+) strand; PAM type: YTN; PAM sequence: TTT
ctacaggctacctgcatcct

SEQ ID NO: 337771 - DNA, 20 bp, Artificial Sequence
  Description of Artificial Sequence: Synthetic oligonucleotide
  Target: LAMA2; (+) strand; PAM type: YTN; PAM sequence: TTC
tacaggctacctgcatcctt

SEQ ID NO: 337772 - DNA, 20 bp, Artificial Sequence
  Description of Artificial Sequence: Synthetic oligonucleotide
  Target: LAMA2; (+) strand; PAM type: YTN; PAM sequence: CTA
caggctacctgcatcctttg

SEQ ID NO: 337773 - DNA, 20 bp, Artificial Sequence
  Description of Artificial Sequence: Synthetic oligonucleotide
  Target: LAMA2; (+) strand; PAM type: YTN; PAM sequence: CTA
cctgcatcctttggctcatg

SEQ ID NO: 337774 - DNA, 20 bp, Artificial Sequence
  Description of Artificial Sequence: Synthetic oligonucleotide
  Target: LAMA2; (+) strand; PAM type: YTN; PAM sequence: CTG
catcctttggctcatgaccc

SEQ ID NO: 337775 - DNA, 20 bp, Artificial Sequence
  Description of Artificial Sequence: Synthetic oligonucleotide
  Target: LAMA2; (+) strand; PAM type: YTN; PAM sequence: CTT
tggctcatgaccccttcctc

SEQ ID NO: 337776 - DNA, 20 bp, Artificial Sequence
  Description of Artificial Sequence: Synthetic oligonucleotide
  Target: LAMA2; (+) strand; PAM type: YTN; PAM sequence: TTT
ggctcatgaccccttcctcc

SEQ ID NO: 337777 - DNA, 20 bp, Artificial Sequence
  Description of Artificial Sequence: Synthetic oligonucleotide
  Target: LAMA2; (+) strand; PAM type: YTN; PAM sequence: TTG
gctcatgaccccttcctcca

SEQ ID NO: 337778 - DNA, 20 bp, Artificial Sequence
  Description of Artificial Sequence: Synthetic oligonucleotide
  Target: LAMA2; (+) strand; PAM type: YTN; PAM sequence: CTC
atgaccccttcctccatctt

SEQ ID NO: 337779 - DNA, 20 bp, Artificial Sequence
  Description of Artificial Sequence: Synthetic oligonucleotide
  Target: LAMA2; (+) strand; PAM type: YTN; PAM sequence: CTT
cctccatcttcaaagccagg

SEQ ID NO: 337780 - DNA, 20 bp, Artificial Sequence
  Description of Artificial Sequence: Synthetic oligonucleotide
  Target: LAMA2; (+) strand; PAM type: YTN; PAM sequence: TTC
ctccatcttcaaagccagga

SEQ ID NO: 337781 - DNA, 20 bp, Artificial Sequence
  Description of Artificial Sequence: Synthetic oligonucleotide
  Target: LAMA2; (+) strand; PAM type: YTN; PAM sequence: CTC
catcttcaaagccaggaaca

SEQ ID NO: 337782 - DNA, 20 bp, Artificial Sequence
  Description of Artificial Sequence: Synthetic oligonucleotide
  Target: LAMA2; (+) strand; PAM type: YTN; PAM sequence: CTT
caaagccaggaacaggttga

SEQ ID NO: 337783 - DNA, 20 bp, Artificial Sequence
  Description of Artificial Sequence: Synthetic oligonucleotide
  Target: LAMA2; (+) strand; PAM type: YTN; PAM sequence: TTC
aaagccaggaacaggttgaa

SEQ ID NO: 337784 - DNA, 20 bp, Artificial Sequence
  Description of Artificial Sequence: Synthetic oligonucleotide
  Target: LAMA2; (+) strand; PAM type: YTN; PAM sequence: TTG
aatccttcgttgtaccaccc

SEQ ID NO: 337785 - DNA, 20 bp, Artificial Sequence
  Description of Artificial Sequence: Synthetic oligonucleotide
  Target: LAMA2; (+) strand; PAM type: YTN; PAM sequence: CTT
cgttgtaccaccctaacctc

SEQ ID NO: 337786 - DNA, 20 bp, Artificial Sequence
  Description of Artificial Sequence: Synthetic oligonucleotide
  Target: LAMA2; (+) strand; PAM type: YTN; PAM sequence: TTC
gttgtaccaccctaacctct

SEQ ID NO: 337787 - DNA, 20 bp, Artificial Sequence
  Description of Artificial Sequence: Synthetic oligonucleotide
  Target: LAMA2; (+) strand; PAM type: YTN; PAM sequence: TTG
taccaccctaacctcttctt

SEQ ID NO: 337788 - DNA, 20 bp, Artificial Sequence
  Description of Artificial Sequence: Synthetic oligonucleotide
  Target: LAMA2; (+) strand; PAM type: YTN; PAM sequence: CTA
acctcttcttttgcctccct

SEQ ID NO: 337789 - DNA, 20 bp, Artificial Sequence
  Description of Artificial Sequence: Synthetic oligonucleotide
  Target: LAMA2; (+) strand; PAM type: YTN; PAM sequence: CTC
ttcttttgcctccctcttat

SEQ ID NO: 337790 - DNA, 20 bp, Artificial Sequence
  Description of Artificial Sequence: Synthetic oligonucleotide
  Target: LAMA2; (+) strand; PAM type: YTN; PAM sequence: CTT
cttttgcctccctcttatac

SEQ ID NO: 337791 - DNA, 20 bp, Artificial Sequence
  Description of Artificial Sequence: Synthetic oligonucleotide
  Target: LAMA2; (+) strand; PAM type: YTN; PAM sequence: TTC
ttttgcctccctcttatact

SEQ ID NO: 337792 - DNA, 20 bp, Artificial Sequence
  Description of Artificial Sequence: Synthetic oligonucleotide
  Target: LAMA2; (+) strand; PAM type: YTN; PAM sequence: CTT
ttgcctccctcttatacttt

SEQ ID NO: 337793 - DNA, 20 bp, Artificial Sequence
  Description of Artificial Sequence: Synthetic oligonucleotide
  Target: LAMA2; (+) strand; PAM type: YTN; PAM sequence: TTT
tgcctccctcttatactttt

SEQ ID NO: 337794 - DNA, 20 bp, Artificial Sequence
  Description of Artificial Sequence: Synthetic oligonucleotide
  Target: LAMA2; (+) strand; PAM type: YTN; PAM sequence: TTT
gcctccctcttatacttttc

SEQ ID NO: 337795 - DNA, 20 bp, Artificial Sequence
  Description of Artificial Sequence: Synthetic oligonucleotide
  Target: LAMA2; (+) strand; PAM type: YTN; PAM sequence: TTG
cctccctcttatacttttca

SEQ ID NO: 337796 - DNA, 20 bp, Artificial Sequence
  Description of Artificial Sequence: Synthetic oligonucleotide
  Target: LAMA2; (+) strand; PAM type: YTN; PAM sequence: CTC
cctcttatacttttcaggac

SEQ ID NO: 337797 - DNA, 20 bp, Artificial Sequence
  Description of Artificial Sequence: Synthetic oligonucleotide
  Target: LAMA2; (+) strand; PAM type: YTN; PAM sequence: CTC
ttatacttttcaggaccctt

SEQ ID NO: 337798 - DNA, 20 bp, Artificial Sequence
  Description of Artificial Sequence: Synthetic oligonucleotide
  Target: LAMA2; (+) strand; PAM type: YTN; PAM sequence: CTT
atacttttcaggacccttat

SEQ ID NO: 337799 - DNA, 20 bp, Artificial Sequence
  Description of Artificial Sequence: Synthetic oligonucleotide
  Target: LAMA2; (+) strand; PAM type: YTN; PAM sequence: TTA
tacttttcaggacccttatg

SEQ ID NO: 337800 - DNA, 20 bp, Artificial Sequence
  Description of Artificial Sequence: Synthetic oligonucleotide
  Target: LAMA2; (+) strand; PAM type: YTN; PAM sequence: CTT
ttcaggacccttatgattac

SEQ ID NO: 337801 - DNA, 20 bp, Artificial Sequence
  Description of Artificial Sequence: Synthetic oligonucleotide
  Target: LAMA2; (+) strand; PAM type: YTN; PAM sequence: TTT
tcaggacccttatgattaca

SEQ ID NO: 337802 - DNA, 20 bp, Artificial Sequence
  Description of Artificial Sequence: Synthetic oligonucleotide
  Target: LAMA2; (+) strand; PAM type: YTN; PAM sequence: TTT
caggacccttatgattacat

SEQ ID NO: 337803 - DNA, 20 bp, Artificial Sequence
  Description of Artificial Sequence: Synthetic oligonucleotide
  Target: LAMA2; (+) strand; PAM type: YTN; PAM sequence: TTC
aggacccttatgattacatt

SEQ ID NO: 337804 - DNA, 20 bp, Artificial Sequence
  Description of Artificial Sequence: Synthetic oligonucleotide
  Target: LAMA2; (+) strand; PAM type: YTN; PAM sequence: CTT
atgattacattgagcccagt

SEQ ID NO: 337805 - DNA, 20 bp, Artificial Sequence
  Description of Artificial Sequence: Synthetic oligonucleotide
  Target: LAMA2; (+) strand; PAM type: YTN; PAM sequence: TTA
tgattacattgagcccagtg

SEQ ID NO: 337806 - DNA, 20 bp, Artificial Sequence
  Description of Artificial Sequence: Synthetic oligonucleotide
  Target: LAMA2; (+) strand; PAM type: YTN; PAM sequence: TTA
cattgagcccagtggattat

SEQ ID NO: 337807 - DNA, 20 bp, Artificial Sequence
  Description of Artificial Sequence: Synthetic oligonucleotide
  Target: LAMA2; (+) strand; PAM type: YTN; PAM sequence: TTG
agcccagtggattatccagg

SEQ ID NO: 337808 - DNA, 20 bp, Artificial Sequence
  Description of Artificial Sequence: Synthetic oligonucleotide
  Target: LAMA2; (+) strand; PAM type: YTN; PAM sequence: TTA
tccagggtgatcctttcatc

SEQ ID NO: 337809 - DNA, 20 bp, Artificial Sequence
  Description of Artificial Sequence: Synthetic oligonucleotide
  Target: LAMA2; (+) strand; PAM type: YTN; PAM sequence: CTT
tcatctcaaggtctttaact

SEQ ID NO: 337810 - DNA, 20 bp, Artificial Sequence
  Description of Artificial Sequence: Synthetic oligonucleotide
  Target: LAMA2; (+) strand; PAM type: YTN; PAM sequence: TTT
catctcaaggtctttaactg

SEQ ID NO: 337811 - DNA, 20 bp, Artificial Sequence
  Description of Artificial Sequence: Synthetic oligonucleotide
  Target: LAMA2; (+) strand; PAM type: YTN; PAM sequence: TTC
atctcaaggtctttaactga

SEQ ID NO: 337812 - DNA, 20 bp, Artificial Sequence
  Description of Artificial Sequence: Synthetic oligonucleotide
  Target: LAMA2; (+) strand; PAM type: YTN; PAM sequence: CTC
aaggtctttaactgaatcat

SEQ ID NO: 337813 - DNA, 20 bp, Artificial Sequence
  Description of Artificial Sequence: Synthetic oligonucleotide
  Target: LAMA2; (+) strand; PAM type: YTN; PAM sequence: CTT
taactgaatcatatctacaa

SEQ ID NO: 337814 - DNA, 20 bp, Artificial Sequence
  Description of Artificial Sequence: Synthetic oligonucleotide
  Target: LAMA2; (+) strand; PAM type: YTN; PAM sequence: TTT
aactgaatcatatctacaaa

SEQ ID NO: 337815 - DNA, 20 bp, Artificial Sequence
  Description of Artificial Sequence: Synthetic oligonucleotide
  Target: LAMA2; (+) strand; PAM type: YTN; PAM sequence: TTA
actgaatcatatctacaaag

SEQ ID NO: 337816 - DNA, 20 bp, Artificial Sequence
  Description of Artificial Sequence: Synthetic oligonucleotide
  Target: LAMA2; (+) strand; PAM type: YTN; PAM sequence: CTG
aatcatatctacaaagttcc

SEQ ID NO: 337817 - DNA, 20 bp, Artificial Sequence
  Description of Artificial Sequence: Synthetic oligonucleotide
  Target: LAMA2; (+) strand; PAM type: YTN; PAM sequence: CTA
caaagttccctttgccataa

SEQ ID NO: 337818 - DNA, 20 bp, Artificial Sequence
  Description of Artificial Sequence: Synthetic oligonucleotide
  Target: LAMA2; (+) strand; PAM type: YTN; PAM sequence: TTC
cctttgccataaaaagggtc

SEQ ID NO: 337819 - DNA, 20 bp, Artificial Sequence
  Description of Artificial Sequence: Synthetic oligonucleotide
  Target: LAMA2; (+) strand; PAM type: YTN; PAM sequence: CTT
tgccataaaaagggtcatat

SEQ ID NO: 337820 - DNA, 20 bp, Artificial Sequence
  Description of Artificial Sequence: Synthetic oligonucleotide
  Target: LAMA2; (+) strand; PAM type: YTN; PAM sequence: TTT
gccataaaaagggtcatatt

SEQ ID NO: 337821 - DNA, 20 bp, Artificial Sequence
  Description of Artificial Sequence: Synthetic oligonucleotide
  Target: LAMA2; (+) strand; PAM type: YTN; PAM sequence: TTG
ccataaaaagggtcatattc

SEQ ID NO: 337822 - DNA, 20 bp, Artificial Sequence
  Description of Artificial Sequence: Synthetic oligonucleotide
  Target: LAMA2; (+) strand; PAM type: YTN; PAM sequence: TTC
acaggttccaagaattaaat

SEQ ID NO: 337823 - DNA, 20 bp, Artificial Sequence
  Description of Artificial Sequence: Synthetic oligonucleotide
  Target: LAMA2; (+) strand; PAM type: YTN; PAM sequence: TTC
caagaattaaatatagacgt

SEQ ID NO: 337824 - DNA, 20 bp, Artificial Sequence
  Description of Artificial Sequence: Synthetic oligonucleotide
  Target: LAMA2; (+) strand; PAM type: YTN; PAM sequence: TTA
aatatagacgtctttgaggg

SEQ ID NO: 337825 - DNA, 20 bp, Artificial Sequence
  Description of Artificial Sequence: Synthetic oligonucleotide
  Target: LAMA2; (+) strand; PAM type: YTN; PAM sequence: CTT
tgagggaccactgtttactc

SEQ ID NO: 337826 - DNA, 20 bp, Artificial Sequence
  Description of Artificial Sequence: Synthetic oligonucleotide
  Target: LAMA2; (+) strand; PAM type: YTN; PAM sequence: TTT
gagggaccactgtttactct

SEQ ID NO: 337827 - DNA, 20 bp, Artificial Sequence
  Description of Artificial Sequence: Synthetic oligonucleotide
  Target: LAMA2; (+) strand; PAM type: YTN; PAM sequence: TTG
agggaccactgtttactcta

SEQ ID NO: 337828 - DNA, 20 bp, Artificial Sequence
  Description of Artificial Sequence: Synthetic oligonucleotide
  Target: LAMA2; (+) strand; PAM type: YTN; PAM sequence: CTG
tttactctaccataactagc

SEQ ID NO: 337829 - DNA, 20 bp, Artificial Sequence
  Description of Artificial Sequence: Synthetic oligonucleotide
  Target: LAMA2; (+) strand; PAM type: YTN; PAM sequence: TTT
actctaccataactagccta

SEQ ID NO: 337830 - DNA, 20 bp, Artificial Sequence
  Description of Artificial Sequence: Synthetic oligonucleotide
  Target: LAMA2; (+) strand; PAM type: YTN; PAM sequence: TTA
ctctaccataactagcctat

SEQ ID NO: 337831 - DNA, 20 bp, Artificial Sequence
  Description of Artificial Sequence: Synthetic oligonucleotide
  Target: LAMA2; (+) strand; PAM type: YTN; PAM sequence: CTC
taccataactagcctatctc

SEQ ID NO: 337832 - DNA, 20 bp, Artificial Sequence
  Description of Artificial Sequence: Synthetic oligonucleotide
  Target: LAMA2; (+) strand; PAM type: YTN; PAM sequence: CTA
ccataactagcctatctcat

SEQ ID NO: 337833 - DNA, 20 bp, Artificial Sequence
  Description of Artificial Sequence: Synthetic oligonucleotide
  Target: LAMA2; (+) strand; PAM type: YTN; PAM sequence: CTA
gcctatctcatttcaatttt

SEQ ID NO: 337834 - DNA, 20 bp, Artificial Sequence
  Description of Artificial Sequence: Synthetic oligonucleotide
  Target: LAMA2; (+) strand; PAM type: YTN; PAM sequence: CTA
tctcatttcaattttctaat

SEQ ID NO: 337835 - DNA, 20 bp, Artificial Sequence
  Description of Artificial Sequence: Synthetic oligonucleotide
  Target: LAMA2; (+) strand; PAM type: YTN; PAM sequence: CTC
atttcaattttctaatcagt

SEQ ID NO: 337836 - DNA, 20 bp, Artificial Sequence
  Description of Artificial Sequence: Synthetic oligonucleotide
  Target: LAMA2; (+) strand; PAM type: YTN; PAM sequence: TTT
caattttctaatcagttact

SEQ ID NO: 337837 - DNA, 20 bp, Artificial Sequence
  Description of Artificial Sequence: Synthetic oligonucleotide
  Target: LAMA2; (+) strand; PAM type: YTN; PAM sequence: TTC
aattttctaatcagttacta

SEQ ID NO: 337838 - DNA, 20 bp, Artificial Sequence
  Description of Artificial Sequence: Synthetic oligonucleotide
  Target: LAMA2; (+) strand; PAM type: YTN; PAM sequence: TTT
tctaatcagttactacctgt

SEQ ID NO: 337839 - DNA, 20 bp, Artificial Sequence
  Description of Artificial Sequence: Synthetic oligonucleotide
  Target: LAMA2; (+) strand; PAM type: YTN; PAM sequence: TTT
ctaatcagttactacctgtc

SEQ ID NO: 337840 - DNA, 20 bp, Artificial Sequence
  Description of Artificial Sequence: Synthetic oligonucleotide
  Target: LAMA2; (+) strand; PAM type: YTN; PAM sequence: TTC
taatcagttactacctgtct

SEQ ID NO: 337841 - DNA, 20 bp, Artificial Sequence
  Description of Artificial Sequence: Synthetic oligonucleotide
  Target: LAMA2; (+) strand; PAM type: YTN; PAM sequence: CTA
atcagttactacctgtctct

SEQ ID NO: 337842 - DNA, 20 bp, Artificial Sequence
  Description of Artificial Sequence: Synthetic oligonucleotide
  Target: LAMA2; (+) strand; PAM type: YTN; PAM sequence: TTA
ctacctgtctcttagagttc

SEQ ID NO: 337843 - DNA, 20 bp, Artificial Sequence
  Description of Artificial Sequence: Synthetic oligonucleotide
  Target: LAMA2; (+) strand; PAM type: YTN; PAM sequence: CTA
cctgtctcttagagttcttg

SEQ ID NO: 337844 - DNA, 20 bp, Artificial Sequence
  Description of Artificial Sequence: Synthetic oligonucleotide
  Target: LAMA2; (+) strand; PAM type: YTN; PAM sequence: CTG
tctcttagagttcttgttag

SEQ ID NO: 337845 - DNA, 20 bp, Artificial Sequence
  Description of Artificial Sequence: Synthetic oligonucleotide
  Target: LAMA2; (+) strand; PAM type: YTN; PAM sequence: CTC
ttagagttcttgttagcaga

SEQ ID NO: 337846 - DNA, 20 bp, Artificial Sequence
  Description of Artificial Sequence: Synthetic oligonucleotide
  Target: LAMA2; (+) strand; PAM type: YTN; PAM sequence: CTT
agagttcttgttagcagaaa

SEQ ID NO: 337847 - DNA, 20 bp, Artificial Sequence
  Description of Artificial Sequence: Synthetic oligonucleotide
  Target: LAMA2; (+) strand; PAM type: YTN; PAM sequence: TTA
gagttcttgttagcagaaac

SEQ ID NO: 337848 - DNA, 20 bp, Artificial Sequence
  Description of Artificial Sequence: Synthetic oligonucleotide
  Target: LAMA2; (+) strand; PAM type: YTN; PAM sequence: TTC
ttgttagcagaaacaaattt

SEQ ID NO: 337849 - DNA, 20 bp, Artificial Sequence
  Description of Artificial Sequence: Synthetic oligonucleotide
  Target: LAMA2; (+) strand; PAM type: YTN; PAM sequence: CTT
gttagcagaaacaaatttct

SEQ ID NO: 337850 - DNA, 20 bp, Artificial Sequence
  Description of Artificial Sequence: Synthetic oligonucleotide
  Target: LAMA2; (+) strand; PAM type: YTN; PAM sequence: TTG
ttagcagaaacaaatttctg

SEQ ID NO: 337851 - DNA, 20 bp, Artificial Sequence
  Description of Artificial Sequence: Synthetic oligonucleotide
  Target: LAMA2; (+) strand; PAM type: YTN; PAM sequence: TTA
gcagaaacaaatttctgtgt

SEQ ID NO: 337852 - DNA, 20 bp, Artificial Sequence
  Description of Artificial Sequence: Synthetic oligonucleotide
  Target: LAMA2; (+) strand; PAM type: YTN; PAM sequence: TTT
ctgtgtaataaagtgcctgg

SEQ ID NO: 337853 - DNA, 20 bp, Artificial Sequence
  Description of Artificial Sequence: Synthetic oligonucleotide
  Target: LAMA2; (+) strand; PAM type: YTN; PAM sequence: TTC
tgtgtaataaagtgcctggc

SEQ ID NO: 337854 - DNA, 20 bp, Artificial Sequence
  Description of Artificial Sequence: Synthetic oligonucleotide
  Target: LAMA2; (+) strand; PAM type: YTN; PAM sequence: CTG
tgtaataaagtgcctggcaa

SEQ ID NO: 337855 - DNA, 20 bp, Artificial Sequence
  Description of Artificial Sequence: Synthetic oligonucleotide
  Target: LAMA2; (+) strand; PAM type: YTN; PAM sequence: CTG
gcaaaaagtaggtcctaaat

SEQ ID NO: 337856 - DNA, 20 bp, Artificial Sequence
  Description of Artificial Sequence: Synthetic oligonucleotide
  Target: LAMA2; (+) strand; PAM type: YTN; PAM sequence: CTA
aataaaatgttattttcccc

SEQ ID NO: 337857 - DNA, 20 bp, Artificial Sequence
  Description of Artificial Sequence: Synthetic oligonucleotide
  Target: LAMA2; (+) strand; PAM type: YTN; PAM sequence: TTA
ttttccccaagggaaagatt

SEQ ID NO: 337858 - DNA, 20 bp, Artificial Sequence
  Description of Artificial Sequence: Synthetic oligonucleotide
  Target: LAMA2; (+) strand; PAM type: YTN; PAM sequence: TTT
tccccaagggaaagattatt

SEQ ID NO: 337859 - DNA, 20 bp, Artificial Sequence
  Description of Artificial Sequence: Synthetic oligonucleotide
  Target: LAMA2; (+) strand; PAM type: YTN; PAM sequence: TTT
ccccaagggaaagattatta

SEQ ID NO: 337860 - DNA, 20 bp, Artificial Sequence
  Description of Artificial Sequence: Synthetic oligonucleotide
  Target: LAMA2; (+) strand; PAM type: YTN; PAM sequence: TTC
cccaagggaaagattattag

SEQ ID NO: 337861 - DNA, 20 bp, Artificial Sequence
  Description of Artificial Sequence: Synthetic oligonucleotide
  Target: LAMA2; (+) strand; PAM type: YTN; PAM sequence: TTA
ttaggaattataacattggg

SEQ ID NO: 337862 - DNA, 20 bp, Artificial Sequence
  Description of Artificial Sequence: Synthetic oligonucleotide
  Target: LAMA2; (+) strand; PAM type: YTN; PAM sequence: TTA
ggaattataacattgggaca

SEQ ID NO: 337863 - DNA, 20 bp, Artificial Sequence
  Description of Artificial Sequence: Synthetic oligonucleotide
  Target: LAMA2; (+) strand; PAM type: YTN; PAM sequence: TTA
taacattgggacacaccttt

SEQ ID NO: 337864 - DNA, 20 bp, Artificial Sequence
  Description of Artificial Sequence: Synthetic oligonucleotide
  Target: LAMA2; (+) strand; PAM type: YTN; PAM sequence: TTG
ggacacacctttgtttaaaa

SEQ ID NO: 337865 - DNA, 20 bp, Artificial Sequence
  Description of Artificial Sequence: Synthetic oligonucleotide
  Target: LAMA2; (+) strand; PAM type: YTN; PAM sequence: CTT
tgtttaaaaagctctaatta

SEQ ID NO: 337866 - DNA, 20 bp, Artificial Sequence
  Description of Artificial Sequence: Synthetic oligonucleotide
  Target: LAMA2; (+) strand; PAM type: YTN; PAM sequence: TTT
gtttaaaaagctctaattaa

SEQ ID NO: 337867 - DNA, 20 bp, Artificial Sequence
  Description of Artificial Sequence: Synthetic oligonucleotide
  Target: LAMA2; (+) strand; PAM type: YTN; PAM sequence: TTG
tttaaaaagctctaattaac

SEQ ID NO: 337868 - DNA, 20 bp, Artificial Sequence
  Description of Artificial Sequence: Synthetic oligonucleotide
  Target: LAMA2; (+) strand; PAM type: YTN; PAM sequence: TTT
aaaaagctctaattaacaag

SEQ ID NO: 337869 - DNA, 20 bp, Artificial Sequence
  Description of Artificial Sequence: Synthetic oligonucleotide
  Target: LAMA2; (+) strand; PAM type: YTN; PAM sequence: TTA
aaaagctctaattaacaaga

SEQ ID NO: 337870 - DNA, 20 bp, Artificial Sequence
  Description of Artificial Sequence: Synthetic oligonucleotide
  Target: LAMA2; (+) strand; PAM type: YTN; PAM sequence: CTC
taattaacaagaaccacagc

SEQ ID NO: 337871 - DNA, 20 bp, Artificial Sequence
  Description of Artificial Sequence: Synthetic oligonucleotide
  Target: LAMA2; (+) strand; PAM type: YTN; PAM sequence: CTA
attaacaagaaccacagcag

SEQ ID NO: 337872 - DNA, 20 bp, Artificial Sequence
  Description of Artificial Sequence: Synthetic oligonucleotide
  Target: LAMA2; (+) strand; PAM type: YTN; PAM sequence: TTA
acaagaaccacagcaggggc

SEQ ID NO: 337873 - DNA, 20 bp, Artificial Sequence
  Description of Artificial Sequence: Synthetic oligonucleotide
  Target: LAMA2; (+) strand; PAM type: YTN; PAM sequence: TTG
gagagaaattcagttagtgc

SEQ ID NO: 337874 - DNA, 20 bp, Artificial Sequence
  Description of Artificial Sequence: Synthetic oligonucleotide
  Target: LAMA2; (+) strand; PAM type: YTN; PAM sequence: TTC
agttagtgctgtcttctgga

SEQ ID NO: 337875 - DNA, 20 bp, Artificial Sequence
  Description of Artificial Sequence: Synthetic oligonucleotide
  Target: LAMA2; (+) strand; PAM type: YTN; PAM sequence: TTA
gtgctgtcttctggacactc

SEQ ID NO: 337876 - DNA, 20 bp, Artificial Sequence
  Description of Artificial Sequence: Synthetic oligonucleotide
  Target: LAMA2; (+) strand; PAM type: YTN; PAM sequence: CTG
tcttctggacactccttcta

SEQ ID NO: 337877 - DNA, 20 bp, Artificial Sequence
  Description of Artificial Sequence: Synthetic oligonucleotide
  Target: LAMA2; (+) strand; PAM type: YTN; PAM sequence: CTT
ctggacactccttctatctt

SEQ ID NO: 337878 - DNA, 20 bp, Artificial Sequence
  Description of Artificial Sequence: Synthetic oligonucleotide
  Target: LAMA2; (+) strand; PAM type: YTN; PAM sequence: TTC
tggacactccttctatcttc

SEQ ID NO: 337879 - DNA, 20 bp, Artificial Sequence
  Description of Artificial Sequence: Synthetic oligonucleotide
  Target: LAMA2; (+) strand; PAM type: YTN; PAM sequence: CTG
gacactccttctatcttcat

SEQ ID NO: 337880 - DNA, 20 bp, Artificial Sequence
  Description of Artificial Sequence: Synthetic oligonucleotide
  Target: LAMA2; (+) strand; PAM type: YTN; PAM sequence: CTC
cttctatcttcattctctcc

SEQ ID NO: 337881 - DNA, 20 bp, Artificial Sequence
  Description of Artificial Sequence: Synthetic oligonucleotide
  Target: LAMA2; (+) strand; PAM type: YTN; PAM sequence: CTT
ctatcttcattctctcctct

SEQ ID NO: 337882 - DNA, 20 bp, Artificial Sequence
  Description of Artificial Sequence: Synthetic oligonucleotide
  Target: LAMA2; (+) strand; PAM type: YTN; PAM sequence: TTC
tatcttcattctctcctctg

SEQ ID NO: 337883 - DNA, 20 bp, Artificial Sequence
  Description of Artificial Sequence: Synthetic oligonucleotide
  Target: LAMA2; (+) strand; PAM type: YTN; PAM sequence: CTA
tcttcattctctcctctgcc

SEQ ID NO: 337884 - DNA, 20 bp, Artificial Sequence
  Description of Artificial Sequence: Synthetic oligonucleotide
  Target: LAMA2; (+) strand; PAM type: YTN; PAM sequence: CTT
cattctctcctctgccattg

SEQ ID NO: 337885 - DNA, 20 bp, Artificial Sequence
  Description of Artificial Sequence: Synthetic oligonucleotide
  Target: LAMA2; (+) strand; PAM type: YTN; PAM sequence: TTC
attctctcctctgccattgt

SEQ ID NO: 337886 - DNA, 20 bp, Artificial Sequence
  Description of Artificial Sequence: Synthetic oligonucleotide
  Target: LAMA2; (+) strand; PAM type: YTN; PAM sequence: TTC
tctcctctgccattgttaac

SEQ ID NO: 337887 - DNA, 20 bp, Artificial Sequence
  Description of Artificial Sequence: Synthetic oligonucleotide
  Target: LAMA2; (+) strand; PAM type: YTN; PAM sequence: CTC
tcctctgccattgttaacct

SEQ ID NO: 337888 - DNA, 20 bp, Artificial Sequence
  Description of Artificial Sequence: Synthetic oligonucleotide
  Target: LAMA2; (+) strand; PAM type: YTN; PAM sequence: CTC
ctctgccattgttaaccttc

SEQ ID NO: 337889 - DNA, 20 bp, Artificial Sequence
  Description of Artificial Sequence: Synthetic oligonucleotide
  Target: LAMA2; (+) strand; PAM type: YTN; PAM sequence: CTC
tgccattgttaaccttccat

SEQ ID NO: 337890 - DNA, 20 bp, Artificial Sequence
  Description of Artificial Sequence: Synthetic oligonucleotide
  Target: LAMA2; (+) strand; PAM type: YTN; PAM sequence: CTG
ccattgttaaccttccattt

SEQ ID NO: 337891 - DNA, 20 bp, Artificial Sequence
  Description of Artificial Sequence: Synthetic oligonucleotide
  Target: LAMA2; (+) strand; PAM type: YTN; PAM sequence: TTG
ttaaccttccattttaggca

SEQ ID NO: 337892 - DNA, 20 bp, Artificial Sequence
  Description of Artificial Sequence: Synthetic oligonucleotide
  Target: LAMA2; (+) strand; PAM type: YTN; PAM sequence: TTA
accttccattttaggcaagg

SEQ ID NO: 337893 - DNA, 20 bp, Artificial Sequence
  Description of Artificial Sequence: Synthetic oligonucleotide
  Target: LAMA2; (+) strand; PAM type: YTN; PAM sequence: CTT
ccattttaggcaaggagctg

SEQ ID NO: 337894 - DNA, 20 bp, Artificial Sequence
  Description of Artificial Sequence: Synthetic oligonucleotide
  Target: LAMA2; (+) strand; PAM type: YTN; PAM sequence: TTC
cattttaggcaaggagctgt

SEQ ID NO: 337895 - DNA, 20 bp, Artificial Sequence
  Description of Artificial Sequence: Synthetic oligonucleotide
  Target: LAMA2; (+) strand; PAM type: YTN; PAM sequence: TTT
taggcaaggagctgtattag

SEQ ID NO: 337896 - DNA, 20 bp, Artificial Sequence
  Description of Artificial Sequence: Synthetic oligonucleotide
  Target: LAMA2; (+) strand; PAM type: YTN; PAM sequence: TTT
aggcaaggagctgtattagg

SEQ ID NO: 337897 - DNA, 20 bp, Artificial Sequence
  Description of Artificial Sequence: Synthetic oligonucleotide
  Target: LAMA2; (+) strand; PAM type: YTN; PAM sequence: TTA
ggcaaggagctgtattagga

SEQ ID NO: 337898 - DNA, 20 bp, Artificial Sequence
  Description of Artificial Sequence: Synthetic oligonucleotide
  Target: LAMA2; (+) strand; PAM type: YTN; PAM sequence: CTG
tattaggaaaatgtggtttc

SEQ ID NO: 337899 - DNA, 20 bp, Artificial Sequence
  Description of Artificial Sequence: Synthetic oligonucleotide
  Target: LAMA2; (+) strand; PAM type: YTN; PAM sequence: TTA
ggaaaatgtggtttcctttt

SEQ ID NO: 337900 - DNA, 20 bp, Artificial Sequence
  Description of Artificial Sequence: Synthetic oligonucleotide
  Target: LAMA2; (+) strand; PAM type: YTN; PAM sequence: TTT
ccttttattaaaagaaaatc

SEQ ID NO: 337901 - DNA, 20 bp, Artificial Sequence
  Description of Artificial Sequence: Synthetic oligonucleotide
  Target: LAMA2; (+) strand; PAM type: YTN; PAM sequence: TTC
cttttattaaaagaaaatct

SEQ ID NO: 337902 - DNA, 20 bp, Artificial Sequence
  Description of Artificial Sequence: Synthetic oligonucleotide
  Target: LAMA2; (+) strand; PAM type: YTN; PAM sequence: CTT
ttattaaaagaaaatctcta

SEQ ID NO: 337903 - DNA, 20 bp, Artificial Sequence
  Description of Artificial Sequence: Synthetic oligonucleotide
  Target: LAMA2; (+) strand; PAM type: YTN; PAM sequence: TTT
tattaaaagaaaatctctaa

SEQ ID NO: 337904 - DNA, 20 bp, Artificial Sequence
  Description of Artificial Sequence: Synthetic oligonucleotide
  Target: LAMA2; (+) strand; PAM type: YTN; PAM sequence: TTT
attaaaagaaaatctctaaa

SEQ ID NO: 337905 - DNA, 20 bp, Artificial Sequence
  Description of Artificial Sequence: Synthetic oligonucleotide
  Target: LAMA2; (+) strand; PAM type: YTN; PAM sequence: TTA
ttaaaagaaaatctctaaat

SEQ ID NO: 337906 - DNA, 20 bp, Artificial Sequence
  Description of Artificial Sequence: Synthetic oligonucleotide
  Target: LAMA2; (+) strand; PAM type: YTN; PAM sequence: TTA
aaagaaaatctctaaattat

SEQ ID NO: 337907 - DNA, 20 bp, Artificial Sequence
  Description of Artificial Sequence: Synthetic oligonucleotide
  Target: LAMA2; (+) strand; PAM type: YTN; PAM sequence: CTC
taaattattaatagatatta

SEQ ID NO: 337908 - DNA, 20 bp, Artificial Sequence
  Description of Artificial Sequence: Synthetic oligonucleotide
  Target: LAMA2; (+) strand; PAM type: YTN; PAM sequence: CTA
aattattaatagatattact

SEQ ID NO: 337909 - DNA, 20 bp, Artificial Sequence
  Description of Artificial Sequence: Synthetic oligonucleotide
  Target: LAMA2; (+) strand; PAM type: YTN; PAM sequence: TTA
ttaatagatattacttttcc

SEQ ID NO: 337910 - DNA, 20 bp, Artificial Sequence
  Description of Artificial Sequence: Synthetic oligonucleotide
  Target: LAMA2; (+) strand; PAM type: YTN; PAM sequence: TTA
atagatattacttttccaaa

SEQ ID NO: 337911 - DNA, 20 bp, Artificial Sequence
  Description of Artificial Sequence: Synthetic oligonucleotide
  Target: LAMA2; (+) strand; PAM type: YTN; PAM sequence: TTA
cttttccaaagaaaatttca

SEQ ID NO: 337912 - DNA, 20 bp, Artificial Sequence
  Description of Artificial Sequence: Synthetic oligonucleotide
  Target: LAMA2; (+) strand; PAM type: YTN; PAM sequence: CTT
ttccaaagaaaatttcagaa

SEQ ID NO: 337913 - DNA, 20 bp, Artificial Sequence
  Description of Artificial Sequence: Synthetic oligonucleotide
  Target: LAMA2; (+) strand; PAM type: YTN; PAM sequence: TTT
tccaaagaaaatttcagaaa

SEQ ID NO: 337914 - DNA, 20 bp, Artificial Sequence
  Description of Artificial Sequence: Synthetic oligonucleotide
  Target: LAMA2; (+) strand; PAM type: YTN; PAM sequence: TTT
ccaaagaaaatttcagaaag

SEQ ID NO: 337915 - DNA, 20 bp, Artificial Sequence
  Description of Artificial Sequence: Synthetic oligonucleotide
  Target: LAMA2; (+) strand; PAM type: YTN; PAM sequence: TTC
caaagaaaatttcagaaagg

SEQ ID NO: 337916 - DNA, 20 bp, Artificial Sequence
  Description of Artificial Sequence: Synthetic oligonucleotide
  Target: LAMA2; (+) strand; PAM type: YTN; PAM sequence: TTT
cagaaaggagaagaacaaca

SEQ ID NO: 337917 - DNA, 20 bp, Artificial Sequence
  Description of Artificial Sequence: Synthetic oligonucleotide
  Target: LAMA2; (+) strand; PAM type: YTN; PAM sequence: TTC
agaaaggagaagaacaacat

SEQ ID NO: 337918 - DNA, 20 bp, Artificial Sequence
  Description of Artificial Sequence: Synthetic oligonucleotide
  Target: LAMA2; (+) strand; PAM type: YTN; PAM sequence: CTG
tggacactttaaagataagg

SEQ ID NO: 337919 - DNA, 20 bp, Artificial Sequence
  Description of Artificial Sequence: Synthetic oligonucleotide
  Target: LAMA2; (+) strand; PAM type: YTN; PAM sequence: CTT
taaagataaggatgatggag

SEQ ID NO: 337920 - DNA, 20 bp, Artificial Sequence
  Description of Artificial Sequence: Synthetic oligonucleotide
  Target: LAMA2; (+) strand; PAM type: YTN; PAM sequence: TTT
aaagataaggatgatggaga

SEQ ID NO: 337921 - DNA, 20 bp, Artificial Sequence
  Description of Artificial Sequence: Synthetic oligonucleotide
  Target: LAMA2; (+) strand; PAM type: YTN; PAM sequence: TTA
aagataaggatgatggagaa

SEQ ID NO: 337922 - DNA, 20 bp, Artificial Sequence
  Description of Artificial Sequence: Synthetic oligonucleotide
  Target: LAMA2; (+) strand; PAM type: YTN; PAM sequence: CTG
aattttgcaagcaggttata

SEQ ID NO: 337923 - DNA, 20 bp, Artificial Sequence
  Description of Artificial Sequence: Synthetic oligonucleotide
  Target: LAMA2; (+) strand; PAM type: YTN; PAM sequence: TTT
tgcaagcaggttataataac

SEQ ID NO: 337924 - DNA, 20 bp, Artificial Sequence
  Description of Artificial Sequence: Synthetic oligonucleotide
  Target: LAMA2; (+) strand; PAM type: YTN; PAM sequence: TTT
gcaagcaggttataataact

SEQ ID NO: 337925 - DNA, 20 bp, Artificial Sequence
  Description of Artificial Sequence: Synthetic oligonucleotide
  Target: LAMA2; (+) strand; PAM type: YTN; PAM sequence: TTG
caagcaggttataataactc

SEQ ID NO: 337926 - DNA, 20 bp, Artificial Sequence
  Description of Artificial Sequence: Synthetic oligonucleotide
  Target: LAMA2; (+) strand; PAM type: YTN; PAM sequence: TTA
taataactcctgagagtgat

SEQ ID NO: 337927 - DNA, 20 bp, Artificial Sequence
  Description of Artificial Sequence: Synthetic oligonucleotide
  Target: LAMA2; (+) strand; PAM type: YTN; PAM sequence: CTC
ctgagagtgattgtaatagg

SEQ ID NO: 337928 - DNA, 20 bp, Artificial Sequence
  Description of Artificial Sequence: Synthetic oligonucleotide
  Target: LAMA2; (+) strand; PAM type: YTN; PAM sequence: CTG
agagtgattgtaatagggtg

SEQ ID NO: 337929 - DNA, 20 bp, Artificial Sequence
  Description of Artificial Sequence: Synthetic oligonucleotide
  Target: LAMA2; (+) strand; PAM type: YTN; PAM sequence: TTG
taatagggtgattaggtcat

SEQ ID NO: 337930 - DNA, 20 bp, Artificial Sequence
  Description of Artificial Sequence: Synthetic oligonucleotide
  Target: LAMA2; (+) strand; PAM type: YTN; PAM sequence: TTA
ggtcatgcatggactacaag

SEQ ID NO: 337931 - DNA, 20 bp, Artificial Sequence
  Description of Artificial Sequence: Synthetic oligonucleotide
  Target: LAMA2; (+) strand; PAM type: YTN; PAM sequence: CTA
caagggatcaagtagaaaag

SEQ ID NO: 337932 - DNA, 20 bp, Artificial Sequence
  Description of Artificial Sequence: Synthetic oligonucleotide
  Target: LAMA2; (+) strand; PAM type: YTN; PAM sequence: CTA
ctcttaagaaagtccctaga

SEQ ID NO: 337933 - DNA, 20 bp, Artificial Sequence
  Description of Artificial Sequence: Synthetic oligonucleotide
  Target: LAMA2; (+) strand; PAM type: YTN; PAM sequence: CTC
ttaagaaagtccctagagaa

SEQ ID NO: 337934 - DNA, 20 bp, Artificial Sequence
  Description of Artificial Sequence: Synthetic oligonucleotide
  Target: LAMA2; (+) strand; PAM type: YTN; PAM sequence: CTT
aagaaagtccctagagaagg

SEQ ID NO: 337935 - DNA, 20 bp, Artificial Sequence
  Description of Artificial Sequence: Synthetic oligonucleotide
  Target: LAMA2; (+) strand; PAM type: YTN; PAM sequence: TTA
agaaagtccctagagaagga

SEQ ID NO: 337936 - DNA, 20 bp, Artificial Sequence
  Description of Artificial Sequence: Synthetic oligonucleotide
  Target: LAMA2; (+) strand; PAM type: YTN; PAM sequence: CTA
gagaaggataagaaaatggg

SEQ ID NO: 337937 - DNA, 20 bp, Artificial Sequence
  Description of Artificial Sequence: Synthetic oligonucleotide
  Target: LAMA2; (+) strand; PAM type: YTN; PAM sequence: CTT
ggaaatagatgatgatattt

SEQ ID NO: 337938 - DNA, 20 bp, Artificial Sequence
  Description of Artificial Sequence: Synthetic oligonucleotide
  Target: LAMA2; (+) strand; PAM type: YTN; PAM sequence: TTG
gaaatagatgatgatatttc

SEQ ID NO: 337939 - DNA, 20 bp, Artificial Sequence
  Description of Artificial Sequence: Synthetic oligonucleotide
  Target: LAMA2; (+) strand; PAM type: YTN; PAM sequence: TTT
cttttttttttaatttaatt

SEQ ID NO: 337940 - DNA, 20 bp, Artificial Sequence
  Description of Artificial Sequence: Synthetic oligonucleotide
  Target: LAMA2; (+) strand; PAM type: YTN; PAM sequence: TTC
ttttttttttaatttaattt

SEQ ID NO: 337941 - DNA, 20 bp, Artificial Sequence
  Description of Artificial Sequence: Synthetic oligonucleotide
  Target: LAMA2; (+) strand; PAM type: YTN; PAM sequence: CTT
ttttttttaatttaatttta

SEQ ID NO: 337942 - DNA, 20 bp, Artificial Sequence
  Description of Artificial Sequence: Synthetic oligonucleotide
  Target: LAMA2; (+) strand; PAM type: YTN; PAM sequence: TTT
tttttttaatttaattttat

SEQ ID NO: 337943 - DNA, 20 bp, Artificial Sequence
  Description of Artificial Sequence: Synthetic oligonucleotide
  Target: LAMA2; (+) strand; PAM type: YTN; PAM sequence: TTT
ttttttaatttaattttatt

SEQ ID NO: 337944 - DNA, 20 bp, Artificial Sequence
  Description of Artificial Sequence: Synthetic oligonucleotide
  Target: LAMA2; (+) strand; PAM type: YTN; PAM sequence: TTT
tttttaatttaattttattt

SEQ ID NO: 337945 - DNA, 20 bp, Artificial Sequence
  Description of Artificial Sequence: Synthetic oligonucleotide
  Target: LAMA2; (+) strand; PAM type: YTN; PAM sequence: TTT
ttttaatttaattttattta

SEQ ID NO: 337946 - DNA, 20 bp, Artificial Sequence
  Description of Artificial Sequence: Synthetic oligonucleotide
  Target: LAMA2; (+) strand; PAM type: YTN; PAM sequence: TTT
tttaatttaattttatttat

SEQ ID NO: 337947 - DNA, 20 bp, Artificial Sequence
  Description of Artificial Sequence: Synthetic oligonucleotide
  Target: LAMA2; (+) strand; PAM type: YTN; PAM sequence: TTT
ttaatttaattttatttatt

SEQ ID NO: 337948 - DNA, 20 bp, Artificial Sequence
  Description of Artificial Sequence: Synthetic oligonucleotide
  Target: LAMA2; (+) strand; PAM type: YTN; PAM sequence: TTT
taatttaattttatttattt

SEQ ID NO: 337949 - DNA, 20 bp, Artificial Sequence
  Description of Artificial Sequence: Synthetic oligonucleotide
  Target: LAMA2; (+) strand; PAM type: YTN; PAM sequence: TTT
aatttaattttatttattta

SEQ ID NO: 337950 - DNA, 20 bp, Artificial Sequence
  Description of Artificial Sequence: Synthetic oligonucleotide
  Target: LAMA2; (+) strand; PAM type: YTN; PAM sequence: TTA
atttaattttatttatttat

SEQ ID NO: 337951 - DNA, 20 bp, Artificial Sequence
  Description of Artificial Sequence: Synthetic oligonucleotide
  Target: LAMA2; (+) strand; PAM type: YTN; PAM sequence: TTT
aattttatttatttattttt

SEQ ID NO: 337952 - DNA, 20 bp, Artificial Sequence
  Description of Artificial Sequence: Synthetic oligonucleotide
  Target: LAMA2; (+) strand; PAM type: YTN; PAM sequence: TTA
attttatttatttatttttt

SEQ ID NO: 337953 - DNA, 20 bp, Artificial Sequence
  Description of Artificial Sequence: Synthetic oligonucleotide
  Target: LAMA2; (+) strand; PAM type: YTN; PAM sequence: TTT
tatttatttattttttttat

SEQ ID NO: 337954 - DNA, 20 bp, Artificial Sequence
  Description of Artificial Sequence: Synthetic oligonucleotide
  Target: LAMA2; (+) strand; PAM type: YTN; PAM sequence: TTT
atttatttattttttttatt

SEQ ID NO: 337955 - DNA, 20 bp, Artificial Sequence
  Description of Artificial Sequence: Synthetic oligonucleotide
  Target: LAMA2; (+) strand; PAM type: YTN; PAM sequence: TTA
tttatttattttttttatta

SEQ ID NO: 337956 - DNA, 20 bp, Artificial Sequence
  Description of Artificial Sequence: Synthetic oligonucleotide
  Target: LAMA2; (+) strand; PAM type: YTN; PAM sequence: TTT
atttattttttttattaatc

SEQ ID NO: 337957 - DNA, 20 bp, Artificial Sequence
  Description of Artificial Sequence: Synthetic oligonucleotide
  Target: LAMA2; (+) strand; PAM type: YTN; PAM sequence: TTA
tttattttttttattaatca

SEQ ID NO: 337958 - DNA, 20 bp, Artificial Sequence
  Description of Artificial Sequence: Synthetic oligonucleotide
  Target: LAMA2; (+) strand; PAM type: YTN; PAM sequence: TTT
attttttttattaatcattc

SEQ ID NO: 337959 - DNA, 20 bp, Artificial Sequence
  Description of Artificial Sequence: Synthetic oligonucleotide
  Target: LAMA2; (+) strand; PAM type: YTN; PAM sequence: TTA
ttttttttattaatcattct

SEQ ID NO: 337960 - DNA, 20 bp, Artificial Sequence
  Description of Artificial Sequence: Synthetic oligonucleotide
  Target: LAMA2; (+) strand; PAM type: YTN; PAM sequence: TTT
tttttattaatcattcttgg

SEQ ID NO: 337961 - DNA, 20 bp, Artificial Sequence
  Description of Artificial Sequence: Synthetic oligonucleotide
  Target: LAMA2; (+) strand; PAM type: YTN; PAM sequence: TTT
ttttattaatcattcttggg

SEQ ID NO: 337962 - DNA, 20 bp, Artificial Sequence
  Description of Artificial Sequence: Synthetic oligonucleotide
  Target: LAMA2; (+) strand; PAM type: YTN; PAM sequence: TTT
tttattaatcattcttgggt

SEQ ID NO: 337963 - DNA, 20 bp, Artificial Sequence
  Description of Artificial Sequence: Synthetic oligonucleotide
  Target: LAMA2; (+) strand; PAM type: YTN; PAM sequence: TTT
ttattaatcattcttgggtg

SEQ ID NO: 337964 - DNA, 20 bp, Artificial Sequence
  Description of Artificial Sequence: Synthetic oligonucleotide
  Target: LAMA2; (+) strand; PAM type: YTN; PAM sequence: TTT
tattaatcattcttgggtgt

SEQ ID NO: 337965 - DNA, 20 bp, Artificial Sequence
  Description of Artificial Sequence: Synthetic oligonucleotide
  Target: LAMA2; (+) strand; PAM type: YTN; PAM sequence: TTT
attaatcattcttgggtgtt

SEQ ID NO: 337966 - DNA, 20 bp, Artificial Sequence
  Description of Artificial Sequence: Synthetic oligonucleotide
  Target: LAMA2; (+) strand; PAM type: YTN; PAM sequence: TTA
ttaatcattcttgggtgttt

SEQ ID NO: 337967 - DNA, 20 bp, Artificial Sequence
  Description of Artificial Sequence: Synthetic oligonucleotide
  Target: LAMA2; (+) strand; PAM type: YTN; PAM sequence: TTA
atcattcttgggtgtttctc

SEQ ID NO: 337968 - DNA, 20 bp, Artificial Sequence
  Description of Artificial Sequence: Synthetic oligonucleotide
  Target: LAMA2; (+) strand; PAM type: YTN; PAM sequence: TTC
ttgggtgtttctcacagagg

SEQ ID NO: 337969 - DNA, 20 bp, Artificial Sequence
  Description of Artificial Sequence: Synthetic oligonucleotide
  Target: LAMA2; (+) strand; PAM type: YTN; PAM sequence: CTT
gggtgtttctcacagagggg

SEQ ID NO: 337970 - DNA, 20 bp, Artificial Sequence
  Description of Artificial Sequence: Synthetic oligonucleotide
  Target: LAMA2; (+) strand; PAM type: YTN; PAM sequence: TTG
ggtgtttctcacagaggggg

SEQ ID NO: 337971 - DNA, 20 bp, Artificial Sequence
  Description of Artificial Sequence: Synthetic oligonucleotide
  Target: LAMA2; (+) strand; PAM type: YTN; PAM sequence: TTT
ctcacagagggggatttggc

SEQ ID NO: 337972 - DNA, 20 bp, Artificial Sequence
  Description of Artificial Sequence: Synthetic oligonucleotide
  Target: LAMA2; (+) strand; PAM type: YTN; PAM sequence: TTC
tcacagagggggatttggca

SEQ ID NO: 337973 - DNA, 20 bp, Artificial Sequence
  Description of Artificial Sequence: Synthetic oligonucleotide
  Target: LAMA2; (+) strand; PAM type: YTN; PAM sequence: CTC
acagagggggatttggcagg

SEQ ID NO: 337974 - DNA, 20 bp, Artificial Sequence
  Description of Artificial Sequence: Synthetic oligonucleotide
  Target: LAMA2; (+) strand; PAM type: YTN; PAM sequence: TTT
ggcagggtcacgggacaata

SEQ ID NO: 337975 - DNA, 20 bp, Artificial Sequence
  Description of Artificial Sequence: Synthetic oligonucleotide
  Target: LAMA2; (+) strand; PAM type: YTN; PAM sequence: TTG
gcagggtcacgggacaatag

SEQ ID NO: 337976 - DNA, 20 bp, Artificial Sequence
  Description of Artificial Sequence: Synthetic oligonucleotide
  Target: LAMA2; (+) strand; PAM type: YTN; PAM sequence: CTC
tggttttcctaggcagagga

SEQ ID NO: 337977 - DNA, 20 bp, Artificial Sequence
  Description of Artificial Sequence: Synthetic oligonucleotide
  Target: LAMA2; (+) strand; PAM type: YTN; PAM sequence: CTG
gttttcctaggcagaggacc

SEQ ID NO: 337978 - DNA, 20 bp, Artificial Sequence
  Description of Artificial Sequence: Synthetic oligonucleotide
  Target: LAMA2; (+) strand; PAM type: YTN; PAM sequence: TTT
tcctaggcagaggaccctgc

SEQ ID NO: 337979 - DNA, 20 bp, Artificial Sequence
  Description of Artificial Sequence: Synthetic oligonucleotide
  Target: LAMA2; (+) strand; PAM type: YTN; PAM sequence: TTT
cctaggcagaggaccctgcg

SEQ ID NO: 337980 - DNA, 20 bp, Artificial Sequence
  Description of Artificial Sequence: Synthetic oligonucleotide
  Target: LAMA2; (+) strand; PAM type: YTN; PAM sequence: TTC
ctaggcagaggaccctgcgg

SEQ ID NO: 337981 - DNA, 20 bp, Artificial Sequence
  Description of Artificial Sequence: Synthetic oligonucleotide
  Target: LAMA2; (+) strand; PAM type: YTN; PAM sequence: CTA
ggcagaggaccctgcggcct

SEQ ID NO: 337982 - DNA, 20 bp, Artificial Sequence
  Description of Artificial Sequence: Synthetic oligonucleotide
  Target: LAMA2; (+) strand; PAM type: YTN; PAM sequence: CTG
cggccttccgccgtgtttgt

SEQ ID NO: 337983 - DNA, 20 bp, Artificial Sequence
  Description of Artificial Sequence: Synthetic oligonucleotide
  Target: LAMA2; (+) strand; PAM type: YTN; PAM sequence: CTT
ccgccgtgtttgtgtccctg

SEQ ID NO: 337984 - DNA, 20 bp, Artificial Sequence
  Description of Artificial Sequence: Synthetic oligonucleotide
  Target: LAMA2; (+) strand; PAM type: YTN; PAM sequence: TTC
cgccgtgtttgtgtccctgg

SEQ ID NO: 337985 - DNA, 20 bp, Artificial Sequence
  Description of Artificial Sequence: Synthetic oligonucleotide
  Target: LAMA2; (+) strand; PAM type: YTN; PAM sequence: TTT
gtgtccctgggtacttgaga

SEQ ID NO: 337986 - DNA, 20 bp, Artificial Sequence
  Description of Artificial Sequence: Synthetic oligonucleotide
  Target: LAMA2; (+) strand; PAM type: YTN; PAM sequence: TTG
tgtccctgggtacttgagat

SEQ ID NO: 337987 - DNA, 20 bp, Artificial Sequence
  Description of Artificial Sequence: Synthetic oligonucleotide
  Target: LAMA2; (+) strand; PAM type: YTN; PAM sequence: CTG
ggtacttgagatcagggagt

SEQ ID NO: 337988 - DNA, 20 bp, Artificial Sequence
  Description of Artificial Sequence: Synthetic oligonucleotide
  Target: LAMA2; (+) strand; PAM type: YTN; PAM sequence: CTT
gagatcagggagtcctgatg

SEQ ID NO: 337989 - DNA, 20 bp, Artificial Sequence
  Description of Artificial Sequence: Synthetic oligonucleotide
  Target: LAMA2; (+) strand; PAM type: YTN; PAM sequence: TTG
agatcagggagtcctgatga

SEQ ID NO: 337990 - DNA, 20 bp, Artificial Sequence
  Description of Artificial Sequence: Synthetic oligonucleotide
  Target: LAMA2; (+) strand; PAM type: YTN; PAM sequence: CTG
atgactcttaacgcgcatgc

SEQ ID NO: 337991 - DNA, 20 bp, Artificial Sequence
  Description of Artificial Sequence: Synthetic oligonucleotide
  Target: LAMA2; (+) strand; PAM type: YTN; PAM sequence: CTC
ttaacgcgcatgctgcctta

SEQ ID NO: 337992 - DNA, 20 bp, Artificial Sequence
  Description of Artificial Sequence: Synthetic oligonucleotide
  Target: LAMA2; (+) strand; PAM type: YTN; PAM sequence: CTT
aacgcgcatgctgccttaaa

SEQ ID NO: 337993 - DNA, 20 bp, Artificial Sequence
  Description of Artificial Sequence: Synthetic oligonucleotide
  Target: LAMA2; (+) strand; PAM type: YTN; PAM sequence: TTA
acgcgcatgctgccttaaag

SEQ ID NO: 337994 - DNA, 20 bp, Artificial Sequence
  Description of Artificial Sequence: Synthetic oligonucleotide
  Target: LAMA2; (+) strand; PAM type: YTN; PAM sequence: CTG
ccttaaagcatctgtttaac

SEQ ID NO: 337995 - DNA, 20 bp, Artificial Sequence
  Description of Artificial Sequence: Synthetic oligonucleotide
  Target: LAMA2; (+) strand; PAM type: YTN; PAM sequence: CTT
aaagcatctgtttaacaaag

SEQ ID NO: 337996 - DNA, 20 bp, Artificial Sequence
  Description of Artificial Sequence: Synthetic oligonucleotide
  Target: LAMA2; (+) strand; PAM type: YTN; PAM sequence: TTA
aagcatctgtttaacaaagc

SEQ ID NO: 337997 - DNA, 20 bp, Artificial Sequence
  Description of Artificial Sequence: Synthetic oligonucleotide
  Target: LAMA2; (+) strand; PAM type: YTN; PAM sequence: CTG
tttaacaaagcacatcttgt

SEQ ID NO: 337998 - DNA, 20 bp, Artificial Sequence
  Description of Artificial Sequence: Synthetic oligonucleotide
  Target: LAMA2; (+) strand; PAM type: YTN; PAM sequence: TTT
aacaaagcacatcttgtacc

SEQ ID NO: 337999 - DNA, 20 bp, Artificial Sequence
  Description of Artificial Sequence: Synthetic oligonucleotide
  Target: LAMA2; (+) strand; PAM type: YTN; PAM sequence: TTA
acaaagcacatcttgtaccg

SEQ ID NO: 338000 - DNA, 20 bp, Artificial Sequence
  Description of Artificial Sequence: Synthetic oligonucleotide
  Target: LAMA2; (+) strand; PAM type: YTN; PAM sequence: CTT
gtaccgcccttaatccattc

SEQ ID NO: 338001 - DNA, 20 bp, Artificial Sequence
  Description of Artificial Sequence: Synthetic oligonucleotide
  Target: LAMA2; (+) strand; PAM type: YTN; PAM sequence: TTG
taccgcccttaatccattca

SEQ ID NO: 338002 - DNA, 20 bp, Artificial Sequence
  Description of Artificial Sequence: Synthetic oligonucleotide
  Target: LAMA2; (+) strand; PAM type: YTN; PAM sequence: CTT
aatccattcaaccctgagtg

SEQ ID NO: 338003 - DNA, 20 bp, Artificial Sequence
  Description of Artificial Sequence: Synthetic oligonucleotide
  Target: LAMA2; (+) strand; PAM type: YTN; PAM sequence: TTA
atccattcaaccctgagtgg

SEQ ID NO: 338004 - DNA, 20 bp, Artificial Sequence
  Description of Artificial Sequence: Synthetic oligonucleotide
  Target: LAMA2; (+) strand; PAM type: YTN; PAM sequence: TTC
aaccctgagtggacacagca

SEQ ID NO: 338005 - DNA, 20 bp, Artificial Sequence
  Description of Artificial Sequence: Synthetic oligonucleotide
  Target: LAMA2; (+) strand; PAM type: YTN; PAM sequence: CTG
agtggacacagcacatgttt

SEQ ID NO: 338006 - DNA, 20 bp, Artificial Sequence
  Description of Artificial Sequence: Synthetic oligonucleotide
  Target: LAMA2; (+) strand; PAM type: YTN; PAM sequence: TTT
cagagagcacggggttggga

SEQ ID NO: 338007 - DNA, 20 bp, Artificial Sequence
  Description of Artificial Sequence: Synthetic oligonucleotide
  Target: LAMA2; (+) strand; PAM type: YTN; PAM sequence: TTC
agagagcacggggttgggag

SEQ ID NO: 338008 - DNA, 20 bp, Artificial Sequence
  Description of Artificial Sequence: Synthetic oligonucleotide
  Target: LAMA2; (+) strand; PAM type: YTN; PAM sequence: TTG
ggagtaaggtcatagatcaa

SEQ ID NO: 338009 - DNA, 20 bp, Artificial Sequence
  Description of Artificial Sequence: Synthetic oligonucleotide
  Target: LAMA2; (+) strand; PAM type: YTN; PAM sequence: CTT
tcttagtacagaacaaaatg

SEQ ID NO: 338010 - DNA, 20 bp, Artificial Sequence
  Description of Artificial Sequence: Synthetic oligonucleotide
  Target: LAMA2; (+) strand; PAM type: YTN; PAM sequence: TTT
cttagtacagaacaaaatgg

SEQ ID NO: 338011 - DNA, 20 bp, Artificial Sequence
  Description of Artificial Sequence: Synthetic oligonucleotide
  Target: LAMA2; (+) strand; PAM type: YTN; PAM sequence: TTC
ttagtacagaacaaaatgga

SEQ ID NO: 338012 - DNA, 20 bp, Artificial Sequence
  Description of Artificial Sequence: Synthetic oligonucleotide
  Target: LAMA2; (+) strand; PAM type: YTN; PAM sequence: CTT
agtacagaacaaaatggagt

SEQ ID NO: 338013 - DNA, 20 bp, Artificial Sequence
  Description of Artificial Sequence: Synthetic oligonucleotide
  Target: LAMA2; (+) strand; PAM type: YTN; PAM sequence: TTA
gtacagaacaaaatggagtc

SEQ ID NO: 338014 - DNA, 20 bp, Artificial Sequence
  Description of Artificial Sequence: Synthetic oligonucleotide
  Target: LAMA2; (+) strand; PAM type: YTN; PAM sequence: CTC
ctatgtctacttctttctac

SEQ ID NO: 338015 - DNA, 20 bp, Artificial Sequence
  Description of Artificial Sequence: Synthetic oligonucleotide
  Target: LAMA2; (+) strand; PAM type: YTN; PAM sequence: CTA
tgtctacttctttctacaca

SEQ ID NO: 338016 - DNA, 20 bp, Artificial Sequence
  Description of Artificial Sequence: Synthetic oligonucleotide
  Target: LAMA2; (+) strand; PAM type: YTN; PAM sequence: CTA
cttctttctacacagacaca

SEQ ID NO: 338017 - DNA, 20 bp, Artificial Sequence
  Description of Artificial Sequence: Synthetic oligonucleotide
  Target: LAMA2; (+) strand; PAM type: YTN; PAM sequence: CTT
ctttctacacagacacagca

SEQ ID NO: 338018 - DNA, 20 bp, Artificial Sequence
  Description of Artificial Sequence: Synthetic oligonucleotide
  Target: LAMA2; (+) strand; PAM type: YTN; PAM sequence: TTC
tttctacacagacacagcaa

SEQ ID NO: 338019 - DNA, 20 bp, Artificial Sequence
  Description of Artificial Sequence: Synthetic oligonucleotide
  Target: LAMA2; (+) strand; PAM type: YTN; PAM sequence: CTT
tctacacagacacagcaaca

SEQ ID NO: 338020 - DNA, 20 bp, Artificial Sequence
  Description of Artificial Sequence: Synthetic oligonucleotide
  Target: LAMA2; (+) strand; PAM type: YTN; PAM sequence: TTT
ctacacagacacagcaacaa

SEQ ID NO: 338021 - DNA, 20 bp, Artificial Sequence
  Description of Artificial Sequence: Synthetic oligonucleotide
  Target: LAMA2; (+) strand; PAM type: YTN; PAM sequence: TTC
tacacagacacagcaacaat

SEQ ID NO: 338022 - DNA, 20 bp, Artificial Sequence
  Description of Artificial Sequence: Synthetic oligonucleotide
  Target: LAMA2; (+) strand; PAM type: YTN; PAM sequence: CTA
cacagacacagcaacaatct

SEQ ID NO: 338023 - DNA, 20 bp, Artificial Sequence
  Description of Artificial Sequence: Synthetic oligonucleotide
  Target: LAMA2; (+) strand; PAM type: YTN; PAM sequence: CTG
atttctctatcttttcccca

SEQ ID NO: 338024 - DNA, 20 bp, Artificial Sequence
  Description of Artificial Sequence: Synthetic oligonucleotide
  Target: LAMA2; (+) strand; PAM type: YTN; PAM sequence: TTT
ctctatcttttccccacatt

SEQ ID NO: 338025 - DNA, 20 bp, Artificial Sequence
  Description of Artificial Sequence: Synthetic oligonucleotide
  Target: LAMA2; (+) strand; PAM type: YTN; PAM sequence: TTC
tctatcttttccccacattt

SEQ ID NO: 338026 - DNA, 20 bp, Artificial Sequence
  Description of Artificial Sequence: Synthetic oligonucleotide
  Target: LAMA2; (+) strand; PAM type: YTN; PAM sequence: CTC
tatcttttccccacatttcc

SEQ ID NO: 338027 - DNA, 20 bp, Artificial Sequence
  Description of Artificial Sequence: Synthetic oligonucleotide
  Target: LAMA2; (+) strand; PAM type: YTN; PAM sequence: CTA
tcttttccccacatttcccc

SEQ ID NO: 338028 - DNA, 20 bp, Artificial Sequence
  Description of Artificial Sequence: Synthetic oligonucleotide
  Target: LAMA2; (+) strand; PAM type: YTN; PAM sequence: CTT
ttccccacatttcccccttt

SEQ ID NO: 338029 - DNA, 20 bp, Artificial Sequence
  Description of Artificial Sequence: Synthetic oligonucleotide
  Target: LAMA2; (+) strand; PAM type: YTN; PAM sequence: TTT
tccccacatttccccctttt

SEQ ID NO: 338030 - DNA, 20 bp, Artificial Sequence
  Description of Artificial Sequence: Synthetic oligonucleotide
  Target: LAMA2; (+) strand; PAM type: YTN; PAM sequence: TTT
ccccacatttcccccttttc

SEQ ID NO: 338031 - DNA, 20 bp, Artificial Sequence
  Description of Artificial Sequence: Synthetic oligonucleotide
  Target: LAMA2; (+) strand; PAM type: YTN; PAM sequence: TTC
cccacatttcccccttttct

SEQ ID NO: 338032 - DNA, 20 bp, Artificial Sequence
  Description of Artificial Sequence: Synthetic oligonucleotide
  Target: LAMA2; (+) strand; PAM type: YTN; PAM sequence: TTT
cccccttttctattccacaa

SEQ ID NO: 338033 - DNA, 20 bp, Artificial Sequence
  Description of Artificial Sequence: Synthetic oligonucleotide
  Target: LAMA2; (+) strand; PAM type: YTN; PAM sequence: TTC
ccccttttctattccacaaa

SEQ ID NO: 338034 - DNA, 20 bp, Artificial Sequence
  Description of Artificial Sequence: Synthetic oligonucleotide
  Target: LAMA2; (+) strand; PAM type: YTN; PAM sequence: CTT
ttctattccacaaaaccacc

SEQ ID NO: 338035 - DNA, 20 bp, Artificial Sequence
  Description of Artificial Sequence: Synthetic oligonucleotide
  Target: LAMA2; (+) strand; PAM type: YTN; PAM sequence: TTT
tctattccacaaaaccacca

SEQ ID NO: 338036 - DNA, 20 bp, Artificial Sequence
  Description of Artificial Sequence: Synthetic oligonucleotide
  Target: LAMA2; (+) strand; PAM type: YTN; PAM sequence: TTT
ctattccacaaaaccaccat

SEQ ID NO: 338037 - DNA, 20 bp, Artificial Sequence
  Description of Artificial Sequence: Synthetic oligonucleotide
  Target: LAMA2; (+) strand; PAM type: YTN; PAM sequence: TTC
tattccacaaaaccaccatc

SEQ ID NO: 338038 - DNA, 20 bp, Artificial Sequence
  Description of Artificial Sequence: Synthetic oligonucleotide
  Target: LAMA2; (+) strand; PAM type: YTN; PAM sequence: CTA
ttccacaaaaccaccatcat

SEQ ID NO: 338039 - DNA, 20 bp, Artificial Sequence
  Description of Artificial Sequence: Synthetic oligonucleotide
  Target: LAMA2; (+) strand; PAM type: YTN; PAM sequence: TTC
cacaaaaccaccatcatcat

SEQ ID NO: 338040 - DNA, 20 bp, Artificial Sequence
  Description of Artificial Sequence: Synthetic oligonucleotide
  Target: LAMA2; (+) strand; PAM type: YTN; PAM sequence: TTC
tcaatgagctgctgggtaca

SEQ ID NO: 338041 - DNA, 20 bp, Artificial Sequence
  Description of Artificial Sequence: Synthetic oligonucleotide
  Target: LAMA2; (+) strand; PAM type: YTN; PAM sequence: CTC
aatgagctgctgggtacacc

SEQ ID NO: 338042 - DNA, 20 bp, Artificial Sequence
  Description of Artificial Sequence: Synthetic oligonucleotide
  Target: LAMA2; (+) strand; PAM type: YTN; PAM sequence: CTG
ctgggtacacctcccagatg

SEQ ID NO: 338043 - DNA, 20 bp, Artificial Sequence
  Description of Artificial Sequence: Synthetic oligonucleotide
  Target: LAMA2; (+) strand; PAM type: YTN; PAM sequence: CTG
ggtacacctcccagatgggg

SEQ ID NO: 338044 - DNA, 20 bp, Artificial Sequence
  Description of Artificial Sequence: Synthetic oligonucleotide
  Target: LAMA2; (+) strand; PAM type: YTN; PAM sequence: CTC
ccagatggggtggcggctgg

SEQ ID NO: 338045 - DNA, 20 bp, Artificial Sequence
  Description of Artificial Sequence: Synthetic oligonucleotide
  Target: LAMA2; (+) strand; PAM type: YTN; PAM sequence: CTG
ggcagaggggctcctcactt

SEQ ID NO: 338046 - DNA, 20 bp, Artificial Sequence
  Description of Artificial Sequence: Synthetic oligonucleotide
  Target: LAMA2; (+) strand; PAM type: YTN; PAM sequence: CTC
ctcacttcccagaaggggtg

SEQ ID NO: 338047 - DNA, 20 bp, Artificial Sequence
  Description of Artificial Sequence: Synthetic oligonucleotide
  Target: LAMA2; (+) strand; PAM type: YTN; PAM sequence: CTC
acttcccagaaggggtggcc

SEQ ID NO: 338048 - DNA, 20 bp, Artificial Sequence
  Description of Artificial Sequence: Synthetic oligonucleotide
  Target: LAMA2; (+) strand; PAM type: YTN; PAM sequence: CTT
cccagaaggggtggccggta

SEQ ID NO: 338049 - DNA, 20 bp, Artificial Sequence
  Description of Artificial Sequence: Synthetic oligonucleotide
  Target: LAMA2; (+) strand; PAM type: YTN; PAM sequence: TTC
ccagaaggggtggccggtag

SEQ ID NO: 338050 - DNA, 20 bp, Artificial Sequence
  Description of Artificial Sequence: Synthetic oligonucleotide
  Target: LAMA2; (+) strand; PAM type: YTN; PAM sequence: CTC
cctcccagacggggtggctg

SEQ ID NO: 338051 - DNA, 20 bp, Artificial Sequence
  Description of Artificial Sequence: Synthetic oligonucleotide
  Target: LAMA2; (+) strand; PAM type: YTN; PAM sequence: CTC
ccagacggggtggctggcca

SEQ ID NO: 338052 - DNA, 20 bp, Artificial Sequence
  Description of Artificial Sequence: Synthetic oligonucleotide
  Target: LAMA2; (+) strand; PAM type: YTN; PAM sequence: CTG
gccaggcgggggctgccccc

SEQ ID NO: 338053 - DNA, 20 bp, Artificial Sequence
  Description of Artificial Sequence: Synthetic oligonucleotide
  Target: LAMA2; (+) strand; PAM type: YTN; PAM sequence: CTG
ccccctacctccctcctgga

SEQ ID NO: 338054 - DNA, 20 bp, Artificial Sequence
  Description of Artificial Sequence: Synthetic oligonucleotide
  Target: LAMA2; (+) strand; PAM type: YTN; PAM sequence: CTA
cctccctcctggacggggcg

SEQ ID NO: 338055 - DNA, 20 bp, Artificial Sequence
  Description of Artificial Sequence: Synthetic oligonucleotide
  Target: LAMA2; (+) strand; PAM type: YTN; PAM sequence: CTC
cctcctggacggggcggctg

SEQ ID NO: 338056 - DNA, 20 bp, Artificial Sequence
  Description of Artificial Sequence: Synthetic oligonucleotide
  Target: LAMA2; (+) strand; PAM type: YTN; PAM sequence: CTC
ctggacggggcggctggcag

SEQ ID NO: 338057 - DNA, 20 bp, Artificial Sequence
  Description of Artificial Sequence: Synthetic oligonucleotide
  Target: LAMA2; (+) strand; PAM type: YTN; PAM sequence: CTG
gacggggcggctggcagggt

SEQ ID NO: 338058 - DNA, 20 bp, Artificial Sequence
  Description of Artificial Sequence: Synthetic oligonucleotide
  Target: LAMA2; (+) strand; PAM type: YTN; PAM sequence: CTG
gcagggtgggggctgccccc

SEQ ID NO: 338059 - DNA, 20 bp, Artificial Sequence
  Description of Artificial Sequence: Synthetic oligonucleotide
  Target: LAMA2; (+) strand; PAM type: YTN; PAM sequence: CTG
cccccacctccctcccggac

SEQ ID NO: 338060 - DNA, 20 bp, Artificial Sequence
  Description of Artificial Sequence: Synthetic oligonucleotide
  Target: LAMA2; (+) strand; PAM type: YTN; PAM sequence: CTC
cctcccggacggggtggctg

SEQ ID NO: 338061 - DNA, 20 bp, Artificial Sequence
  Description of Artificial Sequence: Synthetic oligonucleotide
  Target: LAMA2; (+) strand; PAM type: YTN; PAM sequence: CTC
ccggacggggtggctgccgg

SEQ ID NO: 338062 - DNA, 20 bp, Artificial Sequence
  Description of Artificial Sequence: Synthetic oligonucleotide
  Target: LAMA2; (+) strand; PAM type: YTN; PAM sequence: CTG
ccgggcggagacgctcctca

SEQ ID NO: 338063 - DNA, 20 bp, Artificial Sequence
  Description of Artificial Sequence: Synthetic oligonucleotide
  Target: LAMA2; (+) strand; PAM type: YTN; PAM sequence: CTC
ctcacttcccagatggggta

SEQ ID NO: 338064 - DNA, 20 bp, Artificial Sequence
  Description of Artificial Sequence: Synthetic oligonucleotide
  Target: LAMA2; (+) strand; PAM type: YTN; PAM sequence: CTC
acttcccagatggggtagct

SEQ ID NO: 338065 - DNA, 20 bp, Artificial Sequence
  Description of Artificial Sequence: Synthetic oligonucleotide
  Target: LAMA2; (+) strand; PAM type: YTN; PAM sequence: CTT
cccagatggggtagctgccg

SEQ ID NO: 338066 - DNA, 20 bp, Artificial Sequence
  Description of Artificial Sequence: Synthetic oligonucleotide
  Target: LAMA2; (+) strand; PAM type: YTN; PAM sequence: TTC
ccagatggggtagctgccgg

SEQ ID NO: 338067 - DNA, 20 bp, Artificial Sequence
  Description of Artificial Sequence: Synthetic oligonucleotide
  Target: LAMA2; (+) strand; PAM type: YTN; PAM sequence: CTG
ccgggcggaggggctcctca

SEQ ID NO: 338068 - DNA, 20 bp, Artificial Sequence
  Description of Artificial Sequence: Synthetic oligonucleotide
  Target: LAMA2; (+) strand; PAM type: YTN; PAM sequence: CTC
ctcacttctcagacggggcg

SEQ ID NO: 338069 - DNA, 20 bp, Artificial Sequence
  Description of Artificial Sequence: Synthetic oligonucleotide
  Target: LAMA2; (+) strand; PAM type: YTN; PAM sequence: CTC
acttctcagacggggcggct

SEQ ID NO: 338070 - DNA, 20 bp, Artificial Sequence
  Description of Artificial Sequence: Synthetic oligonucleotide
  Target: LAMA2; (+) strand; PAM type: YTN; PAM sequence: CTT
ctcagacggggcggctgccg

SEQ ID NO: 338071 - DNA, 20 bp, Artificial Sequence
  Description of Artificial Sequence: Synthetic oligonucleotide
  Target: LAMA2; (+) strand; PAM type: YTN; PAM sequence: TTC
tcagacggggcggctgccgg

SEQ ID NO: 338072 - DNA, 20 bp, Artificial Sequence
  Description of Artificial Sequence: Synthetic oligonucleotide
  Target: LAMA2; (+) strand; PAM type: YTN; PAM sequence: CTC
agacggggcggctgccgggc

SEQ ID NO: 338073 - DNA, 20 bp, Artificial Sequence
  Description of Artificial Sequence: Synthetic oligonucleotide
  Target: LAMA2; (+) strand; PAM type: YTN; PAM sequence: CTG
ccgggcggaggggttcctca

SEQ ID NO: 338074 - DNA, 20 bp, Artificial Sequence
  Description of Artificial Sequence: Synthetic oligonucleotide
  Target: LAMA2; (+) strand; PAM type: YTN; PAM sequence: TTC
ctcacttctcagatggggcg

SEQ ID NO: 338075 - DNA, 20 bp, Artificial Sequence
  Description of Artificial Sequence: Synthetic oligonucleotide
  Target: LAMA2; (+) strand; PAM type: YTN; PAM sequence: CTC
acttctcagatggggcggct

SEQ ID NO: 338076 - DNA, 20 bp, Artificial Sequence
  Description of Artificial Sequence: Synthetic oligonucleotide
  Target: LAMA2; (+) strand; PAM type: YTN; PAM sequence: CTT
ctcagatggggcggctgccg

SEQ ID NO: 338077 - DNA, 20 bp, Artificial Sequence
  Description of Artificial Sequence: Synthetic oligonucleotide
  Target: LAMA2; (+) strand; PAM type: YTN; PAM sequence: TTC
tcagatggggcggctgccgg

SEQ ID NO: 338078 - DNA, 20 bp, Artificial Sequence
  Description of Artificial Sequence: Synthetic oligonucleotide
  Target: LAMA2; (+) strand; PAM type: YTN; PAM sequence: CTC
agatggggcggctgccgggc

SEQ ID NO: 338079 - DNA, 20 bp, Artificial Sequence
  Description of Artificial Sequence: Synthetic oligonucleotide
  Target: LAMA2; (+) strand; PAM type: YTN; PAM sequence: CTG
ccgggcagaggggctcctca

SEQ ID NO: 338080 - DNA, 20 bp, Artificial Sequence
  Description of Artificial Sequence: Synthetic oligonucleotide
  Target: LAMA2; (+) strand; PAM type: YTN; PAM sequence: CTC
ctcacttctcagacgcagcg

SEQ ID NO: 338081 - DNA, 20 bp, Artificial Sequence
  Description of Artificial Sequence: Synthetic oligonucleotide
  Target: LAMA2; (+) strand; PAM type: YTN; PAM sequence: CTC
acttctcagacgcagcggcc

SEQ ID NO: 338082 - DNA, 20 bp, Artificial Sequence
  Description of Artificial Sequence: Synthetic oligonucleotide
  Target: LAMA2; (+) strand; PAM type: YTN; PAM sequence: CTT
ctcagacgcagcggccgggc

SEQ ID NO: 338083 - DNA, 20 bp, Artificial Sequence
  Description of Artificial Sequence: Synthetic oligonucleotide
  Target: LAMA2; (+) strand; PAM type: YTN; PAM sequence: TTC
tcagacgcagcggccgggca

SEQ ID NO: 338084 - DNA, 20 bp, Artificial Sequence
  Description of Artificial Sequence: Synthetic oligonucleotide
  Target: LAMA2; (+) strand; PAM type: YTN; PAM sequence: CTC
agacgcagcggccgggcaga

SEQ ID NO: 338085 - DNA, 20 bp, Artificial Sequence
  Description of Artificial Sequence: Synthetic oligonucleotide
  Target: LAMA2; (+) strand; PAM type: YTN; PAM sequence: CTC
ctcacttcctagacgggatg

SEQ ID NO: 338086 - DNA, 20 bp, Artificial Sequence
  Description of Artificial Sequence: Synthetic oligonucleotide
  Target: LAMA2; (+) strand; PAM type: YTN; PAM sequence: CTC
acttcctagacgggatggcg

SEQ ID NO: 338087 - DNA, 20 bp, Artificial Sequence
  Description of Artificial Sequence: Synthetic oligonucleotide
  Target: LAMA2; (+) strand; PAM type: YTN; PAM sequence: CTT
cctagacgggatggcggtcc

SEQ ID NO: 338088 - DNA, 20 bp, Artificial Sequence
  Description of Artificial Sequence: Synthetic oligonucleotide
  Target: LAMA2; (+) strand; PAM type: YTN; PAM sequence: TTC
ctagacgggatggcggtccg

SEQ ID NO: 338089 - DNA, 20 bp, Artificial Sequence
  Description of Artificial Sequence: Synthetic oligonucleotide
  Target: LAMA2; (+) strand; PAM type: YTN; PAM sequence: CTA
gacgggatggcggtccggaa

SEQ ID NO: 338090 - DNA, 20 bp, Artificial Sequence
  Description of Artificial Sequence: Synthetic oligonucleotide
  Target: LAMA2; (+) strand; PAM type: YTN; PAM sequence: CTC
ctcacttcccagactgggta

SEQ ID NO: 338091 - DNA, 20 bp, Artificial Sequence
  Description of Artificial Sequence: Synthetic oligonucleotide
  Target: LAMA2; (+) strand; PAM type: YTN; PAM sequence: CTC
acttcccagactgggtagcc

SEQ ID NO: 338092 - DNA, 20 bp, Artificial Sequence
  Description of Artificial Sequence: Synthetic oligonucleotide
  Target: LAMA2; (+) strand; PAM type: YTN; PAM sequence: CTT
cccagactgggtagccaggc

SEQ ID NO: 338093 - DNA, 20 bp, Artificial Sequence
  Description of Artificial Sequence: Synthetic oligonucleotide
  Target: LAMA2; (+) strand; PAM type: YTN; PAM sequence: TTC
ccagactgggtagccaggca

SEQ ID NO: 338094 - DNA, 20 bp, Artificial Sequence
  Description of Artificial Sequence: Synthetic oligonucleotide
  Target: LAMA2; (+) strand; PAM type: YTN; PAM sequence: CTG
ggtagccaggcagaggggct

SEQ ID NO: 338095 - DNA, 20 bp, Artificial Sequence
  Description of Artificial Sequence: Synthetic oligonucleotide
  Target: LAMA2; (+) strand; PAM type: YTN; PAM sequence: CTC
cttacatcccagacgatggg

SEQ ID NO: 338096 - DNA, 20 bp, Artificial Sequence
  Description of Artificial Sequence: Synthetic oligonucleotide
  Target: LAMA2; (+) strand; PAM type: YTN; PAM sequence: CTT
acatcccagacgatgggcgg

SEQ ID NO: 338097 - DNA, 20 bp, Artificial Sequence
  Description of Artificial Sequence: Synthetic oligonucleotide
  Target: LAMA2; (+) strand; PAM type: YTN; PAM sequence: TTA
catcccagacgatgggcggc

SEQ ID NO: 338098 - DNA, 20 bp, Artificial Sequence
  Description of Artificial Sequence: Synthetic oligonucleotide
  Target: LAMA2; (+) strand; PAM type: YTN; PAM sequence: CTC
ctcacttcccagacggggtg

SEQ ID NO: 338099 - DNA, 20 bp, Artificial Sequence
  Description of Artificial Sequence: Synthetic oligonucleotide
  Target: LAMA2; (+) strand; PAM type: YTN; PAM sequence: CTC
acttcccagacggggtggcg

SEQ ID NO: 338100 - DNA, 20 bp, Artificial Sequence
  Description of Artificial Sequence: Synthetic oligonucleotide
  Target: LAMA2; (+) strand; PAM type: YTN; PAM sequence: CTT
cccagacggggtggcggccg

SEQ ID NO: 338101 - DNA, 20 bp, Artificial Sequence
  Description of Artificial Sequence: Synthetic oligonucleotide
  Target: LAMA2; (+) strand; PAM type: YTN; PAM sequence: TTC
ccagacggggtggcggccgg

SEQ ID NO: 338102 - DNA, 20 bp, Artificial Sequence
  Description of Artificial Sequence: Synthetic oligonucleotide
  Target: LAMA2; (+) strand; PAM type: YTN; PAM sequence: CTG
caaactcggcactttgggag

SEQ ID NO: 338103 - DNA, 20 bp, Artificial Sequence
  Description of Artificial Sequence: Synthetic oligonucleotide
  Target: LAMA2; (+) strand; PAM type: YTN; PAM sequence: CTC
ggcactttgggaggccaagg

SEQ ID NO: 338104 - DNA, 20 bp, Artificial Sequence
  Description of Artificial Sequence: Synthetic oligonucleotide
  Target: LAMA2; (+) strand; PAM type: YTN; PAM sequence: CTT
tgggaggccaaggcaggcgg

SEQ ID NO: 338105 - DNA, 20 bp, Artificial Sequence
  Description of Artificial Sequence: Synthetic oligonucleotide
  Target: LAMA2; (+) strand; PAM type: YTN; PAM sequence: TTT
gggaggccaaggcaggcggc

SEQ ID NO: 338106 - DNA, 20 bp, Artificial Sequence
  Description of Artificial Sequence: Synthetic oligonucleotide
  Target: LAMA2; (+) strand; PAM type: YTN; PAM sequence: TTG
ggaggccaaggcaggcggct

SEQ ID NO: 338107 - DNA, 20 bp, Artificial Sequence
  Description of Artificial Sequence: Synthetic oligonucleotide
  Target: LAMA2; (+) strand; PAM type: YTN; PAM sequence: CTG
ggaggtggaggttgtagcta

SEQ ID NO: 338108 - DNA, 20 bp, Artificial Sequence
  Description of Artificial Sequence: Synthetic oligonucleotide
  Target: LAMA2; (+) strand; PAM type: YTN; PAM sequence: TTG
tagctagccgagatcacacc

SEQ ID NO: 338109 - DNA, 20 bp, Artificial Sequence
  Description of Artificial Sequence: Synthetic oligonucleotide
  Target: LAMA2; (+) strand; PAM type: YTN; PAM sequence: CTA
gccgagatcacaccactgca

SEQ ID NO: 338110 - DNA, 20 bp, Artificial Sequence
  Description of Artificial Sequence: Synthetic oligonucleotide
  Target: LAMA2; (+) strand; PAM type: YTN; PAM sequence: CTG
cactccagcctgggcaacat

SEQ ID NO: 338111 - DNA, 20 bp, Artificial Sequence
  Description of Artificial Sequence: Synthetic oligonucleotide
  Target: LAMA2; (+) strand; PAM type: YTN; PAM sequence: CTC
cagcctgggcaacattgagc

SEQ ID NO: 338112 - DNA, 20 bp, Artificial Sequence
  Description of Artificial Sequence: Synthetic oligonucleotide
  Target: LAMA2; (+) strand; PAM type: YTN; PAM sequence: CTG
ggcaacattgagcactgagt

SEQ ID NO: 338113 - DNA, 20 bp, Artificial Sequence
  Description of Artificial Sequence: Synthetic oligonucleotide
  Target: LAMA2; (+) strand; PAM type: YTN; PAM sequence: TTG
agcactgagtgaacgagact

SEQ ID NO: 338114 - DNA, 20 bp, Artificial Sequence
  Description of Artificial Sequence: Synthetic oligonucleotide
  Target: LAMA2; (+) strand; PAM type: YTN; PAM sequence: CTG
agtgaacgagactccgtctg

SEQ ID NO: 338115 - DNA, 20 bp, Artificial Sequence
  Description of Artificial Sequence: Synthetic oligonucleotide
  Target: LAMA2; (+) strand; PAM type: YTN; PAM sequence: CTC
cgtctgcaatctcggcacct

SEQ ID NO: 338116 - DNA, 20 bp, Artificial Sequence
  Description of Artificial Sequence: Synthetic oligonucleotide
  Target: LAMA2; (+) strand; PAM type: YTN; PAM sequence: CTG
caatctcggcacctcgggag

SEQ ID NO: 338117 - DNA, 20 bp, Artificial Sequence
  Description of Artificial Sequence: Synthetic oligonucleotide
  Target: LAMA2; (+) strand; PAM type: YTN; PAM sequence: CTC
ggcacctcgggaggccgagg

SEQ ID NO: 338118 - DNA, 20 bp, Artificial Sequence
  Description of Artificial Sequence: Synthetic oligonucleotide
  Target: LAMA2; (+) strand; PAM type: YTN; PAM sequence: CTC
gggaggccgaggctggcaga

SEQ ID NO: 338119 - DNA, 20 bp, Artificial Sequence
  Description of Artificial Sequence: Synthetic oligonucleotide
  Target: LAMA2; (+) strand; PAM type: YTN; PAM sequence: CTG
gcagatcactcgcggttagg

SEQ ID NO: 338120 - DNA, 20 bp, Artificial Sequence
  Description of Artificial Sequence: Synthetic oligonucleotide
  Target: LAMA2; (+) strand; PAM type: YTN; PAM sequence: CTC
gcggttaggagctggagacc

SEQ ID NO: 338121 - DNA, 20 bp, Artificial Sequence
  Description of Artificial Sequence: Synthetic oligonucleotide
  Target: LAMA2; (+) strand; PAM type: YTN; PAM sequence: TTA
ggagctggagaccagcccgg

SEQ ID NO: 338122 - DNA, 20 bp, Artificial Sequence
  Description of Artificial Sequence: Synthetic oligonucleotide
  Target: LAMA2; (+) strand; PAM type: YTN; PAM sequence: CTG
gagaccagcccggtagatga

SEQ ID NO: 338123 - DNA, 20 bp, Artificial Sequence
  Description of Artificial Sequence: Synthetic oligonucleotide
  Target: LAMA2; (+) strand; PAM type: YTN; PAM sequence: TTT
catttgcaatagctaaaatt

SEQ ID NO: 338124 - DNA, 20 bp, Artificial Sequence
  Description of Artificial Sequence: Synthetic oligonucleotide
  Target: LAMA2; (+) strand; PAM type: YTN; PAM sequence: TTC
atttgcaatagctaaaattg

SEQ ID NO: 338125 - DNA, 20 bp, Artificial Sequence
  Description of Artificial Sequence: Synthetic oligonucleotide
  Target: LAMA2; (+) strand; PAM type: YTN; PAM sequence: TTT
gcaatagctaaaattgacta

SEQ ID NO: 338126 - DNA, 20 bp, Artificial Sequence
  Description of Artificial Sequence: Synthetic oligonucleotide
  Target: LAMA2; (+) strand; PAM type: YTN; PAM sequence: TTG
caatagctaaaattgactaa

SEQ ID NO: 338127 - DNA, 20 bp, Artificial Sequence
  Description of Artificial Sequence: Synthetic oligonucleotide
  Target: LAMA2; (+) strand; PAM type: YTN; PAM sequence: CTA
aaattgactaagtgttaagt

SEQ ID NO: 338128 - DNA, 20 bp, Artificial Sequence
  Description of Artificial Sequence: Synthetic oligonucleotide
  Target: LAMA2; (+) strand; PAM type: YTN; PAM sequence: TTG
actaagtgttaagtgactct

SEQ ID NO: 338129 - DNA, 20 bp, Artificial Sequence
  Description of Artificial Sequence: Synthetic oligonucleotide
  Target: LAMA2; (+) strand; PAM type: YTN; PAM sequence: CTA
agtgttaagtgactctgatc

SEQ ID NO: 338130 - DNA, 20 bp, Artificial Sequence
  Description of Artificial Sequence: Synthetic oligonucleotide
  Target: LAMA2; (+) strand; PAM type: YTN; PAM sequence: TTA
agtgactctgatctgttgaa

SEQ ID NO: 338131 - DNA, 20 bp, Artificial Sequence
  Description of Artificial Sequence: Synthetic oligonucleotide
  Target: LAMA2; (+) strand; PAM type: YTN; PAM sequence: CTC
tgatctgttgaaagaattca

SEQ ID NO: 338132 - DNA, 20 bp, Artificial Sequence
  Description of Artificial Sequence: Synthetic oligonucleotide
  Target: LAMA2; (+) strand; PAM type: YTN; PAM sequence: CTG
atctgttgaaagaattcatg

SEQ ID NO: 338133 - DNA, 20 bp, Artificial Sequence
  Description of Artificial Sequence: Synthetic oligonucleotide
  Target: LAMA2; (+) strand; PAM type: YTN; PAM sequence: CTG
ttgaaagaattcatgaacca

SEQ ID NO: 338134 - DNA, 20 bp, Artificial Sequence
  Description of Artificial Sequence: Synthetic oligonucleotide
  Target: LAMA2; (+) strand; PAM type: YTN; PAM sequence: TTG
aaagaattcatgaaccaaga

SEQ ID NO: 338135 - DNA, 20 bp, Artificial Sequence
  Description of Artificial Sequence: Synthetic oligonucleotide
  Target: LAMA2; (+) strand; PAM type: YTN; PAM sequence: TTC
atgaaccaagatcagaaact

SEQ ID NO: 338136 - DNA, 20 bp, Artificial Sequence
  Description of Artificial Sequence: Synthetic oligonucleotide
  Target: LAMA2; (+) strand; PAM type: YTN; PAM sequence: CTT
tcttctgtctttgatttgtt

SEQ ID NO: 338137 - DNA, 20 bp, Artificial Sequence
  Description of Artificial Sequence: Synthetic oligonucleotide
  Target: LAMA2; (+) strand; PAM type: YTN; PAM sequence: TTT
cttctgtctttgatttgtta

SEQ ID NO: 338138 - DNA, 20 bp, Artificial Sequence
  Description of Artificial Sequence: Synthetic oligonucleotide
  Target: LAMA2; (+) strand; PAM type: YTN; PAM sequence: TTC
ttctgtctttgatttgttat

SEQ ID NO: 338139 - DNA, 20 bp, Artificial Sequence
  Description of Artificial Sequence: Synthetic oligonucleotide
  Target: LAMA2; (+) strand; PAM type: YTN; PAM sequence: CTT
ctgtctttgatttgttattc

SEQ ID NO: 338140 - DNA, 20 bp, Artificial Sequence
  Description of Artificial Sequence: Synthetic oligonucleotide
  Target: LAMA2; (+) strand; PAM type: YTN; PAM sequence: TTC
tgtctttgatttgttattct

SEQ ID NO: 338141 - DNA, 20 bp, Artificial Sequence
  Description of Artificial Sequence: Synthetic oligonucleotide
  Target: LAMA2; (+) strand; PAM type: YTN; PAM sequence: CTG
tctttgatttgttattctac

SEQ ID NO: 338142 - DNA, 20 bp, Artificial Sequence
  Description of Artificial Sequence: Synthetic oligonucleotide
  Target: LAMA2; (+) strand; PAM type: YTN; PAM sequence: CTT
tgatttgttattctactctg

SEQ ID NO: 338143 - DNA, 20 bp, Artificial Sequence
  Description of Artificial Sequence: Synthetic oligonucleotide
  Target: LAMA2; (+) strand; PAM type: YTN; PAM sequence: TTT
gatttgttattctactctgt

SEQ ID NO: 338144 - DNA, 20 bp, Artificial Sequence
  Description of Artificial Sequence: Synthetic oligonucleotide
  Target: LAMA2; (+) strand; PAM type: YTN; PAM sequence: TTG
atttgttattctactctgtt

SEQ ID NO: 338145 - DNA, 20 bp, Artificial Sequence
  Description of Artificial Sequence: Synthetic oligonucleotide
  Target: LAMA2; (+) strand; PAM type: YTN; PAM sequence: TTT
gttattctactctgttaaca

SEQ ID NO: 338146 - DNA, 20 bp, Artificial Sequence
  Description of Artificial Sequence: Synthetic oligonucleotide
  Target: LAMA2; (+) strand; PAM type: YTN; PAM sequence: TTG
ttattctactctgttaacat

SEQ ID NO: 338147 - DNA, 20 bp, Artificial Sequence
  Description of Artificial Sequence: Synthetic oligonucleotide
  Target: LAMA2; (+) strand; PAM type: YTN; PAM sequence: TTA
ttctactctgttaacattat

SEQ ID NO: 338148 - DNA, 20 bp, Artificial Sequence
  Description of Artificial Sequence: Synthetic oligonucleotide
  Target: LAMA2; (+) strand; PAM type: YTN; PAM sequence: TTC
tactctgttaacattatact

SEQ ID NO: 338149 - DNA, 20 bp, Artificial Sequence
  Description of Artificial Sequence: Synthetic oligonucleotide
  Target: LAMA2; (+) strand; PAM type: YTN; PAM sequence: CTA
ctctgttaacattatacttc

SEQ ID NO: 338150 - DNA, 20 bp, Artificial Sequence
  Description of Artificial Sequence: Synthetic oligonucleotide
  Target: LAMA2; (+) strand; PAM type: YTN; PAM sequence: CTC
tgttaacattatacttctaa

SEQ ID NO: 338151 - DNA, 20 bp, Artificial Sequence
  Description of Artificial Sequence: Synthetic oligonucleotide
  Target: LAMA2; (+) strand; PAM type: YTN; PAM sequence: CTG
ttaacattatacttctaaca

SEQ ID NO: 338152 - DNA, 20 bp, Artificial Sequence
  Description of Artificial Sequence: Synthetic oligonucleotide
  Target: LAMA2; (+) strand; PAM type: YTN; PAM sequence: TTA
acattatacttctaacactt

SEQ ID NO: 338153 - DNA, 20 bp, Artificial Sequence
  Description of Artificial Sequence: Synthetic oligonucleotide
  Target: LAMA2; (+) strand; PAM type: YTN; PAM sequence: TTA
tacttctaacacttcccatc

SEQ ID NO: 338154 - DNA, 20 bp, Artificial Sequence
  Description of Artificial Sequence: Synthetic oligonucleotide
  Target: LAMA2; (+) strand; PAM type: YTN; PAM sequence: CTT
ctaacacttcccatcactac

SEQ ID NO: 338155 - DNA, 20 bp, Artificial Sequence
  Description of Artificial Sequence: Synthetic oligonucleotide
  Target: LAMA2; (+) strand; PAM type: YTN; PAM sequence: TTC
taacacttcccatcactaca

SEQ ID NO: 338156 - DNA, 20 bp, Artificial Sequence
  Description of Artificial Sequence: Synthetic oligonucleotide
  Target: LAMA2; (+) strand; PAM type: YTN; PAM sequence: CTA
acacttcccatcactacaaa

SEQ ID NO: 338157 - DNA, 20 bp, Artificial Sequence
  Description of Artificial Sequence: Synthetic oligonucleotide
  Target: LAMA2; (+) strand; PAM type: YTN; PAM sequence: CTT
cccatcactacaaatctttg

SEQ ID NO: 338158 - DNA, 20 bp, Artificial Sequence
  Description of Artificial Sequence: Synthetic oligonucleotide
  Target: LAMA2; (+) strand; PAM type: YTN; PAM sequence: TTC
ccatcactacaaatctttgc

SEQ ID NO: 338159 - DNA, 20 bp, Artificial Sequence
  Description of Artificial Sequence: Synthetic oligonucleotide
  Target: LAMA2; (+) strand; PAM type: YTN; PAM sequence: CTA
caaatctttgctattagtcc

SEQ ID NO: 338160 - DNA, 20 bp, Artificial Sequence
  Description of Artificial Sequence: Synthetic oligonucleotide
  Target: LAMA2; (+) strand; PAM type: YTN; PAM sequence: CTT
tgctattagtccccaaatgc

SEQ ID NO: 338161 - DNA, 20 bp, Artificial Sequence
  Description of Artificial Sequence: Synthetic oligonucleotide
  Target: LAMA2; (+) strand; PAM type: YTN; PAM sequence: TTT
gctattagtccccaaatgct

SEQ ID NO: 338162 - DNA, 20 bp, Artificial Sequence
  Description of Artificial Sequence: Synthetic oligonucleotide
  Target: LAMA2; (+) strand; PAM type: YTN; PAM sequence: TTG
ctattagtccccaaatgctt

SEQ ID NO: 338163 - DNA, 20 bp, Artificial Sequence
  Description of Artificial Sequence: Synthetic oligonucleotide
  Target: LAMA2; (+) strand; PAM type: YTN; PAM sequence: CTA
ttagtccccaaatgctttga

SEQ ID NO: 338164 - DNA, 20 bp, Artificial Sequence
  Description of Artificial Sequence: Synthetic oligonucleotide
  Target: LAMA2; (+) strand; PAM type: YTN; PAM sequence: TTA
gtccccaaatgctttgaact

SEQ ID NO: 338165 - DNA, 20 bp, Artificial Sequence
  Description of Artificial Sequence: Synthetic oligonucleotide
  Target: LAMA2; (+) strand; PAM type: YTN; PAM sequence: CTT
tgaactagagtgattcattt

SEQ ID NO: 338166 - DNA, 20 bp, Artificial Sequence
  Description of Artificial Sequence: Synthetic oligonucleotide
  Target: LAMA2; (+) strand; PAM type: YTN; PAM sequence: TTT
gaactagagtgattcattta

SEQ ID NO: 338167 - DNA, 20 bp, Artificial Sequence
  Description of Artificial Sequence: Synthetic oligonucleotide
  Target: LAMA2; (+) strand; PAM type: YTN; PAM sequence: TTG
aactagagtgattcatttat

SEQ ID NO: 338168 - DNA, 20 bp, Artificial Sequence
  Description of Artificial Sequence: Synthetic oligonucleotide
  Target: LAMA2; (+) strand; PAM type: YTN; PAM sequence: CTA
gagtgattcatttatgtgtg

SEQ ID NO: 338169 - DNA, 20 bp, Artificial Sequence
  Description of Artificial Sequence: Synthetic oligonucleotide
  Target: LAMA2; (+) strand; PAM type: YTN; PAM sequence: TTC
atttatgtgtgtaatgtcat

SEQ ID NO: 338170 - DNA, 20 bp, Artificial Sequence
  Description of Artificial Sequence: Synthetic oligonucleotide
  Target: LAMA2; (+) strand; PAM type: YTN; PAM sequence: TTT
atgtgtgtaatgtcataaat

SEQ ID NO: 338171 - DNA, 20 bp, Artificial Sequence
  Description of Artificial Sequence: Synthetic oligonucleotide
  Target: LAMA2; (+) strand; PAM type: YTN; PAM sequence: TTA
tgtgtgtaatgtcataaatt

SEQ ID NO: 338172 - DNA, 20 bp, Artificial Sequence
  Description of Artificial Sequence: Synthetic oligonucleotide
  Target: LAMA2; (+) strand; PAM type: YTN; PAM sequence: TTG
gagaatgtgtaggttcatct

SEQ ID NO: 338173 - DNA, 20 bp, Artificial Sequence
  Description of Artificial Sequence: Synthetic oligonucleotide
  Target: LAMA2; (+) strand; PAM type: YTN; PAM sequence: TTC
atcttaccttggtaaataca

SEQ ID NO: 338174 - DNA, 20 bp, Artificial Sequence
  Description of Artificial Sequence: Synthetic oligonucleotide
  Target: LAMA2; (+) strand; PAM type: YTN; PAM sequence: CTT
accttggtaaatacagaagc

SEQ ID NO: 338175 - DNA, 20 bp, Artificial Sequence
  Description of Artificial Sequence: Synthetic oligonucleotide
  Target: LAMA2; (+) strand; PAM type: YTN; PAM sequence: TTA
ccttggtaaatacagaagca

SEQ ID NO: 338176 - DNA, 20 bp, Artificial Sequence
  Description of Artificial Sequence: Synthetic oligonucleotide
  Target: LAMA2; (+) strand; PAM type: YTN; PAM sequence: CTT
ggtaaatacagaagcacaaa

SEQ ID NO: 338177 - DNA, 20 bp, Artificial Sequence
  Description of Artificial Sequence: Synthetic oligonucleotide
  Target: LAMA2; (+) strand; PAM type: YTN; PAM sequence: TTG
gtaaatacagaagcacaaaa

SEQ ID NO: 338178 - DNA, 20 bp, Artificial Sequence
  Description of Artificial Sequence: Synthetic oligonucleotide
  Target: LAMA2; (+) strand; PAM type: YTN; PAM sequence: TTT
ctccagggtgaataaatttt

SEQ ID NO: 338179 - DNA, 20 bp, Artificial Sequence
  Description of Artificial Sequence: Synthetic oligonucleotide
  Target: LAMA2; (+) strand; PAM type: YTN; PAM sequence: TTC
tccagggtgaataaatttta

SEQ ID NO: 338180 - DNA, 20 bp, Artificial Sequence
  Description of Artificial Sequence: Synthetic oligonucleotide
  Target: LAMA2; (+) strand; PAM type: YTN; PAM sequence: CTC
cagggtgaataaattttaga

SEQ ID NO: 338181 - DNA, 20 bp, Artificial Sequence
  Description of Artificial Sequence: Synthetic oligonucleotide
  Target: LAMA2; (+) strand; PAM type: YTN; PAM sequence: TTT
tagaaggcaaatttaaactg

SEQ ID NO: 338182 - DNA, 20 bp, Artificial Sequence
  Description of Artificial Sequence: Synthetic oligonucleotide
  Target: LAMA2; (+) strand; PAM type: YTN; PAM sequence: TTT
agaaggcaaatttaaactgt

SEQ ID NO: 338183 - DNA, 20 bp, Artificial Sequence
  Description of Artificial Sequence: Synthetic oligonucleotide
  Target: LAMA2; (+) strand; PAM type: YTN; PAM sequence: TTA
gaaggcaaatttaaactgtc

SEQ ID NO: 338184 - DNA, 20 bp, Artificial Sequence
  Description of Artificial Sequence: Synthetic oligonucleotide
  Target: LAMA2; (+) strand; PAM type: YTN; PAM sequence: TTT
aaactgtcatatttctgatt

SEQ ID NO: 338185 - DNA, 20 bp, Artificial Sequence
  Description of Artificial Sequence: Synthetic oligonucleotide
  Target: LAMA2; (+) strand; PAM type: YTN; PAM sequence: TTA
aactgtcatatttctgattg

SEQ ID NO: 338186 - DNA, 20 bp, Artificial Sequence
  Description of Artificial Sequence: Synthetic oligonucleotide
  Target: LAMA2; (+) strand; PAM type: YTN; PAM sequence: CTG
tcatatttctgattgcctgt

SEQ ID NO: 338187 - DNA, 20 bp, Artificial Sequence
  Description of Artificial Sequence: Synthetic oligonucleotide
  Target: LAMA2; (+) strand; PAM type: YTN; PAM sequence: TTT
ctgattgcctgtgattcaca

SEQ ID NO: 338188 - DNA, 20 bp, Artificial Sequence
  Description of Artificial Sequence: Synthetic oligonucleotide
  Target: LAMA2; (+) strand; PAM type: YTN; PAM sequence: TTC
tgattgcctgtgattcacac

SEQ ID NO: 338189 - DNA, 20 bp, Artificial Sequence
  Description of Artificial Sequence: Synthetic oligonucleotide
  Target: LAMA2; (+) strand; PAM type: YTN; PAM sequence: CTG
attgcctgtgattcacacca

SEQ ID NO: 338190 - DNA, 20 bp, Artificial Sequence
  Description of Artificial Sequence: Synthetic oligonucleotide
  Target: LAMA2; (+) strand; PAM type: YTN; PAM sequence: TTG
cctgtgattcacaccattgt

SEQ ID NO: 338191 - DNA, 20 bp, Artificial Sequence
  Description of Artificial Sequence: Synthetic oligonucleotide
  Target: LAMA2; (+) strand; PAM type: YTN; PAM sequence: CTG
tgattcacaccattgttgta

SEQ ID NO: 338192 - DNA, 20 bp, Artificial Sequence
  Description of Artificial Sequence: Synthetic oligonucleotide
  Target: LAMA2; (+) strand; PAM type: YTN; PAM sequence: TTC
acaccattgttgtactctgt

SEQ ID NO: 338193 - DNA, 20 bp, Artificial Sequence
  Description of Artificial Sequence: Synthetic oligonucleotide
  Target: LAMA2; (+) strand; PAM type: YTN; PAM sequence: TTG
ttgtactctgtgacagtttc

SEQ ID NO: 338194 - DNA, 20 bp, Artificial Sequence
  Description of Artificial Sequence: Synthetic oligonucleotide
  Target: LAMA2; (+) strand; PAM type: YTN; PAM sequence: TTG
tactctgtgacagtttcatt

SEQ ID NO: 338195 - DNA, 20 bp, Artificial Sequence
  Description of Artificial Sequence: Synthetic oligonucleotide
  Target: LAMA2; (+) strand; PAM type: YTN; PAM sequence: CTC
tgtgacagtttcattgaaag

SEQ ID NO: 338196 - DNA, 20 bp, Artificial Sequence
  Description of Artificial Sequence: Synthetic oligonucleotide
  Target: LAMA2; (+) strand; PAM type: YTN; PAM sequence: CTG
tgacagtttcattgaaagga

SEQ ID NO: 338197 - DNA, 20 bp, Artificial Sequence
  Description of Artificial Sequence: Synthetic oligonucleotide
  Target: LAMA2; (+) strand; PAM type: YTN; PAM sequence: TTT
cattgaaaggactgtcatgt

SEQ ID NO: 338198 - DNA, 20 bp, Artificial Sequence
  Description of Artificial Sequence: Synthetic oligonucleotide
  Target: LAMA2; (+) strand; PAM type: YTN; PAM sequence: TTC
attgaaaggactgtcatgtt

SEQ ID NO: 338199 - DNA, 20 bp, Artificial Sequence
  Description of Artificial Sequence: Synthetic oligonucleotide
  Target: LAMA2; (+) strand; PAM type: YTN; PAM sequence: TTG
aaaggactgtcatgttccat

SEQ ID NO: 338200 - DNA, 20 bp, Artificial Sequence
  Description of Artificial Sequence: Synthetic oligonucleotide
  Target: LAMA2; (+) strand; PAM type: YTN; PAM sequence: CTG
tcatgttccatgaggaactc

SEQ ID NO: 338201 - DNA, 20 bp, Artificial Sequence
  Description of Artificial Sequence: Synthetic oligonucleotide
  Target: LAMA2; (+) strand; PAM type: YTN; PAM sequence: TTC
catgaggaactcagcctacc

SEQ ID NO: 338202 - DNA, 20 bp, Artificial Sequence
  Description of Artificial Sequence: Synthetic oligonucleotide
  Target: LAMA2; (+) strand; PAM type: YTN; PAM sequence: CTC
agcctacctgctcttttacc

SEQ ID NO: 338203 - DNA, 20 bp, Artificial Sequence
  Description of Artificial Sequence: Synthetic oligonucleotide
  Target: LAMA2; (+) strand; PAM type: YTN; PAM sequence: CTA
cctgctcttttaccagtagc

SEQ ID NO: 338204 - DNA, 20 bp, Artificial Sequence
  Description of Artificial Sequence: Synthetic oligonucleotide
  Target: LAMA2; (+) strand; PAM type: YTN; PAM sequence: CTG
ctcttttaccagtagctggt

SEQ ID NO: 338205 - DNA, 20 bp, Artificial Sequence
  Description of Artificial Sequence: Synthetic oligonucleotide
  Target: LAMA2; (+) strand; PAM type: YTN; PAM sequence: CTC
ttttaccagtagctggtggg

SEQ ID NO: 338206 - DNA, 20 bp, Artificial Sequence
  Description of Artificial Sequence: Synthetic oligonucleotide
  Target: LAMA2; (+) strand; PAM type: YTN; PAM sequence: CTT
ttaccagtagctggtgggaa

SEQ ID NO: 338207 - DNA, 20 bp, Artificial Sequence
  Description of Artificial Sequence: Synthetic oligonucleotide
  Target: LAMA2; (+) strand; PAM type: YTN; PAM sequence: TTT
taccagtagctggtgggaaa

SEQ ID NO: 338208 - DNA, 20 bp, Artificial Sequence
  Description of Artificial Sequence: Synthetic oligonucleotide
  Target: LAMA2; (+) strand; PAM type: YTN; PAM sequence: TTT
accagtagctggtgggaaag

SEQ ID NO: 338209 - DNA, 20 bp, Artificial Sequence
  Description of Artificial Sequence: Synthetic oligonucleotide
  Target: LAMA2; (+) strand; PAM type: YTN; PAM sequence: TTA
ccagtagctggtgggaaagc

SEQ ID NO: 338210 - DNA, 20 bp, Artificial Sequence
  Description of Artificial Sequence: Synthetic oligonucleotide
  Target: LAMA2; (+) strand; PAM type: YTN; PAM sequence: CTG
gtgggaaagccatgctgtgc

SEQ ID NO: 338211 - DNA, 20 bp, Artificial Sequence
  Description of Artificial Sequence: Synthetic oligonucleotide
  Target: LAMA2; (+) strand; PAM type: YTN; PAM sequence: CTG
tgccaatgacttattcacag

SEQ ID NO: 338212 - DNA, 20 bp, Artificial Sequence
  Description of Artificial Sequence: Synthetic oligonucleotide
  Target: LAMA2; (+) strand; PAM type: YTN; PAM sequence: CTT
attcacaggaggcaggtcaa

SEQ ID NO: 338213 - DNA, 20 bp, Artificial Sequence
  Description of Artificial Sequence: Synthetic oligonucleotide
  Target: LAMA2; (+) strand; PAM type: YTN; PAM sequence: TTA
ttcacaggaggcaggtcaat

SEQ ID NO: 338214 - DNA, 20 bp, Artificial Sequence
  Description of Artificial Sequence: Synthetic oligonucleotide
  Target: LAMA2; (+) strand; PAM type: YTN; PAM sequence: TTC
acaggaggcaggtcaatctt

SEQ ID NO: 338215 - DNA, 20 bp, Artificial Sequence
  Description of Artificial Sequence: Synthetic oligonucleotide
  Target: LAMA2; (+) strand; PAM type: YTN; PAM sequence: CTT
ttgaaaccacagattgtttc

SEQ ID NO: 338216 - DNA, 20 bp, Artificial Sequence
  Description of Artificial Sequence: Synthetic oligonucleotide
  Target: LAMA2; (+) strand; PAM type: YTN; PAM sequence: TTT
tgaaaccacagattgtttca

SEQ ID NO: 338217 - DNA, 20 bp, Artificial Sequence
  Description of Artificial Sequence: Synthetic oligonucleotide
  Target: LAMA2; (+) strand; PAM type: YTN; PAM sequence: TTT
gaaaccacagattgtttcaa

SEQ ID NO: 338218 - DNA, 20 bp, Artificial Sequence
  Description of Artificial Sequence: Synthetic oligonucleotide
  Target: LAMA2; (+) strand; PAM type: YTN; PAM sequence: TTG
aaaccacagattgtttcaaa

SEQ ID NO: 338219 - DNA, 20 bp, Artificial Sequence
  Description of Artificial Sequence: Synthetic oligonucleotide
  Target: LAMA2; (+) strand; PAM type: YTN; PAM sequence: TTG
tttcaaatgagagaaaaata

SEQ ID NO: 338220 - DNA, 20 bp, Artificial Sequence
  Description of Artificial Sequence: Synthetic oligonucleotide
  Target: LAMA2; (+) strand; PAM type: YTN; PAM sequence: TTT
caaatgagagaaaaatatgt

SEQ ID NO: 338221 - DNA, 20 bp, Artificial Sequence
  Description of Artificial Sequence: Synthetic oligonucleotide
  Target: LAMA2; (+) strand; PAM type: YTN; PAM sequence: TTC
aaatgagagaaaaatatgtg

SEQ ID NO: 338222 - DNA, 20 bp, Artificial Sequence
  Description of Artificial Sequence: Synthetic oligonucleotide
  Target: LAMA2; (+) strand; PAM type: YTN; PAM sequence: CTA
aagacaaggaaaatgcttgc

SEQ ID NO: 338223 - DNA, 20 bp, Artificial Sequence
  Description of Artificial Sequence: Synthetic oligonucleotide
  Target: LAMA2; (+) strand; PAM type: YTN; PAM sequence: CTT
gcctgggttttccctgcagc

SEQ ID NO: 338224 - DNA, 20 bp, Artificial Sequence
  Description of Artificial Sequence: Synthetic oligonucleotide
  Target: LAMA2; (+) strand; PAM type: YTN; PAM sequence: TTG
cctgggttttccctgcagct

SEQ ID NO: 338225 - DNA, 20 bp, Artificial Sequence
  Description of Artificial Sequence: Synthetic oligonucleotide
  Target: LAMA2; (+) strand; PAM type: YTN; PAM sequence: CTG
ggttttccctgcagctgacg

SEQ ID NO: 338226 - DNA, 20 bp, Artificial Sequence
  Description of Artificial Sequence: Synthetic oligonucleotide
  Target: LAMA2; (+) strand; PAM type: YTN; PAM sequence: TTT
tccctgcagctgacgttgtt

SEQ ID NO: 338227 - DNA, 20 bp, Artificial Sequence
  Description of Artificial Sequence: Synthetic oligonucleotide
  Target: LAMA2; (+) strand; PAM type: YTN; PAM sequence: TTT
ccctgcagctgacgttgtta

SEQ ID NO: 338228 - DNA, 20 bp, Artificial Sequence
  Description of Artificial Sequence: Synthetic oligonucleotide
  Target: LAMA2; (+) strand; PAM type: YTN; PAM sequence: TTC
cctgcagctgacgttgttaa

SEQ ID NO: 338229 - DNA, 20 bp, Artificial Sequence
  Description of Artificial Sequence: Synthetic oligonucleotide
  Target: LAMA2; (+) strand; PAM type: YTN; PAM sequence: CTG
cagctgacgttgttaaaaat

SEQ ID NO: 338230 - DNA, 20 bp, Artificial Sequence
  Description of Artificial Sequence: Synthetic oligonucleotide
  Target: LAMA2; (+) strand; PAM type: YTN; PAM sequence: CTG
acgttgttaaaaatgatagc

SEQ ID NO: 338231 - DNA, 20 bp, Artificial Sequence
  Description of Artificial Sequence: Synthetic oligonucleotide
  Target: LAMA2; (+) strand; PAM type: YTN; PAM sequence: TTG
ttaaaaatgatagcaactta

SEQ ID NO: 338232 - DNA, 20 bp, Artificial Sequence
  Description of Artificial Sequence: Synthetic oligonucleotide
  Target: LAMA2; (+) strand; PAM type: YTN; PAM sequence: TTA
aaaatgatagcaacttaatg

SEQ ID NO: 338233 - DNA, 20 bp, Artificial Sequence
  Description of Artificial Sequence: Synthetic oligonucleotide
  Target: LAMA2; (+) strand; PAM type: YTN; PAM sequence: CTT
aatgaagcatggcgtactaa

SEQ ID NO: 338234 - DNA, 20 bp, Artificial Sequence
  Description of Artificial Sequence: Synthetic oligonucleotide
  Target: LAMA2; (+) strand; PAM type: YTN; PAM sequence: TTA
atgaagcatggcgtactaaa

SEQ ID NO: 338235 - DNA, 20 bp, Artificial Sequence
  Description of Artificial Sequence: Synthetic oligonucleotide
  Target: LAMA2; (+) strand; PAM type: YTN; PAM sequence: CTA
aatgcattaataagctgagg

SEQ ID NO: 338236 - DNA, 20 bp, Artificial Sequence
  Description of Artificial Sequence: Synthetic oligonucleotide
  Target: LAMA2; (+) strand; PAM type: YTN; PAM sequence: TTA
ataagctgagggaggacctt

SEQ ID NO: 338237 - DNA, 20 bp, Artificial Sequence
  Description of Artificial Sequence: Synthetic oligonucleotide
  Target: LAMA2; (+) strand; PAM type: YTN; PAM sequence: CTG
agggaggaccttattcattc

SEQ ID NO: 338238 - DNA, 20 bp, Artificial Sequence
  Description of Artificial Sequence: Synthetic oligonucleotide
  Target: LAMA2; (+) strand; PAM type: YTN; PAM sequence: CTT
attcattccaatttggactc

SEQ ID NO: 338239 - DNA, 20 bp, Artificial Sequence
  Description of Artificial Sequence: Synthetic oligonucleotide
  Target: LAMA2; (+) strand; PAM type: YTN; PAM sequence: TTA
ttcattccaatttggactct

SEQ ID NO: 338240 - DNA, 20 bp, Artificial Sequence
  Description of Artificial Sequence: Synthetic oligonucleotide
  Target: LAMA2; (+) strand; PAM type: YTN; PAM sequence: TTC
attccaatttggactctgct

SEQ ID NO: 338241 - DNA, 20 bp, Artificial Sequence
  Description of Artificial Sequence: Synthetic oligonucleotide
  Target: LAMA2; (+) strand; PAM type: YTN; PAM sequence: TTC
caatttggactctgctcact

SEQ ID NO: 338242 - DNA, 20 bp, Artificial Sequence
  Description of Artificial Sequence: Synthetic oligonucleotide
  Target: LAMA2; (+) strand; PAM type: YTN; PAM sequence: TTT
ggactctgctcactcgtgtt

SEQ ID NO: 338243 - DNA, 20 bp, Artificial Sequence
  Description of Artificial Sequence: Synthetic oligonucleotide
  Target: LAMA2; (+) strand; PAM type: YTN; PAM sequence: TTG
gactctgctcactcgtgtta

SEQ ID NO: 338244 - DNA, 20 bp, Artificial Sequence
  Description of Artificial Sequence: Synthetic oligonucleotide
  Target: LAMA2; (+) strand; PAM type: YTN; PAM sequence: CTC
tgctcactcgtgttactcgt

SEQ ID NO: 338245 - DNA, 20 bp, Artificial Sequence
  Description of Artificial Sequence: Synthetic oligonucleotide
  Target: LAMA2; (+) strand; PAM type: YTN; PAM sequence: CTG
ctcactcgtgttactcgttt

SEQ ID NO: 338246 - DNA, 20 bp, Artificial Sequence
  Description of Artificial Sequence: Synthetic oligonucleotide
  Target: LAMA2; (+) strand; PAM type: YTN; PAM sequence: CTC
actcgtgttactcgttttct

SEQ ID NO: 338247 - DNA, 20 bp, Artificial Sequence
  Description of Artificial Sequence: Synthetic oligonucleotide
  Target: LAMA2; (+) strand; PAM type: YTN; PAM sequence: CTC
gtgttactcgttttcttaag

SEQ ID NO: 338248 - DNA, 20 bp, Artificial Sequence
  Description of Artificial Sequence: Synthetic oligonucleotide
  Target: LAMA2; (+) strand; PAM type: YTN; PAM sequence: TTA
ctcgttttcttaagactgga

SEQ ID NO: 338249 - DNA, 20 bp, Artificial Sequence
  Description of Artificial Sequence: Synthetic oligonucleotide
  Target: LAMA2; (+) strand; PAM type: YTN; PAM sequence: CTC
gttttcttaagactggacta

SEQ ID NO: 338250 - DNA, 20 bp, Artificial Sequence
  Description of Artificial Sequence: Synthetic oligonucleotide
  Target: LAMA2; (+) strand; PAM type: YTN; PAM sequence: TTT
tcttaagactggactaaaat

SEQ ID NO: 338251 - DNA, 20 bp, Artificial Sequence
  Description of Artificial Sequence: Synthetic oligonucleotide
  Target: LAMA2; (+) strand; PAM type: YTN; PAM sequence: TTT
cttaagactggactaaaatt

SEQ ID NO: 338252 - DNA, 20 bp, Artificial Sequence
  Description of Artificial Sequence: Synthetic oligonucleotide
  Target: LAMA2; (+) strand; PAM type: YTN; PAM sequence: TTC
ttaagactggactaaaattg

SEQ ID NO: 338253 - DNA, 20 bp, Artificial Sequence
  Description of Artificial Sequence: Synthetic oligonucleotide
  Target: LAMA2; (+) strand; PAM type: YTN; PAM sequence: CTT
aagactggactaaaattgtg

SEQ ID NO: 338254 - DNA, 20 bp, Artificial Sequence
  Description of Artificial Sequence: Synthetic oligonucleotide
  Target: LAMA2; (+) strand; PAM type: YTN; PAM sequence: TTA
agactggactaaaattgtga

SEQ ID NO: 338255 - DNA, 20 bp, Artificial Sequence
  Description of Artificial Sequence: Synthetic oligonucleotide
  Target: LAMA2; (+) strand; PAM type: YTN; PAM sequence: CTG
gactaaaattgtgagacctt

SEQ ID NO: 338256 - DNA, 20 bp, Artificial Sequence
  Description of Artificial Sequence: Synthetic oligonucleotide
  Target: LAMA2; (+) strand; PAM type: YTN; PAM sequence: CTA
aaattgtgagaccttatggg

SEQ ID NO: 338257 - DNA, 20 bp, Artificial Sequence
  Description of Artificial Sequence: Synthetic oligonucleotide
  Target: LAMA2; (+) strand; PAM type: YTN; PAM sequence: TTG
tgagaccttatgggccaacg

SEQ ID NO: 338258 - DNA, 20 bp, Artificial Sequence
  Description of Artificial Sequence: Synthetic oligonucleotide
  Target: LAMA2; (+) strand; PAM type: YTN; PAM sequence: CTT
atgggccaacgatacccttt

SEQ ID NO: 338259 - DNA, 20 bp, Artificial Sequence
  Description of Artificial Sequence: Synthetic oligonucleotide
  Target: LAMA2; (+) strand; PAM type: YTN; PAM sequence: TTA
tgggccaacgatacccttta

SEQ ID NO: 338260 - DNA, 20 bp, Artificial Sequence
  Description of Artificial Sequence: Synthetic oligonucleotide
  Target: LAMA2; (+) strand; PAM type: YTN; PAM sequence: CTT
tagagctgataattaatttg

SEQ ID NO: 338261 - DNA, 20 bp, Artificial Sequence
  Description of Artificial Sequence: Synthetic oligonucleotide
  Target: LAMA2; (+) strand; PAM type: YTN; PAM sequence: TTT
agagctgataattaatttga

SEQ ID NO: 338262 - DNA, 20 bp, Artificial Sequence
  Description of Artificial Sequence: Synthetic oligonucleotide
  Target: LAMA2; (+) strand; PAM type: YTN; PAM sequence: TTA
gagctgataattaatttgaa

SEQ ID NO: 338263 - DNA, 20 bp, Artificial Sequence
  Description of Artificial Sequence: Synthetic oligonucleotide
  Target: LAMA2; (+) strand; PAM type: YTN; PAM sequence: CTG
ataattaatttgaaagaatt

SEQ ID NO: 338264 - DNA, 20 bp, Artificial Sequence
  Description of Artificial Sequence: Synthetic oligonucleotide
  Target: LAMA2; (+) strand; PAM type: YTN; PAM sequence: TTA
atttgaaagaattattaaag

SEQ ID NO: 338265 - DNA, 20 bp, Artificial Sequence
  Description of Artificial Sequence: Synthetic oligonucleotide
  Target: LAMA2; (+) strand; PAM type: YTN; PAM sequence: TTT
gaaagaattattaaagcata

SEQ ID NO: 338266 - DNA, 20 bp, Artificial Sequence
  Description of Artificial Sequence: Synthetic oligonucleotide
  Target: LAMA2; (+) strand; PAM type: YTN; PAM sequence: TTG
aaagaattattaaagcatat

SEQ ID NO: 338267 - DNA, 20 bp, Artificial Sequence
  Description of Artificial Sequence: Synthetic oligonucleotide
  Target: LAMA2; (+) strand; PAM type: YTN; PAM sequence: TTA
ttaaagcatatttcttgagc

SEQ ID NO: 338268 - DNA, 20 bp, Artificial Sequence
  Description of Artificial Sequence: Synthetic oligonucleotide
  Target: LAMA2; (+) strand; PAM type: YTN; PAM sequence: TTA
aagcatatttcttgagctaa

SEQ ID NO: 338269 - DNA, 20 bp, Artificial Sequence
  Description of Artificial Sequence: Synthetic oligonucleotide
  Target: LAMA2; (+) strand; PAM type: YTN; PAM sequence: TTT
cttgagctaagaatgcagtg

SEQ ID NO: 338270 - DNA, 20 bp, Artificial Sequence
  Description of Artificial Sequence: Synthetic oligonucleotide
  Target: LAMA2; (+) strand; PAM type: YTN; PAM sequence: TTC
ttgagctaagaatgcagtgt

SEQ ID NO: 338271 - DNA, 20 bp, Artificial Sequence
  Description of Artificial Sequence: Synthetic oligonucleotide
  Target: LAMA2; (+) strand; PAM type: YTN; PAM sequence: CTT
gagctaagaatgcagtgtat

SEQ ID NO: 338272 - DNA, 20 bp, Artificial Sequence
  Description of Artificial Sequence: Synthetic oligonucleotide
  Target: LAMA2; (+) strand; PAM type: YTN; PAM sequence: TTG
agctaagaatgcagtgtatt

SEQ ID NO: 338273 - DNA, 20 bp, Artificial Sequence
  Description of Artificial Sequence: Synthetic oligonucleotide
  Target: LAMA2; (+) strand; PAM type: YTN; PAM sequence: CTA
agaatgcagtgtattcacag

SEQ ID NO: 338274 - DNA, 20 bp, Artificial Sequence
  Description of Artificial Sequence: Synthetic oligonucleotide
  Target: LAMA2; (+) strand; PAM type: YTN; PAM sequence: TTC
acagtaagaggcagagttaa

SEQ ID NO: 338275 - DNA, 20 bp, Artificial Sequence
  Description of Artificial Sequence: Synthetic oligonucleotide
  Target: LAMA2; (+) strand; PAM type: YTN; PAM sequence: TTA
accatttatcaagataatta

SEQ ID NO: 338276 - DNA, 20 bp, Artificial Sequence
  Description of Artificial Sequence: Synthetic oligonucleotide
  Target: LAMA2; (+) strand; PAM type: YTN; PAM sequence: TTT
atcaagataattaagaaaat

SEQ ID NO: 338277 - DNA, 20 bp, Artificial Sequence
  Description of Artificial Sequence: Synthetic oligonucleotide
  Target: LAMA2; (+) strand; PAM type: YTN; PAM sequence: TTA
tcaagataattaagaaaatg

SEQ ID NO: 338278 - DNA, 20 bp, Artificial Sequence
  Description of Artificial Sequence: Synthetic oligonucleotide
  Target: LAMA2; (+) strand; PAM type: YTN; PAM sequence: TTA
agaaaatgcattaaatgttt

SEQ ID NO: 338279 - DNA, 20 bp, Artificial Sequence
  Description of Artificial Sequence: Synthetic oligonucleotide
  Target: LAMA2; (+) strand; PAM type: YTN; PAM sequence: TTA
aatgtttgctccgtaagagc

SEQ ID NO: 338280 - DNA, 20 bp, Artificial Sequence
  Description of Artificial Sequence: Synthetic oligonucleotide
  Target: LAMA2; (+) strand; PAM type: YTN; PAM sequence: TTT
gctccgtaagagcaagcact

SEQ ID NO: 338281 - DNA, 20 bp, Artificial Sequence
  Description of Artificial Sequence: Synthetic oligonucleotide
  Target: LAMA2; (+) strand; PAM type: YTN; PAM sequence: TTG
ctccgtaagagcaagcacta

SEQ ID NO: 338282 - DNA, 20 bp, Artificial Sequence
  Description of Artificial Sequence: Synthetic oligonucleotide
  Target: LAMA2; (+) strand; PAM type: YTN; PAM sequence: CTC
cgtaagagcaagcactaaat

SEQ ID NO: 338283 - DNA, 20 bp, Artificial Sequence
  Description of Artificial Sequence: Synthetic oligonucleotide
  Target: LAMA2; (+) strand; PAM type: YTN; PAM sequence: CTA
aattaccagtagtagtaata

SEQ ID NO: 338284 - DNA, 20 bp, Artificial Sequence
  Description of Artificial Sequence: Synthetic oligonucleotide
  Target: LAMA2; (+) strand; PAM type: YTN; PAM sequence: TTA
ccagtagtagtaatattatt

SEQ ID NO: 338285 - DNA, 20 bp, Artificial Sequence
  Description of Artificial Sequence: Synthetic oligonucleotide
  Target: LAMA2; (+) strand; PAM type: YTN; PAM sequence: TTA
ttatgtgaaagggaatcaat

SEQ ID NO: 338286 - DNA, 20 bp, Artificial Sequence
  Description of Artificial Sequence: Synthetic oligonucleotide
  Target: LAMA2; (+) strand; PAM type: YTN; PAM sequence: TTA
tgtgaaagggaatcaatagt

SEQ ID NO: 338287 - DNA, 20 bp, Artificial Sequence
  Description of Artificial Sequence: Synthetic oligonucleotide
  Target: LAMA2; (+) strand; PAM type: YTN; PAM sequence: TTT
gtttactaaaatgagatgca

SEQ ID NO: 338288 - DNA, 20 bp, Artificial Sequence
  Description of Artificial Sequence: Synthetic oligonucleotide
  Target: LAMA2; (+) strand; PAM type: YTN; PAM sequence: TTG
tttactaaaatgagatgcat

SEQ ID NO: 338289 - DNA, 20 bp, Artificial Sequence
  Description of Artificial Sequence: Synthetic oligonucleotide
  Target: LAMA2; (+) strand; PAM type: YTN; PAM sequence: TTT
actaaaatgagatgcattag

SEQ ID NO: 338290 - DNA, 20 bp, Artificial Sequence
  Description of Artificial Sequence: Synthetic oligonucleotide
  Target: LAMA2; (+) strand; PAM type: YTN; PAM sequence: TTA
ctaaaatgagatgcattagc

SEQ ID NO: 338291 - DNA, 20 bp, Artificial Sequence
  Description of Artificial Sequence: Synthetic oligonucleotide
  Target: LAMA2; (+) strand; PAM type: YTN; PAM sequence: CTA
aaatgagatgcattagcaag

SEQ ID NO: 338292 - DNA, 20 bp, Artificial Sequence
  Description of Artificial Sequence: Synthetic oligonucleotide
  Target: LAMA2; (+) strand; PAM type: YTN; PAM sequence: TTA
gcaagcttttttattctgat

SEQ ID NO: 338293 - DNA, 20 bp, Artificial Sequence
  Description of Artificial Sequence: Synthetic oligonucleotide
  Target: LAMA2; (+) strand; PAM type: YTN; PAM sequence: CTT
ttttattctgatataaaaat

SEQ ID NO: 338294 - DNA, 20 bp, Artificial Sequence
  Description of Artificial Sequence: Synthetic oligonucleotide
  Target: LAMA2; (+) strand; PAM type: YTN; PAM sequence: TTT
tttattctgatataaaaatt

SEQ ID NO: 338295 - DNA, 20 bp, Artificial Sequence
  Description of Artificial Sequence: Synthetic oligonucleotide
  Target: LAMA2; (+) strand; PAM type: YTN; PAM sequence: TTT
ttattctgatataaaaattt

SEQ ID NO: 338296 - DNA, 20 bp, Artificial Sequence
  Description of Artificial Sequence: Synthetic oligonucleotide
  Target: LAMA2; (+) strand; PAM type: YTN; PAM sequence: TTT
tattctgatataaaaatttt

SEQ ID NO: 338297 - DNA, 20 bp, Artificial Sequence
  Description of Artificial Sequence: Synthetic oligonucleotide
  Target: LAMA2; (+) strand; PAM type: YTN; PAM sequence: TTT
attctgatataaaaattttc

SEQ ID NO: 338298 - DNA, 20 bp, Artificial Sequence
  Description of Artificial Sequence: Synthetic oligonucleotide
  Target: LAMA2; (+) strand; PAM type: YTN; PAM sequence: TTA
ttctgatataaaaattttca

SEQ ID NO: 338299 - DNA, 20 bp, Artificial Sequence
  Description of Artificial Sequence: Synthetic oligonucleotide
  Target: LAMA2; (+) strand; PAM type: YTN; PAM sequence: TTC
tgatataaaaattttcaaat

SEQ ID NO: 338300 - DNA, 20 bp, Artificial Sequence
  Description of Artificial Sequence: Synthetic oligonucleotide
  Target: LAMA2; (+) strand; PAM type: YTN; PAM sequence: CTG
atataaaaattttcaaatat

SEQ ID NO: 338301 - DNA, 20 bp, Artificial Sequence
  Description of Artificial Sequence: Synthetic oligonucleotide
  Target: LAMA2; (+) strand; PAM type: YTN; PAM sequence: TTT
tcaaatatacacaaaagtat

SEQ ID NO: 338302 - DNA, 20 bp, Artificial Sequence
  Description of Artificial Sequence: Synthetic oligonucleotide
  Target: LAMA2; (+) strand; PAM type: YTN; PAM sequence: TTT
caaatatacacaaaagtata

SEQ ID NO: 338303 - DNA, 20 bp, Artificial Sequence
  Description of Artificial Sequence: Synthetic oligonucleotide
  Target: LAMA2; (+) strand; PAM type: YTN; PAM sequence: TTC
aaatatacacaaaagtatag

SEQ ID NO: 338304 - DNA, 20 bp, Artificial Sequence
  Description of Artificial Sequence: Synthetic oligonucleotide
  Target: LAMA2; (+) strand; PAM type: YTN; PAM sequence: CTC
aaatgtacccaacacccatc

SEQ ID NO: 338305 - DNA, 20 bp, Artificial Sequence
  Description of Artificial Sequence: Synthetic oligonucleotide
  Target: LAMA2; (+) strand; PAM type: YTN; PAM sequence: TTA
actcaggacccctcttgtat

SEQ ID NO: 338306 - DNA, 20 bp, Artificial Sequence
  Description of Artificial Sequence: Synthetic oligonucleotide
  Target: LAMA2; (+) strand; PAM type: YTN; PAM sequence: CTC
aggacccctcttgtatcagt

SEQ ID NO: 338307 - DNA, 20 bp, Artificial Sequence
  Description of Artificial Sequence: Synthetic oligonucleotide
  Target: LAMA2; (+) strand; PAM type: YTN; PAM sequence: CTC
ttgtatcagttttcaaccca

SEQ ID NO: 338308 - DNA, 20 bp, Artificial Sequence
  Description of Artificial Sequence: Synthetic oligonucleotide
  Target: LAMA2; (+) strand; PAM type: YTN; PAM sequence: CTT
gtatcagttttcaacccatc

SEQ ID NO: 338309 - DNA, 20 bp, Artificial Sequence
  Description of Artificial Sequence: Synthetic oligonucleotide
  Target: LAMA2; (+) strand; PAM type: YTN; PAM sequence: TTG
tatcagttttcaacccatcc

SEQ ID NO: 338310 - DNA, 20 bp, Artificial Sequence
  Description of Artificial Sequence: Synthetic oligonucleotide
  Target: LAMA2; (+) strand; PAM type: YTN; PAM sequence: TTT
tcaacccatccacatcctac

SEQ ID NO: 338311 - DNA, 20 bp, Artificial Sequence
  Description of Artificial Sequence: Synthetic oligonucleotide
  Target: LAMA2; (+) strand; PAM type: YTN; PAM sequence: TTT
caacccatccacatcctact

SEQ ID NO: 338312 - DNA, 20 bp, Artificial Sequence
  Description of Artificial Sequence: Synthetic oligonucleotide
  Target: LAMA2; (+) strand; PAM type: YTN; PAM sequence: TTC
aacccatccacatcctactc

SEQ ID NO: 338313 - DNA, 20 bp, Artificial Sequence
  Description of Artificial Sequence: Synthetic oligonucleotide
  Target: LAMA2; (+) strand; PAM type: YTN; PAM sequence: CTA
ctccacccctccagattatt

SEQ ID NO: 338314 - DNA, 20 bp, Artificial Sequence
  Description of Artificial Sequence: Synthetic oligonucleotide
  Target: LAMA2; (+) strand; PAM type: YTN; PAM sequence: CTC
cacccctccagattattggg

SEQ ID NO: 338315 - DNA, 20 bp, Artificial Sequence
  Description of Artificial Sequence: Synthetic oligonucleotide
  Target: LAMA2; (+) strand; PAM type: YTN; PAM sequence: CTC
cagattattgggaagcaaat

SEQ ID NO: 338316 - DNA, 20 bp, Artificial Sequence
  Description of Artificial Sequence: Synthetic oligonucleotide
  Target: LAMA2; (+) strand; PAM type: YTN; PAM sequence: TTA
ttgggaagcaaattccatat

SEQ ID NO: 338317 - DNA, 20 bp, Artificial Sequence
  Description of Artificial Sequence: Synthetic oligonucleotide
  Target: LAMA2; (+) strand; PAM type: YTN; PAM sequence: TTG
ggaagcaaattccatatgta

SEQ ID NO: 338318 - DNA, 20 bp, Artificial Sequence
  Description of Artificial Sequence: Synthetic oligonucleotide
  Target: LAMA2; (+) strand; PAM type: YTN; PAM sequence: TTC
catatgtattactcgctttg

SEQ ID NO: 338319 - DNA, 20 bp, Artificial Sequence
  Description of Artificial Sequence: Synthetic oligonucleotide
  Target: LAMA2; (+) strand; PAM type: YTN; PAM sequence: TTA
ctcgctttgtaactacttca

SEQ ID NO: 338320 - DNA, 20 bp, Artificial Sequence
  Description of Artificial Sequence: Synthetic oligonucleotide
  Target: LAMA2; (+) strand; PAM type: YTN; PAM sequence: CTC
gctttgtaactacttcatta

SEQ ID NO: 338321 - DNA, 20 bp, Artificial Sequence
  Description of Artificial Sequence: Synthetic oligonucleotide
  Target: LAMA2; (+) strand; PAM type: YTN; PAM sequence: CTT
tgtaactacttcattatgta

SEQ ID NO: 338322 - DNA, 20 bp, Artificial Sequence
  Description of Artificial Sequence: Synthetic oligonucleotide
  Target: LAMA2; (+) strand; PAM type: YTN; PAM sequence: TTT
gtaactacttcattatgtat

SEQ ID NO: 338323 - DNA, 20 bp, Artificial Sequence
  Description of Artificial Sequence: Synthetic oligonucleotide
  Target: LAMA2; (+) strand; PAM type: YTN; PAM sequence: TTG
taactacttcattatgtatc

SEQ ID NO: 338324 - DNA, 20 bp, Artificial Sequence
  Description of Artificial Sequence: Synthetic oligonucleotide
  Target: LAMA2; (+) strand; PAM type: YTN; PAM sequence: CTA
cttcattatgtatctctgaa

SEQ ID NO: 338325 - DNA, 20 bp, Artificial Sequence
  Description of Artificial Sequence: Synthetic oligonucleotide
  Target: LAMA2; (+) strand; PAM type: YTN; PAM sequence: CTT
cattatgtatctctgaagga

SEQ ID NO: 338326 - DNA, 20 bp, Artificial Sequence
  Description of Artificial Sequence: Synthetic oligonucleotide
  Target: LAMA2; (+) strand; PAM type: YTN; PAM sequence: TTC
attatgtatctctgaaggat

SEQ ID NO: 338327 - DNA, 20 bp, Artificial Sequence
  Description of Artificial Sequence: Synthetic oligonucleotide
  Target: LAMA2; (+) strand; PAM type: YTN; PAM sequence: TTA
tgtatctctgaaggataaga

SEQ ID NO: 338328 - DNA, 20 bp, Artificial Sequence
  Description of Artificial Sequence: Synthetic oligonucleotide
  Target: LAMA2; (+) strand; PAM type: YTN; PAM sequence: CTC
tgaaggataagactctttta

SEQ ID NO: 338329 - DNA, 20 bp, Artificial Sequence
  Description of Artificial Sequence: Synthetic oligonucleotide
  Target: LAMA2; (+) strand; PAM type: YTN; PAM sequence: CTG
aaggataagactcttttata

SEQ ID NO: 338330 - DNA, 20 bp, Artificial Sequence
  Description of Artificial Sequence: Synthetic oligonucleotide
  Target: LAMA2; (+) strand; PAM type: YTN; PAM sequence: CTC
ttttataaaggaaaccattg

SEQ ID NO: 338331 - DNA, 20 bp, Artificial Sequence
  Description of Artificial Sequence: Synthetic oligonucleotide
  Target: LAMA2; (+) strand; PAM type: YTN; PAM sequence: CTT
ttataaaggaaaccattgtc

SEQ ID NO: 338332 - DNA, 20 bp, Artificial Sequence
  Description of Artificial Sequence: Synthetic oligonucleotide
  Target: LAMA2; (+) strand; PAM type: YTN; PAM sequence: TTT
tataaaggaaaccattgtca

SEQ ID NO: 338333 - DNA, 20 bp, Artificial Sequence
  Description of Artificial Sequence: Synthetic oligonucleotide
  Target: LAMA2; (+) strand; PAM type: YTN; PAM sequence: TTT
ataaaggaaaccattgtcac

SEQ ID NO: 338334 - DNA, 20 bp, Artificial Sequence
  Description of Artificial Sequence: Synthetic oligonucleotide
  Target: LAMA2; (+) strand; PAM type: YTN; PAM sequence: TTA
taaaggaaaccattgtcaca

SEQ ID NO: 338335 - DNA, 20 bp, Artificial Sequence
  Description of Artificial Sequence: Synthetic oligonucleotide
  Target: LAMA2; (+) strand; PAM type: YTN; PAM sequence: TTG
tcacatctaaaaattaatac

SEQ ID NO: 338336 - DNA, 20 bp, Artificial Sequence
  Description of Artificial Sequence: Synthetic oligonucleotide
  Target: LAMA2; (+) strand; PAM type: YTN; PAM sequence: CTA
aaaattaatactattatact

SEQ ID NO: 338337 - DNA, 20 bp, Artificial Sequence
  Description of Artificial Sequence: Synthetic oligonucleotide
  Target: LAMA2; (+) strand; PAM type: YTN; PAM sequence: TTA
atactattatactgattctt

SEQ ID NO: 338338 - DNA, 20 bp, Artificial Sequence
  Description of Artificial Sequence: Synthetic oligonucleotide
  Target: LAMA2; (+) strand; PAM type: YTN; PAM sequence: CTA
ttatactgattctttaatat

SEQ ID NO: 338339 - DNA, 20 bp, Artificial Sequence
  Description of Artificial Sequence: Synthetic oligonucleotide
  Target: LAMA2; (+) strand; PAM type: YTN; PAM sequence: TTA
tactgattctttaatattaa

SEQ ID NO: 338340 - DNA, 20 bp, Artificial Sequence
  Description of Artificial Sequence: Synthetic oligonucleotide
  Target: LAMA2; (+) strand; PAM type: YTN; PAM sequence: CTG
attctttaatattaacaaat

SEQ ID NO: 338341 - DNA, 20 bp, Artificial Sequence
  Description of Artificial Sequence: Synthetic oligonucleotide
  Target: LAMA2; (+) strand; PAM type: YTN; PAM sequence: TTC
tttaatattaacaaatattt

SEQ ID NO: 338342 - DNA, 20 bp, Artificial Sequence
  Description of Artificial Sequence: Synthetic oligonucleotide
  Target: LAMA2; (+) strand; PAM type: YTN; PAM sequence: CTT
taatattaacaaatatttac

SEQ ID NO: 338343 - DNA, 20 bp, Artificial Sequence
  Description of Artificial Sequence: Synthetic oligonucleotide
  Target: LAMA2; (+) strand; PAM type: YTN; PAM sequence: TTT
aatattaacaaatatttact

SEQ ID NO: 338344 - DNA, 20 bp, Artificial Sequence
  Description of Artificial Sequence: Synthetic oligonucleotide
  Target: LAMA2; (+) strand; PAM type: YTN; PAM sequence: TTA
atattaacaaatatttactc

SEQ ID NO: 338345 - DNA, 20 bp, Artificial Sequence
  Description of Artificial Sequence: Synthetic oligonucleotide
  Target: LAMA2; (+) strand; PAM type: YTN; PAM sequence: TTA
acaaatatttactcagtatt

SEQ ID NO: 338346 - DNA, 20 bp, Artificial Sequence
  Description of Artificial Sequence: Synthetic oligonucleotide
  Target: LAMA2; (+) strand; PAM type: YTN; PAM sequence: TTT
actcagtattcaaattcatc

SEQ ID NO: 338347 - DNA, 20 bp, Artificial Sequence
  Description of Artificial Sequence: Synthetic oligonucleotide
  Target: LAMA2; (+) strand; PAM type: YTN; PAM sequence: TTA
ctcagtattcaaattcatca

SEQ ID NO: 338348 - DNA, 20 bp, Artificial Sequence
  Description of Artificial Sequence: Synthetic oligonucleotide
  Target: LAMA2; (+) strand; PAM type: YTN; PAM sequence: CTC
agtattcaaattcatcacac

SEQ ID NO: 338349 - DNA, 20 bp, Artificial Sequence
  Description of Artificial Sequence: Synthetic oligonucleotide
  Target: LAMA2; (+) strand; PAM type: YTN; PAM sequence: TTC
aaattcatcacacctgcttc

SEQ ID NO: 338350 - DNA, 20 bp, Artificial Sequence
  Description of Artificial Sequence: Synthetic oligonucleotide
  Target: LAMA2; (+) strand; PAM type: YTN; PAM sequence: TTC
atcacacctgcttccaagtt

SEQ ID NO: 338351 - DNA, 20 bp, Artificial Sequence
  Description of Artificial Sequence: Synthetic oligonucleotide
  Target: LAMA2; (+) strand; PAM type: YTN; PAM sequence: CTG
cttccaagttttttaaaaac

SEQ ID NO: 338352 - DNA, 20 bp, Artificial Sequence
  Description of Artificial Sequence: Synthetic oligonucleotide
  Target: LAMA2; (+) strand; PAM type: YTN; PAM sequence: CTT
ccaagttttttaaaaacagt

SEQ ID NO: 338353 - DNA, 20 bp, Artificial Sequence
  Description of Artificial Sequence: Synthetic oligonucleotide
  Target: LAMA2; (+) strand; PAM type: YTN; PAM sequence: TTC
caagttttttaaaaacagtt

SEQ ID NO: 338354 - DNA, 20 bp, Artificial Sequence
  Description of Artificial Sequence: Synthetic oligonucleotide
  Target: LAMA2; (+) strand; PAM type: YTN; PAM sequence: TTT
tttaaaaacagttgaatcag

SEQ ID NO: 338355 - DNA, 20 bp, Artificial Sequence
  Description of Artificial Sequence: Synthetic oligonucleotide
  Target: LAMA2; (+) strand; PAM type: YTN; PAM sequence: TTT
ttaaaaacagttgaatcagg

SEQ ID NO: 338356 - DNA, 20 bp, Artificial Sequence
  Description of Artificial Sequence: Synthetic oligonucleotide
  Target: LAMA2; (+) strand; PAM type: YTN; PAM sequence: TTT
taaaaacagttgaatcagga

SEQ ID NO: 338357 - DNA, 20 bp, Artificial Sequence
  Description of Artificial Sequence: Synthetic oligonucleotide
  Target: LAMA2; (+) strand; PAM type: YTN; PAM sequence: TTT
aaaaacagttgaatcaggat

SEQ ID NO: 338358 - DNA, 20 bp, Artificial Sequence
  Description of Artificial Sequence: Synthetic oligonucleotide
  Target: LAMA2; (+) strand; PAM type: YTN; PAM sequence: TTA
aaaacagttgaatcaggatt

SEQ ID NO: 338359 - DNA, 20 bp, Artificial Sequence
  Description of Artificial Sequence: Synthetic oligonucleotide
  Target: LAMA2; (+) strand; PAM type: YTN; PAM sequence: TTG
aatcaggattcacaagaagt

SEQ ID NO: 338360 - DNA, 20 bp, Artificial Sequence
  Description of Artificial Sequence: Synthetic oligonucleotide
  Target: LAMA2; (+) strand; PAM type: YTN; PAM sequence: TTC
acaagaagtcacatactgca

SEQ ID NO: 338361 - DNA, 20 bp, Artificial Sequence
  Description of Artificial Sequence: Synthetic oligonucleotide
  Target: LAMA2; (+) strand; PAM type: YTN; PAM sequence: CTG
catttgttcgatatatctag

SEQ ID NO: 338362 - DNA, 20 bp, Artificial Sequence
  Description of Artificial Sequence: Synthetic oligonucleotide
  Target: LAMA2; (+) strand; PAM type: YTN; PAM sequence: TTT
gttcgatatatctaggtctc

SEQ ID NO: 338363 - DNA, 20 bp, Artificial Sequence
  Description of Artificial Sequence: Synthetic oligonucleotide
  Target: LAMA2; (+) strand; PAM type: YTN; PAM sequence: TTG
ttcgatatatctaggtctct

SEQ ID NO: 338364 - DNA, 20 bp, Artificial Sequence
  Description of Artificial Sequence: Synthetic oligonucleotide
  Target: LAMA2; (+) strand; PAM type: YTN; PAM sequence: TTC
gatatatctaggtctctcaa

SEQ ID NO: 338365 - DNA, 20 bp, Artificial Sequence
  Description of Artificial Sequence: Synthetic oligonucleotide
  Target: LAMA2; (+) strand; PAM type: YTN; PAM sequence: CTA
ggtctctcaatcaataacat

SEQ ID NO: 338366 - DNA, 20 bp, Artificial Sequence
  Description of Artificial Sequence: Synthetic oligonucleotide
  Target: LAMA2; (+) strand; PAM type: YTN; PAM sequence: CTC
tcaatcaataacattttaac

SEQ ID NO: 338367 - DNA, 20 bp, Artificial Sequence
  Description of Artificial Sequence: Synthetic oligonucleotide
  Target: LAMA2; (+) strand; PAM type: YTN; PAM sequence: CTC
aatcaataacattttaactt

SEQ ID NO: 338368 - DNA, 20 bp, Artificial Sequence
  Description of Artificial Sequence: Synthetic oligonucleotide
  Target: LAMA2; (+) strand; PAM type: YTN; PAM sequence: TTT
taacttccttgcaacttatt

SEQ ID NO: 338369 - DNA, 20 bp, Artificial Sequence
  Description of Artificial Sequence: Synthetic oligonucleotide
  Target: LAMA2; (+) strand; PAM type: YTN; PAM sequence: TTT
aacttccttgcaacttattt

SEQ ID NO: 338370 - DNA, 20 bp, Artificial Sequence
  Description of Artificial Sequence: Synthetic oligonucleotide
  Target: LAMA2; (+) strand; PAM type: YTN; PAM sequence: TTA
acttccttgcaacttatttt

SEQ ID NO: 338371 - DNA, 20 bp, Artificial Sequence
  Description of Artificial Sequence: Synthetic oligonucleotide
  Target: LAMA2; (+) strand; PAM type: YTN; PAM sequence: CTT
ccttgcaacttatttttttg

SEQ ID NO: 338372 - DNA, 20 bp, Artificial Sequence
  Description of Artificial Sequence: Synthetic oligonucleotide
  Target: LAMA2; (+) strand; PAM type: YTN; PAM sequence: TTC
cttgcaacttatttttttga

SEQ ID NO: 338373 - DNA, 20 bp, Artificial Sequence
  Description of Artificial Sequence: Synthetic oligonucleotide
  Target: LAMA2; (+) strand; PAM type: YTN; PAM sequence: CTT
gcaacttatttttttgaaga

SEQ ID NO: 338374 - DNA, 20 bp, Artificial Sequence
  Description of Artificial Sequence: Synthetic oligonucleotide
  Target: LAMA2; (+) strand; PAM type: YTN; PAM sequence: TTG
caacttatttttttgaagaa

SEQ ID NO: 338375 - DNA, 20 bp, Artificial Sequence
  Description of Artificial Sequence: Synthetic oligonucleotide
  Target: LAMA2; (+) strand; PAM type: YTN; PAM sequence: CTT
atttttttgaagaaaccacg

SEQ ID NO: 338376 - DNA, 20 bp, Artificial Sequence
  Description of Artificial Sequence: Synthetic oligonucleotide
  Target: LAMA2; (+) strand; PAM type: YTN; PAM sequence: TTA
tttttttgaagaaaccacgt

SEQ ID NO: 338377 - DNA, 20 bp, Artificial Sequence
  Description of Artificial Sequence: Synthetic oligonucleotide
  Target: LAMA2; (+) strand; PAM type: YTN; PAM sequence: TTT
ttttgaagaaaccacgttgt

SEQ ID NO: 338378 - DNA, 20 bp, Artificial Sequence
  Description of Artificial Sequence: Synthetic oligonucleotide
  Target: LAMA2; (+) strand; PAM type: YTN; PAM sequence: TTT
tttgaagaaaccacgttgtg

SEQ ID NO: 338379 - DNA, 20 bp, Artificial Sequence
  Description of Artificial Sequence: Synthetic oligonucleotide
  Target: LAMA2; (+) strand; PAM type: YTN; PAM sequence: TTT
ttgaagaaaccacgttgtgt

SEQ ID NO: 338380 - DNA, 20 bp, Artificial Sequence
  Description of Artificial Sequence: Synthetic oligonucleotide
  Target: LAMA2; (+) strand; PAM type: YTN; PAM sequence: TTT
tgaagaaaccacgttgtgtg

SEQ ID NO: 338381 - DNA, 20 bp, Artificial Sequence
  Description of Artificial Sequence: Synthetic oligonucleotide
  Target: LAMA2; (+) strand; PAM type: YTN; PAM sequence: TTT
gaagaaaccacgttgtgtgt

SEQ ID NO: 338382 - DNA, 20 bp, Artificial Sequence
  Description of Artificial Sequence: Synthetic oligonucleotide
  Target: LAMA2; (+) strand; PAM type: YTN; PAM sequence: TTG
aagaaaccacgttgtgtgtc

SEQ ID NO: 338383 - DNA, 20 bp, Artificial Sequence
  Description of Artificial Sequence: Synthetic oligonucleotide
  Target: LAMA2; (+) strand; PAM type: YTN; PAM sequence: TTG
tgtgtccagtagtgtttctt

SEQ ID NO: 338384 - DNA, 20 bp, Artificial Sequence
  Description of Artificial Sequence: Synthetic oligonucleotide
  Target: LAMA2; (+) strand; PAM type: YTN; PAM sequence: TTT
cttacatcctgcattttgct

SEQ ID NO: 338385 - DNA, 20 bp, Artificial Sequence
  Description of Artificial Sequence: Synthetic oligonucleotide
  Target: LAMA2; (+) strand; PAM type: YTN; PAM sequence: TTC
ttacatcctgcattttgcta

SEQ ID NO: 338386 - DNA, 20 bp, Artificial Sequence
  Description of Artificial Sequence: Synthetic oligonucleotide
  Target: LAMA2; (+) strand; PAM type: YTN; PAM sequence: CTT
acatcctgcattttgctact

SEQ ID NO: 338387 - DNA, 20 bp, Artificial Sequence
  Description of Artificial Sequence: Synthetic oligonucleotide
  Target: LAMA2; (+) strand; PAM type: YTN; PAM sequence: TTA
catcctgcattttgctactt

SEQ ID NO: 338388 - DNA, 20 bp, Artificial Sequence
  Description of Artificial Sequence: Synthetic oligonucleotide
  Target: LAMA2; (+) strand; PAM type: YTN; PAM sequence: CTG
cattttgctacttagggttc

SEQ ID NO: 338389 - DNA, 20 bp, Artificial Sequence
  Description of Artificial Sequence: Synthetic oligonucleotide
  Target: LAMA2; (+) strand; PAM type: YTN; PAM sequence: TTT
tgctacttagggttcctgta

SEQ ID NO: 338390 - DNA, 20 bp, Artificial Sequence
  Description of Artificial Sequence: Synthetic oligonucleotide
  Target: LAMA2; (+) strand; PAM type: YTN; PAM sequence: TTT
gctacttagggttcctgtag

SEQ ID NO: 338391 - DNA, 20 bp, Artificial Sequence
  Description of Artificial Sequence: Synthetic oligonucleotide
  Target: LAMA2; (+) strand; PAM type: YTN; PAM sequence: TTG
ctacttagggttcctgtagt

SEQ ID NO: 338392 - DNA, 20 bp, Artificial Sequence
  Description of Artificial Sequence: Synthetic oligonucleotide
  Target: LAMA2; (+) strand; PAM type: YTN; PAM sequence: CTA
cttagggttcctgtagtact

SEQ ID NO: 338393 - DNA, 20 bp, Artificial Sequence
  Description of Artificial Sequence: Synthetic oligonucleotide
  Target: LAMA2; (+) strand; PAM type: YTN; PAM sequence: CTT
agggttcctgtagtactgtt

SEQ ID NO: 338394 - DNA, 20 bp, Artificial Sequence
  Description of Artificial Sequence: Synthetic oligonucleotide
  Target: LAMA2; (+) strand; PAM type: YTN; PAM sequence: TTA
gggttcctgtagtactgttt

SEQ ID NO: 338395 - DNA, 20 bp, Artificial Sequence
  Description of Artificial Sequence: Synthetic oligonucleotide
  Target: LAMA2; (+) strand; PAM type: YTN; PAM sequence: TTC
ctgtagtactgtttgcatat

SEQ ID NO: 338396 - DNA, 20 bp, Artificial Sequence
  Description of Artificial Sequence: Synthetic oligonucleotide
  Target: LAMA2; (+) strand; PAM type: YTN; PAM sequence: CTG
tagtactgtttgcatatttc

SEQ ID NO: 338397 - DNA, 20 bp, Artificial Sequence
  Description of Artificial Sequence: Synthetic oligonucleotide
  Target: LAMA2; (+) strand; PAM type: YTN; PAM sequence: CTG
tttgcatatttctctactac

SEQ ID NO: 338398 - DNA, 20 bp, Artificial Sequence
  Description of Artificial Sequence: Synthetic oligonucleotide
  Target: LAMA2; (+) strand; PAM type: YTN; PAM sequence: TTT
gcatatttctctactactat

SEQ ID NO: 338399 - DNA, 20 bp, Artificial Sequence
  Description of Artificial Sequence: Synthetic oligonucleotide
  Target: LAMA2; (+) strand; PAM type: YTN; PAM sequence: TTG
catatttctctactactata

SEQ ID NO: 338400 - DNA, 20 bp, Artificial Sequence
  Description of Artificial Sequence: Synthetic oligonucleotide
  Target: LAMA2; (+) strand; PAM type: YTN; PAM sequence: TTT
ctctactactatatttcctg

SEQ ID NO: 338401 - DNA, 20 bp, Artificial Sequence
  Description of Artificial Sequence: Synthetic oligonucleotide
  Target: LAMA2; (+) strand; PAM type: YTN; PAM sequence: TTC
tctactactatatttcctga

SEQ ID NO: 338402 - DNA, 20 bp, Artificial Sequence
  Description of Artificial Sequence: Synthetic oligonucleotide
  Target: LAMA2; (+) strand; PAM type: YTN; PAM sequence: CTC
tactactatatttcctgaaa

SEQ ID NO: 338403 - DNA, 20 bp, Artificial Sequence
  Description of Artificial Sequence: Synthetic oligonucleotide
  Target: LAMA2; (+) strand; PAM type: YTN; PAM sequence: CTA
ctactatatttcctgaaaac

SEQ ID NO: 338404 - DNA, 20 bp, Artificial Sequence
  Description of Artificial Sequence: Synthetic oligonucleotide
  Target: LAMA2; (+) strand; PAM type: YTN; PAM sequence: CTA
ctatatttcctgaaaactga

SEQ ID NO: 338405 - DNA, 20 bp, Artificial Sequence
  Description of Artificial Sequence: Synthetic oligonucleotide
  Target: LAMA2; (+) strand; PAM type: YTN; PAM sequence: CTA
tatttcctgaaaactgatag

SEQ ID NO: 338406 - DNA, 20 bp, Artificial Sequence
  Description of Artificial Sequence: Synthetic oligonucleotide
  Target: LAMA2; (+) strand; PAM type: YTN; PAM sequence: TTT
cctgaaaactgatagataaa

SEQ ID NO: 338407 - DNA, 20 bp, Artificial Sequence
  Description of Artificial Sequence: Synthetic oligonucleotide
  Target: LAMA2; (+) strand; PAM type: YTN; PAM sequence: TTC
ctgaaaactgatagataaat

SEQ ID NO: 338408 - DNA, 20 bp, Artificial Sequence
  Description of Artificial Sequence: Synthetic oligonucleotide
  Target: LAMA2; (+) strand; PAM type: YTN; PAM sequence: CTG
aaaactgatagataaattta

SEQ ID NO: 338409 - DNA, 20 bp, Artificial Sequence
  Description of Artificial Sequence: Synthetic oligonucleotide
  Target: LAMA2; (+) strand; PAM type: YTN; PAM sequence: CTG
atagataaatttagagagtt

SEQ ID NO: 338410 - DNA, 20 bp, Artificial Sequence
  Description of Artificial Sequence: Synthetic oligonucleotide
  Target: LAMA2; (+) strand; PAM type: YTN; PAM sequence: TTT
agagagttactctgattcag

SEQ ID NO: 338411 - DNA, 20 bp, Artificial Sequence
  Description of Artificial Sequence: Synthetic oligonucleotide
  Target: LAMA2; (+) strand; PAM type: YTN; PAM sequence: TTA
gagagttactctgattcagg

SEQ ID NO: 338412 - DNA, 20 bp, Artificial Sequence
  Description of Artificial Sequence: Synthetic oligonucleotide
  Target: LAMA2; (+) strand; PAM type: YTN; PAM sequence: TTA
ctctgattcagggttcatat

SEQ ID NO: 338413 - DNA, 20 bp, Artificial Sequence
  Description of Artificial Sequence: Synthetic oligonucleotide
  Target: LAMA2; (+) strand; PAM type: YTN; PAM sequence: CTC
tgattcagggttcatatttt

SEQ ID NO: 338414 - DNA, 20 bp, Artificial Sequence
  Description of Artificial Sequence: Synthetic oligonucleotide
  Target: LAMA2; (+) strand; PAM type: YTN; PAM sequence: CTG
attcagggttcatatttttg

SEQ ID NO: 338415 - DNA, 20 bp, Artificial Sequence
  Description of Artificial Sequence: Synthetic oligonucleotide
  Target: LAMA2; (+) strand; PAM type: YTN; PAM sequence: TTC
agggttcatatttttggcac

SEQ ID NO: 338416 - DNA, 20 bp, Artificial Sequence
  Description of Artificial Sequence: Synthetic oligonucleotide
  Target: LAMA2; (+) strand; PAM type: YTN; PAM sequence: TTC
atatttttggcacaaccact

SEQ ID NO: 338417 - DNA, 20 bp, Artificial Sequence
  Description of Artificial Sequence: Synthetic oligonucleotide
  Target: LAMA2; (+) strand; PAM type: YTN; PAM sequence: TTT
ttggcacaaccactttatag

SEQ ID NO: 338418 - DNA, 20 bp, Artificial Sequence
  Description of Artificial Sequence: Synthetic oligonucleotide
  Target: LAMA2; (+) strand; PAM type: YTN; PAM sequence: TTT
tggcacaaccactttataga

SEQ ID NO: 338419 - DNA, 20 bp, Artificial Sequence
  Description of Artificial Sequence: Synthetic oligonucleotide
  Target: LAMA2; (+) strand; PAM type: YTN; PAM sequence: TTT
ggcacaaccactttatagat

SEQ ID NO: 338420 - DNA, 20 bp, Artificial Sequence
  Description of Artificial Sequence: Synthetic oligonucleotide
  Target: LAMA2; (+) strand; PAM type: YTN; PAM sequence: TTG
gcacaaccactttatagatt

SEQ ID NO: 338421 - DNA, 20 bp, Artificial Sequence
  Description of Artificial Sequence: Synthetic oligonucleotide
  Target: LAMA2; (+) strand; PAM type: YTN; PAM sequence: CTT
tatagattgtgctatgtgct

SEQ ID NO: 338422 - DNA, 20 bp, Artificial Sequence
  Description of Artificial Sequence: Synthetic oligonucleotide
  Target: LAMA2; (+) strand; PAM type: YTN; PAM sequence: TTT
atagattgtgctatgtgctt

SEQ ID NO: 338423 - DNA, 20 bp, Artificial Sequence
  Description of Artificial Sequence: Synthetic oligonucleotide
  Target: LAMA2; (+) strand; PAM type: YTN; PAM sequence: TTA
tagattgtgctatgtgcttc

SEQ ID NO: 338424 - DNA, 20 bp, Artificial Sequence
  Description of Artificial Sequence: Synthetic oligonucleotide
  Target: LAMA2; (+) strand; PAM type: YTN; PAM sequence: TTG
tgctatgtgcttccatcaca

SEQ ID NO: 338425 - DNA, 20 bp, Artificial Sequence
  Description of Artificial Sequence: Synthetic oligonucleotide
  Target: LAMA2; (+) strand; PAM type: YTN; PAM sequence: CTA
tgtgcttccatcacactgca

SEQ ID NO: 338426 - DNA, 20 bp, Artificial Sequence
  Description of Artificial Sequence: Synthetic oligonucleotide
  Target: LAMA2; (+) strand; PAM type: YTN; PAM sequence: CTT
ccatcacactgcagaaaata

SEQ ID NO: 338427 - DNA, 20 bp, Artificial Sequence
  Description of Artificial Sequence: Synthetic oligonucleotide
  Target: LAMA2; (+) strand; PAM type: YTN; PAM sequence: TTC
catcacactgcagaaaatat

SEQ ID NO: 338428 - DNA, 20 bp, Artificial Sequence
  Description of Artificial Sequence: Synthetic oligonucleotide
  Target: LAMA2; (+) strand; PAM type: YTN; PAM sequence: CTG
cagaaaatatctgggtgtct

SEQ ID NO: 338429 - DNA, 20 bp, Artificial Sequence
  Description of Artificial Sequence: Synthetic oligonucleotide
  Target: LAMA2; (+) strand; PAM type: YTN; PAM sequence: CTG
ggtgtctcttttttggggat

SEQ ID NO: 338430 - DNA, 20 bp, Artificial Sequence
  Description of Artificial Sequence: Synthetic oligonucleotide
  Target: LAMA2; (+) strand; PAM type: YTN; PAM sequence: CTC
ttttttggggatgtttctgg

SEQ ID NO: 338431 - DNA, 20 bp, Artificial Sequence
  Description of Artificial Sequence: Synthetic oligonucleotide
  Target: LAMA2; (+) strand; PAM type: YTN; PAM sequence: CTT
ttttggggatgtttctggtc

SEQ ID NO: 338432 - DNA, 20 bp, Artificial Sequence
  Description of Artificial Sequence: Synthetic oligonucleotide
  Target: LAMA2; (+) strand; PAM type: YTN; PAM sequence: TTT
tttggggatgtttctggtca

SEQ ID NO: 338433 - DNA, 20 bp, Artificial Sequence
  Description of Artificial Sequence: Synthetic oligonucleotide
  Target: LAMA2; (+) strand; PAM type: YTN; PAM sequence: TTT
ttggggatgtttctggtcat

SEQ ID NO: 338434 - DNA, 20 bp, Artificial Sequence
  Description of Artificial Sequence: Synthetic oligonucleotide
  Target: LAMA2; (+) strand; PAM type: YTN; PAM sequence: TTT
tggggatgtttctggtcatt

SEQ ID NO: 338435 - DNA, 20 bp, Artificial Sequence
  Description of Artificial Sequence: Synthetic oligonucleotide
  Target: LAMA2; (+) strand; PAM type: YTN; PAM sequence: TTT
ggggatgtttctggtcattg

SEQ ID NO: 338436 - DNA, 20 bp, Artificial Sequence
  Description of Artificial Sequence: Synthetic oligonucleotide
  Target: LAMA2; (+) strand; PAM type: YTN; PAM sequence: TTG
gggatgtttctggtcattga

SEQ ID NO: 338437 - DNA, 20 bp, Artificial Sequence
  Description of Artificial Sequence: Synthetic oligonucleotide
  Target: LAMA2; (+) strand; PAM type: YTN; PAM sequence: TTT
ctggtcattgatcagcatta

SEQ ID NO: 338438 - DNA, 20 bp, Artificial Sequence
  Description of Artificial Sequence: Synthetic oligonucleotide
  Target: LAMA2; (+) strand; PAM type: YTN; PAM sequence: TTC
tggtcattgatcagcattaa

SEQ ID NO: 338439 - DNA, 20 bp, Artificial Sequence
  Description of Artificial Sequence: Synthetic oligonucleotide
  Target: LAMA2; (+) strand; PAM type: YTN; PAM sequence: CTG
gtcattgatcagcattaatg

SEQ ID NO: 338440 - DNA, 20 bp, Artificial Sequence
  Description of Artificial Sequence: Synthetic oligonucleotide
  Target: LAMA2; (+) strand; PAM type: YTN; PAM sequence: TTG
atcagcattaatggccacag

SEQ ID NO: 338441 - DNA, 20 bp, Artificial Sequence
  Description of Artificial Sequence: Synthetic oligonucleotide
  Target: LAMA2; (+) strand; PAM type: YTN; PAM sequence: TTA
atggccacaggtccatcatt

SEQ ID NO: 338442 - DNA, 20 bp, Artificial Sequence
  Description of Artificial Sequence: Synthetic oligonucleotide
  Target: LAMA2; (+) strand; PAM type: YTN; PAM sequence: TTT
tatgggggctcccttcatag

SEQ ID NO: 338443 - DNA, 20 bp, Artificial Sequence
  Description of Artificial Sequence: Synthetic oligonucleotide
  Target: LAMA2; (+) strand; PAM type: YTN; PAM sequence: TTT
atgggggctcccttcatagt

SEQ ID NO: 338444 - DNA, 20 bp, Artificial Sequence
  Description of Artificial Sequence: Synthetic oligonucleotide
  Target: LAMA2; (+) strand; PAM type: YTN; PAM sequence: TTA
tgggggctcccttcatagta

SEQ ID NO: 338445 - DNA, 20 bp, Artificial Sequence
  Description of Artificial Sequence: Synthetic oligonucleotide
  Target: LAMA2; (+) strand; PAM type: YTN; PAM sequence: CTC
ccttcatagtaaactgcaca

SEQ ID NO: 338446 - DNA, 20 bp, Artificial Sequence
  Description of Artificial Sequence: Synthetic oligonucleotide
  Target: LAMA2; (+) strand; PAM type: YTN; PAM sequence: CTT
catagtaaactgcacagtaa

SEQ ID NO: 338447 - DNA, 20 bp, Artificial Sequence
  Description of Artificial Sequence: Synthetic oligonucleotide
  Target: LAMA2; (+) strand; PAM type: YTN; PAM sequence: TTC
atagtaaactgcacagtaaa

SEQ ID NO: 338448 - DNA, 20 bp, Artificial Sequence
  Description of Artificial Sequence: Synthetic oligonucleotide
  Target: LAMA2; (+) strand; PAM type: YTN; PAM sequence: CTG
cacagtaaactatacacagt

SEQ ID NO: 338449 - DNA, 20 bp, Artificial Sequence
  Description of Artificial Sequence: Synthetic oligonucleotide
  Target: LAMA2; (+) strand; PAM type: YTN; PAM sequence: CTA
tacacagtgaaccttgtggt

SEQ ID NO: 338450 - DNA, 20 bp, Artificial Sequence
  Description of Artificial Sequence: Synthetic oligonucleotide
  Target: LAMA2; (+) strand; PAM type: YTN; PAM sequence: CTT
gtggtaaactgtagcatcct

SEQ ID NO: 338451 - DNA, 20 bp, Artificial Sequence
  Description of Artificial Sequence: Synthetic oligonucleotide
  Target: LAMA2; (+) strand; PAM type: YTN; PAM sequence: TTG
tggtaaactgtagcatcctg

SEQ ID NO: 338452 - DNA, 20 bp, Artificial Sequence
  Description of Artificial Sequence: Synthetic oligonucleotide
  Target: LAMA2; (+) strand; PAM type: YTN; PAM sequence: CTG
tagcatcctgtgtactatag

SEQ ID NO: 338453 - DNA, 20 bp, Artificial Sequence
  Description of Artificial Sequence: Synthetic oligonucleotide
  Target: LAMA2; (+) strand; PAM type: YTN; PAM sequence: CTG
tgtactatagcaatttactc

SEQ ID NO: 338454 - DNA, 20 bp, Artificial Sequence
  Description of Artificial Sequence: Synthetic oligonucleotide
  Target: LAMA2; (+) strand; PAM type: YTN; PAM sequence: CTA
tagcaatttactccatgttg

SEQ ID NO: 338455 - DNA, 20 bp, Artificial Sequence
  Description of Artificial Sequence: Synthetic oligonucleotide
  Target: LAMA2; (+) strand; PAM type: YTN; PAM sequence: TTT
actccatgttgcttttttca

SEQ ID NO: 338456 - DNA, 20 bp, Artificial Sequence
  Description of Artificial Sequence: Synthetic oligonucleotide
  Target: LAMA2; (+) strand; PAM type: YTN; PAM sequence: TTA
ctccatgttgcttttttcat

SEQ ID NO: 338457 - DNA, 20 bp, Artificial Sequence
  Description of Artificial Sequence: Synthetic oligonucleotide
  Target: LAMA2; (+) strand; PAM type: YTN; PAM sequence: CTC
catgttgcttttttcattta

SEQ ID NO: 338458 - DNA, 20 bp, Artificial Sequence
  Description of Artificial Sequence: Synthetic oligonucleotide
  Target: LAMA2; (+) strand; PAM type: YTN; PAM sequence: TTG
cttttttcatttaacaataa

SEQ ID NO: 338459 - DNA, 20 bp, Artificial Sequence
  Description of Artificial Sequence: Synthetic oligonucleotide
  Target: LAMA2; (+) strand; PAM type: YTN; PAM sequence: CTT
ttttcatttaacaataaatc

SEQ ID NO: 338460 - DNA, 20 bp, Artificial Sequence
  Description of Artificial Sequence: Synthetic oligonucleotide
  Target: LAMA2; (+) strand; PAM type: YTN; PAM sequence: TTT
tttcatttaacaataaatcc

SEQ ID NO: 338461 - DNA, 20 bp, Artificial Sequence
  Description of Artificial Sequence: Synthetic oligonucleotide
  Target: LAMA2; (+) strand; PAM type: YTN; PAM sequence: TTT
ttcatttaacaataaatccc

SEQ ID NO: 338462 - DNA, 20 bp, Artificial Sequence
  Description of Artificial Sequence: Synthetic oligonucleotide
  Target: LAMA2; (+) strand; PAM type: YTN; PAM sequence: TTT
tcatttaacaataaatcccg

SEQ ID NO: 338463 - DNA, 20 bp, Artificial Sequence
  Description of Artificial Sequence: Synthetic oligonucleotide
  Target: LAMA2; (+) strand; PAM type: YTN; PAM sequence: TTT
catttaacaataaatcccgc

SEQ ID NO: 338464 - DNA, 20 bp, Artificial Sequence
  Description of Artificial Sequence: Synthetic oligonucleotide
  Target: LAMA2; (+) strand; PAM type: YTN; PAM sequence: TTC
atttaacaataaatcccgcc

SEQ ID NO: 338465 - DNA, 20 bp, Artificial Sequence
  Description of Artificial Sequence: Synthetic oligonucleotide
  Target: LAMA2; (+) strand; PAM type: YTN; PAM sequence: TTT
aacaataaatcccgccattc

SEQ ID NO: 338466 - DNA, 20 bp, Artificial Sequence
  Description of Artificial Sequence: Synthetic oligonucleotide
  Target: LAMA2; (+) strand; PAM type: YTN; PAM sequence: TTA
acaataaatcccgccattca

SEQ ID NO: 338467 - DNA, 20 bp, Artificial Sequence
  Description of Artificial Sequence: Synthetic oligonucleotide
  Target: LAMA2; (+) strand; PAM type: YTN; PAM sequence: TTC
attgctcttccatctcaggg

SEQ ID NO: 338468 - DNA, 20 bp, Artificial Sequence
  Description of Artificial Sequence: Synthetic oligonucleotide
  Target: LAMA2; (+) strand; PAM type: YTN; PAM sequence: TTG
ctcttccatctcagggtttt

SEQ ID NO: 338469 - DNA, 20 bp, Artificial Sequence
  Description of Artificial Sequence: Synthetic oligonucleotide
  Target: LAMA2; (+) strand; PAM type: YTN; PAM sequence: CTC
ttccatctcagggttttctt

SEQ ID NO: 338470 - DNA, 20 bp, Artificial Sequence
  Description of Artificial Sequence: Synthetic oligonucleotide
  Target: LAMA2; (+) strand; PAM type: YTN; PAM sequence: CTT
ccatctcagggttttcttgc

SEQ ID NO: 338471 - DNA, 20 bp, Artificial Sequence
  Description of Artificial Sequence: Synthetic oligonucleotide
  Target: LAMA2; (+) strand; PAM type: YTN; PAM sequence: TTC
catctcagggttttcttgct

SEQ ID NO: 338472 - DNA, 20 bp, Artificial Sequence
  Description of Artificial Sequence: Synthetic oligonucleotide
  Target: LAMA2; (+) strand; PAM type: YTN; PAM sequence: CTC
agggttttcttgcttattat

SEQ ID NO: 338473 - DNA, 20 bp, Artificial Sequence
  Description of Artificial Sequence: Synthetic oligonucleotide
  Target: LAMA2; (+) strand; PAM type: YTN; PAM sequence: TTT
tcttgcttattattgcttgt

SEQ ID NO: 338474 - DNA, 20 bp, Artificial Sequence
  Description of Artificial Sequence: Synthetic oligonucleotide
  Target: LAMA2; (+) strand; PAM type: YTN; PAM sequence: TTT
cttgcttattattgcttgtt

SEQ ID NO: 338475 - DNA, 20 bp, Artificial Sequence
  Description of Artificial Sequence: Synthetic oligonucleotide
  Target: LAMA2; (+) strand; PAM type: YTN; PAM sequence: TTC
ttgcttattattgcttgtta

SEQ ID NO: 338476 - DNA, 20 bp, Artificial Sequence
  Description of Artificial Sequence: Synthetic oligonucleotide
  Target: LAMA2; (+) strand; PAM type: YTN; PAM sequence: CTT
gcttattattgcttgttaaa

SEQ ID NO: 338477 - DNA, 20 bp, Artificial Sequence
  Description of Artificial Sequence: Synthetic oligonucleotide
  Target: LAMA2; (+) strand; PAM type: YTN; PAM sequence: TTG
cttattattgcttgttaaaa

SEQ ID NO: 338478 - DNA, 20 bp, Artificial Sequence
  Description of Artificial Sequence: Synthetic oligonucleotide
  Target: LAMA2; (+) strand; PAM type: YTN; PAM sequence: CTT
attattgcttgttaaaattc

SEQ ID NO: 338479 - DNA, 20 bp, Artificial Sequence
  Description of Artificial Sequence: Synthetic oligonucleotide
  Target: LAMA2; (+) strand; PAM type: YTN; PAM sequence: TTA
ttattgcttgttaaaattct

SEQ ID NO: 338480 - DNA, 20 bp, Artificial Sequence
  Description of Artificial Sequence: Synthetic oligonucleotide
  Target: LAMA2; (+) strand; PAM type: YTN; PAM sequence: TTA
ttgcttgttaaaattcttcc

SEQ ID NO: 338481 - DNA, 20 bp, Artificial Sequence
  Description of Artificial Sequence: Synthetic oligonucleotide
  Target: LAMA2; (+) strand; PAM type: YTN; PAM sequence: TTG
cttgttaaaattcttccaaa

SEQ ID NO: 338482 - DNA, 20 bp, Artificial Sequence
  Description of Artificial Sequence: Synthetic oligonucleotide
  Target: LAMA2; (+) strand; PAM type: YTN; PAM sequence: CTT
gttaaaattcttccaaatca

SEQ ID NO: 338483 - DNA, 20 bp, Artificial Sequence
  Description of Artificial Sequence: Synthetic oligonucleotide
  Target: LAMA2; (+) strand; PAM type: YTN; PAM sequence: TTG
ttaaaattcttccaaatcac

SEQ ID NO: 338484 - DNA, 20 bp, Artificial Sequence
  Description of Artificial Sequence: Synthetic oligonucleotide
  Target: LAMA2; (+) strand; PAM type: YTN; PAM sequence: TTA
aaattcttccaaatcacatt

SEQ ID NO: 338485 - DNA, 20 bp, Artificial Sequence
  Description of Artificial Sequence: Synthetic oligonucleotide
  Target: LAMA2; (+) strand; PAM type: YTN; PAM sequence: TTC
ttccaaatcacatttataat

SEQ ID NO: 338486 - DNA, 20 bp, Artificial Sequence
  Description of Artificial Sequence: Synthetic oligonucleotide
  Target: LAMA2; (+) strand; PAM type: YTN; PAM sequence: CTT
ccaaatcacatttataatca

SEQ ID NO: 338487 - DNA, 20 bp, Artificial Sequence
  Description of Artificial Sequence: Synthetic oligonucleotide
  Target: LAMA2; (+) strand; PAM type: YTN; PAM sequence: TTC
caaatcacatttataatcaa

SEQ ID NO: 338488 - DNA, 20 bp, Artificial Sequence
  Description of Artificial Sequence: Synthetic oligonucleotide
  Target: LAMA2; (+) strand; PAM type: YTN; PAM sequence: TTT
ataatcaagtcgttcagcac

SEQ ID NO: 338489 - DNA, 20 bp, Artificial Sequence
  Description of Artificial Sequence: Synthetic oligonucleotide
  Target: LAMA2; (+) strand; PAM type: YTN; PAM sequence: TTA
taatcaagtcgttcagcact

SEQ ID NO: 338490 - DNA, 20 bp, Artificial Sequence
  Description of Artificial Sequence: Synthetic oligonucleotide
  Target: LAMA2; (+) strand; PAM type: YTN; PAM sequence: TTC
agcactaaggaaaaaaaata

SEQ ID NO: 338491 - DNA, 20 bp, Artificial Sequence
  Description of Artificial Sequence: Synthetic oligonucleotide
  Target: LAMA2; (+) strand; PAM type: YTN; PAM sequence: CTA
aggaaaaaaaataacatttt

SEQ ID NO: 338492 - DNA, 20 bp, Artificial Sequence
  Description of Artificial Sequence: Synthetic oligonucleotide
  Target: LAMA2; (+) strand; PAM type: YTN; PAM sequence: TTT
tcatgaaaaaatgaaattgc

SEQ ID NO: 338493 - DNA, 20 bp, Artificial Sequence
  Description of Artificial Sequence: Synthetic oligonucleotide
  Target: LAMA2; (+) strand; PAM type: YTN; PAM sequence: TTT
catgaaaaaatgaaattgca

SEQ ID NO: 338494 - DNA, 20 bp, Artificial Sequence
  Description of Artificial Sequence: Synthetic oligonucleotide
  Target: LAMA2; (+) strand; PAM type: YTN; PAM sequence: TTC
atgaaaaaatgaaattgcat

SEQ ID NO: 338495 - DNA, 20 bp, Artificial Sequence
  Description of Artificial Sequence: Synthetic oligonucleotide
  Target: LAMA2; (+) strand; PAM type: YTN; PAM sequence: TTG
cattacatttatatattctc

SEQ ID NO: 338496 - DNA, 20 bp, Artificial Sequence
  Description of Artificial Sequence: Synthetic oligonucleotide
  Target: LAMA2; (+) strand; PAM type: YTN; PAM sequence: TTA
catttatatattctcttagg

SEQ ID NO: 338497 - DNA, 20 bp, Artificial Sequence
  Description of Artificial Sequence: Synthetic oligonucleotide
  Target: LAMA2; (+) strand; PAM type: YTN; PAM sequence: TTT
atatattctcttagggacat

SEQ ID NO: 338498 - DNA, 20 bp, Artificial Sequence
  Description of Artificial Sequence: Synthetic oligonucleotide
  Target: LAMA2; (+) strand; PAM type: YTN; PAM sequence: TTA
tatattctcttagggacatt

SEQ ID NO: 338499 - DNA, 20 bp, Artificial Sequence
  Description of Artificial Sequence: Synthetic oligonucleotide
  Target: LAMA2; (+) strand; PAM type: YTN; PAM sequence: TTC
tcttagggacattgaaaata

SEQ ID NO: 338500 - DNA, 20 bp, Artificial Sequence
  Description of Artificial Sequence: Synthetic oligonucleotide
  Target: LAMA2; (+) strand; PAM type: YTN; PAM sequence: CTC
ttagggacattgaaaataag

SEQ ID NO: 338501 - DNA, 20 bp, Artificial Sequence
  Description of Artificial Sequence: Synthetic oligonucleotide
  Target: LAMA2; (+) strand; PAM type: YTN; PAM sequence: CTT
agggacattgaaaataagtc

SEQ ID NO: 338502 - DNA, 20 bp, Artificial Sequence
  Description of Artificial Sequence: Synthetic oligonucleotide
  Target: LAMA2; (+) strand; PAM type: YTN; PAM sequence: TTA
gggacattgaaaataagtct

SEQ ID NO: 338503 - DNA, 20 bp, Artificial Sequence
  Description of Artificial Sequence: Synthetic oligonucleotide
  Target: LAMA2; (+) strand; PAM type: YTN; PAM sequence: TTG
aaaataagtcttgctatttt

SEQ ID NO: 338504 - DNA, 20 bp, Artificial Sequence
  Description of Artificial Sequence: Synthetic oligonucleotide
  Target: LAMA2; (+) strand; PAM type: YTN; PAM sequence: CTT
gctatttttcagagctagac

SEQ ID NO: 338505 - DNA, 20 bp, Artificial Sequence
  Description of Artificial Sequence: Synthetic oligonucleotide
  Target: LAMA2; (+) strand; PAM type: YTN; PAM sequence: TTG
ctatttttcagagctagact

SEQ ID NO: 338506 - DNA, 20 bp, Artificial Sequence
  Description of Artificial Sequence: Synthetic oligonucleotide
  Target: LAMA2; (+) strand; PAM type: YTN; PAM sequence: CTA
tttttcagagctagactttg

SEQ ID NO: 338507 - DNA, 20 bp, Artificial Sequence
  Description of Artificial Sequence: Synthetic oligonucleotide
  Target: LAMA2; (+) strand; PAM type: YTN; PAM sequence: TTT
ttcagagctagactttgaga

SEQ ID NO: 338508 - DNA, 20 bp, Artificial Sequence
  Description of Artificial Sequence: Synthetic oligonucleotide
  Target: LAMA2; (+) strand; PAM type: YTN; PAM sequence: TTT
tcagagctagactttgagat

SEQ ID NO: 338509 - DNA, 20 bp, Artificial Sequence
  Description of Artificial Sequence: Synthetic oligonucleotide
  Target: LAMA2; (+) strand; PAM type: YTN; PAM sequence: TTT
cagagctagactttgagatt

SEQ ID NO: 338510 - DNA, 20 bp, Artificial Sequence
  Description of Artificial Sequence: Synthetic oligonucleotide
  Target: LAMA2; (+) strand; PAM type: YTN; PAM sequence: TTC
agagctagactttgagattt

SEQ ID NO: 338511 - DNA, 20 bp, Artificial Sequence
  Description of Artificial Sequence: Synthetic oligonucleotide
  Target: LAMA2; (+) strand; PAM type: YTN; PAM sequence: CTA
gactttgagatttgcttttt

SEQ ID NO: 338512 - DNA, 20 bp, Artificial Sequence
  Description of Artificial Sequence: Synthetic oligonucleotide
  Target: LAMA2; (+) strand; PAM type: YTN; PAM sequence: CTT
tgagatttgcttttttgcag

SEQ ID NO: 338513 - DNA, 20 bp, Artificial Sequence
  Description of Artificial Sequence: Synthetic oligonucleotide
  Target: LAMA2; (+) strand; PAM type: YTN; PAM sequence: TTT
gagatttgcttttttgcaga

SEQ ID NO: 338514 - DNA, 20 bp, Artificial Sequence
  Description of Artificial Sequence: Synthetic oligonucleotide
  Target: LAMA2; (+) strand; PAM type: YTN; PAM sequence: TTG
agatttgcttttttgcagag

SEQ ID NO: 338515 - DNA, 20 bp, Artificial Sequence
  Description of Artificial Sequence: Synthetic oligonucleotide
  Target: LAMA2; (+) strand; PAM type: YTN; PAM sequence: TTT
gcttttttgcagagtgagat

SEQ ID NO: 338516 - DNA, 20 bp, Artificial Sequence
  Description of Artificial Sequence: Synthetic oligonucleotide
  Target: LAMA2; (+) strand; PAM type: YTN; PAM sequence: TTG
cttttttgcagagtgagata

SEQ ID NO: 338517 - DNA, 20 bp, Artificial Sequence
  Description of Artificial Sequence: Synthetic oligonucleotide
  Target: LAMA2; (+) strand; PAM type: YTN; PAM sequence: CTT
ttttgcagagtgagatagag

SEQ ID NO: 338518 - DNA, 20 bp, Artificial Sequence
  Description of Artificial Sequence: Synthetic oligonucleotide
  Target: LAMA2; (+) strand; PAM type: YTN; PAM sequence: TTT
tttgcagagtgagatagaga

SEQ ID NO: 338519 - DNA, 20 bp, Artificial Sequence
  Description of Artificial Sequence: Synthetic oligonucleotide
  Target: LAMA2; (+) strand; PAM type: YTN; PAM sequence: TTT
ttgcagagtgagatagagaa

SEQ ID NO: 338520 - DNA, 20 bp, Artificial Sequence
  Description of Artificial Sequence: Synthetic oligonucleotide
  Target: LAMA2; (+) strand; PAM type: YTN; PAM sequence: TTT
tgcagagtgagatagagaag

SEQ ID NO: 338521 - DNA, 20 bp, Artificial Sequence
  Description of Artificial Sequence: Synthetic oligonucleotide
  Target: LAMA2; (+) strand; PAM type: YTN; PAM sequence: TTT
gcagagtgagatagagaagt

SEQ ID NO: 338522 - DNA, 20 bp, Artificial Sequence
  Description of Artificial Sequence: Synthetic oligonucleotide
  Target: LAMA2; (+) strand; PAM type: YTN; PAM sequence: TTG
cagagtgagatagagaagtc

SEQ ID NO: 338523 - DNA, 20 bp, Artificial Sequence
  Description of Artificial Sequence: Synthetic oligonucleotide
  Target: LAMA2; (+) strand; PAM type: YTN; PAM sequence: CTT
caaatactgtcccttgaaga

SEQ ID NO: 338524 - DNA, 20 bp, Artificial Sequence
  Description of Artificial Sequence: Synthetic oligonucleotide
  Target: LAMA2; (+) strand; PAM type: YTN; PAM sequence: TTC
aaatactgtcccttgaagag

SEQ ID NO: 338525 - DNA, 20 bp, Artificial Sequence
  Description of Artificial Sequence: Synthetic oligonucleotide
  Target: LAMA2; (+) strand; PAM type: YTN; PAM sequence: CTG
tcccttgaagagttaggcat

SEQ ID NO: 338526 - DNA, 20 bp, Artificial Sequence
  Description of Artificial Sequence: Synthetic oligonucleotide
  Target: LAMA2; (+) strand; PAM type: YTN; PAM sequence: CTT
gaagagttaggcattgattt

SEQ ID NO: 338527 - DNA, 20 bp, Artificial Sequence
  Description of Artificial Sequence: Synthetic oligonucleotide
  Target: LAMA2; (+) strand; PAM type: YTN; PAM sequence: TTG
aagagttaggcattgattta

SEQ ID NO: 338528 - DNA, 20 bp, Artificial Sequence
  Description of Artificial Sequence: Synthetic oligonucleotide
  Target: LAMA2; (+) strand; PAM type: YTN; PAM sequence: TTA
ggcattgatttaaacccttt

SEQ ID NO: 338529 - DNA, 20 bp, Artificial Sequence
  Description of Artificial Sequence: Synthetic oligonucleotide
  Target: LAMA2; (+) strand; PAM type: YTN; PAM sequence: TTG
atttaaacccttttgaaaaa

SEQ ID NO: 338530 - DNA, 20 bp, Artificial Sequence
  Description of Artificial Sequence: Synthetic oligonucleotide
  Target: LAMA2; (+) strand; PAM type: YTN; PAM sequence: TTT
aaacccttttgaaaaacaat

SEQ ID NO: 338531 - DNA, 20 bp, Artificial Sequence
  Description of Artificial Sequence: Synthetic oligonucleotide
  Target: LAMA2; (+) strand; PAM type: YTN; PAM sequence: TTA
aacccttttgaaaaacaatt

SEQ ID NO: 338532 - DNA, 20 bp, Artificial Sequence
  Description of Artificial Sequence: Synthetic oligonucleotide
  Target: LAMA2; (+) strand; PAM type: YTN; PAM sequence: CTT
ttgaaaaacaatttcaacaa

SEQ ID NO: 338533 - DNA, 20 bp, Artificial Sequence
  Description of Artificial Sequence: Synthetic oligonucleotide
  Target: LAMA2; (+) strand; PAM type: YTN; PAM sequence: TTT
tgaaaaacaatttcaacaaa

SEQ ID NO: 338534 - DNA, 20 bp, Artificial Sequence
  Description of Artificial Sequence: Synthetic oligonucleotide
  Target: LAMA2; (+) strand; PAM type: YTN; PAM sequence: TTT
gaaaaacaatttcaacaaat

SEQ ID NO: 338535 - DNA, 20 bp, Artificial Sequence
  Description of Artificial Sequence: Synthetic oligonucleotide
  Target: LAMA2; (+) strand; PAM type: YTN; PAM sequence: TTG
aaaaacaatttcaacaaata

SEQ ID NO: 338536 - DNA, 20 bp, Artificial Sequence
  Description of Artificial Sequence: Synthetic oligonucleotide
  Target: LAMA2; (+) strand; PAM type: YTN; PAM sequence: TTT
caacaaataattgaaaatgt

SEQ ID NO: 338537 - DNA, 20 bp, Artificial Sequence
  Description of Artificial Sequence: Synthetic oligonucleotide
  Target: LAMA2; (+) strand; PAM type: YTN; PAM sequence: TTC
aacaaataattgaaaatgtt

SEQ ID NO: 338538 - DNA, 20 bp, Artificial Sequence
  Description of Artificial Sequence: Synthetic oligonucleotide
  Target: LAMA2; (+) strand; PAM type: YTN; PAM sequence: TTG
aaaatgttctcttcaaagta

SEQ ID NO: 338539 - DNA, 20 bp, Artificial Sequence
  Description of Artificial Sequence: Synthetic oligonucleotide
  Target: LAMA2; (+) strand; PAM type: YTN; PAM sequence: TTC
tcttcaaagtattatcatta

SEQ ID NO: 338540 - DNA, 20 bp, Artificial Sequence
  Description of Artificial Sequence: Synthetic oligonucleotide
  Target: LAMA2; (+) strand; PAM type: YTN; PAM sequence: CTC
ttcaaagtattatcattagt

SEQ ID NO: 338541 - DNA, 20 bp, Artificial Sequence
  Description of Artificial Sequence: Synthetic oligonucleotide
  Target: LAMA2; (+) strand; PAM type: YTN; PAM sequence: CTT
caaagtattatcattagtca

SEQ ID NO: 338542 - DNA, 20 bp, Artificial Sequence
  Description of Artificial Sequence: Synthetic oligonucleotide
  Target: LAMA2; (+) strand; PAM type: YTN; PAM sequence: TTC
aaagtattatcattagtcat

SEQ ID NO: 338543 - DNA, 20 bp, Artificial Sequence
  Description of Artificial Sequence: Synthetic oligonucleotide
  Target: LAMA2; (+) strand; PAM type: YTN; PAM sequence: TTA
tcattagtcatccagttaga

SEQ ID NO: 338544 - DNA, 20 bp, Artificial Sequence
  Description of Artificial Sequence: Synthetic oligonucleotide
  Target: LAMA2; (+) strand; PAM type: YTN; PAM sequence: TTA
gtcatccagttagattatta

SEQ ID NO: 338545 - DNA, 20 bp, Artificial Sequence
  Description of Artificial Sequence: Synthetic oligonucleotide
  Target: LAMA2; (+) strand; PAM type: YTN; PAM sequence: TTA
gattattattattaggaatt

SEQ ID NO: 338546 - DNA, 20 bp, Artificial Sequence
  Description of Artificial Sequence: Synthetic oligonucleotide
  Target: LAMA2; (+) strand; PAM type: YTN; PAM sequence: TTA
ttattattaggaattctgag

SEQ ID NO: 338547 - DNA, 20 bp, Artificial Sequence
  Description of Artificial Sequence: Synthetic oligonucleotide
  Target: LAMA2; (+) strand; PAM type: YTN; PAM sequence: TTA
ttattaggaattctgaggtg

SEQ ID NO: 338548 - DNA, 20 bp, Artificial Sequence
  Description of Artificial Sequence: Synthetic oligonucleotide
  Target: LAMA2; (+) strand; PAM type: YTN; PAM sequence: TTA
ttaggaattctgaggtggtg

SEQ ID NO: 338549 - DNA, 20 bp, Artificial Sequence
  Description of Artificial Sequence: Synthetic oligonucleotide
  Target: LAMA2; (+) strand; PAM type: YTN; PAM sequence: TTA
ggaattctgaggtggtggaa

SEQ ID NO: 338550 - DNA, 20 bp, Artificial Sequence
  Description of Artificial Sequence: Synthetic oligonucleotide
  Target: LAMA2; (+) strand; PAM type: YTN; PAM sequence: TTC
tgaggtggtggaataattca

SEQ ID NO: 338551 - DNA, 20 bp, Artificial Sequence
  Description of Artificial Sequence: Synthetic oligonucleotide
  Target: LAMA2; (+) strand; PAM type: YTN; PAM sequence: CTG
aggtggtggaataattcatt

SEQ ID NO: 338552 - DNA, 20 bp, Artificial Sequence
  Description of Artificial Sequence: Synthetic oligonucleotide
  Target: LAMA2; (+) strand; PAM type: YTN; PAM sequence: TTC
attttccaatgtgttaactt

SEQ ID NO: 338553 - DNA, 20 bp, Artificial Sequence
  Description of Artificial Sequence: Synthetic oligonucleotide
  Target: LAMA2; (+) strand; PAM type: YTN; PAM sequence: TTT
tccaatgtgttaacttctca

SEQ ID NO: 338554 - DNA, 20 bp, Artificial Sequence
  Description of Artificial Sequence: Synthetic oligonucleotide
  Target: LAMA2; (+) strand; PAM type: YTN; PAM sequence: TTT
ccaatgtgttaacttctcat

SEQ ID NO: 338555 - DNA, 20 bp, Artificial Sequence
  Description of Artificial Sequence: Synthetic oligonucleotide
  Target: LAMA2; (+) strand; PAM type: YTN; PAM sequence: TTC
caatgtgttaacttctcatg

SEQ ID NO: 338556 - DNA, 20 bp, Artificial Sequence
  Description of Artificial Sequence: Synthetic oligonucleotide
  Target: LAMA2; (+) strand; PAM type: YTN; PAM sequence: TTA
acttctcatgagtttaatgt

SEQ ID NO: 338557 - DNA, 20 bp, Artificial Sequence
  Description of Artificial Sequence: Synthetic oligonucleotide
  Target: LAMA2; (+) strand; PAM type: YTN; PAM sequence: CTT
ctcatgagtttaatgtgagt

SEQ ID NO: 338558 - DNA, 20 bp, Artificial Sequence
  Description of Artificial Sequence: Synthetic oligonucleotide
  Target: LAMA2; (+) strand; PAM type: YTN; PAM sequence: TTC
tcatgagtttaatgtgagta

SEQ ID NO: 338559 - DNA, 20 bp, Artificial Sequence
  Description of Artificial Sequence: Synthetic oligonucleotide
  Target: LAMA2; (+) strand; PAM type: YTN; PAM sequence: CTC
atgagtttaatgtgagtata

SEQ ID NO: 338560 - DNA, 20 bp, Artificial Sequence
  Description of Artificial Sequence: Synthetic oligonucleotide
  Target: LAMA2; (+) strand; PAM type: YTN; PAM sequence: TTT
aatgtgagtataaaaagtct

SEQ ID NO: 338561 - DNA, 20 bp, Artificial Sequence
  Description of Artificial Sequence: Synthetic oligonucleotide
  Target: LAMA2; (+) strand; PAM type: YTN; PAM sequence: TTA
atgtgagtataaaaagtctg

SEQ ID NO: 338562 - DNA, 20 bp, Artificial Sequence
  Description of Artificial Sequence: Synthetic oligonucleotide
  Target: LAMA2; (+) strand; PAM type: YTN; PAM sequence: CTG
ttttaactgagggcagagta

SEQ ID NO: 338563 - DNA, 20 bp, Artificial Sequence
  Description of Artificial Sequence: Synthetic oligonucleotide
  Target: LAMA2; (+) strand; PAM type: YTN; PAM sequence: TTT
taactgagggcagagtattc

SEQ ID NO: 338564 - DNA, 20 bp, Artificial Sequence
  Description of Artificial Sequence: Synthetic oligonucleotide
  Target: LAMA2; (+) strand; PAM type: YTN; PAM sequence: TTT
aactgagggcagagtattcc

SEQ ID NO: 338565 - DNA, 20 bp, Artificial Sequence
  Description of Artificial Sequence: Synthetic oligonucleotide
  Target: LAMA2; (+) strand; PAM type: YTN; PAM sequence: TTA
actgagggcagagtattcct

SEQ ID NO: 338566 - DNA, 20 bp, Artificial Sequence
  Description of Artificial Sequence: Synthetic oligonucleotide
  Target: LAMA2; (+) strand; PAM type: YTN; PAM sequence: CTG
agggcagagtattccttttt

SEQ ID NO: 338567 - DNA, 20 bp, Artificial Sequence
  Description of Artificial Sequence: Synthetic oligonucleotide
  Target: LAMA2; (+) strand; PAM type: YTN; PAM sequence: TTC
ctttttctcttataatacag

SEQ ID NO: 338568 - DNA, 20 bp, Artificial Sequence
  Description of Artificial Sequence: Synthetic oligonucleotide
  Target: LAMA2; (+) strand; PAM type: YTN; PAM sequence: CTT
tttctcttataatacaggag

SEQ ID NO: 338569 - DNA, 20 bp, Artificial Sequence
  Description of Artificial Sequence: Synthetic oligonucleotide
  Target: LAMA2; (+) strand; PAM type: YTN; PAM sequence: TTT
ttctcttataatacaggagc

SEQ ID NO: 338570 - DNA, 20 bp, Artificial Sequence
  Description of Artificial Sequence: Synthetic oligonucleotide
  Target: LAMA2; (+) strand; PAM type: YTN; PAM sequence: TTT
tctcttataatacaggagcc

SEQ ID NO: 338571 - DNA, 20 bp, Artificial Sequence
  Description of Artificial Sequence: Synthetic oligonucleotide
  Target: LAMA2; (+) strand; PAM type: YTN; PAM sequence: TTT
ctcttataatacaggagcca

SEQ ID NO: 338572 - DNA, 20 bp, Artificial Sequence
  Description of Artificial Sequence: Synthetic oligonucleotide
  Target: LAMA2; (+) strand; PAM type: YTN; PAM sequence: TTC
tcttataatacaggagccag

SEQ ID NO: 338573 - DNA, 20 bp, Artificial Sequence
  Description of Artificial Sequence: Synthetic oligonucleotide
  Target: LAMA2; (+) strand; PAM type: YTN; PAM sequence: CTC
ttataatacaggagccagtt

SEQ ID NO: 338574 - DNA, 20 bp, Artificial Sequence
  Description of Artificial Sequence: Synthetic oligonucleotide
  Target: LAMA2; (+) strand; PAM type: YTN; PAM sequence: CTT
ataatacaggagccagttac

SEQ ID NO: 338575 - DNA, 20 bp, Artificial Sequence
  Description of Artificial Sequence: Synthetic oligonucleotide
  Target: LAMA2; (+) strand; PAM type: YTN; PAM sequence: TTA
taatacaggagccagttaca

SEQ ID NO: 338576 - DNA, 20 bp, Artificial Sequence
  Description of Artificial Sequence: Synthetic oligonucleotide
  Target: LAMA2; (+) strand; PAM type: YTN; PAM sequence: TTA
caacacaggaggtgaaatgg

SEQ ID NO: 338577 - DNA, 20 bp, Artificial Sequence
  Description of Artificial Sequence: Synthetic oligonucleotide
  Target: LAMA2; (+) strand; PAM type: YTN; PAM sequence: CTG
tttgcttacctgcaacttca

SEQ ID NO: 338578 - DNA, 20 bp, Artificial Sequence
  Description of Artificial Sequence: Synthetic oligonucleotide
  Target: LAMA2; (+) strand; PAM type: YTN; PAM sequence: TTT
gcttacctgcaacttcagga

SEQ ID NO: 338579 - DNA, 20 bp, Artificial Sequence
  Description of Artificial Sequence: Synthetic oligonucleotide
  Target: LAMA2; (+) strand; PAM type: YTN; PAM sequence: TTG
cttacctgcaacttcaggaa

SEQ ID NO: 338580 - DNA, 20 bp, Artificial Sequence
  Description of Artificial Sequence: Synthetic oligonucleotide
  Target: LAMA2; (+) strand; PAM type: YTN; PAM sequence: CTT
acctgcaacttcaggaattt

SEQ ID NO: 338581 - DNA, 20 bp, Artificial Sequence
  Description of Artificial Sequence: Synthetic oligonucleotide
  Target: LAMA2; (+) strand; PAM type: YTN; PAM sequence: TTA
cctgcaacttcaggaatttc

SEQ ID NO: 338582 - DNA, 20 bp, Artificial Sequence
  Description of Artificial Sequence: Synthetic oligonucleotide
  Target: LAMA2; (+) strand; PAM type: YTN; PAM sequence: CTG
caacttcaggaatttcatgc

SEQ ID NO: 338583 - DNA, 20 bp, Artificial Sequence
  Description of Artificial Sequence: Synthetic oligonucleotide
  Target: LAMA2; (+) strand; PAM type: YTN; PAM sequence: CTT
caggaatttcatgcttagca

SEQ ID NO: 338584 - DNA, 20 bp, Artificial Sequence
  Description of Artificial Sequence: Synthetic oligonucleotide
  Target: LAMA2; (+) strand; PAM type: YTN; PAM sequence: TTC
aggaatttcatgcttagcaa

SEQ ID NO: 338585 - DNA, 20 bp, Artificial Sequence
  Description of Artificial Sequence: Synthetic oligonucleotide
  Target: LAMA2; (+) strand; PAM type: YTN; PAM sequence: TTT
catgcttagcaattaattgc

SEQ ID NO: 338586 - DNA, 20 bp, Artificial Sequence
  Description of Artificial Sequence: Synthetic oligonucleotide
  Target: LAMA2; (+) strand; PAM type: YTN; PAM sequence: TTC
atgcttagcaattaattgca

SEQ ID NO: 338587 - DNA, 20 bp, Artificial Sequence
  Description of Artificial Sequence: Synthetic oligonucleotide
  Target: LAMA2; (+) strand; PAM type: YTN; PAM sequence: CTT
agcaattaattgcagtacac

SEQ ID NO: 338588 - DNA, 20 bp, Artificial Sequence
  Description of Artificial Sequence: Synthetic oligonucleotide
  Target: LAMA2; (+) strand; PAM type: YTN; PAM sequence: TTA
gcaattaattgcagtacaca

SEQ ID NO: 338589 - DNA, 20 bp, Artificial Sequence
  Description of Artificial Sequence: Synthetic oligonucleotide
  Target: LAMA2; (+) strand; PAM type: YTN; PAM sequence: TTA
attgcagtacacacttgtgg

SEQ ID NO: 338590 - DNA, 20 bp, Artificial Sequence
  Description of Artificial Sequence: Synthetic oligonucleotide
  Target: LAMA2; (+) strand; PAM type: YTN; PAM sequence: TTG
cagtacacacttgtgggggt

SEQ ID NO: 338591 - DNA, 20 bp, Artificial Sequence
  Description of Artificial Sequence: Synthetic oligonucleotide
  Target: LAMA2; (+) strand; PAM type: YTN; PAM sequence: CTT
gtgggggtaggggtaggagg

SEQ ID NO: 338592 - DNA, 20 bp, Artificial Sequence
  Description of Artificial Sequence: Synthetic oligonucleotide
  Target: LAMA2; (+) strand; PAM type: YTN; PAM sequence: TTG
tgggggtaggggtaggaggt

SEQ ID NO: 338593 - DNA, 20 bp, Artificial Sequence
  Description of Artificial Sequence: Synthetic oligonucleotide
  Target: LAMA2; (+) strand; PAM type: YTN; PAM sequence: TTG
gataagtgggttgcacttaa

SEQ ID NO: 338594 - DNA, 20 bp, Artificial Sequence
  Description of Artificial Sequence: Synthetic oligonucleotide
  Target: LAMA2; (+) strand; PAM type: YTN; PAM sequence: TTG
cacttaataattcagtgaca

SEQ ID NO: 338595 - DNA, 20 bp, Artificial Sequence
  Description of Artificial Sequence: Synthetic oligonucleotide
  Target: LAMA2; (+) strand; PAM type: YTN; PAM sequence: CTT
aataattcagtgacaattac

SEQ ID NO: 338596 - DNA, 20 bp, Artificial Sequence
  Description of Artificial Sequence: Synthetic oligonucleotide
  Target: LAMA2; (+) strand; PAM type: YTN; PAM sequence: TTA
ataattcagtgacaattaca

SEQ ID NO: 338597 - DNA, 20 bp, Artificial Sequence
  Description of Artificial Sequence: Synthetic oligonucleotide
  Target: LAMA2; (+) strand; PAM type: YTN; PAM sequence: TTC
agtgacaattacaaatcgtt

SEQ ID NO: 338598 - DNA, 20 bp, Artificial Sequence
  Description of Artificial Sequence: Synthetic oligonucleotide
  Target: LAMA2; (+) strand; PAM type: YTN; PAM sequence: TTA
caaatcgtttcactatatgt

SEQ ID NO: 338599 - DNA, 20 bp, Artificial Sequence
  Description of Artificial Sequence: Synthetic oligonucleotide
  Target: LAMA2; (+) strand; PAM type: YTN; PAM sequence: TTT
cactatatgtgaaagtattt

SEQ ID NO: 338600 - DNA, 20 bp, Artificial Sequence
  Description of Artificial Sequence: Synthetic oligonucleotide
  Target: LAMA2; (+) strand; PAM type: YTN; PAM sequence: TTC
actatatgtgaaagtatttg

SEQ ID NO: 338601 - DNA, 20 bp, Artificial Sequence
  Description of Artificial Sequence: Synthetic oligonucleotide
  Target: LAMA2; (+) strand; PAM type: YTN; PAM sequence: CTA
tatgtgaaagtatttgaagt

SEQ ID NO: 338602 - DNA, 20 bp, Artificial Sequence
  Description of Artificial Sequence: Synthetic oligonucleotide
  Target: LAMA2; (+) strand; PAM type: YTN; PAM sequence: TTT
gaagtaaatttacctgaaga

SEQ ID NO: 338603 - DNA, 20 bp, Artificial Sequence
  Description of Artificial Sequence: Synthetic oligonucleotide
  Target: LAMA2; (+) strand; PAM type: YTN; PAM sequence: TTG
aagtaaatttacctgaagat

SEQ ID NO: 338604 - DNA, 20 bp, Artificial Sequence
  Description of Artificial Sequence: Synthetic oligonucleotide
  Target: LAMA2; (+) strand; PAM type: YTN; PAM sequence: TTT
acctgaagatagaaaatatg

SEQ ID NO: 338605 - DNA, 20 bp, Artificial Sequence
  Description of Artificial Sequence: Synthetic oligonucleotide
  Target: LAMA2; (+) strand; PAM type: YTN; PAM sequence: TTA
cctgaagatagaaaatatgg

SEQ ID NO: 338606 - DNA, 20 bp, Artificial Sequence
  Description of Artificial Sequence: Synthetic oligonucleotide
  Target: LAMA2; (+) strand; PAM type: YTN; PAM sequence: CTG
aagatagaaaatatgggtgg

SEQ ID NO: 338607 - DNA, 20 bp, Artificial Sequence
  Description of Artificial Sequence: Synthetic oligonucleotide
  Target: LAMA2; (+) strand; PAM type: YTN; PAM sequence: CTC
ctcctgaactccccaccaca

SEQ ID NO: 338608 - DNA, 20 bp, Artificial Sequence
  Description of Artificial Sequence: Synthetic oligonucleotide
  Target: LAMA2; (+) strand; PAM type: YTN; PAM sequence: CTC
ctgaactccccaccacatta

SEQ ID NO: 338609 - DNA, 20 bp, Artificial Sequence
  Description of Artificial Sequence: Synthetic oligonucleotide
  Target: LAMA2; (+) strand; PAM type: YTN; PAM sequence: CTG
aactccccaccacattattc

SEQ ID NO: 338610 - DNA, 20 bp, Artificial Sequence
  Description of Artificial Sequence: Synthetic oligonucleotide
  Target: LAMA2; (+) strand; PAM type: YTN; PAM sequence: CTC
cccaccacattattctaggt

SEQ ID NO: 338611 - DNA, 20 bp, Artificial Sequence
  Description of Artificial Sequence: Synthetic oligonucleotide
  Target: LAMA2; (+) strand; PAM type: YTN; PAM sequence: TTA
ttctaggtttattgaagtaa

SEQ ID NO: 338612 - DNA, 20 bp, Artificial Sequence
  Description of Artificial Sequence: Synthetic oligonucleotide
  Target: LAMA2; (+) strand; PAM type: YTN; PAM sequence: TTC
taggtttattgaagtaaatg

SEQ ID NO: 338613 - DNA, 20 bp, Artificial Sequence
  Description of Artificial Sequence: Synthetic oligonucleotide
  Target: LAMA2; (+) strand; PAM type: YTN; PAM sequence: CTA
ggtttattgaagtaaatgta

SEQ ID NO: 338614 - DNA, 20 bp, Artificial Sequence
  Description of Artificial Sequence: Synthetic oligonucleotide
  Target: LAMA2; (+) strand; PAM type: YTN; PAM sequence: TTT
attgaagtaaatgtaaactt

SEQ ID NO: 338615 - DNA, 20 bp, Artificial Sequence
  Description of Artificial Sequence: Synthetic oligonucleotide
  Target: LAMA2; (+) strand; PAM type: YTN; PAM sequence: TTA
ttgaagtaaatgtaaactta

SEQ ID NO: 338616 - DNA, 20 bp, Artificial Sequence
  Description of Artificial Sequence: Synthetic oligonucleotide
  Target: LAMA2; (+) strand; PAM type: YTN; PAM sequence: TTG
aagtaaatgtaaacttataa

SEQ ID NO: 338617 - DNA, 20 bp, Artificial Sequence
  Description of Artificial Sequence: Synthetic oligonucleotide
  Target: LAMA2; (+) strand; PAM type: YTN; PAM sequence: CTT
ataaggggacataaaactca

SEQ ID NO: 338618 - DNA, 20 bp, Artificial Sequence
  Description of Artificial Sequence: Synthetic oligonucleotide
  Target: LAMA2; (+) strand; PAM type: YTN; PAM sequence: TTA
taaggggacataaaactcac

SEQ ID NO: 338619 - DNA, 20 bp, Artificial Sequence
  Description of Artificial Sequence: Synthetic oligonucleotide
  Target: LAMA2; (+) strand; PAM type: YTN; PAM sequence: CTC
acacagaaaataataattag

SEQ ID NO: 338620 - DNA, 20 bp, Artificial Sequence
  Description of Artificial Sequence: Synthetic oligonucleotide
  Target: LAMA2; (+) strand; PAM type: YTN; PAM sequence: TTA
gacatatttccacattaatg

SEQ ID NO: 338621 - DNA, 20 bp, Artificial Sequence
  Description of Artificial Sequence: Synthetic oligonucleotide
  Target: LAMA2; (+) strand; PAM type: YTN; PAM sequence: TTT
ccacattaatgtttttaagt

SEQ ID NO: 338622 - DNA, 20 bp, Artificial Sequence
  Description of Artificial Sequence: Synthetic oligonucleotide
  Target: LAMA2; (+) strand; PAM type: YTN; PAM sequence: TTC
cacattaatgtttttaagtt

SEQ ID NO: 338623 - DNA, 20 bp, Artificial Sequence
  Description of Artificial Sequence: Synthetic oligonucleotide
  Target: LAMA2; (+) strand; PAM type: YTN; PAM sequence: TTA
atgtttttaagtttaaaaca

SEQ ID NO: 338624 - DNA, 20 bp, Artificial Sequence
  Description of Artificial Sequence: Synthetic oligonucleotide
  Target: LAMA2; (+) strand; PAM type: YTN; PAM sequence: TTT
ttaagtttaaaacatcattt

SEQ ID NO: 338625 - DNA, 20 bp, Artificial Sequence
  Description of Artificial Sequence: Synthetic oligonucleotide
  Target: LAMA2; (+) strand; PAM type: YTN; PAM sequence: TTT
taagtttaaaacatcattta

SEQ ID NO: 338626 - DNA, 20 bp, Artificial Sequence
  Description of Artificial Sequence: Synthetic oligonucleotide
  Target: LAMA2; (+) strand; PAM type: YTN; PAM sequence: TTT
aagtttaaaacatcatttaa

SEQ ID NO: 338627 - DNA, 20 bp, Artificial Sequence
  Description of Artificial Sequence: Synthetic oligonucleotide
  Target: LAMA2; (+) strand; PAM type: YTN; PAM sequence: TTA
agtttaaaacatcatttaaa

SEQ ID NO: 338628 - DNA, 20 bp, Artificial Sequence
  Description of Artificial Sequence: Synthetic oligonucleotide
  Target: LAMA2; (+) strand; PAM type: YTN; PAM sequence: TTT
aaaacatcatttaaaaattt

SEQ ID NO: 338629 - DNA, 20 bp, Artificial Sequence
  Description of Artificial Sequence: Synthetic oligonucleotide
  Target: LAMA2; (+) strand; PAM type: YTN; PAM sequence: TTA
aaacatcatttaaaaatttt

SEQ ID NO: 338630 - DNA, 20 bp, Artificial Sequence
  Description of Artificial Sequence: Synthetic oligonucleotide
  Target: LAMA2; (+) strand; PAM type: YTN; PAM sequence: TTT
aaaaattttatcactgatgc

SEQ ID NO: 338631 - DNA, 20 bp, Artificial Sequence
  Description of Artificial Sequence: Synthetic oligonucleotide
  Target: LAMA2; (+) strand; PAM type: YTN; PAM sequence: TTA
aaaattttatcactgatgct

SEQ ID NO: 338632 - DNA, 20 bp, Artificial Sequence
  Description of Artificial Sequence: Synthetic oligonucleotide
  Target: LAMA2; (+) strand; PAM type: YTN; PAM sequence: TTT
tatcactgatgcttgactta

SEQ ID NO: 338633 - DNA, 20 bp, Artificial Sequence
  Description of Artificial Sequence: Synthetic oligonucleotide
  Target: LAMA2; (+) strand; PAM type: YTN; PAM sequence: TTT
atcactgatgcttgacttaa

SEQ ID NO: 338634 - DNA, 20 bp, Artificial Sequence
  Description of Artificial Sequence: Synthetic oligonucleotide
  Target: LAMA2; (+) strand; PAM type: YTN; PAM sequence: TTA
tcactgatgcttgacttaaa

SEQ ID NO: 338635 - DNA, 20 bp, Artificial Sequence
  Description of Artificial Sequence: Synthetic oligonucleotide
  Target: LAMA2; (+) strand; PAM type: YTN; PAM sequence: CTG
atgcttgacttaaacaagtc

SEQ ID NO: 338636 - DNA, 20 bp, Artificial Sequence
  Description of Artificial Sequence: Synthetic oligonucleotide
  Target: LAMA2; (+) strand; PAM type: YTN; PAM sequence: CTT
gacttaaacaagtccactta

SEQ ID NO: 338637 - DNA, 20 bp, Artificial Sequence
  Description of Artificial Sequence: Synthetic oligonucleotide
  Target: LAMA2; (+) strand; PAM type: YTN; PAM sequence: TTG
acttaaacaagtccacttat

SEQ ID NO: 338638 - DNA, 20 bp, Artificial Sequence
  Description of Artificial Sequence: Synthetic oligonucleotide
  Target: LAMA2; (+) strand; PAM type: YTN; PAM sequence: CTT
aaacaagtccacttatagca

SEQ ID NO: 338639 - DNA, 20 bp, Artificial Sequence
  Description of Artificial Sequence: Synthetic oligonucleotide
  Target: LAMA2; (+) strand; PAM type: YTN; PAM sequence: TTA
aacaagtccacttatagcat

SEQ ID NO: 338640 - DNA, 20 bp, Artificial Sequence
  Description of Artificial Sequence: Synthetic oligonucleotide
  Target: LAMA2; (+) strand; PAM type: YTN; PAM sequence: CTT
atagcattgtcagaatctgt

SEQ ID NO: 338641 - DNA, 20 bp, Artificial Sequence
  Description of Artificial Sequence: Synthetic oligonucleotide
  Target: LAMA2; (+) strand; PAM type: YTN; PAM sequence: TTA
tagcattgtcagaatctgta

SEQ ID NO: 338642 - DNA, 20 bp, Artificial Sequence
  Description of Artificial Sequence: Synthetic oligonucleotide
  Target: LAMA2; (+) strand; PAM type: YTN; PAM sequence: TTG
tcagaatctgtataagtatc

SEQ ID NO: 338643 - DNA, 20 bp, Artificial Sequence
  Description of Artificial Sequence: Synthetic oligonucleotide
  Target: LAMA2; (+) strand; PAM type: YTN; PAM sequence: CTG
tataagtatctcttcaggga

SEQ ID NO: 338644 - DNA, 20 bp, Artificial Sequence
  Description of Artificial Sequence: Synthetic oligonucleotide
  Target: LAMA2; (+) strand; PAM type: YTN; PAM sequence: CTC
ttcagggaatttttaagatg

SEQ ID NO: 338645 - DNA, 20 bp, Artificial Sequence
  Description of Artificial Sequence: Synthetic oligonucleotide
  Target: LAMA2; (+) strand; PAM type: YTN; PAM sequence: CTT
cagggaatttttaagatgag

SEQ ID NO: 338646 - DNA, 20 bp, Artificial Sequence
  Description of Artificial Sequence: Synthetic oligonucleotide
  Target: LAMA2; (+) strand; PAM type: YTN; PAM sequence: TTC
agggaatttttaagatgaga

SEQ ID NO: 338647 - DNA, 20 bp, Artificial Sequence
  Description of Artificial Sequence: Synthetic oligonucleotide
  Target: LAMA2; (+) strand; PAM type: YTN; PAM sequence: TTT
ttaagatgagagtgaacaat

SEQ ID NO: 338648 - DNA, 20 bp, Artificial Sequence
  Description of Artificial Sequence: Synthetic oligonucleotide
  Target: LAMA2; (+) strand; PAM type: YTN; PAM sequence: TTT
taagatgagagtgaacaatt

SEQ ID NO: 338649 - DNA, 20 bp, Artificial Sequence
  Description of Artificial Sequence: Synthetic oligonucleotide
  Target: LAMA2; (+) strand; PAM type: YTN; PAM sequence: TTT
aagatgagagtgaacaattt

SEQ ID NO: 338650 - DNA, 20 bp, Artificial Sequence
  Description of Artificial Sequence: Synthetic oligonucleotide
  Target: LAMA2; (+) strand; PAM type: YTN; PAM sequence: TTA
agatgagagtgaacaatttt

SEQ ID NO: 338651 - DNA, 20 bp, Artificial Sequence
  Description of Artificial Sequence: Synthetic oligonucleotide
  Target: LAMA2; (+) strand; PAM type: YTN; PAM sequence: TTT
tctgagattgcctacacatt

SEQ ID NO: 338652 - DNA, 20 bp, Artificial Sequence
  Description of Artificial Sequence: Synthetic oligonucleotide
  Target: LAMA2; (+) strand; PAM type: YTN; PAM sequence: TTT
ctgagattgcctacacattt

SEQ ID NO: 338653 - DNA, 20 bp, Artificial Sequence
  Description of Artificial Sequence: Synthetic oligonucleotide
  Target: LAMA2; (+) strand; PAM type: YTN; PAM sequence: TTC
tgagattgcctacacatttt

SEQ ID NO: 338654 - DNA, 20 bp, Artificial Sequence
  Description of Artificial Sequence: Synthetic oligonucleotide
  Target: LAMA2; (+) strand; PAM type: YTN; PAM sequence: CTG
agattgcctacacatttttg

SEQ ID NO: 338655 - DNA, 20 bp, Artificial Sequence
  Description of Artificial Sequence: Synthetic oligonucleotide
  Target: LAMA2; (+) strand; PAM type: YTN; PAM sequence: TTG
cctacacatttttgttacac

SEQ ID NO: 338656 - DNA, 20 bp, Artificial Sequence
  Description of Artificial Sequence: Synthetic oligonucleotide
  Target: LAMA2; (+) strand; PAM type: YTN; PAM sequence: CTA
cacatttttgttacacagta

SEQ ID NO: 338657 - DNA, 20 bp, Artificial Sequence
  Description of Artificial Sequence: Synthetic oligonucleotide
  Target: LAMA2; (+) strand; PAM type: YTN; PAM sequence: TTT
ttgttacacagtaagagcca

SEQ ID NO: 338658 - DNA, 20 bp, Artificial Sequence
  Description of Artificial Sequence: Synthetic oligonucleotide
  Target: LAMA2; (+) strand; PAM type: YTN; PAM sequence: TTT
tgttacacagtaagagccag

SEQ ID NO: 338659 - DNA, 20 bp, Artificial Sequence
  Description of Artificial Sequence: Synthetic oligonucleotide
  Target: LAMA2; (+) strand; PAM type: YTN; PAM sequence: TTT
gttacacagtaagagccagg

SEQ ID NO: 338660 - DNA, 20 bp, Artificial Sequence
  Description of Artificial Sequence: Synthetic oligonucleotide
  Target: LAMA2; (+) strand; PAM type: YTN; PAM sequence: TTG
ttacacagtaagagccaggt

SEQ ID NO: 338661 - DNA, 20 bp, Artificial Sequence
  Description of Artificial Sequence: Synthetic oligonucleotide
  Target: LAMA2; (+) strand; PAM type: YTN; PAM sequence: TTA
cacagtaagagccaggttct

SEQ ID NO: 338662 - DNA, 20 bp, Artificial Sequence
  Description of Artificial Sequence: Synthetic oligonucleotide
  Target: LAMA2; (+) strand; PAM type: YTN; PAM sequence: TTC
tatgtggcttaggtggggat

SEQ ID NO: 338663 - DNA, 20 bp, Artificial Sequence
  Description of Artificial Sequence: Synthetic oligonucleotide
  Target: LAMA2; (+) strand; PAM type: YTN; PAM sequence: CTA
tgtggcttaggtggggatgg

SEQ ID NO: 338664 - DNA, 20 bp, Artificial Sequence
  Description of Artificial Sequence: Synthetic oligonucleotide
  Target: LAMA2; (+) strand; PAM type: YTN; PAM sequence: CTT
aggtggggatggggctttga

SEQ ID NO: 338665 - DNA, 20 bp, Artificial Sequence
  Description of Artificial Sequence: Synthetic oligonucleotide
  Target: LAMA2; (+) strand; PAM type: YTN; PAM sequence: TTA
ggtggggatggggctttgag

SEQ ID NO: 338666 - DNA, 20 bp, Artificial Sequence
  Description of Artificial Sequence: Synthetic oligonucleotide
  Target: LAMA2; (+) strand; PAM type: YTN; PAM sequence: CTT
tgagtgaatcctctgttgta

SEQ ID NO: 338667 - DNA, 20 bp, Artificial Sequence
  Description of Artificial Sequence: Synthetic oligonucleotide
  Target: LAMA2; (+) strand; PAM type: YTN; PAM sequence: TTT
gagtgaatcctctgttgtac

SEQ ID NO: 338668 - DNA, 20 bp, Artificial Sequence
  Description of Artificial Sequence: Synthetic oligonucleotide
  Target: LAMA2; (+) strand; PAM type: YTN; PAM sequence: TTG
agtgaatcctctgttgtaca

SEQ ID NO: 338669 - DNA, 20 bp, Artificial Sequence
  Description of Artificial Sequence: Synthetic oligonucleotide
  Target: LAMA2; (+) strand; PAM type: YTN; PAM sequence: CTC
tgttgtacacagacttaata

SEQ ID NO: 338670 - DNA, 20 bp, Artificial Sequence
  Description of Artificial Sequence: Synthetic oligonucleotide
  Target: LAMA2; (+) strand; PAM type: YTN; PAM sequence: CTG
ttgtacacagacttaataca

SEQ ID NO: 338671 - DNA, 20 bp, Artificial Sequence
  Description of Artificial Sequence: Synthetic oligonucleotide
  Target: LAMA2; (+) strand; PAM type: YTN; PAM sequence: TTG
tacacagacttaatacattc

SEQ ID NO: 338672 - DNA, 20 bp, Artificial Sequence
  Description of Artificial Sequence: Synthetic oligonucleotide
  Target: LAMA2; (+) strand; PAM type: YTN; PAM sequence: CTT
aatacattctccatttcagc

SEQ ID NO: 338673 - DNA, 20 bp, Artificial Sequence
  Description of Artificial Sequence: Synthetic oligonucleotide
  Target: LAMA2; (+) strand; PAM type: YTN; PAM sequence: TTA
atacattctccatttcagcc

SEQ ID NO: 338674 - DNA, 20 bp, Artificial Sequence
  Description of Artificial Sequence: Synthetic oligonucleotide
  Target: LAMA2; (+) strand; PAM type: YTN; PAM sequence: TTC
tccatttcagcccacttttc

SEQ ID NO: 338675 - DNA, 20 bp, Artificial Sequence
  Description of Artificial Sequence: Synthetic oligonucleotide
  Target: LAMA2; (+) strand; PAM type: YTN; PAM sequence: CTC
catttcagcccacttttcac

SEQ ID NO: 338676 - DNA, 20 bp, Artificial Sequence
  Description of Artificial Sequence: Synthetic oligonucleotide
  Target: LAMA2; (+) strand; PAM type: YTN; PAM sequence: TTT
cagcccacttttcacctctg

SEQ ID NO: 338677 - DNA, 20 bp, Artificial Sequence
  Description of Artificial Sequence: Synthetic oligonucleotide
  Target: LAMA2; (+) strand; PAM type: YTN; PAM sequence: TTC
agcccacttttcacctctgt

SEQ ID NO: 338678 - DNA, 20 bp, Artificial Sequence
  Description of Artificial Sequence: Synthetic oligonucleotide
  Target: LAMA2; (+) strand; PAM type: YTN; PAM sequence: CTT
ttcacctctgttttcatcag

SEQ ID NO: 338679 - DNA, 20 bp, Artificial Sequence
  Description of Artificial Sequence: Synthetic oligonucleotide
  Target: LAMA2; (+) strand; PAM type: YTN; PAM sequence: TTT
tcacctctgttttcatcaga

SEQ ID NO: 338680 - DNA, 20 bp, Artificial Sequence
  Description of Artificial Sequence: Synthetic oligonucleotide
  Target: LAMA2; (+) strand; PAM type: YTN; PAM sequence: TTT
cacctctgttttcatcagac

SEQ ID NO: 338681 - DNA, 20 bp, Artificial Sequence
  Description of Artificial Sequence: Synthetic oligonucleotide
  Target: LAMA2; (+) strand; PAM type: YTN; PAM sequence: TTC
acctctgttttcatcagacc

SEQ ID NO: 338682 - DNA, 20 bp, Artificial Sequence
  Description of Artificial Sequence: Synthetic oligonucleotide
  Target: LAMA2; (+) strand; PAM type: YTN; PAM sequence: CTC
tgttttcatcagacctacct

SEQ ID NO: 338683 - DNA, 20 bp, Artificial Sequence
  Description of Artificial Sequence: Synthetic oligonucleotide
  Target: LAMA2; (+) strand; PAM type: YTN; PAM sequence: CTG
ttttcatcagacctacctcg

SEQ ID NO: 338684 - DNA, 20 bp, Artificial Sequence
  Description of Artificial Sequence: Synthetic oligonucleotide
  Target: LAMA2; (+) strand; PAM type: YTN; PAM sequence: TTT
tcatcagacctacctcggtg

SEQ ID NO: 338685 - DNA, 20 bp, Artificial Sequence
  Description of Artificial Sequence: Synthetic oligonucleotide
  Target: LAMA2; (+) strand; PAM type: YTN; PAM sequence: TTT
catcagacctacctcggtga

SEQ ID NO: 338686 - DNA, 20 bp, Artificial Sequence
  Description of Artificial Sequence: Synthetic oligonucleotide
  Target: LAMA2; (+) strand; PAM type: YTN; PAM sequence: TTC
atcagacctacctcggtgag

SEQ ID NO: 338687 - DNA, 20 bp, Artificial Sequence
  Description of Artificial Sequence: Synthetic oligonucleotide
  Target: LAMA2; (+) strand; PAM type: YTN; PAM sequence: CTA
cctcggtgaggttctagact

SEQ ID NO: 338688 - DNA, 20 bp, Artificial Sequence
  Description of Artificial Sequence: Synthetic oligonucleotide
  Target: LAMA2; (+) strand; PAM type: YTN; PAM sequence: CTC
ggtgaggttctagacttctg

SEQ ID NO: 338689 - DNA, 20 bp, Artificial Sequence
  Description of Artificial Sequence: Synthetic oligonucleotide
  Target: LAMA2; (+) strand; PAM type: YTN; PAM sequence: TTC
tagacttctgccctgctgca

SEQ ID NO: 338690 - DNA, 20 bp, Artificial Sequence
  Description of Artificial Sequence: Synthetic oligonucleotide
  Target: LAMA2; (+) strand; PAM type: YTN; PAM sequence: CTA
gacttctgccctgctgcagc

SEQ ID NO: 338691 - DNA, 20 bp, Artificial Sequence
  Description of Artificial Sequence: Synthetic oligonucleotide
  Target: LAMA2; (+) strand; PAM type: YTN; PAM sequence: CTT
ctgccctgctgcagctactc

SEQ ID NO: 338692 - DNA, 20 bp, Artificial Sequence
  Description of Artificial Sequence: Synthetic oligonucleotide
  Target: LAMA2; (+) strand; PAM type: YTN; PAM sequence: TTC
tgccctgctgcagctactca

SEQ ID NO: 338693 - DNA, 20 bp, Artificial Sequence
  Description of Artificial Sequence: Synthetic oligonucleotide
  Target: LAMA2; (+) strand; PAM type: YTN; PAM sequence: CTG
ccctgctgcagctactcagt

SEQ ID NO: 338694 - DNA, 20 bp, Artificial Sequence
  Description of Artificial Sequence: Synthetic oligonucleotide
  Target: LAMA2; (+) strand; PAM type: YTN; PAM sequence: CTG
ctgcagctactcagtacttt

SEQ ID NO: 338695 - DNA, 20 bp, Artificial Sequence
  Description of Artificial Sequence: Synthetic oligonucleotide
  Target: LAMA2; (+) strand; PAM type: YTN; PAM sequence: CTG
cagctactcagtactttagg

SEQ ID NO: 338696 - DNA, 20 bp, Artificial Sequence
  Description of Artificial Sequence: Synthetic oligonucleotide
  Target: LAMA2; (+) strand; PAM type: YTN; PAM sequence: CTA
ctcagtactttaggccatga

SEQ ID NO: 338697 - DNA, 20 bp, Artificial Sequence
  Description of Artificial Sequence: Synthetic oligonucleotide
  Target: LAMA2; (+) strand; PAM type: YTN; PAM sequence: CTC
agtactttaggccatgacct

SEQ ID NO: 338698 - DNA, 20 bp, Artificial Sequence
  Description of Artificial Sequence: Synthetic oligonucleotide
  Target: LAMA2; (+) strand; PAM type: YTN; PAM sequence: CTT
taggccatgacctccgctct

SEQ ID NO: 338699 - DNA, 20 bp, Artificial Sequence
  Description of Artificial Sequence: Synthetic oligonucleotide
  Target: LAMA2; (+) strand; PAM type: YTN; PAM sequence: TTT
aggccatgacctccgctctc

SEQ ID NO: 338700 - DNA, 20 bp, Artificial Sequence
  Description of Artificial Sequence: Synthetic oligonucleotide
  Target: LAMA2; (+) strand; PAM type: YTN; PAM sequence: TTA
ggccatgacctccgctctcc

SEQ ID NO: 338701 - DNA, 20 bp, Artificial Sequence
  Description of Artificial Sequence: Synthetic oligonucleotide
  Target: LAMA2; (+) strand; PAM type: YTN; PAM sequence: CTC
cgctctccttcctcagcaac

SEQ ID NO: 338702 - DNA, 20 bp, Artificial Sequence
  Description of Artificial Sequence: Synthetic oligonucleotide
  Target: LAMA2; (+) strand; PAM type: YTN; PAM sequence: CTC
tccttcctcagcaactcacc

SEQ ID NO: 338703 - DNA, 20 bp, Artificial Sequence
  Description of Artificial Sequence: Synthetic oligonucleotide
  Target: LAMA2; (+) strand; PAM type: YTN; PAM sequence: CTC
cttcctcagcaactcaccac

SEQ ID NO: 338704 - DNA, 20 bp, Artificial Sequence
  Description of Artificial Sequence: Synthetic oligonucleotide
  Target: LAMA2; (+) strand; PAM type: YTN; PAM sequence: CTT
cctcagcaactcaccacaga

SEQ ID NO: 338705 - DNA, 20 bp, Artificial Sequence
  Description of Artificial Sequence: Synthetic oligonucleotide
  Target: LAMA2; (+) strand; PAM type: YTN; PAM sequence: TTC
ctcagcaactcaccacagac

SEQ ID NO: 338706 - DNA, 20 bp, Artificial Sequence
  Description of Artificial Sequence: Synthetic oligonucleotide
  Target: LAMA2; (+) strand; PAM type: YTN; PAM sequence: CTC
agcaactcaccacagacctt

SEQ ID NO: 338707 - DNA, 20 bp, Artificial Sequence
  Description of Artificial Sequence: Synthetic oligonucleotide
  Target: LAMA2; (+) strand; PAM type: YTN; PAM sequence: CTC
accacagaccttccagaaaa

SEQ ID NO: 338708 - DNA, 20 bp, Artificial Sequence
  Description of Artificial Sequence: Synthetic oligonucleotide
  Target: LAMA2; (+) strand; PAM type: YTN; PAM sequence: CTT
ccagaaaaatgttaaaccct

SEQ ID NO: 338709 - DNA, 20 bp, Artificial Sequence
  Description of Artificial Sequence: Synthetic oligonucleotide
  Target: LAMA2; (+) strand; PAM type: YTN; PAM sequence: TTC
cagaaaaatgttaaaccctt

SEQ ID NO: 338710 - DNA, 20 bp, Artificial Sequence
  Description of Artificial Sequence: Synthetic oligonucleotide
  Target: LAMA2; (+) strand; PAM type: YTN; PAM sequence: TTA
aacccttctcatccttttct

SEQ ID NO: 338711 - DNA, 20 bp, Artificial Sequence
  Description of Artificial Sequence: Synthetic oligonucleotide
  Target: LAMA2; (+) strand; PAM type: YTN; PAM sequence: CTT
ctcatccttttcttgttatt

SEQ ID NO: 338712 - DNA, 20 bp, Artificial Sequence
  Description of Artificial Sequence: Synthetic oligonucleotide
  Target: LAMA2; (+) strand; PAM type: YTN; PAM sequence: TTC
tcatccttttcttgttattg

SEQ ID NO: 338713 - DNA, 20 bp, Artificial Sequence
  Description of Artificial Sequence: Synthetic oligonucleotide
  Target: LAMA2; (+) strand; PAM type: YTN; PAM sequence: CTC
atccttttcttgttattggt

SEQ ID NO: 338714 - DNA, 20 bp, Artificial Sequence
  Description of Artificial Sequence: Synthetic oligonucleotide
  Target: LAMA2; (+) strand; PAM type: YTN; PAM sequence: CTT
ttcttgttattggtttctat

SEQ ID NO: 338715 - DNA, 20 bp, Artificial Sequence
  Description of Artificial Sequence: Synthetic oligonucleotide
  Target: LAMA2; (+) strand; PAM type: YTN; PAM sequence: TTT
tcttgttattggtttctatt

SEQ ID NO: 338716 - DNA, 20 bp, Artificial Sequence
  Description of Artificial Sequence: Synthetic oligonucleotide
  Target: LAMA2; (+) strand; PAM type: YTN; PAM sequence: TTT
cttgttattggtttctattt

SEQ ID NO: 338717 - DNA, 20 bp, Artificial Sequence
  Description of Artificial Sequence: Synthetic oligonucleotide
  Target: LAMA2; (+) strand; PAM type: YTN; PAM sequence: TTC
ttgttattggtttctatttt

SEQ ID NO: 338718 - DNA, 20 bp, Artificial Sequence
  Description of Artificial Sequence: Synthetic oligonucleotide
  Target: LAMA2; (+) strand; PAM type: YTN; PAM sequence: CTT
gttattggtttctattttct

SEQ ID NO: 338719 - DNA, 20 bp, Artificial Sequence
  Description of Artificial Sequence: Synthetic oligonucleotide
  Target: LAMA2; (+) strand; PAM type: YTN; PAM sequence: TTG
ttattggtttctattttctt

SEQ ID NO: 338720 - DNA, 20 bp, Artificial Sequence
  Description of Artificial Sequence: Synthetic oligonucleotide
  Target: LAMA2; (+) strand; PAM type: YTN; PAM sequence: TTA
ttggtttctattttctttct

SEQ ID NO: 338721 - DNA, 20 bp, Artificial Sequence
  Description of Artificial Sequence: Synthetic oligonucleotide
  Target: LAMA2; (+) strand; PAM type: YTN; PAM sequence: TTG
gtttctattttctttctttc

SEQ ID NO: 338722 - DNA, 20 bp, Artificial Sequence
  Description of Artificial Sequence: Synthetic oligonucleotide
  Target: LAMA2; (+) strand; PAM type: YTN; PAM sequence: TTT
ctattttctttctttctttt

SEQ ID NO: 338723 - DNA, 20 bp, Artificial Sequence
  Description of Artificial Sequence: Synthetic oligonucleotide
  Target: LAMA2; (+) strand; PAM type: YTN; PAM sequence: TTC
tattttctttctttcttttt

SEQ ID NO: 338724 - DNA, 20 bp, Artificial Sequence
  Description of Artificial Sequence: Synthetic oligonucleotide
  Target: LAMA2; (+) strand; PAM type: YTN; PAM sequence: CTA
ttttctttctttcttttttc

SEQ ID NO: 338725 - DNA, 20 bp, Artificial Sequence
  Description of Artificial Sequence: Synthetic oligonucleotide
  Target: LAMA2; (+) strand; PAM type: YTN; PAM sequence: TTT
tctttctttcttttttcttt

SEQ ID NO: 338726 - DNA, 20 bp, Artificial Sequence
  Description of Artificial Sequence: Synthetic oligonucleotide
  Target: LAMA2; (+) strand; PAM type: YTN; PAM sequence: TTT
ctttctttcttttttcttta

SEQ ID NO: 338727 - DNA, 20 bp, Artificial Sequence
  Description of Artificial Sequence: Synthetic oligonucleotide
  Target: LAMA2; (+) strand; PAM type: YTN; PAM sequence: TTC
tttctttcttttttctttag

SEQ ID NO: 338728 - DNA, 20 bp, Artificial Sequence
  Description of Artificial Sequence: Synthetic oligonucleotide
  Target: LAMA2; (+) strand; PAM type: YTN; PAM sequence: CTT
tctttcttttttctttagcg

SEQ ID NO: 338729 - DNA, 20 bp, Artificial Sequence
  Description of Artificial Sequence: Synthetic oligonucleotide
  Target: LAMA2; (+) strand; PAM type: YTN; PAM sequence: TTT
ctttcttttttctttagcgt

SEQ ID NO: 338730 - DNA, 20 bp, Artificial Sequence
  Description of Artificial Sequence: Synthetic oligonucleotide
  Target: LAMA2; (+) strand; PAM type: YTN; PAM sequence: TTC
tttcttttttctttagcgtc

SEQ ID NO: 338731 - DNA, 20 bp, Artificial Sequence
  Description of Artificial Sequence: Synthetic oligonucleotide
  Target: LAMA2; (+) strand; PAM type: YTN; PAM sequence: CTT
tcttttttctttagcgtcac

SEQ ID NO: 338732 - DNA, 20 bp, Artificial Sequence
  Description of Artificial Sequence: Synthetic oligonucleotide
  Target: LAMA2; (+) strand; PAM type: YTN; PAM sequence: TTT
cttttttctttagcgtcaca

SEQ ID NO: 338733 - DNA, 20 bp, Artificial Sequence
  Description of Artificial Sequence: Synthetic oligonucleotide
  Target: LAMA2; (+) strand; PAM type: YTN; PAM sequence: TTC
ttttttctttagcgtcacag

SEQ ID NO: 338734 - DNA, 20 bp, Artificial Sequence
  Description of Artificial Sequence: Synthetic oligonucleotide
  Target: LAMA2; (+) strand; PAM type: YTN; PAM sequence: CTT
ttttctttagcgtcacaggg

SEQ ID NO: 338735 - DNA, 20 bp, Artificial Sequence
  Description of Artificial Sequence: Synthetic oligonucleotide
  Target: LAMA2; (+) strand; PAM type: YTN; PAM sequence: TTT
tttctttagcgtcacagggg

SEQ ID NO: 338736 - DNA, 20 bp, Artificial Sequence
  Description of Artificial Sequence: Synthetic oligonucleotide
  Target: LAMA2; (+) strand; PAM type: YTN; PAM sequence: TTT
ttctttagcgtcacagggga

SEQ ID NO: 338737 - DNA, 20 bp, Artificial Sequence
  Description of Artificial Sequence: Synthetic oligonucleotide
  Target: LAMA2; (+) strand; PAM type: YTN; PAM sequence: TTT
tctttagcgtcacaggggaa

SEQ ID NO: 338738 - DNA, 20 bp, Artificial Sequence
  Description of Artificial Sequence: Synthetic oligonucleotide
  Target: LAMA2; (+) strand; PAM type: YTN; PAM sequence: TTT
ctttagcgtcacaggggaag

SEQ ID NO: 338739 - DNA, 20 bp, Artificial Sequence
  Description of Artificial Sequence: Synthetic oligonucleotide
  Target: LAMA2; (+) strand; PAM type: YTN; PAM sequence: TTC
tttagcgtcacaggggaaga

SEQ ID NO: 338740 - DNA, 20 bp, Artificial Sequence
  Description of Artificial Sequence: Synthetic oligonucleotide
  Target: LAMA2; (+) strand; PAM type: YTN; PAM sequence: CTT
tagcgtcacaggggaagagc

SEQ ID NO: 338741 - DNA, 20 bp, Artificial Sequence
  Description of Artificial Sequence: Synthetic oligonucleotide
  Target: LAMA2; (+) strand; PAM type: YTN; PAM sequence: TTT
agcgtcacaggggaagagct

SEQ ID NO: 338742 - DNA, 20 bp, Artificial Sequence
  Description of Artificial Sequence: Synthetic oligonucleotide
  Target: LAMA2; (+) strand; PAM type: YTN; PAM sequence: TTA
gcgtcacaggggaagagctg

SEQ ID NO: 338743 - DNA, 20 bp, Artificial Sequence
  Description of Artificial Sequence: Synthetic oligonucleotide
  Target: LAMA2; (+) strand; PAM type: YTN; PAM sequence: CTG
ataattgtattggctatatg

SEQ ID NO: 338744 - DNA, 20 bp, Artificial Sequence
  Description of Artificial Sequence: Synthetic oligonucleotide
  Target: LAMA2; (+) strand; PAM type: YTN; PAM sequence: TTG
tattggctatatgtatcaac

SEQ ID NO: 338745 - DNA, 20 bp, Artificial Sequence
  Description of Artificial Sequence: Synthetic oligonucleotide
  Target: LAMA2; (+) strand; PAM type: YTN; PAM sequence: TTG
gctatatgtatcaactcaaa

SEQ ID NO: 338746 - DNA, 20 bp, Artificial Sequence
  Description of Artificial Sequence: Synthetic oligonucleotide
  Target: LAMA2; (+) strand; PAM type: YTN; PAM sequence: CTA
tatgtatcaactcaaacaga

SEQ ID NO: 338747 - DNA, 20 bp, Artificial Sequence
  Description of Artificial Sequence: Synthetic oligonucleotide
  Target: LAMA2; (+) strand; PAM type: YTN; PAM sequence: CTC
aaacagagagacattacctg

SEQ ID NO: 338748 - DNA, 20 bp, Artificial Sequence
  Description of Artificial Sequence: Synthetic oligonucleotide
  Target: LAMA2; (+) strand; PAM type: YTN; PAM sequence: TTA
cctgcagttctataaagatt

SEQ ID NO: 338749 - DNA, 20 bp, Artificial Sequence
  Description of Artificial Sequence: Synthetic oligonucleotide
  Target: LAMA2; (+) strand; PAM type: YTN; PAM sequence: CTG
cagttctataaagattccca

SEQ ID NO: 338750 - DNA, 20 bp, Artificial Sequence
  Description of Artificial Sequence: Synthetic oligonucleotide
  Target: LAMA2; (+) strand; PAM type: YTN; PAM sequence: TTC
tataaagattcccagattat

SEQ ID NO: 338751 - DNA, 20 bp, Artificial Sequence
  Description of Artificial Sequence: Synthetic oligonucleotide
  Target: LAMA2; (+) strand; PAM type: YTN; PAM sequence: CTA
taaagattcccagattattc

SEQ ID NO: 338752 - DNA, 20 bp, Artificial Sequence
  Description of Artificial Sequence: Synthetic oligonucleotide
  Target: LAMA2; (+) strand; PAM type: YTN; PAM sequence: TTC
ccagattattccaatgggta

SEQ ID NO: 338753 - DNA, 20 bp, Artificial Sequence
  Description of Artificial Sequence: Synthetic oligonucleotide
  Target: LAMA2; (+) strand; PAM type: YTN; PAM sequence: TTA
ttccaatgggtattaagctt

SEQ ID NO: 338754 - DNA, 20 bp, Artificial Sequence
  Description of Artificial Sequence: Synthetic oligonucleotide
  Target: LAMA2; (+) strand; PAM type: YTN; PAM sequence: TTC
caatgggtattaagcttgaa

SEQ ID NO: 338755 - DNA, 20 bp, Artificial Sequence
  Description of Artificial Sequence: Synthetic oligonucleotide
  Target: LAMA2; (+) strand; PAM type: YTN; PAM sequence: TTA
agcttgaaaacatgatgtct

SEQ ID NO: 338756 - DNA, 20 bp, Artificial Sequence
  Description of Artificial Sequence: Synthetic oligonucleotide
  Target: LAMA2; (+) strand; PAM type: YTN; PAM sequence: CTT
gaaaacatgatgtctatgat

SEQ ID NO: 338757 - DNA, 20 bp, Artificial Sequence
  Description of Artificial Sequence: Synthetic oligonucleotide
  Target: LAMA2; (+) strand; PAM type: YTN; PAM sequence: TTG
aaaacatgatgtctatgatc

SEQ ID NO: 338758 - DNA, 20 bp, Artificial Sequence
  Description of Artificial Sequence: Synthetic oligonucleotide
  Target: LAMA2; (+) strand; PAM type: YTN; PAM sequence: CTA
tgatcctttctggttctgat

SEQ ID NO: 338759 - DNA, 20 bp, Artificial Sequence
  Description of Artificial Sequence: Synthetic oligonucleotide
  Target: LAMA2; (+) strand; PAM type: YTN; PAM sequence: CTT
tctggttctgatattgtata

SEQ ID NO: 338760 - DNA, 20 bp, Artificial Sequence
  Description of Artificial Sequence: Synthetic oligonucleotide
  Target: LAMA2; (+) strand; PAM type: YTN; PAM sequence: TTT
ctggttctgatattgtataa

SEQ ID NO: 338761 - DNA, 20 bp, Artificial Sequence
  Description of Artificial Sequence: Synthetic oligonucleotide
  Target: LAMA2; (+) strand; PAM type: YTN; PAM sequence: TTC
tggttctgatattgtataac

SEQ ID NO: 338762 - DNA, 20 bp, Artificial Sequence
  Description of Artificial Sequence: Synthetic oligonucleotide
  Target: LAMA2; (+) strand; PAM type: YTN; PAM sequence: CTG
gttctgatattgtataactc

SEQ ID NO: 338763 - DNA, 20 bp, Artificial Sequence
  Description of Artificial Sequence: Synthetic oligonucleotide
  Target: LAMA2; (+) strand; PAM type: YTN; PAM sequence: TTC
tgatattgtataactctcat

SEQ ID NO: 338764 - DNA, 20 bp, Artificial Sequence
  Description of Artificial Sequence: Synthetic oligonucleotide
  Target: LAMA2; (+) strand; PAM type: YTN; PAM sequence: CTG
atattgtataactctcatca

SEQ ID NO: 338765 - DNA, 20 bp, Artificial Sequence
  Description of Artificial Sequence: Synthetic oligonucleotide
  Target: LAMA2; (+) strand; PAM type: YTN; PAM sequence: TTG
tataactctcatcacttaat

SEQ ID NO: 338766 - DNA, 20 bp, Artificial Sequence
  Description of Artificial Sequence: Synthetic oligonucleotide
  Target: LAMA2; (+) strand; PAM type: YTN; PAM sequence: CTC
tcatcacttaatgaaagcca

SEQ ID NO: 338767 - DNA, 20 bp, Artificial Sequence
  Description of Artificial Sequence: Synthetic oligonucleotide
  Target: LAMA2; (+) strand; PAM type: YTN; PAM sequence: CTC
atcacttaatgaaagccacc

SEQ ID NO: 338768 - DNA, 20 bp, Artificial Sequence
  Description of Artificial Sequence: Synthetic oligonucleotide
  Target: LAMA2; (+) strand; PAM type: YTN; PAM sequence: CTT
aatgaaagccaccgttccta

SEQ ID NO: 338769 - DNA, 20 bp, Artificial Sequence
  Description of Artificial Sequence: Synthetic oligonucleotide
  Target: LAMA2; (+) strand; PAM type: YTN; PAM sequence: TTA
atgaaagccaccgttcctat

SEQ ID NO: 338770 - DNA, 20 bp, Artificial Sequence
  Description of Artificial Sequence: Synthetic oligonucleotide
  Target: LAMA2; (+) strand; PAM type: YTN; PAM sequence: TTC
ctatttggataaataagaga

SEQ ID NO: 338771 - DNA, 20 bp, Artificial Sequence
  Description of Artificial Sequence: Synthetic oligonucleotide
  Target: LAMA2; (+) strand; PAM type: YTN; PAM sequence: CTA
tttggataaataagagaatt

SEQ ID NO: 338772 - DNA, 20 bp, Artificial Sequence
  Description of Artificial Sequence: Synthetic oligonucleotide
  Target: LAMA2; (+) strand; PAM type: YTN; PAM sequence: TTT
ggataaataagagaattgaa

SEQ ID NO: 338773 - DNA, 20 bp, Artificial Sequence
  Description of Artificial Sequence: Synthetic oligonucleotide
  Target: LAMA2; (+) strand; PAM type: YTN; PAM sequence: TTG
gataaataagagaattgaaa

SEQ ID NO: 338774 - DNA, 20 bp, Artificial Sequence
  Description of Artificial Sequence: Synthetic oligonucleotide
  Target: LAMA2; (+) strand; PAM type: YTN; PAM sequence: TTG
aaaaacgcactattagaact

SEQ ID NO: 338775 - DNA, 20 bp, Artificial Sequence
  Description of Artificial Sequence: Synthetic oligonucleotide
  Target: LAMA2; (+) strand; PAM type: YTN; PAM sequence: CTA
ttagaactgagagtacagat

SEQ ID NO: 338776 - DNA, 20 bp, Artificial Sequence
  Description of Artificial Sequence: Synthetic oligonucleotide
  Target: LAMA2; (+) strand; PAM type: YTN; PAM sequence: TTA
gaactgagagtacagatgag

SEQ ID NO: 338777 - DNA, 20 bp, Artificial Sequence
  Description of Artificial Sequence: Synthetic oligonucleotide
  Target: LAMA2; (+) strand; PAM type: YTN; PAM sequence: CTG
agagtacagatgagctttcc

SEQ ID NO: 338778 - DNA, 20 bp, Artificial Sequence
  Description of Artificial Sequence: Synthetic oligonucleotide
  Target: LAMA2; (+) strand; PAM type: YTN; PAM sequence: CTT
tccaaatatattagagatgg

SEQ ID NO: 338779 - DNA, 20 bp, Artificial Sequence
  Description of Artificial Sequence: Synthetic oligonucleotide
  Target: LAMA2; (+) strand; PAM type: YTN; PAM sequence: TTT
ccaaatatattagagatggc

SEQ ID NO: 338780 - DNA, 20 bp, Artificial Sequence
  Description of Artificial Sequence: Synthetic oligonucleotide
  Target: LAMA2; (+) strand; PAM type: YTN; PAM sequence: TTC
caaatatattagagatggca

SEQ ID NO: 338781 - DNA, 20 bp, Artificial Sequence
  Description of Artificial Sequence: Synthetic oligonucleotide
  Target: LAMA2; (+) strand; PAM type: YTN; PAM sequence: TTA
gagatggcatcacagtacat

SEQ ID NO: 338782 - DNA, 20 bp, Artificial Sequence
  Description of Artificial Sequence: Synthetic oligonucleotide
  Target: LAMA2; (+) strand; PAM type: YTN; PAM sequence: TTA
aaatccataacatgggcaag

SEQ ID NO: 338783 - DNA, 20 bp, Artificial Sequence
  Description of Artificial Sequence: Synthetic oligonucleotide
  Target: LAMA2; (+) strand; PAM type: YTN; PAM sequence: CTA
gaaaagtgcagaacctcttt

SEQ ID NO: 338784 - DNA, 20 bp, Artificial Sequence
  Description of Artificial Sequence: Synthetic oligonucleotide
  Target: LAMA2; (+) strand; PAM type: YTN; PAM sequence: CTC
tttagaagtgaagcattttc

SEQ ID NO: 338785 - DNA, 20 bp, Artificial Sequence
  Description of Artificial Sequence: Synthetic oligonucleotide
  Target: LAMA2; (+) strand; PAM type: YTN; PAM sequence: CTT
tagaagtgaagcattttcgt

SEQ ID NO: 338786 - DNA, 20 bp, Artificial Sequence
  Description of Artificial Sequence: Synthetic oligonucleotide
  Target: LAMA2; (+) strand; PAM type: YTN; PAM sequence: TTT
agaagtgaagcattttcgtt

SEQ ID NO: 338787 - DNA, 20 bp, Artificial Sequence
  Description of Artificial Sequence: Synthetic oligonucleotide
  Target: LAMA2; (+) strand; PAM type: YTN; PAM sequence: TTA
gaagtgaagcattttcgttc

SEQ ID NO: 338788 - DNA, 20 bp, Artificial Sequence
  Description of Artificial Sequence: Synthetic oligonucleotide
  Target: LAMA2; (+) strand; PAM type: YTN; PAM sequence: TTT
tcgttccatgcacatcaatt

SEQ ID NO: 338789 - DNA, 20 bp, Artificial Sequence
  Description of Artificial Sequence: Synthetic oligonucleotide
  Target: LAMA2; (+) strand; PAM type: YTN; PAM sequence: TTT
cgttccatgcacatcaattt

SEQ ID NO: 338790 - DNA, 20 bp, Artificial Sequence
  Description of Artificial Sequence: Synthetic oligonucleotide
  Target: LAMA2; (+) strand; PAM type: YTN; PAM sequence: TTC
gttccatgcacatcaatttg

SEQ ID NO: 338791 - DNA, 20 bp, Artificial Sequence
  Description of Artificial Sequence: Synthetic oligonucleotide
  Target: LAMA2; (+) strand; PAM type: YTN; PAM sequence: TTC
catgcacatcaatttgctat

SEQ ID NO: 338792 - DNA, 20 bp, Artificial Sequence
  Description of Artificial Sequence: Synthetic oligonucleotide
  Target: LAMA2; (+) strand; PAM type: YTN; PAM sequence: TTT
gctataggagttcagggaca

SEQ ID NO: 338793 - DNA, 20 bp, Artificial Sequence
  Description of Artificial Sequence: Synthetic oligonucleotide
  Target: LAMA2; (+) strand; PAM type: YTN; PAM sequence: TTG
ctataggagttcagggacaa

SEQ ID NO: 338794 - DNA, 20 bp, Artificial Sequence
  Description of Artificial Sequence: Synthetic oligonucleotide
  Target: LAMA2; (+) strand; PAM type: YTN; PAM sequence: CTA
taggagttcagggacaaata

SEQ ID NO: 338795 - DNA, 20 bp, Artificial Sequence
  Description of Artificial Sequence: Synthetic oligonucleotide
  Target: LAMA2; (+) strand; PAM type: YTN; PAM sequence: TTC
agggacaaatagcaatatgg

SEQ ID NO: 338796 - DNA, 20 bp, Artificial Sequence
  Description of Artificial Sequence: Synthetic oligonucleotide
  Target: LAMA2; (+) strand; PAM type: YTN; PAM sequence: CTC
aacattgagcagaaattaga

SEQ ID NO: 338797 - DNA, 20 bp, Artificial Sequence
  Description of Artificial Sequence: Synthetic oligonucleotide
  Target: LAMA2; (+) strand; PAM type: YTN; PAM sequence: TTG
agcagaaattagacacatgc

SEQ ID NO: 338798 - DNA, 20 bp, Artificial Sequence
  Description of Artificial Sequence: Synthetic oligonucleotide
  Target: LAMA2; (+) strand; PAM type: YTN; PAM sequence: TTA
gacacatgctgttctcttga

SEQ ID NO: 338799 - DNA, 20 bp, Artificial Sequence
  Description of Artificial Sequence: Synthetic oligonucleotide
  Target: LAMA2; (+) strand; PAM type: YTN; PAM sequence: CTG
ttctcttgagagattaagaa

SEQ ID NO: 338800 - DNA, 20 bp, Artificial Sequence
  Description of Artificial Sequence: Synthetic oligonucleotide
  Target: LAMA2; (+) strand; PAM type: YTN; PAM sequence: TTC
tcttgagagattaagaaaga

SEQ ID NO: 338801 - DNA, 20 bp, Artificial Sequence
  Description of Artificial Sequence: Synthetic oligonucleotide
  Target: LAMA2; (+) strand; PAM type: YTN; PAM sequence: CTC
ttgagagattaagaaagaat

SEQ ID NO: 338802 - DNA, 20 bp, Artificial Sequence
  Description of Artificial Sequence: Synthetic oligonucleotide
  Target: LAMA2; (+) strand; PAM type: YTN; PAM sequence: CTT
gagagattaagaaagaataa

SEQ ID NO: 338803 - DNA, 20 bp, Artificial Sequence
  Description of Artificial Sequence: Synthetic oligonucleotide
  Target: LAMA2; (+) strand; PAM type: YTN; PAM sequence: TTG
agagattaagaaagaataaa

SEQ ID NO: 338804 - DNA, 20 bp, Artificial Sequence
  Description of Artificial Sequence: Synthetic oligonucleotide
  Target: LAMA2; (+) strand; PAM type: YTN; PAM sequence: TTA
agaaagaataaatagaagag

SEQ ID NO: 338805 - DNA, 20 bp, Artificial Sequence
  Description of Artificial Sequence: Synthetic oligonucleotide
  Target: LAMA2; (+) strand; PAM type: YTN; PAM sequence: CTA
tgagaaggataaagcattgt

SEQ ID NO: 338806 - DNA, 20 bp, Artificial Sequence
  Description of Artificial Sequence: Synthetic oligonucleotide
  Target: LAMA2; (+) strand; PAM type: YTN; PAM sequence: TTG
tcttccatagagagtgacct

SEQ ID NO: 338807 - DNA, 20 bp, Artificial Sequence
  Description of Artificial Sequence: Synthetic oligonucleotide
  Target: LAMA2; (+) strand; PAM type: YTN; PAM sequence: CTT
ccatagagagtgaccttcat

SEQ ID NO: 338808 - DNA, 20 bp, Artificial Sequence
  Description of Artificial Sequence: Synthetic oligonucleotide
  Target: LAMA2; (+) strand; PAM type: YTN; PAM sequence: TTC
catagagagtgaccttcatt

SEQ ID NO: 338809 - DNA, 20 bp, Artificial Sequence
  Description of Artificial Sequence: Synthetic oligonucleotide
  Target: LAMA2; (+) strand; PAM type: YTN; PAM sequence: CTT
cattaatattttttacggct

SEQ ID NO: 338810 - DNA, 20 bp, Artificial Sequence
  Description of Artificial Sequence: Synthetic oligonucleotide
  Target: LAMA2; (+) strand; PAM type: YTN; PAM sequence: TTC
attaatattttttacggctt

SEQ ID NO: 338811 - DNA, 20 bp, Artificial Sequence
  Description of Artificial Sequence: Synthetic oligonucleotide
  Target: LAMA2; (+) strand; PAM type: YTN; PAM sequence: TTA
atattttttacggcttttgt

SEQ ID NO: 338812 - DNA, 20 bp, Artificial Sequence
  Description of Artificial Sequence: Synthetic oligonucleotide
  Target: LAMA2; (+) strand; PAM type: YTN; PAM sequence: TTT
tttacggcttttgtggagat

SEQ ID NO: 338813 - DNA, 20 bp, Artificial Sequence
  Description of Artificial Sequence: Synthetic oligonucleotide
  Target: LAMA2; (+) strand; PAM type: YTN; PAM sequence: TTT
ttacggcttttgtggagatc

SEQ ID NO: 338814 - DNA, 20 bp, Artificial Sequence
  Description of Artificial Sequence: Synthetic oligonucleotide
  Target: LAMA2; (+) strand; PAM type: YTN; PAM sequence: TTT
tacggcttttgtggagatca

SEQ ID NO: 338815 - DNA, 20 bp, Artificial Sequence
  Description of Artificial Sequence: Synthetic oligonucleotide
  Target: LAMA2; (+) strand; PAM type: YTN; PAM sequence: TTT
acggcttttgtggagatcag

SEQ ID NO: 338816 - DNA, 20 bp, Artificial Sequence
  Description of Artificial Sequence: Synthetic oligonucleotide
  Target: LAMA2; (+) strand; PAM type: YTN; PAM sequence: TTA
cggcttttgtggagatcagc

SEQ ID NO: 338817 - DNA, 20 bp, Artificial Sequence
  Description of Artificial Sequence: Synthetic oligonucleotide
  Target: LAMA2; (+) strand; PAM type: YTN; PAM sequence: CTT
ttgtggagatcagcctaagg

SEQ ID NO: 338818 - DNA, 20 bp, Artificial Sequence
  Description of Artificial Sequence: Synthetic oligonucleotide
  Target: LAMA2; (+) strand; PAM type: YTN; PAM sequence: TTT
tgtggagatcagcctaagga

SEQ ID NO: 338819 - DNA, 20 bp, Artificial Sequence
  Description of Artificial Sequence: Synthetic oligonucleotide
  Target: LAMA2; (+) strand; PAM type: YTN; PAM sequence: TTT
gtggagatcagcctaaggaa

SEQ ID NO: 338820 - DNA, 20 bp, Artificial Sequence
  Description of Artificial Sequence: Synthetic oligonucleotide
  Target: LAMA2; (+) strand; PAM type: YTN; PAM sequence: TTG
tggagatcagcctaaggaaa

SEQ ID NO: 338821 - DNA, 20 bp, Artificial Sequence
  Description of Artificial Sequence: Synthetic oligonucleotide
  Target: LAMA2; (+) strand; PAM type: YTN; PAM sequence: CTA
aggaaacagaagtcctatgg

SEQ ID NO: 338822 - DNA, 20 bp, Artificial Sequence
  Description of Artificial Sequence: Synthetic oligonucleotide
  Target: LAMA2; (+) strand; PAM type: YTN; PAM sequence: CTA
tggccttattacatcattac

SEQ ID NO: 338823 - DNA, 20 bp, Artificial Sequence
  Description of Artificial Sequence: Synthetic oligonucleotide
  Target: LAMA2; (+) strand; PAM type: YTN; PAM sequence: CTT
attacatcattacagaatca

SEQ ID NO: 338824 - DNA, 20 bp, Artificial Sequence
  Description of Artificial Sequence: Synthetic oligonucleotide
  Target: LAMA2; (+) strand; PAM type: YTN; PAM sequence: TTA
ttacatcattacagaatcac

SEQ ID NO: 338825 - DNA, 20 bp, Artificial Sequence
  Description of Artificial Sequence: Synthetic oligonucleotide
  Target: LAMA2; (+) strand; PAM type: YTN; PAM sequence: TTA
catcattacagaatcacact

SEQ ID NO: 338826 - DNA, 20 bp, Artificial Sequence
  Description of Artificial Sequence: Synthetic oligonucleotide
  Target: LAMA2; (+) strand; PAM type: YTN; PAM sequence: TTA
cagaatcacactttggctgg

SEQ ID NO: 338827 - DNA, 20 bp, Artificial Sequence
  Description of Artificial Sequence: Synthetic oligonucleotide
  Target: LAMA2; (+) strand; PAM type: YTN; PAM sequence: CTT
tggctgggtctcttaactgt

SEQ ID NO: 338828 - DNA, 20 bp, Artificial Sequence
  Description of Artificial Sequence: Synthetic oligonucleotide
  Target: LAMA2; (+) strand; PAM type: YTN; PAM sequence: TTT
ggctgggtctcttaactgtg

SEQ ID NO: 338829 - DNA, 20 bp, Artificial Sequence
  Description of Artificial Sequence: Synthetic oligonucleotide
  Target: LAMA2; (+) strand; PAM type: YTN; PAM sequence: TTG
gctgggtctcttaactgtgt

SEQ ID NO: 338830 - DNA, 20 bp, Artificial Sequence
  Description of Artificial Sequence: Synthetic oligonucleotide
  Target: LAMA2; (+) strand; PAM type: YTN; PAM sequence: CTG
ggtctcttaactgtgtaaca

SEQ ID NO: 338831 - DNA, 20 bp, Artificial Sequence
  Description of Artificial Sequence: Synthetic oligonucleotide
  Target: LAMA2; (+) strand; PAM type: YTN; PAM sequence: CTC
ttaactgtgtaacagtggtg

SEQ ID NO: 338832 - DNA, 20 bp, Artificial Sequence
  Description of Artificial Sequence: Synthetic oligonucleotide
  Target: LAMA2; (+) strand; PAM type: YTN; PAM sequence: CTT
aactgtgtaacagtggtgct

SEQ ID NO: 338833 - DNA, 20 bp, Artificial Sequence
  Description of Artificial Sequence: Synthetic oligonucleotide
  Target: LAMA2; (+) strand; PAM type: YTN; PAM sequence: TTA
actgtgtaacagtggtgctc

SEQ ID NO: 338834 - DNA, 20 bp, Artificial Sequence
  Description of Artificial Sequence: Synthetic oligonucleotide
  Target: LAMA2; (+) strand; PAM type: YTN; PAM sequence: CTG
tgtaacagtggtgctcaaaa

SEQ ID NO: 338835 - DNA, 20 bp, Artificial Sequence
  Description of Artificial Sequence: Synthetic oligonucleotide
  Target: LAMA2; (+) strand; PAM type: YTN; PAM sequence: CTC
aaaagtctctgtaaatctcc

SEQ ID NO: 338836 - DNA, 20 bp, Artificial Sequence
  Description of Artificial Sequence: Synthetic oligonucleotide
  Target: LAMA2; (+) strand; PAM type: YTN; PAM sequence: CTC
tgtaaatctccaaaacacaa

SEQ ID NO: 338837 - DNA, 20 bp, Artificial Sequence
  Description of Artificial Sequence: Synthetic oligonucleotide
  Target: LAMA2; (+) strand; PAM type: YTN; PAM sequence: CTG
taaatctccaaaacacaata

SEQ ID NO: 338838 - DNA, 20 bp, Artificial Sequence
  Description of Artificial Sequence: Synthetic oligonucleotide
  Target: LAMA2; (+) strand; PAM type: YTN; PAM sequence: CTC
caaaacacaatactctttag

SEQ ID NO: 338839 - DNA, 20 bp, Artificial Sequence
  Description of Artificial Sequence: Synthetic oligonucleotide
  Target: LAMA2; (+) strand; PAM type: YTN; PAM sequence: CTC
tttagtagcatttcttagat

SEQ ID NO: 338840 - DNA, 20 bp, Artificial Sequence
  Description of Artificial Sequence: Synthetic oligonucleotide
  Target: LAMA2; (+) strand; PAM type: YTN; PAM sequence: CTT
tagtagcatttcttagattt

SEQ ID NO: 338841 - DNA, 20 bp, Artificial Sequence
  Description of Artificial Sequence: Synthetic oligonucleotide
  Target: LAMA2; (+) strand; PAM type: YTN; PAM sequence: TTT
agtagcatttcttagatttg

SEQ ID NO: 338842 - DNA, 20 bp, Artificial Sequence
  Description of Artificial Sequence: Synthetic oligonucleotide
  Target: LAMA2; (+) strand; PAM type: YTN; PAM sequence: TTA
gtagcatttcttagatttgt

SEQ ID NO: 338843 - DNA, 20 bp, Artificial Sequence
  Description of Artificial Sequence: Synthetic oligonucleotide
  Target: LAMA2; (+) strand; PAM type: YTN; PAM sequence: TTT
cttagatttgtgattcttct

SEQ ID NO: 338844 - DNA, 20 bp, Artificial Sequence
  Description of Artificial Sequence: Synthetic oligonucleotide
  Target: LAMA2; (+) strand; PAM type: YTN; PAM sequence: TTC
ttagatttgtgattcttctg

SEQ ID NO: 338845 - DNA, 20 bp, Artificial Sequence
  Description of Artificial Sequence: Synthetic oligonucleotide
  Target: LAMA2; (+) strand; PAM type: YTN; PAM sequence: CTT
agatttgtgattcttctggg

SEQ ID NO: 338846 - DNA, 20 bp, Artificial Sequence
  Description of Artificial Sequence: Synthetic oligonucleotide
  Target: LAMA2; (+) strand; PAM type: YTN; PAM sequence: TTA
gatttgtgattcttctgggg

SEQ ID NO: 338847 - DNA, 20 bp, Artificial Sequence
  Description of Artificial Sequence: Synthetic oligonucleotide
  Target: LAMA2; (+) strand; PAM type: YTN; PAM sequence: TTT
gtgattcttctggggacaaa

SEQ ID NO: 338848 - DNA, 20 bp, Artificial Sequence
  Description of Artificial Sequence: Synthetic oligonucleotide
  Target: LAMA2; (+) strand; PAM type: YTN; PAM sequence: TTG
tgattcttctggggacaaag

SEQ ID NO: 338849 - DNA, 20 bp, Artificial Sequence
  Description of Artificial Sequence: Synthetic oligonucleotide
  Target: LAMA2; (+) strand; PAM type: YTN; PAM sequence: TTC
ttctggggacaaaggatctg

SEQ ID NO: 338850 - DNA, 20 bp, Artificial Sequence
  Description of Artificial Sequence: Synthetic oligonucleotide
  Target: LAMA2; (+) strand; PAM type: YTN; PAM sequence: CTT
ctggggacaaaggatctggg

SEQ ID NO: 338851 - DNA, 20 bp, Artificial Sequence
  Description of Artificial Sequence: Synthetic oligonucleotide
  Target: LAMA2; (+) strand; PAM type: YTN; PAM sequence: TTC
tggggacaaaggatctggga

SEQ ID NO: 338852 - DNA, 20 bp, Artificial Sequence
  Description of Artificial Sequence: Synthetic oligonucleotide
  Target: LAMA2; (+) strand; PAM type: YTN; PAM sequence: CTG
gggacaaaggatctgggata

SEQ ID NO: 338853 - DNA, 20 bp, Artificial Sequence
  Description of Artificial Sequence: Synthetic oligonucleotide
  Target: LAMA2; (+) strand; PAM type: YTN; PAM sequence: CTG
ggatacaatgggttcccgag

SEQ ID NO: 338854 - DNA, 20 bp, Artificial Sequence
  Description of Artificial Sequence: Synthetic oligonucleotide
  Target: LAMA2; (+) strand; PAM type: YTN; PAM sequence: TTC
ccgagtgcagtggtgtgatc

SEQ ID NO: 338855 - DNA, 20 bp, Artificial Sequence
  Description of Artificial Sequence: Synthetic oligonucleotide
  Target: LAMA2; (+) strand; PAM type: YTN; PAM sequence: CTC
ggctcactgcaacctccgcc

SEQ ID NO: 338856 - DNA, 20 bp, Artificial Sequence
  Description of Artificial Sequence: Synthetic oligonucleotide
  Target: LAMA2; (+) strand; PAM type: YTN; PAM sequence: CTC
actgcaacctccgccttccg

SEQ ID NO: 338857 - DNA, 20 bp, Artificial Sequence
  Description of Artificial Sequence: Synthetic oligonucleotide
  Target: LAMA2; (+) strand; PAM type: YTN; PAM sequence: CTG
caacctccgccttccgattt

SEQ ID NO: 338858 - DNA, 20 bp, Artificial Sequence
  Description of Artificial Sequence: Synthetic oligonucleotide
  Target: LAMA2; (+) strand; PAM type: YTN; PAM sequence: CTC
cgccttccgattttcaagcg

SEQ ID NO: 338859 - DNA, 20 bp, Artificial Sequence
  Description of Artificial Sequence: Synthetic oligonucleotide
  Target: LAMA2; (+) strand; PAM type: YTN; PAM sequence: CTT
ccgattttcaagcgattctc

SEQ ID NO: 338860 - DNA, 20 bp, Artificial Sequence
  Description of Artificial Sequence: Synthetic oligonucleotide
  Target: LAMA2; (+) strand; PAM type: YTN; PAM sequence: TTC
cgattttcaagcgattctcc

SEQ ID NO: 338861 - DNA, 20 bp, Artificial Sequence
  Description of Artificial Sequence: Synthetic oligonucleotide
  Target: LAMA2; (+) strand; PAM type: YTN; PAM sequence: TTT
tcaagcgattctcctgcctc

SEQ ID NO: 338862 - DNA, 20 bp, Artificial Sequence
  Description of Artificial Sequence: Synthetic oligonucleotide
  Target: LAMA2; (+) strand; PAM type: YTN; PAM sequence: TTT
caagcgattctcctgcctca

SEQ ID NO: 338863 - DNA, 20 bp, Artificial Sequence
  Description of Artificial Sequence: Synthetic oligonucleotide
  Target: LAMA2; (+) strand; PAM type: YTN; PAM sequence: TTC
aagcgattctcctgcctcag

SEQ ID NO: 338864 - DNA, 20 bp, Artificial Sequence
  Description of Artificial Sequence: Synthetic oligonucleotide
  Target: LAMA2; (+) strand; PAM type: YTN; PAM sequence: TTC
tcctgcctcagcttccggag

SEQ ID NO: 338865 - DNA, 20 bp, Artificial Sequence
  Description of Artificial Sequence: Synthetic oligonucleotide
  Target: LAMA2; (+) strand; PAM type: YTN; PAM sequence: CTC
ctgcctcagcttccggagta

SEQ ID NO: 338866 - DNA, 20 bp, Artificial Sequence
  Description of Artificial Sequence: Synthetic oligonucleotide
  Target: LAMA2; (+) strand; PAM type: YTN; PAM sequence: CTG
cctcagcttccggagtagct

SEQ ID NO: 338867 - DNA, 20 bp, Artificial Sequence
  Description of Artificial Sequence: Synthetic oligonucleotide
  Target: LAMA2; (+) strand; PAM type: YTN; PAM sequence: CTC
agcttccggagtagctggga

SEQ ID NO: 338868 - DNA, 20 bp, Artificial Sequence
  Description of Artificial Sequence: Synthetic oligonucleotide
  Target: LAMA2; (+) strand; PAM type: YTN; PAM sequence: CTT
ccggagtagctgggattaca

SEQ ID NO: 338869 - DNA, 20 bp, Artificial Sequence
  Description of Artificial Sequence: Synthetic oligonucleotide
  Target: LAMA2; (+) strand; PAM type: YTN; PAM sequence: TTC
cggagtagctgggattacag

SEQ ID NO: 338870 - DNA, 20 bp, Artificial Sequence
  Description of Artificial Sequence: Synthetic oligonucleotide
  Target: LAMA2; (+) strand; PAM type: YTN; PAM sequence: CTG
ggattacaggcgcccaccac

SEQ ID NO: 338871 - DNA, 20 bp, Artificial Sequence
  Description of Artificial Sequence: Synthetic oligonucleotide
  Target: LAMA2; (+) strand; PAM type: YTN; PAM sequence: TTA
caggcgcccaccaccacccc

SEQ ID NO: 338872 - DNA, 20 bp, Artificial Sequence
  Description of Artificial Sequence: Synthetic oligonucleotide
  Target: LAMA2; (+) strand; PAM type: YTN; PAM sequence: CTA
attttttttttttgtatttt

SEQ ID NO: 338873 - DNA, 20 bp, Artificial Sequence
  Description of Artificial Sequence: Synthetic oligonucleotide
  Target: LAMA2; (+) strand; PAM type: YTN; PAM sequence: TTT
tttttttttgtattttttag

SEQ ID NO: 338874 - DNA, 20 bp, Artificial Sequence
  Description of Artificial Sequence: Synthetic oligonucleotide
  Target: LAMA2; (+) strand; PAM type: YTN; PAM sequence: TTT
ttttttttgtattttttagt

SEQ ID NO: 338875 - DNA, 20 bp, Artificial Sequence
  Description of Artificial Sequence: Synthetic oligonucleotide
  Target: LAMA2; (+) strand; PAM type: YTN; PAM sequence: TTT
tttttttgtattttttagta

SEQ ID NO: 338876 - DNA, 20 bp, Artificial Sequence
  Description of Artificial Sequence: Synthetic oligonucleotide
  Target: LAMA2; (+) strand; PAM type: YTN; PAM sequence: TTT
ttttttgtattttttagtag

SEQ ID NO: 338877 - DNA, 20 bp, Artificial Sequence
  Description of Artificial Sequence: Synthetic oligonucleotide
  Target: LAMA2; (+) strand; PAM type: YTN; PAM sequence: TTT
tttttgtattttttagtaga

SEQ ID NO: 338878 - DNA, 20 bp, Artificial Sequence
  Description of Artificial Sequence: Synthetic oligonucleotide
  Target: LAMA2; (+) strand; PAM type: YTN; PAM sequence: TTT
ttttgtattttttagtagag

SEQ ID NO: 338879 - DNA, 20 bp, Artificial Sequence
  Description of Artificial Sequence: Synthetic oligonucleotide
  Target: LAMA2; (+) strand; PAM type: YTN; PAM sequence: TTT
tttgtattttttagtagaga

SEQ ID NO: 338880 - DNA, 20 bp, Artificial Sequence
  Description of Artificial Sequence: Synthetic oligonucleotide
  Target: LAMA2; (+) strand; PAM type: YTN; PAM sequence: TTT
ttgtattttttagtagagac

SEQ ID NO: 338881 - DNA, 20 bp, Artificial Sequence
  Description of Artificial Sequence: Synthetic oligonucleotide
  Target: LAMA2; (+) strand; PAM type: YTN; PAM sequence: TTT
tgtattttttagtagagacg

SEQ ID NO: 338882 - DNA, 20 bp, Artificial Sequence
  Description of Artificial Sequence: Synthetic oligonucleotide
  Target: LAMA2; (+) strand; PAM type: YTN; PAM sequence: TTT
gtattttttagtagagacgg

SEQ ID NO: 338883 - DNA, 20 bp, Artificial Sequence
  Description of Artificial Sequence: Synthetic oligonucleotide
  Target: LAMA2; (+) strand; PAM type: YTN; PAM sequence: TTG
tattttttagtagagacgga

SEQ ID NO: 338884 - DNA, 20 bp, Artificial Sequence
  Description of Artificial Sequence: Synthetic oligonucleotide
  Target: LAMA2; (+) strand; PAM type: YTN; PAM sequence: TTT
tttagtagagacggagtttc

SEQ ID NO: 338885 - DNA, 20 bp, Artificial Sequence
  Description of Artificial Sequence: Synthetic oligonucleotide
  Target: LAMA2; (+) strand; PAM type: YTN; PAM sequence: TTT
ttagtagagacggagtttca

SEQ ID NO: 338886 - DNA, 20 bp, Artificial Sequence
  Description of Artificial Sequence: Synthetic oligonucleotide
  Target: LAMA2; (+) strand; PAM type: YTN; PAM sequence: TTT
tagtagagacggagtttcac

SEQ ID NO: 338887 - DNA, 20 bp, Artificial Sequence
  Description of Artificial Sequence: Synthetic oligonucleotide
  Target: LAMA2; (+) strand; PAM type: YTN; PAM sequence: TTT
agtagagacggagtttcacc

SEQ ID NO: 338888 - DNA, 20 bp, Artificial Sequence
  Description of Artificial Sequence: Synthetic oligonucleotide
  Target: LAMA2; (+) strand; PAM type: YTN; PAM sequence: TTA
gtagagacggagtttcacca

SEQ ID NO: 338889 - DNA, 20 bp, Artificial Sequence
  Description of Artificial Sequence: Synthetic oligonucleotide
  Target: LAMA2; (+) strand; PAM type: YTN; PAM sequence: TTT
caccatattggccaggctgg

SEQ ID NO: 338890 - DNA, 20 bp, Artificial Sequence
  Description of Artificial Sequence: Synthetic oligonucleotide
  Target: LAMA2; (+) strand; PAM type: YTN; PAM sequence: TTC
accatattggccaggctggt

SEQ ID NO: 338891 - DNA, 20 bp, Artificial Sequence
  Description of Artificial Sequence: Synthetic oligonucleotide
  Target: LAMA2; (+) strand; PAM type: YTN; PAM sequence: TTG
gccaggctggtctcgaactc

SEQ ID NO: 338892 - DNA, 20 bp, Artificial Sequence
  Description of Artificial Sequence: Synthetic oligonucleotide
  Target: LAMA2; (+) strand; PAM type: YTN; PAM sequence: CTG
gtctcgaactcctgacatcg

SEQ ID NO: 338893 - DNA, 20 bp, Artificial Sequence
  Description of Artificial Sequence: Synthetic oligonucleotide
  Target: LAMA2; (+) strand; PAM type: YTN; PAM sequence: CTC
gaactcctgacatcgtgatc

SEQ ID NO: 338894 - DNA, 20 bp, Artificial Sequence
  Description of Artificial Sequence: Synthetic oligonucleotide
  Target: LAMA2; (+) strand; PAM type: YTN; PAM sequence: CTC
ctgacatcgtgatccgcctg

SEQ ID NO: 338895 - DNA, 20 bp, Artificial Sequence
  Description of Artificial Sequence: Synthetic oligonucleotide
  Target: LAMA2; (+) strand; PAM type: YTN; PAM sequence: CTG
acatcgtgatccgcctgccc

SEQ ID NO: 338896 - DNA, 20 bp, Artificial Sequence
  Description of Artificial Sequence: Synthetic oligonucleotide
  Target: LAMA2; (+) strand; PAM type: YTN; PAM sequence: CTG
ccccagcctcccaaagtgct

SEQ ID NO: 338897 - DNA, 20 bp, Artificial Sequence
  Description of Artificial Sequence: Synthetic oligonucleotide
  Target: LAMA2; (+) strand; PAM type: YTN; PAM sequence: CTC
ccaaagtgctgggattacag

SEQ ID NO: 338898 - DNA, 20 bp, Artificial Sequence
  Description of Artificial Sequence: Synthetic oligonucleotide
  Target: LAMA2; (+) strand; PAM type: YTN; PAM sequence: CTG
ggattacaggcgtgagccac

SEQ ID NO: 338899 - DNA, 20 bp, Artificial Sequence
  Description of Artificial Sequence: Synthetic oligonucleotide
  Target: LAMA2; (+) strand; PAM type: YTN; PAM sequence: TTA
caggcgtgagccaccgtgcc

SEQ ID NO: 338900 - DNA, 20 bp, Artificial Sequence
  Description of Artificial Sequence: Synthetic oligonucleotide
  Target: LAMA2; (+) strand; PAM type: YTN; PAM sequence: TTT
ttttttttttttaaatcaag

SEQ ID NO: 338901 - DNA, 20 bp, Artificial Sequence
  Description of Artificial Sequence: Synthetic oligonucleotide
  Target: LAMA2; (+) strand; PAM type: YTN; PAM sequence: TTT
tttttttttttaaatcaaga

SEQ ID NO: 338902 - DNA, 20 bp, Artificial Sequence
  Description of Artificial Sequence: Synthetic oligonucleotide
  Target: LAMA2; (+) strand; PAM type: YTN; PAM sequence: TTT
ttttttttttaaatcaagac

SEQ ID NO: 338903 - DNA, 20 bp, Artificial Sequence
  Description of Artificial Sequence: Synthetic oligonucleotide
  Target: LAMA2; (+) strand; PAM type: YTN; PAM sequence: TTT
tttttttttaaatcaagact

SEQ ID NO: 338904 - DNA, 20 bp, Artificial Sequence
  Description of Artificial Sequence: Synthetic oligonucleotide
  Target: LAMA2; (+) strand; PAM type: YTN; PAM sequence: TTT
ttttttttaaatcaagactt

SEQ ID NO: 338905 - DNA, 20 bp, Artificial Sequence
  Description of Artificial Sequence: Synthetic oligonucleotide
  Target: LAMA2; (+) strand; PAM type: YTN; PAM sequence: TTT
tttttttaaatcaagactta

SEQ ID NO: 338906 - DNA, 20 bp, Artificial Sequence
  Description of Artificial Sequence: Synthetic oligonucleotide
  Target: LAMA2; (+) strand; PAM type: YTN; PAM sequence: TTT
ttttttaaatcaagacttag

SEQ ID NO: 338907 - DNA, 20 bp, Artificial Sequence
  Description of Artificial Sequence: Synthetic oligonucleotide
  Target: LAMA2; (+) strand; PAM type: YTN; PAM sequence: TTT
tttttaaatcaagacttagc

SEQ ID NO: 338908 - DNA, 20 bp, Artificial Sequence
  Description of Artificial Sequence: Synthetic oligonucleotide
  Target: LAMA2; (+) strand; PAM type: YTN; PAM sequence: TTT
ttttaaatcaagacttagca

SEQ ID NO: 338909 - DNA, 20 bp, Artificial Sequence
  Description of Artificial Sequence: Synthetic oligonucleotide
  Target: LAMA2; (+) strand; PAM type: YTN; PAM sequence: TTT
tttaaatcaagacttagcaa

SEQ ID NO: 338910 - DNA, 20 bp, Artificial Sequence
  Description of Artificial Sequence: Synthetic oligonucleotide
  Target: LAMA2; (+) strand; PAM type: YTN; PAM sequence: TTT
ttaaatcaagacttagcaat

SEQ ID NO: 338911 - DNA, 20 bp, Artificial Sequence
  Description of Artificial Sequence: Synthetic oligonucleotide
  Target: LAMA2; (+) strand; PAM type: YTN; PAM sequence: TTT
taaatcaagacttagcaatg

SEQ ID NO: 338912 - DNA, 20 bp, Artificial Sequence
  Description of Artificial Sequence: Synthetic oligonucleotide
  Target: LAMA2; (+) strand; PAM type: YTN; PAM sequence: TTT
aaatcaagacttagcaatgc

SEQ ID NO: 338913 - DNA, 20 bp, Artificial Sequence
  Description of Artificial Sequence: Synthetic oligonucleotide
  Target: LAMA2; (+) strand; PAM type: YTN; PAM sequence: TTA
aatcaagacttagcaatgca

SEQ ID NO: 338914 - DNA, 20 bp, Artificial Sequence
  Description of Artificial Sequence: Synthetic oligonucleotide
  Target: LAMA2; (+) strand; PAM type: YTN; PAM sequence: CTT
agcaatgcatgttctagaaa

SEQ ID NO: 338915 - DNA, 20 bp, Artificial Sequence
  Description of Artificial Sequence: Synthetic oligonucleotide
  Target: LAMA2; (+) strand; PAM type: YTN; PAM sequence: TTA
gcaatgcatgttctagaaac

SEQ ID NO: 338916 - DNA, 20 bp, Artificial Sequence
  Description of Artificial Sequence: Synthetic oligonucleotide
  Target: LAMA2; (+) strand; PAM type: YTN; PAM sequence: TTC
tagaaactgattctggtttt

SEQ ID NO: 338917 - DNA, 20 bp, Artificial Sequence
  Description of Artificial Sequence: Synthetic oligonucleotide
  Target: LAMA2; (+) strand; PAM type: YTN; PAM sequence: CTA
gaaactgattctggttttca

SEQ ID NO: 338918 - DNA, 20 bp, Artificial Sequence
  Description of Artificial Sequence: Synthetic oligonucleotide
  Target: LAMA2; (+) strand; PAM type: YTN; PAM sequence: CTG
attctggttttcagacttaa

SEQ ID NO: 338919 - DNA, 20 bp, Artificial Sequence
  Description of Artificial Sequence: Synthetic oligonucleotide
  Target: LAMA2; (+) strand; PAM type: YTN; PAM sequence: TTC
tggttttcagacttaactaa

SEQ ID NO: 338920 - DNA, 20 bp, Artificial Sequence
  Description of Artificial Sequence: Synthetic oligonucleotide
  Target: LAMA2; (+) strand; PAM type: YTN; PAM sequence: CTG
gttttcagacttaactaaca

SEQ ID NO: 338921 - DNA, 20 bp, Artificial Sequence
  Description of Artificial Sequence: Synthetic oligonucleotide
  Target: LAMA2; (+) strand; PAM type: YTN; PAM sequence: TTT
tcagacttaactaacatggg

SEQ ID NO: 338922 - DNA, 20 bp, Artificial Sequence
  Description of Artificial Sequence: Synthetic oligonucleotide
  Target: LAMA2; (+) strand; PAM type: YTN; PAM sequence: TTT
cagacttaactaacatgggt

SEQ ID NO: 338923 - DNA, 20 bp, Artificial Sequence
  Description of Artificial Sequence: Synthetic oligonucleotide
  Target: LAMA2; (+) strand; PAM type: YTN; PAM sequence: TTC
agacttaactaacatgggta

SEQ ID NO: 338924 - DNA, 20 bp, Artificial Sequence
  Description of Artificial Sequence: Synthetic oligonucleotide
  Target: LAMA2; (+) strand; PAM type: YTN; PAM sequence: CTT
aactaacatgggtataggtg

SEQ ID NO: 338925 - DNA, 20 bp, Artificial Sequence
  Description of Artificial Sequence: Synthetic oligonucleotide
  Target: LAMA2; (+) strand; PAM type: YTN; PAM sequence: TTA
actaacatgggtataggtga

SEQ ID NO: 338926 - DNA, 20 bp, Artificial Sequence
  Description of Artificial Sequence: Synthetic oligonucleotide
  Target: LAMA2; (+) strand; PAM type: YTN; PAM sequence: CTA
acatgggtataggtgagcta

SEQ ID NO: 338927 - DNA, 20 bp, Artificial Sequence
  Description of Artificial Sequence: Synthetic oligonucleotide
  Target: LAMA2; (+) strand; PAM type: YTN; PAM sequence: CTA
agatattaagctgcagggaa

SEQ ID NO: 338928 - DNA, 20 bp, Artificial Sequence
  Description of Artificial Sequence: Synthetic oligonucleotide
  Target: LAMA2; (+) strand; PAM type: YTN; PAM sequence: TTA
agctgcagggaagggtctag

SEQ ID NO: 338929 - DNA, 20 bp, Artificial Sequence
  Description of Artificial Sequence: Synthetic oligonucleotide
  Target: LAMA2; (+) strand; PAM type: YTN; PAM sequence: CTG
cagggaagggtctagagtag

SEQ ID NO: 338930 - DNA, 20 bp, Artificial Sequence
  Description of Artificial Sequence: Synthetic oligonucleotide
  Target: LAMA2; (+) strand; PAM type: YTN; PAM sequence: CTA
gagtagctagagttcctggg

SEQ ID NO: 338931 - DNA, 20 bp, Artificial Sequence
  Description of Artificial Sequence: Synthetic oligonucleotide
  Target: LAMA2; (+) strand; PAM type: YTN; PAM sequence: CTA
gagttcctgggctgctcact

SEQ ID NO: 338932 - DNA, 20 bp, Artificial Sequence
  Description of Artificial Sequence: Synthetic oligonucleotide
  Target: LAMA2; (+) strand; PAM type: YTN; PAM sequence: TTC
ctgggctgctcacttcaagc

SEQ ID NO: 338933 - DNA, 20 bp, Artificial Sequence
  Description of Artificial Sequence: Synthetic oligonucleotide
  Target: LAMA2; (+) strand; PAM type: YTN; PAM sequence: CTG
ggctgctcacttcaagctat

SEQ ID NO: 338934 - DNA, 20 bp, Artificial Sequence
  Description of Artificial Sequence: Synthetic oligonucleotide
  Target: LAMA2; (+) strand; PAM type: YTN; PAM sequence: CTG
ctcacttcaagctatgaggt

SEQ ID NO: 338935 - DNA, 20 bp, Artificial Sequence
  Description of Artificial Sequence: Synthetic oligonucleotide
  Target: LAMA2; (+) strand; PAM type: YTN; PAM sequence: CTC
acttcaagctatgaggtctc

SEQ ID NO: 338936 - DNA, 20 bp, Artificial Sequence
  Description of Artificial Sequence: Synthetic oligonucleotide
  Target: LAMA2; (+) strand; PAM type: YTN; PAM sequence: CTT
caagctatgaggtctcctga

SEQ ID NO: 338937 - DNA, 20 bp, Artificial Sequence
  Description of Artificial Sequence: Synthetic oligonucleotide
  Target: LAMA2; (+) strand; PAM type: YTN; PAM sequence: TTC
aagctatgaggtctcctgaa

SEQ ID NO: 338938 - DNA, 20 bp, Artificial Sequence
  Description of Artificial Sequence: Synthetic oligonucleotide
  Target: LAMA2; (+) strand; PAM type: YTN; PAM sequence: CTA
tgaggtctcctgaacactgg

SEQ ID NO: 338939 - DNA, 20 bp, Artificial Sequence
  Description of Artificial Sequence: Synthetic oligonucleotide
  Target: LAMA2; (+) strand; PAM type: YTN; PAM sequence: CTC
ctgaacactggtaaaaaccc

SEQ ID NO: 338940 - DNA, 20 bp, Artificial Sequence
  Description of Artificial Sequence: Synthetic oligonucleotide
  Target: LAMA2; (+) strand; PAM type: YTN; PAM sequence: CTG
aacactggtaaaaaccccag

SEQ ID NO: 338941 - DNA, 20 bp, Artificial Sequence
  Description of Artificial Sequence: Synthetic oligonucleotide
  Target: LAMA2; (+) strand; PAM type: YTN; PAM sequence: CTG
gtaaaaaccccagtgctgta

SEQ ID NO: 338942 - DNA, 20 bp, Artificial Sequence
  Description of Artificial Sequence: Synthetic oligonucleotide
  Target: LAMA2; (+) strand; PAM type: YTN; PAM sequence: CTG
tacaaatatcattttatctt

SEQ ID NO: 338943 - DNA, 20 bp, Artificial Sequence
  Description of Artificial Sequence: Synthetic oligonucleotide
  Target: LAMA2; (+) strand; PAM type: YTN; PAM sequence: TTT
tatcttagccatgatgttca

SEQ ID NO: 338944 - DNA, 20 bp, Artificial Sequence
  Description of Artificial Sequence: Synthetic oligonucleotide
  Target: LAMA2; (+) strand; PAM type: YTN; PAM sequence: TTT
atcttagccatgatgttcaa

SEQ ID NO: 338945 - DNA, 20 bp, Artificial Sequence
  Description of Artificial Sequence: Synthetic oligonucleotide
  Target: LAMA2; (+) strand; PAM type: YTN; PAM sequence: TTA
tcttagccatgatgttcaag

SEQ ID NO: 338946 - DNA, 20 bp, Artificial Sequence
  Description of Artificial Sequence: Synthetic oligonucleotide
  Target: LAMA2; (+) strand; PAM type: YTN; PAM sequence: CTT
agccatgatgttcaagattg

SEQ ID NO: 338947 - DNA, 20 bp, Artificial Sequence
  Description of Artificial Sequence: Synthetic oligonucleotide
  Target: LAMA2; (+) strand; PAM type: YTN; PAM sequence: TTA
gccatgatgttcaagattgg

SEQ ID NO: 338948 - DNA, 20 bp, Artificial Sequence
  Description of Artificial Sequence: Synthetic oligonucleotide
  Target: LAMA2; (+) strand; PAM type: YTN; PAM sequence: TTC
aagattggaaagcataactc

SEQ ID NO: 338949 - DNA, 20 bp, Artificial Sequence
  Description of Artificial Sequence: Synthetic oligonucleotide
  Target: LAMA2; (+) strand; PAM type: YTN; PAM sequence: TTG
gaaagcataactctatgtga

SEQ ID NO: 338950 - DNA, 20 bp, Artificial Sequence
  Description of Artificial Sequence: Synthetic oligonucleotide
  Target: LAMA2; (+) strand; PAM type: YTN; PAM sequence: CTC
tatgtgatgatcattgtccg

SEQ ID NO: 338951 - DNA, 20 bp, Artificial Sequence
  Description of Artificial Sequence: Synthetic oligonucleotide
  Target: LAMA2; (+) strand; PAM type: YTN; PAM sequence: CTA
tgtgatgatcattgtccgtt

SEQ ID NO: 338952 - DNA, 20 bp, Artificial Sequence
  Description of Artificial Sequence: Synthetic oligonucleotide
  Target: LAMA2; (+) strand; PAM type: YTN; PAM sequence: TTG
tccgttgcttattattttga

SEQ ID NO: 338953 - DNA, 20 bp, Artificial Sequence
  Description of Artificial Sequence: Synthetic oligonucleotide
  Target: LAMA2; (+) strand; PAM type: YTN; PAM sequence: TTG
cttattattttgagactaaa

SEQ ID NO: 338954 - DNA, 20 bp, Artificial Sequence
  Description of Artificial Sequence: Synthetic oligonucleotide
  Target: LAMA2; (+) strand; PAM type: YTN; PAM sequence: CTT
attattttgagactaaagga

SEQ ID NO: 338955 - DNA, 20 bp, Artificial Sequence
  Description of Artificial Sequence: Synthetic oligonucleotide
  Target: LAMA2; (+) strand; PAM type: YTN; PAM sequence: TTA
ttattttgagactaaaggat

SEQ ID NO: 338956 - DNA, 20 bp, Artificial Sequence
  Description of Artificial Sequence: Synthetic oligonucleotide
  Target: LAMA2; (+) strand; PAM type: YTN; PAM sequence: TTA
ttttgagactaaaggattct

SEQ ID NO: 338957 - DNA, 20 bp, Artificial Sequence
  Description of Artificial Sequence: Synthetic oligonucleotide
  Target: LAMA2; (+) strand; PAM type: YTN; PAM sequence: TTT
tgagactaaaggattcttaa

SEQ ID NO: 338958 - DNA, 20 bp, Artificial Sequence
  Description of Artificial Sequence: Synthetic oligonucleotide
  Target: LAMA2; (+) strand; PAM type: YTN; PAM sequence: TTT
gagactaaaggattcttaag

SEQ ID NO: 338959 - DNA, 20 bp, Artificial Sequence
  Description of Artificial Sequence: Synthetic oligonucleotide
  Target: LAMA2; (+) strand; PAM type: YTN; PAM sequence: TTG
agactaaaggattcttaaga

SEQ ID NO: 338960 - DNA, 20 bp, Artificial Sequence
  Description of Artificial Sequence: Synthetic oligonucleotide
  Target: LAMA2; (+) strand; PAM type: YTN; PAM sequence: CTA
aaggattcttaagaaagacc

SEQ ID NO: 338961 - DNA, 20 bp, Artificial Sequence
  Description of Artificial Sequence: Synthetic oligonucleotide
  Target: LAMA2; (+) strand; PAM type: YTN; PAM sequence: TTC
ttaagaaagaccctattctc

SEQ ID NO: 338962 - DNA, 20 bp, Artificial Sequence
  Description of Artificial Sequence: Synthetic oligonucleotide
  Target: LAMA2; (+) strand; PAM type: YTN; PAM sequence: CTT
aagaaagaccctattctcca

SEQ ID NO: 338963 - DNA, 20 bp, Artificial Sequence
  Description of Artificial Sequence: Synthetic oligonucleotide
  Target: LAMA2; (+) strand; PAM type: YTN; PAM sequence: TTA
agaaagaccctattctccat

SEQ ID NO: 338964 - DNA, 20 bp, Artificial Sequence
  Description of Artificial Sequence: Synthetic oligonucleotide
  Target: LAMA2; (+) strand; PAM type: YTN; PAM sequence: CTA
ttctccatttccacactaaa

SEQ ID NO: 338965 - DNA, 20 bp, Artificial Sequence
  Description of Artificial Sequence: Synthetic oligonucleotide
  Target: LAMA2; (+) strand; PAM type: YTN; PAM sequence: TTC
tccatttccacactaaatga

SEQ ID NO: 338966 - DNA, 20 bp, Artificial Sequence
  Description of Artificial Sequence: Synthetic oligonucleotide
  Target: LAMA2; (+) strand; PAM type: YTN; PAM sequence: CTC
catttccacactaaatgaga

SEQ ID NO: 338967 - DNA, 20 bp, Artificial Sequence
  Description of Artificial Sequence: Synthetic oligonucleotide
  Target: LAMA2; (+) strand; PAM type: YTN; PAM sequence: TTT
ccacactaaatgagatcaag

SEQ ID NO: 338968 - DNA, 20 bp, Artificial Sequence
  Description of Artificial Sequence: Synthetic oligonucleotide
  Target: LAMA2; (+) strand; PAM type: YTN; PAM sequence: TTC
cacactaaatgagatcaagt

SEQ ID NO: 338969 - DNA, 20 bp, Artificial Sequence
  Description of Artificial Sequence: Synthetic oligonucleotide
  Target: LAMA2; (+) strand; PAM type: YTN; PAM sequence: CTA
aatgagatcaagttcttaat

SEQ ID NO: 338970 - DNA, 20 bp, Artificial Sequence
  Description of Artificial Sequence: Synthetic oligonucleotide
  Target: LAMA2; (+) strand; PAM type: YTN; PAM sequence: TTC
ttaatactcttcttattata

SEQ ID NO: 338971 - DNA, 20 bp, Artificial Sequence
  Description of Artificial Sequence: Synthetic oligonucleotide
  Target: LAMA2; (+) strand; PAM type: YTN; PAM sequence: CTT
aatactcttcttattatagg

SEQ ID NO: 338972 - DNA, 20 bp, Artificial Sequence
  Description of Artificial Sequence: Synthetic oligonucleotide
  Target: LAMA2; (+) strand; PAM type: YTN; PAM sequence: TTA
atactcttcttattatagga

SEQ ID NO: 338973 - DNA, 20 bp, Artificial Sequence
  Description of Artificial Sequence: Synthetic oligonucleotide
  Target: LAMA2; (+) strand; PAM type: YTN; PAM sequence: CTC
ttcttattataggaggaaca

SEQ ID NO: 338974 - DNA, 20 bp, Artificial Sequence
  Description of Artificial Sequence: Synthetic oligonucleotide
  Target: LAMA2; (+) strand; PAM type: YTN; PAM sequence: CTT
cttattataggaggaacatc

SEQ ID NO: 338975 - DNA, 20 bp, Artificial Sequence
  Description of Artificial Sequence: Synthetic oligonucleotide
  Target: LAMA2; (+) strand; PAM type: YTN; PAM sequence: TTC
ttattataggaggaacatct

SEQ ID NO: 338976 - DNA, 20 bp, Artificial Sequence
  Description of Artificial Sequence: Synthetic oligonucleotide
  Target: LAMA2; (+) strand; PAM type: YTN; PAM sequence: CTT
attataggaggaacatctaa

SEQ ID NO: 338977 - DNA, 20 bp, Artificial Sequence
  Description of Artificial Sequence: Synthetic oligonucleotide
  Target: LAMA2; (+) strand; PAM type: YTN; PAM sequence: TTA
ttataggaggaacatctaat

SEQ ID NO: 338978 - DNA, 20 bp, Artificial Sequence
  Description of Artificial Sequence: Synthetic oligonucleotide
  Target: LAMA2; (+) strand; PAM type: YTN; PAM sequence: TTA
taggaggaacatctaattca

SEQ ID NO: 338979 - DNA, 20 bp, Artificial Sequence
  Description of Artificial Sequence: Synthetic oligonucleotide
  Target: LAMA2; (+) strand; PAM type: YTN; PAM sequence: CTA
attcaatgctacatcagtaa

SEQ ID NO: 338980 - DNA, 20 bp, Artificial Sequence
  Description of Artificial Sequence: Synthetic oligonucleotide
  Target: LAMA2; (+) strand; PAM type: YTN; PAM sequence: TTC
aatgctacatcagtaattaa

SEQ ID NO: 338981 - DNA, 20 bp, Artificial Sequence
  Description of Artificial Sequence: Synthetic oligonucleotide
  Target: LAMA2; (+) strand; PAM type: YTN; PAM sequence: CTA
catcagtaattaaatgatat

SEQ ID NO: 338982 - DNA, 20 bp, Artificial Sequence
  Description of Artificial Sequence: Synthetic oligonucleotide
  Target: LAMA2; (+) strand; PAM type: YTN; PAM sequence: TTA
aatgatattttgttaggtga

SEQ ID NO: 338983 - DNA, 20 bp, Artificial Sequence
  Description of Artificial Sequence: Synthetic oligonucleotide
  Target: LAMA2; (+) strand; PAM type: YTN; PAM sequence: TTT
tgttaggtgacatgcaaatg

SEQ ID NO: 338984 - DNA, 20 bp, Artificial Sequence
  Description of Artificial Sequence: Synthetic oligonucleotide
  Target: LAMA2; (+) strand; PAM type: YTN; PAM sequence: TTT
gttaggtgacatgcaaatga

SEQ ID NO: 338985 - DNA, 20 bp, Artificial Sequence
  Description of Artificial Sequence: Synthetic oligonucleotide
  Target: LAMA2; (+) strand; PAM type: YTN; PAM sequence: TTG
ttaggtgacatgcaaatgag

SEQ ID NO: 338986 - DNA, 20 bp, Artificial Sequence
  Description of Artificial Sequence: Synthetic oligonucleotide
  Target: LAMA2; (+) strand; PAM type: YTN; PAM sequence: TTA
ggtgacatgcaaatgagtaa

SEQ ID NO: 338987 - DNA, 20 bp, Artificial Sequence
  Description of Artificial Sequence: Synthetic oligonucleotide
  Target: LAMA2; (+) strand; PAM type: YTN; PAM sequence: TTC
cctttgttatgtaaattgtc

SEQ ID NO: 338988 - DNA, 20 bp, Artificial Sequence
  Description of Artificial Sequence: Synthetic oligonucleotide
  Target: LAMA2; (+) strand; PAM type: YTN; PAM sequence: CTT
tgttatgtaaattgtcaaac

SEQ ID NO: 338989 - DNA, 20 bp, Artificial Sequence
  Description of Artificial Sequence: Synthetic oligonucleotide
  Target: LAMA2; (+) strand; PAM type: YTN; PAM sequence: TTT
gttatgtaaattgtcaaaca

SEQ ID NO: 338990 - DNA, 20 bp, Artificial Sequence
  Description of Artificial Sequence: Synthetic oligonucleotide
  Target: LAMA2; (+) strand; PAM type: YTN; PAM sequence: TTG
ttatgtaaattgtcaaacac

SEQ ID NO: 338991 - DNA, 20 bp, Artificial Sequence
  Description of Artificial Sequence: Synthetic oligonucleotide
  Target: LAMA2; (+) strand; PAM type: YTN; PAM sequence: TTA
tgtaaattgtcaaacacttg

SEQ ID NO: 338992 - DNA, 20 bp, Artificial Sequence
  Description of Artificial Sequence: Synthetic oligonucleotide
  Target: LAMA2; (+) strand; PAM type: YTN; PAM sequence: TTG
tcaaacacttgatattgttt

SEQ ID NO: 338993 - DNA, 20 bp, Artificial Sequence
  Description of Artificial Sequence: Synthetic oligonucleotide
  Target: LAMA2; (+) strand; PAM type: YTN; PAM sequence: CTT
gatattgtttttaaagttat

SEQ ID NO: 338994 - DNA, 20 bp, Artificial Sequence
  Description of Artificial Sequence: Synthetic oligonucleotide
  Target: LAMA2; (+) strand; PAM type: YTN; PAM sequence: TTG
atattgtttttaaagttatt

SEQ ID NO: 338995 - DNA, 20 bp, Artificial Sequence
  Description of Artificial Sequence: Synthetic oligonucleotide
  Target: LAMA2; (+) strand; PAM type: YTN; PAM sequence: TTG
tttttaaagttatttgggat

SEQ ID NO: 338996 - DNA, 20 bp, Artificial Sequence
  Description of Artificial Sequence: Synthetic oligonucleotide
  Target: LAMA2; (+) strand; PAM type: YTN; PAM sequence: TTT
ttaaagttatttgggatttt

SEQ ID NO: 338997 - DNA, 20 bp, Artificial Sequence
  Description of Artificial Sequence: Synthetic oligonucleotide
  Target: LAMA2; (+) strand; PAM type: YTN; PAM sequence: TTT
taaagttatttgggattttt

SEQ ID NO: 338998 - DNA, 20 bp, Artificial Sequence
  Description of Artificial Sequence: Synthetic oligonucleotide
  Target: LAMA2; (+) strand; PAM type: YTN; PAM sequence: TTT
aaagttatttgggatttttt

SEQ ID NO: 338999 - DNA, 20 bp, Artificial Sequence
  Description of Artificial Sequence: Synthetic oligonucleotide
  Target: LAMA2; (+) strand; PAM type: YTN; PAM sequence: TTA
aagttatttgggattttttt

SEQ ID NO: 339000 - DNA, 20 bp, Artificial Sequence
  Description of Artificial Sequence: Synthetic oligonucleotide
  Target: LAMA2; (+) strand; PAM type: YTN; PAM sequence: TTA
tttgggatttttttaagaca

SEQ ID NO: 339001 - DNA, 20 bp, Artificial Sequence
  Description of Artificial Sequence: Synthetic oligonucleotide
  Target: LAMA2; (+) strand; PAM type: YTN; PAM sequence: TTT
gggatttttttaagacacca

SEQ ID NO: 339002 - DNA, 20 bp, Artificial Sequence
  Description of Artificial Sequence: Synthetic oligonucleotide
  Target: LAMA2; (+) strand; PAM type: YTN; PAM sequence: TTG
ggatttttttaagacaccaa

SEQ ID NO: 339003 - DNA, 20 bp, Artificial Sequence
  Description of Artificial Sequence: Synthetic oligonucleotide
  Target: LAMA2; (+) strand; PAM type: YTN; PAM sequence: TTT
ttttaagacaccaagtttgt

SEQ ID NO: 339004 - DNA, 20 bp, Artificial Sequence
  Description of Artificial Sequence: Synthetic oligonucleotide
  Target: LAMA2; (+) strand; PAM type: YTN; PAM sequence: TTT
tttaagacaccaagtttgta

SEQ ID NO: 339005 - DNA, 20 bp, Artificial Sequence
  Description of Artificial Sequence: Synthetic oligonucleotide
  Target: LAMA2; (+) strand; PAM type: YTN; PAM sequence: TTT
ttaagacaccaagtttgtaa

SEQ ID NO: 339006 - DNA, 20 bp, Artificial Sequence
  Description of Artificial Sequence: Synthetic oligonucleotide
  Target: LAMA2; (+) strand; PAM type: YTN; PAM sequence: TTT
taagacaccaagtttgtaac

SEQ ID NO: 339007 - DNA, 20 bp, Artificial Sequence
  Description of Artificial Sequence: Synthetic oligonucleotide
  Target: LAMA2; (+) strand; PAM type: YTN; PAM sequence: TTT
aagacaccaagtttgtaaca

SEQ ID NO: 339008 - DNA, 20 bp, Artificial Sequence
  Description of Artificial Sequence: Synthetic oligonucleotide
  Target: LAMA2; (+) strand; PAM type: YTN; PAM sequence: TTA
agacaccaagtttgtaacaa

SEQ ID NO: 339009 - DNA, 20 bp, Artificial Sequence
  Description of Artificial Sequence: Synthetic oligonucleotide
  Target: LAMA2; (+) strand; PAM type: YTN; PAM sequence: TTT
gtaacaagtgcccttcaaca

SEQ ID NO: 339010 - DNA, 20 bp, Artificial Sequence
  Description of Artificial Sequence: Synthetic oligonucleotide
  Target: LAMA2; (+) strand; PAM type: YTN; PAM sequence: TTG
taacaagtgcccttcaacag

SEQ ID NO: 339011 - DNA, 20 bp, Artificial Sequence
  Description of Artificial Sequence: Synthetic oligonucleotide
  Target: LAMA2; (+) strand; PAM type: YTN; PAM sequence: CTT
caacagaaaagacacttgga

SEQ ID NO: 339012 - DNA, 20 bp, Artificial Sequence
  Description of Artificial Sequence: Synthetic oligonucleotide
  Target: LAMA2; (+) strand; PAM type: YTN; PAM sequence: TTC
aacagaaaagacacttggat

SEQ ID NO: 339013 - DNA, 20 bp, Artificial Sequence
  Description of Artificial Sequence: Synthetic oligonucleotide
  Target: LAMA2; (+) strand; PAM type: YTN; PAM sequence: CTT
ggatatcatgagatgttctc

SEQ ID NO: 339014 - DNA, 20 bp, Artificial Sequence
  Description of Artificial Sequence: Synthetic oligonucleotide
  Target: LAMA2; (+) strand; PAM type: YTN; PAM sequence: TTG
gatatcatgagatgttctct

SEQ ID NO: 339015 - DNA, 20 bp, Artificial Sequence
  Description of Artificial Sequence: Synthetic oligonucleotide
  Target: LAMA2; (+) strand; PAM type: YTN; PAM sequence: TTC
tcttaggttcctcaaagcct

SEQ ID NO: 339016 - DNA, 20 bp, Artificial Sequence
  Description of Artificial Sequence: Synthetic oligonucleotide
  Target: LAMA2; (+) strand; PAM type: YTN; PAM sequence: CTC
ttaggttcctcaaagcctag

SEQ ID NO: 339017 - DNA, 20 bp, Artificial Sequence
  Description of Artificial Sequence: Synthetic oligonucleotide
  Target: LAMA2; (+) strand; PAM type: YTN; PAM sequence: CTT
aggttcctcaaagcctagca

SEQ ID NO: 339018 - DNA, 20 bp, Artificial Sequence
  Description of Artificial Sequence: Synthetic oligonucleotide
  Target: LAMA2; (+) strand; PAM type: YTN; PAM sequence: TTA
ggttcctcaaagcctagcag

SEQ ID NO: 339019 - DNA, 20 bp, Artificial Sequence
  Description of Artificial Sequence: Synthetic oligonucleotide
  Target: LAMA2; (+) strand; PAM type: YTN; PAM sequence: TTC
ctcaaagcctagcagtcata

SEQ ID NO: 339020 - DNA, 20 bp, Artificial Sequence
  Description of Artificial Sequence: Synthetic oligonucleotide
  Target: LAMA2; (+) strand; PAM type: YTN; PAM sequence: CTC
aaagcctagcagtcatagca

SEQ ID NO: 339021 - DNA, 20 bp, Artificial Sequence
  Description of Artificial Sequence: Synthetic oligonucleotide
  Target: LAMA2; (+) strand; PAM type: YTN; PAM sequence: CTA
gcagtcatagcattttaata

SEQ ID NO: 339022 - DNA, 20 bp, Artificial Sequence
  Description of Artificial Sequence: Synthetic oligonucleotide
  Target: LAMA2; (+) strand; PAM type: YTN; PAM sequence: TTT
taatacttactagtggggag

SEQ ID NO: 339023 - DNA, 20 bp, Artificial Sequence
  Description of Artificial Sequence: Synthetic oligonucleotide
  Target: LAMA2; (+) strand; PAM type: YTN; PAM sequence: TTT
aatacttactagtggggagt

SEQ ID NO: 339024 - DNA, 20 bp, Artificial Sequence
  Description of Artificial Sequence: Synthetic oligonucleotide
  Target: LAMA2; (+) strand; PAM type: YTN; PAM sequence: TTA
atacttactagtggggagtc

SEQ ID NO: 339025 - DNA, 20 bp, Artificial Sequence
  Description of Artificial Sequence: Synthetic oligonucleotide
  Target: LAMA2; (+) strand; PAM type: YTN; PAM sequence: CTT
actagtggggagtctgcctt

SEQ ID NO: 339026 - DNA, 20 bp, Artificial Sequence
  Description of Artificial Sequence: Synthetic oligonucleotide
  Target: LAMA2; (+) strand; PAM type: YTN; PAM sequence: TTA
ctagtggggagtctgccttc

SEQ ID NO: 339027 - DNA, 20 bp, Artificial Sequence
  Description of Artificial Sequence: Synthetic oligonucleotide
  Target: LAMA2; (+) strand; PAM type: YTN; PAM sequence: CTA
gtggggagtctgccttccct

SEQ ID NO: 339028 - DNA, 20 bp, Artificial Sequence
  Description of Artificial Sequence: Synthetic oligonucleotide
  Target: LAMA2; (+) strand; PAM type: YTN; PAM sequence: CTG
ccttccctgctgcacaccag

SEQ ID NO: 339029 - DNA, 20 bp, Artificial Sequence
  Description of Artificial Sequence: Synthetic oligonucleotide
  Target: LAMA2; (+) strand; PAM type: YTN; PAM sequence: CTT
ccctgctgcacaccagaaca

SEQ ID NO: 339030 - DNA, 20 bp, Artificial Sequence
  Description of Artificial Sequence: Synthetic oligonucleotide
  Target: LAMA2; (+) strand; PAM type: YTN; PAM sequence: TTC
cctgctgcacaccagaacag

SEQ ID NO: 339031 - DNA, 20 bp, Artificial Sequence
  Description of Artificial Sequence: Synthetic oligonucleotide
  Target: LAMA2; (+) strand; PAM type: YTN; PAM sequence: CTG
ctgcacaccagaacagactg

SEQ ID NO: 339032 - DNA, 20 bp, Artificial Sequence
  Description of Artificial Sequence: Synthetic oligonucleotide
  Target: LAMA2; (+) strand; PAM type: YTN; PAM sequence: CTG
cacaccagaacagactgggg

SEQ ID NO: 339033 - DNA, 20 bp, Artificial Sequence
  Description of Artificial Sequence: Synthetic oligonucleotide
  Target: LAMA2; (+) strand; PAM type: YTN; PAM sequence: CTG
gggtgggggttaatcatctg

SEQ ID NO: 339034 - DNA, 20 bp, Artificial Sequence
  Description of Artificial Sequence: Synthetic oligonucleotide
  Target: LAMA2; (+) strand; PAM type: YTN; PAM sequence: TTA
atcatctggaaatgaggtat

SEQ ID NO: 339035 - DNA, 20 bp, Artificial Sequence
  Description of Artificial Sequence: Synthetic oligonucleotide
  Target: LAMA2; (+) strand; PAM type: YTN; PAM sequence: CTG
gaaatgaggtattataacta

SEQ ID NO: 339036 - DNA, 20 bp, Artificial Sequence
  Description of Artificial Sequence: Synthetic oligonucleotide
  Target: LAMA2; (+) strand; PAM type: YTN; PAM sequence: TTA
taactactgattttgaagag

SEQ ID NO: 339037 - DNA, 20 bp, Artificial Sequence
  Description of Artificial Sequence: Synthetic oligonucleotide
  Target: LAMA2; (+) strand; PAM type: YTN; PAM sequence: CTA
ctgattttgaagagtcttta

SEQ ID NO: 339038 - DNA, 20 bp, Artificial Sequence
  Description of Artificial Sequence: Synthetic oligonucleotide
  Target: LAMA2; (+) strand; PAM type: YTN; PAM sequence: CTG
attttgaagagtctttataa

SEQ ID NO: 339039 - DNA, 20 bp, Artificial Sequence
  Description of Artificial Sequence: Synthetic oligonucleotide
  Target: LAMA2; (+) strand; PAM type: YTN; PAM sequence: TTT
tgaagagtctttataatgaa

SEQ ID NO: 339040 - DNA, 20 bp, Artificial Sequence
  Description of Artificial Sequence: Synthetic oligonucleotide
  Target: LAMA2; (+) strand; PAM type: YTN; PAM sequence: TTT
gaagagtctttataatgaaa

SEQ ID NO: 339041 - DNA, 20 bp, Artificial Sequence
  Description of Artificial Sequence: Synthetic oligonucleotide
  Target: LAMA2; (+) strand; PAM type: YTN; PAM sequence: TTG
aagagtctttataatgaaaa

SEQ ID NO: 339042 - DNA, 20 bp, Artificial Sequence
  Description of Artificial Sequence: Synthetic oligonucleotide
  Target: LAMA2; (+) strand; PAM type: YTN; PAM sequence: CTT
tataatgaaaacaagacaca

SEQ ID NO: 339043 - DNA, 20 bp, Artificial Sequence
  Description of Artificial Sequence: Synthetic oligonucleotide
  Target: LAMA2; (+) strand; PAM type: YTN; PAM sequence: TTT
ataatgaaaacaagacacag

SEQ ID NO: 339044 - DNA, 20 bp, Artificial Sequence
  Description of Artificial Sequence: Synthetic oligonucleotide
  Target: LAMA2; (+) strand; PAM type: YTN; PAM sequence: TTA
taatgaaaacaagacacagt

SEQ ID NO: 339045 - DNA, 20 bp, Artificial Sequence
  Description of Artificial Sequence: Synthetic oligonucleotide
  Target: LAMA2; (+) strand; PAM type: YTN; PAM sequence: TTA
ataaaagtagcatagaaaac

SEQ ID NO: 339046 - DNA, 20 bp, Artificial Sequence
  Description of Artificial Sequence: Synthetic oligonucleotide
  Target: LAMA2; (+) strand; PAM type: YTN; PAM sequence: TTA
gagagttattttattagggc

SEQ ID NO: 339047 - DNA, 20 bp, Artificial Sequence
  Description of Artificial Sequence: Synthetic oligonucleotide
  Target: LAMA2; (+) strand; PAM type: YTN; PAM sequence: TTA
ttttattagggccattaaat

SEQ ID NO: 339048 - DNA, 20 bp, Artificial Sequence
  Description of Artificial Sequence: Synthetic oligonucleotide
  Target: LAMA2; (+) strand; PAM type: YTN; PAM sequence: TTT
tattagggccattaaatatt

SEQ ID NO: 339049 - DNA, 20 bp, Artificial Sequence
  Description of Artificial Sequence: Synthetic oligonucleotide
  Target: LAMA2; (+) strand; PAM type: YTN; PAM sequence: TTT
attagggccattaaatattt

SEQ ID NO: 339050 - DNA, 20 bp, Artificial Sequence
  Description of Artificial Sequence: Synthetic oligonucleotide
  Target: LAMA2; (+) strand; PAM type: YTN; PAM sequence: TTA
ttagggccattaaatatttg

SEQ ID NO: 339051 - DNA, 20 bp, Artificial Sequence
  Description of Artificial Sequence: Synthetic oligonucleotide
  Target: LAMA2; (+) strand; PAM type: YTN; PAM sequence: TTA
gggccattaaatatttggag

SEQ ID NO: 339052 - DNA, 20 bp, Artificial Sequence
  Description of Artificial Sequence: Synthetic oligonucleotide
  Target: LAMA2; (+) strand; PAM type: YTN; PAM sequence: TTA
aatatttggagtacagtact

SEQ ID NO: 339053 - DNA, 20 bp, Artificial Sequence
  Description of Artificial Sequence: Synthetic oligonucleotide
  Target: LAMA2; (+) strand; PAM type: YTN; PAM sequence: TTT
ggagtacagtacttagaaaa

SEQ ID NO: 339054 - DNA, 20 bp, Artificial Sequence
  Description of Artificial Sequence: Synthetic oligonucleotide
  Target: LAMA2; (+) strand; PAM type: YTN; PAM sequence: TTG
gagtacagtacttagaaaat

SEQ ID NO: 339055 - DNA, 20 bp, Artificial Sequence
  Description of Artificial Sequence: Synthetic oligonucleotide
  Target: LAMA2; (+) strand; PAM type: YTN; PAM sequence: CTT
agaaaatcactgttaaaatt

SEQ ID NO: 339056 - DNA, 20 bp, Artificial Sequence
  Description of Artificial Sequence: Synthetic oligonucleotide
  Target: LAMA2; (+) strand; PAM type: YTN; PAM sequence: TTA
gaaaatcactgttaaaattg

SEQ ID NO: 339057 - DNA, 20 bp, Artificial Sequence
  Description of Artificial Sequence: Synthetic oligonucleotide
  Target: LAMA2; (+) strand; PAM type: YTN; PAM sequence: CTG
ttaaaattgttacagttact

SEQ ID NO: 339058 - DNA, 20 bp, Artificial Sequence
  Description of Artificial Sequence: Synthetic oligonucleotide
  Target: LAMA2; (+) strand; PAM type: YTN; PAM sequence: TTA
aaattgttacagttactctc

SEQ ID NO: 339059 - DNA, 20 bp, Artificial Sequence
  Description of Artificial Sequence: Synthetic oligonucleotide
  Target: LAMA2; (+) strand; PAM type: YTN; PAM sequence: TTG
ttacagttactctctgaagc

SEQ ID NO: 339060 - DNA, 20 bp, Artificial Sequence
  Description of Artificial Sequence: Synthetic oligonucleotide
  Target: LAMA2; (+) strand; PAM type: YTN; PAM sequence: TTA
cagttactctctgaagcctg

SEQ ID NO: 339061 - DNA, 20 bp, Artificial Sequence
  Description of Artificial Sequence: Synthetic oligonucleotide
  Target: LAMA2; (+) strand; PAM type: YTN; PAM sequence: TTA
ctctctgaagcctgctaaga

SEQ ID NO: 339062 - DNA, 20 bp, Artificial Sequence
  Description of Artificial Sequence: Synthetic oligonucleotide
  Target: LAMA2; (+) strand; PAM type: YTN; PAM sequence: CTC
tctgaagcctgctaagaata

SEQ ID NO: 339063 - DNA, 20 bp, Artificial Sequence
  Description of Artificial Sequence: Synthetic oligonucleotide
  Target: LAMA2; (+) strand; PAM type: YTN; PAM sequence: CTC
tgaagcctgctaagaatact

SEQ ID NO: 339064 - DNA, 20 bp, Artificial Sequence
  Description of Artificial Sequence: Synthetic oligonucleotide
  Target: LAMA2; (+) strand; PAM type: YTN; PAM sequence: CTG
aagcctgctaagaatactgc

SEQ ID NO: 339065 - DNA, 20 bp, Artificial Sequence
  Description of Artificial Sequence: Synthetic oligonucleotide
  Target: LAMA2; (+) strand; PAM type: YTN; PAM sequence: CTG
ctaagaatactgctatttat

SEQ ID NO: 339066 - DNA, 20 bp, Artificial Sequence
  Description of Artificial Sequence: Synthetic oligonucleotide
  Target: LAMA2; (+) strand; PAM type: YTN; PAM sequence: CTA
agaatactgctatttattac

SEQ ID NO: 339067 - DNA, 20 bp, Artificial Sequence
  Description of Artificial Sequence: Synthetic oligonucleotide
  Target: LAMA2; (+) strand; PAM type: YTN; PAM sequence: CTG
ctatttattacatttttaat

SEQ ID NO: 339068 - DNA, 20 bp, Artificial Sequence
  Description of Artificial Sequence: Synthetic oligonucleotide
  Target: LAMA2; (+) strand; PAM type: YTN; PAM sequence: CTA
tttattacatttttaataat

SEQ ID NO: 339069 - DNA, 20 bp, Artificial Sequence
  Description of Artificial Sequence: Synthetic oligonucleotide
  Target: LAMA2; (+) strand; PAM type: YTN; PAM sequence: TTT
attacatttttaataatgct

SEQ ID NO: 339070 - DNA, 20 bp, Artificial Sequence
  Description of Artificial Sequence: Synthetic oligonucleotide
  Target: LAMA2; (+) strand; PAM type: YTN; PAM sequence: TTA
ttacatttttaataatgcta

SEQ ID NO: 339071 - DNA, 20 bp, Artificial Sequence
  Description of Artificial Sequence: Synthetic oligonucleotide
  Target: LAMA2; (+) strand; PAM type: YTN; PAM sequence: TTA
catttttaataatgctattc

SEQ ID NO: 339072 - DNA, 20 bp, Artificial Sequence
  Description of Artificial Sequence: Synthetic oligonucleotide
  Target: LAMA2; (+) strand; PAM type: YTN; PAM sequence: TTT
ttaataatgctattcactac

SEQ ID NO: 339073 - DNA, 20 bp, Artificial Sequence
  Description of Artificial Sequence: Synthetic oligonucleotide
  Target: LAMA2; (+) strand; PAM type: YTN; PAM sequence: TTT
taataatgctattcactaca

SEQ ID NO: 339074 - DNA, 20 bp, Artificial Sequence
  Description of Artificial Sequence: Synthetic oligonucleotide
  Target: LAMA2; (+) strand; PAM type: YTN; PAM sequence: TTT
aataatgctattcactacat

SEQ ID NO: 339075 - DNA, 20 bp, Artificial Sequence
  Description of Artificial Sequence: Synthetic oligonucleotide
  Target: LAMA2; (+) strand; PAM type: YTN; PAM sequence: TTA
ataatgctattcactacatt

SEQ ID NO: 339076 - DNA, 20 bp, Artificial Sequence
  Description of Artificial Sequence: Synthetic oligonucleotide
  Target: LAMA2; (+) strand; PAM type: YTN; PAM sequence: CTA
ttcactacattttaaaagtt

SEQ ID NO: 339077 - DNA, 20 bp, Artificial Sequence
  Description of Artificial Sequence: Synthetic oligonucleotide
  Target: LAMA2; (+) strand; PAM type: YTN; PAM sequence: TTC
actacattttaaaagtttac

SEQ ID NO: 339078 - DNA, 20 bp, Artificial Sequence
  Description of Artificial Sequence: Synthetic oligonucleotide
  Target: LAMA2; (+) strand; PAM type: YTN; PAM sequence: CTA
cattttaaaagtttactcaa

SEQ ID NO: 339079 - DNA, 20 bp, Artificial Sequence
  Description of Artificial Sequence: Synthetic oligonucleotide
  Target: LAMA2; (+) strand; PAM type: YTN; PAM sequence: TTT
taaaagtttactcaaaaact

SEQ ID NO: 339080 - DNA, 20 bp, Artificial Sequence
  Description of Artificial Sequence: Synthetic oligonucleotide
  Target: LAMA2; (+) strand; PAM type: YTN; PAM sequence: TTT
aaaagtttactcaaaaacta

SEQ ID NO: 339081 - DNA, 20 bp, Artificial Sequence
  Description of Artificial Sequence: Synthetic oligonucleotide
  Target: LAMA2; (+) strand; PAM type: YTN; PAM sequence: TTA
aaagtttactcaaaaactac

SEQ ID NO: 339082 - DNA, 20 bp, Artificial Sequence
  Description of Artificial Sequence: Synthetic oligonucleotide
  Target: LAMA2; (+) strand; PAM type: YTN; PAM sequence: TTT
actcaaaaactacatgactt

SEQ ID NO: 339083 - DNA, 20 bp, Artificial Sequence
  Description of Artificial Sequence: Synthetic oligonucleotide
  Target: LAMA2; (+) strand; PAM type: YTN; PAM sequence: TTA
ctcaaaaactacatgacttt

SEQ ID NO: 339084 - DNA, 20 bp, Artificial Sequence
  Description of Artificial Sequence: Synthetic oligonucleotide
  Target: LAMA2; (+) strand; PAM type: YTN; PAM sequence: CTC
aaaaactacatgactttcaa

SEQ ID NO: 339085 - DNA, 20 bp, Artificial Sequence
  Description of Artificial Sequence: Synthetic oligonucleotide
  Target: LAMA2; (+) strand; PAM type: YTN; PAM sequence: CTA
catgactttcaagtcattta

SEQ ID NO: 339086 - DNA, 20 bp, Artificial Sequence
  Description of Artificial Sequence: Synthetic oligonucleotide
  Target: LAMA2; (+) strand; PAM type: YTN; PAM sequence: CTT
tcaagtcatttaagaagtcc

SEQ ID NO: 339087 - DNA, 20 bp, Artificial Sequence
  Description of Artificial Sequence: Synthetic oligonucleotide
  Target: LAMA2; (+) strand; PAM type: YTN; PAM sequence: TTT
caagtcatttaagaagtcca

SEQ ID NO: 339088 - DNA, 20 bp, Artificial Sequence
  Description of Artificial Sequence: Synthetic oligonucleotide
  Target: LAMA2; (+) strand; PAM type: YTN; PAM sequence: TTC
aagtcatttaagaagtccaa

SEQ ID NO: 339089 - DNA, 20 bp, Artificial Sequence
  Description of Artificial Sequence: Synthetic oligonucleotide
  Target: LAMA2; (+) strand; PAM type: YTN; PAM sequence: TTT
aagaagtccaaaagaaattc

SEQ ID NO: 339090 - DNA, 20 bp, Artificial Sequence
  Description of Artificial Sequence: Synthetic oligonucleotide
  Target: LAMA2; (+) strand; PAM type: YTN; PAM sequence: TTA
agaagtccaaaagaaattcc

SEQ ID NO: 339091 - DNA, 20 bp, Artificial Sequence
  Description of Artificial Sequence: Synthetic oligonucleotide
  Target: LAMA2; (+) strand; PAM type: YTN; PAM sequence: TTC
catgccaacaaatttaatta

SEQ ID NO: 339092 - DNA, 20 bp, Artificial Sequence
  Description of Artificial Sequence: Synthetic oligonucleotide
  Target: LAMA2; (+) strand; PAM type: YTN; PAM sequence: TTT
aattaattttgcatggaatg

SEQ ID NO: 339093 - DNA, 20 bp, Artificial Sequence
  Description of Artificial Sequence: Synthetic oligonucleotide
  Target: LAMA2; (+) strand; PAM type: YTN; PAM sequence: TTA
attaattttgcatggaatgt

SEQ ID NO: 339094 - DNA, 20 bp, Artificial Sequence
  Description of Artificial Sequence: Synthetic oligonucleotide
  Target: LAMA2; (+) strand; PAM type: YTN; PAM sequence: TTA
attttgcatggaatgtgaaa

SEQ ID NO: 339095 - DNA, 20 bp, Artificial Sequence
  Description of Artificial Sequence: Synthetic oligonucleotide
  Target: LAMA2; (+) strand; PAM type: YTN; PAM sequence: TTT
tgcatggaatgtgaaagaac

SEQ ID NO: 339096 - DNA, 20 bp, Artificial Sequence
  Description of Artificial Sequence: Synthetic oligonucleotide
  Target: LAMA2; (+) strand; PAM type: YTN; PAM sequence: TTT
gcatggaatgtgaaagaacc

SEQ ID NO: 339097 - DNA, 20 bp, Artificial Sequence
  Description of Artificial Sequence: Synthetic oligonucleotide
  Target: LAMA2; (+) strand; PAM type: YTN; PAM sequence: TTG
catggaatgtgaaagaaccc

SEQ ID NO: 339098 - DNA, 20 bp, Artificial Sequence
  Description of Artificial Sequence: Synthetic oligonucleotide
  Target: LAMA2; (+) strand; PAM type: YTN; PAM sequence: TTG
ttttgaaatgggactcattc

SEQ ID NO: 339099 - DNA, 20 bp, Artificial Sequence
  Description of Artificial Sequence: Synthetic oligonucleotide
  Target: LAMA2; (+) strand; PAM type: YTN; PAM sequence: TTT
tgaaatgggactcattcagt

SEQ ID NO: 339100 - DNA, 20 bp, Artificial Sequence
  Description of Artificial Sequence: Synthetic oligonucleotide
  Target: LAMA2; (+) strand; PAM type: YTN; PAM sequence: TTT
gaaatgggactcattcagtc

SEQ ID NO: 339101 - DNA, 20 bp, Artificial Sequence
  Description of Artificial Sequence: Synthetic oligonucleotide
  Target: LAMA2; (+) strand; PAM type: YTN; PAM sequence: TTG
aaatgggactcattcagtct

SEQ ID NO: 339102 - DNA, 20 bp, Artificial Sequence
  Description of Artificial Sequence: Synthetic oligonucleotide
  Target: LAMA2; (+) strand; PAM type: YTN; PAM sequence: CTC
attcagtcttctgtaaggcg

SEQ ID NO: 339103 - DNA, 20 bp, Artificial Sequence
  Description of Artificial Sequence: Synthetic oligonucleotide
  Target: LAMA2; (+) strand; PAM type: YTN; PAM sequence: TTC
agtcttctgtaaggcggtga

SEQ ID NO: 339104 - DNA, 20 bp, Artificial Sequence
  Description of Artificial Sequence: Synthetic oligonucleotide
  Target: LAMA2; (+) strand; PAM type: YTN; PAM sequence: CTT
ctgtaaggcggtgactgctt

SEQ ID NO: 339105 - DNA, 20 bp, Artificial Sequence
  Description of Artificial Sequence: Synthetic oligonucleotide
  Target: LAMA2; (+) strand; PAM type: YTN; PAM sequence: TTC
tgtaaggcggtgactgcttt

SEQ ID NO: 339106 - DNA, 20 bp, Artificial Sequence
  Description of Artificial Sequence: Synthetic oligonucleotide
  Target: LAMA2; (+) strand; PAM type: YTN; PAM sequence: CTG
taaggcggtgactgcttttc

SEQ ID NO: 339107 - DNA, 20 bp, Artificial Sequence
  Description of Artificial Sequence: Synthetic oligonucleotide
  Target: LAMA2; (+) strand; PAM type: YTN; PAM sequence: CTG
cttttccgtgtcactgctgg

SEQ ID NO: 339108 - DNA, 20 bp, Artificial Sequence
  Description of Artificial Sequence: Synthetic oligonucleotide
  Target: LAMA2; (+) strand; PAM type: YTN; PAM sequence: CTT
ttccgtgtcactgctggcag

SEQ ID NO: 339109 - DNA, 20 bp, Artificial Sequence
  Description of Artificial Sequence: Synthetic oligonucleotide
  Target: LAMA2; (+) strand; PAM type: YTN; PAM sequence: TTT
tccgtgtcactgctggcagt

SEQ ID NO: 339110 - DNA, 20 bp, Artificial Sequence
  Description of Artificial Sequence: Synthetic oligonucleotide
  Target: LAMA2; (+) strand; PAM type: YTN; PAM sequence: TTT
ccgtgtcactgctggcagtt

SEQ ID NO: 339111 - DNA, 20 bp, Artificial Sequence
  Description of Artificial Sequence: Synthetic oligonucleotide
  Target: LAMA2; (+) strand; PAM type: YTN; PAM sequence: TTC
cgtgtcactgctggcagtta

SEQ ID NO: 339112 - DNA, 20 bp, Artificial Sequence
  Description of Artificial Sequence: Synthetic oligonucleotide
  Target: LAMA2; (+) strand; PAM type: YTN; PAM sequence: CTG
ctggcagttatgttgaatta

SEQ ID NO: 339113 - DNA, 20 bp, Artificial Sequence
  Description of Artificial Sequence: Synthetic oligonucleotide
  Target: LAMA2; (+) strand; PAM type: YTN; PAM sequence: CTG
gcagttatgttgaattatag

SEQ ID NO: 339114 - DNA, 20 bp, Artificial Sequence
  Description of Artificial Sequence: Synthetic oligonucleotide
  Target: LAMA2; (+) strand; PAM type: YTN; PAM sequence: TTA
tgttgaattatagaaagagt

SEQ ID NO: 339115 - DNA, 20 bp, Artificial Sequence
  Description of Artificial Sequence: Synthetic oligonucleotide
  Target: LAMA2; (+) strand; PAM type: YTN; PAM sequence: TTG
aattatagaaagagtctgtg

SEQ ID NO: 339116 - DNA, 20 bp, Artificial Sequence
  Description of Artificial Sequence: Synthetic oligonucleotide
  Target: LAMA2; (+) strand; PAM type: YTN; PAM sequence: TTA
tagaaagagtctgtggggtc

SEQ ID NO: 339117 - DNA, 20 bp, Artificial Sequence
  Description of Artificial Sequence: Synthetic oligonucleotide
  Target: LAMA2; (+) strand; PAM type: YTN; PAM sequence: CTG
tggggtctctagtagaactt

SEQ ID NO: 339118 - DNA, 20 bp, Artificial Sequence
  Description of Artificial Sequence: Synthetic oligonucleotide
  Target: LAMA2; (+) strand; PAM type: YTN; PAM sequence: CTC
tagtagaacttctcttcgtg

SEQ ID NO: 339119 - DNA, 20 bp, Artificial Sequence
  Description of Artificial Sequence: Synthetic oligonucleotide
  Target: LAMA2; (+) strand; PAM type: YTN; PAM sequence: CTA
gtagaacttctcttcgtgga

SEQ ID NO: 339120 - DNA, 20 bp, Artificial Sequence
  Description of Artificial Sequence: Synthetic oligonucleotide
  Target: LAMA2; (+) strand; PAM type: YTN; PAM sequence: CTT
ctcttcgtggattattttta

SEQ ID NO: 339121 - DNA, 20 bp, Artificial Sequence
  Description of Artificial Sequence: Synthetic oligonucleotide
  Target: LAMA2; (+) strand; PAM type: YTN; PAM sequence: TTC
tcttcgtggattatttttat

SEQ ID NO: 339122 - DNA, 20 bp, Artificial Sequence
  Description of Artificial Sequence: Synthetic oligonucleotide
  Target: LAMA2; (+) strand; PAM type: YTN; PAM sequence: CTC
ttcgtggattatttttatct

SEQ ID NO: 339123 - DNA, 20 bp, Artificial Sequence
  Description of Artificial Sequence: Synthetic oligonucleotide
  Target: LAMA2; (+) strand; PAM type: YTN; PAM sequence: CTT
cgtggattatttttatctat

SEQ ID NO: 339124 - DNA, 20 bp, Artificial Sequence
  Description of Artificial Sequence: Synthetic oligonucleotide
  Target: LAMA2; (+) strand; PAM type: YTN; PAM sequence: TTC
gtggattatttttatctatt

SEQ ID NO: 339125 - DNA, 20 bp, Artificial Sequence
  Description of Artificial Sequence: Synthetic oligonucleotide
  Target: LAMA2; (+) strand; PAM type: YTN; PAM sequence: TTA
tttttatctattattccaga

SEQ ID NO: 339126 - DNA, 20 bp, Artificial Sequence
  Description of Artificial Sequence: Synthetic oligonucleotide
  Target: LAMA2; (+) strand; PAM type: YTN; PAM sequence: TTT
ttatctattattccagagcc

SEQ ID NO: 339127 - DNA, 20 bp, Artificial Sequence
  Description of Artificial Sequence: Synthetic oligonucleotide
  Target: LAMA2; (+) strand; PAM type: YTN; PAM sequence: TTT
tatctattattccagagcca

SEQ ID NO: 339128 - DNA, 20 bp, Artificial Sequence
  Description of Artificial Sequence: Synthetic oligonucleotide
  Target: LAMA2; (+) strand; PAM type: YTN; PAM sequence: TTT
atctattattccagagccaa

SEQ ID NO: 339129 - DNA, 20 bp, Artificial Sequence
  Description of Artificial Sequence: Synthetic oligonucleotide
  Target: LAMA2; (+) strand; PAM type: YTN; PAM sequence: TTA
tctattattccagagccaac

SEQ ID NO: 339130 - DNA, 20 bp, Artificial Sequence
  Description of Artificial Sequence: Synthetic oligonucleotide
  Target: LAMA2; (+) strand; PAM type: YTN; PAM sequence: CTA
ttattccagagccaacacag

SEQ ID NO: 339131 - DNA, 20 bp, Artificial Sequence
  Description of Artificial Sequence: Synthetic oligonucleotide
  Target: LAMA2; (+) strand; PAM type: YTN; PAM sequence: TTA
ttccagagccaacacaggag

SEQ ID NO: 339132 - DNA, 20 bp, Artificial Sequence
  Description of Artificial Sequence: Synthetic oligonucleotide
  Target: LAMA2; (+) strand; PAM type: YTN; PAM sequence: TTC
cagagccaacacaggagcta

SEQ ID NO: 339133 - DNA, 20 bp, Artificial Sequence
  Description of Artificial Sequence: Synthetic oligonucleotide
  Target: LAMA2; (+) strand; PAM type: YTN; PAM sequence: CTA
tgaagtcataaatccacatt

SEQ ID NO: 339134 - DNA, 20 bp, Artificial Sequence
  Description of Artificial Sequence: Synthetic oligonucleotide
  Target: LAMA2; (+) strand; PAM type: YTN; PAM sequence: TTG
tagctgcatgagaacttggc

SEQ ID NO: 339135 - DNA, 20 bp, Artificial Sequence
  Description of Artificial Sequence: Synthetic oligonucleotide
  Target: LAMA2; (+) strand; PAM type: YTN; PAM sequence: CTG
catgagaacttggccttatc

SEQ ID NO: 339136 - DNA, 20 bp, Artificial Sequence
  Description of Artificial Sequence: Synthetic oligonucleotide
  Target: LAMA2; (+) strand; PAM type: YTN; PAM sequence: CTT
ggccttatcacatatttgca

SEQ ID NO: 339137 - DNA, 20 bp, Artificial Sequence
  Description of Artificial Sequence: Synthetic oligonucleotide
  Target: LAMA2; (+) strand; PAM type: YTN; PAM sequence: TTG
gccttatcacatatttgcat

SEQ ID NO: 339138 - DNA, 20 bp, Artificial Sequence
  Description of Artificial Sequence: Synthetic oligonucleotide
  Target: LAMA2; (+) strand; PAM type: YTN; PAM sequence: CTT
atcacatatttgcatactca

SEQ ID NO: 339139 - DNA, 20 bp, Artificial Sequence
  Description of Artificial Sequence: Synthetic oligonucleotide
  Target: LAMA2; (+) strand; PAM type: YTN; PAM sequence: TTA
tcacatatttgcatactcag

SEQ ID NO: 339140 - DNA, 20 bp, Artificial Sequence
  Description of Artificial Sequence: Synthetic oligonucleotide
  Target: LAMA2; (+) strand; PAM type: YTN; PAM sequence: TTT
gcatactcagtgctttctaa

SEQ ID NO: 339141 - DNA, 20 bp, Artificial Sequence
  Description of Artificial Sequence: Synthetic oligonucleotide
  Target: LAMA2; (+) strand; PAM type: YTN; PAM sequence: TTG
catactcagtgctttctaag

SEQ ID NO: 339142 - DNA, 20 bp, Artificial Sequence
  Description of Artificial Sequence: Synthetic oligonucleotide
  Target: LAMA2; (+) strand; PAM type: YTN; PAM sequence: CTC
agtgctttctaagcaaagtt

SEQ ID NO: 339143 - DNA, 20 bp, Artificial Sequence
  Description of Artificial Sequence: Synthetic oligonucleotide
  Target: LAMA2; (+) strand; PAM type: YTN; PAM sequence: CTT
tctaagcaaagttctttatc

SEQ ID NO: 339144 - DNA, 20 bp, Artificial Sequence
  Description of Artificial Sequence: Synthetic oligonucleotide
  Target: LAMA2; (+) strand; PAM type: YTN; PAM sequence: TTT
ctaagcaaagttctttatcc

SEQ ID NO: 339145 - DNA, 20 bp, Artificial Sequence
  Description of Artificial Sequence: Synthetic oligonucleotide
  Target: LAMA2; (+) strand; PAM type: YTN; PAM sequence: TTC
taagcaaagttctttatcca

SEQ ID NO: 339146 - DNA, 20 bp, Artificial Sequence
  Description of Artificial Sequence: Synthetic oligonucleotide
  Target: LAMA2; (+) strand; PAM type: YTN; PAM sequence: CTA
agcaaagttctttatccata

SEQ ID NO: 339147 - DNA, 20 bp, Artificial Sequence
  Description of Artificial Sequence: Synthetic oligonucleotide
  Target: LAMA2; (+) strand; PAM type: YTN; PAM sequence: TTC
tttatccataaccttagtgt

SEQ ID NO: 339148 - DNA, 20 bp, Artificial Sequence
  Description of Artificial Sequence: Synthetic oligonucleotide
  Target: LAMA2; (+) strand; PAM type: YTN; PAM sequence: CTT
tatccataaccttagtgtag

SEQ ID NO: 339149 - DNA, 20 bp, Artificial Sequence
  Description of Artificial Sequence: Synthetic oligonucleotide
  Target: LAMA2; (+) strand; PAM type: YTN; PAM sequence: TTT
atccataaccttagtgtagt

SEQ ID NO: 339150 - DNA, 20 bp, Artificial Sequence
  Description of Artificial Sequence: Synthetic oligonucleotide
  Target: LAMA2; (+) strand; PAM type: YTN; PAM sequence: TTA
tccataaccttagtgtagtc

SEQ ID NO: 339151 - DNA, 20 bp, Artificial Sequence
  Description of Artificial Sequence: Synthetic oligonucleotide
  Target: LAMA2; (+) strand; PAM type: YTN; PAM sequence: CTT
agtgtagtcttatttttctt

SEQ ID NO: 339152 - DNA, 20 bp, Artificial Sequence
  Description of Artificial Sequence: Synthetic oligonucleotide
  Target: LAMA2; (+) strand; PAM type: YTN; PAM sequence: TTA
gtgtagtcttatttttctta

SEQ ID NO: 339153 - DNA, 20 bp, Artificial Sequence
  Description of Artificial Sequence: Synthetic oligonucleotide
  Target: LAMA2; (+) strand; PAM type: YTN; PAM sequence: CTT
atttttcttagtgggtacct

SEQ ID NO: 339154 - DNA, 20 bp, Artificial Sequence
  Description of Artificial Sequence: Synthetic oligonucleotide
  Target: LAMA2; (+) strand; PAM type: YTN; PAM sequence: TTA
tttttcttagtgggtacctg

SEQ ID NO: 339155 - DNA, 20 bp, Artificial Sequence
  Description of Artificial Sequence: Synthetic oligonucleotide
  Target: LAMA2; (+) strand; PAM type: YTN; PAM sequence: TTT
ttcttagtgggtacctgtga

SEQ ID NO: 339156 - DNA, 20 bp, Artificial Sequence
  Description of Artificial Sequence: Synthetic oligonucleotide
  Target: LAMA2; (+) strand; PAM type: YTN; PAM sequence: TTT
tcttagtgggtacctgtgat

SEQ ID NO: 339157 - DNA, 20 bp, Artificial Sequence
  Description of Artificial Sequence: Synthetic oligonucleotide
  Target: LAMA2; (+) strand; PAM type: YTN; PAM sequence: TTT
cttagtgggtacctgtgatc

SEQ ID NO: 339158 - DNA, 20 bp, Artificial Sequence
  Description of Artificial Sequence: Synthetic oligonucleotide
  Target: LAMA2; (+) strand; PAM type: YTN; PAM sequence: TTC
ttagtgggtacctgtgatct

SEQ ID NO: 339159 - DNA, 20 bp, Artificial Sequence
  Description of Artificial Sequence: Synthetic oligonucleotide
  Target: LAMA2; (+) strand; PAM type: YTN; PAM sequence: CTT
agtgggtacctgtgatctct

SEQ ID NO: 339160 - DNA, 20 bp, Artificial Sequence
  Description of Artificial Sequence: Synthetic oligonucleotide
  Target: LAMA2; (+) strand; PAM type: YTN; PAM sequence: TTA
gtgggtacctgtgatctcta

SEQ ID NO: 339161 - DNA, 20 bp, Artificial Sequence
  Description of Artificial Sequence: Synthetic oligonucleotide
  Target: LAMA2; (+) strand; PAM type: YTN; PAM sequence: CTG
tgatctctaatatgctttgc

SEQ ID NO: 339162 - DNA, 20 bp, Artificial Sequence
  Description of Artificial Sequence: Synthetic oligonucleotide
  Target: LAMA2; (+) strand; PAM type: YTN; PAM sequence: CTC
taatatgctttgctatctct

SEQ ID NO: 339163 - DNA, 20 bp, Artificial Sequence
  Description of Artificial Sequence: Synthetic oligonucleotide
  Target: LAMA2; (+) strand; PAM type: YTN; PAM sequence: CTA
atatgctttgctatctctct

SEQ ID NO: 339164 - DNA, 20 bp, Artificial Sequence
  Description of Artificial Sequence: Synthetic oligonucleotide
  Target: LAMA2; (+) strand; PAM type: YTN; PAM sequence: CTT
tgctatctctctttttgttt

SEQ ID NO: 339165 - DNA, 20 bp, Artificial Sequence
  Description of Artificial Sequence: Synthetic oligonucleotide
  Target: LAMA2; (+) strand; PAM type: YTN; PAM sequence: TTT
gctatctctctttttgtttt

SEQ ID NO: 339166 - DNA, 20 bp, Artificial Sequence
  Description of Artificial Sequence: Synthetic oligonucleotide
  Target: LAMA2; (+) strand; PAM type: YTN; PAM sequence: TTG
ctatctctctttttgtttta

SEQ ID NO: 339167 - DNA, 20 bp, Artificial Sequence
  Description of Artificial Sequence: Synthetic oligonucleotide
  Target: LAMA2; (+) strand; PAM type: YTN; PAM sequence: CTA
tctctctttttgttttatat

SEQ ID NO: 339168 - DNA, 20 bp, Artificial Sequence
  Description of Artificial Sequence: Synthetic oligonucleotide
  Target: LAMA2; (+) strand; PAM type: YTN; PAM sequence: CTC
tctttttgttttatatcttt

SEQ ID NO: 339169 - DNA, 20 bp, Artificial Sequence
  Description of Artificial Sequence: Synthetic oligonucleotide
  Target: LAMA2; (+) strand; PAM type: YTN; PAM sequence: CTC
tttttgttttatatctttaa

SEQ ID NO: 339170 - DNA, 20 bp, Artificial Sequence
  Description of Artificial Sequence: Synthetic oligonucleotide
  Target: LAMA2; (+) strand; PAM type: YTN; PAM sequence: CTT
tttgttttatatctttaaaa

SEQ ID NO: 339171 - DNA, 20 bp, Artificial Sequence
  Description of Artificial Sequence: Synthetic oligonucleotide
  Target: LAMA2; (+) strand; PAM type: YTN; PAM sequence: TTT
ttgttttatatctttaaaaa

SEQ ID NO: 339172 - DNA, 20 bp, Artificial Sequence
  Description of Artificial Sequence: Synthetic oligonucleotide
  Target: LAMA2; (+) strand; PAM type: YTN; PAM sequence: TTT
tgttttatatctttaaaaaa

SEQ ID NO: 339173 - DNA, 20 bp, Artificial Sequence
  Description of Artificial Sequence: Synthetic oligonucleotide
  Target: LAMA2; (+) strand; PAM type: YTN; PAM sequence: TTT
gttttatatctttaaaaaaa

SEQ ID NO: 339174 - DNA, 20 bp, Artificial Sequence
  Description of Artificial Sequence: Synthetic oligonucleotide
  Target: LAMA2; (+) strand; PAM type: YTN; PAM sequence: TTG
ttttatatctttaaaaaaat

SEQ ID NO: 339175 - DNA, 20 bp, Artificial Sequence
  Description of Artificial Sequence: Synthetic oligonucleotide
  Target: LAMA2; (+) strand; PAM type: YTN; PAM sequence: TTT
tatatctttaaaaaaatctc

SEQ ID NO: 339176 - DNA, 20 bp, Artificial Sequence
  Description of Artificial Sequence: Synthetic oligonucleotide
  Target: LAMA2; (+) strand; PAM type: YTN; PAM sequence: TTT
atatctttaaaaaaatctct

SEQ ID NO: 339177 - DNA, 20 bp, Artificial Sequence
  Description of Artificial Sequence: Synthetic oligonucleotide
  Target: LAMA2; (+) strand; PAM type: YTN; PAM sequence: TTA
tatctttaaaaaaatctcta

SEQ ID NO: 339178 - DNA, 20 bp, Artificial Sequence
  Description of Artificial Sequence: Synthetic oligonucleotide
  Target: LAMA2; (+) strand; PAM type: YTN; PAM sequence: CTT
taaaaaaatctctatgtttt

SEQ ID NO: 339179 - DNA, 20 bp, Artificial Sequence
  Description of Artificial Sequence: Synthetic oligonucleotide
  Target: LAMA2; (+) strand; PAM type: YTN; PAM sequence: TTT
aaaaaaatctctatgttttt

SEQ ID NO: 339180 - DNA, 20 bp, Artificial Sequence
  Description of Artificial Sequence: Synthetic oligonucleotide
  Target: LAMA2; (+) strand; PAM type: YTN; PAM sequence: TTA
aaaaaatctctatgttttta

SEQ ID NO: 339181 - DNA, 20 bp, Artificial Sequence
  Description of Artificial Sequence: Synthetic oligonucleotide
  Target: LAMA2; (+) strand; PAM type: YTN; PAM sequence: CTC
tatgtttttattttttctgg

SEQ ID NO: 339182 - DNA, 20 bp, Artificial Sequence
  Description of Artificial Sequence: Synthetic oligonucleotide
  Target: LAMA2; (+) strand; PAM type: YTN; PAM sequence: CTA
tgtttttattttttctggaa

SEQ ID NO: 339183 - DNA, 20 bp, Artificial Sequence
  Description of Artificial Sequence: Synthetic oligonucleotide
  Target: LAMA2; (+) strand; PAM type: YTN; PAM sequence: TTT
ttattttttctggaaggaaa

SEQ ID NO: 339184 - DNA, 20 bp, Artificial Sequence
  Description of Artificial Sequence: Synthetic oligonucleotide
  Target: LAMA2; (+) strand; PAM type: YTN; PAM sequence: TTT
tattttttctggaaggaaac

SEQ ID NO: 339185 - DNA, 20 bp, Artificial Sequence
  Description of Artificial Sequence: Synthetic oligonucleotide
  Target: LAMA2; (+) strand; PAM type: YTN; PAM sequence: TTT
attttttctggaaggaaaca

SEQ ID NO: 339186 - DNA, 20 bp, Artificial Sequence
  Description of Artificial Sequence: Synthetic oligonucleotide
  Target: LAMA2; (+) strand; PAM type: YTN; PAM sequence: TTA
ttttttctggaaggaaacag

SEQ ID NO: 339187 - DNA, 20 bp, Artificial Sequence
  Description of Artificial Sequence: Synthetic oligonucleotide
  Target: LAMA2; (+) strand; PAM type: YTN; PAM sequence: TTT
tttctggaaggaaacaggct

SEQ ID NO: 339188 - DNA, 20 bp, Artificial Sequence
  Description of Artificial Sequence: Synthetic oligonucleotide
  Target: LAMA2; (+) strand; PAM type: YTN; PAM sequence: TTT
ttctggaaggaaacaggctc

SEQ ID NO: 339189 - DNA, 20 bp, Artificial Sequence
  Description of Artificial Sequence: Synthetic oligonucleotide
  Target: LAMA2; (+) strand; PAM type: YTN; PAM sequence: TTT
tctggaaggaaacaggctca

SEQ ID NO: 339190 - DNA, 20 bp, Artificial Sequence
  Description of Artificial Sequence: Synthetic oligonucleotide
  Target: LAMA2; (+) strand; PAM type: YTN; PAM sequence: TTT
ctggaaggaaacaggctcac

SEQ ID NO: 339191 - DNA, 20 bp, Artificial Sequence
  Description of Artificial Sequence: Synthetic oligonucleotide
  Target: LAMA2; (+) strand; PAM type: YTN; PAM sequence: TTC
tggaaggaaacaggctcact

SEQ ID NO: 339192 - DNA, 20 bp, Artificial Sequence
  Description of Artificial Sequence: Synthetic oligonucleotide
  Target: LAMA2; (+) strand; PAM type: YTN; PAM sequence: CTG
gaaggaaacaggctcacttg

SEQ ID NO: 339193 - DNA, 20 bp, Artificial Sequence
  Description of Artificial Sequence: Synthetic oligonucleotide
  Target: LAMA2; (+) strand; PAM type: YTN; PAM sequence: CTC
acttggaatatttacctaga

SEQ ID NO: 339194 - DNA, 20 bp, Artificial Sequence
  Description of Artificial Sequence: Synthetic oligonucleotide
  Target: LAMA2; (+) strand; PAM type: YTN; PAM sequence: CTT
ggaatatttacctagattct

SEQ ID NO: 339195 - DNA, 20 bp, Artificial Sequence
  Description of Artificial Sequence: Synthetic oligonucleotide
  Target: LAMA2; (+) strand; PAM type: YTN; PAM sequence: TTG
gaatatttacctagattctc

SEQ ID NO: 339196 - DNA, 20 bp, Artificial Sequence
  Description of Artificial Sequence: Synthetic oligonucleotide
  Target: LAMA2; (+) strand; PAM type: YTN; PAM sequence: TTT
acctagattctctctttcac

SEQ ID NO: 339197 - DNA, 20 bp, Artificial Sequence
  Description of Artificial Sequence: Synthetic oligonucleotide
  Target: LAMA2; (+) strand; PAM type: YTN; PAM sequence: TTA
cctagattctctctttcaca

SEQ ID NO: 339198 - DNA, 20 bp, Artificial Sequence
  Description of Artificial Sequence: Synthetic oligonucleotide
  Target: LAMA2; (+) strand; PAM type: YTN; PAM sequence: CTA
gattctctctttcacaagaa

SEQ ID NO: 339199 - DNA, 20 bp, Artificial Sequence
  Description of Artificial Sequence: Synthetic oligonucleotide
  Target: LAMA2; (+) strand; PAM type: YTN; PAM sequence: TTC
tctctttcacaagaacacgc

SEQ ID NO: 339200 - DNA, 20 bp, Artificial Sequence
  Description of Artificial Sequence: Synthetic oligonucleotide
  Target: LAMA2; (+) strand; PAM type: YTN; PAM sequence: CTC
tctttcacaagaacacgcag

SEQ ID NO: 339201 - DNA, 20 bp, Artificial Sequence
  Description of Artificial Sequence: Synthetic oligonucleotide
  Target: LAMA2; (+) strand; PAM type: YTN; PAM sequence: CTC
tttcacaagaacacgcagta

SEQ ID NO: 339202 - DNA, 20 bp, Artificial Sequence
  Description of Artificial Sequence: Synthetic oligonucleotide
  Target: LAMA2; (+) strand; PAM type: YTN; PAM sequence: CTT
tcacaagaacacgcagtatt

SEQ ID NO: 339203 - DNA, 20 bp, Artificial Sequence
  Description of Artificial Sequence: Synthetic oligonucleotide
  Target: LAMA2; (+) strand; PAM type: YTN; PAM sequence: TTT
cacaagaacacgcagtattt

SEQ ID NO: 339204 - DNA, 20 bp, Artificial Sequence
  Description of Artificial Sequence: Synthetic oligonucleotide
  Target: LAMA2; (+) strand; PAM type: YTN; PAM sequence: TTC
acaagaacacgcagtatttt

SEQ ID NO: 339205 - DNA, 20 bp, Artificial Sequence
  Description of Artificial Sequence: Synthetic oligonucleotide
  Target: LAMA2; (+) strand; PAM type: YTN; PAM sequence: TTT
tgtattcattatctcattat

SEQ ID NO: 339206 - DNA, 20 bp, Artificial Sequence
  Description of Artificial Sequence: Synthetic oligonucleotide
  Target: LAMA2; (+) strand; PAM type: YTN; PAM sequence: TTT
gtattcattatctcattatc

SEQ ID NO: 339207 - DNA, 20 bp, Artificial Sequence
  Description of Artificial Sequence: Synthetic oligonucleotide
  Target: LAMA2; (+) strand; PAM type: YTN; PAM sequence: TTG
tattcattatctcattatct

SEQ ID NO: 339208 - DNA, 20 bp, Artificial Sequence
  Description of Artificial Sequence: Synthetic oligonucleotide
  Target: LAMA2; (+) strand; PAM type: YTN; PAM sequence: TTC
attatctcattatctcttcc

SEQ ID NO: 339209 - DNA, 20 bp, Artificial Sequence
  Description of Artificial Sequence: Synthetic oligonucleotide
  Target: LAMA2; (+) strand; PAM type: YTN; PAM sequence: TTA
tctcattatctcttccctgg

SEQ ID NO: 339210 - DNA, 20 bp, Artificial Sequence
  Description of Artificial Sequence: Synthetic oligonucleotide
  Target: LAMA2; (+) strand; PAM type: YTN; PAM sequence: CTC
attatctcttccctggttgt

SEQ ID NO: 339211 - DNA, 20 bp, Artificial Sequence
  Description of Artificial Sequence: Synthetic oligonucleotide
  Target: LAMA2; (+) strand; PAM type: YTN; PAM sequence: TTA
tctcttccctggttgtgtct

SEQ ID NO: 339212 - DNA, 20 bp, Artificial Sequence
  Description of Artificial Sequence: Synthetic oligonucleotide
  Target: LAMA2; (+) strand; PAM type: YTN; PAM sequence: CTC
ttccctggttgtgtctttag

SEQ ID NO: 339213 - DNA, 20 bp, Artificial Sequence
  Description of Artificial Sequence: Synthetic oligonucleotide
  Target: LAMA2; (+) strand; PAM type: YTN; PAM sequence: CTT
ccctggttgtgtctttagaa

SEQ ID NO: 339214 - DNA, 20 bp, Artificial Sequence
  Description of Artificial Sequence: Synthetic oligonucleotide
  Target: LAMA2; (+) strand; PAM type: YTN; PAM sequence: TTC
cctggttgtgtctttagaaa

SEQ ID NO: 339215 - DNA, 20 bp, Artificial Sequence
  Description of Artificial Sequence: Synthetic oligonucleotide
  Target: LAMA2; (+) strand; PAM type: YTN; PAM sequence: CTG
gttgtgtctttagaaaagaa

SEQ ID NO: 339216 - DNA, 20 bp, Artificial Sequence
  Description of Artificial Sequence: Synthetic oligonucleotide
  Target: LAMA2; (+) strand; PAM type: YTN; PAM sequence: TTG
tgtctttagaaaagaaacaa

SEQ ID NO: 339217 - DNA, 20 bp, Artificial Sequence
  Description of Artificial Sequence: Synthetic oligonucleotide
  Target: LAMA2; (+) strand; PAM type: YTN; PAM sequence: CTT
tagaaaagaaacaatggata

SEQ ID NO: 339218 - DNA, 20 bp, Artificial Sequence
  Description of Artificial Sequence: Synthetic oligonucleotide
  Target: LAMA2; (+) strand; PAM type: YTN; PAM sequence: TTT
agaaaagaaacaatggataa

SEQ ID NO: 339219 - DNA, 20 bp, Artificial Sequence
  Description of Artificial Sequence: Synthetic oligonucleotide
  Target: LAMA2; (+) strand; PAM type: YTN; PAM sequence: TTA
gaaaagaaacaatggataac

SEQ ID NO: 339220 - DNA, 20 bp, Artificial Sequence
  Description of Artificial Sequence: Synthetic oligonucleotide
  Target: LAMA2; (+) strand; PAM type: YTN; PAM sequence: TTT
cagtaattttctcagctcac

SEQ ID NO: 339221 - DNA, 20 bp, Artificial Sequence
  Description of Artificial Sequence: Synthetic oligonucleotide
  Target: LAMA2; (+) strand; PAM type: YTN; PAM sequence: TTC
agtaattttctcagctcaca

SEQ ID NO: 339222 - DNA, 20 bp, Artificial Sequence
  Description of Artificial Sequence: Synthetic oligonucleotide
  Target: LAMA2; (+) strand; PAM type: YTN; PAM sequence: TTT
tctcagctcacagagaccta

SEQ ID NO: 339223 - DNA, 20 bp, Artificial Sequence
  Description of Artificial Sequence: Synthetic oligonucleotide
  Target: LAMA2; (+) strand; PAM type: YTN; PAM sequence: TTT
ctcagctcacagagacctaa

SEQ ID NO: 339224 - DNA, 20 bp, Artificial Sequence
  Description of Artificial Sequence: Synthetic oligonucleotide
  Target: LAMA2; (+) strand; PAM type: YTN; PAM sequence: TTC
tcagctcacagagacctaat

SEQ ID NO: 339225 - DNA, 20 bp, Artificial Sequence
  Description of Artificial Sequence: Synthetic oligonucleotide
  Target: LAMA2; (+) strand; PAM type: YTN; PAM sequence: CTC
agctcacagagacctaatag

SEQ ID NO: 339226 - DNA, 20 bp, Artificial Sequence
  Description of Artificial Sequence: Synthetic oligonucleotide
  Target: LAMA2; (+) strand; PAM type: YTN; PAM sequence: CTC
acagagacctaataggacaa

SEQ ID NO: 339227 - DNA, 20 bp, Artificial Sequence
  Description of Artificial Sequence: Synthetic oligonucleotide
  Target: LAMA2; (+) strand; PAM type: YTN; PAM sequence: CTA
ataggacaaatactccagga

SEQ ID NO: 339228 - DNA, 20 bp, Artificial Sequence
  Description of Artificial Sequence: Synthetic oligonucleotide
  Target: LAMA2; (+) strand; PAM type: YTN; PAM sequence: CTC
caggaacgtatgccttagtt

SEQ ID NO: 339229 - DNA, 20 bp, Artificial Sequence
  Description of Artificial Sequence: Synthetic oligonucleotide
  Target: LAMA2; (+) strand; PAM type: YTN; PAM sequence: CTT
agttcctgcagatgacaata

SEQ ID NO: 339230 - DNA, 20 bp, Artificial Sequence
  Description of Artificial Sequence: Synthetic oligonucleotide
  Target: LAMA2; (+) strand; PAM type: YTN; PAM sequence: TTA
gttcctgcagatgacaatat

SEQ ID NO: 339231 - DNA, 20 bp, Artificial Sequence
  Description of Artificial Sequence: Synthetic oligonucleotide
  Target: LAMA2; (+) strand; PAM type: YTN; PAM sequence: TTC
ctgcagatgacaatatatgc

SEQ ID NO: 339232 - DNA, 20 bp, Artificial Sequence
  Description of Artificial Sequence: Synthetic oligonucleotide
  Target: LAMA2; (+) strand; PAM type: YTN; PAM sequence: CTG
cagatgacaatatatgctaa

SEQ ID NO: 339233 - DNA, 20 bp, Artificial Sequence
  Description of Artificial Sequence: Synthetic oligonucleotide
  Target: LAMA2; (+) strand; PAM type: YTN; PAM sequence: CTA
actgggattcaagctctaac

SEQ ID NO: 339234 - DNA, 20 bp, Artificial Sequence
  Description of Artificial Sequence: Synthetic oligonucleotide
  Target: LAMA2; (+) strand; PAM type: YTN; PAM sequence: CTG
ggattcaagctctaacaaac

SEQ ID NO: 339235 - DNA, 20 bp, Artificial Sequence
  Description of Artificial Sequence: Synthetic oligonucleotide
  Target: LAMA2; (+) strand; PAM type: YTN; PAM sequence: TTC
aagctctaacaaacaggcaa

SEQ ID NO: 339236 - DNA, 20 bp, Artificial Sequence
  Description of Artificial Sequence: Synthetic oligonucleotide
  Target: LAMA2; (+) strand; PAM type: YTN; PAM sequence: CTC
taacaaacaggcaagaccaa

SEQ ID NO: 339237 - DNA, 20 bp, Artificial Sequence
  Description of Artificial Sequence: Synthetic oligonucleotide
  Target: LAMA2; (+) strand; PAM type: YTN; PAM sequence: CTA
acaaacaggcaagaccaatg

SEQ ID NO: 339238 - DNA, 20 bp, Artificial Sequence
  Description of Artificial Sequence: Synthetic oligonucleotide
  Target: LAMA2; (+) strand; PAM type: YTN; PAM sequence: CTA
ataaccataacgtggaagca

SEQ ID NO: 339239 - DNA, 20 bp, Artificial Sequence
  Description of Artificial Sequence: Synthetic oligonucleotide
  Target: LAMA2; (+) strand; PAM type: YTN; PAM sequence: TTA
cagtgattttggctatccaa

SEQ ID NO: 339240 - DNA, 20 bp, Artificial Sequence
  Description of Artificial Sequence: Synthetic oligonucleotide
  Target: LAMA2; (+) strand; PAM type: YTN; PAM sequence: TTT
tggctatccaactaaatgta

SEQ ID NO: 339241 - DNA, 20 bp, Artificial Sequence
  Description of Artificial Sequence: Synthetic oligonucleotide
  Target: LAMA2; (+) strand; PAM type: YTN; PAM sequence: TTT
ggctatccaactaaatgtaa

SEQ ID NO: 339242 - DNA, 20 bp, Artificial Sequence
  Description of Artificial Sequence: Synthetic oligonucleotide
  Target: LAMA2; (+) strand; PAM type: YTN; PAM sequence: TTG
gctatccaactaaatgtaat

SEQ ID NO: 339243 - DNA, 20 bp, Artificial Sequence
  Description of Artificial Sequence: Synthetic oligonucleotide
  Target: LAMA2; (+) strand; PAM type: YTN; PAM sequence: CTA
tccaactaaatgtaataaat

SEQ ID NO: 339244 - DNA, 20 bp, Artificial Sequence
  Description of Artificial Sequence: Synthetic oligonucleotide
  Target: LAMA2; (+) strand; PAM type: YTN; PAM sequence: CTA
aatgtaataaatatcaaatg

SEQ ID NO: 339245 - DNA, 20 bp, Artificial Sequence
  Description of Artificial Sequence: Synthetic oligonucleotide
  Target: LAMA2; (+) strand; PAM type: YTN; PAM sequence: TTT
cagaagaattataataagga

SEQ ID NO: 339246 - DNA, 20 bp, Artificial Sequence
  Description of Artificial Sequence: Synthetic oligonucleotide
  Target: LAMA2; (+) strand; PAM type: YTN; PAM sequence: TTC
agaagaattataataaggaa

SEQ ID NO: 339247 - DNA, 20 bp, Artificial Sequence
  Description of Artificial Sequence: Synthetic oligonucleotide
  Target: LAMA2; (+) strand; PAM type: YTN; PAM sequence: TTA
taataaggaatatagcatct

SEQ ID NO: 339248 - DNA, 20 bp, Artificial Sequence
  Description of Artificial Sequence: Synthetic oligonucleotide
  Target: LAMA2; (+) strand; PAM type: YTN; PAM sequence: CTT
taacccatttctcatttgcc

SEQ ID NO: 339249 - DNA, 20 bp, Artificial Sequence
  Description of Artificial Sequence: Synthetic oligonucleotide
  Target: LAMA2; (+) strand; PAM type: YTN; PAM sequence: TTT
aacccatttctcatttgcct

SEQ ID NO: 339250 - DNA, 20 bp, Artificial Sequence
  Description of Artificial Sequence: Synthetic oligonucleotide
  Target: LAMA2; (+) strand; PAM type: YTN; PAM sequence: TTA
acccatttctcatttgcctg

SEQ ID NO: 339251 - DNA, 20 bp, Artificial Sequence
  Description of Artificial Sequence: Synthetic oligonucleotide
  Target: LAMA2; (+) strand; PAM type: YTN; PAM sequence: TTT
ctcatttgcctgaagaatac

SEQ ID NO: 339252 - DNA, 20 bp, Artificial Sequence
  Description of Artificial Sequence: Synthetic oligonucleotide
  Target: LAMA2; (+) strand; PAM type: YTN; PAM sequence: TTC
tcatttgcctgaagaatact

SEQ ID NO: 339253 - DNA, 20 bp, Artificial Sequence
  Description of Artificial Sequence: Synthetic oligonucleotide
  Target: LAMA2; (+) strand; PAM type: YTN; PAM sequence: CTC
atttgcctgaagaatacttg

SEQ ID NO: 339254 - DNA, 20 bp, Artificial Sequence
  Description of Artificial Sequence: Synthetic oligonucleotide
  Target: LAMA2; (+) strand; PAM type: YTN; PAM sequence: TTT
gcctgaagaatacttgcaga

SEQ ID NO: 339255 - DNA, 20 bp, Artificial Sequence
  Description of Artificial Sequence: Synthetic oligonucleotide
  Target: LAMA2; (+) strand; PAM type: YTN; PAM sequence: TTG
cctgaagaatacttgcagac

SEQ ID NO: 339256 - DNA, 20 bp, Artificial Sequence
  Description of Artificial Sequence: Synthetic oligonucleotide
  Target: LAMA2; (+) strand; PAM type: YTN; PAM sequence: CTG
aagaatacttgcagacagca

SEQ ID NO: 339257 - DNA, 20 bp, Artificial Sequence
  Description of Artificial Sequence: Synthetic oligonucleotide
  Target: LAMA2; (+) strand; PAM type: YTN; PAM sequence: CTT
gcagacagcatttgtggctt

SEQ ID NO: 339258 - DNA, 20 bp, Artificial Sequence
  Description of Artificial Sequence: Synthetic oligonucleotide
  Target: LAMA2; (+) strand; PAM type: YTN; PAM sequence: TTG
cagacagcatttgtggctta

SEQ ID NO: 339259 - DNA, 20 bp, Artificial Sequence
  Description of Artificial Sequence: Synthetic oligonucleotide
  Target: LAMA2; (+) strand; PAM type: YTN; PAM sequence: TTT
gtggcttaatgtttaccctg

SEQ ID NO: 339260 - DNA, 20 bp, Artificial Sequence
  Description of Artificial Sequence: Synthetic oligonucleotide
  Target: LAMA2; (+) strand; PAM type: YTN; PAM sequence: TTG
tggcttaatgtttaccctga

SEQ ID NO: 339261 - DNA, 20 bp, Artificial Sequence
  Description of Artificial Sequence: Synthetic oligonucleotide
  Target: LAMA2; (+) strand; PAM type: YTN; PAM sequence: CTT
aatgtttaccctgagataac

SEQ ID NO: 339262 - DNA, 20 bp, Artificial Sequence
  Description of Artificial Sequence: Synthetic oligonucleotide
  Target: LAMA2; (+) strand; PAM type: YTN; PAM sequence: TTA
atgtttaccctgagataact

SEQ ID NO: 339263 - DNA, 20 bp, Artificial Sequence
  Description of Artificial Sequence: Synthetic oligonucleotide
  Target: LAMA2; (+) strand; PAM type: YTN; PAM sequence: TTT
accctgagataacttgtggc

SEQ ID NO: 339264 - DNA, 20 bp, Artificial Sequence
  Description of Artificial Sequence: Synthetic oligonucleotide
  Target: LAMA2; (+) strand; PAM type: YTN; PAM sequence: TTA
ccctgagataacttgtggct

SEQ ID NO: 339265 - DNA, 20 bp, Artificial Sequence
  Description of Artificial Sequence: Synthetic oligonucleotide
  Target: LAMA2; (+) strand; PAM type: YTN; PAM sequence: CTG
agataacttgtggcttactg

SEQ ID NO: 339266 - DNA, 20 bp, Artificial Sequence
  Description of Artificial Sequence: Synthetic oligonucleotide
  Target: LAMA2; (+) strand; PAM type: YTN; PAM sequence: CTT
gtggcttactgtcctaacct

SEQ ID NO: 339267 - DNA, 20 bp, Artificial Sequence
  Description of Artificial Sequence: Synthetic oligonucleotide
  Target: LAMA2; (+) strand; PAM type: YTN; PAM sequence: TTG
tggcttactgtcctaacctt

SEQ ID NO: 339268 - DNA, 20 bp, Artificial Sequence
  Description of Artificial Sequence: Synthetic oligonucleotide
  Target: LAMA2; (+) strand; PAM type: YTN; PAM sequence: CTT
actgtcctaaccttatcccc

SEQ ID NO: 339269 - DNA, 20 bp, Artificial Sequence
  Description of Artificial Sequence: Synthetic oligonucleotide
  Target: LAMA2; (+) strand; PAM type: YTN; PAM sequence: TTA
ctgtcctaaccttatcccca

SEQ ID NO: 339270 - DNA, 20 bp, Artificial Sequence
  Description of Artificial Sequence: Synthetic oligonucleotide
  Target: LAMA2; (+) strand; PAM type: YTN; PAM sequence: CTG
tcctaaccttatccccaaag

SEQ ID NO: 339271 - DNA, 20 bp, Artificial Sequence
  Description of Artificial Sequence: Synthetic oligonucleotide
  Target: LAMA2; (+) strand; PAM type: YTN; PAM sequence: CTA
accttatccccaaagtttgc

SEQ ID NO: 339272 - DNA, 20 bp, Artificial Sequence
  Description of Artificial Sequence: Synthetic oligonucleotide
  Target: LAMA2; (+) strand; PAM type: YTN; PAM sequence: CTT
atccccaaagtttgccatga

SEQ ID NO: 339273 - DNA, 20 bp, Artificial Sequence
  Description of Artificial Sequence: Synthetic oligonucleotide
  Target: LAMA2; (+) strand; PAM type: YTN; PAM sequence: TTA
tccccaaagtttgccatgaa

SEQ ID NO: 339274 - DNA, 20 bp, Artificial Sequence
  Description of Artificial Sequence: Synthetic oligonucleotide
  Target: LAMA2; (+) strand; PAM type: YTN; PAM sequence: TTT
gccatgaaatatctcacttt

SEQ ID NO: 339275 - DNA, 20 bp, Artificial Sequence
  Description of Artificial Sequence: Synthetic oligonucleotide
  Target: LAMA2; (+) strand; PAM type: YTN; PAM sequence: TTG
ccatgaaatatctcactttt

SEQ ID NO: 339276 - DNA, 20 bp, Artificial Sequence
  Description of Artificial Sequence: Synthetic oligonucleotide
  Target: LAMA2; (+) strand; PAM type: YTN; PAM sequence: CTC
acttttattattatttttgc

SEQ ID NO: 339277 - DNA, 20 bp, Artificial Sequence
  Description of Artificial Sequence: Synthetic oligonucleotide
  Target: LAMA2; (+) strand; PAM type: YTN; PAM sequence: CTT
ttattattatttttgcatag

SEQ ID NO: 339278 - DNA, 20 bp, Artificial Sequence
  Description of Artificial Sequence: Synthetic oligonucleotide
  Target: LAMA2; (+) strand; PAM type: YTN; PAM sequence: TTT
tattattatttttgcatagg

SEQ ID NO: 339279 - DNA, 20 bp, Artificial Sequence
  Description of Artificial Sequence: Synthetic oligonucleotide
  Target: LAMA2; (+) strand; PAM type: YTN; PAM sequence: TTT
attattatttttgcataggt

SEQ ID NO: 339280 - DNA, 20 bp, Artificial Sequence
  Description of Artificial Sequence: Synthetic oligonucleotide
  Target: LAMA2; (+) strand; PAM type: YTN; PAM sequence: TTA
ttattatttttgcataggtc

SEQ ID NO: 339281 - DNA, 20 bp, Artificial Sequence
  Description of Artificial Sequence: Synthetic oligonucleotide
  Target: LAMA2; (+) strand; PAM type: YTN; PAM sequence: TTA
ttatttttgcataggtctag

SEQ ID NO: 339282 - DNA, 20 bp, Artificial Sequence
  Description of Artificial Sequence: Synthetic oligonucleotide
  Target: LAMA2; (+) strand; PAM type: YTN; PAM sequence: TTA
tttttgcataggtctagcat

SEQ ID NO: 339283 - DNA, 20 bp, Artificial Sequence
  Description of Artificial Sequence: Synthetic oligonucleotide
  Target: LAMA2; (+) strand; PAM type: YTN; PAM sequence: TTT
ttgcataggtctagcatatt

SEQ ID NO: 339284 - DNA, 20 bp, Artificial Sequence
  Description of Artificial Sequence: Synthetic oligonucleotide
  Target: LAMA2; (+) strand; PAM type: YTN; PAM sequence: TTT
tgcataggtctagcatattg

SEQ ID NO: 339285 - DNA, 20 bp, Artificial Sequence
  Description of Artificial Sequence: Synthetic oligonucleotide
  Target: LAMA2; (+) strand; PAM type: YTN; PAM sequence: TTT
gcataggtctagcatattga

SEQ ID NO: 339286 - DNA, 20 bp, Artificial Sequence
  Description of Artificial Sequence: Synthetic oligonucleotide
  Target: LAMA2; (+) strand; PAM type: YTN; PAM sequence: TTG
cataggtctagcatattgac

SEQ ID NO: 339287 - DNA, 20 bp, Artificial Sequence
  Description of Artificial Sequence: Synthetic oligonucleotide
  Target: LAMA2; (+) strand; PAM type: YTN; PAM sequence: CTA
gcatattgactttggaaaca

SEQ ID NO: 339288 - DNA, 20 bp, Artificial Sequence
  Description of Artificial Sequence: Synthetic oligonucleotide
  Target: LAMA2; (+) strand; PAM type: YTN; PAM sequence: TTG
actttggaaacaaaagacat

SEQ ID NO: 339289 - DNA, 20 bp, Artificial Sequence
  Description of Artificial Sequence: Synthetic oligonucleotide
  Target: LAMA2; (+) strand; PAM type: YTN; PAM sequence: CTT
tggaaacaaaagacatcatt

SEQ ID NO: 339290 - DNA, 20 bp, Artificial Sequence
  Description of Artificial Sequence: Synthetic oligonucleotide
  Target: LAMA2; (+) strand; PAM type: YTN; PAM sequence: TTT
ggaaacaaaagacatcattc

SEQ ID NO: 339291 - DNA, 20 bp, Artificial Sequence
  Description of Artificial Sequence: Synthetic oligonucleotide
  Target: LAMA2; (+) strand; PAM type: YTN; PAM sequence: TTG
gaaacaaaagacatcattct

SEQ ID NO: 339292 - DNA, 20 bp, Artificial Sequence
  Description of Artificial Sequence: Synthetic oligonucleotide
  Target: LAMA2; (+) strand; PAM type: YTN; PAM sequence: TTC
tatttgtagcattctgtgtt

SEQ ID NO: 339293 - DNA, 20 bp, Artificial Sequence
  Description of Artificial Sequence: Synthetic oligonucleotide
  Target: LAMA2; (+) strand; PAM type: YTN; PAM sequence: CTA
tttgtagcattctgtgtttg

SEQ ID NO: 339294 - DNA, 20 bp, Artificial Sequence
  Description of Artificial Sequence: Synthetic oligonucleotide
  Target: LAMA2; (+) strand; PAM type: YTN; PAM sequence: TTT
gtagcattctgtgtttgata

SEQ ID NO: 339295 - DNA, 20 bp, Artificial Sequence
  Description of Artificial Sequence: Synthetic oligonucleotide
  Target: LAMA2; (+) strand; PAM type: YTN; PAM sequence: TTG
tagcattctgtgtttgatag

SEQ ID NO: 339296 - DNA, 20 bp, Artificial Sequence
  Description of Artificial Sequence: Synthetic oligonucleotide
  Target: LAMA2; (+) strand; PAM type: YTN; PAM sequence: TTC
tgtgtttgatagtagtattt

SEQ ID NO: 339297 - DNA, 20 bp, Artificial Sequence
  Description of Artificial Sequence: Synthetic oligonucleotide
  Target: LAMA2; (+) strand; PAM type: YTN; PAM sequence: CTG
tgtttgatagtagtatttcc

SEQ ID NO: 339298 - DNA, 20 bp, Artificial Sequence
  Description of Artificial Sequence: Synthetic oligonucleotide
  Target: LAMA2; (+) strand; PAM type: YTN; PAM sequence: TTT
gatagtagtatttccatata

SEQ ID NO: 339299 - DNA, 20 bp, Artificial Sequence
  Description of Artificial Sequence: Synthetic oligonucleotide
  Target: LAMA2; (+) strand; PAM type: YTN; PAM sequence: TTG
atagtagtatttccatatac

SEQ ID NO: 339300 - DNA, 20 bp, Artificial Sequence
  Description of Artificial Sequence: Synthetic oligonucleotide
  Target: LAMA2; (+) strand; PAM type: YTN; PAM sequence: TTT
ccatatacaaaatatagtaa

SEQ ID NO: 339301 - DNA, 20 bp, Artificial Sequence
  Description of Artificial Sequence: Synthetic oligonucleotide
  Target: LAMA2; (+) strand; PAM type: YTN; PAM sequence: TTC
catatacaaaatatagtaat

SEQ ID NO: 339302 - DNA, 20 bp, Artificial Sequence
  Description of Artificial Sequence: Synthetic oligonucleotide
  Target: LAMA2; (+) strand; PAM type: YTN; PAM sequence: TTA
ttgattgctgaaatcaaatc

SEQ ID NO: 339303 - DNA, 20 bp, Artificial Sequence
  Description of Artificial Sequence: Synthetic oligonucleotide
  Target: LAMA2; (+) strand; PAM type: YTN; PAM sequence: TTG
attgctgaaatcaaatccta

SEQ ID NO: 339304 - DNA, 20 bp, Artificial Sequence
  Description of Artificial Sequence: Synthetic oligonucleotide
  Target: LAMA2; (+) strand; PAM type: YTN; PAM sequence: TTG
ctgaaatcaaatcctagaaa

SEQ ID NO: 339305 - DNA, 20 bp, Artificial Sequence
  Description of Artificial Sequence: Synthetic oligonucleotide
  Target: LAMA2; (+) strand; PAM type: YTN; PAM sequence: CTG
aaatcaaatcctagaaaata

SEQ ID NO: 339306 - DNA, 20 bp, Artificial Sequence
  Description of Artificial Sequence: Synthetic oligonucleotide
  Target: LAMA2; (+) strand; PAM type: YTN; PAM sequence: CTA
gaaaatacagcattcctata

SEQ ID NO: 339307 - DNA, 20 bp, Artificial Sequence
  Description of Artificial Sequence: Synthetic oligonucleotide
  Target: LAMA2; (+) strand; PAM type: YTN; PAM sequence: TTC
ctatataaaaaattattaaa

SEQ ID NO: 339308 - DNA, 20 bp, Artificial Sequence
  Description of Artificial Sequence: Synthetic oligonucleotide
  Target: LAMA2; (+) strand; PAM type: YTN; PAM sequence: CTA
tataaaaaattattaaattc

SEQ ID NO: 339309 - DNA, 20 bp, Artificial Sequence
  Description of Artificial Sequence: Synthetic oligonucleotide
  Target: LAMA2; (+) strand; PAM type: YTN; PAM sequence: TTA
ttaaattctgatcatcatat

SEQ ID NO: 339310 - DNA, 20 bp, Artificial Sequence
  Description of Artificial Sequence: Synthetic oligonucleotide
  Target: LAMA2; (+) strand; PAM type: YTN; PAM sequence: TTA
aattctgatcatcatataca

SEQ ID NO: 339311 - DNA, 20 bp, Artificial Sequence
  Description of Artificial Sequence: Synthetic oligonucleotide
  Target: LAMA2; (+) strand; PAM type: YTN; PAM sequence: TTC
tgatcatcatatacatttct

SEQ ID NO: 339312 - DNA, 20 bp, Artificial Sequence
  Description of Artificial Sequence: Synthetic oligonucleotide
  Target: LAMA2; (+) strand; PAM type: YTN; PAM sequence: CTG
atcatcatatacatttctgt

SEQ ID NO: 339313 - DNA, 20 bp, Artificial Sequence
  Description of Artificial Sequence: Synthetic oligonucleotide
  Target: LAMA2; (+) strand; PAM type: YTN; PAM sequence: TTT
ctgttacattaggattagag

SEQ ID NO: 339314 - DNA, 20 bp, Artificial Sequence
  Description of Artificial Sequence: Synthetic oligonucleotide
  Target: LAMA2; (+) strand; PAM type: YTN; PAM sequence: TTC
tgttacattaggattagaga

SEQ ID NO: 339315 - DNA, 20 bp, Artificial Sequence
  Description of Artificial Sequence: Synthetic oligonucleotide
  Target: LAMA2; (+) strand; PAM type: YTN; PAM sequence: CTG
ttacattaggattagagata

SEQ ID NO: 339316 - DNA, 20 bp, Artificial Sequence
  Description of Artificial Sequence: Synthetic oligonucleotide
  Target: LAMA2; (+) strand; PAM type: YTN; PAM sequence: TTA
cattaggattagagataagt

SEQ ID NO: 339317 - DNA, 20 bp, Artificial Sequence
  Description of Artificial Sequence: Synthetic oligonucleotide
  Target: LAMA2; (+) strand; PAM type: YTN; PAM sequence: TTA
ggattagagataagttttat

SEQ ID NO: 339318 - DNA, 20 bp, Artificial Sequence
  Description of Artificial Sequence: Synthetic oligonucleotide
  Target: LAMA2; (+) strand; PAM type: YTN; PAM sequence: TTA
gagataagttttatttagaa

SEQ ID NO: 339319 - DNA, 20 bp, Artificial Sequence
  Description of Artificial Sequence: Synthetic oligonucleotide
  Target: LAMA2; (+) strand; PAM type: YTN; PAM sequence: TTT
tatttagaaataactctaag

SEQ ID NO: 339320 - DNA, 20 bp, Artificial Sequence
  Description of Artificial Sequence: Synthetic oligonucleotide
  Target: LAMA2; (+) strand; PAM type: YTN; PAM sequence: TTT
atttagaaataactctaaga

SEQ ID NO: 339321 - DNA, 20 bp, Artificial Sequence
  Description of Artificial Sequence: Synthetic oligonucleotide
  Target: LAMA2; (+) strand; PAM type: YTN; PAM sequence: TTA
tttagaaataactctaagaa

SEQ ID NO: 339322 - DNA, 20 bp, Artificial Sequence
  Description of Artificial Sequence: Synthetic oligonucleotide
  Target: LAMA2; (+) strand; PAM type: YTN; PAM sequence: TTT
agaaataactctaagaaacg

SEQ ID NO: 339323 - DNA, 20 bp, Artificial Sequence
  Description of Artificial Sequence: Synthetic oligonucleotide
  Target: LAMA2; (+) strand; PAM type: YTN; PAM sequence: TTA
gaaataactctaagaaacgt

SEQ ID NO: 339324 - DNA, 20 bp, Artificial Sequence
  Description of Artificial Sequence: Synthetic oligonucleotide
  Target: LAMA2; (+) strand; PAM type: YTN; PAM sequence: CTC
taagaaacgtttttatattt

SEQ ID NO: 339325 - DNA, 20 bp, Artificial Sequence
  Description of Artificial Sequence: Synthetic oligonucleotide
  Target: LAMA2; (+) strand; PAM type: YTN; PAM sequence: CTA
agaaacgtttttatatttta

SEQ ID NO: 339326 - DNA, 20 bp, Artificial Sequence
  Description of Artificial Sequence: Synthetic oligonucleotide
  Target: LAMA2; (+) strand; PAM type: YTN; PAM sequence: TTT
ttatattttattttcacatt

SEQ ID NO: 339327 - DNA, 20 bp, Artificial Sequence
  Description of Artificial Sequence: Synthetic oligonucleotide
  Target: LAMA2; (+) strand; PAM type: YTN; PAM sequence: TTT
tatattttattttcacattg

SEQ ID NO: 339328 - DNA, 20 bp, Artificial Sequence
  Description of Artificial Sequence: Synthetic oligonucleotide
  Target: LAMA2; (+) strand; PAM type: YTN; PAM sequence: TTT
atattttattttcacattga

SEQ ID NO: 339329 - DNA, 20 bp, Artificial Sequence
  Description of Artificial Sequence: Synthetic oligonucleotide
  Target: LAMA2; (+) strand; PAM type: YTN; PAM sequence: TTA
tattttattttcacattgaa

SEQ ID NO: 339330 - DNA, 20 bp, Artificial Sequence
  Description of Artificial Sequence: Synthetic oligonucleotide
  Target: LAMA2; (+) strand; PAM type: YTN; PAM sequence: TTT
tattttcacattgaaaataa

SEQ ID NO: 339331 - DNA, 20 bp, Artificial Sequence
  Description of Artificial Sequence: Synthetic oligonucleotide
  Target: LAMA2; (+) strand; PAM type: YTN; PAM sequence: TTT
attttcacattgaaaataag

SEQ ID NO: 339332 - DNA, 20 bp, Artificial Sequence
  Description of Artificial Sequence: Synthetic oligonucleotide
  Target: LAMA2; (+) strand; PAM type: YTN; PAM sequence: TTA
ttttcacattgaaaataagt

SEQ ID NO: 339333 - DNA, 20 bp, Artificial Sequence
  Description of Artificial Sequence: Synthetic oligonucleotide
  Target: LAMA2; (+) strand; PAM type: YTN; PAM sequence: TTT
tcacattgaaaataagtcag

SEQ ID NO: 339334 - DNA, 20 bp, Artificial Sequence
  Description of Artificial Sequence: Synthetic oligonucleotide
  Target: LAMA2; (+) strand; PAM type: YTN; PAM sequence: TTT
cacattgaaaataagtcaga

SEQ ID NO: 339335 - DNA, 20 bp, Artificial Sequence
  Description of Artificial Sequence: Synthetic oligonucleotide
  Target: LAMA2; (+) strand; PAM type: YTN; PAM sequence: TTC
acattgaaaataagtcagat

SEQ ID NO: 339336 - DNA, 20 bp, Artificial Sequence
  Description of Artificial Sequence: Synthetic oligonucleotide
  Target: LAMA2; (+) strand; PAM type: YTN; PAM sequence: TTG
aaaataagtcagatttgctt

SEQ ID NO: 339337 - DNA, 20 bp, Artificial Sequence
  Description of Artificial Sequence: Synthetic oligonucleotide
  Target: LAMA2; (+) strand; PAM type: YTN; PAM sequence: TTT
gcttcagcctcaaaaaatgt

SEQ ID NO: 339338 - DNA, 20 bp, Artificial Sequence
  Description of Artificial Sequence: Synthetic oligonucleotide
  Target: LAMA2; (+) strand; PAM type: YTN; PAM sequence: TTG
cttcagcctcaaaaaatgtg

SEQ ID NO: 339339 - DNA, 20 bp, Artificial Sequence
  Description of Artificial Sequence: Synthetic oligonucleotide
  Target: LAMA2; (+) strand; PAM type: YTN; PAM sequence: CTT
cagcctcaaaaaatgtgttt

SEQ ID NO: 339340 - DNA, 20 bp, Artificial Sequence
  Description of Artificial Sequence: Synthetic oligonucleotide
  Target: LAMA2; (+) strand; PAM type: YTN; PAM sequence: TTC
agcctcaaaaaatgtgttta

SEQ ID NO: 339341 - DNA, 20 bp, Artificial Sequence
  Description of Artificial Sequence: Synthetic oligonucleotide
  Target: LAMA2; (+) strand; PAM type: YTN; PAM sequence: CTC
aaaaaatgtgtttatgtaaa

SEQ ID NO: 339342 - DNA, 20 bp, Artificial Sequence
  Description of Artificial Sequence: Synthetic oligonucleotide
  Target: LAMA2; (+) strand; PAM type: YTN; PAM sequence: TTT
atgtaaaattaaatgagagc

SEQ ID NO: 339343 - DNA, 20 bp, Artificial Sequence
  Description of Artificial Sequence: Synthetic oligonucleotide
  Target: LAMA2; (+) strand; PAM type: YTN; PAM sequence: TTA
tgtaaaattaaatgagagct

SEQ ID NO: 339344 - DNA, 20 bp, Artificial Sequence
  Description of Artificial Sequence: Synthetic oligonucleotide
  Target: LAMA2; (+) strand; PAM type: YTN; PAM sequence: TTA
aatgagagctggcagtgagc

SEQ ID NO: 339345 - DNA, 20 bp, Artificial Sequence
  Description of Artificial Sequence: Synthetic oligonucleotide
  Target: LAMA2; (+) strand; PAM type: YTN; PAM sequence: CTG
gcagtgagctgtacattttt

SEQ ID NO: 339346 - DNA, 20 bp, Artificial Sequence
  Description of Artificial Sequence: Synthetic oligonucleotide
  Target: LAMA2; (+) strand; PAM type: YTN; PAM sequence: CTG
tacattttttttcctaatgg

SEQ ID NO: 339347 - DNA, 20 bp, Artificial Sequence
  Description of Artificial Sequence: Synthetic oligonucleotide
  Target: LAMA2; (+) strand; PAM type: YTN; PAM sequence: TTT
tttttcctaatgggacatgg

SEQ ID NO: 339348 - DNA, 20 bp, Artificial Sequence
  Description of Artificial Sequence: Synthetic oligonucleotide
  Target: LAMA2; (+) strand; PAM type: YTN; PAM sequence: TTT
ttttcctaatgggacatggg

SEQ ID NO: 339349 - DNA, 20 bp, Artificial Sequence
  Description of Artificial Sequence: Synthetic oligonucleotide
  Target: LAMA2; (+) strand; PAM type: YTN; PAM sequence: TTT
tttcctaatgggacatgggt

SEQ ID NO: 339350 - DNA, 20 bp, Artificial Sequence
  Description of Artificial Sequence: Synthetic oligonucleotide
  Target: LAMA2; (+) strand; PAM type: YTN; PAM sequence: TTT
ttcctaatgggacatgggtt

SEQ ID NO: 339351 - DNA, 20 bp, Artificial Sequence
  Description of Artificial Sequence: Synthetic oligonucleotide
  Target: LAMA2; (+) strand; PAM type: YTN; PAM sequence: TTT
tcctaatgggacatgggtta

SEQ ID NO: 339352 - DNA, 20 bp, Artificial Sequence
  Description of Artificial Sequence: Synthetic oligonucleotide
  Target: LAMA2; (+) strand; PAM type: YTN; PAM sequence: TTT
cctaatgggacatgggttat

SEQ ID NO: 339353 - DNA, 20 bp, Artificial Sequence
  Description of Artificial Sequence: Synthetic oligonucleotide
  Target: LAMA2; (+) strand; PAM type: YTN; PAM sequence: TTC
ctaatgggacatgggttatg

SEQ ID NO: 339354 - DNA, 20 bp, Artificial Sequence
  Description of Artificial Sequence: Synthetic oligonucleotide
  Target: LAMA2; (+) strand; PAM type: YTN; PAM sequence: CTA
atgggacatgggttatgggt

SEQ ID NO: 339355 - DNA, 20 bp, Artificial Sequence
  Description of Artificial Sequence: Synthetic oligonucleotide
  Target: LAMA2; (+) strand; PAM type: YTN; PAM sequence: TTA
tgggttaaagatgtacaagc

SEQ ID NO: 339356 - DNA, 20 bp, Artificial Sequence
  Description of Artificial Sequence: Synthetic oligonucleotide
  Target: LAMA2; (+) strand; PAM type: YTN; PAM sequence: TTA
aagatgtacaagctggccgg

SEQ ID NO: 339357 - DNA, 20 bp, Artificial Sequence
  Description of Artificial Sequence: Synthetic oligonucleotide
  Target: LAMA2; (+) strand; PAM type: YTN; PAM sequence: CTG
gccgggcacggtggctcatg

SEQ ID NO: 339358 - DNA, 20 bp, Artificial Sequence
  Description of Artificial Sequence: Synthetic oligonucleotide
  Target: LAMA2; (+) strand; PAM type: YTN; PAM sequence: CTC
atgcctgtaatcccaacact

SEQ ID NO: 339359 - DNA, 20 bp, Artificial Sequence
  Description of Artificial Sequence: Synthetic oligonucleotide
  Target: LAMA2; (+) strand; PAM type: YTN; PAM sequence: CTG
taatcccaacactttgtgag

SEQ ID NO: 339360 - DNA, 20 bp, Artificial Sequence
  Description of Artificial Sequence: Synthetic oligonucleotide
  Target: LAMA2; (+) strand; PAM type: YTN; PAM sequence: CTT
tgtgaggctgaggcaagtgg

SEQ ID NO: 339361 - DNA, 20 bp, Artificial Sequence
  Description of Artificial Sequence: Synthetic oligonucleotide
  Target: LAMA2; (+) strand; PAM type: YTN; PAM sequence: TTT
gtgaggctgaggcaagtgga

SEQ ID NO: 339362 - DNA, 20 bp, Artificial Sequence
  Description of Artificial Sequence: Synthetic oligonucleotide
  Target: LAMA2; (+) strand; PAM type: YTN; PAM sequence: TTG
tgaggctgaggcaagtggat

SEQ ID NO: 339363 - DNA, 20 bp, Artificial Sequence
  Description of Artificial Sequence: Synthetic oligonucleotide
  Target: LAMA2; (+) strand; PAM type: YTN; PAM sequence: CTG
aggcaagtggatcacctgag

SEQ ID NO: 339364 - DNA, 20 bp, Artificial Sequence
  Description of Artificial Sequence: Synthetic oligonucleotide
  Target: LAMA2; (+) strand; PAM type: YTN; PAM sequence: CTG
aggttaggagtttgagacca

SEQ ID NO: 339365 - DNA, 20 bp, Artificial Sequence
  Description of Artificial Sequence: Synthetic oligonucleotide
  Target: LAMA2; (+) strand; PAM type: YTN; PAM sequence: TTA
ggagtttgagaccagcctta

SEQ ID NO: 339366 - DNA, 20 bp, Artificial Sequence
  Description of Artificial Sequence: Synthetic oligonucleotide
  Target: LAMA2; (+) strand; PAM type: YTN; PAM sequence: TTT
gagaccagccttaccaatat

SEQ ID NO: 339367 - DNA, 20 bp, Artificial Sequence
  Description of Artificial Sequence: Synthetic oligonucleotide
  Target: LAMA2; (+) strand; PAM type: YTN; PAM sequence: TTG
agaccagccttaccaatatg

SEQ ID NO: 339368 - DNA, 20 bp, Artificial Sequence
  Description of Artificial Sequence: Synthetic oligonucleotide
  Target: LAMA2; (+) strand; PAM type: YTN; PAM sequence: CTT
accaatatggtgaaactcca

SEQ ID NO: 339369 - DNA, 20 bp, Artificial Sequence
  Description of Artificial Sequence: Synthetic oligonucleotide
  Target: LAMA2; (+) strand; PAM type: YTN; PAM sequence: TTA
ccaatatggtgaaactccat

SEQ ID NO: 339370 - DNA, 20 bp, Artificial Sequence
  Description of Artificial Sequence: Synthetic oligonucleotide
  Target: LAMA2; (+) strand; PAM type: YTN; PAM sequence: CTC
catctctactaaatacaaaa

SEQ ID NO: 339371 - DNA, 20 bp, Artificial Sequence
  Description of Artificial Sequence: Synthetic oligonucleotide
  Target: LAMA2; (+) strand; PAM type: YTN; PAM sequence: CTC
tactaaatacaaaaaaaaaa

SEQ ID NO: 339372 - DNA, 20 bp, Artificial Sequence
  Description of Artificial Sequence: Synthetic oligonucleotide
  Target: LAMA2; (+) strand; PAM type: YTN; PAM sequence: CTA
ctaaatacaaaaaaaaaaaa

SEQ ID NO: 339373 - DNA, 20 bp, Artificial Sequence
  Description of Artificial Sequence: Synthetic oligonucleotide
  Target: LAMA2; (+) strand; PAM type: YTN; PAM sequence: CTA
aatacaaaaaaaaaaaaaaa

SEQ ID NO: 339374 - DNA, 20 bp, Artificial Sequence
  Description of Artificial Sequence: Synthetic oligonucleotide
  Target: LAMA2; (+) strand; PAM type: YTN; PAM sequence: TTA
gccaggcgcagtggcacctg

SEQ ID NO: 339375 - DNA, 20 bp, Artificial Sequence
  Description of Artificial Sequence: Synthetic oligonucleotide
  Target: LAMA2; (+) strand; PAM type: YTN; PAM sequence: CTG
cctgtaatccagctacttgg

SEQ ID NO: 339376 - DNA, 20 bp, Artificial Sequence
  Description of Artificial Sequence: Synthetic oligonucleotide
  Target: LAMA2; (+) strand; PAM type: YTN; PAM sequence: CTG
taatccagctacttgggagg

SEQ ID NO: 339377 - DNA, 20 bp, Artificial Sequence
  Description of Artificial Sequence: Synthetic oligonucleotide
  Target: LAMA2; (+) strand; PAM type: YTN; PAM sequence: CTA
cttgggaggctgaggcagga

SEQ ID NO: 339378 - DNA, 20 bp, Artificial Sequence
  Description of Artificial Sequence: Synthetic oligonucleotide
  Target: LAMA2; (+) strand; PAM type: YTN; PAM sequence: CTT
gggaggctgaggcaggagaa

SEQ ID NO: 339379 - DNA, 20 bp, Artificial Sequence
  Description of Artificial Sequence: Synthetic oligonucleotide
  Target: LAMA2; (+) strand; PAM type: YTN; PAM sequence: TTG
ggaggctgaggcaggagaat

SEQ ID NO: 339380 - DNA, 20 bp, Artificial Sequence
  Description of Artificial Sequence: Synthetic oligonucleotide
  Target: LAMA2; (+) strand; PAM type: YTN; PAM sequence: CTG
aggcaggagaattgcttgaa

SEQ ID NO: 339381 - DNA, 20 bp, Artificial Sequence
  Description of Artificial Sequence: Synthetic oligonucleotide
  Target: LAMA2; (+) strand; PAM type: YTN; PAM sequence: TTG
cttgaacctgggaggcagag

SEQ ID NO: 339382 - DNA, 20 bp, Artificial Sequence
  Description of Artificial Sequence: Synthetic oligonucleotide
  Target: LAMA2; (+) strand; PAM type: YTN; PAM sequence: CTT
gaacctgggaggcagaggtt

SEQ ID NO: 339383 - DNA, 20 bp, Artificial Sequence
  Description of Artificial Sequence: Synthetic oligonucleotide
  Target: LAMA2; (+) strand; PAM type: YTN; PAM sequence: TTG
aacctgggaggcagaggttg

SEQ ID NO: 339384 - DNA, 20 bp, Artificial Sequence
  Description of Artificial Sequence: Synthetic oligonucleotide
  Target: LAMA2; (+) strand; PAM type: YTN; PAM sequence: CTG
ggaggcagaggttgcagtga

SEQ ID NO: 339385 - DNA, 20 bp, Artificial Sequence
  Description of Artificial Sequence: Synthetic oligonucleotide
  Target: LAMA2; (+) strand; PAM type: YTN; PAM sequence: TTG
cagtgagccaagcttgcgcc

SEQ ID NO: 339386 - DNA, 20 bp, Artificial Sequence
  Description of Artificial Sequence: Synthetic oligonucleotide
  Target: LAMA2; (+) strand; PAM type: YTN; PAM sequence: CTT
gcgccattgcactccatcct

SEQ ID NO: 339387 - DNA, 20 bp, Artificial Sequence
  Description of Artificial Sequence: Synthetic oligonucleotide
  Target: LAMA2; (+) strand; PAM type: YTN; PAM sequence: TTG
cgccattgcactccatcctg

SEQ ID NO: 339388 - DNA, 20 bp, Artificial Sequence
  Description of Artificial Sequence: Synthetic oligonucleotide
  Target: LAMA2; (+) strand; PAM type: YTN; PAM sequence: TTG
cactccatcctggacaacag

SEQ ID NO: 339389 - DNA, 20 bp, Artificial Sequence
  Description of Artificial Sequence: Synthetic oligonucleotide
  Target: LAMA2; (+) strand; PAM type: YTN; PAM sequence: CTC
catcctggacaacagagcag

SEQ ID NO: 339390 - DNA, 20 bp, Artificial Sequence
  Description of Artificial Sequence: Synthetic oligonucleotide
  Target: LAMA2; (+) strand; PAM type: YTN; PAM sequence: CTG
gacaacagagcaggacgcag

SEQ ID NO: 339391 - DNA, 20 bp, Artificial Sequence
  Description of Artificial Sequence: Synthetic oligonucleotide
  Target: LAMA2; (+) strand; PAM type: YTN; PAM sequence: CTG
gaaaaaaaaaaaaagtgtaa

SEQ ID NO: 339392 - DNA, 20 bp, Artificial Sequence
  Description of Artificial Sequence: Synthetic oligonucleotide
  Target: LAMA2; (+) strand; PAM type: YTN; PAM sequence: CTA
gaggccctggcctccacaag

SEQ ID NO: 339393 - DNA, 20 bp, Artificial Sequence
  Description of Artificial Sequence: Synthetic oligonucleotide
  Target: LAMA2; (+) strand; PAM type: YTN; PAM sequence: CTG
gcctccacaagcccacaatt

SEQ ID NO: 339394 - DNA, 20 bp, Artificial Sequence
  Description of Artificial Sequence: Synthetic oligonucleotide
  Target: LAMA2; (+) strand; PAM type: YTN; PAM sequence: CTC
cacaagcccacaatttagtt

SEQ ID NO: 339395 - DNA, 20 bp, Artificial Sequence
  Description of Artificial Sequence: Synthetic oligonucleotide
  Target: LAMA2; (+) strand; PAM type: YTN; PAM sequence: TTT
agttattcttcttctttatg

SEQ ID NO: 339396 - DNA, 20 bp, Artificial Sequence
  Description of Artificial Sequence: Synthetic oligonucleotide
  Target: LAMA2; (+) strand; PAM type: YTN; PAM sequence: TTA
gttattcttcttctttatga

SEQ ID NO: 339397 - DNA, 20 bp, Artificial Sequence
  Description of Artificial Sequence: Synthetic oligonucleotide
  Target: LAMA2; (+) strand; PAM type: YTN; PAM sequence: TTA
ttcttcttctttatgatttt

SEQ ID NO: 339398 - DNA, 20 bp, Artificial Sequence
  Description of Artificial Sequence: Synthetic oligonucleotide
  Target: LAMA2; (+) strand; PAM type: YTN; PAM sequence: TTC
ttcttctttatgattttaag

SEQ ID NO: 339399 - DNA, 20 bp, Artificial Sequence
  Description of Artificial Sequence: Synthetic oligonucleotide
  Target: LAMA2; (+) strand; PAM type: YTN; PAM sequence: CTT
cttctttatgattttaagac

SEQ ID NO: 339400 - DNA, 20 bp, Artificial Sequence
  Description of Artificial Sequence: Synthetic oligonucleotide
  Target: LAMA2; (+) strand; PAM type: YTN; PAM sequence: TTC
ttctttatgattttaagacc

SEQ ID NO: 339401 - DNA, 20 bp, Artificial Sequence
  Description of Artificial Sequence: Synthetic oligonucleotide
  Target: LAMA2; (+) strand; PAM type: YTN; PAM sequence: CTT
ctttatgattttaagacctt

SEQ ID NO: 339402 - DNA, 20 bp, Artificial Sequence
  Description of Artificial Sequence: Synthetic oligonucleotide
  Target: LAMA2; (+) strand; PAM type: YTN; PAM sequence: TTC
tttatgattttaagaccttg

SEQ ID NO: 339403 - DNA, 20 bp, Artificial Sequence
  Description of Artificial Sequence: Synthetic oligonucleotide
  Target: LAMA2; (+) strand; PAM type: YTN; PAM sequence: CTT
tatgattttaagaccttgtc

SEQ ID NO: 339404 - DNA, 20 bp, Artificial Sequence
  Description of Artificial Sequence: Synthetic oligonucleotide
  Target: LAMA2; (+) strand; PAM type: YTN; PAM sequence: TTT
atgattttaagaccttgtca

SEQ ID NO: 339405 - DNA, 20 bp, Artificial Sequence
  Description of Artificial Sequence: Synthetic oligonucleotide
  Target: LAMA2; (+) strand; PAM type: YTN; PAM sequence: TTA
tgattttaagaccttgtcag

SEQ ID NO: 339406 - DNA, 20 bp, Artificial Sequence
  Description of Artificial Sequence: Synthetic oligonucleotide
  Target: LAMA2; (+) strand; PAM type: YTN; PAM sequence: TTT
taagaccttgtcaggaatac

SEQ ID NO: 339407 - DNA, 20 bp, Artificial Sequence
  Description of Artificial Sequence: Synthetic oligonucleotide
  Target: LAMA2; (+) strand; PAM type: YTN; PAM sequence: TTT
aagaccttgtcaggaatact

SEQ ID NO: 339408 - DNA, 20 bp, Artificial Sequence
  Description of Artificial Sequence: Synthetic oligonucleotide
  Target: LAMA2; (+) strand; PAM type: YTN; PAM sequence: TTA
agaccttgtcaggaatactt

SEQ ID NO: 339409 - DNA, 20 bp, Artificial Sequence
  Description of Artificial Sequence: Synthetic oligonucleotide
  Target: LAMA2; (+) strand; PAM type: YTN; PAM sequence: CTT
gtcaggaatactttgggatt

SEQ ID NO: 339410 - DNA, 20 bp, Artificial Sequence
  Description of Artificial Sequence: Synthetic oligonucleotide
  Target: LAMA2; (+) strand; PAM type: YTN; PAM sequence: TTG
tcaggaatactttgggatta

SEQ ID NO: 339411 - DNA, 20 bp, Artificial Sequence
  Description of Artificial Sequence: Synthetic oligonucleotide
  Target: LAMA2; (+) strand; PAM type: YTN; PAM sequence: CTT
tgggattatcagtagttagg

SEQ ID NO: 339412 - DNA, 20 bp, Artificial Sequence
  Description of Artificial Sequence: Synthetic oligonucleotide
  Target: LAMA2; (+) strand; PAM type: YTN; PAM sequence: TTT
gggattatcagtagttagga

SEQ ID NO: 339413 - DNA, 20 bp, Artificial Sequence
  Description of Artificial Sequence: Synthetic oligonucleotide
  Target: LAMA2; (+) strand; PAM type: YTN; PAM sequence: TTG
ggattatcagtagttaggac

SEQ ID NO: 339414 - DNA, 20 bp, Artificial Sequence
  Description of Artificial Sequence: Synthetic oligonucleotide
  Target: LAMA2; (+) strand; PAM type: YTN; PAM sequence: TTA
tcagtagttaggaccaagat

SEQ ID NO: 339415 - DNA, 20 bp, Artificial Sequence
  Description of Artificial Sequence: Synthetic oligonucleotide
  Target: LAMA2; (+) strand; PAM type: YTN; PAM sequence: TTA
ggaccaagatatttcatatt

SEQ ID NO: 339416 - DNA, 20 bp, Artificial Sequence
  Description of Artificial Sequence: Synthetic oligonucleotide
  Target: LAMA2; (+) strand; PAM type: YTN; PAM sequence: TTT
catattttatagcagagaca

SEQ ID NO: 339417 - DNA, 20 bp, Artificial Sequence
  Description of Artificial Sequence: Synthetic oligonucleotide
  Target: LAMA2; (+) strand; PAM type: YTN; PAM sequence: TTC
atattttatagcagagacaa

SEQ ID NO: 339418 - DNA, 20 bp, Artificial Sequence
  Description of Artificial Sequence: Synthetic oligonucleotide
  Target: LAMA2; (+) strand; PAM type: YTN; PAM sequence: TTT
tatagcagagacaactctat

SEQ ID NO: 339419 - DNA, 20 bp, Artificial Sequence
  Description of Artificial Sequence: Synthetic oligonucleotide
  Target: LAMA2; (+) strand; PAM type: YTN; PAM sequence: TTT
atagcagagacaactctatc

SEQ ID NO: 339420 - DNA, 20 bp, Artificial Sequence
  Description of Artificial Sequence: Synthetic oligonucleotide
  Target: LAMA2; (+) strand; PAM type: YTN; PAM sequence: TTA
tagcagagacaactctatct

SEQ ID NO: 339421 - DNA, 20 bp, Artificial Sequence
  Description of Artificial Sequence: Synthetic oligonucleotide
  Target: LAMA2; (+) strand; PAM type: YTN; PAM sequence: CTC
tatctgtgcattttataaga

SEQ ID NO: 339422 - DNA, 20 bp, Artificial Sequence
  Description of Artificial Sequence: Synthetic oligonucleotide
  Target: LAMA2; (+) strand; PAM type: YTN; PAM sequence: CTA
tctgtgcattttataagatt

SEQ ID NO: 339423 - DNA, 20 bp, Artificial Sequence
  Description of Artificial Sequence: Synthetic oligonucleotide
  Target: LAMA2; (+) strand; PAM type: YTN; PAM sequence: CTG
tgcattttataagattaatc

SEQ ID NO: 339424 - DNA, 20 bp, Artificial Sequence
  Description of Artificial Sequence: Synthetic oligonucleotide
  Target: LAMA2; (+) strand; PAM type: YTN; PAM sequence: TTT
tataagattaatccattggt

SEQ ID NO: 339425 - DNA, 20 bp, Artificial Sequence
  Description of Artificial Sequence: Synthetic oligonucleotide
  Target: LAMA2; (+) strand; PAM type: YTN; PAM sequence: TTT
ataagattaatccattggta

SEQ ID NO: 339426 - DNA, 20 bp, Artificial Sequence
  Description of Artificial Sequence: Synthetic oligonucleotide
  Target: LAMA2; (+) strand; PAM type: YTN; PAM sequence: TTA
taagattaatccattggtat

SEQ ID NO: 339427 - DNA, 20 bp, Artificial Sequence
  Description of Artificial Sequence: Synthetic oligonucleotide
  Target: LAMA2; (+) strand; PAM type: YTN; PAM sequence: TTA
atccattggtatgtttcttg

SEQ ID NO: 339428 - DNA, 20 bp, Artificial Sequence
  Description of Artificial Sequence: Synthetic oligonucleotide
  Target: LAMA2; (+) strand; PAM type: YTN; PAM sequence: TTG
gtatgtttcttgttgaattt

SEQ ID NO: 339429 - DNA, 20 bp, Artificial Sequence
  Description of Artificial Sequence: Synthetic oligonucleotide
  Target: LAMA2; (+) strand; PAM type: YTN; PAM sequence: TTT
cttgttgaatttctatataa

SEQ ID NO: 339430 - DNA, 20 bp, Artificial Sequence
  Description of Artificial Sequence: Synthetic oligonucleotide
  Target: LAMA2; (+) strand; PAM type: YTN; PAM sequence: TTC
ttgttgaatttctatataaa

SEQ ID NO: 339431 - DNA, 20 bp, Artificial Sequence
  Description of Artificial Sequence: Synthetic oligonucleotide
  Target: LAMA2; (+) strand; PAM type: YTN; PAM sequence: CTT
gttgaatttctatataaaga

SEQ ID NO: 339432 - DNA, 20 bp, Artificial Sequence
  Description of Artificial Sequence: Synthetic oligonucleotide
  Target: LAMA2; (+) strand; PAM type: YTN; PAM sequence: TTG
ttgaatttctatataaagac

SEQ ID NO: 339433 - DNA, 20 bp, Artificial Sequence
  Description of Artificial Sequence: Synthetic oligonucleotide
  Target: LAMA2; (+) strand; PAM type: YTN; PAM sequence: TTG
aatttctatataaagacatt

SEQ ID NO: 339434 - DNA, 20 bp, Artificial Sequence
  Description of Artificial Sequence: Synthetic oligonucleotide
  Target: LAMA2; (+) strand; PAM type: YTN; PAM sequence: TTT
ctatataaagacattctacg

SEQ ID NO: 339435 - DNA, 20 bp, Artificial Sequence
  Description of Artificial Sequence: Synthetic oligonucleotide
  Target: LAMA2; (+) strand; PAM type: YTN; PAM sequence: TTC
tatataaagacattctacgt

SEQ ID NO: 339436 - DNA, 20 bp, Artificial Sequence
  Description of Artificial Sequence: Synthetic oligonucleotide
  Target: LAMA2; (+) strand; PAM type: YTN; PAM sequence: CTA
tataaagacattctacgtga

SEQ ID NO: 339437 - DNA, 20 bp, Artificial Sequence
  Description of Artificial Sequence: Synthetic oligonucleotide
  Target: LAMA2; (+) strand; PAM type: YTN; PAM sequence: TTC
tacgtgatgagttgttcaat

SEQ ID NO: 339438 - DNA, 20 bp, Artificial Sequence
  Description of Artificial Sequence: Synthetic oligonucleotide
  Target: LAMA2; (+) strand; PAM type: YTN; PAM sequence: CTA
cgtgatgagttgttcaatat

SEQ ID NO: 339439 - DNA, 20 bp, Artificial Sequence
  Description of Artificial Sequence: Synthetic oligonucleotide
  Target: LAMA2; (+) strand; PAM type: YTN; PAM sequence: TTG
ttcaatatgaactgtctaaa

SEQ ID NO: 339440 - DNA, 20 bp, Artificial Sequence
  Description of Artificial Sequence: Synthetic oligonucleotide
  Target: LAMA2; (+) strand; PAM type: YTN; PAM sequence: TTC
aatatgaactgtctaaaaaa

SEQ ID NO: 339441 - DNA, 20 bp, Artificial Sequence
  Description of Artificial Sequence: Synthetic oligonucleotide
  Target: LAMA2; (+) strand; PAM type: YTN; PAM sequence: CTG
tctaaaaaacaattccttat

SEQ ID NO: 339442 - DNA, 20 bp, Artificial Sequence
  Description of Artificial Sequence: Synthetic oligonucleotide
  Target: LAMA2; (+) strand; PAM type: YTN; PAM sequence: CTA
aaaaacaattccttatgaat

SEQ ID NO: 339443 - DNA, 20 bp, Artificial Sequence
  Description of Artificial Sequence: Synthetic oligonucleotide
  Target: LAMA2; (+) strand; PAM type: YTN; PAM sequence: TTC
cttatgaataatacctaaaa

SEQ ID NO: 339444 - DNA, 20 bp, Artificial Sequence
  Description of Artificial Sequence: Synthetic oligonucleotide
  Target: LAMA2; (+) strand; PAM type: YTN; PAM sequence: CTT
atgaataatacctaaaaatg

SEQ ID NO: 339445 - DNA, 20 bp, Artificial Sequence
  Description of Artificial Sequence: Synthetic oligonucleotide
  Target: LAMA2; (+) strand; PAM type: YTN; PAM sequence: TTA
tgaataatacctaaaaatgc

SEQ ID NO: 339446 - DNA, 20 bp, Artificial Sequence
  Description of Artificial Sequence: Synthetic oligonucleotide
  Target: LAMA2; (+) strand; PAM type: YTN; PAM sequence: CTA
aaaatgcataagtagcaaat

SEQ ID NO: 339447 - DNA, 20 bp, Artificial Sequence
  Description of Artificial Sequence: Synthetic oligonucleotide
  Target: LAMA2; (+) strand; PAM type: YTN; PAM sequence: CTT
ttatagtggttgatgtaaca

SEQ ID NO: 339448 - DNA, 20 bp, Artificial Sequence
  Description of Artificial Sequence: Synthetic oligonucleotide
  Target: LAMA2; (+) strand; PAM type: YTN; PAM sequence: TTT
tatagtggttgatgtaacat

SEQ ID NO: 339449 - DNA, 20 bp, Artificial Sequence
  Description of Artificial Sequence: Synthetic oligonucleotide
  Target: LAMA2; (+) strand; PAM type: YTN; PAM sequence: TTT
atagtggttgatgtaacata

SEQ ID NO: 339450 - DNA, 20 bp, Artificial Sequence
  Description of Artificial Sequence: Synthetic oligonucleotide
  Target: LAMA2; (+) strand; PAM type: YTN; PAM sequence: TTA
tagtggttgatgtaacatat

SEQ ID NO: 339451 - DNA, 20 bp, Artificial Sequence
  Description of Artificial Sequence: Synthetic oligonucleotide
  Target: LAMA2; (+) strand; PAM type: YTN; PAM sequence: TTG
atgtaacatattctatgttg

SEQ ID NO: 339452 - DNA, 20 bp, Artificial Sequence
  Description of Artificial Sequence: Synthetic oligonucleotide
  Target: LAMA2; (+) strand; PAM type: YTN; PAM sequence: TTC
tatgttgttcctacttttgc

SEQ ID NO: 339453 - DNA, 20 bp, Artificial Sequence
  Description of Artificial Sequence: Synthetic oligonucleotide
  Target: LAMA2; (+) strand; PAM type: YTN; PAM sequence: CTA
tgttgttcctacttttgccc

SEQ ID NO: 339454 - DNA, 20 bp, Artificial Sequence
  Description of Artificial Sequence: Synthetic oligonucleotide
  Target: LAMA2; (+) strand; PAM type: YTN; PAM sequence: TTG
ttcctacttttgccctttct

SEQ ID NO: 339455 - DNA, 20 bp, Artificial Sequence
  Description of Artificial Sequence: Synthetic oligonucleotide
  Target: LAMA2; (+) strand; PAM type: YTN; PAM sequence: TTC
ctacttttgccctttctctg

SEQ ID NO: 339456 - DNA, 20 bp, Artificial Sequence
  Description of Artificial Sequence: Synthetic oligonucleotide
  Target: LAMA2; (+) strand; PAM type: YTN; PAM sequence: CTA
cttttgccctttctctgtta

SEQ ID NO: 339457 - DNA, 20 bp, Artificial Sequence
  Description of Artificial Sequence: Synthetic oligonucleotide
  Target: LAMA2; (+) strand; PAM type: YTN; PAM sequence: CTT
ttgccctttctctgttactt

SEQ ID NO: 339458 - DNA, 20 bp, Artificial Sequence
  Description of Artificial Sequence: Synthetic oligonucleotide
  Target: LAMA2; (+) strand; PAM type: YTN; PAM sequence: TTT
tgccctttctctgttactta

SEQ ID NO: 339459 - DNA, 20 bp, Artificial Sequence
  Description of Artificial Sequence: Synthetic oligonucleotide
  Target: LAMA2; (+) strand; PAM type: YTN; PAM sequence: TTT
gccctttctctgttacttat

SEQ ID NO: 339460 - DNA, 20 bp, Artificial Sequence
  Description of Artificial Sequence: Synthetic oligonucleotide
  Target: LAMA2; (+) strand; PAM type: YTN; PAM sequence: TTG
ccctttctctgttacttatt

SEQ ID NO: 339461 - DNA, 20 bp, Artificial Sequence
  Description of Artificial Sequence: Synthetic oligonucleotide
  Target: LAMA2; (+) strand; PAM type: YTN; PAM sequence: CTT
tctctgttacttattttact

SEQ ID NO: 339462 - DNA, 20 bp, Artificial Sequence
  Description of Artificial Sequence: Synthetic oligonucleotide
  Target: LAMA2; (+) strand; PAM type: YTN; PAM sequence: TTT
ctctgttacttattttactt

SEQ ID NO: 339463 - DNA, 20 bp, Artificial Sequence
  Description of Artificial Sequence: Synthetic oligonucleotide
  Target: LAMA2; (+) strand; PAM type: YTN; PAM sequence: TTC
tctgttacttattttacttt

SEQ ID NO: 339464 - DNA, 20 bp, Artificial Sequence
  Description of Artificial Sequence: Synthetic oligonucleotide
  Target: LAMA2; (+) strand; PAM type: YTN; PAM sequence: CTC
tgttacttattttactttgt

SEQ ID NO: 339465 - DNA, 20 bp, Artificial Sequence
  Description of Artificial Sequence: Synthetic oligonucleotide
  Target: LAMA2; (+) strand; PAM type: YTN; PAM sequence: CTG
ttacttattttactttgtct

SEQ ID NO: 339466 - DNA, 20 bp, Artificial Sequence
  Description of Artificial Sequence: Synthetic oligonucleotide
  Target: LAMA2; (+) strand; PAM type: YTN; PAM sequence: TTA
cttattttactttgtcttta

SEQ ID NO: 339467 - DNA, 20 bp, Artificial Sequence
  Description of Artificial Sequence: Synthetic oligonucleotide
  Target: LAMA2; (+) strand; PAM type: YTN; PAM sequence: CTT
attttactttgtctttattt

SEQ ID NO: 339468 - DNA, 20 bp, Artificial Sequence
  Description of Artificial Sequence: Synthetic oligonucleotide
  Target: LAMA2; (+) strand; PAM type: YTN; PAM sequence: TTA
ttttactttgtctttatttt

SEQ ID NO: 339469 - DNA, 20 bp, Artificial Sequence
  Description of Artificial Sequence: Synthetic oligonucleotide
  Target: LAMA2; (+) strand; PAM type: YTN; PAM sequence: TTT
tactttgtctttattttaaa

SEQ ID NO: 339470 - DNA, 20 bp, Artificial Sequence
  Description of Artificial Sequence: Synthetic oligonucleotide
  Target: LAMA2; (+) strand; PAM type: YTN; PAM sequence: TTT
actttgtctttattttaaag

SEQ ID NO: 339471 - DNA, 20 bp, Artificial Sequence
  Description of Artificial Sequence: Synthetic oligonucleotide
  Target: LAMA2; (+) strand; PAM type: YTN; PAM sequence: TTA
ctttgtctttattttaaaga

SEQ ID NO: 339472 - DNA, 20 bp, Artificial Sequence
  Description of Artificial Sequence: Synthetic oligonucleotide
  Target: LAMA2; (+) strand; PAM type: YTN; PAM sequence: CTT
tgtctttattttaaagataa

SEQ ID NO: 339473 - DNA, 20 bp, Artificial Sequence
  Description of Artificial Sequence: Synthetic oligonucleotide
  Target: LAMA2; (+) strand; PAM type: YTN; PAM sequence: TTT
gtctttattttaaagataat

SEQ ID NO: 339474 - DNA, 20 bp, Artificial Sequence
  Description of Artificial Sequence: Synthetic oligonucleotide
  Target: LAMA2; (+) strand; PAM type: YTN; PAM sequence: TTG
tctttattttaaagataatt

SEQ ID NO: 339475 - DNA, 20 bp, Artificial Sequence
  Description of Artificial Sequence: Synthetic oligonucleotide
  Target: LAMA2; (+) strand; PAM type: YTN; PAM sequence: CTT
tattttaaagataattttat

SEQ ID NO: 339476 - DNA, 20 bp, Artificial Sequence
  Description of Artificial Sequence: Synthetic oligonucleotide
  Target: LAMA2; (+) strand; PAM type: YTN; PAM sequence: TTT
attttaaagataattttatt

SEQ ID NO: 339477 - DNA, 20 bp, Artificial Sequence
  Description of Artificial Sequence: Synthetic oligonucleotide
  Target: LAMA2; (+) strand; PAM type: YTN; PAM sequence: TTA
ttttaaagataattttattt

SEQ ID NO: 339478 - DNA, 20 bp, Artificial Sequence
  Description of Artificial Sequence: Synthetic oligonucleotide
  Target: LAMA2; (+) strand; PAM type: YTN; PAM sequence: TTT
taaagataattttatttaaa

SEQ ID NO: 339479 - DNA, 20 bp, Artificial Sequence
  Description of Artificial Sequence: Synthetic oligonucleotide
  Target: LAMA2; (+) strand; PAM type: YTN; PAM sequence: TTT
aaagataattttatttaaaa

SEQ ID NO: 339480 - DNA, 20 bp, Artificial Sequence
  Description of Artificial Sequence: Synthetic oligonucleotide
  Target: LAMA2; (+) strand; PAM type: YTN; PAM sequence: TTA
aagataattttatttaaaag

SEQ ID NO: 339481 - DNA, 20 bp, Artificial Sequence
  Description of Artificial Sequence: Synthetic oligonucleotide
  Target: LAMA2; (+) strand; PAM type: YTN; PAM sequence: TTT
tatttaaaagtaaaacattt

SEQ ID NO: 339482 - DNA, 20 bp, Artificial Sequence
  Description of Artificial Sequence: Synthetic oligonucleotide
  Target: LAMA2; (+) strand; PAM type: YTN; PAM sequence: TTT
atttaaaagtaaaacattta

SEQ ID NO: 339483 - DNA, 20 bp, Artificial Sequence
  Description of Artificial Sequence: Synthetic oligonucleotide
  Target: LAMA2; (+) strand; PAM type: YTN; PAM sequence: TTA
tttaaaagtaaaacatttat

SEQ ID NO: 339484 - DNA, 20 bp, Artificial Sequence
  Description of Artificial Sequence: Synthetic oligonucleotide
  Target: LAMA2; (+) strand; PAM type: YTN; PAM sequence: TTT
aaaagtaaaacatttatgtt

SEQ ID NO: 339485 - DNA, 20 bp, Artificial Sequence
  Description of Artificial Sequence: Synthetic oligonucleotide
  Target: LAMA2; (+) strand; PAM type: YTN; PAM sequence: TTA
aaagtaaaacatttatgttc

SEQ ID NO: 339486 - DNA, 20 bp, Artificial Sequence
  Description of Artificial Sequence: Synthetic oligonucleotide
  Target: LAMA2; (+) strand; PAM type: YTN; PAM sequence: TTT
atgttcatacaaaaaatata

SEQ ID NO: 339487 - DNA, 20 bp, Artificial Sequence
  Description of Artificial Sequence: Synthetic oligonucleotide
  Target: LAMA2; (+) strand; PAM type: YTN; PAM sequence: TTA
tgttcatacaaaaaatatag

SEQ ID NO: 339488 - DNA, 20 bp, Artificial Sequence
  Description of Artificial Sequence: Synthetic oligonucleotide
  Target: LAMA2; (+) strand; PAM type: YTN; PAM sequence: TTC
atacaaaaaatatagcagaa

SEQ ID NO: 339489 - DNA, 20 bp, Artificial Sequence
  Description of Artificial Sequence: Synthetic oligonucleotide
  Target: LAMA2; (+) strand; PAM type: YTN; PAM sequence: CTC
ctcttttcttgactcctaaa

SEQ ID NO: 339490 - DNA, 20 bp, Artificial Sequence
  Description of Artificial Sequence: Synthetic oligonucleotide
  Target: LAMA2; (+) strand; PAM type: YTN; PAM sequence: CTC
ttttcttgactcctaaaggt

SEQ ID NO: 339491 - DNA, 20 bp, Artificial Sequence
  Description of Artificial Sequence: Synthetic oligonucleotide
  Target: LAMA2; (+) strand; PAM type: YTN; PAM sequence: CTT
ttcttgactcctaaaggtgg

SEQ ID NO: 339492 - DNA, 20 bp, Artificial Sequence
  Description of Artificial Sequence: Synthetic oligonucleotide
  Target: LAMA2; (+) strand; PAM type: YTN; PAM sequence: TTT
tcttgactcctaaaggtggc

SEQ ID NO: 339493 - DNA, 20 bp, Artificial Sequence
  Description of Artificial Sequence: Synthetic oligonucleotide
  Target: LAMA2; (+) strand; PAM type: YTN; PAM sequence: TTT
cttgactcctaaaggtggca

SEQ ID NO: 339494 - DNA, 20 bp, Artificial Sequence
  Description of Artificial Sequence: Synthetic oligonucleotide
  Target: LAMA2; (+) strand; PAM type: YTN; PAM sequence: TTC
ttgactcctaaaggtggcag

SEQ ID NO: 339495 - DNA, 20 bp, Artificial Sequence
  Description of Artificial Sequence: Synthetic oligonucleotide
  Target: LAMA2; (+) strand; PAM type: YTN; PAM sequence: CTT
gactcctaaaggtggcagct

SEQ ID NO: 339496 - DNA, 20 bp, Artificial Sequence
  Description of Artificial Sequence: Synthetic oligonucleotide
  Target: LAMA2; (+) strand; PAM type: YTN; PAM sequence: TTG
actcctaaaggtggcagctt

SEQ ID NO: 339497 - DNA, 20 bp, Artificial Sequence
  Description of Artificial Sequence: Synthetic oligonucleotide
  Target: LAMA2; (+) strand; PAM type: YTN; PAM sequence: CTC
ctaaaggtggcagctttaat

SEQ ID NO: 339498 - DNA, 20 bp, Artificial Sequence
  Description of Artificial Sequence: Synthetic oligonucleotide
  Target: LAMA2; (+) strand; PAM type: YTN; PAM sequence: CTA
aaggtggcagctttaatatg

SEQ ID NO: 339499 - DNA, 20 bp, Artificial Sequence
  Description of Artificial Sequence: Synthetic oligonucleotide
  Target: LAMA2; (+) strand; PAM type: YTN; PAM sequence: CTT
taatatgttcacataattcc

SEQ ID NO: 339500 - DNA, 20 bp, Artificial Sequence
  Description of Artificial Sequence: Synthetic oligonucleotide
  Target: LAMA2; (+) strand; PAM type: YTN; PAM sequence: TTT
aatatgttcacataattcct

SEQ ID NO: 339501 - DNA, 20 bp, Artificial Sequence
  Description of Artificial Sequence: Synthetic oligonucleotide
  Target: LAMA2; (+) strand; PAM type: YTN; PAM sequence: TTA
atatgttcacataattcctc

SEQ ID NO: 339502 - DNA, 20 bp, Artificial Sequence
  Description of Artificial Sequence: Synthetic oligonucleotide
  Target: LAMA2; (+) strand; PAM type: YTN; PAM sequence: TTC
acataattcctctcccaaaa

SEQ ID NO: 339503 - DNA, 20 bp, Artificial Sequence
  Description of Artificial Sequence: Synthetic oligonucleotide
  Target: LAMA2; (+) strand; PAM type: YTN; PAM sequence: TTC
ctctcccaaaatgtcttggc

SEQ ID NO: 339504 - DNA, 20 bp, Artificial Sequence
  Description of Artificial Sequence: Synthetic oligonucleotide
  Target: LAMA2; (+) strand; PAM type: YTN; PAM sequence: CTC
tcccaaaatgtcttggcata

SEQ ID NO: 339505 - DNA, 20 bp, Artificial Sequence
  Description of Artificial Sequence: Synthetic oligonucleotide
  Target: LAMA2; (+) strand; PAM type: YTN; PAM sequence: CTC
ccaaaatgtcttggcatatt

SEQ ID NO: 339506 - DNA, 20 bp, Artificial Sequence
  Description of Artificial Sequence: Synthetic oligonucleotide
  Target: LAMA2; (+) strand; PAM type: YTN; PAM sequence: CTT
ggcatattcaagcagttaca

SEQ ID NO: 339507 - DNA, 20 bp, Artificial Sequence
  Description of Artificial Sequence: Synthetic oligonucleotide
  Target: LAMA2; (+) strand; PAM type: YTN; PAM sequence: TTG
gcatattcaagcagttacag

SEQ ID NO: 339508 - DNA, 20 bp, Artificial Sequence
  Description of Artificial Sequence: Synthetic oligonucleotide
  Target: LAMA2; (+) strand; PAM type: YTN; PAM sequence: TTC
aagcagttacaggcacatac

SEQ ID NO: 339509 - DNA, 20 bp, Artificial Sequence
  Description of Artificial Sequence: Synthetic oligonucleotide
  Target: LAMA2; (+) strand; PAM type: YTN; PAM sequence: TTA
caggcacatacatagatatg

SEQ ID NO: 339510 - DNA, 20 bp, Artificial Sequence
  Description of Artificial Sequence: Synthetic oligonucleotide
  Target: LAMA2; (+) strand; PAM type: YTN; PAM sequence: CTA
tctgcagttatacctatcta

SEQ ID NO: 339511 - DNA, 20 bp, Artificial Sequence
  Description of Artificial Sequence: Synthetic oligonucleotide
  Target: LAMA2; (+) strand; PAM type: YTN; PAM sequence: CTG
cagttatacctatctatatg

SEQ ID NO: 339512 - DNA, 20 bp, Artificial Sequence
  Description of Artificial Sequence: Synthetic oligonucleotide
  Target: LAMA2; (+) strand; PAM type: YTN; PAM sequence: TTA
tacctatctatatgcctttg

SEQ ID NO: 339513 - DNA, 20 bp, Artificial Sequence
  Description of Artificial Sequence: Synthetic oligonucleotide
  Target: LAMA2; (+) strand; PAM type: YTN; PAM sequence: CTA
tctatatgcctttgtaaata

SEQ ID NO: 339514 - DNA, 20 bp, Artificial Sequence
  Description of Artificial Sequence: Synthetic oligonucleotide
  Target: LAMA2; (+) strand; PAM type: YTN; PAM sequence: CTA
tatgcctttgtaaatataaa

SEQ ID NO: 339515 - DNA, 20 bp, Artificial Sequence
  Description of Artificial Sequence: Synthetic oligonucleotide
  Target: LAMA2; (+) strand; PAM type: YTN; PAM sequence: CTT
tgtaaatataaattcatcag

SEQ ID NO: 339516 - DNA, 20 bp, Artificial Sequence
  Description of Artificial Sequence: Synthetic oligonucleotide
  Target: LAMA2; (+) strand; PAM type: YTN; PAM sequence: TTT
gtaaatataaattcatcagt

SEQ ID NO: 339517 - DNA, 20 bp, Artificial Sequence
  Description of Artificial Sequence: Synthetic oligonucleotide
  Target: LAMA2; (+) strand; PAM type: YTN; PAM sequence: TTG
taaatataaattcatcagta

SEQ ID NO: 339518 - DNA, 20 bp, Artificial Sequence
  Description of Artificial Sequence: Synthetic oligonucleotide
  Target: LAMA2; (+) strand; PAM type: YTN; PAM sequence: TTC
atcagtatttctcacctgca

SEQ ID NO: 339519 - DNA, 20 bp, Artificial Sequence
  Description of Artificial Sequence: Synthetic oligonucleotide
  Target: LAMA2; (+) strand; PAM type: YTN; PAM sequence: TTT
ctcacctgcagtgatactca

SEQ ID NO: 339520 - DNA, 20 bp, Artificial Sequence
  Description of Artificial Sequence: Synthetic oligonucleotide
  Target: LAMA2; (+) strand; PAM type: YTN; PAM sequence: TTC
tcacctgcagtgatactcaa

SEQ ID NO: 339521 - DNA, 20 bp, Artificial Sequence
  Description of Artificial Sequence: Synthetic oligonucleotide
  Target: LAMA2; (+) strand; PAM type: YTN; PAM sequence: CTC
acctgcagtgatactcaata

SEQ ID NO: 339522 - DNA, 20 bp, Artificial Sequence
  Description of Artificial Sequence: Synthetic oligonucleotide
  Target: LAMA2; (+) strand; PAM type: YTN; PAM sequence: CTG
cagtgatactcaataaaaca

SEQ ID NO: 339523 - DNA, 20 bp, Artificial Sequence
  Description of Artificial Sequence: Synthetic oligonucleotide
  Target: LAMA2; (+) strand; PAM type: YTN; PAM sequence: CTC
aataaaacagaatgctcaaa

SEQ ID NO: 339524 - DNA, 20 bp, Artificial Sequence
  Description of Artificial Sequence: Synthetic oligonucleotide
  Target: LAMA2; (+) strand; PAM type: YTN; PAM sequence: CTC
aaagcccagacccctcagga

SEQ ID NO: 339525 - DNA, 20 bp, Artificial Sequence
  Description of Artificial Sequence: Synthetic oligonucleotide
  Target: LAMA2; (+) strand; PAM type: YTN; PAM sequence: CTC
aggacaaatatcttggctgt

SEQ ID NO: 339526 - DNA, 20 bp, Artificial Sequence
  Description of Artificial Sequence: Synthetic oligonucleotide
  Target: LAMA2; (+) strand; PAM type: YTN; PAM sequence: CTT
ggctgtccttgctatgctgg

SEQ ID NO: 339527 - DNA, 20 bp, Artificial Sequence
  Description of Artificial Sequence: Synthetic oligonucleotide
  Target: LAMA2; (+) strand; PAM type: YTN; PAM sequence: TTG
gctgtccttgctatgctggg

SEQ ID NO: 339528 - DNA, 20 bp, Artificial Sequence
  Description of Artificial Sequence: Synthetic oligonucleotide
  Target: LAMA2; (+) strand; PAM type: YTN; PAM sequence: CTG
tccttgctatgctggggtca

SEQ ID NO: 339529 - DNA, 20 bp, Artificial Sequence
  Description of Artificial Sequence: Synthetic oligonucleotide
  Target: LAMA2; (+) strand; PAM type: YTN; PAM sequence: CTT
gctatgctggggtcaatcag

SEQ ID NO: 339530 - DNA, 20 bp, Artificial Sequence
  Description of Artificial Sequence: Synthetic oligonucleotide
  Target: LAMA2; (+) strand; PAM type: YTN; PAM sequence: TTG
ctatgctggggtcaatcaga

SEQ ID NO: 339531 - DNA, 20 bp, Artificial Sequence
  Description of Artificial Sequence: Synthetic oligonucleotide
  Target: LAMA2; (+) strand; PAM type: YTN; PAM sequence: CTA
tgctggggtcaatcagatgg

SEQ ID NO: 339532 - DNA, 20 bp, Artificial Sequence
  Description of Artificial Sequence: Synthetic oligonucleotide
  Target: LAMA2; (+) strand; PAM type: YTN; PAM sequence: CTG
gggtcaatcagatggtctca

SEQ ID NO: 339533 - DNA, 20 bp, Artificial Sequence
  Description of Artificial Sequence: Synthetic oligonucleotide
  Target: LAMA2; (+) strand; PAM type: YTN; PAM sequence: CTC
aggggagaggaggcatttgg

SEQ ID NO: 339534 - DNA, 20 bp, Artificial Sequence
  Description of Artificial Sequence: Synthetic oligonucleotide
  Target: LAMA2; (+) strand; PAM type: YTN; PAM sequence: TTT
gggaggttgggcagcagtga

SEQ ID NO: 339535 - DNA, 20 bp, Artificial Sequence
  Description of Artificial Sequence: Synthetic oligonucleotide
  Target: LAMA2; (+) strand; PAM type: YTN; PAM sequence: TTG
ggaggttgggcagcagtgat

SEQ ID NO: 339536 - DNA, 20 bp, Artificial Sequence
  Description of Artificial Sequence: Synthetic oligonucleotide
  Target: LAMA2; (+) strand; PAM type: YTN; PAM sequence: TTG
ggcagcagtgatttgtcaac

SEQ ID NO: 339537 - DNA, 20 bp, Artificial Sequence
  Description of Artificial Sequence: Synthetic oligonucleotide
  Target: LAMA2; (+) strand; PAM type: YTN; PAM sequence: TTT
gtcaacaagtacagaagcat

SEQ ID NO: 339538 - DNA, 20 bp, Artificial Sequence
  Description of Artificial Sequence: Synthetic oligonucleotide
  Target: LAMA2; (+) strand; PAM type: YTN; PAM sequence: TTG
tcaacaagtacagaagcatt

SEQ ID NO: 339539 - DNA, 20 bp, Artificial Sequence
  Description of Artificial Sequence: Synthetic oligonucleotide
  Target: LAMA2; (+) strand; PAM type: YTN; PAM sequence: TTT
cagtattttatccactagtt

SEQ ID NO: 339540 - DNA, 20 bp, Artificial Sequence
  Description of Artificial Sequence: Synthetic oligonucleotide
  Target: LAMA2; (+) strand; PAM type: YTN; PAM sequence: TTC
agtattttatccactagttg

SEQ ID NO: 339541 - DNA, 20 bp, Artificial Sequence
  Description of Artificial Sequence: Synthetic oligonucleotide
  Target: LAMA2; (+) strand; PAM type: YTN; PAM sequence: TTT
tatccactagttgttccaca

SEQ ID NO: 339542 - DNA, 20 bp, Artificial Sequence
  Description of Artificial Sequence: Synthetic oligonucleotide
  Target: LAMA2; (+) strand; PAM type: YTN; PAM sequence: TTT
atccactagttgttccacaa

SEQ ID NO: 339543 - DNA, 20 bp, Artificial Sequence
  Description of Artificial Sequence: Synthetic oligonucleotide
  Target: LAMA2; (+) strand; PAM type: YTN; PAM sequence: TTA
tccactagttgttccacaac

SEQ ID NO: 339544 - DNA, 20 bp, Artificial Sequence
  Description of Artificial Sequence: Synthetic oligonucleotide
  Target: LAMA2; (+) strand; PAM type: YTN; PAM sequence: CTA
gttgttccacaactgtgcct

SEQ ID NO: 339545 - DNA, 20 bp, Artificial Sequence
  Description of Artificial Sequence: Synthetic oligonucleotide
  Target: LAMA2; (+) strand; PAM type: YTN; PAM sequence: TTG
ttccacaactgtgcctaaaa

SEQ ID NO: 339546 - DNA, 20 bp, Artificial Sequence
  Description of Artificial Sequence: Synthetic oligonucleotide
  Target: LAMA2; (+) strand; PAM type: YTN; PAM sequence: TTC
cacaactgtgcctaaaaggc

SEQ ID NO: 339547 - DNA, 20 bp, Artificial Sequence
  Description of Artificial Sequence: Synthetic oligonucleotide
  Target: LAMA2; (+) strand; PAM type: YTN; PAM sequence: CTG
tgcctaaaaggctaatacta

SEQ ID NO: 339548 - DNA, 20 bp, Artificial Sequence
  Description of Artificial Sequence: Synthetic oligonucleotide
  Target: LAMA2; (+) strand; PAM type: YTN; PAM sequence: CTA
aaaggctaatactaacccta

SEQ ID NO: 339549 - DNA, 20 bp, Artificial Sequence
  Description of Artificial Sequence: Synthetic oligonucleotide
  Target: LAMA2; (+) strand; PAM type: YTN; PAM sequence: CTA
atactaaccctactttgact

SEQ ID NO: 339550 - DNA, 20 bp, Artificial Sequence
  Description of Artificial Sequence: Synthetic oligonucleotide
  Target: LAMA2; (+) strand; PAM type: YTN; PAM sequence: CTA
accctactttgactcattcg

SEQ ID NO: 339551 - DNA, 20 bp, Artificial Sequence
  Description of Artificial Sequence: Synthetic oligonucleotide
  Target: LAMA2; (+) strand; PAM type: YTN; PAM sequence: CTA
ctttgactcattcgatgggt

SEQ ID NO: 339552 - DNA, 20 bp, Artificial Sequence
  Description of Artificial Sequence: Synthetic oligonucleotide
  Target: LAMA2; (+) strand; PAM type: YTN; PAM sequence: CTT
tgactcattcgatgggtgat

SEQ ID NO: 339553 - DNA, 20 bp, Artificial Sequence
  Description of Artificial Sequence: Synthetic oligonucleotide
  Target: LAMA2; (+) strand; PAM type: YTN; PAM sequence: TTT
gactcattcgatgggtgatt

SEQ ID NO: 339554 - DNA, 20 bp, Artificial Sequence
  Description of Artificial Sequence: Synthetic oligonucleotide
  Target: LAMA2; (+) strand; PAM type: YTN; PAM sequence: TTG
actcattcgatgggtgattt

SEQ ID NO: 339555 - DNA, 20 bp, Artificial Sequence
  Description of Artificial Sequence: Synthetic oligonucleotide
  Target: LAMA2; (+) strand; PAM type: YTN; PAM sequence: CTC
attcgatgggtgatttcccc

SEQ ID NO: 339556 - DNA, 20 bp, Artificial Sequence
  Description of Artificial Sequence: Synthetic oligonucleotide
  Target: LAMA2; (+) strand; PAM type: YTN; PAM sequence: TTC
gatgggtgatttcccctcca

SEQ ID NO: 339557 - DNA, 20 bp, Artificial Sequence
  Description of Artificial Sequence: Synthetic oligonucleotide
  Target: LAMA2; (+) strand; PAM type: YTN; PAM sequence: TTT
cccctccatggctctcaagc

SEQ ID NO: 339558 - DNA, 20 bp, Artificial Sequence
  Description of Artificial Sequence: Synthetic oligonucleotide
  Target: LAMA2; (+) strand; PAM type: YTN; PAM sequence: TTC
ccctccatggctctcaagca

SEQ ID NO: 339559 - DNA, 20 bp, Artificial Sequence
  Description of Artificial Sequence: Synthetic oligonucleotide
  Target: LAMA2; (+) strand; PAM type: YTN; PAM sequence: CTC
catggctctcaagcatgcat

SEQ ID NO: 339560 - DNA, 20 bp, Artificial Sequence
  Description of Artificial Sequence: Synthetic oligonucleotide
  Target: LAMA2; (+) strand; PAM type: YTN; PAM sequence: CTC
tcaagcatgcatgcattcaa

SEQ ID NO: 339561 - DNA, 20 bp, Artificial Sequence
  Description of Artificial Sequence: Synthetic oligonucleotide
  Target: LAMA2; (+) strand; PAM type: YTN; PAM sequence: CTC
aagcatgcatgcattcaagt

SEQ ID NO: 339562 - DNA, 20 bp, Artificial Sequence
  Description of Artificial Sequence: Synthetic oligonucleotide
  Target: LAMA2; (+) strand; PAM type: YTN; PAM sequence: TTC
aagtaaacatcttgaaggaa

SEQ ID NO: 339563 - DNA, 20 bp, Artificial Sequence
  Description of Artificial Sequence: Synthetic oligonucleotide
  Target: LAMA2; (+) strand; PAM type: YTN; PAM sequence: CTT
gaaggaatagcatcagagcc

SEQ ID NO: 339564 - DNA, 20 bp, Artificial Sequence
  Description of Artificial Sequence: Synthetic oligonucleotide
  Target: LAMA2; (+) strand; PAM type: YTN; PAM sequence: TTG
aaggaatagcatcagagcca

SEQ ID NO: 339565 - DNA, 20 bp, Artificial Sequence
  Description of Artificial Sequence: Synthetic oligonucleotide
  Target: LAMA2; (+) strand; PAM type: YTN; PAM sequence: CTG
tattaccgcattccatacca

SEQ ID NO: 339566 - DNA, 20 bp, Artificial Sequence
  Description of Artificial Sequence: Synthetic oligonucleotide
  Target: LAMA2; (+) strand; PAM type: YTN; PAM sequence: TTA
ccgcattccataccaaattt

SEQ ID NO: 339567 - DNA, 20 bp, Artificial Sequence
  Description of Artificial Sequence: Synthetic oligonucleotide
  Target: LAMA2; (+) strand; PAM type: YTN; PAM sequence: TTC
cataccaaatttttatattt

SEQ ID NO: 339568 - DNA, 20 bp, Artificial Sequence
  Description of Artificial Sequence: Synthetic oligonucleotide
  Target: LAMA2; (+) strand; PAM type: YTN; PAM sequence: TTT
ttatatttttaaatctagtc

SEQ ID NO: 339569 - DNA, 20 bp, Artificial Sequence
  Description of Artificial Sequence: Synthetic oligonucleotide
  Target: LAMA2; (+) strand; PAM type: YTN; PAM sequence: TTT
tatatttttaaatctagtcc

SEQ ID NO: 339570 - DNA, 20 bp, Artificial Sequence
  Description of Artificial Sequence: Synthetic oligonucleotide
  Target: LAMA2; (+) strand; PAM type: YTN; PAM sequence: TTT
atatttttaaatctagtccc

SEQ ID NO: 339571 - DNA, 20 bp, Artificial Sequence
  Description of Artificial Sequence: Synthetic oligonucleotide
  Target: LAMA2; (+) strand; PAM type: YTN; PAM sequence: TTA
tatttttaaatctagtccct

SEQ ID NO: 339572 - DNA, 20 bp, Artificial Sequence
  Description of Artificial Sequence: Synthetic oligonucleotide
  Target: LAMA2; (+) strand; PAM type: YTN; PAM sequence: TTT
ttaaatctagtcccttaggg

SEQ ID NO: 339573 - DNA, 20 bp, Artificial Sequence
  Description of Artificial Sequence: Synthetic oligonucleotide
  Target: LAMA2; (+) strand; PAM type: YTN; PAM sequence: TTT
taaatctagtcccttagggt

SEQ ID NO: 339574 - DNA, 20 bp, Artificial Sequence
  Description of Artificial Sequence: Synthetic oligonucleotide
  Target: LAMA2; (+) strand; PAM type: YTN; PAM sequence: TTT
aaatctagtcccttagggta

SEQ ID NO: 339575 - DNA, 20 bp, Artificial Sequence
  Description of Artificial Sequence: Synthetic oligonucleotide
  Target: LAMA2; (+) strand; PAM type: YTN; PAM sequence: TTA
aatctagtcccttagggtat

SEQ ID NO: 339576 - DNA, 20 bp, Artificial Sequence
  Description of Artificial Sequence: Synthetic oligonucleotide
  Target: LAMA2; (+) strand; PAM type: YTN; PAM sequence: CTA
gtcccttagggtataccata

SEQ ID NO: 339577 - DNA, 20 bp, Artificial Sequence
  Description of Artificial Sequence: Synthetic oligonucleotide
  Target: LAMA2; (+) strand; PAM type: YTN; PAM sequence: CTT
agggtataccatagatccta

SEQ ID NO: 339578 - DNA, 20 bp, Artificial Sequence
  Description of Artificial Sequence: Synthetic oligonucleotide
  Target: LAMA2; (+) strand; PAM type: YTN; PAM sequence: TTA
gggtataccatagatcctat

SEQ ID NO: 339579 - DNA, 20 bp, Artificial Sequence
  Description of Artificial Sequence: Synthetic oligonucleotide
  Target: LAMA2; (+) strand; PAM type: YTN; PAM sequence: CTA
tacacgtatgcatgagttac

SEQ ID NO: 339580 - DNA, 20 bp, Artificial Sequence
  Description of Artificial Sequence: Synthetic oligonucleotide
  Target: LAMA2; (+) strand; PAM type: YTN; PAM sequence: TTA
ccatgtcaaaactatgaagc

SEQ ID NO: 339581 - DNA, 20 bp, Artificial Sequence
  Description of Artificial Sequence: Synthetic oligonucleotide
  Target: LAMA2; (+) strand; PAM type: YTN; PAM sequence: CTA
tgaagcagataaaatttgtt

SEQ ID NO: 339582 - DNA, 20 bp, Artificial Sequence
  Description of Artificial Sequence: Synthetic oligonucleotide
  Target: LAMA2; (+) strand; PAM type: YTN; PAM sequence: TTT
gtttctagagcatccctttc

SEQ ID NO: 339583 - DNA, 20 bp, Artificial Sequence
  Description of Artificial Sequence: Synthetic oligonucleotide
  Target: LAMA2; (+) strand; PAM type: YTN; PAM sequence: TTG
tttctagagcatccctttca

SEQ ID NO: 339584 - DNA, 20 bp, Artificial Sequence
  Description of Artificial Sequence: Synthetic oligonucleotide
  Target: LAMA2; (+) strand; PAM type: YTN; PAM sequence: TTT
ctagagcatccctttcagga

SEQ ID NO: 339585 - DNA, 20 bp, Artificial Sequence
  Description of Artificial Sequence: Synthetic oligonucleotide
  Target: LAMA2; (+) strand; PAM type: YTN; PAM sequence: TTC
tagagcatccctttcaggat

SEQ ID NO: 339586 - DNA, 20 bp, Artificial Sequence
  Description of Artificial Sequence: Synthetic oligonucleotide
  Target: LAMA2; (+) strand; PAM type: YTN; PAM sequence: CTA
gagcatccctttcaggattc

SEQ ID NO: 339587 - DNA, 20 bp, Artificial Sequence
  Description of Artificial Sequence: Synthetic oligonucleotide
  Target: LAMA2; (+) strand; PAM type: YTN; PAM sequence: CTT
tcaggattccctctgtagct

SEQ ID NO: 339588 - DNA, 20 bp, Artificial Sequence
  Description of Artificial Sequence: Synthetic oligonucleotide
  Target: LAMA2; (+) strand; PAM type: YTN; PAM sequence: TTT
caggattccctctgtagctc

SEQ ID NO: 339589 - DNA, 20 bp, Artificial Sequence
  Description of Artificial Sequence: Synthetic oligonucleotide
  Target: LAMA2; (+) strand; PAM type: YTN; PAM sequence: TTC
aggattccctctgtagctca

SEQ ID NO: 339590 - DNA, 20 bp, Artificial Sequence
  Description of Artificial Sequence: Synthetic oligonucleotide
  Target: LAMA2; (+) strand; PAM type: YTN; PAM sequence: TTC
cctctgtagctcagcagtcc

SEQ ID NO: 339591 - DNA, 20 bp, Artificial Sequence
  Description of Artificial Sequence: Synthetic oligonucleotide
  Target: LAMA2; (+) strand; PAM type: YTN; PAM sequence: CTC
tgtagctcagcagtcctgtt

SEQ ID NO: 339592 - DNA, 20 bp, Artificial Sequence
  Description of Artificial Sequence: Synthetic oligonucleotide
  Target: LAMA2; (+) strand; PAM type: YTN; PAM sequence: CTG
tagctcagcagtcctgttaa

SEQ ID NO: 339593 - DNA, 20 bp, Artificial Sequence
  Description of Artificial Sequence: Synthetic oligonucleotide
  Target: LAMA2; (+) strand; PAM type: YTN; PAM sequence: CTC
agcagtcctgttaatcacat

SEQ ID NO: 339594 - DNA, 20 bp, Artificial Sequence
  Description of Artificial Sequence: Synthetic oligonucleotide
  Target: LAMA2; (+) strand; PAM type: YTN; PAM sequence: CTG
ttaatcacattgtagtgagc

SEQ ID NO: 339595 - DNA, 20 bp, Artificial Sequence
  Description of Artificial Sequence: Synthetic oligonucleotide
  Target: LAMA2; (+) strand; PAM type: YTN; PAM sequence: TTA
atcacattgtagtgagcctg

SEQ ID NO: 339596 - DNA, 20 bp, Artificial Sequence
  Description of Artificial Sequence: Synthetic oligonucleotide
  Target: LAMA2; (+) strand; PAM type: YTN; PAM sequence: TTG
tagtgagcctgtcctcccaa

SEQ ID NO: 339597 - DNA, 20 bp, Artificial Sequence
  Description of Artificial Sequence: Synthetic oligonucleotide
  Target: LAMA2; (+) strand; PAM type: YTN; PAM sequence: CTG
tcctcccaattgtgccccac

SEQ ID NO: 339598 - DNA, 20 bp, Artificial Sequence
  Description of Artificial Sequence: Synthetic oligonucleotide
  Target: LAMA2; (+) strand; PAM type: YTN; PAM sequence: CTC
ccaattgtgccccaccagtg

SEQ ID NO: 339599 - DNA, 20 bp, Artificial Sequence
  Description of Artificial Sequence: Synthetic oligonucleotide
  Target: LAMA2; (+) strand; PAM type: YTN; PAM sequence: TTG
tgccccaccagtgacctcat

SEQ ID NO: 339600 - DNA, 20 bp, Artificial Sequence
  Description of Artificial Sequence: Synthetic oligonucleotide
  Target: LAMA2; (+) strand; PAM type: YTN; PAM sequence: CTC
atccacttagagcttagagc

SEQ ID NO: 339601 - DNA, 20 bp, Artificial Sequence
  Description of Artificial Sequence: Synthetic oligonucleotide
  Target: LAMA2; (+) strand; PAM type: YTN; PAM sequence: CTT
agagcttagagctgccaagc

SEQ ID NO: 339602 - DNA, 20 bp, Artificial Sequence
  Description of Artificial Sequence: Synthetic oligonucleotide
  Target: LAMA2; (+) strand; PAM type: YTN; PAM sequence: TTA
gagcttagagctgccaagct

SEQ ID NO: 339603 - DNA, 20 bp, Artificial Sequence
  Description of Artificial Sequence: Synthetic oligonucleotide
  Target: LAMA2; (+) strand; PAM type: YTN; PAM sequence: CTT
agagctgccaagctctcata

SEQ ID NO: 339604 - DNA, 20 bp, Artificial Sequence
  Description of Artificial Sequence: Synthetic oligonucleotide
  Target: LAMA2; (+) strand; PAM type: YTN; PAM sequence: TTA
gagctgccaagctctcatac

SEQ ID NO: 339605 - DNA, 20 bp, Artificial Sequence
  Description of Artificial Sequence: Synthetic oligonucleotide
  Target: LAMA2; (+) strand; PAM type: YTN; PAM sequence: CTG
ccaagctctcatacctcata

SEQ ID NO: 339606 - DNA, 20 bp, Artificial Sequence
  Description of Artificial Sequence: Synthetic oligonucleotide
  Target: LAMA2; (+) strand; PAM type: YTN; PAM sequence: CTC
tcatacctcatagcatttac

SEQ ID NO: 339607 - DNA, 20 bp, Artificial Sequence
  Description of Artificial Sequence: Synthetic oligonucleotide
  Target: LAMA2; (+) strand; PAM type: YTN; PAM sequence: CTC
atacctcatagcatttacta

SEQ ID NO: 339608 - DNA, 20 bp, Artificial Sequence
  Description of Artificial Sequence: Synthetic oligonucleotide
  Target: LAMA2; (+) strand; PAM type: YTN; PAM sequence: CTC
atagcatttactagtcaaga

SEQ ID NO: 339609 - DNA, 20 bp, Artificial Sequence
  Description of Artificial Sequence: Synthetic oligonucleotide
  Target: LAMA2; (+) strand; PAM type: YTN; PAM sequence: TTT
actagtcaagaacatatcat

SEQ ID NO: 339610 - DNA, 20 bp, Artificial Sequence
  Description of Artificial Sequence: Synthetic oligonucleotide
  Target: LAMA2; (+) strand; PAM type: YTN; PAM sequence: TTA
ctagtcaagaacatatcata

SEQ ID NO: 339611 - DNA, 20 bp, Artificial Sequence
  Description of Artificial Sequence: Synthetic oligonucleotide
  Target: LAMA2; (+) strand; PAM type: YTN; PAM sequence: CTA
gtcaagaacatatcatactg

SEQ ID NO: 339612 - DNA, 20 bp, Artificial Sequence
  Description of Artificial Sequence: Synthetic oligonucleotide
  Target: LAMA2; (+) strand; PAM type: YTN; PAM sequence: CTG
ttttattattatagcacttt

SEQ ID NO: 339613 - DNA, 20 bp, Artificial Sequence
  Description of Artificial Sequence: Synthetic oligonucleotide
  Target: LAMA2; (+) strand; PAM type: YTN; PAM sequence: TTT
tattattatagcacttttca

SEQ ID NO: 339614 - DNA, 20 bp, Artificial Sequence
  Description of Artificial Sequence: Synthetic oligonucleotide
  Target: LAMA2; (+) strand; PAM type: YTN; PAM sequence: TTT
attattatagcacttttcat

SEQ ID NO: 339615 - DNA, 20 bp, Artificial Sequence
  Description of Artificial Sequence: Synthetic oligonucleotide
  Target: LAMA2; (+) strand; PAM type: YTN; PAM sequence: TTA
ttattatagcacttttcatt

SEQ ID NO: 339616 - DNA, 20 bp, Artificial Sequence
  Description of Artificial Sequence: Synthetic oligonucleotide
  Target: LAMA2; (+) strand; PAM type: YTN; PAM sequence: TTA
ttatagcacttttcatttgt

SEQ ID NO: 339617 - DNA, 20 bp, Artificial Sequence
  Description of Artificial Sequence: Synthetic oligonucleotide
  Target: LAMA2; (+) strand; PAM type: YTN; PAM sequence: TTA
tagcacttttcatttgtctc

SEQ ID NO: 339618 - DNA, 20 bp, Artificial Sequence
  Description of Artificial Sequence: Synthetic oligonucleotide
  Target: LAMA2; (+) strand; PAM type: YTN; PAM sequence: CTT
ttcatttgtctcattattac

SEQ ID NO: 339619 - DNA, 20 bp, Artificial Sequence
  Description of Artificial Sequence: Synthetic oligonucleotide
  Target: LAMA2; (+) strand; PAM type: YTN; PAM sequence: TTT
tcatttgtctcattattaca

SEQ ID NO: 339620 - DNA, 20 bp, Artificial Sequence
  Description of Artificial Sequence: Synthetic oligonucleotide
  Target: LAMA2; (+) strand; PAM type: YTN; PAM sequence: TTT
catttgtctcattattacaa

SEQ ID NO: 339621 - DNA, 20 bp, Artificial Sequence
  Description of Artificial Sequence: Synthetic oligonucleotide
  Target: LAMA2; (+) strand; PAM type: YTN; PAM sequence: TTC
atttgtctcattattacaat

SEQ ID NO: 339622 - DNA, 20 bp, Artificial Sequence
  Description of Artificial Sequence: Synthetic oligonucleotide
  Target: LAMA2; (+) strand; PAM type: YTN; PAM sequence: TTT
gtctcattattacaatatat

SEQ ID NO: 339623 - DNA, 20 bp, Artificial Sequence
  Description of Artificial Sequence: Synthetic oligonucleotide
  Target: LAMA2; (+) strand; PAM type: YTN; PAM sequence: TTG
tctcattattacaatatatt

SEQ ID NO: 339624 - DNA, 20 bp, Artificial Sequence
  Description of Artificial Sequence: Synthetic oligonucleotide
  Target: LAMA2; (+) strand; PAM type: YTN; PAM sequence: CTC
attattacaatatattaaca

SEQ ID NO: 339625 - DNA, 20 bp, Artificial Sequence
  Description of Artificial Sequence: Synthetic oligonucleotide
  Target: LAMA2; (+) strand; PAM type: YTN; PAM sequence: TTA
ttacaatatattaacaacac

SEQ ID NO: 339626 - DNA, 20 bp, Artificial Sequence
  Description of Artificial Sequence: Synthetic oligonucleotide
  Target: LAMA2; (+) strand; PAM type: YTN; PAM sequence: TTA
caatatattaacaacacatt

SEQ ID NO: 339627 - DNA, 20 bp, Artificial Sequence
  Description of Artificial Sequence: Synthetic oligonucleotide
  Target: LAMA2; (+) strand; PAM type: YTN; PAM sequence: TTA
acaacacattgatggtggaa

SEQ ID NO: 339628 - DNA, 20 bp, Artificial Sequence
  Description of Artificial Sequence: Synthetic oligonucleotide
  Target: LAMA2; (+) strand; PAM type: YTN; PAM sequence: TTG
atggtggaatagtaatttaa

SEQ ID NO: 339629 - DNA, 20 bp, Artificial Sequence
  Description of Artificial Sequence: Synthetic oligonucleotide
  Target: LAMA2; (+) strand; PAM type: YTN; PAM sequence: TTT
aaactaattcatatctgtct

SEQ ID NO: 339630 - DNA, 20 bp, Artificial Sequence
  Description of Artificial Sequence: Synthetic oligonucleotide
  Target: LAMA2; (+) strand; PAM type: YTN; PAM sequence: TTA
aactaattcatatctgtctt

SEQ ID NO: 339631 - DNA, 20 bp, Artificial Sequence
  Description of Artificial Sequence: Synthetic oligonucleotide
  Target: LAMA2; (+) strand; PAM type: YTN; PAM sequence: CTA
attcatatctgtctttctac

SEQ ID NO: 339632 - DNA, 20 bp, Artificial Sequence
  Description of Artificial Sequence: Synthetic oligonucleotide
  Target: LAMA2; (+) strand; PAM type: YTN; PAM sequence: TTC
atatctgtctttctacctag

SEQ ID NO: 339633 - DNA, 20 bp, Artificial Sequence
  Description of Artificial Sequence: Synthetic oligonucleotide
  Target: LAMA2; (+) strand; PAM type: YTN; PAM sequence: CTG
tctttctacctagaacattg

SEQ ID NO: 339634 - DNA, 20 bp, Artificial Sequence
  Description of Artificial Sequence: Synthetic oligonucleotide
  Target: LAMA2; (+) strand; PAM type: YTN; PAM sequence: CTT
tctacctagaacattgtaca

SEQ ID NO: 339635 - DNA, 20 bp, Artificial Sequence
  Description of Artificial Sequence: Synthetic oligonucleotide
  Target: LAMA2; (+) strand; PAM type: YTN; PAM sequence: TTT
ctacctagaacattgtacat

SEQ ID NO: 339636 - DNA, 20 bp, Artificial Sequence
  Description of Artificial Sequence: Synthetic oligonucleotide
  Target: LAMA2; (+) strand; PAM type: YTN; PAM sequence: TTC
tacctagaacattgtacata

SEQ ID NO: 339637 - DNA, 20 bp, Artificial Sequence
  Description of Artificial Sequence: Synthetic oligonucleotide
  Target: LAMA2; (+) strand; PAM type: YTN; PAM sequence: CTA
cctagaacattgtacataaa

SEQ ID NO: 339638 - DNA, 20 bp, Artificial Sequence
  Description of Artificial Sequence: Synthetic oligonucleotide
  Target: LAMA2; (+) strand; PAM type: YTN; PAM sequence: CTA
gaacattgtacataaatgtc

SEQ ID NO: 339639 - DNA, 20 bp, Artificial Sequence
  Description of Artificial Sequence: Synthetic oligonucleotide
  Target: LAMA2; (+) strand; PAM type: YTN; PAM sequence: TTG
tacataaatgtcattccata

SEQ ID NO: 339640 - DNA, 20 bp, Artificial Sequence
  Description of Artificial Sequence: Synthetic oligonucleotide
  Target: LAMA2; (+) strand; PAM type: YTN; PAM sequence: TTC
cataatgtttcttcactatt

SEQ ID NO: 339641 - DNA, 20 bp, Artificial Sequence
  Description of Artificial Sequence: Synthetic oligonucleotide
  Target: LAMA2; (+) strand; PAM type: YTN; PAM sequence: TTT
cttcactattcttttggact

SEQ ID NO: 339642 - DNA, 20 bp, Artificial Sequence
  Description of Artificial Sequence: Synthetic oligonucleotide
  Target: LAMA2; (+) strand; PAM type: YTN; PAM sequence: TTC
ttcactattcttttggacta

SEQ ID NO: 339643 - DNA, 20 bp, Artificial Sequence
  Description of Artificial Sequence: Synthetic oligonucleotide
  Target: LAMA2; (+) strand; PAM type: YTN; PAM sequence: CTT
cactattcttttggactaca

SEQ ID NO: 339644 - DNA, 20 bp, Artificial Sequence
  Description of Artificial Sequence: Synthetic oligonucleotide
  Target: LAMA2; (+) strand; PAM type: YTN; PAM sequence: TTC
actattcttttggactacat

SEQ ID NO: 339645 - DNA, 20 bp, Artificial Sequence
  Description of Artificial Sequence: Synthetic oligonucleotide
  Target: LAMA2; (+) strand; PAM type: YTN; PAM sequence: CTA
ttcttttggactacattggt

SEQ ID NO: 339646 - DNA, 20 bp, Artificial Sequence
  Description of Artificial Sequence: Synthetic oligonucleotide
  Target: LAMA2; (+) strand; PAM type: YTN; PAM sequence: TTC
ttttggactacattggtaaa

SEQ ID NO: 339647 - DNA, 20 bp, Artificial Sequence
  Description of Artificial Sequence: Synthetic oligonucleotide
  Target: LAMA2; (+) strand; PAM type: YTN; PAM sequence: CTT
ttggactacattggtaaaga

SEQ ID NO: 339648 - DNA, 20 bp, Artificial Sequence
  Description of Artificial Sequence: Synthetic oligonucleotide
  Target: LAMA2; (+) strand; PAM type: YTN; PAM sequence: TTT
tggactacattggtaaagac

SEQ ID NO: 339649 - DNA, 20 bp, Artificial Sequence
  Description of Artificial Sequence: Synthetic oligonucleotide
  Target: LAMA2; (+) strand; PAM type: YTN; PAM sequence: TTT
ggactacattggtaaagaca

SEQ ID NO: 339650 - DNA, 20 bp, Artificial Sequence
  Description of Artificial Sequence: Synthetic oligonucleotide
  Target: LAMA2; (+) strand; PAM type: YTN; PAM sequence: TTG
gactacattggtaaagacac

SEQ ID NO: 339651 - DNA, 20 bp, Artificial Sequence
  Description of Artificial Sequence: Synthetic oligonucleotide
  Target: LAMA2; (+) strand; PAM type: YTN; PAM sequence: CTA
cattggtaaagacacagata

SEQ ID NO: 339652 - DNA, 20 bp, Artificial Sequence
  Description of Artificial Sequence: Synthetic oligonucleotide
  Target: LAMA2; (+) strand; PAM type: YTN; PAM sequence: TTG
gtaaagacacagatatgcac

SEQ ID NO: 339653 - DNA, 20 bp, Artificial Sequence
  Description of Artificial Sequence: Synthetic oligonucleotide
  Target: LAMA2; (+) strand; PAM type: YTN; PAM sequence: CTA
ccacaaaacatctagaatat

SEQ ID NO: 339654 - DNA, 20 bp, Artificial Sequence
  Description of Artificial Sequence: Synthetic oligonucleotide
  Target: LAMA2; (+) strand; PAM type: YTN; PAM sequence: CTA
gaatatttctttttttacgt

SEQ ID NO: 339655 - DNA, 20 bp, Artificial Sequence
  Description of Artificial Sequence: Synthetic oligonucleotide
  Target: LAMA2; (+) strand; PAM type: YTN; PAM sequence: TTT
ctttttttacgtcttcaaat

SEQ ID NO: 339656 - DNA, 20 bp, Artificial Sequence
  Description of Artificial Sequence: Synthetic oligonucleotide
  Target: LAMA2; (+) strand; PAM type: YTN; PAM sequence: TTC
tttttttacgtcttcaaatt

SEQ ID NO: 339657 - DNA, 20 bp, Artificial Sequence
  Description of Artificial Sequence: Synthetic oligonucleotide
  Target: LAMA2; (+) strand; PAM type: YTN; PAM sequence: CTT
tttttacgtcttcaaattct

SEQ ID NO: 339658 - DNA, 20 bp, Artificial Sequence
  Description of Artificial Sequence: Synthetic oligonucleotide
  Target: LAMA2; (+) strand; PAM type: YTN; PAM sequence: TTT
ttttacgtcttcaaattcta

SEQ ID NO: 339659 - DNA, 20 bp, Artificial Sequence
  Description of Artificial Sequence: Synthetic oligonucleotide
  Target: LAMA2; (+) strand; PAM type: YTN; PAM sequence: TTT
tttacgtcttcaaattctat

SEQ ID NO: 339660 - DNA, 20 bp, Artificial Sequence
  Description of Artificial Sequence: Synthetic oligonucleotide
  Target: LAMA2; (+) strand; PAM type: YTN; PAM sequence: TTT
ttacgtcttcaaattctata

SEQ ID NO: 339661 - DNA, 20 bp, Artificial Sequence
  Description of Artificial Sequence: Synthetic oligonucleotide
  Target: LAMA2; (+) strand; PAM type: YTN; PAM sequence: TTT
tacgtcttcaaattctatat

SEQ ID NO: 339662 - DNA, 20 bp, Artificial Sequence
  Description of Artificial Sequence: Synthetic oligonucleotide
  Target: LAMA2; (+) strand; PAM type: YTN; PAM sequence: TTT
acgtcttcaaattctatata

SEQ ID NO: 339663 - DNA, 20 bp, Artificial Sequence
  Description of Artificial Sequence: Synthetic oligonucleotide
  Target: LAMA2; (+) strand; PAM type: YTN; PAM sequence: TTA
cgtcttcaaattctatataa

SEQ ID NO: 339664 - DNA, 20 bp, Artificial Sequence
  Description of Artificial Sequence: Synthetic oligonucleotide
  Target: LAMA2; (+) strand; PAM type: YTN; PAM sequence: CTT
caaattctatataaatttgt

SEQ ID NO: 339665 - DNA, 20 bp, Artificial Sequence
  Description of Artificial Sequence: Synthetic oligonucleotide
  Target: LAMA2; (+) strand; PAM type: YTN; PAM sequence: TTC
aaattctatataaatttgta

SEQ ID NO: 339666 - DNA, 20 bp, Artificial Sequence
  Description of Artificial Sequence: Synthetic oligonucleotide
  Target: LAMA2; (+) strand; PAM type: YTN; PAM sequence: TTC
tatataaatttgtaaataga

SEQ ID NO: 339667 - DNA, 20 bp, Artificial Sequence
  Description of Artificial Sequence: Synthetic oligonucleotide
  Target: LAMA2; (+) strand; PAM type: YTN; PAM sequence: CTA
tataaatttgtaaatagagc

SEQ ID NO: 339668 - DNA, 20 bp, Artificial Sequence
  Description of Artificial Sequence: Synthetic oligonucleotide
  Target: LAMA2; (+) strand; PAM type: YTN; PAM sequence: TTT
gtaaatagagcattgccaca

SEQ ID NO: 339669 - DNA, 20 bp, Artificial Sequence
  Description of Artificial Sequence: Synthetic oligonucleotide
  Target: LAMA2; (+) strand; PAM type: YTN; PAM sequence: TTG
taaatagagcattgccacat

SEQ ID NO: 339670 - DNA, 20 bp, Artificial Sequence
  Description of Artificial Sequence: Synthetic oligonucleotide
  Target: LAMA2; (+) strand; PAM type: YTN; PAM sequence: TTG
ccacattcctctccattgtc

SEQ ID NO: 339671 - DNA, 20 bp, Artificial Sequence
  Description of Artificial Sequence: Synthetic oligonucleotide
  Target: LAMA2; (+) strand; PAM type: YTN; PAM sequence: TTC
ctctccattgtcactctgtt

SEQ ID NO: 339672 - DNA, 20 bp, Artificial Sequence
  Description of Artificial Sequence: Synthetic oligonucleotide
  Target: LAMA2; (+) strand; PAM type: YTN; PAM sequence: CTC
tccattgtcactctgttaac

SEQ ID NO: 339673 - DNA, 20 bp, Artificial Sequence
  Description of Artificial Sequence: Synthetic oligonucleotide
  Target: LAMA2; (+) strand; PAM type: YTN; PAM sequence: CTC
cattgtcactctgttaacag

SEQ ID NO: 339674 - DNA, 20 bp, Artificial Sequence
  Description of Artificial Sequence: Synthetic oligonucleotide
  Target: LAMA2; (+) strand; PAM type: YTN; PAM sequence: TTG
tcactctgttaacagtaaca

SEQ ID NO: 339675 - DNA, 20 bp, Artificial Sequence
  Description of Artificial Sequence: Synthetic oligonucleotide
  Target: LAMA2; (+) strand; PAM type: YTN; PAM sequence: CTC
tgttaacagtaacaatacct

SEQ ID NO: 339676 - DNA, 20 bp, Artificial Sequence
  Description of Artificial Sequence: Synthetic oligonucleotide
  Target: LAMA2; (+) strand; PAM type: YTN; PAM sequence: CTG
ttaacagtaacaatacctct

SEQ ID NO: 339677 - DNA, 20 bp, Artificial Sequence
  Description of Artificial Sequence: Synthetic oligonucleotide
  Target: LAMA2; (+) strand; PAM type: YTN; PAM sequence: TTA
acagtaacaatacctcttta

SEQ ID NO: 339678 - DNA, 20 bp, Artificial Sequence
  Description of Artificial Sequence: Synthetic oligonucleotide
  Target: LAMA2; (+) strand; PAM type: YTN; PAM sequence: CTC
tttatttcaccccttttctt

SEQ ID NO: 339679 - DNA, 20 bp, Artificial Sequence
  Description of Artificial Sequence: Synthetic oligonucleotide
  Target: LAMA2; (+) strand; PAM type: YTN; PAM sequence: CTT
tatttcaccccttttcttgc

SEQ ID NO: 339680 - DNA, 20 bp, Artificial Sequence
  Description of Artificial Sequence: Synthetic oligonucleotide
  Target: LAMA2; (+) strand; PAM type: YTN; PAM sequence: TTT
atttcaccccttttcttgca

SEQ ID NO: 339681 - DNA, 20 bp, Artificial Sequence
  Description of Artificial Sequence: Synthetic oligonucleotide
  Target: LAMA2; (+) strand; PAM type: YTN; PAM sequence: TTA
tttcaccccttttcttgcat

SEQ ID NO: 339682 - DNA, 20 bp, Artificial Sequence
  Description of Artificial Sequence: Synthetic oligonucleotide
  Target: LAMA2; (+) strand; PAM type: YTN; PAM sequence: TTT
caccccttttcttgcatgtt

SEQ ID NO: 339683 - DNA, 20 bp, Artificial Sequence
  Description of Artificial Sequence: Synthetic oligonucleotide
  Target: LAMA2; (+) strand; PAM type: YTN; PAM sequence: TTC
accccttttcttgcatgttt

SEQ ID NO: 339684 - DNA, 20 bp, Artificial Sequence
  Description of Artificial Sequence: Synthetic oligonucleotide
  Target: LAMA2; (+) strand; PAM type: YTN; PAM sequence: CTT
ttcttgcatgtttacctttt

SEQ ID NO: 339685 - DNA, 20 bp, Artificial Sequence
  Description of Artificial Sequence: Synthetic oligonucleotide
  Target: LAMA2; (+) strand; PAM type: YTN; PAM sequence: TTT
tcttgcatgtttaccttttg

SEQ ID NO: 339686 - DNA, 20 bp, Artificial Sequence
  Description of Artificial Sequence: Synthetic oligonucleotide
  Target: LAMA2; (+) strand; PAM type: YTN; PAM sequence: TTT
cttgcatgtttaccttttgt

SEQ ID NO: 339687 - DNA, 20 bp, Artificial Sequence
  Description of Artificial Sequence: Synthetic oligonucleotide
  Target: LAMA2; (+) strand; PAM type: YTN; PAM sequence: TTC
ttgcatgtttaccttttgta

SEQ ID NO: 339688 - DNA, 20 bp, Artificial Sequence
  Description of Artificial Sequence: Synthetic oligonucleotide
  Target: LAMA2; (+) strand; PAM type: YTN; PAM sequence: CTT
gcatgtttaccttttgtaaa

SEQ ID NO: 339689 - DNA, 20 bp, Artificial Sequence
  Description of Artificial Sequence: Synthetic oligonucleotide
  Target: LAMA2; (+) strand; PAM type: YTN; PAM sequence: TTG
catgtttaccttttgtaaag

SEQ ID NO: 339690 - DNA, 20 bp, Artificial Sequence
  Description of Artificial Sequence: Synthetic oligonucleotide
  Target: LAMA2; (+) strand; PAM type: YTN; PAM sequence: TTT
accttttgtaaagagaaggt

SEQ ID NO: 339691 - DNA, 20 bp, Artificial Sequence
  Description of Artificial Sequence: Synthetic oligonucleotide
  Target: LAMA2; (+) strand; PAM type: YTN; PAM sequence: TTA
ccttttgtaaagagaaggta

SEQ ID NO: 339692 - DNA, 20 bp, Artificial Sequence
  Description of Artificial Sequence: Synthetic oligonucleotide
  Target: LAMA2; (+) strand; PAM type: YTN; PAM sequence: CTT
ttgtaaagagaaggtacaga

SEQ ID NO: 339693 - DNA, 20 bp, Artificial Sequence
  Description of Artificial Sequence: Synthetic oligonucleotide
  Target: LAMA2; (+) strand; PAM type: YTN; PAM sequence: TTT
tgtaaagagaaggtacagaa

SEQ ID NO: 339694 - DNA, 20 bp, Artificial Sequence
  Description of Artificial Sequence: Synthetic oligonucleotide
  Target: LAMA2; (+) strand; PAM type: YTN; PAM sequence: TTT
gtaaagagaaggtacagaaa

SEQ ID NO: 339695 - DNA, 20 bp, Artificial Sequence
  Description of Artificial Sequence: Synthetic oligonucleotide
  Target: LAMA2; (+) strand; PAM type: YTN; PAM sequence: TTG
taaagagaaggtacagaaac

SEQ ID NO: 339696 - DNA, 20 bp, Artificial Sequence
  Description of Artificial Sequence: Synthetic oligonucleotide
  Target: LAMA2; (+) strand; PAM type: YTN; PAM sequence: CTT
catttaatgtgtttcaggtt

SEQ ID NO: 339697 - DNA, 20 bp, Artificial Sequence
  Description of Artificial Sequence: Synthetic oligonucleotide
  Target: LAMA2; (+) strand; PAM type: YTN; PAM sequence: TTC
atttaatgtgtttcaggttc

SEQ ID NO: 339698 - DNA, 20 bp, Artificial Sequence
  Description of Artificial Sequence: Synthetic oligonucleotide
  Target: LAMA2; (+) strand; PAM type: YTN; PAM sequence: TTT
aatgtgtttcaggttcaatc

SEQ ID NO: 339699 - DNA, 20 bp, Artificial Sequence
  Description of Artificial Sequence: Synthetic oligonucleotide
  Target: LAMA2; (+) strand; PAM type: YTN; PAM sequence: TTA
atgtgtttcaggttcaatcc

SEQ ID NO: 339700 - DNA, 20 bp, Artificial Sequence
  Description of Artificial Sequence: Synthetic oligonucleotide
  Target: LAMA2; (+) strand; PAM type: YTN; PAM sequence: TTT
caggttcaatccgttgtctt

SEQ ID NO: 339701 - DNA, 20 bp, Artificial Sequence
  Description of Artificial Sequence: Synthetic oligonucleotide
  Target: LAMA2; (+) strand; PAM type: YTN; PAM sequence: TTC
aggttcaatccgttgtcttc

SEQ ID NO: 339702 - DNA, 20 bp, Artificial Sequence
  Description of Artificial Sequence: Synthetic oligonucleotide
  Target: LAMA2; (+) strand; PAM type: YTN; PAM sequence: TTC
aatccgttgtcttcataaca

SEQ ID NO: 339703 - DNA, 20 bp, Artificial Sequence
  Description of Artificial Sequence: Synthetic oligonucleotide
  Target: LAMA2; (+) strand; PAM type: YTN; PAM sequence: TTG
tcttcataacactggaattt

SEQ ID NO: 339704 - DNA, 20 bp, Artificial Sequence
  Description of Artificial Sequence: Synthetic oligonucleotide
  Target: LAMA2; (+) strand; PAM type: YTN; PAM sequence: CTT
cataacactggaatttctcc

SEQ ID NO: 339705 - DNA, 20 bp, Artificial Sequence
  Description of Artificial Sequence: Synthetic oligonucleotide
  Target: LAMA2; (+) strand; PAM type: YTN; PAM sequence: TTC
ataacactggaatttctcct

SEQ ID NO: 339706 - DNA, 20 bp, Artificial Sequence
  Description of Artificial Sequence: Synthetic oligonucleotide
  Target: LAMA2; (+) strand; PAM type: YTN; PAM sequence: CTG
gaatttctcctccattattt

SEQ ID NO: 339707 - DNA, 20 bp, Artificial Sequence
  Description of Artificial Sequence: Synthetic oligonucleotide
  Target: LAMA2; (+) strand; PAM type: YTN; PAM sequence: TTT
ctcctccattattttctatt

SEQ ID NO: 339708 - DNA, 20 bp, Artificial Sequence
  Description of Artificial Sequence: Synthetic oligonucleotide
  Target: LAMA2; (+) strand; PAM type: YTN; PAM sequence: TTC
tcctccattattttctattt

SEQ ID NO: 339709 - DNA, 20 bp, Artificial Sequence
  Description of Artificial Sequence: Synthetic oligonucleotide
  Target: LAMA2; (+) strand; PAM type: YTN; PAM sequence: CTC
ctccattattttctatttgg

SEQ ID NO: 339710 - DNA, 20 bp, Artificial Sequence
  Description of Artificial Sequence: Synthetic oligonucleotide
  Target: LAMA2; (+) strand; PAM type: YTN; PAM sequence: CTC
cattattttctatttgggga

SEQ ID NO: 339711 - DNA, 20 bp, Artificial Sequence
  Description of Artificial Sequence: Synthetic oligonucleotide
  Target: LAMA2; (+) strand; PAM type: YTN; PAM sequence: TTA
ttttctatttggggatgtaa

SEQ ID NO: 339712 - DNA, 20 bp, Artificial Sequence
  Description of Artificial Sequence: Synthetic oligonucleotide
  Target: LAMA2; (+) strand; PAM type: YTN; PAM sequence: TTT
tctatttggggatgtaaagg

SEQ ID NO: 339713 - DNA, 20 bp, Artificial Sequence
  Description of Artificial Sequence: Synthetic oligonucleotide
  Target: LAMA2; (+) strand; PAM type: YTN; PAM sequence: TTT
ctatttggggatgtaaagga

SEQ ID NO: 339714 - DNA, 20 bp, Artificial Sequence
  Description of Artificial Sequence: Synthetic oligonucleotide
  Target: LAMA2; (+) strand; PAM type: YTN; PAM sequence: TTC
tatttggggatgtaaaggaa

SEQ ID NO: 339715 - DNA, 20 bp, Artificial Sequence
  Description of Artificial Sequence: Synthetic oligonucleotide
  Target: LAMA2; (+) strand; PAM type: YTN; PAM sequence: CTA
tttggggatgtaaaggaatg

SEQ ID NO: 339716 - DNA, 20 bp, Artificial Sequence
  Description of Artificial Sequence: Synthetic oligonucleotide
  Target: LAMA2; (+) strand; PAM type: YTN; PAM sequence: TTT
ggggatgtaaaggaatggac

SEQ ID NO: 339717 - DNA, 20 bp, Artificial Sequence
  Description of Artificial Sequence: Synthetic oligonucleotide
  Target: LAMA2; (+) strand; PAM type: YTN; PAM sequence: TTG
gggatgtaaaggaatggaca

SEQ ID NO: 339718 - DNA, 20 bp, Artificial Sequence
  Description of Artificial Sequence: Synthetic oligonucleotide
  Target: LAMA2; (+) strand; PAM type: YTN; PAM sequence: TTT
attgaggatttactgccaca

SEQ ID NO: 339719 - DNA, 20 bp, Artificial Sequence
  Description of Artificial Sequence: Synthetic oligonucleotide
  Target: LAMA2; (+) strand; PAM type: YTN; PAM sequence: TTA
ttgaggatttactgccacaa

SEQ ID NO: 339720 - DNA, 20 bp, Artificial Sequence
  Description of Artificial Sequence: Synthetic oligonucleotide
  Target: LAMA2; (+) strand; PAM type: YTN; PAM sequence: TTG
aggatttactgccacaatgc

SEQ ID NO: 339721 - DNA, 20 bp, Artificial Sequence
  Description of Artificial Sequence: Synthetic oligonucleotide
  Target: LAMA2; (+) strand; PAM type: YTN; PAM sequence: TTT
actgccacaatgctagaacc

SEQ ID NO: 339722 - DNA, 20 bp, Artificial Sequence
  Description of Artificial Sequence: Synthetic oligonucleotide
  Target: LAMA2; (+) strand; PAM type: YTN; PAM sequence: TTA
ctgccacaatgctagaacca

SEQ ID NO: 339723 - DNA, 20 bp, Artificial Sequence
  Description of Artificial Sequence: Synthetic oligonucleotide
  Target: LAMA2; (+) strand; PAM type: YTN; PAM sequence: CTG
ccacaatgctagaaccacaa

SEQ ID NO: 339724 - DNA, 20 bp, Artificial Sequence
  Description of Artificial Sequence: Synthetic oligonucleotide
  Target: LAMA2; (+) strand; PAM type: YTN; PAM sequence: CTA
gaaccacaatctgaacatag

SEQ ID NO: 339725 - DNA, 20 bp, Artificial Sequence
  Description of Artificial Sequence: Synthetic oligonucleotide
  Target: LAMA2; (+) strand; PAM type: YTN; PAM sequence: CTG
aacataggaatgtgtttatg

SEQ ID NO: 339726 - DNA, 20 bp, Artificial Sequence
  Description of Artificial Sequence: Synthetic oligonucleotide
  Target: LAMA2; (+) strand; PAM type: YTN; PAM sequence: TTT
atgttgtttttgctgtacca

SEQ ID NO: 339727 - DNA, 20 bp, Artificial Sequence
  Description of Artificial Sequence: Synthetic oligonucleotide
  Target: LAMA2; (+) strand; PAM type: YTN; PAM sequence: TTA
tgttgtttttgctgtaccat

SEQ ID NO: 339728 - DNA, 20 bp, Artificial Sequence
  Description of Artificial Sequence: Synthetic oligonucleotide
  Target: LAMA2; (+) strand; PAM type: YTN; PAM sequence: TTG
tttttgctgtaccatactaa

SEQ ID NO: 339729 - DNA, 20 bp, Artificial Sequence
  Description of Artificial Sequence: Synthetic oligonucleotide
  Target: LAMA2; (+) strand; PAM type: YTN; PAM sequence: TTT
ttgctgtaccatactaactg

SEQ ID NO: 339730 - DNA, 20 bp, Artificial Sequence
  Description of Artificial Sequence: Synthetic oligonucleotide
  Target: LAMA2; (+) strand; PAM type: YTN; PAM sequence: TTT
tgctgtaccatactaactgc

SEQ ID NO: 339731 - DNA, 20 bp, Artificial Sequence
  Description of Artificial Sequence: Synthetic oligonucleotide
  Target: LAMA2; (+) strand; PAM type: YTN; PAM sequence: TTT
gctgtaccatactaactgcc

SEQ ID NO: 339732 - DNA, 20 bp, Artificial Sequence
  Description of Artificial Sequence: Synthetic oligonucleotide
  Target: LAMA2; (+) strand; PAM type: YTN; PAM sequence: TTG
ctgtaccatactaactgcct

SEQ ID NO: 339733 - DNA, 20 bp, Artificial Sequence
  Description of Artificial Sequence: Synthetic oligonucleotide
  Target: LAMA2; (+) strand; PAM type: YTN; PAM sequence: CTG
taccatactaactgcctcta

SEQ ID NO: 339734 - DNA, 20 bp, Artificial Sequence
  Description of Artificial Sequence: Synthetic oligonucleotide
  Target: LAMA2; (+) strand; PAM type: YTN; PAM sequence: CTA
actgcctctaaatggcactt

SEQ ID NO: 339735 - DNA, 20 bp, Artificial Sequence
  Description of Artificial Sequence: Synthetic oligonucleotide
  Target: LAMA2; (+) strand; PAM type: YTN; PAM sequence: CTG
cctctaaatggcactttttt

SEQ ID NO: 339736 - DNA, 20 bp, Artificial Sequence
  Description of Artificial Sequence: Synthetic oligonucleotide
  Target: LAMA2; (+) strand; PAM type: YTN; PAM sequence: CTC
taaatggcacttttttgagg

SEQ ID NO: 339737 - DNA, 20 bp, Artificial Sequence
  Description of Artificial Sequence: Synthetic oligonucleotide
  Target: LAMA2; (+) strand; PAM type: YTN; PAM sequence: CTA
aatggcacttttttgaggat

SEQ ID NO: 339738 - DNA, 20 bp, Artificial Sequence
  Description of Artificial Sequence: Synthetic oligonucleotide
  Target: LAMA2; (+) strand; PAM type: YTN; PAM sequence: CTT
ttttgaggattatgtgatat

SEQ ID NO: 339739 - DNA, 20 bp, Artificial Sequence
  Description of Artificial Sequence: Synthetic oligonucleotide
  Target: LAMA2; (+) strand; PAM type: YTN; PAM sequence: TTT
tttgaggattatgtgatata

SEQ ID NO: 339740 - DNA, 20 bp, Artificial Sequence
  Description of Artificial Sequence: Synthetic oligonucleotide
  Target: LAMA2; (+) strand; PAM type: YTN; PAM sequence: TTT
ttgaggattatgtgatataa

SEQ ID NO: 339741 - DNA, 20 bp, Artificial Sequence
  Description of Artificial Sequence: Synthetic oligonucleotide
  Target: LAMA2; (+) strand; PAM type: YTN; PAM sequence: TTT
tgaggattatgtgatataag

SEQ ID NO: 339742 - DNA, 20 bp, Artificial Sequence
  Description of Artificial Sequence: Synthetic oligonucleotide
  Target: LAMA2; (+) strand; PAM type: YTN; PAM sequence: TTT
gaggattatgtgatataagt

SEQ ID NO: 339743 - DNA, 20 bp, Artificial Sequence
  Description of Artificial Sequence: Synthetic oligonucleotide
  Target: LAMA2; (+) strand; PAM type: YTN; PAM sequence: TTG
aggattatgtgatataagta

SEQ ID NO: 339744 - DNA, 20 bp, Artificial Sequence
  Description of Artificial Sequence: Synthetic oligonucleotide
  Target: LAMA2; (+) strand; PAM type: YTN; PAM sequence: TTA
tgtgatataagtaaacaagt

SEQ ID NO: 339745 - DNA, 20 bp, Artificial Sequence
  Description of Artificial Sequence: Synthetic oligonucleotide
  Target: LAMA2; (+) strand; PAM type: YTN; PAM sequence: TTT
tctaaactatcaagcactat

SEQ ID NO: 339746 - DNA, 20 bp, Artificial Sequence
  Description of Artificial Sequence: Synthetic oligonucleotide
  Target: LAMA2; (+) strand; PAM type: YTN; PAM sequence: TTT
ctaaactatcaagcactatt

SEQ ID NO: 339747 - DNA, 20 bp, Artificial Sequence
  Description of Artificial Sequence: Synthetic oligonucleotide
  Target: LAMA2; (+) strand; PAM type: YTN; PAM sequence: TTC
taaactatcaagcactattc

SEQ ID NO: 339748 - DNA, 20 bp, Artificial Sequence
  Description of Artificial Sequence: Synthetic oligonucleotide
  Target: LAMA2; (+) strand; PAM type: YTN; PAM sequence: CTA
aactatcaagcactattcac

SEQ ID NO: 339749 - DNA, 20 bp, Artificial Sequence
  Description of Artificial Sequence: Synthetic oligonucleotide
  Target: LAMA2; (+) strand; PAM type: YTN; PAM sequence: CTA
tcaagcactattcacactgg

SEQ ID NO: 339750 - DNA, 20 bp, Artificial Sequence
  Description of Artificial Sequence: Synthetic oligonucleotide
  Target: LAMA2; (+) strand; PAM type: YTN; PAM sequence: CTA
ttcacactgggaatttctag

SEQ ID NO: 339751 - DNA, 20 bp, Artificial Sequence
  Description of Artificial Sequence: Synthetic oligonucleotide
  Target: LAMA2; (+) strand; PAM type: YTN; PAM sequence: TTC
acactgggaatttctagctt

SEQ ID NO: 339752 - DNA, 20 bp, Artificial Sequence
  Description of Artificial Sequence: Synthetic oligonucleotide
  Target: LAMA2; (+) strand; PAM type: YTN; PAM sequence: CTG
ggaatttctagcttgtattt

SEQ ID NO: 339753 - DNA, 20 bp, Artificial Sequence
  Description of Artificial Sequence: Synthetic oligonucleotide
  Target: LAMA2; (+) strand; PAM type: YTN; PAM sequence: TTT
ctagcttgtattttacagtc

SEQ ID NO: 339754 - DNA, 20 bp, Artificial Sequence
  Description of Artificial Sequence: Synthetic oligonucleotide
  Target: LAMA2; (+) strand; PAM type: YTN; PAM sequence: TTC
tagcttgtattttacagtct

SEQ ID NO: 339755 - DNA, 20 bp, Artificial Sequence
  Description of Artificial Sequence: Synthetic oligonucleotide
  Target: LAMA2; (+) strand; PAM type: YTN; PAM sequence: CTA
gcttgtattttacagtcttt

SEQ ID NO: 339756 - DNA, 20 bp, Artificial Sequence
  Description of Artificial Sequence: Synthetic oligonucleotide
  Target: LAMA2; (+) strand; PAM type: YTN; PAM sequence: CTT
gtattttacagtctttaaca

SEQ ID NO: 339757 - DNA, 20 bp, Artificial Sequence
  Description of Artificial Sequence: Synthetic oligonucleotide
  Target: LAMA2; (+) strand; PAM type: YTN; PAM sequence: TTG
tattttacagtctttaacac

SEQ ID NO: 339758 - DNA, 20 bp, Artificial Sequence
  Description of Artificial Sequence: Synthetic oligonucleotide
  Target: LAMA2; (+) strand; PAM type: YTN; PAM sequence: TTT
tacagtctttaacacagtaa

SEQ ID NO: 339759 - DNA, 20 bp, Artificial Sequence
  Description of Artificial Sequence: Synthetic oligonucleotide
  Target: LAMA2; (+) strand; PAM type: YTN; PAM sequence: TTT
acagtctttaacacagtaag

SEQ ID NO: 339760 - DNA, 20 bp, Artificial Sequence
  Description of Artificial Sequence: Synthetic oligonucleotide
  Target: LAMA2; (+) strand; PAM type: YTN; PAM sequence: TTA
cagtctttaacacagtaagg

SEQ ID NO: 339761 - DNA, 20 bp, Artificial Sequence
  Description of Artificial Sequence: Synthetic oligonucleotide
  Target: LAMA2; (+) strand; PAM type: YTN; PAM sequence: CTT
taacacagtaaggtgagtaa

SEQ ID NO: 339762 - DNA, 20 bp, Artificial Sequence
  Description of Artificial Sequence: Synthetic oligonucleotide
  Target: LAMA2; (+) strand; PAM type: YTN; PAM sequence: TTT
aacacagtaaggtgagtaaa

SEQ ID NO: 339763 - DNA, 20 bp, Artificial Sequence
  Description of Artificial Sequence: Synthetic oligonucleotide
  Target: LAMA2; (+) strand; PAM type: YTN; PAM sequence: TTA
acacagtaaggtgagtaaat

SEQ ID NO: 339764 - DNA, 20 bp, Artificial Sequence
  Description of Artificial Sequence: Synthetic oligonucleotide
  Target: LAMA2; (+) strand; PAM type: YTN; PAM sequence: TTG
gtatgtactattaataaatg

SEQ ID NO: 339765 - DNA, 20 bp, Artificial Sequence
  Description of Artificial Sequence: Synthetic oligonucleotide
  Target: LAMA2; (+) strand; PAM type: YTN; PAM sequence: CTA
ttaataaatgttttaggtgg

SEQ ID NO: 339766 - DNA, 20 bp, Artificial Sequence
  Description of Artificial Sequence: Synthetic oligonucleotide
  Target: LAMA2; (+) strand; PAM type: YTN; PAM sequence: TTA
ataaatgttttaggtggtaa

SEQ ID NO: 339767 - DNA, 20 bp, Artificial Sequence
  Description of Artificial Sequence: Synthetic oligonucleotide
  Target: LAMA2; (+) strand; PAM type: YTN; PAM sequence: TTT
taggtggtaataattataat

SEQ ID NO: 339768 - DNA, 20 bp, Artificial Sequence
  Description of Artificial Sequence: Synthetic oligonucleotide
  Target: LAMA2; (+) strand; PAM type: YTN; PAM sequence: TTT
aggtggtaataattataatg

SEQ ID NO: 339769 - DNA, 20 bp, Artificial Sequence
  Description of Artificial Sequence: Synthetic oligonucleotide
  Target: LAMA2; (+) strand; PAM type: YTN; PAM sequence: TTA
ggtggtaataattataatgg

SEQ ID NO: 339770 - DNA, 20 bp, Artificial Sequence
  Description of Artificial Sequence: Synthetic oligonucleotide
  Target: LAMA2; (+) strand; PAM type: YTN; PAM sequence: TTA
taatggaactttaaacatca

SEQ ID NO: 339771 - DNA, 20 bp, Artificial Sequence
  Description of Artificial Sequence: Synthetic oligonucleotide
  Target: LAMA2; (+) strand; PAM type: YTN; PAM sequence: CTT
taaacatcaggtgaaatgtt

SEQ ID NO: 339772 - DNA, 20 bp, Artificial Sequence
  Description of Artificial Sequence: Synthetic oligonucleotide
  Target: LAMA2; (+) strand; PAM type: YTN; PAM sequence: TTT
aaacatcaggtgaaatgttg

SEQ ID NO: 339773 - DNA, 20 bp, Artificial Sequence
  Description of Artificial Sequence: Synthetic oligonucleotide
  Target: LAMA2; (+) strand; PAM type: YTN; PAM sequence: TTA
aacatcaggtgaaatgttgc

SEQ ID NO: 339774 - DNA, 20 bp, Artificial Sequence
  Description of Artificial Sequence: Synthetic oligonucleotide
  Target: LAMA2; (+) strand; PAM type: YTN; PAM sequence: TTG
ccaatgagttgttactaaaa

SEQ ID NO: 339775 - DNA, 20 bp, Artificial Sequence
  Description of Artificial Sequence: Synthetic oligonucleotide
  Target: LAMA2; (+) strand; PAM type: YTN; PAM sequence: TTG
ttactaaaatccagtcttaa

SEQ ID NO: 339776 - DNA, 20 bp, Artificial Sequence
  Description of Artificial Sequence: Synthetic oligonucleotide
  Target: LAMA2; (+) strand; PAM type: YTN; PAM sequence: TTA
ctaaaatccagtcttaatcc

SEQ ID NO: 339777 - DNA, 20 bp, Artificial Sequence
  Description of Artificial Sequence: Synthetic oligonucleotide
  Target: LAMA2; (+) strand; PAM type: YTN; PAM sequence: CTA
aaatccagtcttaatccatt

SEQ ID NO: 339778 - DNA, 20 bp, Artificial Sequence
  Description of Artificial Sequence: Synthetic oligonucleotide
  Target: LAMA2; (+) strand; PAM type: YTN; PAM sequence: CTT
aatccatttcttttaaagcc

SEQ ID NO: 339779 - DNA, 20 bp, Artificial Sequence
  Description of Artificial Sequence: Synthetic oligonucleotide
  Target: LAMA2; (+) strand; PAM type: YTN; PAM sequence: TTA
atccatttcttttaaagcca

SEQ ID NO: 339780 - DNA, 20 bp, Artificial Sequence
  Description of Artificial Sequence: Synthetic oligonucleotide
  Target: LAMA2; (+) strand; PAM type: YTN; PAM sequence: TTT
cttttaaagccatggttgtc

SEQ ID NO: 339781 - DNA, 20 bp, Artificial Sequence
  Description of Artificial Sequence: Synthetic oligonucleotide
  Target: LAMA2; (+) strand; PAM type: YTN; PAM sequence: TTC
ttttaaagccatggttgtca

SEQ ID NO: 339782 - DNA, 20 bp, Artificial Sequence
  Description of Artificial Sequence: Synthetic oligonucleotide
  Target: LAMA2; (+) strand; PAM type: YTN; PAM sequence: CTT
ttaaagccatggttgtcaaa

SEQ ID NO: 339783 - DNA, 20 bp, Artificial Sequence
  Description of Artificial Sequence: Synthetic oligonucleotide
  Target: LAMA2; (+) strand; PAM type: YTN; PAM sequence: TTT
taaagccatggttgtcaaaa

SEQ ID NO: 339784 - DNA, 20 bp, Artificial Sequence
  Description of Artificial Sequence: Synthetic oligonucleotide
  Target: LAMA2; (+) strand; PAM type: YTN; PAM sequence: TTT
aaagccatggttgtcaaaac

SEQ ID NO: 339785 - DNA, 20 bp, Artificial Sequence
  Description of Artificial Sequence: Synthetic oligonucleotide
  Target: LAMA2; (+) strand; PAM type: YTN; PAM sequence: TTA
aagccatggttgtcaaaaca

SEQ ID NO: 339786 - DNA, 20 bp, Artificial Sequence
  Description of Artificial Sequence: Synthetic oligonucleotide
  Target: LAMA2; (+) strand; PAM type: YTN; PAM sequence: TTG
tcaaaacaaaacatcacttc

SEQ ID NO: 339787 - DNA, 20 bp, Artificial Sequence
  Description of Artificial Sequence: Synthetic oligonucleotide
  Target: LAMA2; (+) strand; PAM type: YTN; PAM sequence: CTT
cttagcaaaaaattattaga

SEQ ID NO: 339788 - DNA, 20 bp, Artificial Sequence
  Description of Artificial Sequence: Synthetic oligonucleotide
  Target: LAMA2; (+) strand; PAM type: YTN; PAM sequence: TTC
ttagcaaaaaattattagat

SEQ ID NO: 339789 - DNA, 20 bp, Artificial Sequence
  Description of Artificial Sequence: Synthetic oligonucleotide
  Target: LAMA2; (+) strand; PAM type: YTN; PAM sequence: CTT
agcaaaaaattattagatat

SEQ ID NO: 339790 - DNA, 20 bp, Artificial Sequence
  Description of Artificial Sequence: Synthetic oligonucleotide
  Target: LAMA2; (+) strand; PAM type: YTN; PAM sequence: TTA
gcaaaaaattattagatatg

SEQ ID NO: 339791 - DNA, 20 bp, Artificial Sequence
  Description of Artificial Sequence: Synthetic oligonucleotide
  Target: LAMA2; (+) strand; PAM type: YTN; PAM sequence: TTA
ttagatatgaacctgtaata

SEQ ID NO: 339792 - DNA, 20 bp, Artificial Sequence
  Description of Artificial Sequence: Synthetic oligonucleotide
  Target: LAMA2; (+) strand; PAM type: YTN; PAM sequence: TTA
gatatgaacctgtaatagta

SEQ ID NO: 339793 - DNA, 20 bp, Artificial Sequence
  Description of Artificial Sequence: Synthetic oligonucleotide
  Target: LAMA2; (+) strand; PAM type: YTN; PAM sequence: CTG
taatagtaaaatcatttcag

SEQ ID NO: 339794 - DNA, 20 bp, Artificial Sequence
  Description of Artificial Sequence: Synthetic oligonucleotide
  Target: LAMA2; (+) strand; PAM type: YTN; PAM sequence: TTT
cagagaacattataagatta

SEQ ID NO: 339795 - DNA, 20 bp, Artificial Sequence
  Description of Artificial Sequence: Synthetic oligonucleotide
  Target: LAMA2; (+) strand; PAM type: YTN; PAM sequence: TTC
agagaacattataagattat

SEQ ID NO: 339796 - DNA, 20 bp, Artificial Sequence
  Description of Artificial Sequence: Synthetic oligonucleotide
  Target: LAMA2; (+) strand; PAM type: YTN; PAM sequence: TTA
taagattatagaataaaatc

SEQ ID NO: 339797 - DNA, 20 bp, Artificial Sequence
  Description of Artificial Sequence: Synthetic oligonucleotide
  Target: LAMA2; (+) strand; PAM type: YTN; PAM sequence: TTA
tagaataaaatctgaaataa

SEQ ID NO: 339798 - DNA, 20 bp, Artificial Sequence
  Description of Artificial Sequence: Synthetic oligonucleotide
  Target: LAMA2; (+) strand; PAM type: YTN; PAM sequence: CTG
aaataaaatctactgtagca

SEQ ID NO: 339799 - DNA, 20 bp, Artificial Sequence
  Description of Artificial Sequence: Synthetic oligonucleotide
  Target: LAMA2; (+) strand; PAM type: YTN; PAM sequence: CTA
ctgtagcatttagacttata

SEQ ID NO: 339800 - DNA, 20 bp, Artificial Sequence
  Description of Artificial Sequence: Synthetic oligonucleotide
  Target: LAMA2; (+) strand; PAM type: YTN; PAM sequence: CTG
tagcatttagacttatattt

SEQ ID NO: 339801 - DNA, 20 bp, Artificial Sequence
  Description of Artificial Sequence: Synthetic oligonucleotide
  Target: LAMA2; (+) strand; PAM type: YTN; PAM sequence: TTT
agacttatatttgacataaa

SEQ ID NO: 339802 - DNA, 20 bp, Artificial Sequence
  Description of Artificial Sequence: Synthetic oligonucleotide
  Target: LAMA2; (+) strand; PAM type: YTN; PAM sequence: TTA
gacttatatttgacataaaa

SEQ ID NO: 339803 - DNA, 20 bp, Artificial Sequence
  Description of Artificial Sequence: Synthetic oligonucleotide
  Target: LAMA2; (+) strand; PAM type: YTN; PAM sequence: CTT
atatttgacataaaatgatg

SEQ ID NO: 339804 - DNA, 20 bp, Artificial Sequence
  Description of Artificial Sequence: Synthetic oligonucleotide
  Target: LAMA2; (+) strand; PAM type: YTN; PAM sequence: TTA
tatttgacataaaatgatga

SEQ ID NO: 339805 - DNA, 20 bp, Artificial Sequence
  Description of Artificial Sequence: Synthetic oligonucleotide
  Target: LAMA2; (+) strand; PAM type: YTN; PAM sequence: TTT
gacataaaatgatgagaata

SEQ ID NO: 339806 - DNA, 20 bp, Artificial Sequence
  Description of Artificial Sequence: Synthetic oligonucleotide
  Target: LAMA2; (+) strand; PAM type: YTN; PAM sequence: TTG
acataaaatgatgagaatat

SEQ ID NO: 339807 - DNA, 20 bp, Artificial Sequence
  Description of Artificial Sequence: Synthetic oligonucleotide
  Target: LAMA2; (+) strand; PAM type: YTN; PAM sequence: TTT
gggaattcaatgttattgtt

SEQ ID NO: 339808 - DNA, 20 bp, Artificial Sequence
  Description of Artificial Sequence: Synthetic oligonucleotide
  Target: LAMA2; (+) strand; PAM type: YTN; PAM sequence: TTG
ggaattcaatgttattgttg

SEQ ID NO: 339809 - DNA, 20 bp, Artificial Sequence
  Description of Artificial Sequence: Synthetic oligonucleotide
  Target: LAMA2; (+) strand; PAM type: YTN; PAM sequence: TTC
aatgttattgttgttgttat

SEQ ID NO: 339810 - DNA, 20 bp, Artificial Sequence
  Description of Artificial Sequence: Synthetic oligonucleotide
  Target: LAMA2; (+) strand; PAM type: YTN; PAM sequence: TTA
ttgttgttgttatacttccc

SEQ ID NO: 339811 - DNA, 20 bp, Artificial Sequence
  Description of Artificial Sequence: Synthetic oligonucleotide
  Target: LAMA2; (+) strand; PAM type: YTN; PAM sequence: TTG
ttgttgttatacttccctag

SEQ ID NO: 339812 - DNA, 20 bp, Artificial Sequence
  Description of Artificial Sequence: Synthetic oligonucleotide
  Target: LAMA2; (+) strand; PAM type: YTN; PAM sequence: TTG
ttgttatacttccctaggtg

SEQ ID NO: 339813 - DNA, 20 bp, Artificial Sequence
  Description of Artificial Sequence: Synthetic oligonucleotide
  Target: LAMA2; (+) strand; PAM type: YTN; PAM sequence: TTG
ttatacttccctaggtgttc

SEQ ID NO: 339814 - DNA, 20 bp, Artificial Sequence
  Description of Artificial Sequence: Synthetic oligonucleotide
  Target: LAMA2; (+) strand; PAM type: YTN; PAM sequence: TTA
tacttccctaggtgttccag

SEQ ID NO: 339815 - DNA, 20 bp, Artificial Sequence
  Description of Artificial Sequence: Synthetic oligonucleotide
  Target: LAMA2; (+) strand; PAM type: YTN; PAM sequence: CTT
ccctaggtgttccagatcgc

SEQ ID NO: 339816 - DNA, 20 bp, Artificial Sequence
  Description of Artificial Sequence: Synthetic oligonucleotide
  Target: LAMA2; (+) strand; PAM type: YTN; PAM sequence: TTC
cctaggtgttccagatcgcg

SEQ ID NO: 339817 - DNA, 20 bp, Artificial Sequence
  Description of Artificial Sequence: Synthetic oligonucleotide
  Target: LAMA2; (+) strand; PAM type: YTN; PAM sequence: CTA
ggtgttccagatcgcgtatg

SEQ ID NO: 339818 - DNA, 20 bp, Artificial Sequence
  Description of Artificial Sequence: Synthetic oligonucleotide
  Target: LAMA2; (+) strand; PAM type: YTN; PAM sequence: TTC
cagatcgcgtatgtgattgt

SEQ ID NO: 339819 - DNA, 20 bp, Artificial Sequence
  Description of Artificial Sequence: Synthetic oligonucleotide
  Target: LAMA2; (+) strand; PAM type: YTN; PAM sequence: TTG
tgaaggcagctaactccccc

SEQ ID NO: 339820 - DNA, 20 bp, Artificial Sequence
  Description of Artificial Sequence: Synthetic oligonucleotide
  Target: LAMA2; (+) strand; PAM type: YTN; PAM sequence: CTA
actccccccggcctggaaac

SEQ ID NO: 339821 - DNA, 20 bp, Artificial Sequence
  Description of Artificial Sequence: Synthetic oligonucleotide
  Target: LAMA2; (+) strand; PAM type: YTN; PAM sequence: CTC
cccccggcctggaaactgga

SEQ ID NO: 339822 - DNA, 20 bp, Artificial Sequence
  Description of Artificial Sequence: Synthetic oligonucleotide
  Target: LAMA2; (+) strand; PAM type: YTN; PAM sequence: CTG
gaaactggattttggaacgc

SEQ ID NO: 339823 - DNA, 20 bp, Artificial Sequence
  Description of Artificial Sequence: Synthetic oligonucleotide
  Target: LAMA2; (+) strand; PAM type: YTN; PAM sequence: CTG
gattttggaacgctctcttg

SEQ ID NO: 339824 - DNA, 20 bp, Artificial Sequence
  Description of Artificial Sequence: Synthetic oligonucleotide
  Target: LAMA2; (+) strand; PAM type: YTN; PAM sequence: TTT
tggaacgctctcttgatgat

SEQ ID NO: 339825 - DNA, 20 bp, Artificial Sequence
  Description of Artificial Sequence: Synthetic oligonucleotide
  Target: LAMA2; (+) strand; PAM type: YTN; PAM sequence: TTT
ggaacgctctcttgatgatg

SEQ ID NO: 339826 - DNA, 20 bp, Artificial Sequence
  Description of Artificial Sequence: Synthetic oligonucleotide
  Target: LAMA2; (+) strand; PAM type: YTN; PAM sequence: TTG
gaacgctctcttgatgatgt

SEQ ID NO: 339827 - DNA, 20 bp, Artificial Sequence
  Description of Artificial Sequence: Synthetic oligonucleotide
  Target: LAMA2; (+) strand; PAM type: YTN; PAM sequence: CTC
tcttgatgatgttgaataca

SEQ ID NO: 339828 - DNA, 20 bp, Artificial Sequence
  Description of Artificial Sequence: Synthetic oligonucleotide
  Target: LAMA2; (+) strand; PAM type: YTN; PAM sequence: CTC
ttgatgatgttgaatacaag

SEQ ID NO: 339829 - DNA, 20 bp, Artificial Sequence
  Description of Artificial Sequence: Synthetic oligonucleotide
  Target: LAMA2; (+) strand; PAM type: YTN; PAM sequence: CTT
gatgatgttgaatacaagcc

SEQ ID NO: 339830 - DNA, 20 bp, Artificial Sequence
  Description of Artificial Sequence: Synthetic oligonucleotide
  Target: LAMA2; (+) strand; PAM type: YTN; PAM sequence: TTG
atgatgttgaatacaagccc

SEQ ID NO: 339831 - DNA, 20 bp, Artificial Sequence
  Description of Artificial Sequence: Synthetic oligonucleotide
  Target: LAMA2; (+) strand; PAM type: YTN; PAM sequence: TTG
aatacaagccctggcagtat

SEQ ID NO: 339832 - DNA, 20 bp, Artificial Sequence
  Description of Artificial Sequence: Synthetic oligonucleotide
  Target: LAMA2; (+) strand; PAM type: YTN; PAM sequence: CTG
gcagtatcatgctgtgacag

SEQ ID NO: 339833 - DNA, 20 bp, Artificial Sequence
  Description of Artificial Sequence: Synthetic oligonucleotide
  Target: LAMA2; (+) strand; PAM type: YTN; PAM sequence: CTG
tgacagacacggagtgccta

SEQ ID NO: 339834 - DNA, 20 bp, Artificial Sequence
  Description of Artificial Sequence: Synthetic oligonucleotide
  Target: LAMA2; (+) strand; PAM type: YTN; PAM sequence: CTA
acgctttacaatatttatcc

SEQ ID NO: 339835 - DNA, 20 bp, Artificial Sequence
  Description of Artificial Sequence: Synthetic oligonucleotide
  Target: LAMA2; (+) strand; PAM type: YTN; PAM sequence: CTT
tacaatatttatccccgcac

SEQ ID NO: 339836 - DNA, 20 bp, Artificial Sequence
  Description of Artificial Sequence: Synthetic oligonucleotide
  Target: LAMA2; (+) strand; PAM type: YTN; PAM sequence: TTT
acaatatttatccccgcact

SEQ ID NO: 339837 - DNA, 20 bp, Artificial Sequence
  Description of Artificial Sequence: Synthetic oligonucleotide
  Target: LAMA2; (+) strand; PAM type: YTN; PAM sequence: TTA
caatatttatccccgcactg

SEQ ID NO: 339838 - DNA, 20 bp, Artificial Sequence
  Description of Artificial Sequence: Synthetic oligonucleotide
  Target: LAMA2; (+) strand; PAM type: YTN; PAM sequence: TTT
atccccgcactgggccaccg

SEQ ID NO: 339839 - DNA, 20 bp, Artificial Sequence
  Description of Artificial Sequence: Synthetic oligonucleotide
  Target: LAMA2; (+) strand; PAM type: YTN; PAM sequence: TTA
tccccgcactgggccaccgt

SEQ ID NO: 339840 - DNA, 20 bp, Artificial Sequence
  Description of Artificial Sequence: Synthetic oligonucleotide
  Target: LAMA2; (+) strand; PAM type: YTN; PAM sequence: CTG
ggccaccgtcatatgccaaa

SEQ ID NO: 339841 - DNA, 20 bp, Artificial Sequence
  Description of Artificial Sequence: Synthetic oligonucleotide
  Target: LAMA2; (+) strand; PAM type: YTN; PAM sequence: CTG
cacttcattttactccaaga

SEQ ID NO: 339842 - DNA, 20 bp, Artificial Sequence
  Description of Artificial Sequence: Synthetic oligonucleotide
  Target: LAMA2; (+) strand; PAM type: YTN; PAM sequence: CTT
cattttactccaagatacac

SEQ ID NO: 339843 - DNA, 20 bp, Artificial Sequence
  Description of Artificial Sequence: Synthetic oligonucleotide
  Target: LAMA2; (+) strand; PAM type: YTN; PAM sequence: TTC
attttactccaagatacacc

SEQ ID NO: 339844 - DNA, 20 bp, Artificial Sequence
  Description of Artificial Sequence: Synthetic oligonucleotide
  Target: LAMA2; (+) strand; PAM type: YTN; PAM sequence: TTT
tactccaagatacacccctt

SEQ ID NO: 339845 - DNA, 20 bp, Artificial Sequence
  Description of Artificial Sequence: Synthetic oligonucleotide
  Target: LAMA2; (+) strand; PAM type: YTN; PAM sequence: TTT
actccaagatacacccctta

SEQ ID NO: 339846 - DNA, 20 bp, Artificial Sequence
  Description of Artificial Sequence: Synthetic oligonucleotide
  Target: LAMA2; (+) strand; PAM type: YTN; PAM sequence: TTA
ctccaagatacaccccttag

SEQ ID NO: 339847 - DNA, 20 bp, Artificial Sequence
  Description of Artificial Sequence: Synthetic oligonucleotide
  Target: LAMA2; (+) strand; PAM type: YTN; PAM sequence: CTC
caagatacaccccttagaaa

SEQ ID NO: 339848 - DNA, 20 bp, Artificial Sequence
  Description of Artificial Sequence: Synthetic oligonucleotide
  Target: LAMA2; (+) strand; PAM type: YTN; PAM sequence: CTT
agaaaatggagaggtaagat

SEQ ID NO: 339849 - DNA, 20 bp, Artificial Sequence
  Description of Artificial Sequence: Synthetic oligonucleotide
  Target: LAMA2; (+) strand; PAM type: YTN; PAM sequence: TTA
gaaaatggagaggtaagatg

SEQ ID NO: 339850 - DNA, 20 bp, Artificial Sequence
  Description of Artificial Sequence: Synthetic oligonucleotide
  Target: LAMA2; (+) strand; PAM type: YTN; PAM sequence: CTC
accatttaagcacatttgat

SEQ ID NO: 339851 - DNA, 20 bp, Artificial Sequence
  Description of Artificial Sequence: Synthetic oligonucleotide
  Target: LAMA2; (+) strand; PAM type: YTN; PAM sequence: TTT
aagcacatttgatacggtga

SEQ ID NO: 339852 - DNA, 20 bp, Artificial Sequence
  Description of Artificial Sequence: Synthetic oligonucleotide
  Target: LAMA2; (+) strand; PAM type: YTN; PAM sequence: TTA
agcacatttgatacggtgaa

SEQ ID NO: 339853 - DNA, 20 bp, Artificial Sequence
  Description of Artificial Sequence: Synthetic oligonucleotide
  Target: LAMA2; (+) strand; PAM type: YTN; PAM sequence: TTT
gatacggtgaaataggcctg

SEQ ID NO: 339854 - DNA, 20 bp, Artificial Sequence
  Description of Artificial Sequence: Synthetic oligonucleotide
  Target: LAMA2; (+) strand; PAM type: YTN; PAM sequence: TTG
atacggtgaaataggcctgt

SEQ ID NO: 339855 - DNA, 20 bp, Artificial Sequence
  Description of Artificial Sequence: Synthetic oligonucleotide
  Target: LAMA2; (+) strand; PAM type: YTN; PAM sequence: CTG
tcagaaagacctgaatatat

SEQ ID NO: 339856 - DNA, 20 bp, Artificial Sequence
  Description of Artificial Sequence: Synthetic oligonucleotide
  Target: LAMA2; (+) strand; PAM type: YTN; PAM sequence: CTG
aatatatcagtaattaatgt

SEQ ID NO: 339857 - DNA, 20 bp, Artificial Sequence
  Description of Artificial Sequence: Synthetic oligonucleotide
  Target: LAMA2; (+) strand; PAM type: YTN; PAM sequence: TTA
atgtcagggagattttaaaa

SEQ ID NO: 339858 - DNA, 20 bp, Artificial Sequence
  Description of Artificial Sequence: Synthetic oligonucleotide
  Target: LAMA2; (+) strand; PAM type: YTN; PAM sequence: TTT
taaaataggatttagcaaaa

SEQ ID NO: 339859 - DNA, 20 bp, Artificial Sequence
  Description of Artificial Sequence: Synthetic oligonucleotide
  Target: LAMA2; (+) strand; PAM type: YTN; PAM sequence: TTT
aaaataggatttagcaaaag

SEQ ID NO: 339860 - DNA, 20 bp, Artificial Sequence
  Description of Artificial Sequence: Synthetic oligonucleotide
  Target: LAMA2; (+) strand; PAM type: YTN; PAM sequence: TTA
aaataggatttagcaaaagt

SEQ ID NO: 339861 - DNA, 20 bp, Artificial Sequence
  Description of Artificial Sequence: Synthetic oligonucleotide
  Target: LAMA2; (+) strand; PAM type: YTN; PAM sequence: TTT
agcaaaagtacatttaaatg

SEQ ID NO: 339862 - DNA, 20 bp, Artificial Sequence
  Description of Artificial Sequence: Synthetic oligonucleotide
  Target: LAMA2; (+) strand; PAM type: YTN; PAM sequence: TTA
gcaaaagtacatttaaatga

SEQ ID NO: 339863 - DNA, 20 bp, Artificial Sequence
  Description of Artificial Sequence: Synthetic oligonucleotide
  Target: LAMA2; (+) strand; PAM type: YTN; PAM sequence: TTT
aaatgagttattaaataaaa

SEQ ID NO: 339864 - DNA, 20 bp, Artificial Sequence
  Description of Artificial Sequence: Synthetic oligonucleotide
  Target: LAMA2; (+) strand; PAM type: YTN; PAM sequence: TTA
aatgagttattaaataaaaa

SEQ ID NO: 339865 - DNA, 20 bp, Artificial Sequence
  Description of Artificial Sequence: Synthetic oligonucleotide
  Target: LAMA2; (+) strand; PAM type: YTN; PAM sequence: TTA
ttaaataaaaaagaaaaacc

SEQ ID NO: 339866 - DNA, 20 bp, Artificial Sequence
  Description of Artificial Sequence: Synthetic oligonucleotide
  Target: LAMA2; (+) strand; PAM type: YTN; PAM sequence: TTA
aataaaaaagaaaaacctga

SEQ ID NO: 339867 - DNA, 20 bp, Artificial Sequence
  Description of Artificial Sequence: Synthetic oligonucleotide
  Target: LAMA2; (+) strand; PAM type: YTN; PAM sequence: CTG
aggtgattagaattttaact

SEQ ID NO: 339868 - DNA, 20 bp, Artificial Sequence
  Description of Artificial Sequence: Synthetic oligonucleotide
  Target: LAMA2; (+) strand; PAM type: YTN; PAM sequence: TTA
gaattttaactaccttcatg

SEQ ID NO: 339869 - DNA, 20 bp, Artificial Sequence
  Description of Artificial Sequence: Synthetic oligonucleotide
  Target: LAMA2; (+) strand; PAM type: YTN; PAM sequence: TTT
taactaccttcatgtgtctc

SEQ ID NO: 339870 - DNA, 20 bp, Artificial Sequence
  Description of Artificial Sequence: Synthetic oligonucleotide
  Target: LAMA2; (+) strand; PAM type: YTN; PAM sequence: TTT
aactaccttcatgtgtctcc

SEQ ID NO: 339871 - DNA, 20 bp, Artificial Sequence
  Description of Artificial Sequence: Synthetic oligonucleotide
  Target: LAMA2; (+) strand; PAM type: YTN; PAM sequence: TTA
actaccttcatgtgtctccc

SEQ ID NO: 339872 - DNA, 20 bp, Artificial Sequence
  Description of Artificial Sequence: Synthetic oligonucleotide
  Target: LAMA2; (+) strand; PAM type: YTN; PAM sequence: CTA
ccttcatgtgtctcccatct

SEQ ID NO: 339873 - DNA, 20 bp, Artificial Sequence
  Description of Artificial Sequence: Synthetic oligonucleotide
  Target: LAMA2; (+) strand; PAM type: YTN; PAM sequence: CTT
catgtgtctcccatctccag

SEQ ID NO: 339874 - DNA, 20 bp, Artificial Sequence
  Description of Artificial Sequence: Synthetic oligonucleotide
  Target: LAMA2; (+) strand; PAM type: YTN; PAM sequence: TTC
atgtgtctcccatctccagt

SEQ ID NO: 339875 - DNA, 20 bp, Artificial Sequence
  Description of Artificial Sequence: Synthetic oligonucleotide
  Target: LAMA2; (+) strand; PAM type: YTN; PAM sequence: CTC
ccatctccagtaaagatcag

SEQ ID NO: 339876 - DNA, 20 bp, Artificial Sequence
  Description of Artificial Sequence: Synthetic oligonucleotide
  Target: LAMA2; (+) strand; PAM type: YTN; PAM sequence: CTC
cagtaaagatcagagaagag

SEQ ID NO: 339877 - DNA, 20 bp, Artificial Sequence
  Description of Artificial Sequence: Synthetic oligonucleotide
  Target: LAMA2; (+) strand; PAM type: YTN; PAM sequence: TTT
aatctggaaagtcaatgatt

SEQ ID NO: 339878 - DNA, 20 bp, Artificial Sequence
  Description of Artificial Sequence: Synthetic oligonucleotide
  Target: LAMA2; (+) strand; PAM type: YTN; PAM sequence: TTA
atctggaaagtcaatgatta

SEQ ID NO: 339879 - DNA, 20 bp, Artificial Sequence
  Description of Artificial Sequence: Synthetic oligonucleotide
  Target: LAMA2; (+) strand; PAM type: YTN; PAM sequence: CTG
gaaagtcaatgattaatttt

SEQ ID NO: 339880 - DNA, 20 bp, Artificial Sequence
  Description of Artificial Sequence: Synthetic oligonucleotide
  Target: LAMA2; (+) strand; PAM type: YTN; PAM sequence: TTA
attttacatataaagagact

SEQ ID NO: 339881 - DNA, 20 bp, Artificial Sequence
  Description of Artificial Sequence: Synthetic oligonucleotide
  Target: LAMA2; (+) strand; PAM type: YTN; PAM sequence: TTT
tacatataaagagactttct

SEQ ID NO: 339882 - DNA, 20 bp, Artificial Sequence
  Description of Artificial Sequence: Synthetic oligonucleotide
  Target: LAMA2; (+) strand; PAM type: YTN; PAM sequence: TTT
acatataaagagactttctc

SEQ ID NO: 339883 - DNA, 20 bp, Artificial Sequence
  Description of Artificial Sequence: Synthetic oligonucleotide
  Target: LAMA2; (+) strand; PAM type: YTN; PAM sequence: TTA
catataaagagactttctca

SEQ ID NO: 339884 - DNA, 20 bp, Artificial Sequence
  Description of Artificial Sequence: Synthetic oligonucleotide
  Target: LAMA2; (+) strand; PAM type: YTN; PAM sequence: CTT
tctcaacaatgaggattgct

SEQ ID NO: 339885 - DNA, 20 bp, Artificial Sequence
  Description of Artificial Sequence: Synthetic oligonucleotide
  Target: LAMA2; (+) strand; PAM type: YTN; PAM sequence: TTT
ctcaacaatgaggattgcta

SEQ ID NO: 339886 - DNA, 20 bp, Artificial Sequence
  Description of Artificial Sequence: Synthetic oligonucleotide
  Target: LAMA2; (+) strand; PAM type: YTN; PAM sequence: TTC
tcaacaatgaggattgctaa

SEQ ID NO: 339887 - DNA, 20 bp, Artificial Sequence
  Description of Artificial Sequence: Synthetic oligonucleotide
  Target: LAMA2; (+) strand; PAM type: YTN; PAM sequence: CTC
aacaatgaggattgctaatg

SEQ ID NO: 339888 - DNA, 20 bp, Artificial Sequence
  Description of Artificial Sequence: Synthetic oligonucleotide
  Target: LAMA2; (+) strand; PAM type: YTN; PAM sequence: TTG
ctaatgattagagaaggatt

SEQ ID NO: 339889 - DNA, 20 bp, Artificial Sequence
  Description of Artificial Sequence: Synthetic oligonucleotide
  Target: LAMA2; (+) strand; PAM type: YTN; PAM sequence: CTA
atgattagagaaggattgga

SEQ ID NO: 339890 - DNA, 20 bp, Artificial Sequence
  Description of Artificial Sequence: Synthetic oligonucleotide
  Target: LAMA2; (+) strand; PAM type: YTN; PAM sequence: TTA
gagaaggattggagacctta

SEQ ID NO: 339891 - DNA, 20 bp, Artificial Sequence
  Description of Artificial Sequence: Synthetic oligonucleotide
  Target: LAMA2; (+) strand; PAM type: YTN; PAM sequence: TTG
gagaccttaaaggtggcctt

SEQ ID NO: 339892 - DNA, 20 bp, Artificial Sequence
  Description of Artificial Sequence: Synthetic oligonucleotide
  Target: LAMA2; (+) strand; PAM type: YTN; PAM sequence: CTT
aaaggtggccttacatttga

SEQ ID NO: 339893 - DNA, 20 bp, Artificial Sequence
  Description of Artificial Sequence: Synthetic oligonucleotide
  Target: LAMA2; (+) strand; PAM type: YTN; PAM sequence: TTA
aaggtggccttacatttgag

SEQ ID NO: 339894 - DNA, 20 bp, Artificial Sequence
  Description of Artificial Sequence: Synthetic oligonucleotide
  Target: LAMA2; (+) strand; PAM type: YTN; PAM sequence: CTT
acatttgagtgtactttggt

SEQ ID NO: 339895 - DNA, 20 bp, Artificial Sequence
  Description of Artificial Sequence: Synthetic oligonucleotide
  Target: LAMA2; (+) strand; PAM type: YTN; PAM sequence: TTA
catttgagtgtactttggtc

SEQ ID NO: 339896 - DNA, 20 bp, Artificial Sequence
  Description of Artificial Sequence: Synthetic oligonucleotide
  Target: LAMA2; (+) strand; PAM type: YTN; PAM sequence: TTT
gagtgtactttggtctgaag

SEQ ID NO: 339897 - DNA, 20 bp, Artificial Sequence
  Description of Artificial Sequence: Synthetic oligonucleotide
  Target: LAMA2; (+) strand; PAM type: YTN; PAM sequence: TTG
agtgtactttggtctgaaga

SEQ ID NO: 339898 - DNA, 20 bp, Artificial Sequence
  Description of Artificial Sequence: Synthetic oligonucleotide
  Target: LAMA2; (+) strand; PAM type: YTN; PAM sequence: CTT
tggtctgaagatggagacaa

SEQ ID NO: 339899 - DNA, 20 bp, Artificial Sequence
  Description of Artificial Sequence: Synthetic oligonucleotide
  Target: LAMA2; (+) strand; PAM type: YTN; PAM sequence: TTT
ggtctgaagatggagacaaa

SEQ ID NO: 339900 - DNA, 20 bp, Artificial Sequence
  Description of Artificial Sequence: Synthetic oligonucleotide
  Target: LAMA2; (+) strand; PAM type: YTN; PAM sequence: TTG
gtctgaagatggagacaaaa

SEQ ID NO: 339901 - DNA, 20 bp, Artificial Sequence
  Description of Artificial Sequence: Synthetic oligonucleotide
  Target: LAMA2; (+) strand; PAM type: YTN; PAM sequence: CTG
aagatggagacaaaagaaat

SEQ ID NO: 339902 - DNA, 20 bp, Artificial Sequence
  Description of Artificial Sequence: Synthetic oligonucleotide
  Target: LAMA2; (+) strand; PAM type: YTN; PAM sequence: TTT
gtgaagaaatgtaatccaca

SEQ ID NO: 339903 - DNA, 20 bp, Artificial Sequence
  Description of Artificial Sequence: Synthetic oligonucleotide
  Target: LAMA2; (+) strand; PAM type: YTN; PAM sequence: TTG
tgaagaaatgtaatccacat

SEQ ID NO: 339904 - DNA, 20 bp, Artificial Sequence
  Description of Artificial Sequence: Synthetic oligonucleotide
  Target: LAMA2; (+) strand; PAM type: YTN; PAM sequence: TTC
tttcaatcttttgatgtttt

SEQ ID NO: 339905 - DNA, 20 bp, Artificial Sequence
  Description of Artificial Sequence: Synthetic oligonucleotide
  Target: LAMA2; (+) strand; PAM type: YTN; PAM sequence: CTT
tcaatcttttgatgtttttc

SEQ ID NO: 339906 - DNA, 20 bp, Artificial Sequence
  Description of Artificial Sequence: Synthetic oligonucleotide
  Target: LAMA2; (+) strand; PAM type: YTN; PAM sequence: TTT
caatcttttgatgtttttct

SEQ ID NO: 339907 - DNA, 20 bp, Artificial Sequence
  Description of Artificial Sequence: Synthetic oligonucleotide
  Target: LAMA2; (+) strand; PAM type: YTN; PAM sequence: TTC
aatcttttgatgtttttctg

SEQ ID NO: 339908 - DNA, 20 bp, Artificial Sequence
  Description of Artificial Sequence: Synthetic oligonucleotide
  Target: LAMA2; (+) strand; PAM type: YTN; PAM sequence: CTT
ttgatgtttttctgctgtca

SEQ ID NO: 339909 - DNA, 20 bp, Artificial Sequence
  Description of Artificial Sequence: Synthetic oligonucleotide
  Target: LAMA2; (+) strand; PAM type: YTN; PAM sequence: TTT
tgatgtttttctgctgtcac

SEQ ID NO: 339910 - DNA, 20 bp, Artificial Sequence
  Description of Artificial Sequence: Synthetic oligonucleotide
  Target: LAMA2; (+) strand; PAM type: YTN; PAM sequence: TTT
gatgtttttctgctgtcacc

SEQ ID NO: 339911 - DNA, 20 bp, Artificial Sequence
  Description of Artificial Sequence: Synthetic oligonucleotide
  Target: LAMA2; (+) strand; PAM type: YTN; PAM sequence: TTG
atgtttttctgctgtcacca

SEQ ID NO: 339912 - DNA, 20 bp, Artificial Sequence
  Description of Artificial Sequence: Synthetic oligonucleotide
  Target: LAMA2; (+) strand; PAM type: YTN; PAM sequence: TTT
ttctgctgtcaccacatagg

SEQ ID NO: 339913 - DNA, 20 bp, Artificial Sequence
  Description of Artificial Sequence: Synthetic oligonucleotide
  Target: LAMA2; (+) strand; PAM type: YTN; PAM sequence: TTT
tctgctgtcaccacataggg

SEQ ID NO: 339914 - DNA, 20 bp, Artificial Sequence
  Description of Artificial Sequence: Synthetic oligonucleotide
  Target: LAMA2; (+) strand; PAM type: YTN; PAM sequence: TTT
ctgctgtcaccacatagggc

SEQ ID NO: 339915 - DNA, 20 bp, Artificial Sequence
  Description of Artificial Sequence: Synthetic oligonucleotide
  Target: LAMA2; (+) strand; PAM type: YTN; PAM sequence: TTC
tgctgtcaccacatagggct

SEQ ID NO: 339916 - DNA, 20 bp, Artificial Sequence
  Description of Artificial Sequence: Synthetic oligonucleotide
  Target: LAMA2; (+) strand; PAM type: YTN; PAM sequence: CTG
ctgtcaccacatagggctac

SEQ ID NO: 339917 - DNA, 20 bp, Artificial Sequence
  Description of Artificial Sequence: Synthetic oligonucleotide
  Target: LAMA2; (+) strand; PAM type: YTN; PAM sequence: CTG
tcaccacatagggctacagt

SEQ ID NO: 339918 - DNA, 20 bp, Artificial Sequence
  Description of Artificial Sequence: Synthetic oligonucleotide
  Target: LAMA2; (+) strand; PAM type: YTN; PAM sequence: CTA
cagtggggtttcttccctgg

SEQ ID NO: 339919 - DNA, 20 bp, Artificial Sequence
  Description of Artificial Sequence: Synthetic oligonucleotide
  Target: LAMA2; (+) strand; PAM type: YTN; PAM sequence: TTT
cttccctgggtcaggctttg

SEQ ID NO: 339920 - DNA, 20 bp, Artificial Sequence
  Description of Artificial Sequence: Synthetic oligonucleotide
  Target: LAMA2; (+) strand; PAM type: YTN; PAM sequence: TTC
ttccctgggtcaggctttgt

SEQ ID NO: 339921 - DNA, 20 bp, Artificial Sequence
  Description of Artificial Sequence: Synthetic oligonucleotide
  Target: LAMA2; (+) strand; PAM type: YTN; PAM sequence: CTT
ccctgggtcaggctttgtgg

SEQ ID NO: 339922 - DNA, 20 bp, Artificial Sequence
  Description of Artificial Sequence: Synthetic oligonucleotide
  Target: LAMA2; (+) strand; PAM type: YTN; PAM sequence: TTC
cctgggtcaggctttgtgga

SEQ ID NO: 339923 - DNA, 20 bp, Artificial Sequence
  Description of Artificial Sequence: Synthetic oligonucleotide
  Target: LAMA2; (+) strand; PAM type: YTN; PAM sequence: CTG
ggtcaggctttgtggaacag

SEQ ID NO: 339924 - DNA, 20 bp, Artificial Sequence
  Description of Artificial Sequence: Synthetic oligonucleotide
  Target: LAMA2; (+) strand; PAM type: YTN; PAM sequence: CTT
tgtggaacagtaatgtgcag

SEQ ID NO: 339925 - DNA, 20 bp, Artificial Sequence
  Description of Artificial Sequence: Synthetic oligonucleotide
  Target: LAMA2; (+) strand; PAM type: YTN; PAM sequence: TTT
gtggaacagtaatgtgcagg

SEQ ID NO: 339926 - DNA, 20 bp, Artificial Sequence
  Description of Artificial Sequence: Synthetic oligonucleotide
  Target: LAMA2; (+) strand; PAM type: YTN; PAM sequence: TTG
tggaacagtaatgtgcagga

SEQ ID NO: 339927 - DNA, 20 bp, Artificial Sequence
  Description of Artificial Sequence: Synthetic oligonucleotide
  Target: LAMA2; (+) strand; PAM type: YTN; PAM sequence: CTT
aggttctcagtgatgtgcaa

SEQ ID NO: 339928 - DNA, 20 bp, Artificial Sequence
  Description of Artificial Sequence: Synthetic oligonucleotide
  Target: LAMA2; (+) strand; PAM type: YTN; PAM sequence: TTA
ggttctcagtgatgtgcaag

SEQ ID NO: 339929 - DNA, 20 bp, Artificial Sequence
  Description of Artificial Sequence: Synthetic oligonucleotide
  Target: LAMA2; (+) strand; PAM type: YTN; PAM sequence: TTC
tcagtgatgtgcaagctagg

SEQ ID NO: 339930 - DNA, 20 bp, Artificial Sequence
  Description of Artificial Sequence: Synthetic oligonucleotide
  Target: LAMA2; (+) strand; PAM type: YTN; PAM sequence: CTC
agtgatgtgcaagctaggtt

SEQ ID NO: 339931 - DNA, 20 bp, Artificial Sequence
  Description of Artificial Sequence: Synthetic oligonucleotide
  Target: LAMA2; (+) strand; PAM type: YTN; PAM sequence: CTA
ggttacgtgcttagttcaaa

SEQ ID NO: 339932 - DNA, 20 bp, Artificial Sequence
  Description of Artificial Sequence: Synthetic oligonucleotide
  Target: LAMA2; (+) strand; PAM type: YTN; PAM sequence: TTA
cgtgcttagttcaaatatgt

SEQ ID NO: 339933 - DNA, 20 bp, Artificial Sequence
  Description of Artificial Sequence: Synthetic oligonucleotide
  Target: LAMA2; (+) strand; PAM type: YTN; PAM sequence: CTT
agttcaaatatgttcttctc

SEQ ID NO: 339934 - DNA, 20 bp, Artificial Sequence
  Description of Artificial Sequence: Synthetic oligonucleotide
  Target: LAMA2; (+) strand; PAM type: YTN; PAM sequence: TTA
gttcaaatatgttcttctcc

SEQ ID NO: 339935 - DNA, 20 bp, Artificial Sequence
  Description of Artificial Sequence: Synthetic oligonucleotide
  Target: LAMA2; (+) strand; PAM type: YTN; PAM sequence: TTC
aaatatgttcttctccagtg

SEQ ID NO: 339936 - DNA, 20 bp, Artificial Sequence
  Description of Artificial Sequence: Synthetic oligonucleotide
  Target: LAMA2; (+) strand; PAM type: YTN; PAM sequence: TTC
ttctccagtgtctgtcatcc

SEQ ID NO: 339937 - DNA, 20 bp, Artificial Sequence
  Description of Artificial Sequence: Synthetic oligonucleotide
  Target: LAMA2; (+) strand; PAM type: YTN; PAM sequence: CTT
ctccagtgtctgtcatcctg

SEQ ID NO: 339938 - DNA, 20 bp, Artificial Sequence
  Description of Artificial Sequence: Synthetic oligonucleotide
  Target: LAMA2; (+) strand; PAM type: YTN; PAM sequence: TTC
tccagtgtctgtcatcctgt

SEQ ID NO: 339939 - DNA, 20 bp, Artificial Sequence
  Description of Artificial Sequence: Synthetic oligonucleotide
  Target: LAMA2; (+) strand; PAM type: YTN; PAM sequence: CTC
cagtgtctgtcatcctgtgg

SEQ ID NO: 339940 - DNA, 20 bp, Artificial Sequence
  Description of Artificial Sequence: Synthetic oligonucleotide
  Target: LAMA2; (+) strand; PAM type: YTN; PAM sequence: CTG
tcatcctgtggttaagattt

SEQ ID NO: 339941 - DNA, 20 bp, Artificial Sequence
  Description of Artificial Sequence: Synthetic oligonucleotide
  Target: LAMA2; (+) strand; PAM type: YTN; PAM sequence: CTG
tggttaagattttagattca

SEQ ID NO: 339942 - DNA, 20 bp, Artificial Sequence
  Description of Artificial Sequence: Synthetic oligonucleotide
  Target: LAMA2; (+) strand; PAM type: YTN; PAM sequence: TTA
agattttagattcattcatt

SEQ ID NO: 339943 - DNA, 20 bp, Artificial Sequence
  Description of Artificial Sequence: Synthetic oligonucleotide
  Target: LAMA2; (+) strand; PAM type: YTN; PAM sequence: TTT
tagattcattcattgatttt

SEQ ID NO: 339944 - DNA, 20 bp, Artificial Sequence
  Description of Artificial Sequence: Synthetic oligonucleotide
  Target: LAMA2; (+) strand; PAM type: YTN; PAM sequence: TTT
agattcattcattgatttta

SEQ ID NO: 339945 - DNA, 20 bp, Artificial Sequence
  Description of Artificial Sequence: Synthetic oligonucleotide
  Target: LAMA2; (+) strand; PAM type: YTN; PAM sequence: TTA
gattcattcattgattttaa

SEQ ID NO: 339946 - DNA, 20 bp, Artificial Sequence
  Description of Artificial Sequence: Synthetic oligonucleotide
  Target: LAMA2; (+) strand; PAM type: YTN; PAM sequence: TTC
attcattgattttaagccac

SEQ ID NO: 339947 - DNA, 20 bp, Artificial Sequence
  Description of Artificial Sequence: Synthetic oligonucleotide
  Target: LAMA2; (+) strand; PAM type: YTN; PAM sequence: TTC
attgattttaagccacatat

SEQ ID NO: 339948 - DNA, 20 bp, Artificial Sequence
  Description of Artificial Sequence: Synthetic oligonucleotide
  Target: LAMA2; (+) strand; PAM type: YTN; PAM sequence: TTG
attttaagccacatattcta

SEQ ID NO: 339949 - DNA, 20 bp, Artificial Sequence
  Description of Artificial Sequence: Synthetic oligonucleotide
  Target: LAMA2; (+) strand; PAM type: YTN; PAM sequence: TTT
taagccacatattctaacca

SEQ ID NO: 339950 - DNA, 20 bp, Artificial Sequence
  Description of Artificial Sequence: Synthetic oligonucleotide
  Target: LAMA2; (+) strand; PAM type: YTN; PAM sequence: TTT
aagccacatattctaaccat

SEQ ID NO: 339951 - DNA, 20 bp, Artificial Sequence
  Description of Artificial Sequence: Synthetic oligonucleotide
  Target: LAMA2; (+) strand; PAM type: YTN; PAM sequence: TTA
agccacatattctaaccatg

SEQ ID NO: 339952 - DNA, 20 bp, Artificial Sequence
  Description of Artificial Sequence: Synthetic oligonucleotide
  Target: LAMA2; (+) strand; PAM type: YTN; PAM sequence: TTC
taaccatggcttcagttgtt

SEQ ID NO: 339953 - DNA, 20 bp, Artificial Sequence
  Description of Artificial Sequence: Synthetic oligonucleotide
  Target: LAMA2; (+) strand; PAM type: YTN; PAM sequence: CTA
accatggcttcagttgttat

SEQ ID NO: 339954 - DNA, 20 bp, Artificial Sequence
  Description of Artificial Sequence: Synthetic oligonucleotide
  Target: LAMA2; (+) strand; PAM type: YTN; PAM sequence: CTT
cagttgttattagtttatta

SEQ ID NO: 339955 - DNA, 20 bp, Artificial Sequence
  Description of Artificial Sequence: Synthetic oligonucleotide
  Target: LAMA2; (+) strand; PAM type: YTN; PAM sequence: TTC
agttgttattagtttattag

SEQ ID NO: 339956 - DNA, 20 bp, Artificial Sequence
  Description of Artificial Sequence: Synthetic oligonucleotide
  Target: LAMA2; (+) strand; PAM type: YTN; PAM sequence: TTG
ttattagtttattagttgta

SEQ ID NO: 339957 - DNA, 20 bp, Artificial Sequence
  Description of Artificial Sequence: Synthetic oligonucleotide
  Target: LAMA2; (+) strand; PAM type: YTN; PAM sequence: TTA
ttagtttattagttgtatgt

SEQ ID NO: 339958 - DNA, 20 bp, Artificial Sequence
  Description of Artificial Sequence: Synthetic oligonucleotide
  Target: LAMA2; (+) strand; PAM type: YTN; PAM sequence: TTA
gtttattagttgtatgtggg

SEQ ID NO: 339959 - DNA, 20 bp, Artificial Sequence
  Description of Artificial Sequence: Synthetic oligonucleotide
  Target: LAMA2; (+) strand; PAM type: YTN; PAM sequence: TTT
attagttgtatgtgggggcg

SEQ ID NO: 339960 - DNA, 20 bp, Artificial Sequence
  Description of Artificial Sequence: Synthetic oligonucleotide
  Target: LAMA2; (+) strand; PAM type: YTN; PAM sequence: TTA
ttagttgtatgtgggggcgg

SEQ ID NO: 339961 - DNA, 20 bp, Artificial Sequence
  Description of Artificial Sequence: Synthetic oligonucleotide
  Target: LAMA2; (+) strand; PAM type: YTN; PAM sequence: TTA
gttgtatgtgggggcgggga

SEQ ID NO: 339962 - DNA, 20 bp, Artificial Sequence
  Description of Artificial Sequence: Synthetic oligonucleotide
  Target: LAMA2; (+) strand; PAM type: YTN; PAM sequence: TTG
tatgtgggggcggggaggtt

SEQ ID NO: 339963 - DNA, 20 bp, Artificial Sequence
  Description of Artificial Sequence: Synthetic oligonucleotide
  Target: LAMA2; (+) strand; PAM type: YTN; PAM sequence: TTT
tttttttgtttttttttttt

SEQ ID NO: 339964 - DNA, 20 bp, Artificial Sequence
  Description of Artificial Sequence: Synthetic oligonucleotide
  Target: LAMA2; (+) strand; PAM type: YTN; PAM sequence: TTT
ttttttgttttttttttttt

SEQ ID NO: 339965 - DNA, 20 bp, Artificial Sequence
  Description of Artificial Sequence: Synthetic oligonucleotide
  Target: LAMA2; (+) strand; PAM type: YTN; PAM sequence: TTT
tttttgtttttttttttttt

SEQ ID NO: 339966 - DNA, 20 bp, Artificial Sequence
  Description of Artificial Sequence: Synthetic oligonucleotide
  Target: LAMA2; (+) strand; PAM type: YTN; PAM sequence: TTT
ttttgttttttttttttttg

SEQ ID NO: 339967 - DNA, 20 bp, Artificial Sequence
  Description of Artificial Sequence: Synthetic oligonucleotide
  Target: LAMA2; (+) strand; PAM type: YTN; PAM sequence: TTT
tttgttttttttttttttgt

SEQ ID NO: 339968 - DNA, 20 bp, Artificial Sequence
  Description of Artificial Sequence: Synthetic oligonucleotide
  Target: LAMA2; (+) strand; PAM type: YTN; PAM sequence: TTT
ttgttttttttttttttgtt

SEQ ID NO: 339969 - DNA, 20 bp, Artificial Sequence
  Description of Artificial Sequence: Synthetic oligonucleotide
  Target: LAMA2; (+) strand; PAM type: YTN; PAM sequence: TTT
tgttttttttttttttgttt

SEQ ID NO: 339970 - DNA, 20 bp, Artificial Sequence
  Description of Artificial Sequence: Synthetic oligonucleotide
  Target: LAMA2; (+) strand; PAM type: YTN; PAM sequence: TTT
gttttttttttttttgtttt

SEQ ID NO: 339971 - DNA, 20 bp, Artificial Sequence
  Description of Artificial Sequence: Synthetic oligonucleotide
  Target: LAMA2; (+) strand; PAM type: YTN; PAM sequence: TTG
ttttttttttttttgttttc

SEQ ID NO: 339972 - DNA, 20 bp, Artificial Sequence
  Description of Artificial Sequence: Synthetic oligonucleotide
  Target: LAMA2; (+) strand; PAM type: YTN; PAM sequence: TTT
tttttttttttgttttctgg

SEQ ID NO: 339973 - DNA, 20 bp, Artificial Sequence
  Description of Artificial Sequence: Synthetic oligonucleotide
  Target: LAMA2; (+) strand; PAM type: YTN; PAM sequence: TTT
ttttttttttgttttctggc

SEQ ID NO: 339974 - DNA, 20 bp, Artificial Sequence
  Description of Artificial Sequence: Synthetic oligonucleotide
  Target: LAMA2; (+) strand; PAM type: YTN; PAM sequence: TTT
tttttttttgttttctggct

SEQ ID NO: 339975 - DNA, 20 bp, Artificial Sequence
  Description of Artificial Sequence: Synthetic oligonucleotide
  Target: LAMA2; (+) strand; PAM type: YTN; PAM sequence: TTT
ttttttttgttttctggctt

SEQ ID NO: 339976 - DNA, 20 bp, Artificial Sequence
  Description of Artificial Sequence: Synthetic oligonucleotide
  Target: LAMA2; (+) strand; PAM type: YTN; PAM sequence: TTT
tttttttgttttctggctta

SEQ ID NO: 339977 - DNA, 20 bp, Artificial Sequence
  Description of Artificial Sequence: Synthetic oligonucleotide
  Target: LAMA2; (+) strand; PAM type: YTN; PAM sequence: TTT
ttttttgttttctggcttag

SEQ ID NO: 339978 - DNA, 20 bp, Artificial Sequence
  Description of Artificial Sequence: Synthetic oligonucleotide
  Target: LAMA2; (+) strand; PAM type: YTN; PAM sequence: TTT
tttttgttttctggcttagt

SEQ ID NO: 339979 - DNA, 20 bp, Artificial Sequence
  Description of Artificial Sequence: Synthetic oligonucleotide
  Target: LAMA2; (+) strand; PAM type: YTN; PAM sequence: TTT
ttttgttttctggcttagtt

SEQ ID NO: 339980 - DNA, 20 bp, Artificial Sequence
  Description of Artificial Sequence: Synthetic oligonucleotide
  Target: LAMA2; (+) strand; PAM type: YTN; PAM sequence: TTT
tttgttttctggcttagttg

SEQ ID NO: 339981 - DNA, 20 bp, Artificial Sequence
  Description of Artificial Sequence: Synthetic oligonucleotide
  Target: LAMA2; (+) strand; PAM type: YTN; PAM sequence: TTT
ttgttttctggcttagttgt

SEQ ID NO: 339982 - DNA, 20 bp, Artificial Sequence
  Description of Artificial Sequence: Synthetic oligonucleotide
  Target: LAMA2; (+) strand; PAM type: YTN; PAM sequence: TTT
tgttttctggcttagttgtg

SEQ ID NO: 339983 - DNA, 20 bp, Artificial Sequence
  Description of Artificial Sequence: Synthetic oligonucleotide
  Target: LAMA2; (+) strand; PAM type: YTN; PAM sequence: TTT
gttttctggcttagttgtgt

SEQ ID NO: 339984 - DNA, 20 bp, Artificial Sequence
  Description of Artificial Sequence: Synthetic oligonucleotide
  Target: LAMA2; (+) strand; PAM type: YTN; PAM sequence: TTG
ttttctggcttagttgtgtg

SEQ ID NO: 339985 - DNA, 20 bp, Artificial Sequence
  Description of Artificial Sequence: Synthetic oligonucleotide
  Target: LAMA2; (+) strand; PAM type: YTN; PAM sequence: TTT
tctggcttagttgtgtgttc

SEQ ID NO: 339986 - DNA, 20 bp, Artificial Sequence
  Description of Artificial Sequence: Synthetic oligonucleotide
  Target: LAMA2; (+) strand; PAM type: YTN; PAM sequence: TTT
ctggcttagttgtgtgttct

SEQ ID NO: 339987 - DNA, 20 bp, Artificial Sequence
  Description of Artificial Sequence: Synthetic oligonucleotide
  Target: LAMA2; (+) strand; PAM type: YTN; PAM sequence: TTC
tggcttagttgtgtgttctt

SEQ ID NO: 339988 - DNA, 20 bp, Artificial Sequence
  Description of Artificial Sequence: Synthetic oligonucleotide
  Target: LAMA2; (+) strand; PAM type: YTN; PAM sequence: CTG
gcttagttgtgtgttcttga

SEQ ID NO: 339989 - DNA, 20 bp, Artificial Sequence
  Description of Artificial Sequence: Synthetic oligonucleotide
  Target: LAMA2; (+) strand; PAM type: YTN; PAM sequence: CTT
agttgtgtgttcttgatcca

SEQ ID NO: 339990 - DNA, 20 bp, Artificial Sequence
  Description of Artificial Sequence: Synthetic oligonucleotide
  Target: LAMA2; (+) strand; PAM type: YTN; PAM sequence: TTA
gttgtgtgttcttgatccag

SEQ ID NO: 339991 - DNA, 20 bp, Artificial Sequence
  Description of Artificial Sequence: Synthetic oligonucleotide
  Target: LAMA2; (+) strand; PAM type: YTN; PAM sequence: TTG
tgtgttcttgatccagttac

SEQ ID NO: 339992 - DNA, 20 bp, Artificial Sequence
  Description of Artificial Sequence: Synthetic oligonucleotide
  Target: LAMA2; (+) strand; PAM type: YTN; PAM sequence: TTC
ttgatccagttacttaaatt

SEQ ID NO: 339993 - DNA, 20 bp, Artificial Sequence
  Description of Artificial Sequence: Synthetic oligonucleotide
  Target: LAMA2; (+) strand; PAM type: YTN; PAM sequence: CTT
gatccagttacttaaattct

SEQ ID NO: 339994 - DNA, 20 bp, Artificial Sequence
  Description of Artificial Sequence: Synthetic oligonucleotide
  Target: LAMA2; (+) strand; PAM type: YTN; PAM sequence: TTG
atccagttacttaaattctc

SEQ ID NO: 339995 - DNA, 20 bp, Artificial Sequence
  Description of Artificial Sequence: Synthetic oligonucleotide
  Target: LAMA2; (+) strand; PAM type: YTN; PAM sequence: TTA
cttaaattctctgcacctca

SEQ ID NO: 339996 - DNA, 20 bp, Artificial Sequence
  Description of Artificial Sequence: Synthetic oligonucleotide
  Target: LAMA2; (+) strand; PAM type: YTN; PAM sequence: CTT
aaattctctgcacctcagtt

SEQ ID NO: 339997 - DNA, 20 bp, Artificial Sequence
  Description of Artificial Sequence: Synthetic oligonucleotide
  Target: LAMA2; (+) strand; PAM type: YTN; PAM sequence: TTA
aattctctgcacctcagttt

SEQ ID NO: 339998 - DNA, 20 bp, Artificial Sequence
  Description of Artificial Sequence: Synthetic oligonucleotide
  Target: LAMA2; (+) strand; PAM type: YTN; PAM sequence: TTC
tctgcacctcagtttcatcg

SEQ ID NO: 339999 - DNA, 20 bp, Artificial Sequence
  Description of Artificial Sequence: Synthetic oligonucleotide
  Target: LAMA2; (+) strand; PAM type: YTN; PAM sequence: CTC
tgcacctcagtttcatcgcc

SEQ ID NO: 340000 - DNA, 20 bp, Artificial Sequence
  Description of Artificial Sequence: Synthetic oligonucleotide
  Target: LAMA2; (+) strand; PAM type: YTN; PAM sequence: CTG
cacctcagtttcatcgccca

SEQ ID NO: 340001 - DNA, 20 bp, Artificial Sequence
  Description of Artificial Sequence: Synthetic oligonucleotide
  Target: LAMA2; (+) strand; PAM type: YTN; PAM sequence: CTC
agtttcatcgcccataaatc

SEQ ID NO: 340002 - DNA, 20 bp, Artificial Sequence
  Description of Artificial Sequence: Synthetic oligonucleotide
  Target: LAMA2; (+) strand; PAM type: YTN; PAM sequence: TTT
catcgcccataaatcaggaa

SEQ ID NO: 340003 - DNA, 20 bp, Artificial Sequence
  Description of Artificial Sequence: Synthetic oligonucleotide
  Target: LAMA2; (+) strand; PAM type: YTN; PAM sequence: TTC
atcgcccataaatcaggaat

SEQ ID NO: 340004 - DNA, 20 bp, Artificial Sequence
  Description of Artificial Sequence: Synthetic oligonucleotide
  Target: LAMA2; (+) strand; PAM type: YTN; PAM sequence: TTC
ttacctcatataattgtcaa

SEQ ID NO: 340005 - DNA, 20 bp, Artificial Sequence
  Description of Artificial Sequence: Synthetic oligonucleotide
  Target: LAMA2; (+) strand; PAM type: YTN; PAM sequence: CTT
acctcatataattgtcaaga

SEQ ID NO: 340006 - DNA, 20 bp, Artificial Sequence
  Description of Artificial Sequence: Synthetic oligonucleotide
  Target: LAMA2; (+) strand; PAM type: YTN; PAM sequence: TTA
cctcatataattgtcaagag

SEQ ID NO: 340007 - DNA, 20 bp, Artificial Sequence
  Description of Artificial Sequence: Synthetic oligonucleotide
  Target: LAMA2; (+) strand; PAM type: YTN; PAM sequence: CTC
atataattgtcaagaggatt

SEQ ID NO: 340008 - DNA, 20 bp, Artificial Sequence
  Description of Artificial Sequence: Synthetic oligonucleotide
  Target: LAMA2; (+) strand; PAM type: YTN; PAM sequence: TTG
tcaagaggattaaatgcatt

SEQ ID NO: 340009 - DNA, 20 bp, Artificial Sequence
  Description of Artificial Sequence: Synthetic oligonucleotide
  Target: LAMA2; (+) strand; PAM type: YTN; PAM sequence: TTA
aatgcattattgtatttaaa

SEQ ID NO: 340010 - DNA, 20 bp, Artificial Sequence
  Description of Artificial Sequence: Synthetic oligonucleotide
  Target: LAMA2; (+) strand; PAM type: YTN; PAM sequence: TTA
ttgtatttaaagcattagaa

SEQ ID NO: 340011 - DNA, 20 bp, Artificial Sequence
  Description of Artificial Sequence: Synthetic oligonucleotide
  Target: LAMA2; (+) strand; PAM type: YTN; PAM sequence: TTG
tatttaaagcattagaacaa

SEQ ID NO: 340012 - DNA, 20 bp, Artificial Sequence
  Description of Artificial Sequence: Synthetic oligonucleotide
  Target: LAMA2; (+) strand; PAM type: YTN; PAM sequence: TTT
aaagcattagaacaatgctg

SEQ ID NO: 340013 - DNA, 20 bp, Artificial Sequence
  Description of Artificial Sequence: Synthetic oligonucleotide
  Target: LAMA2; (+) strand; PAM type: YTN; PAM sequence: TTA
aagcattagaacaatgctga

SEQ ID NO: 340014 - DNA, 20 bp, Artificial Sequence
  Description of Artificial Sequence: Synthetic oligonucleotide
  Target: LAMA2; (+) strand; PAM type: YTN; PAM sequence: TTA
gaacaatgctgaaatgcaca

SEQ ID NO: 340015 - DNA, 20 bp, Artificial Sequence
  Description of Artificial Sequence: Synthetic oligonucleotide
  Target: LAMA2; (+) strand; PAM type: YTN; PAM sequence: CTG
aaatgcacactaagtactct

SEQ ID NO: 340016 - DNA, 20 bp, Artificial Sequence
  Description of Artificial Sequence: Synthetic oligonucleotide
  Target: LAMA2; (+) strand; PAM type: YTN; PAM sequence: CTA
agtactctgtgctattttta

SEQ ID NO: 340017 - DNA, 20 bp, Artificial Sequence
  Description of Artificial Sequence: Synthetic oligonucleotide
  Target: LAMA2; (+) strand; PAM type: YTN; PAM sequence: CTC
tgtgctatttttattgtttt

SEQ ID NO: 340018 - DNA, 20 bp, Artificial Sequence
  Description of Artificial Sequence: Synthetic oligonucleotide
  Target: LAMA2; (+) strand; PAM type: YTN; PAM sequence: CTG
tgctatttttattgttttgt

SEQ ID NO: 340019 - DNA, 20 bp, Artificial Sequence
  Description of Artificial Sequence: Synthetic oligonucleotide
  Target: LAMA2; (+) strand; PAM type: YTN; PAM sequence: CTA
tttttattgttttgttgcca

SEQ ID NO: 340020 - DNA, 20 bp, Artificial Sequence
  Description of Artificial Sequence: Synthetic oligonucleotide
  Target: LAMA2; (+) strand; PAM type: YTN; PAM sequence: TTT
ttattgttttgttgccatta

SEQ ID NO: 340021 - DNA, 20 bp, Artificial Sequence
  Description of Artificial Sequence: Synthetic oligonucleotide
  Target: LAMA2; (+) strand; PAM type: YTN; PAM sequence: TTT
tattgttttgttgccattaa

SEQ ID NO: 340022 - DNA, 20 bp, Artificial Sequence
  Description of Artificial Sequence: Synthetic oligonucleotide
  Target: LAMA2; (+) strand; PAM type: YTN; PAM sequence: TTT
attgttttgttgccattaag

SEQ ID NO: 340023 - DNA, 20 bp, Artificial Sequence
  Description of Artificial Sequence: Synthetic oligonucleotide
  Target: LAMA2; (+) strand; PAM type: YTN; PAM sequence: TTA
ttgttttgttgccattaagg

SEQ ID NO: 340024 - DNA, 20 bp, Artificial Sequence
  Description of Artificial Sequence: Synthetic oligonucleotide
  Target: LAMA2; (+) strand; PAM type: YTN; PAM sequence: TTG
ttttgttgccattaaggaaa

SEQ ID NO: 340025 - DNA, 20 bp, Artificial Sequence
  Description of Artificial Sequence: Synthetic oligonucleotide
  Target: LAMA2; (+) strand; PAM type: YTN; PAM sequence: TTT
tgttgccattaaggaaataa

SEQ ID NO: 340026 - DNA, 20 bp, Artificial Sequence
  Description of Artificial Sequence: Synthetic oligonucleotide
  Target: LAMA2; (+) strand; PAM type: YTN; PAM sequence: TTT
gttgccattaaggaaataat

SEQ ID NO: 340027 - DNA, 20 bp, Artificial Sequence
  Description of Artificial Sequence: Synthetic oligonucleotide
  Target: LAMA2; (+) strand; PAM type: YTN; PAM sequence: TTG
ttgccattaaggaaataata

SEQ ID NO: 340028 - DNA, 20 bp, Artificial Sequence
  Description of Artificial Sequence: Synthetic oligonucleotide
  Target: LAMA2; (+) strand; PAM type: YTN; PAM sequence: TTG
ccattaaggaaataataacc

SEQ ID NO: 340029 - DNA, 20 bp, Artificial Sequence
  Description of Artificial Sequence: Synthetic oligonucleotide
  Target: LAMA2; (+) strand; PAM type: YTN; PAM sequence: TTA
aggaaataataaccattact

SEQ ID NO: 340030 - DNA, 20 bp, Artificial Sequence
  Description of Artificial Sequence: Synthetic oligonucleotide
  Target: LAMA2; (+) strand; PAM type: YTN; PAM sequence: TTA
ctactattatttttattatt

SEQ ID NO: 340031 - DNA, 20 bp, Artificial Sequence
  Description of Artificial Sequence: Synthetic oligonucleotide
  Target: LAMA2; (+) strand; PAM type: YTN; PAM sequence: CTA
ctattatttttattattatc

SEQ ID NO: 340032 - DNA, 20 bp, Artificial Sequence
  Description of Artificial Sequence: Synthetic oligonucleotide
  Target: LAMA2; (+) strand; PAM type: YTN; PAM sequence: CTA
ttatttttattattatcctt

SEQ ID NO: 340033 - DNA, 20 bp, Artificial Sequence
  Description of Artificial Sequence: Synthetic oligonucleotide
  Target: LAMA2; (+) strand; PAM type: YTN; PAM sequence: TTA
tttttattattatccttagt

SEQ ID NO: 340034 - DNA, 20 bp, Artificial Sequence
  Description of Artificial Sequence: Synthetic oligonucleotide
  Target: LAMA2; (+) strand; PAM type: YTN; PAM sequence: TTT
ttattattatccttagtctt

SEQ ID NO: 340035 - DNA, 20 bp, Artificial Sequence
  Description of Artificial Sequence: Synthetic oligonucleotide
  Target: LAMA2; (+) strand; PAM type: YTN; PAM sequence: TTT
tattattatccttagtcttc

SEQ ID NO: 340036 - DNA, 20 bp, Artificial Sequence
  Description of Artificial Sequence: Synthetic oligonucleotide
  Target: LAMA2; (+) strand; PAM type: YTN; PAM sequence: TTT
attattatccttagtcttct

SEQ ID NO: 340037 - DNA, 20 bp, Artificial Sequence
  Description of Artificial Sequence: Synthetic oligonucleotide
  Target: LAMA2; (+) strand; PAM type: YTN; PAM sequence: TTA
ttattatccttagtcttctc

SEQ ID NO: 340038 - DNA, 20 bp, Artificial Sequence
  Description of Artificial Sequence: Synthetic oligonucleotide
  Target: LAMA2; (+) strand; PAM type: YTN; PAM sequence: TTA
ttatccttagtcttctctca

SEQ ID NO: 340039 - DNA, 20 bp, Artificial Sequence
  Description of Artificial Sequence: Synthetic oligonucleotide
  Target: LAMA2; (+) strand; PAM type: YTN; PAM sequence: TTA
tccttagtcttctctcaaat

SEQ ID NO: 340040 - DNA, 20 bp, Artificial Sequence
  Description of Artificial Sequence: Synthetic oligonucleotide
  Target: LAMA2; (+) strand; PAM type: YTN; PAM sequence: CTT
agtcttctctcaaataccca

SEQ ID NO: 340041 - DNA, 20 bp, Artificial Sequence
  Description of Artificial Sequence: Synthetic oligonucleotide
  Target: LAMA2; (+) strand; PAM type: YTN; PAM sequence: TTA
gtcttctctcaaatacccaa

SEQ ID NO: 340042 - DNA, 20 bp, Artificial Sequence
  Description of Artificial Sequence: Synthetic oligonucleotide
  Target: LAMA2; (+) strand; PAM type: YTN; PAM sequence: CTT
ctctcaaatacccaaacttt

SEQ ID NO: 340043 - DNA, 20 bp, Artificial Sequence
  Description of Artificial Sequence: Synthetic oligonucleotide
  Target: LAMA2; (+) strand; PAM type: YTN; PAM sequence: TTC
tctcaaatacccaaactttg

SEQ ID NO: 340044 - DNA, 20 bp, Artificial Sequence
  Description of Artificial Sequence: Synthetic oligonucleotide
  Target: LAMA2; (+) strand; PAM type: YTN; PAM sequence: CTC
tcaaatacccaaactttgac

SEQ ID NO: 340045 - DNA, 20 bp, Artificial Sequence
  Description of Artificial Sequence: Synthetic oligonucleotide
  Target: LAMA2; (+) strand; PAM type: YTN; PAM sequence: CTC
aaatacccaaactttgactt

SEQ ID NO: 340046 - DNA, 20 bp, Artificial Sequence
  Description of Artificial Sequence: Synthetic oligonucleotide
  Target: LAMA2; (+) strand; PAM type: YTN; PAM sequence: CTT
tgacttagtgactctcttga

SEQ ID NO: 340047 - DNA, 20 bp, Artificial Sequence
  Description of Artificial Sequence: Synthetic oligonucleotide
  Target: LAMA2; (+) strand; PAM type: YTN; PAM sequence: TTT
gacttagtgactctcttgaa

SEQ ID NO: 340048 - DNA, 20 bp, Artificial Sequence
  Description of Artificial Sequence: Synthetic oligonucleotide
  Target: LAMA2; (+) strand; PAM type: YTN; PAM sequence: TTG
acttagtgactctcttgaat

SEQ ID NO: 340049 - DNA, 20 bp, Artificial Sequence
  Description of Artificial Sequence: Synthetic oligonucleotide
  Target: LAMA2; (+) strand; PAM type: YTN; PAM sequence: CTT
agtgactctcttgaattatt

SEQ ID NO: 340050 - DNA, 20 bp, Artificial Sequence
  Description of Artificial Sequence: Synthetic oligonucleotide
  Target: LAMA2; (+) strand; PAM type: YTN; PAM sequence: TTA
gtgactctcttgaattattc

SEQ ID NO: 340051 - DNA, 20 bp, Artificial Sequence
  Description of Artificial Sequence: Synthetic oligonucleotide
  Target: LAMA2; (+) strand; PAM type: YTN; PAM sequence: CTC
tcttgaattattcaatattt

SEQ ID NO: 340052 - DNA, 20 bp, Artificial Sequence
  Description of Artificial Sequence: Synthetic oligonucleotide
  Target: LAMA2; (+) strand; PAM type: YTN; PAM sequence: CTC
ttgaattattcaatatttct

SEQ ID NO: 340053 - DNA, 20 bp, Artificial Sequence
  Description of Artificial Sequence: Synthetic oligonucleotide
  Target: LAMA2; (+) strand; PAM type: YTN; PAM sequence: CTT
gaattattcaatatttcttt

SEQ ID NO: 340054 - DNA, 20 bp, Artificial Sequence
  Description of Artificial Sequence: Synthetic oligonucleotide
  Target: LAMA2; (+) strand; PAM type: YTN; PAM sequence: TTG
aattattcaatatttcttta

SEQ ID NO: 340055 - DNA, 20 bp, Artificial Sequence
  Description of Artificial Sequence: Synthetic oligonucleotide
  Target: LAMA2; (+) strand; PAM type: YTN; PAM sequence: TTA
ttcaatatttctttagtatg

SEQ ID NO: 340056 - DNA, 20 bp, Artificial Sequence
  Description of Artificial Sequence: Synthetic oligonucleotide
  Target: LAMA2; (+) strand; PAM type: YTN; PAM sequence: TTC
aatatttctttagtatgttt

SEQ ID NO: 340057 - DNA, 20 bp, Artificial Sequence
  Description of Artificial Sequence: Synthetic oligonucleotide
  Target: LAMA2; (+) strand; PAM type: YTN; PAM sequence: TTT
ctttagtatgtttccctgac

SEQ ID NO: 340058 - DNA, 20 bp, Artificial Sequence
  Description of Artificial Sequence: Synthetic oligonucleotide
  Target: LAMA2; (+) strand; PAM type: YTN; PAM sequence: TTC
tttagtatgtttccctgact

SEQ ID NO: 340059 - DNA, 20 bp, Artificial Sequence
  Description of Artificial Sequence: Synthetic oligonucleotide
  Target: LAMA2; (+) strand; PAM type: YTN; PAM sequence: CTT
tagtatgtttccctgacttg

SEQ ID NO: 340060 - DNA, 20 bp, Artificial Sequence
  Description of Artificial Sequence: Synthetic oligonucleotide
  Target: LAMA2; (+) strand; PAM type: YTN; PAM sequence: TTT
agtatgtttccctgacttgt

SEQ ID NO: 340061 - DNA, 20 bp, Artificial Sequence
  Description of Artificial Sequence: Synthetic oligonucleotide
  Target: LAMA2; (+) strand; PAM type: YTN; PAM sequence: TTA
gtatgtttccctgacttgtc

SEQ ID NO: 340062 - DNA, 20 bp, Artificial Sequence
  Description of Artificial Sequence: Synthetic oligonucleotide
  Target: LAMA2; (+) strand; PAM type: YTN; PAM sequence: TTT
ccctgacttgtctcccttta

SEQ ID NO: 340063 - DNA, 20 bp, Artificial Sequence
  Description of Artificial Sequence: Synthetic oligonucleotide
  Target: LAMA2; (+) strand; PAM type: YTN; PAM sequence: TTC
cctgacttgtctccctttag

SEQ ID NO: 340064 - DNA, 20 bp, Artificial Sequence
  Description of Artificial Sequence: Synthetic oligonucleotide
  Target: LAMA2; (+) strand; PAM type: YTN; PAM sequence: CTG
acttgtctccctttagtata

SEQ ID NO: 340065 - DNA, 20 bp, Artificial Sequence
  Description of Artificial Sequence: Synthetic oligonucleotide
  Target: LAMA2; (+) strand; PAM type: YTN; PAM sequence: CTT
gtctccctttagtatatgtg

SEQ ID NO: 340066 - DNA, 20 bp, Artificial Sequence
  Description of Artificial Sequence: Synthetic oligonucleotide
  Target: LAMA2; (+) strand; PAM type: YTN; PAM sequence: TTG
tctccctttagtatatgtga

SEQ ID NO: 340067 - DNA, 20 bp, Artificial Sequence
  Description of Artificial Sequence: Synthetic oligonucleotide
  Target: LAMA2; (+) strand; PAM type: YTN; PAM sequence: CTC
cctttagtatatgtgaccca

SEQ ID NO: 340068 - DNA, 20 bp, Artificial Sequence
  Description of Artificial Sequence: Synthetic oligonucleotide
  Target: LAMA2; (+) strand; PAM type: YTN; PAM sequence: CTT
tagtatatgtgacccacctc

SEQ ID NO: 340069 - DNA, 20 bp, Artificial Sequence
  Description of Artificial Sequence: Synthetic oligonucleotide
  Target: LAMA2; (+) strand; PAM type: YTN; PAM sequence: TTT
agtatatgtgacccacctcc

SEQ ID NO: 340070 - DNA, 20 bp, Artificial Sequence
  Description of Artificial Sequence: Synthetic oligonucleotide
  Target: LAMA2; (+) strand; PAM type: YTN; PAM sequence: TTA
gtatatgtgacccacctcct

SEQ ID NO: 340071 - DNA, 20 bp, Artificial Sequence
  Description of Artificial Sequence: Synthetic oligonucleotide
  Target: LAMA2; (+) strand; PAM type: YTN; PAM sequence: CTC
ctttcatgctacctaattat

SEQ ID NO: 340072 - DNA, 20 bp, Artificial Sequence
  Description of Artificial Sequence: Synthetic oligonucleotide
  Target: LAMA2; (+) strand; PAM type: YTN; PAM sequence: CTT
tcatgctacctaattatgta

SEQ ID NO: 340073 - DNA, 20 bp, Artificial Sequence
  Description of Artificial Sequence: Synthetic oligonucleotide
  Target: LAMA2; (+) strand; PAM type: YTN; PAM sequence: TTT
catgctacctaattatgtat

SEQ ID NO: 340074 - DNA, 20 bp, Artificial Sequence
  Description of Artificial Sequence: Synthetic oligonucleotide
  Target: LAMA2; (+) strand; PAM type: YTN; PAM sequence: TTC
atgctacctaattatgtata

SEQ ID NO: 340075 - DNA, 20 bp, Artificial Sequence
  Description of Artificial Sequence: Synthetic oligonucleotide
  Target: LAMA2; (+) strand; PAM type: YTN; PAM sequence: CTA
cctaattatgtatatctcca

SEQ ID NO: 340076 - DNA, 20 bp, Artificial Sequence
  Description of Artificial Sequence: Synthetic oligonucleotide
  Target: LAMA2; (+) strand; PAM type: YTN; PAM sequence: CTA
attatgtatatctccattga

SEQ ID NO: 340077 - DNA, 20 bp, Artificial Sequence
  Description of Artificial Sequence: Synthetic oligonucleotide
  Target: LAMA2; (+) strand; PAM type: YTN; PAM sequence: TTA
tgtatatctccattgatact

SEQ ID NO: 340078 - DNA, 20 bp, Artificial Sequence
  Description of Artificial Sequence: Synthetic oligonucleotide
  Target: LAMA2; (+) strand; PAM type: YTN; PAM sequence: CTC
cattgatactcatgtctgat

SEQ ID NO: 340079 - DNA, 20 bp, Artificial Sequence
  Description of Artificial Sequence: Synthetic oligonucleotide
  Target: LAMA2; (+) strand; PAM type: YTN; PAM sequence: TTG
atactcatgtctgatattct

SEQ ID NO: 340080 - DNA, 20 bp, Artificial Sequence
  Description of Artificial Sequence: Synthetic oligonucleotide
  Target: LAMA2; (+) strand; PAM type: YTN; PAM sequence: CTC
atgtctgatattctctccca

SEQ ID NO: 340081 - DNA, 20 bp, Artificial Sequence
  Description of Artificial Sequence: Synthetic oligonucleotide
  Target: LAMA2; (+) strand; PAM type: YTN; PAM sequence: CTG
atattctctcccacatagtc

SEQ ID NO: 340082 - DNA, 20 bp, Artificial Sequence
  Description of Artificial Sequence: Synthetic oligonucleotide
  Target: LAMA2; (+) strand; PAM type: YTN; PAM sequence: TTC
tctcccacatagtccaaaca

SEQ ID NO: 340083 - DNA, 20 bp, Artificial Sequence
  Description of Artificial Sequence: Synthetic oligonucleotide
  Target: LAMA2; (+) strand; PAM type: YTN; PAM sequence: CTC
tcccacatagtccaaacatc

SEQ ID NO: 340084 - DNA, 20 bp, Artificial Sequence
  Description of Artificial Sequence: Synthetic oligonucleotide
  Target: LAMA2; (+) strand; PAM type: YTN; PAM sequence: CTC
ccacatagtccaaacatctg

SEQ ID NO: 340085 - DNA, 20 bp, Artificial Sequence
  Description of Artificial Sequence: Synthetic oligonucleotide
  Target: LAMA2; (+) strand; PAM type: YTN; PAM sequence: CTG
aagctagtatcatcatttat

SEQ ID NO: 340086 - DNA, 20 bp, Artificial Sequence
  Description of Artificial Sequence: Synthetic oligonucleotide
  Target: LAMA2; (+) strand; PAM type: YTN; PAM sequence: CTA
gtatcatcatttatatttac

SEQ ID NO: 340087 - DNA, 20 bp, Artificial Sequence
  Description of Artificial Sequence: Synthetic oligonucleotide
  Target: LAMA2; (+) strand; PAM type: YTN; PAM sequence: TTT
atatttacattttcagaaaa

SEQ ID NO: 340088 - DNA, 20 bp, Artificial Sequence
  Description of Artificial Sequence: Synthetic oligonucleotide
  Target: LAMA2; (+) strand; PAM type: YTN; PAM sequence: TTA
tatttacattttcagaaaac

SEQ ID NO: 340089 - DNA, 20 bp, Artificial Sequence
  Description of Artificial Sequence: Synthetic oligonucleotide
  Target: LAMA2; (+) strand; PAM type: YTN; PAM sequence: TTT
acattttcagaaaacccata

SEQ ID NO: 340090 - DNA, 20 bp, Artificial Sequence
  Description of Artificial Sequence: Synthetic oligonucleotide
  Target: LAMA2; (+) strand; PAM type: YTN; PAM sequence: TTA
cattttcagaaaacccatat

SEQ ID NO: 340091 - DNA, 20 bp, Artificial Sequence
  Description of Artificial Sequence: Synthetic oligonucleotide
  Target: LAMA2; (+) strand; PAM type: YTN; PAM sequence: TTT
tcagaaaacccatattcaca

SEQ ID NO: 340092 - DNA, 20 bp, Artificial Sequence
  Description of Artificial Sequence: Synthetic oligonucleotide
  Target: LAMA2; (+) strand; PAM type: YTN; PAM sequence: TTT
cagaaaacccatattcacat

SEQ ID NO: 340093 - DNA, 20 bp, Artificial Sequence
  Description of Artificial Sequence: Synthetic oligonucleotide
  Target: LAMA2; (+) strand; PAM type: YTN; PAM sequence: TTC
agaaaacccatattcacatt

SEQ ID NO: 340094 - DNA, 20 bp, Artificial Sequence
  Description of Artificial Sequence: Synthetic oligonucleotide
  Target: LAMA2; (+) strand; PAM type: YTN; PAM sequence: TTC
acattctatcatgcccaccc

SEQ ID NO: 340095 - DNA, 20 bp, Artificial Sequence
  Description of Artificial Sequence: Synthetic oligonucleotide
  Target: LAMA2; (+) strand; PAM type: YTN; PAM sequence: TTC
tatcatgcccaccccagcca

SEQ ID NO: 340096 - DNA, 20 bp, Artificial Sequence
  Description of Artificial Sequence: Synthetic oligonucleotide
  Target: LAMA2; (+) strand; PAM type: YTN; PAM sequence: CTA
tcatgcccaccccagccaat

SEQ ID NO: 340097 - DNA, 20 bp, Artificial Sequence
  Description of Artificial Sequence: Synthetic oligonucleotide
  Target: LAMA2; (+) strand; PAM type: YTN; PAM sequence: CTA
gggttatctctcaacacttc

SEQ ID NO: 340098 - DNA, 20 bp, Artificial Sequence
  Description of Artificial Sequence: Synthetic oligonucleotide
  Target: LAMA2; (+) strand; PAM type: YTN; PAM sequence: TTA
tctctcaacacttctaggga

SEQ ID NO: 340099 - DNA, 20 bp, Artificial Sequence
  Description of Artificial Sequence: Synthetic oligonucleotide
  Target: LAMA2; (+) strand; PAM type: YTN; PAM sequence: CTC
tcaacacttctagggaaaat

SEQ ID NO: 340100 - DNA, 20 bp, Artificial Sequence
  Description of Artificial Sequence: Synthetic oligonucleotide
  Target: LAMA2; (+) strand; PAM type: YTN; PAM sequence: CTC
aacacttctagggaaaatta

SEQ ID NO: 340101 - DNA, 20 bp, Artificial Sequence
  Description of Artificial Sequence: Synthetic oligonucleotide
  Target: LAMA2; (+) strand; PAM type: YTN; PAM sequence: CTT
ctagggaaaattagggtttt

SEQ ID NO: 340102 - DNA, 20 bp, Artificial Sequence
  Description of Artificial Sequence: Synthetic oligonucleotide
  Target: LAMA2; (+) strand; PAM type: YTN; PAM sequence: TTC
tagggaaaattagggttttg

SEQ ID NO: 340103 - DNA, 20 bp, Artificial Sequence
  Description of Artificial Sequence: Synthetic oligonucleotide
  Target: LAMA2; (+) strand; PAM type: YTN; PAM sequence: CTA
gggaaaattagggttttggc

SEQ ID NO: 340104 - DNA, 20 bp, Artificial Sequence
  Description of Artificial Sequence: Synthetic oligonucleotide
  Target: LAMA2; (+) strand; PAM type: YTN; PAM sequence: TTA
gggttttggcataaatctgt

SEQ ID NO: 340105 - DNA, 20 bp, Artificial Sequence
  Description of Artificial Sequence: Synthetic oligonucleotide
  Target: LAMA2; (+) strand; PAM type: YTN; PAM sequence: TTT
tggcataaatctgtcagacc

SEQ ID NO: 340106 - DNA, 20 bp, Artificial Sequence
  Description of Artificial Sequence: Synthetic oligonucleotide
  Target: LAMA2; (+) strand; PAM type: YTN; PAM sequence: TTT
ggcataaatctgtcagaccc

SEQ ID NO: 340107 - DNA, 20 bp, Artificial Sequence
  Description of Artificial Sequence: Synthetic oligonucleotide
  Target: LAMA2; (+) strand; PAM type: YTN; PAM sequence: TTG
gcataaatctgtcagaccct

SEQ ID NO: 340108 - DNA, 20 bp, Artificial Sequence
  Description of Artificial Sequence: Synthetic oligonucleotide
  Target: LAMA2; (+) strand; PAM type: YTN; PAM sequence: CTG
tcagaccctcattaggcact

SEQ ID NO: 340109 - DNA, 20 bp, Artificial Sequence
  Description of Artificial Sequence: Synthetic oligonucleotide
  Target: LAMA2; (+) strand; PAM type: YTN; PAM sequence: CTC
attaggcactatttttatat

SEQ ID NO: 340110 - DNA, 20 bp, Artificial Sequence
  Description of Artificial Sequence: Synthetic oligonucleotide
  Target: LAMA2; (+) strand; PAM type: YTN; PAM sequence: TTA
ggcactatttttatattaat

SEQ ID NO: 340111 - DNA, 20 bp, Artificial Sequence
  Description of Artificial Sequence: Synthetic oligonucleotide
  Target: LAMA2; (+) strand; PAM type: YTN; PAM sequence: CTA
tttttatattaatgtatacc

SEQ ID NO: 340112 - DNA, 20 bp, Artificial Sequence
  Description of Artificial Sequence: Synthetic oligonucleotide
  Target: LAMA2; (+) strand; PAM type: YTN; PAM sequence: TTT
ttatattaatgtataccagt

SEQ ID NO: 340113 - DNA, 20 bp, Artificial Sequence
  Description of Artificial Sequence: Synthetic oligonucleotide
  Target: LAMA2; (+) strand; PAM type: YTN; PAM sequence: TTT
tatattaatgtataccagtg

SEQ ID NO: 340114 - DNA, 20 bp, Artificial Sequence
  Description of Artificial Sequence: Synthetic oligonucleotide
  Target: LAMA2; (+) strand; PAM type: YTN; PAM sequence: TTT
atattaatgtataccagtgc

SEQ ID NO: 340115 - DNA, 20 bp, Artificial Sequence
  Description of Artificial Sequence: Synthetic oligonucleotide
  Target: LAMA2; (+) strand; PAM type: YTN; PAM sequence: TTA
tattaatgtataccagtgct

SEQ ID NO: 340116 - DNA, 20 bp, Artificial Sequence
  Description of Artificial Sequence: Synthetic oligonucleotide
  Target: LAMA2; (+) strand; PAM type: YTN; PAM sequence: TTA
atgtataccagtgcttcact

SEQ ID NO: 340117 - DNA, 20 bp, Artificial Sequence
  Description of Artificial Sequence: Synthetic oligonucleotide
  Target: LAMA2; (+) strand; PAM type: YTN; PAM sequence: CTT
cactatattttaaattccat

SEQ ID NO: 340118 - DNA, 20 bp, Artificial Sequence
  Description of Artificial Sequence: Synthetic oligonucleotide
  Target: LAMA2; (+) strand; PAM type: YTN; PAM sequence: TTC
actatattttaaattccatg

SEQ ID NO: 340119 - DNA, 20 bp, Artificial Sequence
  Description of Artificial Sequence: Synthetic oligonucleotide
  Target: LAMA2; (+) strand; PAM type: YTN; PAM sequence: CTA
tattttaaattccatgttca

SEQ ID NO: 340120 - DNA, 20 bp, Artificial Sequence
  Description of Artificial Sequence: Synthetic oligonucleotide
  Target: LAMA2; (+) strand; PAM type: YTN; PAM sequence: TTT
taaattccatgttcaaaaat

SEQ ID NO: 340121 - DNA, 20 bp, Artificial Sequence
  Description of Artificial Sequence: Synthetic oligonucleotide
  Target: LAMA2; (+) strand; PAM type: YTN; PAM sequence: TTT
aaattccatgttcaaaaata

SEQ ID NO: 340122 - DNA, 20 bp, Artificial Sequence
  Description of Artificial Sequence: Synthetic oligonucleotide
  Target: LAMA2; (+) strand; PAM type: YTN; PAM sequence: TTA
aattccatgttcaaaaatac

SEQ ID NO: 340123 - DNA, 20 bp, Artificial Sequence
  Description of Artificial Sequence: Synthetic oligonucleotide
  Target: LAMA2; (+) strand; PAM type: YTN; PAM sequence: TTC
catgttcaaaaataccagtt

SEQ ID NO: 340124 - DNA, 20 bp, Artificial Sequence
  Description of Artificial Sequence: Synthetic oligonucleotide
  Target: LAMA2; (+) strand; PAM type: YTN; PAM sequence: TTC
aaaaataccagttttgggga

SEQ ID NO: 340125 - DNA, 20 bp, Artificial Sequence
  Description of Artificial Sequence: Synthetic oligonucleotide
  Target: LAMA2; (+) strand; PAM type: YTN; PAM sequence: TTT
tggggaaaaacattccaaat

SEQ ID NO: 340126 - DNA, 20 bp, Artificial Sequence
  Description of Artificial Sequence: Synthetic oligonucleotide
  Target: LAMA2; (+) strand; PAM type: YTN; PAM sequence: TTT
ggggaaaaacattccaaatg

SEQ ID NO: 340127 - DNA, 20 bp, Artificial Sequence
  Description of Artificial Sequence: Synthetic oligonucleotide
  Target: LAMA2; (+) strand; PAM type: YTN; PAM sequence: TTG
gggaaaaacattccaaatgg

SEQ ID NO: 340128 - DNA, 20 bp, Artificial Sequence
  Description of Artificial Sequence: Synthetic oligonucleotide
  Target: LAMA2; (+) strand; PAM type: YTN; PAM sequence: TTC
caaatggtactctcagcaga

SEQ ID NO: 340129 - DNA, 20 bp, Artificial Sequence
  Description of Artificial Sequence: Synthetic oligonucleotide
  Target: LAMA2; (+) strand; PAM type: YTN; PAM sequence: CTC
tcagcagaaatctcaatctg

SEQ ID NO: 340130 - DNA, 20 bp, Artificial Sequence
  Description of Artificial Sequence: Synthetic oligonucleotide
  Target: LAMA2; (+) strand; PAM type: YTN; PAM sequence: CTC
agcagaaatctcaatctgcc

SEQ ID NO: 340131 - DNA, 20 bp, Artificial Sequence
  Description of Artificial Sequence: Synthetic oligonucleotide
  Target: LAMA2; (+) strand; PAM type: YTN; PAM sequence: CTC
aatctgccaaatgacaagga

SEQ ID NO: 340132 - DNA, 20 bp, Artificial Sequence
  Description of Artificial Sequence: Synthetic oligonucleotide
  Target: LAMA2; (+) strand; PAM type: YTN; PAM sequence: CTG
ccaaatgacaaggactcaaa

SEQ ID NO: 340133 - DNA, 20 bp, Artificial Sequence
  Description of Artificial Sequence: Synthetic oligonucleotide
  Target: LAMA2; (+) strand; PAM type: YTN; PAM sequence: CTC
aaatgcagtgagtcaaacag

SEQ ID NO: 340134 - DNA, 20 bp, Artificial Sequence
  Description of Artificial Sequence: Synthetic oligonucleotide
  Target: LAMA2; (+) strand; PAM type: YTN; PAM sequence: CTG
ttcaacctgctttgtgccta

SEQ ID NO: 340135 - DNA, 20 bp, Artificial Sequence
  Description of Artificial Sequence: Synthetic oligonucleotide
  Target: LAMA2; (+) strand; PAM type: YTN; PAM sequence: TTC
aacctgctttgtgcctagag

SEQ ID NO: 340136 - DNA, 20 bp, Artificial Sequence
  Description of Artificial Sequence: Synthetic oligonucleotide
  Target: LAMA2; (+) strand; PAM type: YTN; PAM sequence: CTG
ctttgtgcctagaggcatcc

SEQ ID NO: 340137 - DNA, 20 bp, Artificial Sequence
  Description of Artificial Sequence: Synthetic oligonucleotide
  Target: LAMA2; (+) strand; PAM type: YTN; PAM sequence: CTT
tgtgcctagaggcatccaat

SEQ ID NO: 340138 - DNA, 20 bp, Artificial Sequence
  Description of Artificial Sequence: Synthetic oligonucleotide
  Target: LAMA2; (+) strand; PAM type: YTN; PAM sequence: TTT
gtgcctagaggcatccaatt

SEQ ID NO: 340139 - DNA, 20 bp, Artificial Sequence
  Description of Artificial Sequence: Synthetic oligonucleotide
  Target: LAMA2; (+) strand; PAM type: YTN; PAM sequence: TTG
tgcctagaggcatccaattc

SEQ ID NO: 340140 - DNA, 20 bp, Artificial Sequence
  Description of Artificial Sequence: Synthetic oligonucleotide
  Target: LAMA2; (+) strand; PAM type: YTN; PAM sequence: CTA
gaggcatccaattcctggcc

SEQ ID NO: 340141 - DNA, 20 bp, Artificial Sequence
  Description of Artificial Sequence: Synthetic oligonucleotide
  Target: LAMA2; (+) strand; PAM type: YTN; PAM sequence: TTC
ctggccagtttggcctgagg

SEQ ID NO: 340142 - DNA, 20 bp, Artificial Sequence
  Description of Artificial Sequence: Synthetic oligonucleotide
  Target: LAMA2; (+) strand; PAM type: YTN; PAM sequence: CTG
gccagtttggcctgaggata

SEQ ID NO: 340143 - DNA, 20 bp, Artificial Sequence
  Description of Artificial Sequence: Synthetic oligonucleotide
  Target: LAMA2; (+) strand; PAM type: YTN; PAM sequence: TTT
ggcctgaggatatgggagta

SEQ ID NO: 340144 - DNA, 20 bp, Artificial Sequence
  Description of Artificial Sequence: Synthetic oligonucleotide
  Target: LAMA2; (+) strand; PAM type: YTN; PAM sequence: TTG
gcctgaggatatgggagtag

SEQ ID NO: 340145 - DNA, 20 bp, Artificial Sequence
  Description of Artificial Sequence: Synthetic oligonucleotide
  Target: LAMA2; (+) strand; PAM type: YTN; PAM sequence: CTG
aggatatgggagtagggagt

SEQ ID NO: 340146 - DNA, 20 bp, Artificial Sequence
  Description of Artificial Sequence: Synthetic oligonucleotide
  Target: LAMA2; (+) strand; PAM type: YTN; PAM sequence: TTT
tgagttgaatttttattatt

SEQ ID NO: 340147 - DNA, 20 bp, Artificial Sequence
  Description of Artificial Sequence: Synthetic oligonucleotide
  Target: LAMA2; (+) strand; PAM type: YTN; PAM sequence: TTT
gagttgaatttttattattt

SEQ ID NO: 340148 - DNA, 20 bp, Artificial Sequence
  Description of Artificial Sequence: Synthetic oligonucleotide
  Target: LAMA2; (+) strand; PAM type: YTN; PAM sequence: TTG
agttgaatttttattatttt

SEQ ID NO: 340149 - DNA, 20 bp, Artificial Sequence
  Description of Artificial Sequence: Synthetic oligonucleotide
  Target: LAMA2; (+) strand; PAM type: YTN; PAM sequence: TTG
aatttttattattttttatc

SEQ ID NO: 340150 - DNA, 20 bp, Artificial Sequence
  Description of Artificial Sequence: Synthetic oligonucleotide
  Target: LAMA2; (+) strand; PAM type: YTN; PAM sequence: TTT
ttattattttttatcctaga

SEQ ID NO: 340151 - DNA, 20 bp, Artificial Sequence
  Description of Artificial Sequence: Synthetic oligonucleotide
  Target: LAMA2; (+) strand; PAM type: YTN; PAM sequence: TTT
tattattttttatcctagat

SEQ ID NO: 340152 - DNA, 20 bp, Artificial Sequence
  Description of Artificial Sequence: Synthetic oligonucleotide
  Target: LAMA2; (+) strand; PAM type: YTN; PAM sequence: TTT
attattttttatcctagatt

SEQ ID NO: 340153 - DNA, 20 bp, Artificial Sequence
  Description of Artificial Sequence: Synthetic oligonucleotide
  Target: LAMA2; (+) strand; PAM type: YTN; PAM sequence: TTA
ttattttttatcctagattc

SEQ ID NO: 340154 - DNA, 20 bp, Artificial Sequence
  Description of Artificial Sequence: Synthetic oligonucleotide
  Target: LAMA2; (+) strand; PAM type: YTN; PAM sequence: TTA
ttttttatcctagattcagt

SEQ ID NO: 340155 - DNA, 20 bp, Artificial Sequence
  Description of Artificial Sequence: Synthetic oligonucleotide
  Target: LAMA2; (+) strand; PAM type: YTN; PAM sequence: TTT
tttatcctagattcagttta

SEQ ID NO: 340156 - DNA, 20 bp, Artificial Sequence
  Description of Artificial Sequence: Synthetic oligonucleotide
  Target: LAMA2; (+) strand; PAM type: YTN; PAM sequence: TTT
ttatcctagattcagtttac

SEQ ID NO: 340157 - DNA, 20 bp, Artificial Sequence
  Description of Artificial Sequence: Synthetic oligonucleotide
  Target: LAMA2; (+) strand; PAM type: YTN; PAM sequence: TTT
tatcctagattcagtttaca

SEQ ID NO: 340158 - DNA, 20 bp, Artificial Sequence
  Description of Artificial Sequence: Synthetic oligonucleotide
  Target: LAMA2; (+) strand; PAM type: YTN; PAM sequence: TTT
atcctagattcagtttacat

SEQ ID NO: 340159 - DNA, 20 bp, Artificial Sequence
  Description of Artificial Sequence: Synthetic oligonucleotide
  Target: LAMA2; (+) strand; PAM type: YTN; PAM sequence: TTA
tcctagattcagtttacata

SEQ ID NO: 340160 - DNA, 20 bp, Artificial Sequence
  Description of Artificial Sequence: Synthetic oligonucleotide
  Target: LAMA2; (+) strand; PAM type: YTN; PAM sequence: CTA
gattcagtttacataagact

SEQ ID NO: 340161 - DNA, 20 bp, Artificial Sequence
  Description of Artificial Sequence: Synthetic oligonucleotide
  Target: LAMA2; (+) strand; PAM type: YTN; PAM sequence: TTC
agtttacataagactaataa

SEQ ID NO: 340162 - DNA, 20 bp, Artificial Sequence
  Description of Artificial Sequence: Synthetic oligonucleotide
  Target: LAMA2; (+) strand; PAM type: YTN; PAM sequence: TTT
acataagactaataattctc

SEQ ID NO: 340163 - DNA, 20 bp, Artificial Sequence
  Description of Artificial Sequence: Synthetic oligonucleotide
  Target: LAMA2; (+) strand; PAM type: YTN; PAM sequence: TTA
cataagactaataattctca

SEQ ID NO: 340164 - DNA, 20 bp, Artificial Sequence
  Description of Artificial Sequence: Synthetic oligonucleotide
  Target: LAMA2; (+) strand; PAM type: YTN; PAM sequence: CTA
ataattctcaaacaatttaa

SEQ ID NO: 340165 - DNA, 20 bp, Artificial Sequence
  Description of Artificial Sequence: Synthetic oligonucleotide
  Target: LAMA2; (+) strand; PAM type: YTN; PAM sequence: TTC
tcaaacaatttaagactatt

SEQ ID NO: 340166 - DNA, 20 bp, Artificial Sequence
  Description of Artificial Sequence: Synthetic oligonucleotide
  Target: LAMA2; (+) strand; PAM type: YTN; PAM sequence: CTC
aaacaatttaagactattct

SEQ ID NO: 340167 - DNA, 20 bp, Artificial Sequence
  Description of Artificial Sequence: Synthetic oligonucleotide
  Target: LAMA2; (+) strand; PAM type: YTN; PAM sequence: TTT
aagactattctataccttta

SEQ ID NO: 340168 - DNA, 20 bp, Artificial Sequence
  Description of Artificial Sequence: Synthetic oligonucleotide
  Target: LAMA2; (+) strand; PAM type: YTN; PAM sequence: TTA
agactattctatacctttaa

SEQ ID NO: 340169 - DNA, 20 bp, Artificial Sequence
  Description of Artificial Sequence: Synthetic oligonucleotide
  Target: LAMA2; (+) strand; PAM type: YTN; PAM sequence: CTA
ttctatacctttaaaaatga

SEQ ID NO: 340170 - DNA, 20 bp, Artificial Sequence
  Description of Artificial Sequence: Synthetic oligonucleotide
  Target: LAMA2; (+) strand; PAM type: YTN; PAM sequence: TTC
tatacctttaaaaatgattc

SEQ ID NO: 340171 - DNA, 20 bp, Artificial Sequence
  Description of Artificial Sequence: Synthetic oligonucleotide
  Target: LAMA2; (+) strand; PAM type: YTN; PAM sequence: CTA
tacctttaaaaatgattcaa

SEQ ID NO: 340172 - DNA, 20 bp, Artificial Sequence
  Description of Artificial Sequence: Synthetic oligonucleotide
  Target: LAMA2; (+) strand; PAM type: YTN; PAM sequence: CTT
taaaaatgattcaattcaga

SEQ ID NO: 340173 - DNA, 20 bp, Artificial Sequence
  Description of Artificial Sequence: Synthetic oligonucleotide
  Target: LAMA2; (+) strand; PAM type: YTN; PAM sequence: TTT
aaaaatgattcaattcagaa

SEQ ID NO: 340174 - DNA, 20 bp, Artificial Sequence
  Description of Artificial Sequence: Synthetic oligonucleotide
  Target: LAMA2; (+) strand; PAM type: YTN; PAM sequence: TTA
aaaatgattcaattcagaaa

SEQ ID NO: 340175 - DNA, 20 bp, Artificial Sequence
  Description of Artificial Sequence: Synthetic oligonucleotide
  Target: LAMA2; (+) strand; PAM type: YTN; PAM sequence: TTC
aattcagaaatttattaagc

SEQ ID NO: 340176 - DNA, 20 bp, Artificial Sequence
  Description of Artificial Sequence: Synthetic oligonucleotide
  Target: LAMA2; (+) strand; PAM type: YTN; PAM sequence: TTC
agaaatttattaagcaatat

SEQ ID NO: 340177 - DNA, 20 bp, Artificial Sequence
  Description of Artificial Sequence: Synthetic oligonucleotide
  Target: LAMA2; (+) strand; PAM type: YTN; PAM sequence: TTT
attaagcaatataaaataca

SEQ ID NO: 340178 - DNA, 20 bp, Artificial Sequence
  Description of Artificial Sequence: Synthetic oligonucleotide
  Target: LAMA2; (+) strand; PAM type: YTN; PAM sequence: TTA
ttaagcaatataaaatacac

SEQ ID NO: 340179 - DNA, 20 bp, Artificial Sequence
  Description of Artificial Sequence: Synthetic oligonucleotide
  Target: LAMA2; (+) strand; PAM type: YTN; PAM sequence: TTA
agcaatataaaatacacttc

SEQ ID NO: 340180 - DNA, 20 bp, Artificial Sequence
  Description of Artificial Sequence: Synthetic oligonucleotide
  Target: LAMA2; (+) strand; PAM type: YTN; PAM sequence: CTT
cggcaggtatgtaacatgcg

SEQ ID NO: 340181 - DNA, 20 bp, Artificial Sequence
  Description of Artificial Sequence: Synthetic oligonucleotide
  Target: LAMA2; (+) strand; PAM type: YTN; PAM sequence: TTC
ggcaggtatgtaacatgcgt

SEQ ID NO: 340182 - DNA, 20 bp, Artificial Sequence
  Description of Artificial Sequence: Synthetic oligonucleotide
  Target: LAMA2; (+) strand; PAM type: YTN; PAM sequence: CTA
cccattctctcccttcatta

SEQ ID NO: 340183 - DNA, 20 bp, Artificial Sequence
  Description of Artificial Sequence: Synthetic oligonucleotide
  Target: LAMA2; (+) strand; PAM type: YTN; PAM sequence: TTC
tctcccttcattaataatgg

SEQ ID NO: 340184 - DNA, 20 bp, Artificial Sequence
  Description of Artificial Sequence: Synthetic oligonucleotide
  Target: LAMA2; (+) strand; PAM type: YTN; PAM sequence: CTC
tcccttcattaataatggtt

SEQ ID NO: 340185 - DNA, 20 bp, Artificial Sequence
  Description of Artificial Sequence: Synthetic oligonucleotide
  Target: LAMA2; (+) strand; PAM type: YTN; PAM sequence: CTC
ccttcattaataatggttct

SEQ ID NO: 340186 - DNA, 20 bp, Artificial Sequence
  Description of Artificial Sequence: Synthetic oligonucleotide
  Target: LAMA2; (+) strand; PAM type: YTN; PAM sequence: CTT
cattaataatggttctccat

SEQ ID NO: 340187 - DNA, 20 bp, Artificial Sequence
  Description of Artificial Sequence: Synthetic oligonucleotide
  Target: LAMA2; (+) strand; PAM type: YTN; PAM sequence: TTC
attaataatggttctccatt

SEQ ID NO: 340188 - DNA, 20 bp, Artificial Sequence
  Description of Artificial Sequence: Synthetic oligonucleotide
  Target: LAMA2; (+) strand; PAM type: YTN; PAM sequence: TTA
ataatggttctccattcctt

SEQ ID NO: 340189 - DNA, 20 bp, Artificial Sequence
  Description of Artificial Sequence: Synthetic oligonucleotide
  Target: LAMA2; (+) strand; PAM type: YTN; PAM sequence: TTC
tccattccttaaaccaagtc

SEQ ID NO: 340190 - DNA, 20 bp, Artificial Sequence
  Description of Artificial Sequence: Synthetic oligonucleotide
  Target: LAMA2; (+) strand; PAM type: YTN; PAM sequence: CTC
cattccttaaaccaagtcag

SEQ ID NO: 340191 - DNA, 20 bp, Artificial Sequence
  Description of Artificial Sequence: Synthetic oligonucleotide
  Target: LAMA2; (+) strand; PAM type: YTN; PAM sequence: TTC
cttaaaccaagtcagcctgc

SEQ ID NO: 340192 - DNA, 20 bp, Artificial Sequence
  Description of Artificial Sequence: Synthetic oligonucleotide
  Target: LAMA2; (+) strand; PAM type: YTN; PAM sequence: CTT
aaaccaagtcagcctgccaa

SEQ ID NO: 340193 - DNA, 20 bp, Artificial Sequence
  Description of Artificial Sequence: Synthetic oligonucleotide
  Target: LAMA2; (+) strand; PAM type: YTN; PAM sequence: TTA
aaccaagtcagcctgccaat

SEQ ID NO: 340194 - DNA, 20 bp, Artificial Sequence
  Description of Artificial Sequence: Synthetic oligonucleotide
  Target: LAMA2; (+) strand; PAM type: YTN; PAM sequence: CTG
ccaatatgaaacaaaagaca

SEQ ID NO: 340195 - DNA, 20 bp, Artificial Sequence
  Description of Artificial Sequence: Synthetic oligonucleotide
  Target: LAMA2; (+) strand; PAM type: YTN; PAM sequence: TTT
attagttaattagttagttt

SEQ ID NO: 340196 - DNA, 20 bp, Artificial Sequence
  Description of Artificial Sequence: Synthetic oligonucleotide
  Target: LAMA2; (+) strand; PAM type: YTN; PAM sequence: TTA
ttagttaattagttagtttc

SEQ ID NO: 340197 - DNA, 20 bp, Artificial Sequence
  Description of Artificial Sequence: Synthetic oligonucleotide
  Target: LAMA2; (+) strand; PAM type: YTN; PAM sequence: TTA
gttaattagttagtttcttt

SEQ ID NO: 340198 - DNA, 20 bp, Artificial Sequence
  Description of Artificial Sequence: Synthetic oligonucleotide
  Target: LAMA2; (+) strand; PAM type: YTN; PAM sequence: TTA
attagttagtttctttaatt

SEQ ID NO: 340199 - DNA, 20 bp, Artificial Sequence
  Description of Artificial Sequence: Synthetic oligonucleotide
  Target: LAMA2; (+) strand; PAM type: YTN; PAM sequence: TTA
gttagtttctttaattggct

SEQ ID NO: 340200 - DNA, 20 bp, Artificial Sequence
  Description of Artificial Sequence: Synthetic oligonucleotide
  Target: LAMA2; (+) strand; PAM type: YTN; PAM sequence: TTA
gtttctttaattggctatat

SEQ ID NO: 340201 - DNA, 20 bp, Artificial Sequence
  Description of Artificial Sequence: Synthetic oligonucleotide
  Target: LAMA2; (+) strand; PAM type: YTN; PAM sequence: TTT
ctttaattggctatattgtt

SEQ ID NO: 340202 - DNA, 20 bp, Artificial Sequence
  Description of Artificial Sequence: Synthetic oligonucleotide
  Target: LAMA2; (+) strand; PAM type: YTN; PAM sequence: TTC
tttaattggctatattgttt

SEQ ID NO: 340203 - DNA, 20 bp, Artificial Sequence
  Description of Artificial Sequence: Synthetic oligonucleotide
  Target: LAMA2; (+) strand; PAM type: YTN; PAM sequence: CTT
taattggctatattgttttc

SEQ ID NO: 340204 - DNA, 20 bp, Artificial Sequence
  Description of Artificial Sequence: Synthetic oligonucleotide
  Target: LAMA2; (+) strand; PAM type: YTN; PAM sequence: TTT
aattggctatattgttttca

SEQ ID NO: 340205 - DNA, 20 bp, Artificial Sequence
  Description of Artificial Sequence: Synthetic oligonucleotide
  Target: LAMA2; (+) strand; PAM type: YTN; PAM sequence: TTA
attggctatattgttttcac

SEQ ID NO: 340206 - DNA, 20 bp, Artificial Sequence
  Description of Artificial Sequence: Synthetic oligonucleotide
  Target: LAMA2; (+) strand; PAM type: YTN; PAM sequence: TTG
gctatattgttttcactcct

SEQ ID NO: 340207 - DNA, 20 bp, Artificial Sequence
  Description of Artificial Sequence: Synthetic oligonucleotide
  Target: LAMA2; (+) strand; PAM type: YTN; PAM sequence: CTA
tattgttttcactcctaaac

SEQ ID NO: 340208 - DNA, 20 bp, Artificial Sequence
  Description of Artificial Sequence: Synthetic oligonucleotide
  Target: LAMA2; (+) strand; PAM type: YTN; PAM sequence: TTG
ttttcactcctaaacaacac

SEQ ID NO: 340209 - DNA, 20 bp, Artificial Sequence
  Description of Artificial Sequence: Synthetic oligonucleotide
  Target: LAMA2; (+) strand; PAM type: YTN; PAM sequence: TTT
tcactcctaaacaacactta

SEQ ID NO: 340210 - DNA, 20 bp, Artificial Sequence
  Description of Artificial Sequence: Synthetic oligonucleotide
  Target: LAMA2; (+) strand; PAM type: YTN; PAM sequence: TTT
cactcctaaacaacacttac

SEQ ID NO: 340211 - DNA, 20 bp, Artificial Sequence
  Description of Artificial Sequence: Synthetic oligonucleotide
  Target: LAMA2; (+) strand; PAM type: YTN; PAM sequence: TTC
actcctaaacaacacttact

SEQ ID NO: 340212 - DNA, 20 bp, Artificial Sequence
  Description of Artificial Sequence: Synthetic oligonucleotide
  Target: LAMA2; (+) strand; PAM type: YTN; PAM sequence: CTC
ctaaacaacacttactaaaa

SEQ ID NO: 340213 - DNA, 20 bp, Artificial Sequence
  Description of Artificial Sequence: Synthetic oligonucleotide
  Target: LAMA2; (+) strand; PAM type: YTN; PAM sequence: CTA
aacaacacttactaaaaact

SEQ ID NO: 340214 - DNA, 20 bp, Artificial Sequence
  Description of Artificial Sequence: Synthetic oligonucleotide
  Target: LAMA2; (+) strand; PAM type: YTN; PAM sequence: CTT
actaaaaactgcttattgat

SEQ ID NO: 340215 - DNA, 20 bp, Artificial Sequence
  Description of Artificial Sequence: Synthetic oligonucleotide
  Target: LAMA2; (+) strand; PAM type: YTN; PAM sequence: TTA
ctaaaaactgcttattgatg

SEQ ID NO: 340216 - DNA, 20 bp, Artificial Sequence
  Description of Artificial Sequence: Synthetic oligonucleotide
  Target: LAMA2; (+) strand; PAM type: YTN; PAM sequence: CTA
aaaactgcttattgatggta

SEQ ID NO: 340217 - DNA, 20 bp, Artificial Sequence
  Description of Artificial Sequence: Synthetic oligonucleotide
  Target: LAMA2; (+) strand; PAM type: YTN; PAM sequence: CTG
cttattgatggtaactatta

SEQ ID NO: 340218 - DNA, 20 bp, Artificial Sequence
  Description of Artificial Sequence: Synthetic oligonucleotide
  Target: LAMA2; (+) strand; PAM type: YTN; PAM sequence: CTT
attgatggtaactattagga

SEQ ID NO: 340219 - DNA, 20 bp, Artificial Sequence
  Description of Artificial Sequence: Synthetic oligonucleotide
  Target: LAMA2; (+) strand; PAM type: YTN; PAM sequence: TTA
ttgatggtaactattaggag

SEQ ID NO: 340220 - DNA, 20 bp, Artificial Sequence
  Description of Artificial Sequence: Synthetic oligonucleotide
  Target: LAMA2; (+) strand; PAM type: YTN; PAM sequence: TTG
atggtaactattaggagcaa

SEQ ID NO: 340221 - DNA, 20 bp, Artificial Sequence
  Description of Artificial Sequence: Synthetic oligonucleotide
  Target: LAMA2; (+) strand; PAM type: YTN; PAM sequence: CTA
ttaggagcaactgactgaac

SEQ ID NO: 340222 - DNA, 20 bp, Artificial Sequence
  Description of Artificial Sequence: Synthetic oligonucleotide
  Target: LAMA2; (+) strand; PAM type: YTN; PAM sequence: TTA
ggagcaactgactgaactgt

SEQ ID NO: 340223 - DNA, 20 bp, Artificial Sequence
  Description of Artificial Sequence: Synthetic oligonucleotide
  Target: LAMA2; (+) strand; PAM type: YTN; PAM sequence: CTG
actgaactgtctctgtgaca

SEQ ID NO: 340224 - DNA, 20 bp, Artificial Sequence
  Description of Artificial Sequence: Synthetic oligonucleotide
  Target: LAMA2; (+) strand; PAM type: YTN; PAM sequence: CTG
aactgtctctgtgacatgtt

SEQ ID NO: 340225 - DNA, 20 bp, Artificial Sequence
  Description of Artificial Sequence: Synthetic oligonucleotide
  Target: LAMA2; (+) strand; PAM type: YTN; PAM sequence: CTG
tctctgtgacatgtttcctt

SEQ ID NO: 340226 - DNA, 20 bp, Artificial Sequence
  Description of Artificial Sequence: Synthetic oligonucleotide
  Target: LAMA2; (+) strand; PAM type: YTN; PAM sequence: CTC
tgtgacatgtttccttacgt

SEQ ID NO: 340227 - DNA, 20 bp, Artificial Sequence
  Description of Artificial Sequence: Synthetic oligonucleotide
  Target: LAMA2; (+) strand; PAM type: YTN; PAM sequence: CTG
tgacatgtttccttacgtct

SEQ ID NO: 340228 - DNA, 20 bp, Artificial Sequence
  Description of Artificial Sequence: Synthetic oligonucleotide
  Target: LAMA2; (+) strand; PAM type: YTN; PAM sequence: TTT
ccttacgtctatttgtcact

SEQ ID NO: 340229 - DNA, 20 bp, Artificial Sequence
  Description of Artificial Sequence: Synthetic oligonucleotide
  Target: LAMA2; (+) strand; PAM type: YTN; PAM sequence: TTC
cttacgtctatttgtcactc

SEQ ID NO: 340230 - DNA, 20 bp, Artificial Sequence
  Description of Artificial Sequence: Synthetic oligonucleotide
  Target: LAMA2; (+) strand; PAM type: YTN; PAM sequence: CTT
acgtctatttgtcactcatg

SEQ ID NO: 340231 - DNA, 20 bp, Artificial Sequence
  Description of Artificial Sequence: Synthetic oligonucleotide
  Target: LAMA2; (+) strand; PAM type: YTN; PAM sequence: TTA
cgtctatttgtcactcatgg

SEQ ID NO: 340232 - DNA, 20 bp, Artificial Sequence
  Description of Artificial Sequence: Synthetic oligonucleotide
  Target: LAMA2; (+) strand; PAM type: YTN; PAM sequence: CTA
tttgtcactcatggggaagt

SEQ ID NO: 340233 - DNA, 20 bp, Artificial Sequence
  Description of Artificial Sequence: Synthetic oligonucleotide
  Target: LAMA2; (+) strand; PAM type: YTN; PAM sequence: TTT
gtcactcatggggaagtgaa

SEQ ID NO: 340234 - DNA, 20 bp, Artificial Sequence
  Description of Artificial Sequence: Synthetic oligonucleotide
  Target: LAMA2; (+) strand; PAM type: YTN; PAM sequence: TTG
tcactcatggggaagtgaat

SEQ ID NO: 340235 - DNA, 20 bp, Artificial Sequence
  Description of Artificial Sequence: Synthetic oligonucleotide
  Target: LAMA2; (+) strand; PAM type: YTN; PAM sequence: CTC
atggggaagtgaatgaaata

SEQ ID NO: 340236 - DNA, 20 bp, Artificial Sequence
  Description of Artificial Sequence: Synthetic oligonucleotide
  Target: LAMA2; (+) strand; PAM type: YTN; PAM sequence: TTC
aaaatatttgccatagaatg

SEQ ID NO: 340237 - DNA, 20 bp, Artificial Sequence
  Description of Artificial Sequence: Synthetic oligonucleotide
  Target: LAMA2; (+) strand; PAM type: YTN; PAM sequence: TTT
gccatagaatgataagactg

SEQ ID NO: 340238 - DNA, 20 bp, Artificial Sequence
  Description of Artificial Sequence: Synthetic oligonucleotide
  Target: LAMA2; (+) strand; PAM type: YTN; PAM sequence: TTG
ccatagaatgataagactga

SEQ ID NO: 340239 - DNA, 20 bp, Artificial Sequence
  Description of Artificial Sequence: Synthetic oligonucleotide
  Target: LAMA2; (+) strand; PAM type: YTN; PAM sequence: CTG
aagaataagaattaaattca

SEQ ID NO: 340240 - DNA, 20 bp, Artificial Sequence
  Description of Artificial Sequence: Synthetic oligonucleotide
  Target: LAMA2; (+) strand; PAM type: YTN; PAM sequence: TTA
aattcagacctctcctaggc

SEQ ID NO: 340241 - DNA, 20 bp, Artificial Sequence
  Description of Artificial Sequence: Synthetic oligonucleotide
  Target: LAMA2; (+) strand; PAM type: YTN; PAM sequence: TTC
agacctctcctaggctatct

SEQ ID NO: 340242 - DNA, 20 bp, Artificial Sequence
  Description of Artificial Sequence: Synthetic oligonucleotide
  Target: LAMA2; (+) strand; PAM type: YTN; PAM sequence: CTC
tcctaggctatctattcatt

SEQ ID NO: 340243 - DNA, 20 bp, Artificial Sequence
  Description of Artificial Sequence: Synthetic oligonucleotide
  Target: LAMA2; (+) strand; PAM type: YTN; PAM sequence: CTC
ctaggctatctattcatttt

SEQ ID NO: 340244 - DNA, 20 bp, Artificial Sequence
  Description of Artificial Sequence: Synthetic oligonucleotide
  Target: LAMA2; (+) strand; PAM type: YTN; PAM sequence: CTA
ggctatctattcattttata

SEQ ID NO: 340245 - DNA, 20 bp, Artificial Sequence
  Description of Artificial Sequence: Synthetic oligonucleotide
  Target: LAMA2; (+) strand; PAM type: YTN; PAM sequence: CTA
tctattcattttatatagct

SEQ ID NO: 340246 - DNA, 20 bp, Artificial Sequence
  Description of Artificial Sequence: Synthetic oligonucleotide
  Target: LAMA2; (+) strand; PAM type: YTN; PAM sequence: CTA
ttcattttatatagcttact

SEQ ID NO: 340247 - DNA, 20 bp, Artificial Sequence
  Description of Artificial Sequence: Synthetic oligonucleotide
  Target: LAMA2; (+) strand; PAM type: YTN; PAM sequence: TTC
attttatatagcttactttg

SEQ ID NO: 340248 - DNA, 20 bp, Artificial Sequence
  Description of Artificial Sequence: Synthetic oligonucleotide
  Target: LAMA2; (+) strand; PAM type: YTN; PAM sequence: TTT
tatatagcttactttgtgga

SEQ ID NO: 340249 - DNA, 20 bp, Artificial Sequence
  Description of Artificial Sequence: Synthetic oligonucleotide
  Target: LAMA2; (+) strand; PAM type: YTN; PAM sequence: TTT
atatagcttactttgtggaa

SEQ ID NO: 340250 - DNA, 20 bp, Artificial Sequence
  Description of Artificial Sequence: Synthetic oligonucleotide
  Target: LAMA2; (+) strand; PAM type: YTN; PAM sequence: TTA
tatagcttactttgtggaat

SEQ ID NO: 340251 - DNA, 20 bp, Artificial Sequence
  Description of Artificial Sequence: Synthetic oligonucleotide
  Target: LAMA2; (+) strand; PAM type: YTN; PAM sequence: CTT
actttgtggaatatgttact

SEQ ID NO: 340252 - DNA, 20 bp, Artificial Sequence
  Description of Artificial Sequence: Synthetic oligonucleotide
  Target: LAMA2; (+) strand; PAM type: YTN; PAM sequence: TTA
ctttgtggaatatgttactt

SEQ ID NO: 340253 - DNA, 20 bp, Artificial Sequence
  Description of Artificial Sequence: Synthetic oligonucleotide
  Target: LAMA2; (+) strand; PAM type: YTN; PAM sequence: CTT
tgtggaatatgttacttttt

SEQ ID NO: 340254 - DNA, 20 bp, Artificial Sequence
  Description of Artificial Sequence: Synthetic oligonucleotide
  Target: LAMA2; (+) strand; PAM type: YTN; PAM sequence: TTT
gtggaatatgttactttttt

SEQ ID NO: 340255 - DNA, 20 bp, Artificial Sequence
  Description of Artificial Sequence: Synthetic oligonucleotide
  Target: LAMA2; (+) strand; PAM type: YTN; PAM sequence: TTG
tggaatatgttacttttttg

SEQ ID NO: 340256 - DNA, 20 bp, Artificial Sequence
  Description of Artificial Sequence: Synthetic oligonucleotide
  Target: LAMA2; (+) strand; PAM type: YTN; PAM sequence: TTA
cttttttgaatagacaggtg

SEQ ID NO: 340257 - DNA, 20 bp, Artificial Sequence
  Description of Artificial Sequence: Synthetic oligonucleotide
  Target: LAMA2; (+) strand; PAM type: YTN; PAM sequence: CTT
ttttgaatagacaggtgata

SEQ ID NO: 340258 - DNA, 20 bp, Artificial Sequence
  Description of Artificial Sequence: Synthetic oligonucleotide
  Target: LAMA2; (+) strand; PAM type: YTN; PAM sequence: TTT
tttgaatagacaggtgatat

SEQ ID NO: 340259 - DNA, 20 bp, Artificial Sequence
  Description of Artificial Sequence: Synthetic oligonucleotide
  Target: LAMA2; (+) strand; PAM type: YTN; PAM sequence: TTT
ttgaatagacaggtgatatc

SEQ ID NO: 340260 - DNA, 20 bp, Artificial Sequence
  Description of Artificial Sequence: Synthetic oligonucleotide
  Target: LAMA2; (+) strand; PAM type: YTN; PAM sequence: TTT
tgaatagacaggtgatatcc

SEQ ID NO: 340261 - DNA, 20 bp, Artificial Sequence
  Description of Artificial Sequence: Synthetic oligonucleotide
  Target: LAMA2; (+) strand; PAM type: YTN; PAM sequence: TTT
gaatagacaggtgatatcct

SEQ ID NO: 340262 - DNA, 20 bp, Artificial Sequence
  Description of Artificial Sequence: Synthetic oligonucleotide
  Target: LAMA2; (+) strand; PAM type: YTN; PAM sequence: TTG
aatagacaggtgatatcctc

SEQ ID NO: 340263 - DNA, 20 bp, Artificial Sequence
  Description of Artificial Sequence: Synthetic oligonucleotide
  Target: LAMA2; (+) strand; PAM type: YTN; PAM sequence: CTC
caagactctcagctcaatga

SEQ ID NO: 340264 - DNA, 20 bp, Artificial Sequence
  Description of Artificial Sequence: Synthetic oligonucleotide
  Target: LAMA2; (+) strand; PAM type: YTN; PAM sequence: CTC
tcagctcaatgataatataa

SEQ ID NO: 340265 - DNA, 20 bp, Artificial Sequence
  Description of Artificial Sequence: Synthetic oligonucleotide
  Target: LAMA2; (+) strand; PAM type: YTN; PAM sequence: CTC
agctcaatgataatataact

SEQ ID NO: 340266 - DNA, 20 bp, Artificial Sequence
  Description of Artificial Sequence: Synthetic oligonucleotide
  Target: LAMA2; (+) strand; PAM type: YTN; PAM sequence: CTC
aatgataatataactgaaat

SEQ ID NO: 340267 - DNA, 20 bp, Artificial Sequence
  Description of Artificial Sequence: Synthetic oligonucleotide
  Target: LAMA2; (+) strand; PAM type: YTN; PAM sequence: CTG
aaataataattgaggtctct

SEQ ID NO: 340268 - DNA, 20 bp, Artificial Sequence
  Description of Artificial Sequence: Synthetic oligonucleotide
  Target: LAMA2; (+) strand; PAM type: YTN; PAM sequence: TTG
aggtctctgattctcaggta

SEQ ID NO: 340269 - DNA, 20 bp, Artificial Sequence
  Description of Artificial Sequence: Synthetic oligonucleotide
  Target: LAMA2; (+) strand; PAM type: YTN; PAM sequence: CTC
tgattctcaggtaaatattt

SEQ ID NO: 340270 - DNA, 20 bp, Artificial Sequence
  Description of Artificial Sequence: Synthetic oligonucleotide
  Target: LAMA2; (+) strand; PAM type: YTN; PAM sequence: CTG
attctcaggtaaatatttca

SEQ ID NO: 340271 - DNA, 20 bp, Artificial Sequence
  Description of Artificial Sequence: Synthetic oligonucleotide
  Target: LAMA2; (+) strand; PAM type: YTN; PAM sequence: TTC
tcaggtaaatatttcatcca

SEQ ID NO: 340272 - DNA, 20 bp, Artificial Sequence
  Description of Artificial Sequence: Synthetic oligonucleotide
  Target: LAMA2; (+) strand; PAM type: YTN; PAM sequence: CTC
aggtaaatatttcatccata

SEQ ID NO: 340273 - DNA, 20 bp, Artificial Sequence
  Description of Artificial Sequence: Synthetic oligonucleotide
  Target: LAMA2; (+) strand; PAM type: YTN; PAM sequence: TTT
catccataatctggtaagga

SEQ ID NO: 340274 - DNA, 20 bp, Artificial Sequence
  Description of Artificial Sequence: Synthetic oligonucleotide
  Target: LAMA2; (+) strand; PAM type: YTN; PAM sequence: TTC
atccataatctggtaaggat

SEQ ID NO: 340275 - DNA, 20 bp, Artificial Sequence
  Description of Artificial Sequence: Synthetic oligonucleotide
  Target: LAMA2; (+) strand; PAM type: YTN; PAM sequence: CTG
gtaaggattaaaagttgact

SEQ ID NO: 340276 - DNA, 20 bp, Artificial Sequence
  Description of Artificial Sequence: Synthetic oligonucleotide
  Target: LAMA2; (+) strand; PAM type: YTN; PAM sequence: TTA
aaagttgacttttaaaagtt

SEQ ID NO: 340277 - DNA, 20 bp, Artificial Sequence
  Description of Artificial Sequence: Synthetic oligonucleotide
  Target: LAMA2; (+) strand; PAM type: YTN; PAM sequence: TTG
acttttaaaagttgacaatc

SEQ ID NO: 340278 - DNA, 20 bp, Artificial Sequence
  Description of Artificial Sequence: Synthetic oligonucleotide
  Target: LAMA2; (+) strand; PAM type: YTN; PAM sequence: CTT
ttaaaagttgacaatcgcta

SEQ ID NO: 340279 - DNA, 20 bp, Artificial Sequence
  Description of Artificial Sequence: Synthetic oligonucleotide
  Target: LAMA2; (+) strand; PAM type: YTN; PAM sequence: TTT
taaaagttgacaatcgctaa

SEQ ID NO: 340280 - DNA, 20 bp, Artificial Sequence
  Description of Artificial Sequence: Synthetic oligonucleotide
  Target: LAMA2; (+) strand; PAM type: YTN; PAM sequence: TTT
aaaagttgacaatcgctaaa

SEQ ID NO: 340281 - DNA, 20 bp, Artificial Sequence
  Description of Artificial Sequence: Synthetic oligonucleotide
  Target: LAMA2; (+) strand; PAM type: YTN; PAM sequence: TTA
aaagttgacaatcgctaaac

SEQ ID NO: 340282 - DNA, 20 bp, Artificial Sequence
  Description of Artificial Sequence: Synthetic oligonucleotide
  Target: LAMA2; (+) strand; PAM type: YTN; PAM sequence: TTG
acaatcgctaaacttaaaaa

SEQ ID NO: 340283 - DNA, 20 bp, Artificial Sequence
  Description of Artificial Sequence: Synthetic oligonucleotide
  Target: LAMA2; (+) strand; PAM type: YTN; PAM sequence: CTA
aacttaaaaatggttcagag

SEQ ID NO: 340284 - DNA, 20 bp, Artificial Sequence
  Description of Artificial Sequence: Synthetic oligonucleotide
  Target: LAMA2; (+) strand; PAM type: YTN; PAM sequence: CTT
aaaaatggttcagaggagat

SEQ ID NO: 340285 - DNA, 20 bp, Artificial Sequence
  Description of Artificial Sequence: Synthetic oligonucleotide
  Target: LAMA2; (+) strand; PAM type: YTN; PAM sequence: TTA
aaaatggttcagaggagata

SEQ ID NO: 340286 - DNA, 20 bp, Artificial Sequence
  Description of Artificial Sequence: Synthetic oligonucleotide
  Target: LAMA2; (+) strand; PAM type: YTN; PAM sequence: TTC
agaggagatacaatattgct

SEQ ID NO: 340287 - DNA, 20 bp, Artificial Sequence
  Description of Artificial Sequence: Synthetic oligonucleotide
  Target: LAMA2; (+) strand; PAM type: YTN; PAM sequence: TTG
ctggatctaatgtaagtaga

SEQ ID NO: 340288 - DNA, 20 bp, Artificial Sequence
  Description of Artificial Sequence: Synthetic oligonucleotide
  Target: LAMA2; (+) strand; PAM type: YTN; PAM sequence: CTG
gatctaatgtaagtagaaag

SEQ ID NO: 340289 - DNA, 20 bp, Artificial Sequence
  Description of Artificial Sequence: Synthetic oligonucleotide
  Target: LAMA2; (+) strand; PAM type: YTN; PAM sequence: CTA
atgtaagtagaaagaatcct

SEQ ID NO: 340290 - DNA, 20 bp, Artificial Sequence
  Description of Artificial Sequence: Synthetic oligonucleotide
  Target: LAMA2; (+) strand; PAM type: YTN; PAM sequence: CTA
attctgatatatcatggcat

SEQ ID NO: 340291 - DNA, 20 bp, Artificial Sequence
  Description of Artificial Sequence: Synthetic oligonucleotide
  Target: LAMA2; (+) strand; PAM type: YTN; PAM sequence: TTC
tgatatatcatggcatagaa

SEQ ID NO: 340292 - DNA, 20 bp, Artificial Sequence
  Description of Artificial Sequence: Synthetic oligonucleotide
  Target: LAMA2; (+) strand; PAM type: YTN; PAM sequence: CTG
atatatcatggcatagaaaa

SEQ ID NO: 340293 - DNA, 20 bp, Artificial Sequence
  Description of Artificial Sequence: Synthetic oligonucleotide
  Target: LAMA2; (+) strand; PAM type: YTN; PAM sequence: TTA
gaagacctggattctggtac

SEQ ID NO: 340294 - DNA, 20 bp, Artificial Sequence
  Description of Artificial Sequence: Synthetic oligonucleotide
  Target: LAMA2; (+) strand; PAM type: YTN; PAM sequence: CTG
gattctggtactggttccag

SEQ ID NO: 340295 - DNA, 20 bp, Artificial Sequence
  Description of Artificial Sequence: Synthetic oligonucleotide
  Target: LAMA2; (+) strand; PAM type: YTN; PAM sequence: TTC
tggtactggttccagttatt

SEQ ID NO: 340296 - DNA, 20 bp, Artificial Sequence
  Description of Artificial Sequence: Synthetic oligonucleotide
  Target: LAMA2; (+) strand; PAM type: YTN; PAM sequence: CTG
gtactggttccagttatttg

SEQ ID NO: 340297 - DNA, 20 bp, Artificial Sequence
  Description of Artificial Sequence: Synthetic oligonucleotide
  Target: LAMA2; (+) strand; PAM type: YTN; PAM sequence: CTG
gttccagttatttgtgggac

SEQ ID NO: 340298 - DNA, 20 bp, Artificial Sequence
  Description of Artificial Sequence: Synthetic oligonucleotide
  Target: LAMA2; (+) strand; PAM type: YTN; PAM sequence: TTC
cagttatttgtgggaccttg

SEQ ID NO: 340299 - DNA, 20 bp, Artificial Sequence
  Description of Artificial Sequence: Synthetic oligonucleotide
  Target: LAMA2; (+) strand; PAM type: YTN; PAM sequence: TTA
tttgtgggaccttggtcaaa

SEQ ID NO: 340300 - DNA, 20 bp, Artificial Sequence
  Description of Artificial Sequence: Synthetic oligonucleotide
  Target: LAMA2; (+) strand; PAM type: YTN; PAM sequence: TTT
gtgggaccttggtcaaatga

SEQ ID NO: 340301 - DNA, 20 bp, Artificial Sequence
  Description of Artificial Sequence: Synthetic oligonucleotide
  Target: LAMA2; (+) strand; PAM type: YTN; PAM sequence: TTG
tgggaccttggtcaaatgat

SEQ ID NO: 340302 - DNA, 20 bp, Artificial Sequence
  Description of Artificial Sequence: Synthetic oligonucleotide
  Target: LAMA2; (+) strand; PAM type: YTN; PAM sequence: CTT
ggtcaaatgatttaatctct

SEQ ID NO: 340303 - DNA, 20 bp, Artificial Sequence
  Description of Artificial Sequence: Synthetic oligonucleotide
  Target: LAMA2; (+) strand; PAM type: YTN; PAM sequence: TTG
gtcaaatgatttaatctctc

SEQ ID NO: 340304 - DNA, 20 bp, Artificial Sequence
  Description of Artificial Sequence: Synthetic oligonucleotide
  Target: LAMA2; (+) strand; PAM type: YTN; PAM sequence: TTT
aatctctctgggattaaatt

SEQ ID NO: 340305 - DNA, 20 bp, Artificial Sequence
  Description of Artificial Sequence: Synthetic oligonucleotide
  Target: LAMA2; (+) strand; PAM type: YTN; PAM sequence: TTA
atctctctgggattaaattt

SEQ ID NO: 340306 - DNA, 20 bp, Artificial Sequence
  Description of Artificial Sequence: Synthetic oligonucleotide
  Target: LAMA2; (+) strand; PAM type: YTN; PAM sequence: CTC
tctgggattaaatttcttta

SEQ ID NO: 340307 - DNA, 20 bp, Artificial Sequence
  Description of Artificial Sequence: Synthetic oligonucleotide
  Target: LAMA2; (+) strand; PAM type: YTN; PAM sequence: CTC
tgggattaaatttctttaat

SEQ ID NO: 340308 - DNA, 20 bp, Artificial Sequence
  Description of Artificial Sequence: Synthetic oligonucleotide
  Target: LAMA2; (+) strand; PAM type: YTN; PAM sequence: CTG
ggattaaatttctttaatag

SEQ ID NO: 340309 - DNA, 20 bp, Artificial Sequence
  Description of Artificial Sequence: Synthetic oligonucleotide
  Target: LAMA2; (+) strand; PAM type: YTN; PAM sequence: TTA
aatttctttaatagatgaat

SEQ ID NO: 340310 - DNA, 20 bp, Artificial Sequence
  Description of Artificial Sequence: Synthetic oligonucleotide
  Target: LAMA2; (+) strand; PAM type: YTN; PAM sequence: TTT
ctttaatagatgaattagtt

SEQ ID NO: 340311 - DNA, 20 bp, Artificial Sequence
  Description of Artificial Sequence: Synthetic oligonucleotide
  Target: LAMA2; (+) strand; PAM type: YTN; PAM sequence: TTC
tttaatagatgaattagttc

SEQ ID NO: 340312 - DNA, 20 bp, Artificial Sequence
  Description of Artificial Sequence: Synthetic oligonucleotide
  Target: LAMA2; (+) strand; PAM type: YTN; PAM sequence: CTT
taatagatgaattagttcaa

SEQ ID NO: 340313 - DNA, 20 bp, Artificial Sequence
  Description of Artificial Sequence: Synthetic oligonucleotide
  Target: LAMA2; (+) strand; PAM type: YTN; PAM sequence: TTT
aatagatgaattagttcaat

SEQ ID NO: 340314 - DNA, 20 bp, Artificial Sequence
  Description of Artificial Sequence: Synthetic oligonucleotide
  Target: LAMA2; (+) strand; PAM type: YTN; PAM sequence: TTA
atagatgaattagttcaatg

SEQ ID NO: 340315 - DNA, 20 bp, Artificial Sequence
  Description of Artificial Sequence: Synthetic oligonucleotide
  Target: LAMA2; (+) strand; PAM type: YTN; PAM sequence: TTA
gttcaatgcccagattgttc

SEQ ID NO: 340316 - DNA, 20 bp, Artificial Sequence
  Description of Artificial Sequence: Synthetic oligonucleotide
  Target: LAMA2; (+) strand; PAM type: YTN; PAM sequence: TTC
aatgcccagattgttctaag

SEQ ID NO: 340317 - DNA, 20 bp, Artificial Sequence
  Description of Artificial Sequence: Synthetic oligonucleotide
  Target: LAMA2; (+) strand; PAM type: YTN; PAM sequence: TTG
ttctaaggcagcatggtatt

SEQ ID NO: 340318 - DNA, 20 bp, Artificial Sequence
  Description of Artificial Sequence: Synthetic oligonucleotide
  Target: LAMA2; (+) strand; PAM type: YTN; PAM sequence: TTC
taaggcagcatggtattttc

SEQ ID NO: 340319 - DNA, 20 bp, Artificial Sequence
  Description of Artificial Sequence: Synthetic oligonucleotide
  Target: LAMA2; (+) strand; PAM type: YTN; PAM sequence: CTA
aggcagcatggtattttcta

SEQ ID NO: 340320 - DNA, 20 bp, Artificial Sequence
  Description of Artificial Sequence: Synthetic oligonucleotide
  Target: LAMA2; (+) strand; PAM type: YTN; PAM sequence: TTT
tctaaaataatatagctttg

SEQ ID NO: 340321 - DNA, 20 bp, Artificial Sequence
  Description of Artificial Sequence: Synthetic oligonucleotide
  Target: LAMA2; (+) strand; PAM type: YTN; PAM sequence: TTT
ctaaaataatatagctttgg

SEQ ID NO: 340322 - DNA, 20 bp, Artificial Sequence
  Description of Artificial Sequence: Synthetic oligonucleotide
  Target: LAMA2; (+) strand; PAM type: YTN; PAM sequence: TTC
taaaataatatagctttggc

SEQ ID NO: 340323 - DNA, 20 bp, Artificial Sequence
  Description of Artificial Sequence: Synthetic oligonucleotide
  Target: LAMA2; (+) strand; PAM type: YTN; PAM sequence: CTA
aaataatatagctttggcta

SEQ ID NO: 340324 - DNA, 20 bp, Artificial Sequence
  Description of Artificial Sequence: Synthetic oligonucleotide
  Target: LAMA2; (+) strand; PAM type: YTN; PAM sequence: CTT
tggctatcatacaacatttg

SEQ ID NO: 340325 - DNA, 20 bp, Artificial Sequence
  Description of Artificial Sequence: Synthetic oligonucleotide
  Target: LAMA2; (+) strand; PAM type: YTN; PAM sequence: TTT
ggctatcatacaacatttga

SEQ ID NO: 340326 - DNA, 20 bp, Artificial Sequence
  Description of Artificial Sequence: Synthetic oligonucleotide
  Target: LAMA2; (+) strand; PAM type: YTN; PAM sequence: TTG
gctatcatacaacatttgag

SEQ ID NO: 340327 - DNA, 20 bp, Artificial Sequence
  Description of Artificial Sequence: Synthetic oligonucleotide
  Target: LAMA2; (+) strand; PAM type: YTN; PAM sequence: CTA
tcatacaacatttgaggata

SEQ ID NO: 340328 - DNA, 20 bp, Artificial Sequence
  Description of Artificial Sequence: Synthetic oligonucleotide
  Target: LAMA2; (+) strand; PAM type: YTN; PAM sequence: TTT
gaggatattctaaaagtttt

SEQ ID NO: 340329 - DNA, 20 bp, Artificial Sequence
  Description of Artificial Sequence: Synthetic oligonucleotide
  Target: LAMA2; (+) strand; PAM type: YTN; PAM sequence: TTG
aggatattctaaaagttttg

SEQ ID NO: 340330 - DNA, 20 bp, Artificial Sequence
  Description of Artificial Sequence: Synthetic oligonucleotide
  Target: LAMA2; (+) strand; PAM type: YTN; PAM sequence: TTC
taaaagttttggatactttt

SEQ ID NO: 340331 - DNA, 20 bp, Artificial Sequence
  Description of Artificial Sequence: Synthetic oligonucleotide
  Target: LAMA2; (+) strand; PAM type: YTN; PAM sequence: CTA
aaagttttggatacttttct

SEQ ID NO: 340332 - DNA, 20 bp, Artificial Sequence
  Description of Artificial Sequence: Synthetic oligonucleotide
  Target: LAMA2; (+) strand; PAM type: YTN; PAM sequence: TTT
tggatacttttctctaacat

SEQ ID NO: 340333 - DNA, 20 bp, Artificial Sequence
  Description of Artificial Sequence: Synthetic oligonucleotide
  Target: LAMA2; (+) strand; PAM type: YTN; PAM sequence: TTT
ggatacttttctctaacatt

SEQ ID NO: 340334 - DNA, 20 bp, Artificial Sequence
  Description of Artificial Sequence: Synthetic oligonucleotide
  Target: LAMA2; (+) strand; PAM type: YTN; PAM sequence: TTG
gatacttttctctaacatta

SEQ ID NO: 340335 - DNA, 20 bp, Artificial Sequence
  Description of Artificial Sequence: Synthetic oligonucleotide
  Target: LAMA2; (+) strand; PAM type: YTN; PAM sequence: CTT
ttctctaacattatccagac

SEQ ID NO: 340336 - DNA, 20 bp, Artificial Sequence
  Description of Artificial Sequence: Synthetic oligonucleotide
  Target: LAMA2; (+) strand; PAM type: YTN; PAM sequence: TTT
tctctaacattatccagaca

SEQ ID NO: 340337 - DNA, 20 bp, Artificial Sequence
  Description of Artificial Sequence: Synthetic oligonucleotide
  Target: LAMA2; (+) strand; PAM type: YTN; PAM sequence: TTT
ctctaacattatccagacaa

SEQ ID NO: 340338 - DNA, 20 bp, Artificial Sequence
  Description of Artificial Sequence: Synthetic oligonucleotide
  Target: LAMA2; (+) strand; PAM type: YTN; PAM sequence: TTC
tctaacattatccagacaaa

SEQ ID NO: 340339 - DNA, 20 bp, Artificial Sequence
  Description of Artificial Sequence: Synthetic oligonucleotide
  Target: LAMA2; (+) strand; PAM type: YTN; PAM sequence: CTC
taacattatccagacaaagt

SEQ ID NO: 340340 - DNA, 20 bp, Artificial Sequence
  Description of Artificial Sequence: Synthetic oligonucleotide
  Target: LAMA2; (+) strand; PAM type: YTN; PAM sequence: CTA
acattatccagacaaagtag

SEQ ID NO: 340341 - DNA, 20 bp, Artificial Sequence
  Description of Artificial Sequence: Synthetic oligonucleotide
  Target: LAMA2; (+) strand; PAM type: YTN; PAM sequence: TTA
tccagacaaagtagctgtgg

SEQ ID NO: 340342 - DNA, 20 bp, Artificial Sequence
  Description of Artificial Sequence: Synthetic oligonucleotide
  Target: LAMA2; (+) strand; PAM type: YTN; PAM sequence: CTG
tggaataaatctcactcgtc

SEQ ID NO: 340343 - DNA, 20 bp, Artificial Sequence
  Description of Artificial Sequence: Synthetic oligonucleotide
  Target: LAMA2; (+) strand; PAM type: YTN; PAM sequence: CTC
actcgtcagctttagtttta

SEQ ID NO: 340344 - DNA, 20 bp, Artificial Sequence
  Description of Artificial Sequence: Synthetic oligonucleotide
  Target: LAMA2; (+) strand; PAM type: YTN; PAM sequence: CTC
gtcagctttagttttaaaat

SEQ ID NO: 340345 - DNA, 20 bp, Artificial Sequence
  Description of Artificial Sequence: Synthetic oligonucleotide
  Target: LAMA2; (+) strand; PAM type: YTN; PAM sequence: CTT
tagttttaaaattatgtact

SEQ ID NO: 340346 - DNA, 20 bp, Artificial Sequence
  Description of Artificial Sequence: Synthetic oligonucleotide
  Target: LAMA2; (+) strand; PAM type: YTN; PAM sequence: TTT
agttttaaaattatgtactt

SEQ ID NO: 340347 - DNA, 20 bp, Artificial Sequence
  Description of Artificial Sequence: Synthetic oligonucleotide
  Target: LAMA2; (+) strand; PAM type: YTN; PAM sequence: TTA
gttttaaaattatgtacttt

SEQ ID NO: 340348 - DNA, 20 bp, Artificial Sequence
  Description of Artificial Sequence: Synthetic oligonucleotide
  Target: LAMA2; (+) strand; PAM type: YTN; PAM sequence: TTT
taaaattatgtactttcaca

SEQ ID NO: 340349 - DNA, 20 bp, Artificial Sequence
  Description of Artificial Sequence: Synthetic oligonucleotide
  Target: LAMA2; (+) strand; PAM type: YTN; PAM sequence: TTT
aaaattatgtactttcacat

SEQ ID NO: 340350 - DNA, 20 bp, Artificial Sequence
  Description of Artificial Sequence: Synthetic oligonucleotide
  Target: LAMA2; (+) strand; PAM type: YTN; PAM sequence: TTA
aaattatgtactttcacata

SEQ ID NO: 340351 - DNA, 20 bp, Artificial Sequence
  Description of Artificial Sequence: Synthetic oligonucleotide
  Target: LAMA2; (+) strand; PAM type: YTN; PAM sequence: TTA
tgtactttcacataatccct

SEQ ID NO: 340352 - DNA, 20 bp, Artificial Sequence
  Description of Artificial Sequence: Synthetic oligonucleotide
  Target: LAMA2; (+) strand; PAM type: YTN; PAM sequence: CTT
tcacataatccctggaatac

SEQ ID NO: 340353 - DNA, 20 bp, Artificial Sequence
  Description of Artificial Sequence: Synthetic oligonucleotide
  Target: LAMA2; (+) strand; PAM type: YTN; PAM sequence: TTT
cacataatccctggaataca

SEQ ID NO: 340354 - DNA, 20 bp, Artificial Sequence
  Description of Artificial Sequence: Synthetic oligonucleotide
  Target: LAMA2; (+) strand; PAM type: YTN; PAM sequence: TTC
acataatccctggaatacaa

SEQ ID NO: 340355 - DNA, 20 bp, Artificial Sequence
  Description of Artificial Sequence: Synthetic oligonucleotide
  Target: LAMA2; (+) strand; PAM type: YTN; PAM sequence: CTG
gaatacaattattaattgtt

SEQ ID NO: 340356 - DNA, 20 bp, Artificial Sequence
  Description of Artificial Sequence: Synthetic oligonucleotide
  Target: LAMA2; (+) strand; PAM type: YTN; PAM sequence: TTA
ttaattgtttatgttcaaaa

SEQ ID NO: 340357 - DNA, 20 bp, Artificial Sequence
  Description of Artificial Sequence: Synthetic oligonucleotide
  Target: LAMA2; (+) strand; PAM type: YTN; PAM sequence: TTA
attgtttatgttcaaaactt

SEQ ID NO: 340358 - DNA, 20 bp, Artificial Sequence
  Description of Artificial Sequence: Synthetic oligonucleotide
  Target: LAMA2; (+) strand; PAM type: YTN; PAM sequence: TTG
tttatgttcaaaactttaca

SEQ ID NO: 340359 - DNA, 20 bp, Artificial Sequence
  Description of Artificial Sequence: Synthetic oligonucleotide
  Target: LAMA2; (+) strand; PAM type: YTN; PAM sequence: TTT
atgttcaaaactttacagag

SEQ ID NO: 340360 - DNA, 20 bp, Artificial Sequence
  Description of Artificial Sequence: Synthetic oligonucleotide
  Target: LAMA2; (+) strand; PAM type: YTN; PAM sequence: TTA
tgttcaaaactttacagaga

SEQ ID NO: 340361 - DNA, 20 bp, Artificial Sequence
  Description of Artificial Sequence: Synthetic oligonucleotide
  Target: LAMA2; (+) strand; PAM type: YTN; PAM sequence: TTC
aaaactttacagagaagtga

SEQ ID NO: 340362 - DNA, 20 bp, Artificial Sequence
  Description of Artificial Sequence: Synthetic oligonucleotide
  Target: LAMA2; (+) strand; PAM type: YTN; PAM sequence: CTT
tacagagaagtgacagtcaa

SEQ ID NO: 340363 - DNA, 20 bp, Artificial Sequence
  Description of Artificial Sequence: Synthetic oligonucleotide
  Target: LAMA2; (+) strand; PAM type: YTN; PAM sequence: TTT
acagagaagtgacagtcaaa

SEQ ID NO: 340364 - DNA, 20 bp, Artificial Sequence
  Description of Artificial Sequence: Synthetic oligonucleotide
  Target: LAMA2; (+) strand; PAM type: YTN; PAM sequence: TTA
cagagaagtgacagtcaaat

SEQ ID NO: 340365 - DNA, 20 bp, Artificial Sequence
  Description of Artificial Sequence: Synthetic oligonucleotide
  Target: LAMA2; (+) strand; PAM type: YTN; PAM sequence: TTG
cataagtactgtaacagtag

SEQ ID NO: 340366 - DNA, 20 bp, Artificial Sequence
  Description of Artificial Sequence: Synthetic oligonucleotide
  Target: LAMA2; (+) strand; PAM type: YTN; PAM sequence: CTG
taacagtagtgtatacagag

SEQ ID NO: 340367 - DNA, 20 bp, Artificial Sequence
  Description of Artificial Sequence: Synthetic oligonucleotide
  Target: LAMA2; (+) strand; PAM type: YTN; PAM sequence: CTC
cccctgcttgagtggaagga

SEQ ID NO: 340368 - DNA, 20 bp, Artificial Sequence
  Description of Artificial Sequence: Synthetic oligonucleotide
  Target: LAMA2; (+) strand; PAM type: YTN; PAM sequence: CTG
cttgagtggaaggaggcaca

SEQ ID NO: 340369 - DNA, 20 bp, Artificial Sequence
  Description of Artificial Sequence: Synthetic oligonucleotide
  Target: LAMA2; (+) strand; PAM type: YTN; PAM sequence: CTT
gagtggaaggaggcacattg

SEQ ID NO: 340370 - DNA, 20 bp, Artificial Sequence
  Description of Artificial Sequence: Synthetic oligonucleotide
  Target: LAMA2; (+) strand; PAM type: YTN; PAM sequence: TTG
agtggaaggaggcacattga

SEQ ID NO: 340371 - DNA, 20 bp, Artificial Sequence
  Description of Artificial Sequence: Synthetic oligonucleotide
  Target: LAMA2; (+) strand; PAM type: YTN; PAM sequence: TTG
agaagataacttctcagaat

SEQ ID NO: 340372 - DNA, 20 bp, Artificial Sequence
  Description of Artificial Sequence: Synthetic oligonucleotide
  Target: LAMA2; (+) strand; PAM type: YTN; PAM sequence: CTT
ctcagaatatgggaaaacca

SEQ ID NO: 340373 - DNA, 20 bp, Artificial Sequence
  Description of Artificial Sequence: Synthetic oligonucleotide
  Target: LAMA2; (+) strand; PAM type: YTN; PAM sequence: TTC
tcagaatatgggaaaaccag

SEQ ID NO: 340374 - DNA, 20 bp, Artificial Sequence
  Description of Artificial Sequence: Synthetic oligonucleotide
  Target: LAMA2; (+) strand; PAM type: YTN; PAM sequence: CTC
agaatatgggaaaaccagca

SEQ ID NO: 340375 - DNA, 20 bp, Artificial Sequence
  Description of Artificial Sequence: Synthetic oligonucleotide
  Target: LAMA2; (+) strand; PAM type: YTN; PAM sequence: CTC
ttatctcaaaagtctcaaag

SEQ ID NO: 340376 - DNA, 20 bp, Artificial Sequence
  Description of Artificial Sequence: Synthetic oligonucleotide
  Target: LAMA2; (+) strand; PAM type: YTN; PAM sequence: CTT
atctcaaaagtctcaaagcc

SEQ ID NO: 340377 - DNA, 20 bp, Artificial Sequence
  Description of Artificial Sequence: Synthetic oligonucleotide
  Target: LAMA2; (+) strand; PAM type: YTN; PAM sequence: TTA
tctcaaaagtctcaaagcca

SEQ ID NO: 340378 - DNA, 20 bp, Artificial Sequence
  Description of Artificial Sequence: Synthetic oligonucleotide
  Target: LAMA2; (+) strand; PAM type: YTN; PAM sequence: CTC
aaaagtctcaaagccaatat

SEQ ID NO: 340379 - DNA, 20 bp, Artificial Sequence
  Description of Artificial Sequence: Synthetic oligonucleotide
  Target: LAMA2; (+) strand; PAM type: YTN; PAM sequence: CTC
aaagccaatatgcaaattca

SEQ ID NO: 340380 - DNA, 20 bp, Artificial Sequence
  Description of Artificial Sequence: Synthetic oligonucleotide
  Target: LAMA2; (+) strand; PAM type: YTN; PAM sequence: TTC
atctccaataatgcctatgt

SEQ ID NO: 340381 - DNA, 20 bp, Artificial Sequence
  Description of Artificial Sequence: Synthetic oligonucleotide
  Target: LAMA2; (+) strand; PAM type: YTN; PAM sequence: CTC
caataatgcctatgtgttaa

SEQ ID NO: 340382 - DNA, 20 bp, Artificial Sequence
  Description of Artificial Sequence: Synthetic oligonucleotide
  Target: LAMA2; (+) strand; PAM type: YTN; PAM sequence: CTA
tgtgttaaactcggtacata

SEQ ID NO: 340383 - DNA, 20 bp, Artificial Sequence
  Description of Artificial Sequence: Synthetic oligonucleotide
  Target: LAMA2; (+) strand; PAM type: YTN; PAM sequence: TTA
aactcggtacatacagaatt

SEQ ID NO: 340384 - DNA, 20 bp, Artificial Sequence
  Description of Artificial Sequence: Synthetic oligonucleotide
  Target: LAMA2; (+) strand; PAM type: YTN; PAM sequence: CTC
ggtacatacagaatttacct

SEQ ID NO: 340385 - DNA, 20 bp, Artificial Sequence
  Description of Artificial Sequence: Synthetic oligonucleotide
  Target: LAMA2; (+) strand; PAM type: YTN; PAM sequence: TTT
acctccattgttgagggata

SEQ ID NO: 340386 - DNA, 20 bp, Artificial Sequence
  Description of Artificial Sequence: Synthetic oligonucleotide
  Target: LAMA2; (+) strand; PAM type: YTN; PAM sequence: TTA
cctccattgttgagggatat

SEQ ID NO: 340387 - DNA, 20 bp, Artificial Sequence
  Description of Artificial Sequence: Synthetic oligonucleotide
  Target: LAMA2; (+) strand; PAM type: YTN; PAM sequence: CTC
cattgttgagggatattgtt

SEQ ID NO: 340388 - DNA, 20 bp, Artificial Sequence
  Description of Artificial Sequence: Synthetic oligonucleotide
  Target: LAMA2; (+) strand; PAM type: YTN; PAM sequence: TTG
ttgagggatattgttatcag

SEQ ID NO: 340389 - DNA, 20 bp, Artificial Sequence
  Description of Artificial Sequence: Synthetic oligonucleotide
  Target: LAMA2; (+) strand; PAM type: YTN; PAM sequence: TTG
agggatattgttatcagatg

SEQ ID NO: 340390 - DNA, 20 bp, Artificial Sequence
  Description of Artificial Sequence: Synthetic oligonucleotide
  Target: LAMA2; (+) strand; PAM type: YTN; PAM sequence: TTG
ttatcagatgtagaattcta

SEQ ID NO: 340391 - DNA, 20 bp, Artificial Sequence
  Description of Artificial Sequence: Synthetic oligonucleotide
  Target: LAMA2; (+) strand; PAM type: YTN; PAM sequence: TTA
tcagatgtagaattctaggt

SEQ ID NO: 340392 - DNA, 20 bp, Artificial Sequence
  Description of Artificial Sequence: Synthetic oligonucleotide
  Target: LAMA2; (+) strand; PAM type: YTN; PAM sequence: TTC
taggtttgcagttattttct

SEQ ID NO: 340393 - DNA, 20 bp, Artificial Sequence
  Description of Artificial Sequence: Synthetic oligonucleotide
  Target: LAMA2; (+) strand; PAM type: YTN; PAM sequence: CTA
ggtttgcagttattttcttt

SEQ ID NO: 340394 - DNA, 20 bp, Artificial Sequence
  Description of Artificial Sequence: Synthetic oligonucleotide
  Target: LAMA2; (+) strand; PAM type: YTN; PAM sequence: TTT
gcagttattttcttttggca

SEQ ID NO: 340395 - DNA, 20 bp, Artificial Sequence
  Description of Artificial Sequence: Synthetic oligonucleotide
  Target: LAMA2; (+) strand; PAM type: YTN; PAM sequence: TTG
cagttattttcttttggcac

SEQ ID NO: 340396 - DNA, 20 bp, Artificial Sequence
  Description of Artificial Sequence: Synthetic oligonucleotide
  Target: LAMA2; (+) strand; PAM type: YTN; PAM sequence: TTA
ttttcttttggcacatttta

SEQ ID NO: 340397 - DNA, 20 bp, Artificial Sequence
  Description of Artificial Sequence: Synthetic oligonucleotide
  Target: LAMA2; (+) strand; PAM type: YTN; PAM sequence: TTT
tcttttggcacattttattg

SEQ ID NO: 340398 - DNA, 20 bp, Artificial Sequence
  Description of Artificial Sequence: Synthetic oligonucleotide
  Target: LAMA2; (+) strand; PAM type: YTN; PAM sequence: TTT
cttttggcacattttattgt

SEQ ID NO: 340399 - DNA, 20 bp, Artificial Sequence
  Description of Artificial Sequence: Synthetic oligonucleotide
  Target: LAMA2; (+) strand; PAM type: YTN; PAM sequence: TTC
ttttggcacattttattgtt

SEQ ID NO: 340400 - DNA, 20 bp, Artificial Sequence
  Description of Artificial Sequence: Synthetic oligonucleotide
  Target: LAMA2; (+) strand; PAM type: YTN; PAM sequence: CTT
ttggcacattttattgtttt

SEQ ID NO: 340401 - DNA, 20 bp, Artificial Sequence
  Description of Artificial Sequence: Synthetic oligonucleotide
  Target: LAMA2; (+) strand; PAM type: YTN; PAM sequence: TTT
tggcacattttattgttttc

SEQ ID NO: 340402 - DNA, 20 bp, Artificial Sequence
  Description of Artificial Sequence: Synthetic oligonucleotide
  Target: LAMA2; (+) strand; PAM type: YTN; PAM sequence: TTT
ggcacattttattgttttct

SEQ ID NO: 340403 - DNA, 20 bp, Artificial Sequence
  Description of Artificial Sequence: Synthetic oligonucleotide
  Target: LAMA2; (+) strand; PAM type: YTN; PAM sequence: TTG
gcacattttattgttttctg

SEQ ID NO: 340404 - DNA, 20 bp, Artificial Sequence
  Description of Artificial Sequence: Synthetic oligonucleotide
  Target: LAMA2; (+) strand; PAM type: YTN; PAM sequence: TTT
tattgttttctgatttccat

SEQ ID NO: 340405 - DNA, 20 bp, Artificial Sequence
  Description of Artificial Sequence: Synthetic oligonucleotide
  Target: LAMA2; (+) strand; PAM type: YTN; PAM sequence: TTT
attgttttctgatttccatt

SEQ ID NO: 340406 - DNA, 20 bp, Artificial Sequence
  Description of Artificial Sequence: Synthetic oligonucleotide
  Target: LAMA2; (+) strand; PAM type: YTN; PAM sequence: TTA
ttgttttctgatttccattg

SEQ ID NO: 340407 - DNA, 20 bp, Artificial Sequence
  Description of Artificial Sequence: Synthetic oligonucleotide
  Target: LAMA2; (+) strand; PAM type: YTN; PAM sequence: TTG
ttttctgatttccattgctt

SEQ ID NO: 340408 - DNA, 20 bp, Artificial Sequence
  Description of Artificial Sequence: Synthetic oligonucleotide
  Target: LAMA2; (+) strand; PAM type: YTN; PAM sequence: TTT
tctgatttccattgcttatg

SEQ ID NO: 340409 - DNA, 20 bp, Artificial Sequence
  Description of Artificial Sequence: Synthetic oligonucleotide
  Target: LAMA2; (+) strand; PAM type: YTN; PAM sequence: TTT
ctgatttccattgcttatgt

SEQ ID NO: 340410 - DNA, 20 bp, Artificial Sequence
  Description of Artificial Sequence: Synthetic oligonucleotide
  Target: LAMA2; (+) strand; PAM type: YTN; PAM sequence: TTC
tgatttccattgcttatgta

SEQ ID NO: 340411 - DNA, 20 bp, Artificial Sequence
  Description of Artificial Sequence: Synthetic oligonucleotide
  Target: LAMA2; (+) strand; PAM type: YTN; PAM sequence: CTG
atttccattgcttatgtaga

SEQ ID NO: 340412 - DNA, 20 bp, Artificial Sequence
  Description of Artificial Sequence: Synthetic oligonucleotide
  Target: LAMA2; (+) strand; PAM type: YTN; PAM sequence: TTT
ccattgcttatgtagagaat

SEQ ID NO: 340413 - DNA, 20 bp, Artificial Sequence
  Description of Artificial Sequence: Synthetic oligonucleotide
  Target: LAMA2; (+) strand; PAM type: YTN; PAM sequence: TTC
cattgcttatgtagagaatg

SEQ ID NO: 340414 - DNA, 20 bp, Artificial Sequence
  Description of Artificial Sequence: Synthetic oligonucleotide
  Target: LAMA2; (+) strand; PAM type: YTN; PAM sequence: TTG
cttatgtagagaatgcagct

SEQ ID NO: 340415 - DNA, 20 bp, Artificial Sequence
  Description of Artificial Sequence: Synthetic oligonucleotide
  Target: LAMA2; (+) strand; PAM type: YTN; PAM sequence: CTT
atgtagagaatgcagctatc

SEQ ID NO: 340416 - DNA, 20 bp, Artificial Sequence
  Description of Artificial Sequence: Synthetic oligonucleotide
  Target: LAMA2; (+) strand; PAM type: YTN; PAM sequence: TTA
tgtagagaatgcagctatcc

SEQ ID NO: 340417 - DNA, 20 bp, Artificial Sequence
  Description of Artificial Sequence: Synthetic oligonucleotide
  Target: LAMA2; (+) strand; PAM type: YTN; PAM sequence: CTA
tccgattactatcttttgga

SEQ ID NO: 340418 - DNA, 20 bp, Artificial Sequence
  Description of Artificial Sequence: Synthetic oligonucleotide
  Target: LAMA2; (+) strand; PAM type: YTN; PAM sequence: TTA
ctatcttttggagtgacttt

SEQ ID NO: 340419 - DNA, 20 bp, Artificial Sequence
  Description of Artificial Sequence: Synthetic oligonucleotide
  Target: LAMA2; (+) strand; PAM type: YTN; PAM sequence: CTA
tcttttggagtgacttttct

SEQ ID NO: 340420 - DNA, 20 bp, Artificial Sequence
  Description of Artificial Sequence: Synthetic oligonucleotide
  Target: LAMA2; (+) strand; PAM type: YTN; PAM sequence: CTT
ttggagtgacttttctctga

SEQ ID NO: 340421 - DNA, 20 bp, Artificial Sequence
  Description of Artificial Sequence: Synthetic oligonucleotide
  Target: LAMA2; (+) strand; PAM type: YTN; PAM sequence: TTT
tggagtgacttttctctgat

SEQ ID NO: 340422 - DNA, 20 bp, Artificial Sequence
  Description of Artificial Sequence: Synthetic oligonucleotide
  Target: LAMA2; (+) strand; PAM type: YTN; PAM sequence: TTT
ggagtgacttttctctgatt

SEQ ID NO: 340423 - DNA, 20 bp, Artificial Sequence
  Description of Artificial Sequence: Synthetic oligonucleotide
  Target: LAMA2; (+) strand; PAM type: YTN; PAM sequence: TTG
gagtgacttttctctgattt

SEQ ID NO: 340424 - DNA, 20 bp, Artificial Sequence
  Description of Artificial Sequence: Synthetic oligonucleotide
  Target: LAMA2; (+) strand; PAM type: YTN; PAM sequence: CTT
ttctctgatttatttaaata

SEQ ID NO: 340425 - DNA, 20 bp, Artificial Sequence
  Description of Artificial Sequence: Synthetic oligonucleotide
  Target: LAMA2; (+) strand; PAM type: YTN; PAM sequence: TTT
tctctgatttatttaaatat

SEQ ID NO: 340426 - DNA, 20 bp, Artificial Sequence
  Description of Artificial Sequence: Synthetic oligonucleotide
  Target: LAMA2; (+) strand; PAM type: YTN; PAM sequence: TTT
ctctgatttatttaaatatt

SEQ ID NO: 340427 - DNA, 20 bp, Artificial Sequence
  Description of Artificial Sequence: Synthetic oligonucleotide
  Target: LAMA2; (+) strand; PAM type: YTN; PAM sequence: TTC
tctgatttatttaaatattt

SEQ ID NO: 340428 - DNA, 20 bp, Artificial Sequence
  Description of Artificial Sequence: Synthetic oligonucleotide
  Target: LAMA2; (+) strand; PAM type: YTN; PAM sequence: CTC
tgatttatttaaatattttt

SEQ ID NO: 340429 - DNA, 20 bp, Artificial Sequence
  Description of Artificial Sequence: Synthetic oligonucleotide
  Target: LAMA2; (+) strand; PAM type: YTN; PAM sequence: CTG
atttatttaaatattttttt

SEQ ID NO: 340430 - DNA, 20 bp, Artificial Sequence
  Description of Artificial Sequence: Synthetic oligonucleotide
  Target: LAMA2; (+) strand; PAM type: YTN; PAM sequence: TTT
atttaaatatttttttcttt

SEQ ID NO: 340431 - DNA, 20 bp, Artificial Sequence
  Description of Artificial Sequence: Synthetic oligonucleotide
  Target: LAMA2; (+) strand; PAM type: YTN; PAM sequence: TTA
tttaaatatttttttctttg

SEQ ID NO: 340432 - DNA, 20 bp, Artificial Sequence
  Description of Artificial Sequence: Synthetic oligonucleotide
  Target: LAMA2; (+) strand; PAM type: YTN; PAM sequence: TTT
aaatatttttttctttgttc

SEQ ID NO: 340433 - DNA, 20 bp, Artificial Sequence
  Description of Artificial Sequence: Synthetic oligonucleotide
  Target: LAMA2; (+) strand; PAM type: YTN; PAM sequence: TTA
aatatttttttctttgttct

SEQ ID NO: 340434 - DNA, 20 bp, Artificial Sequence
  Description of Artificial Sequence: Synthetic oligonucleotide
  Target: LAMA2; (+) strand; PAM type: YTN; PAM sequence: TTT
ttttctttgttcttcagtag

SEQ ID NO: 340435 - DNA, 20 bp, Artificial Sequence
  Description of Artificial Sequence: Synthetic oligonucleotide
  Target: LAMA2; (+) strand; PAM type: YTN; PAM sequence: TTT
tttctttgttcttcagtagt

SEQ ID NO: 340436 - DNA, 20 bp, Artificial Sequence
  Description of Artificial Sequence: Synthetic oligonucleotide
  Target: LAMA2; (+) strand; PAM type: YTN; PAM sequence: TTT
ttctttgttcttcagtagtt

SEQ ID NO: 340437 - DNA, 20 bp, Artificial Sequence
  Description of Artificial Sequence: Synthetic oligonucleotide
  Target: LAMA2; (+) strand; PAM type: YTN; PAM sequence: TTT
tctttgttcttcagtagttt

SEQ ID NO: 340438 - DNA, 20 bp, Artificial Sequence
  Description of Artificial Sequence: Synthetic oligonucleotide
  Target: LAMA2; (+) strand; PAM type: YTN; PAM sequence: TTT
ctttgttcttcagtagtttt

SEQ ID NO: 340439 - DNA, 20 bp, Artificial Sequence
  Description of Artificial Sequence: Synthetic oligonucleotide
  Target: LAMA2; (+) strand; PAM type: YTN; PAM sequence: TTC
tttgttcttcagtagtttta

SEQ ID NO: 340440 - DNA, 20 bp, Artificial Sequence
  Description of Artificial Sequence: Synthetic oligonucleotide
  Target: LAMA2; (+) strand; PAM type: YTN; PAM sequence: CTT
tgttcttcagtagttttact

SEQ ID NO: 340441 - DNA, 20 bp, Artificial Sequence
  Description of Artificial Sequence: Synthetic oligonucleotide
  Target: LAMA2; (+) strand; PAM type: YTN; PAM sequence: TTT
gttcttcagtagttttacta

SEQ ID NO: 340442 - DNA, 20 bp, Artificial Sequence
  Description of Artificial Sequence: Synthetic oligonucleotide
  Target: LAMA2; (+) strand; PAM type: YTN; PAM sequence: TTG
ttcttcagtagttttactat

SEQ ID NO: 340443 - DNA, 20 bp, Artificial Sequence
  Description of Artificial Sequence: Synthetic oligonucleotide
  Target: LAMA2; (+) strand; PAM type: YTN; PAM sequence: TTC
ttcagtagttttactatgat

SEQ ID NO: 340444 - DNA, 20 bp, Artificial Sequence
  Description of Artificial Sequence: Synthetic oligonucleotide
  Target: LAMA2; (+) strand; PAM type: YTN; PAM sequence: CTT
cagtagttttactatgatgc

SEQ ID NO: 340445 - DNA, 20 bp, Artificial Sequence
  Description of Artificial Sequence: Synthetic oligonucleotide
  Target: LAMA2; (+) strand; PAM type: YTN; PAM sequence: TTC
agtagttttactatgatgct

SEQ ID NO: 340446 - DNA, 20 bp, Artificial Sequence
  Description of Artificial Sequence: Synthetic oligonucleotide
  Target: LAMA2; (+) strand; PAM type: YTN; PAM sequence: TTT
tactatgatgcttcagatct

SEQ ID NO: 340447 - DNA, 20 bp, Artificial Sequence
  Description of Artificial Sequence: Synthetic oligonucleotide
  Target: LAMA2; (+) strand; PAM type: YTN; PAM sequence: TTT
actatgatgcttcagatctt

SEQ ID NO: 340448 - DNA, 20 bp, Artificial Sequence
  Description of Artificial Sequence: Synthetic oligonucleotide
  Target: LAMA2; (+) strand; PAM type: YTN; PAM sequence: TTA
ctatgatgcttcagatcttc

SEQ ID NO: 340449 - DNA, 20 bp, Artificial Sequence
  Description of Artificial Sequence: Synthetic oligonucleotide
  Target: LAMA2; (+) strand; PAM type: YTN; PAM sequence: CTA
tgatgcttcagatcttcact

SEQ ID NO: 340450 - DNA, 20 bp, Artificial Sequence
  Description of Artificial Sequence: Synthetic oligonucleotide
  Target: LAMA2; (+) strand; PAM type: YTN; PAM sequence: CTT
cagatcttcactgcccacta

SEQ ID NO: 340451 - DNA, 20 bp, Artificial Sequence
  Description of Artificial Sequence: Synthetic oligonucleotide
  Target: LAMA2; (+) strand; PAM type: YTN; PAM sequence: TTC
agatcttcactgcccactac

SEQ ID NO: 340452 - DNA, 20 bp, Artificial Sequence
  Description of Artificial Sequence: Synthetic oligonucleotide
  Target: LAMA2; (+) strand; PAM type: YTN; PAM sequence: CTT
cactgcccactacaatagcc

SEQ ID NO: 340453 - DNA, 20 bp, Artificial Sequence
  Description of Artificial Sequence: Synthetic oligonucleotide
  Target: LAMA2; (+) strand; PAM type: YTN; PAM sequence: TTC
actgcccactacaatagcca

SEQ ID NO: 340454 - DNA, 20 bp, Artificial Sequence
  Description of Artificial Sequence: Synthetic oligonucleotide
  Target: LAMA2; (+) strand; PAM type: YTN; PAM sequence: CTG
cccactacaatagccactag

SEQ ID NO: 340455 - DNA, 20 bp, Artificial Sequence
  Description of Artificial Sequence: Synthetic oligonucleotide
  Target: LAMA2; (+) strand; PAM type: YTN; PAM sequence: CTA
caatagccactagccatatg

SEQ ID NO: 340456 - DNA, 20 bp, Artificial Sequence
  Description of Artificial Sequence: Synthetic oligonucleotide
  Target: LAMA2; (+) strand; PAM type: YTN; PAM sequence: CTA
gccatatgtggtaattcaaa

SEQ ID NO: 340457 - DNA, 20 bp, Artificial Sequence
  Description of Artificial Sequence: Synthetic oligonucleotide
  Target: LAMA2; (+) strand; PAM type: YTN; PAM sequence: TTC
aaatttaaatttcagttaat

SEQ ID NO: 340458 - DNA, 20 bp, Artificial Sequence
  Description of Artificial Sequence: Synthetic oligonucleotide
  Target: LAMA2; (+) strand; PAM type: YTN; PAM sequence: TTT
aaatttcagttaatcaaaat

SEQ ID NO: 340459 - DNA, 20 bp, Artificial Sequence
  Description of Artificial Sequence: Synthetic oligonucleotide
  Target: LAMA2; (+) strand; PAM type: YTN; PAM sequence: TTA
aatttcagttaatcaaaatt

SEQ ID NO: 340460 - DNA, 20 bp, Artificial Sequence
  Description of Artificial Sequence: Synthetic oligonucleotide
  Target: LAMA2; (+) strand; PAM type: YTN; PAM sequence: TTT
cagttaatcaaaattaaatt

SEQ ID NO: 340461 - DNA, 20 bp, Artificial Sequence
  Description of Artificial Sequence: Synthetic oligonucleotide
  Target: LAMA2; (+) strand; PAM type: YTN; PAM sequence: TTC
agttaatcaaaattaaatta

SEQ ID NO: 340462 - DNA, 20 bp, Artificial Sequence
  Description of Artificial Sequence: Synthetic oligonucleotide
  Target: LAMA2; (+) strand; PAM type: YTN; PAM sequence: TTA
atcaaaattaaattaaaatt

SEQ ID NO: 340463 - DNA, 20 bp, Artificial Sequence
  Description of Artificial Sequence: Synthetic oligonucleotide
  Target: LAMA2; (+) strand; PAM type: YTN; PAM sequence: TTA
aattaaaattccatttcccc

SEQ ID NO: 340464 - DNA, 20 bp, Artificial Sequence
  Description of Artificial Sequence: Synthetic oligonucleotide
  Target: LAMA2; (+) strand; PAM type: YTN; PAM sequence: TTA
aaattccatttccccattac

SEQ ID NO: 340465 - DNA, 20 bp, Artificial Sequence
  Description of Artificial Sequence: Synthetic oligonucleotide
  Target: LAMA2; (+) strand; PAM type: YTN; PAM sequence: TTC
catttccccattacactagc

SEQ ID NO: 340466 - DNA, 20 bp, Artificial Sequence
  Description of Artificial Sequence: Synthetic oligonucleotide
  Target: LAMA2; (+) strand; PAM type: YTN; PAM sequence: TTT
ccccattacactagccacat

SEQ ID NO: 340467 - DNA, 20 bp, Artificial Sequence
  Description of Artificial Sequence: Synthetic oligonucleotide
  Target: LAMA2; (+) strand; PAM type: YTN; PAM sequence: TTC
cccattacactagccacatt

SEQ ID NO: 340468 - DNA, 20 bp, Artificial Sequence
  Description of Artificial Sequence: Synthetic oligonucleotide
  Target: LAMA2; (+) strand; PAM type: YTN; PAM sequence: TTA
cactagccacatttcaagta

SEQ ID NO: 340469 - DNA, 20 bp, Artificial Sequence
  Description of Artificial Sequence: Synthetic oligonucleotide
  Target: LAMA2; (+) strand; PAM type: YTN; PAM sequence: CTA
gccacatttcaagtactcag

SEQ ID NO: 340470 - DNA, 20 bp, Artificial Sequence
  Description of Artificial Sequence: Synthetic oligonucleotide
  Target: LAMA2; (+) strand; PAM type: YTN; PAM sequence: TTT
caagtactcagtagccacat

SEQ ID NO: 340471 - DNA, 20 bp, Artificial Sequence
  Description of Artificial Sequence: Synthetic oligonucleotide
  Target: LAMA2; (+) strand; PAM type: YTN; PAM sequence: TTC
aagtactcagtagccacatg

SEQ ID NO: 340472 - DNA, 20 bp, Artificial Sequence
  Description of Artificial Sequence: Synthetic oligonucleotide
  Target: LAMA2; (+) strand; PAM type: YTN; PAM sequence: CTC
agtagccacatgggactagc

SEQ ID NO: 340473 - DNA, 20 bp, Artificial Sequence
  Description of Artificial Sequence: Synthetic oligonucleotide
  Target: LAMA2; (+) strand; PAM type: YTN; PAM sequence: CTA
gcagccaccacactggattg

SEQ ID NO: 340474 - DNA, 20 bp, Artificial Sequence
  Description of Artificial Sequence: Synthetic oligonucleotide
  Target: LAMA2; (+) strand; PAM type: YTN; PAM sequence: CTG
gattgggcagaaagcaacac

SEQ ID NO: 340475 - DNA, 20 bp, Artificial Sequence
  Description of Artificial Sequence: Synthetic oligonucleotide
  Target: LAMA2; (+) strand; PAM type: YTN; PAM sequence: TTG
ggcagaaagcaacactgcca

SEQ ID NO: 340476 - DNA, 20 bp, Artificial Sequence
  Description of Artificial Sequence: Synthetic oligonucleotide
  Target: LAMA2; (+) strand; PAM type: YTN; PAM sequence: CTG
ccattattgcacaaagttct

SEQ ID NO: 340477 - DNA, 20 bp, Artificial Sequence
  Description of Artificial Sequence: Synthetic oligonucleotide
  Target: LAMA2; (+) strand; PAM type: YTN; PAM sequence: TTA
ttgcacaaagttctgttggg

SEQ ID NO: 340478 - DNA, 20 bp, Artificial Sequence
  Description of Artificial Sequence: Synthetic oligonucleotide
  Target: LAMA2; (+) strand; PAM type: YTN; PAM sequence: TTG
cacaaagttctgttgggcaa

SEQ ID NO: 340479 - DNA, 20 bp, Artificial Sequence
  Description of Artificial Sequence: Synthetic oligonucleotide
  Target: LAMA2; (+) strand; PAM type: YTN; PAM sequence: TTC
tgttgggcaatgctacttta

SEQ ID NO: 340480 - DNA, 20 bp, Artificial Sequence
  Description of Artificial Sequence: Synthetic oligonucleotide
  Target: LAMA2; (+) strand; PAM type: YTN; PAM sequence: CTG
ttgggcaatgctactttaga

SEQ ID NO: 340481 - DNA, 20 bp, Artificial Sequence
  Description of Artificial Sequence: Synthetic oligonucleotide
  Target: LAMA2; (+) strand; PAM type: YTN; PAM sequence: TTG
ggcaatgctactttagattg

SEQ ID NO: 340482 - DNA, 20 bp, Artificial Sequence
  Description of Artificial Sequence: Synthetic oligonucleotide
  Target: LAMA2; (+) strand; PAM type: YTN; PAM sequence: CTA
ctttagattgtaccttttta

SEQ ID NO: 340483 - DNA, 20 bp, Artificial Sequence
  Description of Artificial Sequence: Synthetic oligonucleotide
  Target: LAMA2; (+) strand; PAM type: YTN; PAM sequence: CTT
tagattgtacctttttattt

SEQ ID NO: 340484 - DNA, 20 bp, Artificial Sequence
  Description of Artificial Sequence: Synthetic oligonucleotide
  Target: LAMA2; (+) strand; PAM type: YTN; PAM sequence: TTT
agattgtacctttttatttt

SEQ ID NO: 340485 - DNA, 20 bp, Artificial Sequence
  Description of Artificial Sequence: Synthetic oligonucleotide
  Target: LAMA2; (+) strand; PAM type: YTN; PAM sequence: TTA
gattgtacctttttattttc

SEQ ID NO: 340486 - DNA, 20 bp, Artificial Sequence
  Description of Artificial Sequence: Synthetic oligonucleotide
  Target: LAMA2; (+) strand; PAM type: YTN; PAM sequence: TTG
tacctttttattttctacat

SEQ ID NO: 340487 - DNA, 20 bp, Artificial Sequence
  Description of Artificial Sequence: Synthetic oligonucleotide
  Target: LAMA2; (+) strand; PAM type: YTN; PAM sequence: CTT
tttattttctacatatctgc

SEQ ID NO: 340488 - DNA, 20 bp, Artificial Sequence
  Description of Artificial Sequence: Synthetic oligonucleotide
  Target: LAMA2; (+) strand; PAM type: YTN; PAM sequence: TTT
ttattttctacatatctgca

SEQ ID NO: 340489 - DNA, 20 bp, Artificial Sequence
  Description of Artificial Sequence: Synthetic oligonucleotide
  Target: LAMA2; (+) strand; PAM type: YTN; PAM sequence: TTT
tattttctacatatctgcaa

SEQ ID NO: 340490 - DNA, 20 bp, Artificial Sequence
  Description of Artificial Sequence: Synthetic oligonucleotide
  Target: LAMA2; (+) strand; PAM type: YTN; PAM sequence: TTT
attttctacatatctgcaaa

SEQ ID NO: 340491 - DNA, 20 bp, Artificial Sequence
  Description of Artificial Sequence: Synthetic oligonucleotide
  Target: LAMA2; (+) strand; PAM type: YTN; PAM sequence: TTA
ttttctacatatctgcaaag

SEQ ID NO: 340492 - DNA, 20 bp, Artificial Sequence
  Description of Artificial Sequence: Synthetic oligonucleotide
  Target: LAMA2; (+) strand; PAM type: YTN; PAM sequence: TTT
tctacatatctgcaaagtga

SEQ ID NO: 340493 - DNA, 20 bp, Artificial Sequence
  Description of Artificial Sequence: Synthetic oligonucleotide
  Target: LAMA2; (+) strand; PAM type: YTN; PAM sequence: TTT
ctacatatctgcaaagtgat

SEQ ID NO: 340494 - DNA, 20 bp, Artificial Sequence
  Description of Artificial Sequence: Synthetic oligonucleotide
  Target: LAMA2; (+) strand; PAM type: YTN; PAM sequence: TTC
tacatatctgcaaagtgatg

SEQ ID NO: 340495 - DNA, 20 bp, Artificial Sequence
  Description of Artificial Sequence: Synthetic oligonucleotide
  Target: LAMA2; (+) strand; PAM type: YTN; PAM sequence: CTA
catatctgcaaagtgatgtc

SEQ ID NO: 340496 - DNA, 20 bp, Artificial Sequence
  Description of Artificial Sequence: Synthetic oligonucleotide
  Target: LAMA2; (+) strand; PAM type: YTN; PAM sequence: CTG
caaagtgatgtctttcatca

SEQ ID NO: 340497 - DNA, 20 bp, Artificial Sequence
  Description of Artificial Sequence: Synthetic oligonucleotide
  Target: LAMA2; (+) strand; PAM type: YTN; PAM sequence: CTT
tcatcagttcagaaaactgt

SEQ ID NO: 340498 - DNA, 20 bp, Artificial Sequence
  Description of Artificial Sequence: Synthetic oligonucleotide
  Target: LAMA2; (+) strand; PAM type: YTN; PAM sequence: TTT
catcagttcagaaaactgtt

SEQ ID NO: 340499 - DNA, 20 bp, Artificial Sequence
  Description of Artificial Sequence: Synthetic oligonucleotide
  Target: LAMA2; (+) strand; PAM type: YTN; PAM sequence: TTC
atcagttcagaaaactgttc

SEQ ID NO: 340500 - DNA, 20 bp, Artificial Sequence
  Description of Artificial Sequence: Synthetic oligonucleotide
  Target: LAMA2; (+) strand; PAM type: YTN; PAM sequence: TTC
agaaaactgttcagtcatta

SEQ ID NO: 340501 - DNA, 20 bp, Artificial Sequence
  Description of Artificial Sequence: Synthetic oligonucleotide
  Target: LAMA2; (+) strand; PAM type: YTN; PAM sequence: CTG
ttcagtcattacctctctaa

SEQ ID NO: 340502 - DNA, 20 bp, Artificial Sequence
  Description of Artificial Sequence: Synthetic oligonucleotide
  Target: LAMA2; (+) strand; PAM type: YTN; PAM sequence: TTC
agtcattacctctctaaata

SEQ ID NO: 340503 - DNA, 20 bp, Artificial Sequence
  Description of Artificial Sequence: Synthetic oligonucleotide
  Target: LAMA2; (+) strand; PAM type: YTN; PAM sequence: TTA
cctctctaaatattgcttct

SEQ ID NO: 340504 - DNA, 20 bp, Artificial Sequence
  Description of Artificial Sequence: Synthetic oligonucleotide
  Target: LAMA2; (+) strand; PAM type: YTN; PAM sequence: CTC
tctaaatattgcttcttccg

SEQ ID NO: 340505 - DNA, 20 bp, Artificial Sequence
  Description of Artificial Sequence: Synthetic oligonucleotide
  Target: LAMA2; (+) strand; PAM type: YTN; PAM sequence: CTC
taaatattgcttcttccgca

SEQ ID NO: 340506 - DNA, 20 bp, Artificial Sequence
  Description of Artificial Sequence: Synthetic oligonucleotide
  Target: LAMA2; (+) strand; PAM type: YTN; PAM sequence: CTA
aatattgcttcttccgcatt

SEQ ID NO: 340507 - DNA, 20 bp, Artificial Sequence
  Description of Artificial Sequence: Synthetic oligonucleotide
  Target: LAMA2; (+) strand; PAM type: YTN; PAM sequence: TTG
cttcttccgcattccctctg

SEQ ID NO: 340508 - DNA, 20 bp, Artificial Sequence
  Description of Artificial Sequence: Synthetic oligonucleotide
  Target: LAMA2; (+) strand; PAM type: YTN; PAM sequence: CTT
cttccgcattccctctgctc

SEQ ID NO: 340509 - DNA, 20 bp, Artificial Sequence
  Description of Artificial Sequence: Synthetic oligonucleotide
  Target: LAMA2; (+) strand; PAM type: YTN; PAM sequence: TTC
ttccgcattccctctgctct

SEQ ID NO: 340510 - DNA, 20 bp, Artificial Sequence
  Description of Artificial Sequence: Synthetic oligonucleotide
  Target: LAMA2; (+) strand; PAM type: YTN; PAM sequence: CTT
ccgcattccctctgctctat

SEQ ID NO: 340511 - DNA, 20 bp, Artificial Sequence
  Description of Artificial Sequence: Synthetic oligonucleotide
  Target: LAMA2; (+) strand; PAM type: YTN; PAM sequence: TTC
cgcattccctctgctctatg

SEQ ID NO: 340512 - DNA, 20 bp, Artificial Sequence
  Description of Artificial Sequence: Synthetic oligonucleotide
  Target: LAMA2; (+) strand; PAM type: YTN; PAM sequence: TTC
cctctgctctatgattctaa

SEQ ID NO: 340513 - DNA, 20 bp, Artificial Sequence
  Description of Artificial Sequence: Synthetic oligonucleotide
  Target: LAMA2; (+) strand; PAM type: YTN; PAM sequence: CTC
tgctctatgattctaattaa

SEQ ID NO: 340514 - DNA, 20 bp, Artificial Sequence
  Description of Artificial Sequence: Synthetic oligonucleotide
  Target: LAMA2; (+) strand; PAM type: YTN; PAM sequence: CTG
ctctatgattctaattaaaa

SEQ ID NO: 340515 - DNA, 20 bp, Artificial Sequence
  Description of Artificial Sequence: Synthetic oligonucleotide
  Target: LAMA2; (+) strand; PAM type: YTN; PAM sequence: CTC
tatgattctaattaaaaatg

SEQ ID NO: 340516 - DNA, 20 bp, Artificial Sequence
  Description of Artificial Sequence: Synthetic oligonucleotide
  Target: LAMA2; (+) strand; PAM type: YTN; PAM sequence: CTA
tgattctaattaaaaatgac

SEQ ID NO: 340517 - DNA, 20 bp, Artificial Sequence
  Description of Artificial Sequence: Synthetic oligonucleotide
  Target: LAMA2; (+) strand; PAM type: YTN; PAM sequence: TTC
taattaaaaatgacttggaa

SEQ ID NO: 340518 - DNA, 20 bp, Artificial Sequence
  Description of Artificial Sequence: Synthetic oligonucleotide
  Target: LAMA2; (+) strand; PAM type: YTN; PAM sequence: CTA
attaaaaatgacttggaact

SEQ ID NO: 340519 - DNA, 20 bp, Artificial Sequence
  Description of Artificial Sequence: Synthetic oligonucleotide
  Target: LAMA2; (+) strand; PAM type: YTN; PAM sequence: TTA
aaaatgacttggaacttttt

SEQ ID NO: 340520 - DNA, 20 bp, Artificial Sequence
  Description of Artificial Sequence: Synthetic oligonucleotide
  Target: LAMA2; (+) strand; PAM type: YTN; PAM sequence: CTT
ggaactttttactgtataca

SEQ ID NO: 340521 - DNA, 20 bp, Artificial Sequence
  Description of Artificial Sequence: Synthetic oligonucleotide
  Target: LAMA2; (+) strand; PAM type: YTN; PAM sequence: TTG
gaactttttactgtatacac

SEQ ID NO: 340522 - DNA, 20 bp, Artificial Sequence
  Description of Artificial Sequence: Synthetic oligonucleotide
  Target: LAMA2; (+) strand; PAM type: YTN; PAM sequence: CTT
tttactgtatacactatgta

SEQ ID NO: 340523 - DNA, 20 bp, Artificial Sequence
  Description of Artificial Sequence: Synthetic oligonucleotide
  Target: LAMA2; (+) strand; PAM type: YTN; PAM sequence: TTT
ttactgtatacactatgtat

SEQ ID NO: 340524 - DNA, 20 bp, Artificial Sequence
  Description of Artificial Sequence: Synthetic oligonucleotide
  Target: LAMA2; (+) strand; PAM type: YTN; PAM sequence: TTT
tactgtatacactatgtatt

SEQ ID NO: 340525 - DNA, 20 bp, Artificial Sequence
  Description of Artificial Sequence: Synthetic oligonucleotide
  Target: LAMA2; (+) strand; PAM type: YTN; PAM sequence: TTT
actgtatacactatgtattt

SEQ ID NO: 340526 - DNA, 20 bp, Artificial Sequence
  Description of Artificial Sequence: Synthetic oligonucleotide
  Target: LAMA2; (+) strand; PAM type: YTN; PAM sequence: TTA
ctgtatacactatgtatttt

SEQ ID NO: 340527 - DNA, 20 bp, Artificial Sequence
  Description of Artificial Sequence: Synthetic oligonucleotide
  Target: LAMA2; (+) strand; PAM type: YTN; PAM sequence: CTG
tatacactatgtattttaaa

SEQ ID NO: 340528 - DNA, 20 bp, Artificial Sequence
  Description of Artificial Sequence: Synthetic oligonucleotide
  Target: LAMA2; (+) strand; PAM type: YTN; PAM sequence: CTA
tgtattttaaactctcttct

SEQ ID NO: 340529 - DNA, 20 bp, Artificial Sequence
  Description of Artificial Sequence: Synthetic oligonucleotide
  Target: LAMA2; (+) strand; PAM type: YTN; PAM sequence: TTT
taaactctcttctttagttt

SEQ ID NO: 340530 - DNA, 20 bp, Artificial Sequence
  Description of Artificial Sequence: Synthetic oligonucleotide
  Target: LAMA2; (+) strand; PAM type: YTN; PAM sequence: TTT
aaactctcttctttagtttt

SEQ ID NO: 340531 - DNA, 20 bp, Artificial Sequence
  Description of Artificial Sequence: Synthetic oligonucleotide
  Target: LAMA2; (+) strand; PAM type: YTN; PAM sequence: TTA
aactctcttctttagttttc

SEQ ID NO: 340532 - DNA, 20 bp, Artificial Sequence
  Description of Artificial Sequence: Synthetic oligonucleotide
  Target: LAMA2; (+) strand; PAM type: YTN; PAM sequence: CTC
tcttctttagttttcatcct

SEQ ID NO: 340533 - DNA, 20 bp, Artificial Sequence
  Description of Artificial Sequence: Synthetic oligonucleotide
  Target: LAMA2; (+) strand; PAM type: YTN; PAM sequence: CTC
ttctttagttttcatccttt

SEQ ID NO: 340534 - DNA, 20 bp, Artificial Sequence
  Description of Artificial Sequence: Synthetic oligonucleotide
  Target: LAMA2; (+) strand; PAM type: YTN; PAM sequence: CTT
ctttagttttcatccttttg

SEQ ID NO: 340535 - DNA, 20 bp, Artificial Sequence
  Description of Artificial Sequence: Synthetic oligonucleotide
  Target: LAMA2; (+) strand; PAM type: YTN; PAM sequence: TTC
tttagttttcatccttttgt

SEQ ID NO: 340536 - DNA, 20 bp, Artificial Sequence
  Description of Artificial Sequence: Synthetic oligonucleotide
  Target: LAMA2; (+) strand; PAM type: YTN; PAM sequence: CTT
tagttttcatccttttgtct

SEQ ID NO: 340537 - DNA, 20 bp, Artificial Sequence
  Description of Artificial Sequence: Synthetic oligonucleotide
  Target: LAMA2; (+) strand; PAM type: YTN; PAM sequence: TTT
agttttcatccttttgtctt

SEQ ID NO: 340538 - DNA, 20 bp, Artificial Sequence
  Description of Artificial Sequence: Synthetic oligonucleotide
  Target: LAMA2; (+) strand; PAM type: YTN; PAM sequence: TTA
gttttcatccttttgtcttt

SEQ ID NO: 340539 - DNA, 20 bp, Artificial Sequence
  Description of Artificial Sequence: Synthetic oligonucleotide
  Target: LAMA2; (+) strand; PAM type: YTN; PAM sequence: TTT
tcatccttttgtctttctgt

SEQ ID NO: 340540 - DNA, 20 bp, Artificial Sequence
  Description of Artificial Sequence: Synthetic oligonucleotide
  Target: LAMA2; (+) strand; PAM type: YTN; PAM sequence: TTT
catccttttgtctttctgta

SEQ ID NO: 340541 - DNA, 20 bp, Artificial Sequence
  Description of Artificial Sequence: Synthetic oligonucleotide
  Target: LAMA2; (+) strand; PAM type: YTN; PAM sequence: TTC
atccttttgtctttctgtat

SEQ ID NO: 340542 - DNA, 20 bp, Artificial Sequence
  Description of Artificial Sequence: Synthetic oligonucleotide
  Target: LAMA2; (+) strand; PAM type: YTN; PAM sequence: CTT
ttgtctttctgtatcttcat

SEQ ID NO: 340543 - DNA, 20 bp, Artificial Sequence
  Description of Artificial Sequence: Synthetic oligonucleotide
  Target: LAMA2; (+) strand; PAM type: YTN; PAM sequence: TTT
tgtctttctgtatcttcatt

SEQ ID NO: 340544 - DNA, 20 bp, Artificial Sequence
  Description of Artificial Sequence: Synthetic oligonucleotide
  Target: LAMA2; (+) strand; PAM type: YTN; PAM sequence: TTT
gtctttctgtatcttcattc

SEQ ID NO: 340545 - DNA, 20 bp, Artificial Sequence
  Description of Artificial Sequence: Synthetic oligonucleotide
  Target: LAMA2; (+) strand; PAM type: YTN; PAM sequence: TTG
tctttctgtatcttcattct

SEQ ID NO: 340546 - DNA, 20 bp, Artificial Sequence
  Description of Artificial Sequence: Synthetic oligonucleotide
  Target: LAMA2; (+) strand; PAM type: YTN; PAM sequence: CTT
tctgtatcttcattctaggt

SEQ ID NO: 340547 - DNA, 20 bp, Artificial Sequence
  Description of Artificial Sequence: Synthetic oligonucleotide
  Target: LAMA2; (+) strand; PAM type: YTN; PAM sequence: TTT
ctgtatcttcattctaggta

SEQ ID NO: 340548 - DNA, 20 bp, Artificial Sequence
  Description of Artificial Sequence: Synthetic oligonucleotide
  Target: LAMA2; (+) strand; PAM type: YTN; PAM sequence: TTC
tgtatcttcattctaggtat

SEQ ID NO: 340549 - DNA, 20 bp, Artificial Sequence
  Description of Artificial Sequence: Synthetic oligonucleotide
  Target: LAMA2; (+) strand; PAM type: YTN; PAM sequence: CTG
tatcttcattctaggtattt

SEQ ID NO: 340550 - DNA, 20 bp, Artificial Sequence
  Description of Artificial Sequence: Synthetic oligonucleotide
  Target: LAMA2; (+) strand; PAM type: YTN; PAM sequence: CTT
cattctaggtattttcttct

SEQ ID NO: 340551 - DNA, 20 bp, Artificial Sequence
  Description of Artificial Sequence: Synthetic oligonucleotide
  Target: LAMA2; (+) strand; PAM type: YTN; PAM sequence: TTC
attctaggtattttcttctg

SEQ ID NO: 340552 - DNA, 20 bp, Artificial Sequence
  Description of Artificial Sequence: Synthetic oligonucleotide
  Target: LAMA2; (+) strand; PAM type: YTN; PAM sequence: TTC
taggtattttcttctggatt

SEQ ID NO: 340553 - DNA, 20 bp, Artificial Sequence
  Description of Artificial Sequence: Synthetic oligonucleotide
  Target: LAMA2; (+) strand; PAM type: YTN; PAM sequence: CTA
ggtattttcttctggattac

SEQ ID NO: 340554 - DNA, 20 bp, Artificial Sequence
  Description of Artificial Sequence: Synthetic oligonucleotide
  Target: LAMA2; (+) strand; PAM type: YTN; PAM sequence: TTT
tcttctggattacttctagt

SEQ ID NO: 340555 - DNA, 20 bp, Artificial Sequence
  Description of Artificial Sequence: Synthetic oligonucleotide
  Target: LAMA2; (+) strand; PAM type: YTN; PAM sequence: TTT
cttctggattacttctagtt

SEQ ID NO: 340556 - DNA, 20 bp, Artificial Sequence
  Description of Artificial Sequence: Synthetic oligonucleotide
  Target: LAMA2; (+) strand; PAM type: YTN; PAM sequence: TTC
ttctggattacttctagttc

SEQ ID NO: 340557 - DNA, 20 bp, Artificial Sequence
  Description of Artificial Sequence: Synthetic oligonucleotide
  Target: LAMA2; (+) strand; PAM type: YTN; PAM sequence: CTT
ctggattacttctagttcat

SEQ ID NO: 340558 - DNA, 20 bp, Artificial Sequence
  Description of Artificial Sequence: Synthetic oligonucleotide
  Target: LAMA2; (+) strand; PAM type: YTN; PAM sequence: TTC
tggattacttctagttcatt

SEQ ID NO: 340559 - DNA, 20 bp, Artificial Sequence
  Description of Artificial Sequence: Synthetic oligonucleotide
  Target: LAMA2; (+) strand; PAM type: YTN; PAM sequence: CTG
gattacttctagttcattaa

SEQ ID NO: 340560 - DNA, 20 bp, Artificial Sequence
  Description of Artificial Sequence: Synthetic oligonucleotide
  Target: LAMA2; (+) strand; PAM type: YTN; PAM sequence: TTA
cttctagttcattaattctc

SEQ ID NO: 340561 - DNA, 20 bp, Artificial Sequence
  Description of Artificial Sequence: Synthetic oligonucleotide
  Target: LAMA2; (+) strand; PAM type: YTN; PAM sequence: CTT
ctagttcattaattctcttc

SEQ ID NO: 340562 - DNA, 20 bp, Artificial Sequence
  Description of Artificial Sequence: Synthetic oligonucleotide
  Target: LAMA2; (+) strand; PAM type: YTN; PAM sequence: TTC
tagttcattaattctcttct

SEQ ID NO: 340563 - DNA, 20 bp, Artificial Sequence
  Description of Artificial Sequence: Synthetic oligonucleotide
  Target: LAMA2; (+) strand; PAM type: YTN; PAM sequence: CTA
gttcattaattctcttctca

SEQ ID NO: 340564 - DNA, 20 bp, Artificial Sequence
  Description of Artificial Sequence: Synthetic oligonucleotide
  Target: LAMA2; (+) strand; PAM type: YTN; PAM sequence: TTC
attaattctcttctcagcta

SEQ ID NO: 340565 - DNA, 20 bp, Artificial Sequence
  Description of Artificial Sequence: Synthetic oligonucleotide
  Target: LAMA2; (+) strand; PAM type: YTN; PAM sequence: TTA
attctcttctcagctatgta

SEQ ID NO: 340566 - DNA, 20 bp, Artificial Sequence
  Description of Artificial Sequence: Synthetic oligonucleotide
  Target: LAMA2; (+) strand; PAM type: YTN; PAM sequence: TTC
tcttctcagctatgtaaata

SEQ ID NO: 340567 - DNA, 20 bp, Artificial Sequence
  Description of Artificial Sequence: Synthetic oligonucleotide
  Target: LAMA2; (+) strand; PAM type: YTN; PAM sequence: CTC
ttctcagctatgtaaatatt

SEQ ID NO: 340568 - DNA, 20 bp, Artificial Sequence
  Description of Artificial Sequence: Synthetic oligonucleotide
  Target: LAMA2; (+) strand; PAM type: YTN; PAM sequence: CTT
ctcagctatgtaaatattgc

SEQ ID NO: 340569 - DNA, 20 bp, Artificial Sequence
  Description of Artificial Sequence: Synthetic oligonucleotide
  Target: LAMA2; (+) strand; PAM type: YTN; PAM sequence: TTC
tcagctatgtaaatattgct

SEQ ID NO: 340570 - DNA, 20 bp, Artificial Sequence
  Description of Artificial Sequence: Synthetic oligonucleotide
  Target: LAMA2; (+) strand; PAM type: YTN; PAM sequence: CTC
agctatgtaaatattgctat

SEQ ID NO: 340571 - DNA, 20 bp, Artificial Sequence
  Description of Artificial Sequence: Synthetic oligonucleotide
  Target: LAMA2; (+) strand; PAM type: YTN; PAM sequence: CTA
tgtaaatattgctattaaag

SEQ ID NO: 340572 - DNA, 20 bp, Artificial Sequence
  Description of Artificial Sequence: Synthetic oligonucleotide
  Target: LAMA2; (+) strand; PAM type: YTN; PAM sequence: TTG
ctattaaagttattcatagg

SEQ ID NO: 340573 - DNA, 20 bp, Artificial Sequence
  Description of Artificial Sequence: Synthetic oligonucleotide
  Target: LAMA2; (+) strand; PAM type: YTN; PAM sequence: CTA
ttaaagttattcataggatt

SEQ ID NO: 340574 - DNA, 20 bp, Artificial Sequence
  Description of Artificial Sequence: Synthetic oligonucleotide
  Target: LAMA2; (+) strand; PAM type: YTN; PAM sequence: TTA
aagttattcataggattctt

SEQ ID NO: 340575 - DNA, 20 bp, Artificial Sequence
  Description of Artificial Sequence: Synthetic oligonucleotide
  Target: LAMA2; (+) strand; PAM type: YTN; PAM sequence: TTA
ttcataggattcttaatttc

SEQ ID NO: 340576 - DNA, 20 bp, Artificial Sequence
  Description of Artificial Sequence: Synthetic oligonucleotide
  Target: LAMA2; (+) strand; PAM type: YTN; PAM sequence: TTC
ataggattcttaatttcata

SEQ ID NO: 340577 - DNA, 20 bp, Artificial Sequence
  Description of Artificial Sequence: Synthetic oligonucleotide
  Target: LAMA2; (+) strand; PAM type: YTN; PAM sequence: TTC
ttaatttcatatatttttca

SEQ ID NO: 340578 - DNA, 20 bp, Artificial Sequence
  Description of Artificial Sequence: Synthetic oligonucleotide
  Target: LAMA2; (+) strand; PAM type: YTN; PAM sequence: CTT
aatttcatatatttttcagt

SEQ ID NO: 340579 - DNA, 20 bp, Artificial Sequence
  Description of Artificial Sequence: Synthetic oligonucleotide
  Target: LAMA2; (+) strand; PAM type: YTN; PAM sequence: TTA
atttcatatatttttcagtt

SEQ ID NO: 340580 - DNA, 20 bp, Artificial Sequence
  Description of Artificial Sequence: Synthetic oligonucleotide
  Target: LAMA2; (+) strand; PAM type: YTN; PAM sequence: TTT
catatatttttcagtttcta

SEQ ID NO: 340581 - DNA, 20 bp, Artificial Sequence
  Description of Artificial Sequence: Synthetic oligonucleotide
  Target: LAMA2; (+) strand; PAM type: YTN; PAM sequence: TTC
atatatttttcagtttctaa

SEQ ID NO: 340582 - DNA, 20 bp, Artificial Sequence
  Description of Artificial Sequence: Synthetic oligonucleotide
  Target: LAMA2; (+) strand; PAM type: YTN; PAM sequence: TTT
ttcagtttctaaatttctct

SEQ ID NO: 340583 - DNA, 20 bp, Artificial Sequence
  Description of Artificial Sequence: Synthetic oligonucleotide
  Target: LAMA2; (+) strand; PAM type: YTN; PAM sequence: TTT
tcagtttctaaatttctctg

SEQ ID NO: 340584 - DNA, 20 bp, Artificial Sequence
  Description of Artificial Sequence: Synthetic oligonucleotide
  Target: LAMA2; (+) strand; PAM type: YTN; PAM sequence: TTT
cagtttctaaatttctctgg

SEQ ID NO: 340585 - DNA, 20 bp, Artificial Sequence
  Description of Artificial Sequence: Synthetic oligonucleotide
  Target: LAMA2; (+) strand; PAM type: YTN; PAM sequence: TTC
agtttctaaatttctctggt

SEQ ID NO: 340586 - DNA, 20 bp, Artificial Sequence
  Description of Artificial Sequence: Synthetic oligonucleotide
  Target: LAMA2; (+) strand; PAM type: YTN; PAM sequence: TTT
ctaaatttctctggttcatt

SEQ ID NO: 340587 - DNA, 20 bp, Artificial Sequence
  Description of Artificial Sequence: Synthetic oligonucleotide
  Target: LAMA2; (+) strand; PAM type: YTN; PAM sequence: TTC
taaatttctctggttcattt

SEQ ID NO: 340588 - DNA, 20 bp, Artificial Sequence
  Description of Artificial Sequence: Synthetic oligonucleotide
  Target: LAMA2; (+) strand; PAM type: YTN; PAM sequence: CTA
aatttctctggttcattttc

SEQ ID NO: 340589 - DNA, 20 bp, Artificial Sequence
  Description of Artificial Sequence: Synthetic oligonucleotide
  Target: LAMA2; (+) strand; PAM type: YTN; PAM sequence: TTT
ctctggttcattttcttttt

SEQ ID NO: 340590 - DNA, 20 bp, Artificial Sequence
  Description of Artificial Sequence: Synthetic oligonucleotide
  Target: LAMA2; (+) strand; PAM type: YTN; PAM sequence: TTC
tctggttcattttctttttt

SEQ ID NO: 340591 - DNA, 20 bp, Artificial Sequence
  Description of Artificial Sequence: Synthetic oligonucleotide
  Target: LAMA2; (+) strand; PAM type: YTN; PAM sequence: CTC
tggttcattttctttttttc

SEQ ID NO: 340592 - DNA, 20 bp, Artificial Sequence
  Description of Artificial Sequence: Synthetic oligonucleotide
  Target: LAMA2; (+) strand; PAM type: YTN; PAM sequence: CTG
gttcattttctttttttctt

SEQ ID NO: 340593 - DNA, 20 bp, Artificial Sequence
  Description of Artificial Sequence: Synthetic oligonucleotide
  Target: LAMA2; (+) strand; PAM type: YTN; PAM sequence: TTC
attttctttttttctttctt

SEQ ID NO: 340594 - DNA, 20 bp, Artificial Sequence
  Description of Artificial Sequence: Synthetic oligonucleotide
  Target: LAMA2; (+) strand; PAM type: YTN; PAM sequence: TTT
tctttttttctttctttctt

SEQ ID NO: 340595 - DNA, 20 bp, Artificial Sequence
  Description of Artificial Sequence: Synthetic oligonucleotide
  Target: LAMA2; (+) strand; PAM type: YTN; PAM sequence: TTT
ctttttttctttctttcttt

SEQ ID NO: 340596 - DNA, 20 bp, Artificial Sequence
  Description of Artificial Sequence: Synthetic oligonucleotide
  Target: LAMA2; (+) strand; PAM type: YTN; PAM sequence: TTC
tttttttctttctttctttt

SEQ ID NO: 340597 - DNA, 20 bp, Artificial Sequence
  Description of Artificial Sequence: Synthetic oligonucleotide
  Target: LAMA2; (+) strand; PAM type: YTN; PAM sequence: CTT
tttttctttctttctttttt

SEQ ID NO: 340598 - DNA, 20 bp, Artificial Sequence
  Description of Artificial Sequence: Synthetic oligonucleotide
  Target: LAMA2; (+) strand; PAM type: YTN; PAM sequence: TTT
ttttctttctttcttttttt

SEQ ID NO: 340599 - DNA, 20 bp, Artificial Sequence
  Description of Artificial Sequence: Synthetic oligonucleotide
  Target: LAMA2; (+) strand; PAM type: YTN; PAM sequence: TTT
tttctttctttctttttttt

SEQ ID NO: 340600 - DNA, 20 bp, Artificial Sequence
  Description of Artificial Sequence: Synthetic oligonucleotide
  Target: LAMA2; (+) strand; PAM type: YTN; PAM sequence: TTT
ttctttctttcttttttttt

SEQ ID NO: 340601 - DNA, 20 bp, Artificial Sequence
  Description of Artificial Sequence: Synthetic oligonucleotide
  Target: LAMA2; (+) strand; PAM type: YTN; PAM sequence: TTT
tctttctttctttttttttt

SEQ ID NO: 340602 - DNA, 20 bp, Artificial Sequence
  Description of Artificial Sequence: Synthetic oligonucleotide
  Target: LAMA2; (+) strand; PAM type: YTN; PAM sequence: TTT
ctttctttcttttttttttt

SEQ ID NO: 340603 - DNA, 20 bp, Artificial Sequence
  Description of Artificial Sequence: Synthetic oligonucleotide
  Target: LAMA2; (+) strand; PAM type: YTN; PAM sequence: TTC
tttctttctttttttttttt

SEQ ID NO: 340604 - DNA, 20 bp, Artificial Sequence
  Description of Artificial Sequence: Synthetic oligonucleotide
  Target: LAMA2; (+) strand; PAM type: YTN; PAM sequence: CTT
tctttctttttttttttttt

SEQ ID NO: 340605 - DNA, 20 bp, Artificial Sequence
  Description of Artificial Sequence: Synthetic oligonucleotide
  Target: LAMA2; (+) strand; PAM type: YTN; PAM sequence: TTT
ctttcttttttttttttttt

SEQ ID NO: 340606 - DNA, 20 bp, Artificial Sequence
  Description of Artificial Sequence: Synthetic oligonucleotide
  Target: LAMA2; (+) strand; PAM type: YTN; PAM sequence: TTC
tttctttttttttttttttt

SEQ ID NO: 340607 - DNA, 20 bp, Artificial Sequence
  Description of Artificial Sequence: Synthetic oligonucleotide
  Target: LAMA2; (+) strand; PAM type: YTN; PAM sequence: CTT
tcttttttttttttttttga

SEQ ID NO: 340608 - DNA, 20 bp, Artificial Sequence
  Description of Artificial Sequence: Synthetic oligonucleotide
  Target: LAMA2; (+) strand; PAM type: YTN; PAM sequence: TTT
cttttttttttttttttgag

SEQ ID NO: 340609 - DNA, 20 bp, Artificial Sequence
  Description of Artificial Sequence: Synthetic oligonucleotide
  Target: LAMA2; (+) strand; PAM type: YTN; PAM sequence: TTC
ttttttttttttttttgaga

SEQ ID NO: 340610 - DNA, 20 bp, Artificial Sequence
  Description of Artificial Sequence: Synthetic oligonucleotide
  Target: LAMA2; (+) strand; PAM type: YTN; PAM sequence: CTT
ttttttttttttttgagacc

SEQ ID NO: 340611 - DNA, 20 bp, Artificial Sequence
  Description of Artificial Sequence: Synthetic oligonucleotide
  Target: LAMA2; (+) strand; PAM type: YTN; PAM sequence: TTT
tttttttttttttgagaccg

SEQ ID NO: 340612 - DNA, 20 bp, Artificial Sequence
  Description of Artificial Sequence: Synthetic oligonucleotide
  Target: LAMA2; (+) strand; PAM type: YTN; PAM sequence: TTT
ttttttttttttgagaccga

SEQ ID NO: 340613 - DNA, 20 bp, Artificial Sequence
  Description of Artificial Sequence: Synthetic oligonucleotide
  Target: LAMA2; (+) strand; PAM type: YTN; PAM sequence: TTT
tttttttttttgagaccgag

SEQ ID NO: 340614 - DNA, 20 bp, Artificial Sequence
  Description of Artificial Sequence: Synthetic oligonucleotide
  Target: LAMA2; (+) strand; PAM type: YTN; PAM sequence: TTT
ttttttttttgagaccgagt

SEQ ID NO: 340615 - DNA, 20 bp, Artificial Sequence
  Description of Artificial Sequence: Synthetic oligonucleotide
  Target: LAMA2; (+) strand; PAM type: YTN; PAM sequence: TTT
tttttttttgagaccgagtc

SEQ ID NO: 340616 - DNA, 20 bp, Artificial Sequence
  Description of Artificial Sequence: Synthetic oligonucleotide
  Target: LAMA2; (+) strand; PAM type: YTN; PAM sequence: TTT
ttttttttgagaccgagtct

SEQ ID NO: 340617 - DNA, 20 bp, Artificial Sequence
  Description of Artificial Sequence: Synthetic oligonucleotide
  Target: LAMA2; (+) strand; PAM type: YTN; PAM sequence: TTT
tttttttgagaccgagtctc

SEQ ID NO: 340618 - DNA, 20 bp, Artificial Sequence
  Description of Artificial Sequence: Synthetic oligonucleotide
  Target: LAMA2; (+) strand; PAM type: YTN; PAM sequence: TTT
ttttttgagaccgagtctcg

SEQ ID NO: 340619 - DNA, 20 bp, Artificial Sequence
  Description of Artificial Sequence: Synthetic oligonucleotide
  Target: LAMA2; (+) strand; PAM type: YTN; PAM sequence: TTT
tttttgagaccgagtctcgc

SEQ ID NO: 340620 - DNA, 20 bp, Artificial Sequence
  Description of Artificial Sequence: Synthetic oligonucleotide
  Target: LAMA2; (+) strand; PAM type: YTN; PAM sequence: TTT
ttttgagaccgagtctcgct

SEQ ID NO: 340621 - DNA, 20 bp, Artificial Sequence
  Description of Artificial Sequence: Synthetic oligonucleotide
  Target: LAMA2; (+) strand; PAM type: YTN; PAM sequence: TTT
tttgagaccgagtctcgctc

SEQ ID NO: 340622 - DNA, 20 bp, Artificial Sequence
  Description of Artificial Sequence: Synthetic oligonucleotide
  Target: LAMA2; (+) strand; PAM type: YTN; PAM sequence: TTT
ttgagaccgagtctcgctct

SEQ ID NO: 340623 - DNA, 20 bp, Artificial Sequence
  Description of Artificial Sequence: Synthetic oligonucleotide
  Target: LAMA2; (+) strand; PAM type: YTN; PAM sequence: TTT
tgagaccgagtctcgctctg

SEQ ID NO: 340624 - DNA, 20 bp, Artificial Sequence
  Description of Artificial Sequence: Synthetic oligonucleotide
  Target: LAMA2; (+) strand; PAM type: YTN; PAM sequence: TTT
gagaccgagtctcgctctgt

SEQ ID NO: 340625 - DNA, 20 bp, Artificial Sequence
  Description of Artificial Sequence: Synthetic oligonucleotide
  Target: LAMA2; (+) strand; PAM type: YTN; PAM sequence: TTG
agaccgagtctcgctctgtc

SEQ ID NO: 340626 - DNA, 20 bp, Artificial Sequence
  Description of Artificial Sequence: Synthetic oligonucleotide
  Target: LAMA2; (+) strand; PAM type: YTN; PAM sequence: CTC
gctctgtcacccaggctgga

SEQ ID NO: 340627 - DNA, 20 bp, Artificial Sequence
  Description of Artificial Sequence: Synthetic oligonucleotide
  Target: LAMA2; (+) strand; PAM type: YTN; PAM sequence: CTC
tgtcacccaggctggagtgc

SEQ ID NO: 340628 - DNA, 20 bp, Artificial Sequence
  Description of Artificial Sequence: Synthetic oligonucleotide
  Target: LAMA2; (+) strand; PAM type: YTN; PAM sequence: CTG
tcacccaggctggagtgcag

SEQ ID NO: 340629 - DNA, 20 bp, Artificial Sequence
  Description of Artificial Sequence: Synthetic oligonucleotide
  Target: LAMA2; (+) strand; PAM type: YTN; PAM sequence: CTG
gagtgcagtggcgccatctc

SEQ ID NO: 340630 - DNA, 20 bp, Artificial Sequence
  Description of Artificial Sequence: Synthetic oligonucleotide
  Target: LAMA2; (+) strand; PAM type: YTN; PAM sequence: CTC
agctcactgtaacctccgcc

SEQ ID NO: 340631 - DNA, 20 bp, Artificial Sequence
  Description of Artificial Sequence: Synthetic oligonucleotide
  Target: LAMA2; (+) strand; PAM type: YTN; PAM sequence: CTC
actgtaacctccgcctcccg

SEQ ID NO: 340632 - DNA, 20 bp, Artificial Sequence
  Description of Artificial Sequence: Synthetic oligonucleotide
  Target: LAMA2; (+) strand; PAM type: YTN; PAM sequence: CTG
taacctccgcctcccgggtt

SEQ ID NO: 340633 - DNA, 20 bp, Artificial Sequence
  Description of Artificial Sequence: Synthetic oligonucleotide
  Target: LAMA2; (+) strand; PAM type: YTN; PAM sequence: CTC
cgcctcccgggttcccgggt

SEQ ID NO: 340634 - DNA, 20 bp, Artificial Sequence
  Description of Artificial Sequence: Synthetic oligonucleotide
  Target: LAMA2; (+) strand; PAM type: YTN; PAM sequence: CTC
ccgggttcccgggttcaagt

SEQ ID NO: 340635 - DNA, 20 bp, Artificial Sequence
  Description of Artificial Sequence: Synthetic oligonucleotide
  Target: LAMA2; (+) strand; PAM type: YTN; PAM sequence: TTC
ccgggttcaagtggttctcc

SEQ ID NO: 340636 - DNA, 20 bp, Artificial Sequence
  Description of Artificial Sequence: Synthetic oligonucleotide
  Target: LAMA2; (+) strand; PAM type: YTN; PAM sequence: TTC
aagtggttctcctgcctcag

SEQ ID NO: 340637 - DNA, 20 bp, Artificial Sequence
  Description of Artificial Sequence: Synthetic oligonucleotide
  Target: LAMA2; (+) strand; PAM type: YTN; PAM sequence: TTC
tcctgcctcagcctcctgag

SEQ ID NO: 340638 - DNA, 20 bp, Artificial Sequence
  Description of Artificial Sequence: Synthetic oligonucleotide
  Target: LAMA2; (+) strand; PAM type: YTN; PAM sequence: CTC
ctgcctcagcctcctgagta

SEQ ID NO: 340639 - DNA, 20 bp, Artificial Sequence
  Description of Artificial Sequence: Synthetic oligonucleotide
  Target: LAMA2; (+) strand; PAM type: YTN; PAM sequence: CTG
cctcagcctcctgagtagct

SEQ ID NO: 340640 - DNA, 20 bp, Artificial Sequence
  Description of Artificial Sequence: Synthetic oligonucleotide
  Target: LAMA2; (+) strand; PAM type: YTN; PAM sequence: CTC
agcctcctgagtagctggga

SEQ ID NO: 340641 - DNA, 20 bp, Artificial Sequence
  Description of Artificial Sequence: Synthetic oligonucleotide
  Target: LAMA2; (+) strand; PAM type: YTN; PAM sequence: CTC
ctgagtagctgggattacag

SEQ ID NO: 340642 - DNA, 20 bp, Artificial Sequence
  Description of Artificial Sequence: Synthetic oligonucleotide
  Target: LAMA2; (+) strand; PAM type: YTN; PAM sequence: CTG
agtagctgggattacaggcg

SEQ ID NO: 340643 - DNA, 20 bp, Artificial Sequence
  Description of Artificial Sequence: Synthetic oligonucleotide
  Target: LAMA2; (+) strand; PAM type: YTN; PAM sequence: CTG
ggattacaggcgcgtgccac

SEQ ID NO: 340644 - DNA, 20 bp, Artificial Sequence
  Description of Artificial Sequence: Synthetic oligonucleotide
  Target: LAMA2; (+) strand; PAM type: YTN; PAM sequence: TTA
caggcgcgtgccaccatgtc

SEQ ID NO: 340645 - DNA, 20 bp, Artificial Sequence
  Description of Artificial Sequence: Synthetic oligonucleotide
  Target: LAMA2; (+) strand; PAM type: YTN; PAM sequence: CTT
gatttttgtgttttcagtac

SEQ ID NO: 340646 - DNA, 20 bp, Artificial Sequence
  Description of Artificial Sequence: Synthetic oligonucleotide
  Target: LAMA2; (+) strand; PAM type: YTN; PAM sequence: TTG
atttttgtgttttcagtaca

SEQ ID NO: 340647 - DNA, 20 bp, Artificial Sequence
  Description of Artificial Sequence: Synthetic oligonucleotide
  Target: LAMA2; (+) strand; PAM type: YTN; PAM sequence: TTT
ttgtgttttcagtacagaca

SEQ ID NO: 340648 - DNA, 20 bp, Artificial Sequence
  Description of Artificial Sequence: Synthetic oligonucleotide
  Target: LAMA2; (+) strand; PAM type: YTN; PAM sequence: TTT
tgtgttttcagtacagacag

SEQ ID NO: 340649 - DNA, 20 bp, Artificial Sequence
  Description of Artificial Sequence: Synthetic oligonucleotide
  Target: LAMA2; (+) strand; PAM type: YTN; PAM sequence: TTT
gtgttttcagtacagacagg

SEQ ID NO: 340650 - DNA, 20 bp, Artificial Sequence
  Description of Artificial Sequence: Synthetic oligonucleotide
  Target: LAMA2; (+) strand; PAM type: YTN; PAM sequence: TTG
tgttttcagtacagacaggg

SEQ ID NO: 340651 - DNA, 20 bp, Artificial Sequence
  Description of Artificial Sequence: Synthetic oligonucleotide
  Target: LAMA2; (+) strand; PAM type: YTN; PAM sequence: TTT
tcagtacagacagggtttca

SEQ ID NO: 340652 - DNA, 20 bp, Artificial Sequence
  Description of Artificial Sequence: Synthetic oligonucleotide
  Target: LAMA2; (+) strand; PAM type: YTN; PAM sequence: TTT
cagtacagacagggtttcac

SEQ ID NO: 340653 - DNA, 20 bp, Artificial Sequence
  Description of Artificial Sequence: Synthetic oligonucleotide
  Target: LAMA2; (+) strand; PAM type: YTN; PAM sequence: TTC
agtacagacagggtttcacc

SEQ ID NO: 340654 - DNA, 20 bp, Artificial Sequence
  Description of Artificial Sequence: Synthetic oligonucleotide
  Target: LAMA2; (+) strand; PAM type: YTN; PAM sequence: TTT
caccatgttggtcaggatgg

SEQ ID NO: 340655 - DNA, 20 bp, Artificial Sequence
  Description of Artificial Sequence: Synthetic oligonucleotide
  Target: LAMA2; (+) strand; PAM type: YTN; PAM sequence: TTC
accatgttggtcaggatggt

SEQ ID NO: 340656 - DNA, 20 bp, Artificial Sequence
  Description of Artificial Sequence: Synthetic oligonucleotide
  Target: LAMA2; (+) strand; PAM type: YTN; PAM sequence: TTG
gtcaggatggtctcgatctc

SEQ ID NO: 340657 - DNA, 20 bp, Artificial Sequence
  Description of Artificial Sequence: Synthetic oligonucleotide
  Target: LAMA2; (+) strand; PAM type: YTN; PAM sequence: CTC
gatctcttgacctcatgatc

SEQ ID NO: 340658 - DNA, 20 bp, Artificial Sequence
  Description of Artificial Sequence: Synthetic oligonucleotide
  Target: LAMA2; (+) strand; PAM type: YTN; PAM sequence: CTC
ttgacctcatgatctgccca

SEQ ID NO: 340659 - DNA, 20 bp, Artificial Sequence
  Description of Artificial Sequence: Synthetic oligonucleotide
  Target: LAMA2; (+) strand; PAM type: YTN; PAM sequence: CTT
gacctcatgatctgcccacc

SEQ ID NO: 340660 - DNA, 20 bp, Artificial Sequence
  Description of Artificial Sequence: Synthetic oligonucleotide
  Target: LAMA2; (+) strand; PAM type: YTN; PAM sequence: TTG
acctcatgatctgcccacct

SEQ ID NO: 340661 - DNA, 20 bp, Artificial Sequence
  Description of Artificial Sequence: Synthetic oligonucleotide
  Target: LAMA2; (+) strand; PAM type: YTN; PAM sequence: CTC
atgatctgcccaccttggcc

SEQ ID NO: 340662 - DNA, 20 bp, Artificial Sequence
  Description of Artificial Sequence: Synthetic oligonucleotide
  Target: LAMA2; (+) strand; PAM type: YTN; PAM sequence: CTG
cccaccttggcctcccaaag

SEQ ID NO: 340663 - DNA, 20 bp, Artificial Sequence
  Description of Artificial Sequence: Synthetic oligonucleotide
  Target: LAMA2; (+) strand; PAM type: YTN; PAM sequence: CTT
ggcctcccaaagtgctagga

SEQ ID NO: 340664 - DNA, 20 bp, Artificial Sequence
  Description of Artificial Sequence: Synthetic oligonucleotide
  Target: LAMA2; (+) strand; PAM type: YTN; PAM sequence: TTG
gcctcccaaagtgctaggat

SEQ ID NO: 340665 - DNA, 20 bp, Artificial Sequence
  Description of Artificial Sequence: Synthetic oligonucleotide
  Target: LAMA2; (+) strand; PAM type: YTN; PAM sequence: CTC
ccaaagtgctaggattacag

SEQ ID NO: 340666 - DNA, 20 bp, Artificial Sequence
  Description of Artificial Sequence: Synthetic oligonucleotide
  Target: LAMA2; (+) strand; PAM type: YTN; PAM sequence: CTA
ggattacaggcatgagccac

SEQ ID NO: 340667 - DNA, 20 bp, Artificial Sequence
  Description of Artificial Sequence: Synthetic oligonucleotide
  Target: LAMA2; (+) strand; PAM type: YTN; PAM sequence: TTA
caggcatgagccactgtgcc

SEQ ID NO: 340668 - DNA, 20 bp, Artificial Sequence
  Description of Artificial Sequence: Synthetic oligonucleotide
  Target: LAMA2; (+) strand; PAM type: YTN; PAM sequence: CTG
tgcccagcctggttcatttt

SEQ ID NO: 340669 - DNA, 20 bp, Artificial Sequence
  Description of Artificial Sequence: Synthetic oligonucleotide
  Target: LAMA2; (+) strand; PAM type: YTN; PAM sequence: CTG
gttcattttcaaatagaagt

SEQ ID NO: 340670 - DNA, 20 bp, Artificial Sequence
  Description of Artificial Sequence: Synthetic oligonucleotide
  Target: LAMA2; (+) strand; PAM type: YTN; PAM sequence: TTC
attttcaaatagaagttgtt

SEQ ID NO: 340671 - DNA, 20 bp, Artificial Sequence
  Description of Artificial Sequence: Synthetic oligonucleotide
  Target: LAMA2; (+) strand; PAM type: YTN; PAM sequence: TTT
tcaaatagaagttgtttctc

SEQ ID NO: 340672 - DNA, 20 bp, Artificial Sequence
  Description of Artificial Sequence: Synthetic oligonucleotide
  Target: LAMA2; (+) strand; PAM type: YTN; PAM sequence: TTT
caaatagaagttgtttctca

SEQ ID NO: 340673 - DNA, 20 bp, Artificial Sequence
  Description of Artificial Sequence: Synthetic oligonucleotide
  Target: LAMA2; (+) strand; PAM type: YTN; PAM sequence: TTC
aaatagaagttgtttctcat

SEQ ID NO: 340674 - DNA, 20 bp, Artificial Sequence
  Description of Artificial Sequence: Synthetic oligonucleotide
  Target: LAMA2; (+) strand; PAM type: YTN; PAM sequence: TTG
tttctcattttacattgaaa

SEQ ID NO: 340675 - DNA, 20 bp, Artificial Sequence
  Description of Artificial Sequence: Synthetic oligonucleotide
  Target: LAMA2; (+) strand; PAM type: YTN; PAM sequence: TTT
ctcattttacattgaaattt

SEQ ID NO: 340676 - DNA, 20 bp, Artificial Sequence
  Description of Artificial Sequence: Synthetic oligonucleotide
  Target: LAMA2; (+) strand; PAM type: YTN; PAM sequence: TTC
tcattttacattgaaatttt

SEQ ID NO: 340677 - DNA, 20 bp, Artificial Sequence
  Description of Artificial Sequence: Synthetic oligonucleotide
  Target: LAMA2; (+) strand; PAM type: YTN; PAM sequence: CTC
attttacattgaaattttat

SEQ ID NO: 340678 - DNA, 20 bp, Artificial Sequence
  Description of Artificial Sequence: Synthetic oligonucleotide
  Target: LAMA2; (+) strand; PAM type: YTN; PAM sequence: TTT
tacattgaaattttatattt

SEQ ID NO: 340679 - DNA, 20 bp, Artificial Sequence
  Description of Artificial Sequence: Synthetic oligonucleotide
  Target: LAMA2; (+) strand; PAM type: YTN; PAM sequence: TTT
acattgaaattttatattta

SEQ ID NO: 340680 - DNA, 20 bp, Artificial Sequence
  Description of Artificial Sequence: Synthetic oligonucleotide
  Target: LAMA2; (+) strand; PAM type: YTN; PAM sequence: TTA
cattgaaattttatatttat

SEQ ID NO: 340681 - DNA, 20 bp, Artificial Sequence
  Description of Artificial Sequence: Synthetic oligonucleotide
  Target: LAMA2; (+) strand; PAM type: YTN; PAM sequence: TTG
aaattttatatttatagtaa

SEQ ID NO: 340682 - DNA, 20 bp, Artificial Sequence
  Description of Artificial Sequence: Synthetic oligonucleotide
  Target: LAMA2; (+) strand; PAM type: YTN; PAM sequence: TTT
tatatttatagtaaaatttt

SEQ ID NO: 340683 - DNA, 20 bp, Artificial Sequence
  Description of Artificial Sequence: Synthetic oligonucleotide
  Target: LAMA2; (+) strand; PAM type: YTN; PAM sequence: TTT
atatttatagtaaaatttta

SEQ ID NO: 340684 - DNA, 20 bp, Artificial Sequence
  Description of Artificial Sequence: Synthetic oligonucleotide
  Target: LAMA2; (+) strand; PAM type: YTN; PAM sequence: TTA
tatttatagtaaaattttaa

SEQ ID NO: 340685 - DNA, 20 bp, Artificial Sequence
  Description of Artificial Sequence: Synthetic oligonucleotide
  Target: LAMA2; (+) strand; PAM type: YTN; PAM sequence: TTT
atagtaaaattttaatttaa

SEQ ID NO: 340686 - DNA, 20 bp, Artificial Sequence
  Description of Artificial Sequence: Synthetic oligonucleotide
  Target: LAMA2; (+) strand; PAM type: YTN; PAM sequence: TTA
tagtaaaattttaatttaat

SEQ ID NO: 340687 - DNA, 20 bp, Artificial Sequence
  Description of Artificial Sequence: Synthetic oligonucleotide
  Target: LAMA2; (+) strand; PAM type: YTN; PAM sequence: TTT
taatttaataatatgattta

SEQ ID NO: 340688 - DNA, 20 bp, Artificial Sequence
  Description of Artificial Sequence: Synthetic oligonucleotide
  Target: LAMA2; (+) strand; PAM type: YTN; PAM sequence: TTT
aatttaataatatgatttat

SEQ ID NO: 340689 - DNA, 20 bp, Artificial Sequence
  Description of Artificial Sequence: Synthetic oligonucleotide
  Target: LAMA2; (+) strand; PAM type: YTN; PAM sequence: TTA
atttaataatatgatttatt

SEQ ID NO: 340690 - DNA, 20 bp, Artificial Sequence
  Description of Artificial Sequence: Synthetic oligonucleotide
  Target: LAMA2; (+) strand; PAM type: YTN; PAM sequence: TTT
aataatatgatttattctaa

SEQ ID NO: 340691 - DNA, 20 bp, Artificial Sequence
  Description of Artificial Sequence: Synthetic oligonucleotide
  Target: LAMA2; (+) strand; PAM type: YTN; PAM sequence: TTA
ataatatgatttattctaaa

SEQ ID NO: 340692 - DNA, 20 bp, Artificial Sequence
  Description of Artificial Sequence: Synthetic oligonucleotide
  Target: LAMA2; (+) strand; PAM type: YTN; PAM sequence: TTT
attctaaaattttcaatatt

SEQ ID NO: 340693 - DNA, 20 bp, Artificial Sequence
  Description of Artificial Sequence: Synthetic oligonucleotide
  Target: LAMA2; (+) strand; PAM type: YTN; PAM sequence: TTA
ttctaaaattttcaatattc

SEQ ID NO: 340694 - DNA, 20 bp, Artificial Sequence
  Description of Artificial Sequence: Synthetic oligonucleotide
  Target: LAMA2; (+) strand; PAM type: YTN; PAM sequence: TTC
taaaattttcaatattctat

SEQ ID NO: 340695 - DNA, 20 bp, Artificial Sequence
  Description of Artificial Sequence: Synthetic oligonucleotide
  Target: LAMA2; (+) strand; PAM type: YTN; PAM sequence: CTA
aaattttcaatattctattt

SEQ ID NO: 340696 - DNA, 20 bp, Artificial Sequence
  Description of Artificial Sequence: Synthetic oligonucleotide
  Target: LAMA2; (+) strand; PAM type: YTN; PAM sequence: TTT
tcaatattctatttttaatc

SEQ ID NO: 340697 - DNA, 20 bp, Artificial Sequence
  Description of Artificial Sequence: Synthetic oligonucleotide
  Target: LAMA2; (+) strand; PAM type: YTN; PAM sequence: TTT
caatattctatttttaatct

SEQ ID NO: 340698 - DNA, 20 bp, Artificial Sequence
  Description of Artificial Sequence: Synthetic oligonucleotide
  Target: LAMA2; (+) strand; PAM type: YTN; PAM sequence: TTC
aatattctatttttaatctc

SEQ ID NO: 340699 - DNA, 20 bp, Artificial Sequence
  Description of Artificial Sequence: Synthetic oligonucleotide
  Target: LAMA2; (+) strand; PAM type: YTN; PAM sequence: TTC
tatttttaatctccttgagc

SEQ ID NO: 340700 - DNA, 20 bp, Artificial Sequence
  Description of Artificial Sequence: Synthetic oligonucleotide
  Target: LAMA2; (+) strand; PAM type: YTN; PAM sequence: CTA
tttttaatctccttgagcat

SEQ ID NO: 340701 - DNA, 20 bp, Artificial Sequence
  Description of Artificial Sequence: Synthetic oligonucleotide
  Target: LAMA2; (+) strand; PAM type: YTN; PAM sequence: TTT
ttaatctccttgagcataaa

SEQ ID NO: 340702 - DNA, 20 bp, Artificial Sequence
  Description of Artificial Sequence: Synthetic oligonucleotide
  Target: LAMA2; (+) strand; PAM type: YTN; PAM sequence: TTT
taatctccttgagcataaag

SEQ ID NO: 340703 - DNA, 20 bp, Artificial Sequence
  Description of Artificial Sequence: Synthetic oligonucleotide
  Target: LAMA2; (+) strand; PAM type: YTN; PAM sequence: TTT
aatctccttgagcataaagt

SEQ ID NO: 340704 - DNA, 20 bp, Artificial Sequence
  Description of Artificial Sequence: Synthetic oligonucleotide
  Target: LAMA2; (+) strand; PAM type: YTN; PAM sequence: TTA
atctccttgagcataaagta

SEQ ID NO: 340705 - DNA, 20 bp, Artificial Sequence
  Description of Artificial Sequence: Synthetic oligonucleotide
  Target: LAMA2; (+) strand; PAM type: YTN; PAM sequence: CTC
cttgagcataaagtaaaaat

SEQ ID NO: 340706 - DNA, 20 bp, Artificial Sequence
  Description of Artificial Sequence: Synthetic oligonucleotide
  Target: LAMA2; (+) strand; PAM type: YTN; PAM sequence: CTT
gagcataaagtaaaaattat

SEQ ID NO: 340707 - DNA, 20 bp, Artificial Sequence
  Description of Artificial Sequence: Synthetic oligonucleotide
  Target: LAMA2; (+) strand; PAM type: YTN; PAM sequence: TTG
agcataaagtaaaaattatc

SEQ ID NO: 340708 - DNA, 20 bp, Artificial Sequence
  Description of Artificial Sequence: Synthetic oligonucleotide
  Target: LAMA2; (+) strand; PAM type: YTN; PAM sequence: TTA
tctttaaaagtttttgtctg

SEQ ID NO: 340709 - DNA, 20 bp, Artificial Sequence
  Description of Artificial Sequence: Synthetic oligonucleotide
  Target: LAMA2; (+) strand; PAM type: YTN; PAM sequence: CTT
taaaagtttttgtctgataa

SEQ ID NO: 340710 - DNA, 20 bp, Artificial Sequence
  Description of Artificial Sequence: Synthetic oligonucleotide
  Target: LAMA2; (+) strand; PAM type: YTN; PAM sequence: TTT
aaaagtttttgtctgataat

SEQ ID NO: 340711 - DNA, 20 bp, Artificial Sequence
  Description of Artificial Sequence: Synthetic oligonucleotide
  Target: LAMA2; (+) strand; PAM type: YTN; PAM sequence: TTA
aaagtttttgtctgataatt

SEQ ID NO: 340712 - DNA, 20 bp, Artificial Sequence
  Description of Artificial Sequence: Synthetic oligonucleotide
  Target: LAMA2; (+) strand; PAM type: YTN; PAM sequence: TTT
ttgtctgataattctaatat

SEQ ID NO: 340713 - DNA, 20 bp, Artificial Sequence
  Description of Artificial Sequence: Synthetic oligonucleotide
  Target: LAMA2; (+) strand; PAM type: YTN; PAM sequence: TTT
tgtctgataattctaatata

SEQ ID NO: 340714 - DNA, 20 bp, Artificial Sequence
  Description of Artificial Sequence: Synthetic oligonucleotide
  Target: LAMA2; (+) strand; PAM type: YTN; PAM sequence: TTT
gtctgataattctaatatat

SEQ ID NO: 340715 - DNA, 20 bp, Artificial Sequence
  Description of Artificial Sequence: Synthetic oligonucleotide
  Target: LAMA2; (+) strand; PAM type: YTN; PAM sequence: TTG
tctgataattctaatatatg

SEQ ID NO: 340716 - DNA, 20 bp, Artificial Sequence
  Description of Artificial Sequence: Synthetic oligonucleotide
  Target: LAMA2; (+) strand; PAM type: YTN; PAM sequence: CTG
ataattctaatatatggcct

SEQ ID NO: 340717 - DNA, 20 bp, Artificial Sequence
  Description of Artificial Sequence: Synthetic oligonucleotide
  Target: LAMA2; (+) strand; PAM type: YTN; PAM sequence: TTC
taatatatggcctttttgga

SEQ ID NO: 340718 - DNA, 20 bp, Artificial Sequence
  Description of Artificial Sequence: Synthetic oligonucleotide
  Target: LAMA2; (+) strand; PAM type: YTN; PAM sequence: CTA
atatatggcctttttggata

SEQ ID NO: 340719 - DNA, 20 bp, Artificial Sequence
  Description of Artificial Sequence: Synthetic oligonucleotide
  Target: LAMA2; (+) strand; PAM type: YTN; PAM sequence: CTT
tttggatatattttattttc

SEQ ID NO: 340720 - DNA, 20 bp, Artificial Sequence
  Description of Artificial Sequence: Synthetic oligonucleotide
  Target: LAMA2; (+) strand; PAM type: YTN; PAM sequence: TTT
ttggatatattttattttct

SEQ ID NO: 340721 - DNA, 20 bp, Artificial Sequence
  Description of Artificial Sequence: Synthetic oligonucleotide
  Target: LAMA2; (+) strand; PAM type: YTN; PAM sequence: TTT
tggatatattttattttctg

SEQ ID NO: 340722 - DNA, 20 bp, Artificial Sequence
  Description of Artificial Sequence: Synthetic oligonucleotide
  Target: LAMA2; (+) strand; PAM type: YTN; PAM sequence: TTT
ggatatattttattttctgt

SEQ ID NO: 340723 - DNA, 20 bp, Artificial Sequence
  Description of Artificial Sequence: Synthetic oligonucleotide
  Target: LAMA2; (+) strand; PAM type: YTN; PAM sequence: TTG
gatatattttattttctgtt

SEQ ID NO: 340724 - DNA, 20 bp, Artificial Sequence
  Description of Artificial Sequence: Synthetic oligonucleotide
  Target: LAMA2; (+) strand; PAM type: YTN; PAM sequence: TTT
tattttctgtttcatctgct

SEQ ID NO: 340725 - DNA, 20 bp, Artificial Sequence
  Description of Artificial Sequence: Synthetic oligonucleotide
  Target: LAMA2; (+) strand; PAM type: YTN; PAM sequence: TTT
attttctgtttcatctgctg

SEQ ID NO: 340726 - DNA, 20 bp, Artificial Sequence
  Description of Artificial Sequence: Synthetic oligonucleotide
  Target: LAMA2; (+) strand; PAM type: YTN; PAM sequence: TTA
ttttctgtttcatctgctga

SEQ ID NO: 340727 - DNA, 20 bp, Artificial Sequence
  Description of Artificial Sequence: Synthetic oligonucleotide
  Target: LAMA2; (+) strand; PAM type: YTN; PAM sequence: TTT
tctgtttcatctgctgattc

SEQ ID NO: 340728 - DNA, 20 bp, Artificial Sequence
  Description of Artificial Sequence: Synthetic oligonucleotide
  Target: LAMA2; (+) strand; PAM type: YTN; PAM sequence: TTT
ctgtttcatctgctgattct

SEQ ID NO: 340729 - DNA, 20 bp, Artificial Sequence
  Description of Artificial Sequence: Synthetic oligonucleotide
  Target: LAMA2; (+) strand; PAM type: YTN; PAM sequence: TTC
tgtttcatctgctgattctt

SEQ ID NO: 340730 - DNA, 20 bp, Artificial Sequence
  Description of Artificial Sequence: Synthetic oligonucleotide
  Target: LAMA2; (+) strand; PAM type: YTN; PAM sequence: CTG
tttcatctgctgattctttt

SEQ ID NO: 340731 - DNA, 20 bp, Artificial Sequence
  Description of Artificial Sequence: Synthetic oligonucleotide
  Target: LAMA2; (+) strand; PAM type: YTN; PAM sequence: TTT
catctgctgattctttttat

SEQ ID NO: 340732 - DNA, 20 bp, Artificial Sequence
  Description of Artificial Sequence: Synthetic oligonucleotide
  Target: LAMA2; (+) strand; PAM type: YTN; PAM sequence: TTC
atctgctgattctttttatg

SEQ ID NO: 340733 - DNA, 20 bp, Artificial Sequence
  Description of Artificial Sequence: Synthetic oligonucleotide
  Target: LAMA2; (+) strand; PAM type: YTN; PAM sequence: CTG
ctgattctttttatgctgtc

SEQ ID NO: 340734 - DNA, 20 bp, Artificial Sequence
  Description of Artificial Sequence: Synthetic oligonucleotide
  Target: LAMA2; (+) strand; PAM type: YTN; PAM sequence: CTG
attctttttatgctgtctta

SEQ ID NO: 340735 - DNA, 20 bp, Artificial Sequence
  Description of Artificial Sequence: Synthetic oligonucleotide
  Target: LAMA2; (+) strand; PAM type: YTN; PAM sequence: TTC
tttttatgctgtcttacatt

SEQ ID NO: 340736 - DNA, 20 bp, Artificial Sequence
  Description of Artificial Sequence: Synthetic oligonucleotide
  Target: LAMA2; (+) strand; PAM type: YTN; PAM sequence: CTT
tttatgctgtcttacattct

SEQ ID NO: 340737 - DNA, 20 bp, Artificial Sequence
  Description of Artificial Sequence: Synthetic oligonucleotide
  Target: LAMA2; (+) strand; PAM type: YTN; PAM sequence: TTT
ttatgctgtcttacattctt

SEQ ID NO: 340738 - DNA, 20 bp, Artificial Sequence
  Description of Artificial Sequence: Synthetic oligonucleotide
  Target: LAMA2; (+) strand; PAM type: YTN; PAM sequence: TTT
tatgctgtcttacattcttg

SEQ ID NO: 340739 - DNA, 20 bp, Artificial Sequence
  Description of Artificial Sequence: Synthetic oligonucleotide
  Target: LAMA2; (+) strand; PAM type: YTN; PAM sequence: TTT
atgctgtcttacattcttgt

SEQ ID NO: 340740 - DNA, 20 bp, Artificial Sequence
  Description of Artificial Sequence: Synthetic oligonucleotide
  Target: LAMA2; (+) strand; PAM type: YTN; PAM sequence: TTA
tgctgtcttacattcttgtg

SEQ ID NO: 340741 - DNA, 20 bp, Artificial Sequence
  Description of Artificial Sequence: Synthetic oligonucleotide
  Target: LAMA2; (+) strand; PAM type: YTN; PAM sequence: CTG
tcttacattcttgtgtgcct

SEQ ID NO: 340742 - DNA, 20 bp, Artificial Sequence
  Description of Artificial Sequence: Synthetic oligonucleotide
  Target: LAMA2; (+) strand; PAM type: YTN; PAM sequence: CTT
acattcttgtgtgcctgatt

SEQ ID NO: 340743 - DNA, 20 bp, Artificial Sequence
  Description of Artificial Sequence: Synthetic oligonucleotide
  Target: LAMA2; (+) strand; PAM type: YTN; PAM sequence: TTA
cattcttgtgtgcctgatta

SEQ ID NO: 340744 - DNA, 20 bp, Artificial Sequence
  Description of Artificial Sequence: Synthetic oligonucleotide
  Target: LAMA2; (+) strand; PAM type: YTN; PAM sequence: TTC
ttgtgtgcctgattatcttt

SEQ ID NO: 340745 - DNA, 20 bp, Artificial Sequence
  Description of Artificial Sequence: Synthetic oligonucleotide
  Target: LAMA2; (+) strand; PAM type: YTN; PAM sequence: CTT
gtgtgcctgattatctttgt

SEQ ID NO: 340746 - DNA, 20 bp, Artificial Sequence
  Description of Artificial Sequence: Synthetic oligonucleotide
  Target: LAMA2; (+) strand; PAM type: YTN; PAM sequence: TTG
tgtgcctgattatctttgta

SEQ ID NO: 340747 - DNA, 20 bp, Artificial Sequence
  Description of Artificial Sequence: Synthetic oligonucleotide
  Target: LAMA2; (+) strand; PAM type: YTN; PAM sequence: CTG
attatctttgtataacagaa

SEQ ID NO: 340748 - DNA, 20 bp, Artificial Sequence
  Description of Artificial Sequence: Synthetic oligonucleotide
  Target: LAMA2; (+) strand; PAM type: YTN; PAM sequence: TTA
tctttgtataacagaagttg

SEQ ID NO: 340749 - DNA, 20 bp, Artificial Sequence
  Description of Artificial Sequence: Synthetic oligonucleotide
  Target: LAMA2; (+) strand; PAM type: YTN; PAM sequence: CTT
tgtataacagaagttgtatt

SEQ ID NO: 340750 - DNA, 20 bp, Artificial Sequence
  Description of Artificial Sequence: Synthetic oligonucleotide
  Target: LAMA2; (+) strand; PAM type: YTN; PAM sequence: TTT
gtataacagaagttgtattt

SEQ ID NO: 340751 - DNA, 20 bp, Artificial Sequence
  Description of Artificial Sequence: Synthetic oligonucleotide
  Target: LAMA2; (+) strand; PAM type: YTN; PAM sequence: TTG
tataacagaagttgtatttg

SEQ ID NO: 340752 - DNA, 20 bp, Artificial Sequence
  Description of Artificial Sequence: Synthetic oligonucleotide
  Target: LAMA2; (+) strand; PAM type: YTN; PAM sequence: TTG
tatttgaaagagaatgtgta

SEQ ID NO: 340753 - DNA, 20 bp, Artificial Sequence
  Description of Artificial Sequence: Synthetic oligonucleotide
  Target: LAMA2; (+) strand; PAM type: YTN; PAM sequence: TTT
gaaagagaatgtgtagaaat

SEQ ID NO: 340754 - DNA, 20 bp, Artificial Sequence
  Description of Artificial Sequence: Synthetic oligonucleotide
  Target: LAMA2; (+) strand; PAM type: YTN; PAM sequence: TTG
aaagagaatgtgtagaaata

SEQ ID NO: 340755 - DNA, 20 bp, Artificial Sequence
  Description of Artificial Sequence: Synthetic oligonucleotide
  Target: LAMA2; (+) strand; PAM type: YTN; PAM sequence: TTT
gagagctagtatattgtctt

SEQ ID NO: 340756 - DNA, 20 bp, Artificial Sequence
  Description of Artificial Sequence: Synthetic oligonucleotide
  Target: LAMA2; (+) strand; PAM type: YTN; PAM sequence: TTG
agagctagtatattgtcttc

SEQ ID NO: 340757 - DNA, 20 bp, Artificial Sequence
  Description of Artificial Sequence: Synthetic oligonucleotide
  Target: LAMA2; (+) strand; PAM type: YTN; PAM sequence: CTA
gtatattgtcttcatcctgt

SEQ ID NO: 340758 - DNA, 20 bp, Artificial Sequence
  Description of Artificial Sequence: Synthetic oligonucleotide
  Target: LAMA2; (+) strand; PAM type: YTN; PAM sequence: TTG
tcttcatcctgtgtgaactt

SEQ ID NO: 340759 - DNA, 20 bp, Artificial Sequence
  Description of Artificial Sequence: Synthetic oligonucleotide
  Target: LAMA2; (+) strand; PAM type: YTN; PAM sequence: CTT
catcctgtgtgaactttctg

SEQ ID NO: 340760 - DNA, 20 bp, Artificial Sequence
  Description of Artificial Sequence: Synthetic oligonucleotide
  Target: LAMA2; (+) strand; PAM type: YTN; PAM sequence: TTC
atcctgtgtgaactttctga

SEQ ID NO: 340761 - DNA, 20 bp, Artificial Sequence
  Description of Artificial Sequence: Synthetic oligonucleotide
  Target: LAMA2; (+) strand; PAM type: YTN; PAM sequence: CTG
tgtgaactttctgatgctac

SEQ ID NO: 340762 - DNA, 20 bp, Artificial Sequence
  Description of Artificial Sequence: Synthetic oligonucleotide
  Target: LAMA2; (+) strand; PAM type: YTN; PAM sequence: CTT
tctgatgctactgccaggca

SEQ ID NO: 340763 - DNA, 20 bp, Artificial Sequence
  Description of Artificial Sequence: Synthetic oligonucleotide
  Target: LAMA2; (+) strand; PAM type: YTN; PAM sequence: TTT
ctgatgctactgccaggcaa

SEQ ID NO: 340764 - DNA, 20 bp, Artificial Sequence
  Description of Artificial Sequence: Synthetic oligonucleotide
  Target: LAMA2; (+) strand; PAM type: YTN; PAM sequence: TTC
tgatgctactgccaggcaat

SEQ ID NO: 340765 - DNA, 20 bp, Artificial Sequence
  Description of Artificial Sequence: Synthetic oligonucleotide
  Target: LAMA2; (+) strand; PAM type: YTN; PAM sequence: CTG
atgctactgccaggcaatgg

SEQ ID NO: 340766 - DNA, 20 bp, Artificial Sequence
  Description of Artificial Sequence: Synthetic oligonucleotide
  Target: LAMA2; (+) strand; PAM type: YTN; PAM sequence: CTA
ctgccaggcaatggaaatct

SEQ ID NO: 340767 - DNA, 20 bp, Artificial Sequence
  Description of Artificial Sequence: Synthetic oligonucleotide
  Target: LAMA2; (+) strand; PAM type: YTN; PAM sequence: CTG
ccaggcaatggaaatctgga

SEQ ID NO: 340768 - DNA, 20 bp, Artificial Sequence
  Description of Artificial Sequence: Synthetic oligonucleotide
  Target: LAMA2; (+) strand; PAM type: YTN; PAM sequence: CTG
gatcatcttaattcaatttt

SEQ ID NO: 340769 - DNA, 20 bp, Artificial Sequence
  Description of Artificial Sequence: Synthetic oligonucleotide
  Target: LAMA2; (+) strand; PAM type: YTN; PAM sequence: CTT
aattcaattttagggattca

SEQ ID NO: 340770 - DNA, 20 bp, Artificial Sequence
  Description of Artificial Sequence: Synthetic oligonucleotide
  Target: LAMA2; (+) strand; PAM type: YTN; PAM sequence: TTA
attcaattttagggattcaa

SEQ ID NO: 340771 - DNA, 20 bp, Artificial Sequence
  Description of Artificial Sequence: Synthetic oligonucleotide
  Target: LAMA2; (+) strand; PAM type: YTN; PAM sequence: TTC
aattttagggattcaaattt

SEQ ID NO: 340772 - DNA, 20 bp, Artificial Sequence
  Description of Artificial Sequence: Synthetic oligonucleotide
  Target: LAMA2; (+) strand; PAM type: YTN; PAM sequence: TTT
tagggattcaaatttctggg

SEQ ID NO: 340773 - DNA, 20 bp, Artificial Sequence
  Description of Artificial Sequence: Synthetic oligonucleotide
  Target: LAMA2; (+) strand; PAM type: YTN; PAM sequence: TTT
agggattcaaatttctggga

SEQ ID NO: 340774 - DNA, 20 bp, Artificial Sequence
  Description of Artificial Sequence: Synthetic oligonucleotide
  Target: LAMA2; (+) strand; PAM type: YTN; PAM sequence: TTA
gggattcaaatttctgggac

SEQ ID NO: 340775 - DNA, 20 bp, Artificial Sequence
  Description of Artificial Sequence: Synthetic oligonucleotide
  Target: LAMA2; (+) strand; PAM type: YTN; PAM sequence: TTC
aaatttctgggacattcaga

SEQ ID NO: 340776 - DNA, 20 bp, Artificial Sequence
  Description of Artificial Sequence: Synthetic oligonucleotide
  Target: LAMA2; (+) strand; PAM type: YTN; PAM sequence: TTT
ctgggacattcagatgattc

SEQ ID NO: 340777 - DNA, 20 bp, Artificial Sequence
  Description of Artificial Sequence: Synthetic oligonucleotide
  Target: LAMA2; (+) strand; PAM type: YTN; PAM sequence: TTC
tgggacattcagatgattca

SEQ ID NO: 340778 - DNA, 20 bp, Artificial Sequence
  Description of Artificial Sequence: Synthetic oligonucleotide
  Target: LAMA2; (+) strand; PAM type: YTN; PAM sequence: CTG
ggacattcagatgattcaaa

SEQ ID NO: 340779 - DNA, 20 bp, Artificial Sequence
  Description of Artificial Sequence: Synthetic oligonucleotide
  Target: LAMA2; (+) strand; PAM type: YTN; PAM sequence: TTC
agatgattcaaagcattgct

SEQ ID NO: 340780 - DNA, 20 bp, Artificial Sequence
  Description of Artificial Sequence: Synthetic oligonucleotide
  Target: LAMA2; (+) strand; PAM type: YTN; PAM sequence: TTC
aaagcattgctataacccag

SEQ ID NO: 340781 - DNA, 20 bp, Artificial Sequence
  Description of Artificial Sequence: Synthetic oligonucleotide
  Target: LAMA2; (+) strand; PAM type: YTN; PAM sequence: TTG
ctataacccagtgacagctg

SEQ ID NO: 340782 - DNA, 20 bp, Artificial Sequence
  Description of Artificial Sequence: Synthetic oligonucleotide
  Target: LAMA2; (+) strand; PAM type: YTN; PAM sequence: CTA
taacccagtgacagctgctt

SEQ ID NO: 340783 - DNA, 20 bp, Artificial Sequence
  Description of Artificial Sequence: Synthetic oligonucleotide
  Target: LAMA2; (+) strand; PAM type: YTN; PAM sequence: CTG
ctttaattccagtatacgct

SEQ ID NO: 340784 - DNA, 20 bp, Artificial Sequence
  Description of Artificial Sequence: Synthetic oligonucleotide
  Target: LAMA2; (+) strand; PAM type: YTN; PAM sequence: CTT
taattccagtatacgctcat

SEQ ID NO: 340785 - DNA, 20 bp, Artificial Sequence
  Description of Artificial Sequence: Synthetic oligonucleotide
  Target: LAMA2; (+) strand; PAM type: YTN; PAM sequence: TTT
aattccagtatacgctcatt

SEQ ID NO: 340786 - DNA, 20 bp, Artificial Sequence
  Description of Artificial Sequence: Synthetic oligonucleotide
  Target: LAMA2; (+) strand; PAM type: YTN; PAM sequence: TTA
attccagtatacgctcattc

SEQ ID NO: 340787 - DNA, 20 bp, Artificial Sequence
  Description of Artificial Sequence: Synthetic oligonucleotide
  Target: LAMA2; (+) strand; PAM type: YTN; PAM sequence: TTC
cagtatacgctcattcccat

SEQ ID NO: 340788 - DNA, 20 bp, Artificial Sequence
  Description of Artificial Sequence: Synthetic oligonucleotide
  Target: LAMA2; (+) strand; PAM type: YTN; PAM sequence: CTC
attcccatgctgcttatctt

SEQ ID NO: 340789 - DNA, 20 bp, Artificial Sequence
  Description of Artificial Sequence: Synthetic oligonucleotide
  Target: LAMA2; (+) strand; PAM type: YTN; PAM sequence: TTC
ccatgctgcttatctttgga

SEQ ID NO: 340790 - DNA, 20 bp, Artificial Sequence
  Description of Artificial Sequence: Synthetic oligonucleotide
  Target: LAMA2; (+) strand; PAM type: YTN; PAM sequence: CTG
cttatctttggagtccaagc

SEQ ID NO: 340791 - DNA, 20 bp, Artificial Sequence
  Description of Artificial Sequence: Synthetic oligonucleotide
  Target: LAMA2; (+) strand; PAM type: YTN; PAM sequence: CTT
atctttggagtccaagccag

SEQ ID NO: 340792 - DNA, 20 bp, Artificial Sequence
  Description of Artificial Sequence: Synthetic oligonucleotide
  Target: LAMA2; (+) strand; PAM type: YTN; PAM sequence: TTA
tctttggagtccaagccagc

SEQ ID NO: 340793 - DNA, 20 bp, Artificial Sequence
  Description of Artificial Sequence: Synthetic oligonucleotide
  Target: LAMA2; (+) strand; PAM type: YTN; PAM sequence: CTT
tggagtccaagccagcgtgt

SEQ ID NO: 340794 - DNA, 20 bp, Artificial Sequence
  Description of Artificial Sequence: Synthetic oligonucleotide
  Target: LAMA2; (+) strand; PAM type: YTN; PAM sequence: TTT
ggagtccaagccagcgtgtg

SEQ ID NO: 340795 - DNA, 20 bp, Artificial Sequence
  Description of Artificial Sequence: Synthetic oligonucleotide
  Target: LAMA2; (+) strand; PAM type: YTN; PAM sequence: TTG
gagtccaagccagcgtgtgt

SEQ ID NO: 340796 - DNA, 20 bp, Artificial Sequence
  Description of Artificial Sequence: Synthetic oligonucleotide
  Target: LAMA2; (+) strand; PAM type: YTN; PAM sequence: TTA
cgaaagtcccacccatgcag

SEQ ID NO: 340797 - DNA, 20 bp, Artificial Sequence
  Description of Artificial Sequence: Synthetic oligonucleotide
  Target: LAMA2; (+) strand; PAM type: YTN; PAM sequence: CTG
gaatccaacttttgtcctcc

SEQ ID NO: 340798 - DNA, 20 bp, Artificial Sequence
  Description of Artificial Sequence: Synthetic oligonucleotide
  Target: LAMA2; (+) strand; PAM type: YTN; PAM sequence: CTT
ttgtcctcctaatacagcag

SEQ ID NO: 340799 - DNA, 20 bp, Artificial Sequence
  Description of Artificial Sequence: Synthetic oligonucleotide
  Target: LAMA2; (+) strand; PAM type: YTN; PAM sequence: TTT
tgtcctcctaatacagcagg

SEQ ID NO: 340800 - DNA, 20 bp, Artificial Sequence
  Description of Artificial Sequence: Synthetic oligonucleotide
  Target: LAMA2; (+) strand; PAM type: YTN; PAM sequence: TTT
gtcctcctaatacagcaggg

SEQ ID NO: 340801 - DNA, 20 bp, Artificial Sequence
  Description of Artificial Sequence: Synthetic oligonucleotide
  Target: LAMA2; (+) strand; PAM type: YTN; PAM sequence: TTG
tcctcctaatacagcagggc

SEQ ID NO: 340802 - DNA, 20 bp, Artificial Sequence
  Description of Artificial Sequence: Synthetic oligonucleotide
  Target: LAMA2; (+) strand; PAM type: YTN; PAM sequence: CTC
ctaatacagcagggctgtca

SEQ ID NO: 340803 - DNA, 20 bp, Artificial Sequence
  Description of Artificial Sequence: Synthetic oligonucleotide
  Target: LAMA2; (+) strand; PAM type: YTN; PAM sequence: CTA
atacagcagggctgtcaaaa

SEQ ID NO: 340804 - DNA, 20 bp, Artificial Sequence
  Description of Artificial Sequence: Synthetic oligonucleotide
  Target: LAMA2; (+) strand; PAM type: YTN; PAM sequence: CTG
tcaaaagagctgctcagtct

SEQ ID NO: 340805 - DNA, 20 bp, Artificial Sequence
  Description of Artificial Sequence: Synthetic oligonucleotide
  Target: LAMA2; (+) strand; PAM type: YTN; PAM sequence: CTG
ctcagtctctcagccatgtg

SEQ ID NO: 340806 - DNA, 20 bp, Artificial Sequence
  Description of Artificial Sequence: Synthetic oligonucleotide
  Target: LAMA2; (+) strand; PAM type: YTN; PAM sequence: CTC
agtctctcagccatgtgtct

SEQ ID NO: 340807 - DNA, 20 bp, Artificial Sequence
  Description of Artificial Sequence: Synthetic oligonucleotide
  Target: LAMA2; (+) strand; PAM type: YTN; PAM sequence: CTC
tcagccatgtgtctggacag

SEQ ID NO: 340808 - DNA, 20 bp, Artificial Sequence
  Description of Artificial Sequence: Synthetic oligonucleotide
  Target: LAMA2; (+) strand; PAM type: YTN; PAM sequence: CTC
agccatgtgtctggacagga

SEQ ID NO: 340809 - DNA, 20 bp, Artificial Sequence
  Description of Artificial Sequence: Synthetic oligonucleotide
  Target: LAMA2; (+) strand; PAM type: YTN; PAM sequence: CTG
gacaggaaaatgctcacagg

SEQ ID NO: 340810 - DNA, 20 bp, Artificial Sequence
  Description of Artificial Sequence: Synthetic oligonucleotide
  Target: LAMA2; (+) strand; PAM type: YTN; PAM sequence: CTC
acaggacaaaagctgtcaca

SEQ ID NO: 340811 - DNA, 20 bp, Artificial Sequence
  Description of Artificial Sequence: Synthetic oligonucleotide
  Target: LAMA2; (+) strand; PAM type: YTN; PAM sequence: CTG
tcacaacgtaccaatcacct

SEQ ID NO: 340812 - DNA, 20 bp, Artificial Sequence
  Description of Artificial Sequence: Synthetic oligonucleotide
  Target: LAMA2; (+) strand; PAM type: YTN; PAM sequence: CTG
tctagacatctcttttgtcc

SEQ ID NO: 340813 - DNA, 20 bp, Artificial Sequence
  Description of Artificial Sequence: Synthetic oligonucleotide
  Target: LAMA2; (+) strand; PAM type: YTN; PAM sequence: CTA
gacatctcttttgtccttga

SEQ ID NO: 340814 - DNA, 20 bp, Artificial Sequence
  Description of Artificial Sequence: Synthetic oligonucleotide
  Target: LAMA2; (+) strand; PAM type: YTN; PAM sequence: CTC
ttttgtccttgatgttgaga

SEQ ID NO: 340815 - DNA, 20 bp, Artificial Sequence
  Description of Artificial Sequence: Synthetic oligonucleotide
  Target: LAMA2; (+) strand; PAM type: YTN; PAM sequence: CTT
ttgtccttgatgttgagaag

SEQ ID NO: 340816 - DNA, 20 bp, Artificial Sequence
  Description of Artificial Sequence: Synthetic oligonucleotide
  Target: LAMA2; (+) strand; PAM type: YTN; PAM sequence: TTT
tgtccttgatgttgagaagg

SEQ ID NO: 340817 - DNA, 20 bp, Artificial Sequence
  Description of Artificial Sequence: Synthetic oligonucleotide
  Target: LAMA2; (+) strand; PAM type: YTN; PAM sequence: TTT
gtccttgatgttgagaaggt

SEQ ID NO: 340818 - DNA, 20 bp, Artificial Sequence
  Description of Artificial Sequence: Synthetic oligonucleotide
  Target: LAMA2; (+) strand; PAM type: YTN; PAM sequence: TTG
tccttgatgttgagaaggtt

SEQ ID NO: 340819 - DNA, 20 bp, Artificial Sequence
  Description of Artificial Sequence: Synthetic oligonucleotide
  Target: LAMA2; (+) strand; PAM type: YTN; PAM sequence: CTT
gatgttgagaaggttatctt

SEQ ID NO: 340820 - DNA, 20 bp, Artificial Sequence
  Description of Artificial Sequence: Synthetic oligonucleotide
  Target: LAMA2; (+) strand; PAM type: YTN; PAM sequence: TTG
atgttgagaaggttatcttc

SEQ ID NO: 340821 - DNA, 20 bp, Artificial Sequence
  Description of Artificial Sequence: Synthetic oligonucleotide
  Target: LAMA2; (+) strand; PAM type: YTN; PAM sequence: TTG
agaaggttatcttcactctc

SEQ ID NO: 340822 - DNA, 20 bp, Artificial Sequence
  Description of Artificial Sequence: Synthetic oligonucleotide
  Target: LAMA2; (+) strand; PAM type: YTN; PAM sequence: TTA
tcttcactctcttgatagct

SEQ ID NO: 340823 - DNA, 20 bp, Artificial Sequence
  Description of Artificial Sequence: Synthetic oligonucleotide
  Target: LAMA2; (+) strand; PAM type: YTN; PAM sequence: CTT
cactctcttgatagctctca

SEQ ID NO: 340824 - DNA, 20 bp, Artificial Sequence
  Description of Artificial Sequence: Synthetic oligonucleotide
  Target: LAMA2; (+) strand; PAM type: YTN; PAM sequence: TTC
actctcttgatagctctcac

SEQ ID NO: 340825 - DNA, 20 bp, Artificial Sequence
  Description of Artificial Sequence: Synthetic oligonucleotide
  Target: LAMA2; (+) strand; PAM type: YTN; PAM sequence: CTC
tcttgatagctctcacatgg

SEQ ID NO: 340826 - DNA, 20 bp, Artificial Sequence
  Description of Artificial Sequence: Synthetic oligonucleotide
  Target: LAMA2; (+) strand; PAM type: YTN; PAM sequence: CTC
ttgatagctctcacatggct

SEQ ID NO: 340827 - DNA, 20 bp, Artificial Sequence
  Description of Artificial Sequence: Synthetic oligonucleotide
  Target: LAMA2; (+) strand; PAM type: YTN; PAM sequence: CTT
gatagctctcacatggcttt

SEQ ID NO: 340828 - DNA, 20 bp, Artificial Sequence
  Description of Artificial Sequence: Synthetic oligonucleotide
  Target: LAMA2; (+) strand; PAM type: YTN; PAM sequence: TTG
atagctctcacatggcttta

SEQ ID NO: 340829 - DNA, 20 bp, Artificial Sequence
  Description of Artificial Sequence: Synthetic oligonucleotide
  Target: LAMA2; (+) strand; PAM type: YTN; PAM sequence: CTC
tcacatggctttaaacatat

SEQ ID NO: 340830 - DNA, 20 bp, Artificial Sequence
  Description of Artificial Sequence: Synthetic oligonucleotide
  Target: LAMA2; (+) strand; PAM type: YTN; PAM sequence: CTC
acatggctttaaacatatgt

SEQ ID NO: 340831 - DNA, 20 bp, Artificial Sequence
  Description of Artificial Sequence: Synthetic oligonucleotide
  Target: LAMA2; (+) strand; PAM type: YTN; PAM sequence: CTT
taaacatatgtttttgtata

SEQ ID NO: 340832 - DNA, 20 bp, Artificial Sequence
  Description of Artificial Sequence: Synthetic oligonucleotide
  Target: LAMA2; (+) strand; PAM type: YTN; PAM sequence: TTT
aaacatatgtttttgtatat

SEQ ID NO: 340833 - DNA, 20 bp, Artificial Sequence
  Description of Artificial Sequence: Synthetic oligonucleotide
  Target: LAMA2; (+) strand; PAM type: YTN; PAM sequence: TTA
aacatatgtttttgtatatt

SEQ ID NO: 340834 - DNA, 20 bp, Artificial Sequence
  Description of Artificial Sequence: Synthetic oligonucleotide
  Target: LAMA2; (+) strand; PAM type: YTN; PAM sequence: TTT
ttgtatatttatccagtttg

SEQ ID NO: 340835 - DNA, 20 bp, Artificial Sequence
  Description of Artificial Sequence: Synthetic oligonucleotide
  Target: LAMA2; (+) strand; PAM type: YTN; PAM sequence: TTT
tgtatatttatccagtttgt

SEQ ID NO: 340836 - DNA, 20 bp, Artificial Sequence
  Description of Artificial Sequence: Synthetic oligonucleotide
  Target: LAMA2; (+) strand; PAM type: YTN; PAM sequence: TTT
gtatatttatccagtttgtc

SEQ ID NO: 340837 - DNA, 20 bp, Artificial Sequence
  Description of Artificial Sequence: Synthetic oligonucleotide
  Target: LAMA2; (+) strand; PAM type: YTN; PAM sequence: TTG
tatatttatccagtttgtct

SEQ ID NO: 340838 - DNA, 20 bp, Artificial Sequence
  Description of Artificial Sequence: Synthetic oligonucleotide
  Target: LAMA2; (+) strand; PAM type: YTN; PAM sequence: TTT
atccagtttgtctagttgtt

SEQ ID NO: 340839 - DNA, 20 bp, Artificial Sequence
  Description of Artificial Sequence: Synthetic oligonucleotide
  Target: LAMA2; (+) strand; PAM type: YTN; PAM sequence: TTA
tccagtttgtctagttgttg

SEQ ID NO: 340840 - DNA, 20 bp, Artificial Sequence
  Description of Artificial Sequence: Synthetic oligonucleotide
  Target: LAMA2; (+) strand; PAM type: YTN; PAM sequence: TTT
gtctagttgttgtcattgag

SEQ ID NO: 340841 - DNA, 20 bp, Artificial Sequence
  Description of Artificial Sequence: Synthetic oligonucleotide
  Target: LAMA2; (+) strand; PAM type: YTN; PAM sequence: TTG
tctagttgttgtcattgaga

SEQ ID NO: 340842 - DNA, 20 bp, Artificial Sequence
  Description of Artificial Sequence: Synthetic oligonucleotide
  Target: LAMA2; (+) strand; PAM type: YTN; PAM sequence: CTA
gttgttgtcattgagagtgt

SEQ ID NO: 340843 - DNA, 20 bp, Artificial Sequence
  Description of Artificial Sequence: Synthetic oligonucleotide
  Target: LAMA2; (+) strand; PAM type: YTN; PAM sequence: TTG
ttgtcattgagagtgttgac

SEQ ID NO: 340844 - DNA, 20 bp, Artificial Sequence
  Description of Artificial Sequence: Synthetic oligonucleotide
  Target: LAMA2; (+) strand; PAM type: YTN; PAM sequence: TTG
tcattgagagtgttgactct

SEQ ID NO: 340845 - DNA, 20 bp, Artificial Sequence
  Description of Artificial Sequence: Synthetic oligonucleotide
  Target: LAMA2; (+) strand; PAM type: YTN; PAM sequence: TTG
agagtgttgactcttactgt

SEQ ID NO: 340846 - DNA, 20 bp, Artificial Sequence
  Description of Artificial Sequence: Synthetic oligonucleotide
  Target: LAMA2; (+) strand; PAM type: YTN; PAM sequence: TTG
actcttactgtataatctac

SEQ ID NO: 340847 - DNA, 20 bp, Artificial Sequence
  Description of Artificial Sequence: Synthetic oligonucleotide
  Target: LAMA2; (+) strand; PAM type: YTN; PAM sequence: CTC
ttactgtataatctaccata

SEQ ID NO: 340848 - DNA, 20 bp, Artificial Sequence
  Description of Artificial Sequence: Synthetic oligonucleotide
  Target: LAMA2; (+) strand; PAM type: YTN; PAM sequence: CTT
actgtataatctaccataaa

SEQ ID NO: 340849 - DNA, 20 bp, Artificial Sequence
  Description of Artificial Sequence: Synthetic oligonucleotide
  Target: LAMA2; (+) strand; PAM type: YTN; PAM sequence: TTA
ctgtataatctaccataaat

SEQ ID NO: 340850 - DNA, 20 bp, Artificial Sequence
  Description of Artificial Sequence: Synthetic oligonucleotide
  Target: LAMA2; (+) strand; PAM type: YTN; PAM sequence: CTG
tataatctaccataaataga

SEQ ID NO: 340851 - DNA, 20 bp, Artificial Sequence
  Description of Artificial Sequence: Synthetic oligonucleotide
  Target: LAMA2; (+) strand; PAM type: YTN; PAM sequence: CTA
ccataaatagaagcgaagtt

SEQ ID NO: 340852 - DNA, 20 bp, Artificial Sequence
  Description of Artificial Sequence: Synthetic oligonucleotide
  Target: LAMA2; (+) strand; PAM type: YTN; PAM sequence: TTG
cacatgcatttaattttttt

SEQ ID NO: 340853 - DNA, 20 bp, Artificial Sequence
  Description of Artificial Sequence: Synthetic oligonucleotide
  Target: LAMA2; (+) strand; PAM type: YTN; PAM sequence: TTT
aattttttttattttggaat

SEQ ID NO: 340854 - DNA, 20 bp, Artificial Sequence
  Description of Artificial Sequence: Synthetic oligonucleotide
  Target: LAMA2; (+) strand; PAM type: YTN; PAM sequence: TTA
attttttttattttggaatt

SEQ ID NO: 340855 - DNA, 20 bp, Artificial Sequence
  Description of Artificial Sequence: Synthetic oligonucleotide
  Target: LAMA2; (+) strand; PAM type: YTN; PAM sequence: TTT
tttttattttggaattatgt

SEQ ID NO: 340856 - DNA, 20 bp, Artificial Sequence
  Description of Artificial Sequence: Synthetic oligonucleotide
  Target: LAMA2; (+) strand; PAM type: YTN; PAM sequence: TTT
ttttattttggaattatgtt

SEQ ID NO: 340857 - DNA, 20 bp, Artificial Sequence
  Description of Artificial Sequence: Synthetic oligonucleotide
  Target: LAMA2; (+) strand; PAM type: YTN; PAM sequence: TTT
tttattttggaattatgtta

SEQ ID NO: 340858 - DNA, 20 bp, Artificial Sequence
  Description of Artificial Sequence: Synthetic oligonucleotide
  Target: LAMA2; (+) strand; PAM type: YTN; PAM sequence: TTT
ttattttggaattatgttaa

SEQ ID NO: 340859 - DNA, 20 bp, Artificial Sequence
  Description of Artificial Sequence: Synthetic oligonucleotide
  Target: LAMA2; (+) strand; PAM type: YTN; PAM sequence: TTT
tattttggaattatgttaag

SEQ ID NO: 340860 - DNA, 20 bp, Artificial Sequence
  Description of Artificial Sequence: Synthetic oligonucleotide
  Target: LAMA2; (+) strand; PAM type: YTN; PAM sequence: TTT
attttggaattatgttaagt

SEQ ID NO: 340861 - DNA, 20 bp, Artificial Sequence
  Description of Artificial Sequence: Synthetic oligonucleotide
  Target: LAMA2; (+) strand; PAM type: YTN; PAM sequence: TTA
ttttggaattatgttaagtt

SEQ ID NO: 340862 - DNA, 20 bp, Artificial Sequence
  Description of Artificial Sequence: Synthetic oligonucleotide
  Target: LAMA2; (+) strand; PAM type: YTN; PAM sequence: TTT
tggaattatgttaagtttac

SEQ ID NO: 340863 - DNA, 20 bp, Artificial Sequence
  Description of Artificial Sequence: Synthetic oligonucleotide
  Target: LAMA2; (+) strand; PAM type: YTN; PAM sequence: TTT
ggaattatgttaagtttaca

SEQ ID NO: 340864 - DNA, 20 bp, Artificial Sequence
  Description of Artificial Sequence: Synthetic oligonucleotide
  Target: LAMA2; (+) strand; PAM type: YTN; PAM sequence: TTG
gaattatgttaagtttacac

SEQ ID NO: 340865 - DNA, 20 bp, Artificial Sequence
  Description of Artificial Sequence: Synthetic oligonucleotide
  Target: LAMA2; (+) strand; PAM type: YTN; PAM sequence: TTA
tgttaagtttacacacatgt

SEQ ID NO: 340866 - DNA, 20 bp, Artificial Sequence
  Description of Artificial Sequence: Synthetic oligonucleotide
  Target: LAMA2; (+) strand; PAM type: YTN; PAM sequence: TTA
agtttacacacatgtatgaa

SEQ ID NO: 340867 - DNA, 20 bp, Artificial Sequence
  Description of Artificial Sequence: Synthetic oligonucleotide
  Target: LAMA2; (+) strand; PAM type: YTN; PAM sequence: TTT
acacacatgtatgaagatta

SEQ ID NO: 340868 - DNA, 20 bp, Artificial Sequence
  Description of Artificial Sequence: Synthetic oligonucleotide
  Target: LAMA2; (+) strand; PAM type: YTN; PAM sequence: TTA
cacacatgtatgaagattat

SEQ ID NO: 340869 - DNA, 20 bp, Artificial Sequence
  Description of Artificial Sequence: Synthetic oligonucleotide
  Target: LAMA2; (+) strand; PAM type: YTN; PAM sequence: TTA
tagagaatcctcacattccc

SEQ ID NO: 340870 - DNA, 20 bp, Artificial Sequence
  Description of Artificial Sequence: Synthetic oligonucleotide
  Target: LAMA2; (+) strand; PAM type: YTN; PAM sequence: CTC
acattccctcatccagctat

SEQ ID NO: 340871 - DNA, 20 bp, Artificial Sequence
  Description of Artificial Sequence: Synthetic oligonucleotide
  Target: LAMA2; (+) strand; PAM type: YTN; PAM sequence: TTC
cctcatccagctatccctag

SEQ ID NO: 340872 - DNA, 20 bp, Artificial Sequence
  Description of Artificial Sequence: Synthetic oligonucleotide
  Target: LAMA2; (+) strand; PAM type: YTN; PAM sequence: CTC
atccagctatccctaggaat

SEQ ID NO: 340873 - DNA, 20 bp, Artificial Sequence
  Description of Artificial Sequence: Synthetic oligonucleotide
  Target: LAMA2; (+) strand; PAM type: YTN; PAM sequence: CTA
tccctaggaataatatctta

SEQ ID NO: 340874 - DNA, 20 bp, Artificial Sequence
  Description of Artificial Sequence: Synthetic oligonucleotide
  Target: LAMA2; (+) strand; PAM type: YTN; PAM sequence: CTA
ggaataatatcttaaataat

SEQ ID NO: 340875 - DNA, 20 bp, Artificial Sequence
  Description of Artificial Sequence: Synthetic oligonucleotide
  Target: LAMA2; (+) strand; PAM type: YTN; PAM sequence: CTT
aaataatgacaatgcacatg

SEQ ID NO: 340876 - DNA, 20 bp, Artificial Sequence
  Description of Artificial Sequence: Synthetic oligonucleotide
  Target: LAMA2; (+) strand; PAM type: YTN; PAM sequence: TTA
aataatgacaatgcacatgt

SEQ ID NO: 340877 - DNA, 20 bp, Artificial Sequence
  Description of Artificial Sequence: Synthetic oligonucleotide
  Target: LAMA2; (+) strand; PAM type: YTN; PAM sequence: TTA
aaactaagaagttagcattg

SEQ ID NO: 340878 - DNA, 20 bp, Artificial Sequence
  Description of Artificial Sequence: Synthetic oligonucleotide
  Target: LAMA2; (+) strand; PAM type: YTN; PAM sequence: CTA
agaagttagcattgatacat

SEQ ID NO: 340879 - DNA, 20 bp, Artificial Sequence
  Description of Artificial Sequence: Synthetic oligonucleotide
  Target: LAMA2; (+) strand; PAM type: YTN; PAM sequence: TTA
gcattgatacattattgtta

SEQ ID NO: 340880 - DNA, 20 bp, Artificial Sequence
  Description of Artificial Sequence: Synthetic oligonucleotide
  Target: LAMA2; (+) strand; PAM type: YTN; PAM sequence: TTG
atacattattgttatctaaa

SEQ ID NO: 340881 - DNA, 20 bp, Artificial Sequence
  Description of Artificial Sequence: Synthetic oligonucleotide
  Target: LAMA2; (+) strand; PAM type: YTN; PAM sequence: TTA
ttgttatctaaaccacagac

SEQ ID NO: 340882 - DNA, 20 bp, Artificial Sequence
  Description of Artificial Sequence: Synthetic oligonucleotide
  Target: LAMA2; (+) strand; PAM type: YTN; PAM sequence: TTG
ttatctaaaccacagacctt

SEQ ID NO: 340883 - DNA, 20 bp, Artificial Sequence
  Description of Artificial Sequence: Synthetic oligonucleotide
  Target: LAMA2; (+) strand; PAM type: YTN; PAM sequence: TTA
tctaaaccacagaccttatt

SEQ ID NO: 340884 - DNA, 20 bp, Artificial Sequence
  Description of Artificial Sequence: Synthetic oligonucleotide
  Target: LAMA2; (+) strand; PAM type: YTN; PAM sequence: CTA
aaccacagaccttattcagg

SEQ ID NO: 340885 - DNA, 20 bp, Artificial Sequence
  Description of Artificial Sequence: Synthetic oligonucleotide
  Target: LAMA2; (+) strand; PAM type: YTN; PAM sequence: CTT
attcaggtttcattcatttt

SEQ ID NO: 340886 - DNA, 20 bp, Artificial Sequence
  Description of Artificial Sequence: Synthetic oligonucleotide
  Target: LAMA2; (+) strand; PAM type: YTN; PAM sequence: TTA
ttcaggtttcattcatttta

SEQ ID NO: 340887 - DNA, 20 bp, Artificial Sequence
  Description of Artificial Sequence: Synthetic oligonucleotide
  Target: LAMA2; (+) strand; PAM type: YTN; PAM sequence: TTC
aggtttcattcattttacca

SEQ ID NO: 340888 - DNA, 20 bp, Artificial Sequence
  Description of Artificial Sequence: Synthetic oligonucleotide
  Target: LAMA2; (+) strand; PAM type: YTN; PAM sequence: TTT
cattcattttaccaatttca

SEQ ID NO: 340889 - DNA, 20 bp, Artificial Sequence
  Description of Artificial Sequence: Synthetic oligonucleotide
  Target: LAMA2; (+) strand; PAM type: YTN; PAM sequence: TTC
attcattttaccaatttcat

SEQ ID NO: 340890 - DNA, 20 bp, Artificial Sequence
  Description of Artificial Sequence: Synthetic oligonucleotide
  Target: LAMA2; (+) strand; PAM type: YTN; PAM sequence: TTC
attttaccaatttcattttt

SEQ ID NO: 340891 - DNA, 20 bp, Artificial Sequence
  Description of Artificial Sequence: Synthetic oligonucleotide
  Target: LAMA2; (+) strand; PAM type: YTN; PAM sequence: TTT
taccaatttcattttttctc

SEQ ID NO: 340892 - DNA, 20 bp, Artificial Sequence
  Description of Artificial Sequence: Synthetic oligonucleotide
  Target: LAMA2; (+) strand; PAM type: YTN; PAM sequence: TTT
accaatttcattttttctct

SEQ ID NO: 340893 - DNA, 20 bp, Artificial Sequence
  Description of Artificial Sequence: Synthetic oligonucleotide
  Target: LAMA2; (+) strand; PAM type: YTN; PAM sequence: TTA
ccaatttcattttttctctt

SEQ ID NO: 340894 - DNA, 20 bp, Artificial Sequence
  Description of Artificial Sequence: Synthetic oligonucleotide
  Target: LAMA2; (+) strand; PAM type: YTN; PAM sequence: TTT
cattttttctcttctgggat

SEQ ID NO: 340895 - DNA, 20 bp, Artificial Sequence
  Description of Artificial Sequence: Synthetic oligonucleotide
  Target: LAMA2; (+) strand; PAM type: YTN; PAM sequence: TTC
attttttctcttctgggatc

SEQ ID NO: 340896 - DNA, 20 bp, Artificial Sequence
  Description of Artificial Sequence: Synthetic oligonucleotide
  Target: LAMA2; (+) strand; PAM type: YTN; PAM sequence: TTT
tttctcttctgggatccaat

SEQ ID NO: 340897 - DNA, 20 bp, Artificial Sequence
  Description of Artificial Sequence: Synthetic oligonucleotide
  Target: LAMA2; (+) strand; PAM type: YTN; PAM sequence: TTT
ttctcttctgggatccaatt

SEQ ID NO: 340898 - DNA, 20 bp, Artificial Sequence
  Description of Artificial Sequence: Synthetic oligonucleotide
  Target: LAMA2; (+) strand; PAM type: YTN; PAM sequence: TTT
tctcttctgggatccaattc

SEQ ID NO: 340899 - DNA, 20 bp, Artificial Sequence
  Description of Artificial Sequence: Synthetic oligonucleotide
  Target: LAMA2; (+) strand; PAM type: YTN; PAM sequence: TTT
ctcttctgggatccaattca

SEQ ID NO: 340900 - DNA, 20 bp, Artificial Sequence
  Description of Artificial Sequence: Synthetic oligonucleotide
  Target: LAMA2; (+) strand; PAM type: YTN; PAM sequence: TTC
tcttctgggatccaattcag

SEQ ID NO: 340901 - DNA, 20 bp, Artificial Sequence
  Description of Artificial Sequence: Synthetic oligonucleotide
  Target: LAMA2; (+) strand; PAM type: YTN; PAM sequence: CTC
ttctgggatccaattcaggt

SEQ ID NO: 340902 - DNA, 20 bp, Artificial Sequence
  Description of Artificial Sequence: Synthetic oligonucleotide
  Target: LAMA2; (+) strand; PAM type: YTN; PAM sequence: CTT
ctgggatccaattcaggtac

SEQ ID NO: 340903 - DNA, 20 bp, Artificial Sequence
  Description of Artificial Sequence: Synthetic oligonucleotide
  Target: LAMA2; (+) strand; PAM type: YTN; PAM sequence: TTC
tgggatccaattcaggtact

SEQ ID NO: 340904 - DNA, 20 bp, Artificial Sequence
  Description of Artificial Sequence: Synthetic oligonucleotide
  Target: LAMA2; (+) strand; PAM type: YTN; PAM sequence: CTG
ggatccaattcaggtactat

SEQ ID NO: 340905 - DNA, 20 bp, Artificial Sequence
  Description of Artificial Sequence: Synthetic oligonucleotide
  Target: LAMA2; (+) strand; PAM type: YTN; PAM sequence: TTC
aggtactattttgcatttag

SEQ ID NO: 340906 - DNA, 20 bp, Artificial Sequence
  Description of Artificial Sequence: Synthetic oligonucleotide
  Target: LAMA2; (+) strand; PAM type: YTN; PAM sequence: CTA
ttttgcatttagtcactgat

SEQ ID NO: 340907 - DNA, 20 bp, Artificial Sequence
  Description of Artificial Sequence: Synthetic oligonucleotide
  Target: LAMA2; (+) strand; PAM type: YTN; PAM sequence: TTT
tgcatttagtcactgatctg

SEQ ID NO: 340908 - DNA, 20 bp, Artificial Sequence
  Description of Artificial Sequence: Synthetic oligonucleotide
  Target: LAMA2; (+) strand; PAM type: YTN; PAM sequence: TTT
gcatttagtcactgatctgt

SEQ ID NO: 340909 - DNA, 20 bp, Artificial Sequence
  Description of Artificial Sequence: Synthetic oligonucleotide
  Target: LAMA2; (+) strand; PAM type: YTN; PAM sequence: TTG
catttagtcactgatctgtg

SEQ ID NO: 340910 - DNA, 20 bp, Artificial Sequence
  Description of Artificial Sequence: Synthetic oligonucleotide
  Target: LAMA2; (+) strand; PAM type: YTN; PAM sequence: TTT
agtcactgatctgtgacagt

SEQ ID NO: 340911 - DNA, 20 bp, Artificial Sequence
  Description of Artificial Sequence: Synthetic oligonucleotide
  Target: LAMA2; (+) strand; PAM type: YTN; PAM sequence: TTA
gtcactgatctgtgacagtt

SEQ ID NO: 340912 - DNA, 20 bp, Artificial Sequence
  Description of Artificial Sequence: Synthetic oligonucleotide
  Target: LAMA2; (+) strand; PAM type: YTN; PAM sequence: CTG
atctgtgacagttttaagag

SEQ ID NO: 340913 - DNA, 20 bp, Artificial Sequence
  Description of Artificial Sequence: Synthetic oligonucleotide
  Target: LAMA2; (+) strand; PAM type: YTN; PAM sequence: CTG
tgacagttttaagagatatt

SEQ ID NO: 340914 - DNA, 20 bp, Artificial Sequence
  Description of Artificial Sequence: Synthetic oligonucleotide
  Target: LAMA2; (+) strand; PAM type: YTN; PAM sequence: TTT
taagagatattttaagaaat

SEQ ID NO: 340915 - DNA, 20 bp, Artificial Sequence
  Description of Artificial Sequence: Synthetic oligonucleotide
  Target: LAMA2; (+) strand; PAM type: YTN; PAM sequence: TTT
aagagatattttaagaaata

SEQ ID NO: 340916 - DNA, 20 bp, Artificial Sequence
  Description of Artificial Sequence: Synthetic oligonucleotide
  Target: LAMA2; (+) strand; PAM type: YTN; PAM sequence: TTA
agagatattttaagaaatat

SEQ ID NO: 340917 - DNA, 20 bp, Artificial Sequence
  Description of Artificial Sequence: Synthetic oligonucleotide
  Target: LAMA2; (+) strand; PAM type: YTN; PAM sequence: TTT
taagaaatattttaagagat

SEQ ID NO: 340918 - DNA, 20 bp, Artificial Sequence
  Description of Artificial Sequence: Synthetic oligonucleotide
  Target: LAMA2; (+) strand; PAM type: YTN; PAM sequence: TTT
aagaaatattttaagagata

SEQ ID NO: 340919 - DNA, 20 bp, Artificial Sequence
  Description of Artificial Sequence: Synthetic oligonucleotide
  Target: LAMA2; (+) strand; PAM type: YTN; PAM sequence: TTA
agaaatattttaagagatat

SEQ ID NO: 340920 - DNA, 20 bp, Artificial Sequence
  Description of Artificial Sequence: Synthetic oligonucleotide
  Target: LAMA2; (+) strand; PAM type: YTN; PAM sequence: TTT
taagagatatttagagatat

SEQ ID NO: 340921 - DNA, 20 bp, Artificial Sequence
  Description of Artificial Sequence: Synthetic oligonucleotide
  Target: LAMA2; (+) strand; PAM type: YTN; PAM sequence: TTT
aagagatatttagagatatt

SEQ ID NO: 340922 - DNA, 20 bp, Artificial Sequence
  Description of Artificial Sequence: Synthetic oligonucleotide
  Target: LAMA2; (+) strand; PAM type: YTN; PAM sequence: TTA
agagatatttagagatattt

SEQ ID NO: 340923 - DNA, 20 bp, Artificial Sequence
  Description of Artificial Sequence: Synthetic oligonucleotide
  Target: LAMA2; (+) strand; PAM type: YTN; PAM sequence: TTT
agagatattttatagactat

SEQ ID NO: 340924 - DNA, 20 bp, Artificial Sequence
  Description of Artificial Sequence: Synthetic oligonucleotide
  Target: LAMA2; (+) strand; PAM type: YTN; PAM sequence: TTA
gagatattttatagactatt

SEQ ID NO: 340925 - DNA, 20 bp, Artificial Sequence
  Description of Artificial Sequence: Synthetic oligonucleotide
  Target: LAMA2; (+) strand; PAM type: YTN; PAM sequence: TTT
tatagactattattcagttt

SEQ ID NO: 340926 - DNA, 20 bp, Artificial Sequence
  Description of Artificial Sequence: Synthetic oligonucleotide
  Target: LAMA2; (+) strand; PAM type: YTN; PAM sequence: TTT
atagactattattcagtttg

SEQ ID NO: 340927 - DNA, 20 bp, Artificial Sequence
  Description of Artificial Sequence: Synthetic oligonucleotide
  Target: LAMA2; (+) strand; PAM type: YTN; PAM sequence: TTA
tagactattattcagtttgg

SEQ ID NO: 340928 - DNA, 20 bp, Artificial Sequence
  Description of Artificial Sequence: Synthetic oligonucleotide
  Target: LAMA2; (+) strand; PAM type: YTN; PAM sequence: CTA
ttattcagtttgggtttgcc

SEQ ID NO: 340929 - DNA, 20 bp, Artificial Sequence
  Description of Artificial Sequence: Synthetic oligonucleotide
  Target: LAMA2; (+) strand; PAM type: YTN; PAM sequence: TTA
ttcagtttgggtttgcctga

SEQ ID NO: 340930 - DNA, 20 bp, Artificial Sequence
  Description of Artificial Sequence: Synthetic oligonucleotide
  Target: LAMA2; (+) strand; PAM type: YTN; PAM sequence: TTC
agtttgggtttgcctgatgt

SEQ ID NO: 340931 - DNA, 20 bp, Artificial Sequence
  Description of Artificial Sequence: Synthetic oligonucleotide
  Target: LAMA2; (+) strand; PAM type: YTN; PAM sequence: TTT
gggtttgcctgatgtttttt

SEQ ID NO: 340932 - DNA, 20 bp, Artificial Sequence
  Description of Artificial Sequence: Synthetic oligonucleotide
  Target: LAMA2; (+) strand; PAM type: YTN; PAM sequence: TTG
ggtttgcctgatgttttttc

SEQ ID NO: 340933 - DNA, 20 bp, Artificial Sequence
  Description of Artificial Sequence: Synthetic oligonucleotide
  Target: LAMA2; (+) strand; PAM type: YTN; PAM sequence: TTT
gcctgatgttttttcatggt

SEQ ID NO: 340934 - DNA, 20 bp, Artificial Sequence
  Description of Artificial Sequence: Synthetic oligonucleotide
  Target: LAMA2; (+) strand; PAM type: YTN; PAM sequence: TTG
cctgatgttttttcatggtt

SEQ ID NO: 340935 - DNA, 20 bp, Artificial Sequence
  Description of Artificial Sequence: Synthetic oligonucleotide
  Target: LAMA2; (+) strand; PAM type: YTN; PAM sequence: CTG
atgttttttcatggttaaac

SEQ ID NO: 340936 - DNA, 20 bp, Artificial Sequence
  Description of Artificial Sequence: Synthetic oligonucleotide
  Target: LAMA2; (+) strand; PAM type: YTN; PAM sequence: TTT
tttcatggttaaactgggct

SEQ ID NO: 340937 - DNA, 20 bp, Artificial Sequence
  Description of Artificial Sequence: Synthetic oligonucleotide
  Target: LAMA2; (+) strand; PAM type: YTN; PAM sequence: TTT
ttcatggttaaactgggctt

SEQ ID NO: 340938 - DNA, 20 bp, Artificial Sequence
  Description of Artificial Sequence: Synthetic oligonucleotide
  Target: LAMA2; (+) strand; PAM type: YTN; PAM sequence: TTT
tcatggttaaactgggcttc

SEQ ID NO: 340939 - DNA, 20 bp, Artificial Sequence
  Description of Artificial Sequence: Synthetic oligonucleotide
  Target: LAMA2; (+) strand; PAM type: YTN; PAM sequence: TTT
catggttaaactgggcttct

SEQ ID NO: 340940 - DNA, 20 bp, Artificial Sequence
  Description of Artificial Sequence: Synthetic oligonucleotide
  Target: LAMA2; (+) strand; PAM type: YTN; PAM sequence: TTC
atggttaaactgggcttctg

SEQ ID NO: 340941 - DNA, 20 bp, Artificial Sequence
  Description of Artificial Sequence: Synthetic oligonucleotide
  Target: LAMA2; (+) strand; PAM type: YTN; PAM sequence: TTA
aactgggcttctggattttg

SEQ ID NO: 340942 - DNA, 20 bp, Artificial Sequence
  Description of Artificial Sequence: Synthetic oligonucleotide
  Target: LAMA2; (+) strand; PAM type: YTN; PAM sequence: CTG
ggcttctggattttgggaac

SEQ ID NO: 340943 - DNA, 20 bp, Artificial Sequence
  Description of Artificial Sequence: Synthetic oligonucleotide
  Target: LAMA2; (+) strand; PAM type: YTN; PAM sequence: CTT
ctggattttgggaaccaata

SEQ ID NO: 340944 - DNA, 20 bp, Artificial Sequence
  Description of Artificial Sequence: Synthetic oligonucleotide
  Target: LAMA2; (+) strand; PAM type: YTN; PAM sequence: TTC
tggattttgggaaccaatac

SEQ ID NO: 340945 - DNA, 20 bp, Artificial Sequence
  Description of Artificial Sequence: Synthetic oligonucleotide
  Target: LAMA2; (+) strand; PAM type: YTN; PAM sequence: CTG
gattttgggaaccaatacta

SEQ ID NO: 340946 - DNA, 20 bp, Artificial Sequence
  Description of Artificial Sequence: Synthetic oligonucleotide
  Target: LAMA2; (+) strand; PAM type: YTN; PAM sequence: TTT
tgggaaccaatactacagag

SEQ ID NO: 340947 - DNA, 20 bp, Artificial Sequence
  Description of Artificial Sequence: Synthetic oligonucleotide
  Target: LAMA2; (+) strand; PAM type: YTN; PAM sequence: TTT
gggaaccaatactacagagg

SEQ ID NO: 340948 - DNA, 20 bp, Artificial Sequence
  Description of Artificial Sequence: Synthetic oligonucleotide
  Target: LAMA2; (+) strand; PAM type: YTN; PAM sequence: TTG
ggaaccaatactacagagga

SEQ ID NO: 340949 - DNA, 20 bp, Artificial Sequence
  Description of Artificial Sequence: Synthetic oligonucleotide
  Target: LAMA2; (+) strand; PAM type: YTN; PAM sequence: CTA
cagaggaaacagtttctcat

SEQ ID NO: 340950 - DNA, 20 bp, Artificial Sequence
  Description of Artificial Sequence: Synthetic oligonucleotide
  Target: LAMA2; (+) strand; PAM type: YTN; PAM sequence: TTT
ctcattgcatcaatcatttt

SEQ ID NO: 340951 - DNA, 20 bp, Artificial Sequence
  Description of Artificial Sequence: Synthetic oligonucleotide
  Target: LAMA2; (+) strand; PAM type: YTN; PAM sequence: TTC
tcattgcatcaatcattttt

SEQ ID NO: 340952 - DNA, 20 bp, Artificial Sequence
  Description of Artificial Sequence: Synthetic oligonucleotide
  Target: LAMA2; (+) strand; PAM type: YTN; PAM sequence: CTC
attgcatcaatcatttttta

SEQ ID NO: 340953 - DNA, 20 bp, Artificial Sequence
  Description of Artificial Sequence: Synthetic oligonucleotide
  Target: LAMA2; (+) strand; PAM type: YTN; PAM sequence: TTG
catcaatcattttttattaa

SEQ ID NO: 340954 - DNA, 20 bp, Artificial Sequence
  Description of Artificial Sequence: Synthetic oligonucleotide
  Target: LAMA2; (+) strand; PAM type: YTN; PAM sequence: TTT
tttattaatatatgcatatt

SEQ ID NO: 340955 - DNA, 20 bp, Artificial Sequence
  Description of Artificial Sequence: Synthetic oligonucleotide
  Target: LAMA2; (+) strand; PAM type: YTN; PAM sequence: TTT
ttattaatatatgcatattt

SEQ ID NO: 340956 - DNA, 20 bp, Artificial Sequence
  Description of Artificial Sequence: Synthetic oligonucleotide
  Target: LAMA2; (+) strand; PAM type: YTN; PAM sequence: TTT
tattaatatatgcatatttt

SEQ ID NO: 340957 - DNA, 20 bp, Artificial Sequence
  Description of Artificial Sequence: Synthetic oligonucleotide
  Target: LAMA2; (+) strand; PAM type: YTN; PAM sequence: TTT
attaatatatgcatattttt

SEQ ID NO: 340958 - DNA, 20 bp, Artificial Sequence
  Description of Artificial Sequence: Synthetic oligonucleotide
  Target: LAMA2; (+) strand; PAM type: YTN; PAM sequence: TTA
ttaatatatgcatatttttt

SEQ ID NO: 340959 - DNA, 20 bp, Artificial Sequence
  Description of Artificial Sequence: Synthetic oligonucleotide
  Target: LAMA2; (+) strand; PAM type: YTN; PAM sequence: TTA
atatatgcatatttttttct

SEQ ID NO: 340960 - DNA, 20 bp, Artificial Sequence
  Description of Artificial Sequence: Synthetic oligonucleotide
  Target: LAMA2; (+) strand; PAM type: YTN; PAM sequence: TTT
ttttcttttttattggttta

SEQ ID NO: 340961 - DNA, 20 bp, Artificial Sequence
  Description of Artificial Sequence: Synthetic oligonucleotide
  Target: LAMA2; (+) strand; PAM type: YTN; PAM sequence: TTT
tttcttttttattggtttat

SEQ ID NO: 340962 - DNA, 20 bp, Artificial Sequence
  Description of Artificial Sequence: Synthetic oligonucleotide
  Target: LAMA2; (+) strand; PAM type: YTN; PAM sequence: TTT
ttcttttttattggtttatg

SEQ ID NO: 340963 - DNA, 20 bp, Artificial Sequence
  Description of Artificial Sequence: Synthetic oligonucleotide
  Target: LAMA2; (+) strand; PAM type: YTN; PAM sequence: TTT
tcttttttattggtttatgg

SEQ ID NO: 340964 - DNA, 20 bp, Artificial Sequence
  Description of Artificial Sequence: Synthetic oligonucleotide
  Target: LAMA2; (+) strand; PAM type: YTN; PAM sequence: TTT
cttttttattggtttatggg

SEQ ID NO: 340965 - DNA, 20 bp, Artificial Sequence
  Description of Artificial Sequence: Synthetic oligonucleotide
  Target: LAMA2; (+) strand; PAM type: YTN; PAM sequence: TTC
ttttttattggtttatgggg

SEQ ID NO: 340966 - DNA, 20 bp, Artificial Sequence
  Description of Artificial Sequence: Synthetic oligonucleotide
  Target: LAMA2; (+) strand; PAM type: YTN; PAM sequence: CTT
ttttattggtttatggggct

SEQ ID NO: 340967 - DNA, 20 bp, Artificial Sequence
  Description of Artificial Sequence: Synthetic oligonucleotide
  Target: LAMA2; (+) strand; PAM type: YTN; PAM sequence: TTT
tttattggtttatggggctt

SEQ ID NO: 340968 - DNA, 20 bp, Artificial Sequence
  Description of Artificial Sequence: Synthetic oligonucleotide
  Target: LAMA2; (+) strand; PAM type: YTN; PAM sequence: TTT
ttattggtttatggggcttg

SEQ ID NO: 340969 - DNA, 20 bp, Artificial Sequence
  Description of Artificial Sequence: Synthetic oligonucleotide
  Target: LAMA2; (+) strand; PAM type: YTN; PAM sequence: TTT
tattggtttatggggcttgt

SEQ ID NO: 340970 - DNA, 20 bp, Artificial Sequence
  Description of Artificial Sequence: Synthetic oligonucleotide
  Target: LAMA2; (+) strand; PAM type: YTN; PAM sequence: TTT
attggtttatggggcttgtg

SEQ ID NO: 340971 - DNA, 20 bp, Artificial Sequence
  Description of Artificial Sequence: Synthetic oligonucleotide
  Target: LAMA2; (+) strand; PAM type: YTN; PAM sequence: TTA
ttggtttatggggcttgtgc

SEQ ID NO: 340972 - DNA, 20 bp, Artificial Sequence
  Description of Artificial Sequence: Synthetic oligonucleotide
  Target: LAMA2; (+) strand; PAM type: YTN; PAM sequence: TTG
gtttatggggcttgtgcttc

SEQ ID NO: 340973 - DNA, 20 bp, Artificial Sequence
  Description of Artificial Sequence: Synthetic oligonucleotide
  Target: LAMA2; (+) strand; PAM type: YTN; PAM sequence: TTT
atggggcttgtgcttctatt

SEQ ID NO: 340974 - DNA, 20 bp, Artificial Sequence
  Description of Artificial Sequence: Synthetic oligonucleotide
  Target: LAMA2; (+) strand; PAM type: YTN; PAM sequence: TTA
tggggcttgtgcttctatta

SEQ ID NO: 340975 - DNA, 20 bp, Artificial Sequence
  Description of Artificial Sequence: Synthetic oligonucleotide
  Target: LAMA2; (+) strand; PAM type: YTN; PAM sequence: CTT
gtgcttctattaataggtag

SEQ ID NO: 340976 - DNA, 20 bp, Artificial Sequence
  Description of Artificial Sequence: Synthetic oligonucleotide
  Target: LAMA2; (+) strand; PAM type: YTN; PAM sequence: TTG
tgcttctattaataggtaga

SEQ ID NO: 340977 - DNA, 20 bp, Artificial Sequence
  Description of Artificial Sequence: Synthetic oligonucleotide
  Target: LAMA2; (+) strand; PAM type: YTN; PAM sequence: CTT
ctattaataggtagattttt

SEQ ID NO: 340978 - DNA, 20 bp, Artificial Sequence
  Description of Artificial Sequence: Synthetic oligonucleotide
  Target: LAMA2; (+) strand; PAM type: YTN; PAM sequence: TTC
tattaataggtagattttta

SEQ ID NO: 340979 - DNA, 20 bp, Artificial Sequence
  Description of Artificial Sequence: Synthetic oligonucleotide
  Target: LAMA2; (+) strand; PAM type: YTN; PAM sequence: CTA
ttaataggtagatttttaaa

SEQ ID NO: 340980 - DNA, 20 bp, Artificial Sequence
  Description of Artificial Sequence: Synthetic oligonucleotide
  Target: LAMA2; (+) strand; PAM type: YTN; PAM sequence: TTA
ataggtagatttttaaaatg

SEQ ID NO: 340981 - DNA, 20 bp, Artificial Sequence
  Description of Artificial Sequence: Synthetic oligonucleotide
  Target: LAMA2; (+) strand; PAM type: YTN; PAM sequence: TTT
ttaaaatgtttttaattttt

SEQ ID NO: 340982 - DNA, 20 bp, Artificial Sequence
  Description of Artificial Sequence: Synthetic oligonucleotide
  Target: LAMA2; (+) strand; PAM type: YTN; PAM sequence: TTT
taaaatgtttttaattttta

SEQ ID NO: 340983 - DNA, 20 bp, Artificial Sequence
  Description of Artificial Sequence: Synthetic oligonucleotide
  Target: LAMA2; (+) strand; PAM type: YTN; PAM sequence: TTT
aaaatgtttttaatttttat

SEQ ID NO: 340984 - DNA, 20 bp, Artificial Sequence
  Description of Artificial Sequence: Synthetic oligonucleotide
  Target: LAMA2; (+) strand; PAM type: YTN; PAM sequence: TTA
aaatgtttttaatttttatg

SEQ ID NO: 340985 - DNA, 20 bp, Artificial Sequence
  Description of Artificial Sequence: Synthetic oligonucleotide
  Target: LAMA2; (+) strand; PAM type: YTN; PAM sequence: TTT
ttaatttttatggttacata

SEQ ID NO: 340986 - DNA, 20 bp, Artificial Sequence
  Description of Artificial Sequence: Synthetic oligonucleotide
  Target: LAMA2; (+) strand; PAM type: YTN; PAM sequence: TTT
taatttttatggttacatag

SEQ ID NO: 340987 - DNA, 20 bp, Artificial Sequence
  Description of Artificial Sequence: Synthetic oligonucleotide
  Target: LAMA2; (+) strand; PAM type: YTN; PAM sequence: TTT
aatttttatggttacatagt

SEQ ID NO: 340988 - DNA, 20 bp, Artificial Sequence
  Description of Artificial Sequence: Synthetic oligonucleotide
  Target: LAMA2; (+) strand; PAM type: YTN; PAM sequence: TTA
atttttatggttacatagta

SEQ ID NO: 340989 - DNA, 20 bp, Artificial Sequence
  Description of Artificial Sequence: Synthetic oligonucleotide
  Target: LAMA2; (+) strand; PAM type: YTN; PAM sequence: TTT
ttatggttacatagtaggtg

SEQ ID NO: 340990 - DNA, 20 bp, Artificial Sequence
  Description of Artificial Sequence: Synthetic oligonucleotide
  Target: LAMA2; (+) strand; PAM type: YTN; PAM sequence: TTT
tatggttacatagtaggtgt

SEQ ID NO: 340991 - DNA, 20 bp, Artificial Sequence
  Description of Artificial Sequence: Synthetic oligonucleotide
  Target: LAMA2; (+) strand; PAM type: YTN; PAM sequence: TTT
atggttacatagtaggtgta

SEQ ID NO: 340992 - DNA, 20 bp, Artificial Sequence
  Description of Artificial Sequence: Synthetic oligonucleotide
  Target: LAMA2; (+) strand; PAM type: YTN; PAM sequence: TTA
tggttacatagtaggtgtat

SEQ ID NO: 340993 - DNA, 20 bp, Artificial Sequence
  Description of Artificial Sequence: Synthetic oligonucleotide
  Target: LAMA2; (+) strand; PAM type: YTN; PAM sequence: TTA
catagtaggtgtatatattt

SEQ ID NO: 340994 - DNA, 20 bp, Artificial Sequence
  Description of Artificial Sequence: Synthetic oligonucleotide
  Target: LAMA2; (+) strand; PAM type: YTN; PAM sequence: TTT
tagatagatttttaacgtgg

SEQ ID NO: 340995 - DNA, 20 bp, Artificial Sequence
  Description of Artificial Sequence: Synthetic oligonucleotide
  Target: LAMA2; (+) strand; PAM type: YTN; PAM sequence: TTT
agatagatttttaacgtgga

SEQ ID NO: 340996 - DNA, 20 bp, Artificial Sequence
  Description of Artificial Sequence: Synthetic oligonucleotide
  Target: LAMA2; (+) strand; PAM type: YTN; PAM sequence: TTA
gatagatttttaacgtggac

SEQ ID NO: 340997 - DNA, 20 bp, Artificial Sequence
  Description of Artificial Sequence: Synthetic oligonucleotide
  Target: LAMA2; (+) strand; PAM type: YTN; PAM sequence: TTT
ttaacgtggacagcagtatc

SEQ ID NO: 340998 - DNA, 20 bp, Artificial Sequence
  Description of Artificial Sequence: Synthetic oligonucleotide
  Target: LAMA2; (+) strand; PAM type: YTN; PAM sequence: TTT
taacgtggacagcagtatct

SEQ ID NO: 340999 - DNA, 20 bp, Artificial Sequence
  Description of Artificial Sequence: Synthetic oligonucleotide
  Target: LAMA2; (+) strand; PAM type: YTN; PAM sequence: TTT
aacgtggacagcagtatcta

SEQ ID NO: 341000 - DNA, 20 bp, Artificial Sequence
  Description of Artificial Sequence: Synthetic oligonucleotide
  Target: LAMA2; (+) strand; PAM type: YTN; PAM sequence: TTA
acgtggacagcagtatctaa

SEQ ID NO: 341001 - DNA, 20 bp, Artificial Sequence
  Description of Artificial Sequence: Synthetic oligonucleotide
  Target: LAMA2; (+) strand; PAM type: YTN; PAM sequence: CTA
aatatttactgtgatttgta

SEQ ID NO: 341002 - DNA, 20 bp, Artificial Sequence
  Description of Artificial Sequence: Synthetic oligonucleotide
  Target: LAMA2; (+) strand; PAM type: YTN; PAM sequence: TTT
actgtgatttgtaatgtata

SEQ ID NO: 341003 - DNA, 20 bp, Artificial Sequence
  Description of Artificial Sequence: Synthetic oligonucleotide
  Target: LAMA2; (+) strand; PAM type: YTN; PAM sequence: TTA
ctgtgatttgtaatgtatat

SEQ ID NO: 341004 - DNA, 20 bp, Artificial Sequence
  Description of Artificial Sequence: Synthetic oligonucleotide
  Target: LAMA2; (+) strand; PAM type: YTN; PAM sequence: CTG
tgatttgtaatgtatatttt

SEQ ID NO: 341005 - DNA, 20 bp, Artificial Sequence
  Description of Artificial Sequence: Synthetic oligonucleotide
  Target: LAMA2; (+) strand; PAM type: YTN; PAM sequence: TTT
gtaatgtatatttttcacta

SEQ ID NO: 341006 - DNA, 20 bp, Artificial Sequence
  Description of Artificial Sequence: Synthetic oligonucleotide
  Target: LAMA2; (+) strand; PAM type: YTN; PAM sequence: TTG
taatgtatatttttcactaa

SEQ ID NO: 341007 - DNA, 20 bp, Artificial Sequence
  Description of Artificial Sequence: Synthetic oligonucleotide
  Target: LAMA2; (+) strand; PAM type: YTN; PAM sequence: TTT
ttcactaagcattgaatggt

SEQ ID NO: 341008 - DNA, 20 bp, Artificial Sequence
  Description of Artificial Sequence: Synthetic oligonucleotide
  Target: LAMA2; (+) strand; PAM type: YTN; PAM sequence: TTT
tcactaagcattgaatggtc

SEQ ID NO: 341009 - DNA, 20 bp, Artificial Sequence
  Description of Artificial Sequence: Synthetic oligonucleotide
  Target: LAMA2; (+) strand; PAM type: YTN; PAM sequence: TTT
cactaagcattgaatggtca

SEQ ID NO: 341010 - DNA, 20 bp, Artificial Sequence
  Description of Artificial Sequence: Synthetic oligonucleotide
  Target: LAMA2; (+) strand; PAM type: YTN; PAM sequence: TTC
actaagcattgaatggtcat

SEQ ID NO: 341011 - DNA, 20 bp, Artificial Sequence
  Description of Artificial Sequence: Synthetic oligonucleotide
  Target: LAMA2; (+) strand; PAM type: YTN; PAM sequence: CTA
agcattgaatggtcattttc

SEQ ID NO: 341012 - DNA, 20 bp, Artificial Sequence
  Description of Artificial Sequence: Synthetic oligonucleotide
  Target: LAMA2; (+) strand; PAM type: YTN; PAM sequence: TTG
aatggtcattttcttccaga

SEQ ID NO: 341013 - DNA, 20 bp, Artificial Sequence
  Description of Artificial Sequence: Synthetic oligonucleotide
  Target: LAMA2; (+) strand; PAM type: YTN; PAM sequence: TTT
tcttccagaccttcaaaata

SEQ ID NO: 341014 - DNA, 20 bp, Artificial Sequence
  Description of Artificial Sequence: Synthetic oligonucleotide
  Target: LAMA2; (+) strand; PAM type: YTN; PAM sequence: TTT
cttccagaccttcaaaatat

SEQ ID NO: 341015 - DNA, 20 bp, Artificial Sequence
  Description of Artificial Sequence: Synthetic oligonucleotide
  Target: LAMA2; (+) strand; PAM type: YTN; PAM sequence: TTC
ttccagaccttcaaaatatt

SEQ ID NO: 341016 - DNA, 20 bp, Artificial Sequence
  Description of Artificial Sequence: Synthetic oligonucleotide
  Target: LAMA2; (+) strand; PAM type: YTN; PAM sequence: CTT
ccagaccttcaaaatattcc

SEQ ID NO: 341017 - DNA, 20 bp, Artificial Sequence
  Description of Artificial Sequence: Synthetic oligonucleotide
  Target: LAMA2; (+) strand; PAM type: YTN; PAM sequence: TTC
cagaccttcaaaatattcct

SEQ ID NO: 341018 - DNA, 20 bp, Artificial Sequence
  Description of Artificial Sequence: Synthetic oligonucleotide
  Target: LAMA2; (+) strand; PAM type: YTN; PAM sequence: CTT
caaaatattccttaaatatg

SEQ ID NO: 341019 - DNA, 20 bp, Artificial Sequence
  Description of Artificial Sequence: Synthetic oligonucleotide
  Target: LAMA2; (+) strand; PAM type: YTN; PAM sequence: TTC
aaaatattccttaaatatgt

SEQ ID NO: 341020 - DNA, 20 bp, Artificial Sequence
  Description of Artificial Sequence: Synthetic oligonucleotide
  Target: LAMA2; (+) strand; PAM type: YTN; PAM sequence: TTC
cttaaatatgtcagaaataa

SEQ ID NO: 341021 - DNA, 20 bp, Artificial Sequence
  Description of Artificial Sequence: Synthetic oligonucleotide
  Target: LAMA2; (+) strand; PAM type: YTN; PAM sequence: CTT
aaatatgtcagaaataagaa

SEQ ID NO: 341022 - DNA, 20 bp, Artificial Sequence
  Description of Artificial Sequence: Synthetic oligonucleotide
  Target: LAMA2; (+) strand; PAM type: YTN; PAM sequence: TTA
aatatgtcagaaataagaaa

SEQ ID NO: 341023 - DNA, 20 bp, Artificial Sequence
  Description of Artificial Sequence: Synthetic oligonucleotide
  Target: LAMA2; (+) strand; PAM type: YTN; PAM sequence: CTC
cctctctgccttcctccctt

SEQ ID NO: 341024 - DNA, 20 bp, Artificial Sequence
  Description of Artificial Sequence: Synthetic oligonucleotide
  Target: LAMA2; (+) strand; PAM type: YTN; PAM sequence: CTC
tctgccttcctcccttcctt

SEQ ID NO: 341025 - DNA, 20 bp, Artificial Sequence
  Description of Artificial Sequence: Synthetic oligonucleotide
  Target: LAMA2; (+) strand; PAM type: YTN; PAM sequence: CTC
tgccttcctcccttccttcc

SEQ ID NO: 341026 - DNA, 20 bp, Artificial Sequence
  Description of Artificial Sequence: Synthetic oligonucleotide
  Target: LAMA2; (+) strand; PAM type: YTN; PAM sequence: CTG
ccttcctcccttccttcctt

SEQ ID NO: 341027 - DNA, 20 bp, Artificial Sequence
  Description of Artificial Sequence: Synthetic oligonucleotide
  Target: LAMA2; (+) strand; PAM type: YTN; PAM sequence: CTT
cctcccttccttccttcctt

SEQ ID NO: 341028 - DNA, 20 bp, Artificial Sequence
  Description of Artificial Sequence: Synthetic oligonucleotide
  Target: LAMA2; (+) strand; PAM type: YTN; PAM sequence: TTC
ctcccttccttccttccttc

SEQ ID NO: 341029 - DNA, 20 bp, Artificial Sequence
  Description of Artificial Sequence: Synthetic oligonucleotide
  Target: LAMA2; (+) strand; PAM type: YTN; PAM sequence: CTC
ccttccttccttccttcctt

SEQ ID NO: 341030 - DNA, 20 bp, Artificial Sequence
  Description of Artificial Sequence: Synthetic oligonucleotide
  Target: LAMA2; (+) strand; PAM type: YTN; PAM sequence: CTT
ccttccttccttcctttttt

SEQ ID NO: 341031 - DNA, 20 bp, Artificial Sequence
  Description of Artificial Sequence: Synthetic oligonucleotide
  Target: LAMA2; (+) strand; PAM type: YTN; PAM sequence: TTC
cttccttccttccttttttt

SEQ ID NO: 341032 - DNA, 20 bp, Artificial Sequence
  Description of Artificial Sequence: Synthetic oligonucleotide
  Target: LAMA2; (+) strand; PAM type: YTN; PAM sequence: CTT
ccttccttccttttttttct

SEQ ID NO: 341033 - DNA, 20 bp, Artificial Sequence
  Description of Artificial Sequence: Synthetic oligonucleotide
  Target: LAMA2; (+) strand; PAM type: YTN; PAM sequence: TTC
cttccttccttttttttctt

SEQ ID NO: 341034 - DNA, 20 bp, Artificial Sequence
  Description of Artificial Sequence: Synthetic oligonucleotide
  Target: LAMA2; (+) strand; PAM type: YTN; PAM sequence: CTT
ccttccttttttttctttct

SEQ ID NO: 341035 - DNA, 20 bp, Artificial Sequence
  Description of Artificial Sequence: Synthetic oligonucleotide
  Target: LAMA2; (+) strand; PAM type: YTN; PAM sequence: TTC
cttccttttttttctttctt

SEQ ID NO: 341036 - DNA, 20 bp, Artificial Sequence
  Description of Artificial Sequence: Synthetic oligonucleotide
  Target: LAMA2; (+) strand; PAM type: YTN; PAM sequence: CTT
ccttttttttctttcttctt

SEQ ID NO: 341037 - DNA, 20 bp, Artificial Sequence
  Description of Artificial Sequence: Synthetic oligonucleotide
  Target: LAMA2; (+) strand; PAM type: YTN; PAM sequence: TTC
cttttttttctttcttcttt

SEQ ID NO: 341038 - DNA, 20 bp, Artificial Sequence
  Description of Artificial Sequence: Synthetic oligonucleotide
  Target: LAMA2; (+) strand; PAM type: YTN; PAM sequence: CTT
ttttttctttcttctttaca

SEQ ID NO: 341039 - DNA, 20 bp, Artificial Sequence
  Description of Artificial Sequence: Synthetic oligonucleotide
  Target: LAMA2; (+) strand; PAM type: YTN; PAM sequence: TTT
tttttctttcttctttacaa

SEQ ID NO: 341040 - DNA, 20 bp, Artificial Sequence
  Description of Artificial Sequence: Synthetic oligonucleotide
  Target: LAMA2; (+) strand; PAM type: YTN; PAM sequence: TTT
ttttctttcttctttacaaa

SEQ ID NO: 341041 - DNA, 20 bp, Artificial Sequence
  Description of Artificial Sequence: Synthetic oligonucleotide
  Target: LAMA2; (+) strand; PAM type: YTN; PAM sequence: TTT
tttctttcttctttacaaac

SEQ ID NO: 341042 - DNA, 20 bp, Artificial Sequence
  Description of Artificial Sequence: Synthetic oligonucleotide
  Target: LAMA2; (+) strand; PAM type: YTN; PAM sequence: TTT
ttctttcttctttacaaaca

SEQ ID NO: 341043 - DNA, 20 bp, Artificial Sequence
  Description of Artificial Sequence: Synthetic oligonucleotide
  Target: LAMA2; (+) strand; PAM type: YTN; PAM sequence: TTT
tctttcttctttacaaacag

SEQ ID NO: 341044 - DNA, 20 bp, Artificial Sequence
  Description of Artificial Sequence: Synthetic oligonucleotide
  Target: LAMA2; (+) strand; PAM type: YTN; PAM sequence: TTT
ctttcttctttacaaacagg

SEQ ID NO: 341045 - DNA, 20 bp, Artificial Sequence
  Description of Artificial Sequence: Synthetic oligonucleotide
  Target: LAMA2; (+) strand; PAM type: YTN; PAM sequence: TTC
tttcttctttacaaacaggt

SEQ ID NO: 341046 - DNA, 20 bp, Artificial Sequence
  Description of Artificial Sequence: Synthetic oligonucleotide
  Target: LAMA2; (+) strand; PAM type: YTN; PAM sequence: CTT
tcttctttacaaacaggttc

SEQ ID NO: 341047 - DNA, 20 bp, Artificial Sequence
  Description of Artificial Sequence: Synthetic oligonucleotide
  Target: LAMA2; (+) strand; PAM type: YTN; PAM sequence: TTT
cttctttacaaacaggttct

SEQ ID NO: 341048 - DNA, 20 bp, Artificial Sequence
  Description of Artificial Sequence: Synthetic oligonucleotide
  Target: LAMA2; (+) strand; PAM type: YTN; PAM sequence: TTC
ttctttacaaacaggttctc

SEQ ID NO: 341049 - DNA, 20 bp, Artificial Sequence
  Description of Artificial Sequence: Synthetic oligonucleotide
  Target: LAMA2; (+) strand; PAM type: YTN; PAM sequence: CTT
ctttacaaacaggttctcat

SEQ ID NO: 341050 - DNA, 20 bp, Artificial Sequence
  Description of Artificial Sequence: Synthetic oligonucleotide
  Target: LAMA2; (+) strand; PAM type: YTN; PAM sequence: TTC
tttacaaacaggttctcatt

SEQ ID NO: 341051 - DNA, 20 bp, Artificial Sequence
  Description of Artificial Sequence: Synthetic oligonucleotide
  Target: LAMA2; (+) strand; PAM type: YTN; PAM sequence: CTT
tacaaacaggttctcattgt

SEQ ID NO: 341052 - DNA, 20 bp, Artificial Sequence
  Description of Artificial Sequence: Synthetic oligonucleotide
  Target: LAMA2; (+) strand; PAM type: YTN; PAM sequence: TTT
acaaacaggttctcattgtg

SEQ ID NO: 341053 - DNA, 20 bp, Artificial Sequence
  Description of Artificial Sequence: Synthetic oligonucleotide
  Target: LAMA2; (+) strand; PAM type: YTN; PAM sequence: TTA
caaacaggttctcattgtgt

SEQ ID NO: 341054 - DNA, 20 bp, Artificial Sequence
  Description of Artificial Sequence: Synthetic oligonucleotide
  Target: LAMA2; (+) strand; PAM type: YTN; PAM sequence: TTC
tcattgtgttgatcaggcta

SEQ ID NO: 341055 - DNA, 20 bp, Artificial Sequence
  Description of Artificial Sequence: Synthetic oligonucleotide
  Target: LAMA2; (+) strand; PAM type: YTN; PAM sequence: CTC
attgtgttgatcaggctaga

SEQ ID NO: 341056 - DNA, 20 bp, Artificial Sequence
  Description of Artificial Sequence: Synthetic oligonucleotide
  Target: LAMA2; (+) strand; PAM type: YTN; PAM sequence: TTG
tgttgatcaggctagagtcc

SEQ ID NO: 341057 - DNA, 20 bp, Artificial Sequence
  Description of Artificial Sequence: Synthetic oligonucleotide
  Target: LAMA2; (+) strand; PAM type: YTN; PAM sequence: TTG
atcaggctagagtccagtgg

SEQ ID NO: 341058 - DNA, 20 bp, Artificial Sequence
  Description of Artificial Sequence: Synthetic oligonucleotide
  Target: LAMA2; (+) strand; PAM type: YTN; PAM sequence: CTA
gagtccagtggcatgattat

SEQ ID NO: 341059 - DNA, 20 bp, Artificial Sequence
  Description of Artificial Sequence: Synthetic oligonucleotide
  Target: LAMA2; (+) strand; PAM type: YTN; PAM sequence: TTA
tagctcactgcaggctcaaa

SEQ ID NO: 341060 - DNA, 20 bp, Artificial Sequence
  Description of Artificial Sequence: Synthetic oligonucleotide
  Target: LAMA2; (+) strand; PAM type: YTN; PAM sequence: CTC
actgcaggctcaaactccta

SEQ ID NO: 341061 - DNA, 20 bp, Artificial Sequence
  Description of Artificial Sequence: Synthetic oligonucleotide
  Target: LAMA2; (+) strand; PAM type: YTN; PAM sequence: CTG
caggctcaaactcctaggct

SEQ ID NO: 341062 - DNA, 20 bp, Artificial Sequence
  Description of Artificial Sequence: Synthetic oligonucleotide
  Target: LAMA2; (+) strand; PAM type: YTN; PAM sequence: CTC
aaactcctaggctcaagaaa

SEQ ID NO: 341063 - DNA, 20 bp, Artificial Sequence
  Description of Artificial Sequence: Synthetic oligonucleotide
  Target: LAMA2; (+) strand; PAM type: YTN; PAM sequence: CTC
ctaggctcaagaaatcttcc

SEQ ID NO: 341064 - DNA, 20 bp, Artificial Sequence
  Description of Artificial Sequence: Synthetic oligonucleotide
  Target: LAMA2; (+) strand; PAM type: YTN; PAM sequence: CTA
ggctcaagaaatcttcctac

SEQ ID NO: 341065 - DNA, 20 bp, Artificial Sequence
  Description of Artificial Sequence: Synthetic oligonucleotide
  Target: LAMA2; (+) strand; PAM type: YTN; PAM sequence: CTC
aagaaatcttcctacctaaa

SEQ ID NO: 341066 - DNA, 20 bp, Artificial Sequence
  Description of Artificial Sequence: Synthetic oligonucleotide
  Target: LAMA2; (+) strand; PAM type: YTN; PAM sequence: CTT
cctacctaaaaaatcagcct

SEQ ID NO: 341067 - DNA, 20 bp, Artificial Sequence
  Description of Artificial Sequence: Synthetic oligonucleotide
  Target: LAMA2; (+) strand; PAM type: YTN; PAM sequence: TTC
ctacctaaaaaatcagcctc

SEQ ID NO: 341068 - DNA, 20 bp, Artificial Sequence
  Description of Artificial Sequence: Synthetic oligonucleotide
  Target: LAMA2; (+) strand; PAM type: YTN; PAM sequence: CTA
cctaaaaaatcagcctccag

SEQ ID NO: 341069 - DNA, 20 bp, Artificial Sequence
  Description of Artificial Sequence: Synthetic oligonucleotide
  Target: LAMA2; (+) strand; PAM type: YTN; PAM sequence: CTA
aaaaatcagcctccagctaa

SEQ ID NO: 341070 - DNA, 20 bp, Artificial Sequence
  Description of Artificial Sequence: Synthetic oligonucleotide
  Target: LAMA2; (+) strand; PAM type: YTN; PAM sequence: CTC
cagctaattttttaaaattt

SEQ ID NO: 341071 - DNA, 20 bp, Artificial Sequence
  Description of Artificial Sequence: Synthetic oligonucleotide
  Target: LAMA2; (+) strand; PAM type: YTN; PAM sequence: CTA
attttttaaaatttttttgt

SEQ ID NO: 341072 - DNA, 20 bp, Artificial Sequence
  Description of Artificial Sequence: Synthetic oligonucleotide
  Target: LAMA2; (+) strand; PAM type: YTN; PAM sequence: TTT
tttaaaatttttttgtagag

SEQ ID NO: 341073 - DNA, 20 bp, Artificial Sequence
  Description of Artificial Sequence: Synthetic oligonucleotide
  Target: LAMA2; (+) strand; PAM type: YTN; PAM sequence: TTT
ttaaaatttttttgtagaga

SEQ ID NO: 341074 - DNA, 20 bp, Artificial Sequence
  Description of Artificial Sequence: Synthetic oligonucleotide
  Target: LAMA2; (+) strand; PAM type: YTN; PAM sequence: TTT
taaaatttttttgtagagac

SEQ ID NO: 341075 - DNA, 20 bp, Artificial Sequence
  Description of Artificial Sequence: Synthetic oligonucleotide
  Target: LAMA2; (+) strand; PAM type: YTN; PAM sequence: TTT
aaaatttttttgtagagaca

SEQ ID NO: 341076 - DNA, 20 bp, Artificial Sequence
  Description of Artificial Sequence: Synthetic oligonucleotide
  Target: LAMA2; (+) strand; PAM type: YTN; PAM sequence: TTA
aaatttttttgtagagacag

SEQ ID NO: 341077 - DNA, 20 bp, Artificial Sequence
  Description of Artificial Sequence: Synthetic oligonucleotide
  Target: LAMA2; (+) strand; PAM type: YTN; PAM sequence: TTT
ttttgtagagacagggtctt

SEQ ID NO: 341078 - DNA, 20 bp, Artificial Sequence
  Description of Artificial Sequence: Synthetic oligonucleotide
  Target: LAMA2; (+) strand; PAM type: YTN; PAM sequence: TTT
tttgtagagacagggtcttg

SEQ ID NO: 341079 - DNA, 20 bp, Artificial Sequence
  Description of Artificial Sequence: Synthetic oligonucleotide
  Target: LAMA2; (+) strand; PAM type: YTN; PAM sequence: TTT
ttgtagagacagggtcttgc

SEQ ID NO: 341080 - DNA, 20 bp, Artificial Sequence
  Description of Artificial Sequence: Synthetic oligonucleotide
  Target: LAMA2; (+) strand; PAM type: YTN; PAM sequence: TTT
tgtagagacagggtcttgct

SEQ ID NO: 341081 - DNA, 20 bp, Artificial Sequence
  Description of Artificial Sequence: Synthetic oligonucleotide
  Target: LAMA2; (+) strand; PAM type: YTN; PAM sequence: TTT
gtagagacagggtcttgcta

SEQ ID NO: 341082 - DNA, 20 bp, Artificial Sequence
  Description of Artificial Sequence: Synthetic oligonucleotide
  Target: LAMA2; (+) strand; PAM type: YTN; PAM sequence: TTG
tagagacagggtcttgctat

SEQ ID NO: 341083 - DNA, 20 bp, Artificial Sequence
  Description of Artificial Sequence: Synthetic oligonucleotide
  Target: LAMA2; (+) strand; PAM type: YTN; PAM sequence: CTT
gctatgttgcccaggccgtt

SEQ ID NO: 341084 - DNA, 20 bp, Artificial Sequence
  Description of Artificial Sequence: Synthetic oligonucleotide
  Target: LAMA2; (+) strand; PAM type: YTN; PAM sequence: TTG
ctatgttgcccaggccgttc

SEQ ID NO: 341085 - DNA, 20 bp, Artificial Sequence
  Description of Artificial Sequence: Synthetic oligonucleotide
  Target: LAMA2; (+) strand; PAM type: YTN; PAM sequence: CTA
tgttgcccaggccgttctca

SEQ ID NO: 341086 - DNA, 20 bp, Artificial Sequence
  Description of Artificial Sequence: Synthetic oligonucleotide
  Target: LAMA2; (+) strand; PAM type: YTN; PAM sequence: TTG
cccaggccgttctcaaactc

SEQ ID NO: 341087 - DNA, 20 bp, Artificial Sequence
  Description of Artificial Sequence: Synthetic oligonucleotide
  Target: LAMA2; (+) strand; PAM type: YTN; PAM sequence: TTC
tcaaactcctggcctcaagt

SEQ ID NO: 341088 - DNA, 20 bp, Artificial Sequence
  Description of Artificial Sequence: Synthetic oligonucleotide
  Target: LAMA2; (+) strand; PAM type: YTN; PAM sequence: CTC
aaactcctggcctcaagtga

SEQ ID NO: 341089 - DNA, 20 bp, Artificial Sequence
  Description of Artificial Sequence: Synthetic oligonucleotide
  Target: LAMA2; (+) strand; PAM type: YTN; PAM sequence: CTC
ctggcctcaagtgatctttc

SEQ ID NO: 341090 - DNA, 20 bp, Artificial Sequence
  Description of Artificial Sequence: Synthetic oligonucleotide
  Target: LAMA2; (+) strand; PAM type: YTN; PAM sequence: CTG
gcctcaagtgatctttccac

SEQ ID NO: 341091 - DNA, 20 bp, Artificial Sequence
  Description of Artificial Sequence: Synthetic oligonucleotide
  Target: LAMA2; (+) strand; PAM type: YTN; PAM sequence: CTC
aagtgatctttccaccttag

SEQ ID NO: 341092 - DNA, 20 bp, Artificial Sequence
  Description of Artificial Sequence: Synthetic oligonucleotide
  Target: LAMA2; (+) strand; PAM type: YTN; PAM sequence: CTT
tccaccttagtcttctaaag

SEQ ID NO: 341093 - DNA, 20 bp, Artificial Sequence
  Description of Artificial Sequence: Synthetic oligonucleotide
  Target: LAMA2; (+) strand; PAM type: YTN; PAM sequence: TTT
ccaccttagtcttctaaagt

SEQ ID NO: 341094 - DNA, 20 bp, Artificial Sequence
  Description of Artificial Sequence: Synthetic oligonucleotide
  Target: LAMA2; (+) strand; PAM type: YTN; PAM sequence: TTC
caccttagtcttctaaagtt

SEQ ID NO: 341095 - DNA, 20 bp, Artificial Sequence
  Description of Artificial Sequence: Synthetic oligonucleotide
  Target: LAMA2; (+) strand; PAM type: YTN; PAM sequence: CTT
agtcttctaaagttacagtc

SEQ ID NO: 341096 - DNA, 20 bp, Artificial Sequence
  Description of Artificial Sequence: Synthetic oligonucleotide
  Target: LAMA2; (+) strand; PAM type: YTN; PAM sequence: TTA
gtcttctaaagttacagtct

SEQ ID NO: 341097 - DNA, 20 bp, Artificial Sequence
  Description of Artificial Sequence: Synthetic oligonucleotide
  Target: LAMA2; (+) strand; PAM type: YTN; PAM sequence: CTT
ctaaagttacagtcttctga

SEQ ID NO: 341098 - DNA, 20 bp, Artificial Sequence
  Description of Artificial Sequence: Synthetic oligonucleotide
  Target: LAMA2; (+) strand; PAM type: YTN; PAM sequence: TTC
taaagttacagtcttctgag

SEQ ID NO: 341099 - DNA, 20 bp, Artificial Sequence
  Description of Artificial Sequence: Synthetic oligonucleotide
  Target: LAMA2; (+) strand; PAM type: YTN; PAM sequence: CTA
aagttacagtcttctgagat

SEQ ID NO: 341100 - DNA, 20 bp, Artificial Sequence
  Description of Artificial Sequence: Synthetic oligonucleotide
  Target: LAMA2; (+) strand; PAM type: YTN; PAM sequence: TTA
cagtcttctgagattacaga

SEQ ID NO: 341101 - DNA, 20 bp, Artificial Sequence
  Description of Artificial Sequence: Synthetic oligonucleotide
  Target: LAMA2; (+) strand; PAM type: YTN; PAM sequence: CTT
ctgagattacagacatgaac

SEQ ID NO: 341102 - DNA, 20 bp, Artificial Sequence
  Description of Artificial Sequence: Synthetic oligonucleotide
  Target: LAMA2; (+) strand; PAM type: YTN; PAM sequence: TTC
tgagattacagacatgaacc

SEQ ID NO: 341103 - DNA, 20 bp, Artificial Sequence
  Description of Artificial Sequence: Synthetic oligonucleotide
  Target: LAMA2; (+) strand; PAM type: YTN; PAM sequence: CTG
agattacagacatgaaccac

SEQ ID NO: 341104 - DNA, 20 bp, Artificial Sequence
  Description of Artificial Sequence: Synthetic oligonucleotide
  Target: LAMA2; (+) strand; PAM type: YTN; PAM sequence: TTA
cagacatgaaccaccatgcc

SEQ ID NO: 341105 - DNA, 20 bp, Artificial Sequence
  Description of Artificial Sequence: Synthetic oligonucleotide
  Target: LAMA2; (+) strand; PAM type: YTN; PAM sequence: CTG
gcccagaggaatttttaagg

SEQ ID NO: 341106 - DNA, 20 bp, Artificial Sequence
  Description of Artificial Sequence: Synthetic oligonucleotide
  Target: LAMA2; (+) strand; PAM type: YTN; PAM sequence: TTT
ttaaggcccacccatgtaac

SEQ ID NO: 341107 - DNA, 20 bp, Artificial Sequence
  Description of Artificial Sequence: Synthetic oligonucleotide
  Target: LAMA2; (+) strand; PAM type: YTN; PAM sequence: TTT
taaggcccacccatgtaaca

SEQ ID NO: 341108 - DNA, 20 bp, Artificial Sequence
  Description of Artificial Sequence: Synthetic oligonucleotide
  Target: LAMA2; (+) strand; PAM type: YTN; PAM sequence: TTT
aaggcccacccatgtaacaa

SEQ ID NO: 341109 - DNA, 20 bp, Artificial Sequence
  Description of Artificial Sequence: Synthetic oligonucleotide
  Target: LAMA2; (+) strand; PAM type: YTN; PAM sequence: TTA
aggcccacccatgtaacaag

SEQ ID NO: 341110 - DNA, 20 bp, Artificial Sequence
  Description of Artificial Sequence: Synthetic oligonucleotide
  Target: LAMA2; (+) strand; PAM type: YTN; PAM sequence: TTA
tgaaataaacatgtctcaat

SEQ ID NO: 341111 - DNA, 20 bp, Artificial Sequence
  Description of Artificial Sequence: Synthetic oligonucleotide
  Target: LAMA2; (+) strand; PAM type: YTN; PAM sequence: CTC
aattgttacacactagttag

SEQ ID NO: 341112 - DNA, 20 bp, Artificial Sequence
  Description of Artificial Sequence: Synthetic oligonucleotide
  Target: LAMA2; (+) strand; PAM type: YTN; PAM sequence: TTG
ttacacactagttagacaac

SEQ ID NO: 341113 - DNA, 20 bp, Artificial Sequence
  Description of Artificial Sequence: Synthetic oligonucleotide
  Target: LAMA2; (+) strand; PAM type: YTN; PAM sequence: TTA
cacactagttagacaacaat

SEQ ID NO: 341114 - DNA, 20 bp, Artificial Sequence
  Description of Artificial Sequence: Synthetic oligonucleotide
  Target: LAMA2; (+) strand; PAM type: YTN; PAM sequence: CTA
gttagacaacaatgttcatg

SEQ ID NO: 341115 - DNA, 20 bp, Artificial Sequence
  Description of Artificial Sequence: Synthetic oligonucleotide
  Target: LAMA2; (+) strand; PAM type: YTN; PAM sequence: TTA
gacaacaatgttcatgtttt

SEQ ID NO: 341116 - DNA, 20 bp, Artificial Sequence
  Description of Artificial Sequence: Synthetic oligonucleotide
  Target: LAMA2; (+) strand; PAM type: YTN; PAM sequence: TTC
atgttttaggcttagaacat

SEQ ID NO: 341117 - DNA, 20 bp, Artificial Sequence
  Description of Artificial Sequence: Synthetic oligonucleotide
  Target: LAMA2; (+) strand; PAM type: YTN; PAM sequence: TTT
taggcttagaacattaatag

SEQ ID NO: 341118 - DNA, 20 bp, Artificial Sequence
  Description of Artificial Sequence: Synthetic oligonucleotide
  Target: LAMA2; (+) strand; PAM type: YTN; PAM sequence: TTT
aggcttagaacattaatagg

SEQ ID NO: 341119 - DNA, 20 bp, Artificial Sequence
  Description of Artificial Sequence: Synthetic oligonucleotide
  Target: LAMA2; (+) strand; PAM type: YTN; PAM sequence: TTA
ggcttagaacattaatagga

SEQ ID NO: 341120 - DNA, 20 bp, Artificial Sequence
  Description of Artificial Sequence: Synthetic oligonucleotide
  Target: LAMA2; (+) strand; PAM type: YTN; PAM sequence: CTT
agaacattaataggaaatag

SEQ ID NO: 341121 - DNA, 20 bp, Artificial Sequence
  Description of Artificial Sequence: Synthetic oligonucleotide
  Target: LAMA2; (+) strand; PAM type: YTN; PAM sequence: TTA
gaacattaataggaaatagt

SEQ ID NO: 341122 - DNA, 20 bp, Artificial Sequence
  Description of Artificial Sequence: Synthetic oligonucleotide
  Target: LAMA2; (+) strand; PAM type: YTN; PAM sequence: TTA
ataggaaatagttttcttgt

SEQ ID NO: 341123 - DNA, 20 bp, Artificial Sequence
  Description of Artificial Sequence: Synthetic oligonucleotide
  Target: LAMA2; (+) strand; PAM type: YTN; PAM sequence: TTT
tcttgtgactaatgccaaat

SEQ ID NO: 341124 - DNA, 20 bp, Artificial Sequence
  Description of Artificial Sequence: Synthetic oligonucleotide
  Target: LAMA2; (+) strand; PAM type: YTN; PAM sequence: TTT
cttgtgactaatgccaaatc

SEQ ID NO: 341125 - DNA, 20 bp, Artificial Sequence
  Description of Artificial Sequence: Synthetic oligonucleotide
  Target: LAMA2; (+) strand; PAM type: YTN; PAM sequence: TTC
ttgtgactaatgccaaatcc

SEQ ID NO: 341126 - DNA, 20 bp, Artificial Sequence
  Description of Artificial Sequence: Synthetic oligonucleotide
  Target: LAMA2; (+) strand; PAM type: YTN; PAM sequence: CTT
gtgactaatgccaaatccac

SEQ ID NO: 341127 - DNA, 20 bp, Artificial Sequence
  Description of Artificial Sequence: Synthetic oligonucleotide
  Target: LAMA2; (+) strand; PAM type: YTN; PAM sequence: TTG
tgactaatgccaaatccact

SEQ ID NO: 341128 - DNA, 20 bp, Artificial Sequence
  Description of Artificial Sequence: Synthetic oligonucleotide
  Target: LAMA2; (+) strand; PAM type: YTN; PAM sequence: CTA
atgccaaatccactgagtct

SEQ ID NO: 341129 - DNA, 20 bp, Artificial Sequence
  Description of Artificial Sequence: Synthetic oligonucleotide
  Target: LAMA2; (+) strand; PAM type: YTN; PAM sequence: CTG
agtctaaagtttattacatt

SEQ ID NO: 341130 - DNA, 20 bp, Artificial Sequence
  Description of Artificial Sequence: Synthetic oligonucleotide
  Target: LAMA2; (+) strand; PAM type: YTN; PAM sequence: CTA
aagtttattacatttccact

SEQ ID NO: 341131 - DNA, 20 bp, Artificial Sequence
  Description of Artificial Sequence: Synthetic oligonucleotide
  Target: LAMA2; (+) strand; PAM type: YTN; PAM sequence: TTT
attacatttccacttgtcta

SEQ ID NO: 341132 - DNA, 20 bp, Artificial Sequence
  Description of Artificial Sequence: Synthetic oligonucleotide
  Target: LAMA2; (+) strand; PAM type: YTN; PAM sequence: TTA
ttacatttccacttgtctaa

SEQ ID NO: 341133 - DNA, 20 bp, Artificial Sequence
  Description of Artificial Sequence: Synthetic oligonucleotide
  Target: LAMA2; (+) strand; PAM type: YTN; PAM sequence: TTA
catttccacttgtctaaaga

SEQ ID NO: 341134 - DNA, 20 bp, Artificial Sequence
  Description of Artificial Sequence: Synthetic oligonucleotide
  Target: LAMA2; (+) strand; PAM type: YTN; PAM sequence: TTT
ccacttgtctaaagaatttt

SEQ ID NO: 341135 - DNA, 20 bp, Artificial Sequence
  Description of Artificial Sequence: Synthetic oligonucleotide
  Target: LAMA2; (+) strand; PAM type: YTN; PAM sequence: TTC
cacttgtctaaagaattttt

SEQ ID NO: 341136 - DNA, 20 bp, Artificial Sequence
  Description of Artificial Sequence: Synthetic oligonucleotide
  Target: LAMA2; (+) strand; PAM type: YTN; PAM sequence: CTT
gtctaaagaatttttgagac

SEQ ID NO: 341137 - DNA, 20 bp, Artificial Sequence
  Description of Artificial Sequence: Synthetic oligonucleotide
  Target: LAMA2; (+) strand; PAM type: YTN; PAM sequence: TTG
tctaaagaatttttgagaca

SEQ ID NO: 341138 - DNA, 20 bp, Artificial Sequence
  Description of Artificial Sequence: Synthetic oligonucleotide
  Target: LAMA2; (+) strand; PAM type: YTN; PAM sequence: CTA
aagaatttttgagacatgtg

SEQ ID NO: 341139 - DNA, 20 bp, Artificial Sequence
  Description of Artificial Sequence: Synthetic oligonucleotide
  Target: LAMA2; (+) strand; PAM type: YTN; PAM sequence: TTT
ttgagacatgtgccaaaatc

SEQ ID NO: 341140 - DNA, 20 bp, Artificial Sequence
  Description of Artificial Sequence: Synthetic oligonucleotide
  Target: LAMA2; (+) strand; PAM type: YTN; PAM sequence: TTT
tgagacatgtgccaaaatct

SEQ ID NO: 341141 - DNA, 20 bp, Artificial Sequence
  Description of Artificial Sequence: Synthetic oligonucleotide
  Target: LAMA2; (+) strand; PAM type: YTN; PAM sequence: TTT
gagacatgtgccaaaatctt

SEQ ID NO: 341142 - DNA, 20 bp, Artificial Sequence
  Description of Artificial Sequence: Synthetic oligonucleotide
  Target: LAMA2; (+) strand; PAM type: YTN; PAM sequence: TTG
agacatgtgccaaaatcttt

SEQ ID NO: 341143 - DNA, 20 bp, Artificial Sequence
  Description of Artificial Sequence: Synthetic oligonucleotide
  Target: LAMA2; (+) strand; PAM type: YTN; PAM sequence: CTT
tagaacattagagctgaaag

SEQ ID NO: 341144 - DNA, 20 bp, Artificial Sequence
  Description of Artificial Sequence: Synthetic oligonucleotide
  Target: LAMA2; (+) strand; PAM type: YTN; PAM sequence: TTT
agaacattagagctgaaaga

SEQ ID NO: 341145 - DNA, 20 bp, Artificial Sequence
  Description of Artificial Sequence: Synthetic oligonucleotide
  Target: LAMA2; (+) strand; PAM type: YTN; PAM sequence: TTA
gaacattagagctgaaagat

SEQ ID NO: 341146 - DNA, 20 bp, Artificial Sequence
  Description of Artificial Sequence: Synthetic oligonucleotide
  Target: LAMA2; (+) strand; PAM type: YTN; PAM sequence: TTA
gagctgaaagataccttagg

SEQ ID NO: 341147 - DNA, 20 bp, Artificial Sequence
  Description of Artificial Sequence: Synthetic oligonucleotide
  Target: LAMA2; (+) strand; PAM type: YTN; PAM sequence: CTG
aaagataccttaggtaaatt

SEQ ID NO: 341148 - DNA, 20 bp, Artificial Sequence
  Description of Artificial Sequence: Synthetic oligonucleotide
  Target: LAMA2; (+) strand; PAM type: YTN; PAM sequence: CTT
aggtaaatttctcatcaatc

SEQ ID NO: 341149 - DNA, 20 bp, Artificial Sequence
  Description of Artificial Sequence: Synthetic oligonucleotide
  Target: LAMA2; (+) strand; PAM type: YTN; PAM sequence: TTA
ggtaaatttctcatcaatct

SEQ ID NO: 341150 - DNA, 20 bp, Artificial Sequence
  Description of Artificial Sequence: Synthetic oligonucleotide
  Target: LAMA2; (+) strand; PAM type: YTN; PAM sequence: TTT
ctcatcaatctattaaagga

SEQ ID NO: 341151 - DNA, 20 bp, Artificial Sequence
  Description of Artificial Sequence: Synthetic oligonucleotide
  Target: LAMA2; (+) strand; PAM type: YTN; PAM sequence: TTC
tcatcaatctattaaaggat

SEQ ID NO: 341152 - DNA, 20 bp, Artificial Sequence
  Description of Artificial Sequence: Synthetic oligonucleotide
  Target: LAMA2; (+) strand; PAM type: YTN; PAM sequence: CTC
atcaatctattaaaggatat

SEQ ID NO: 341153 - DNA, 20 bp, Artificial Sequence
  Description of Artificial Sequence: Synthetic oligonucleotide
  Target: LAMA2; (+) strand; PAM type: YTN; PAM sequence: CTA
ttaaaggatattcaagcccc

SEQ ID NO: 341154 - DNA, 20 bp, Artificial Sequence
  Description of Artificial Sequence: Synthetic oligonucleotide
  Target: LAMA2; (+) strand; PAM type: YTN; PAM sequence: TTA
aaggatattcaagcccccaa

SEQ ID NO: 341155 - DNA, 20 bp, Artificial Sequence
  Description of Artificial Sequence: Synthetic oligonucleotide
  Target: LAMA2; (+) strand; PAM type: YTN; PAM sequence: TTC
aagcccccaatttcagcctc

SEQ ID NO: 341156 - DNA, 20 bp, Artificial Sequence
  Description of Artificial Sequence: Synthetic oligonucleotide
  Target: LAMA2; (+) strand; PAM type: YTN; PAM sequence: TTT
cagcctctgtatccaaactt

SEQ ID NO: 341157 - DNA, 20 bp, Artificial Sequence
  Description of Artificial Sequence: Synthetic oligonucleotide
  Target: LAMA2; (+) strand; PAM type: YTN; PAM sequence: TTC
agcctctgtatccaaacttc

SEQ ID NO: 341158 - DNA, 20 bp, Artificial Sequence
  Description of Artificial Sequence: Synthetic oligonucleotide
  Target: LAMA2; (+) strand; PAM type: YTN; PAM sequence: CTC
tgtatccaaacttcaatact

SEQ ID NO: 341159 - DNA, 20 bp, Artificial Sequence
  Description of Artificial Sequence: Synthetic oligonucleotide
  Target: LAMA2; (+) strand; PAM type: YTN; PAM sequence: CTG
tatccaaacttcaatactgc

SEQ ID NO: 341160 - DNA, 20 bp, Artificial Sequence
  Description of Artificial Sequence: Synthetic oligonucleotide
  Target: LAMA2; (+) strand; PAM type: YTN; PAM sequence: CTT
caatactgccctatgttcat

SEQ ID NO: 341161 - DNA, 20 bp, Artificial Sequence
  Description of Artificial Sequence: Synthetic oligonucleotide
  Target: LAMA2; (+) strand; PAM type: YTN; PAM sequence: TTC
aatactgccctatgttcata

SEQ ID NO: 341162 - DNA, 20 bp, Artificial Sequence
  Description of Artificial Sequence: Synthetic oligonucleotide
  Target: LAMA2; (+) strand; PAM type: YTN; PAM sequence: CTG
ccctatgttcatatcatcac

SEQ ID NO: 341163 - DNA, 20 bp, Artificial Sequence
  Description of Artificial Sequence: Synthetic oligonucleotide
  Target: LAMA2; (+) strand; PAM type: YTN; PAM sequence: CTA
tgttcatatcatcactggag

SEQ ID NO: 341164 - DNA, 20 bp, Artificial Sequence
  Description of Artificial Sequence: Synthetic oligonucleotide
  Target: LAMA2; (+) strand; PAM type: YTN; PAM sequence: TTC
atatcatcactggagaggtc

SEQ ID NO: 341165 - DNA, 20 bp, Artificial Sequence
  Description of Artificial Sequence: Synthetic oligonucleotide
  Target: LAMA2; (+) strand; PAM type: YTN; PAM sequence: CTG
gagaggtctggcctttcctt

SEQ ID NO: 341166 - DNA, 20 bp, Artificial Sequence
  Description of Artificial Sequence: Synthetic oligonucleotide
  Target: LAMA2; (+) strand; PAM type: YTN; PAM sequence: CTG
gcctttccttatggcctctt

SEQ ID NO: 341167 - DNA, 20 bp, Artificial Sequence
  Description of Artificial Sequence: Synthetic oligonucleotide
  Target: LAMA2; (+) strand; PAM type: YTN; PAM sequence: CTT
tccttatggcctctttaatc

SEQ ID NO: 341168 - DNA, 20 bp, Artificial Sequence
  Description of Artificial Sequence: Synthetic oligonucleotide
  Target: LAMA2; (+) strand; PAM type: YTN; PAM sequence: TTT
ccttatggcctctttaatct

SEQ ID NO: 341169 - DNA, 20 bp, Artificial Sequence
  Description of Artificial Sequence: Synthetic oligonucleotide
  Target: LAMA2; (+) strand; PAM type: YTN; PAM sequence: TTC
cttatggcctctttaatctt

SEQ ID NO: 341170 - DNA, 20 bp, Artificial Sequence
  Description of Artificial Sequence: Synthetic oligonucleotide
  Target: LAMA2; (+) strand; PAM type: YTN; PAM sequence: CTT
atggcctctttaatcttaat

SEQ ID NO: 341171 - DNA, 20 bp, Artificial Sequence
  Description of Artificial Sequence: Synthetic oligonucleotide
  Target: LAMA2; (+) strand; PAM type: YTN; PAM sequence: TTA
tggcctctttaatcttaatt

SEQ ID NO: 341172 - DNA, 20 bp, Artificial Sequence
  Description of Artificial Sequence: Synthetic oligonucleotide
  Target: LAMA2; (+) strand; PAM type: YTN; PAM sequence: CTC
tttaatcttaattgcatcat

SEQ ID NO: 341173 - DNA, 20 bp, Artificial Sequence
  Description of Artificial Sequence: Synthetic oligonucleotide
  Target: LAMA2; (+) strand; PAM type: YTN; PAM sequence: CTT
taatcttaattgcatcatct

SEQ ID NO: 341174 - DNA, 20 bp, Artificial Sequence
  Description of Artificial Sequence: Synthetic oligonucleotide
  Target: LAMA2; (+) strand; PAM type: YTN; PAM sequence: TTT
aatcttaattgcatcatctc

SEQ ID NO: 341175 - DNA, 20 bp, Artificial Sequence
  Description of Artificial Sequence: Synthetic oligonucleotide
  Target: LAMA2; (+) strand; PAM type: YTN; PAM sequence: TTA
atcttaattgcatcatctct

SEQ ID NO: 341176 - DNA, 20 bp, Artificial Sequence
  Description of Artificial Sequence: Synthetic oligonucleotide
  Target: LAMA2; (+) strand; PAM type: YTN; PAM sequence: CTT
aattgcatcatctctgatgt

SEQ ID NO: 341177 - DNA, 20 bp, Artificial Sequence
  Description of Artificial Sequence: Synthetic oligonucleotide
  Target: LAMA2; (+) strand; PAM type: YTN; PAM sequence: TTA
attgcatcatctctgatgtt

SEQ ID NO: 341178 - DNA, 20 bp, Artificial Sequence
  Description of Artificial Sequence: Synthetic oligonucleotide
  Target: LAMA2; (+) strand; PAM type: YTN; PAM sequence: TTG
catcatctctgatgttttat

SEQ ID NO: 341179 - DNA, 20 bp, Artificial Sequence
  Description of Artificial Sequence: Synthetic oligonucleotide
  Target: LAMA2; (+) strand; PAM type: YTN; PAM sequence: CTC
tgatgttttatttggctttg

SEQ ID NO: 341180 - DNA, 20 bp, Artificial Sequence
  Description of Artificial Sequence: Synthetic oligonucleotide
  Target: LAMA2; (+) strand; PAM type: YTN; PAM sequence: CTG
atgttttatttggctttgtt

SEQ ID NO: 341181 - DNA, 20 bp, Artificial Sequence
  Description of Artificial Sequence: Synthetic oligonucleotide
  Target: LAMA2; (+) strand; PAM type: YTN; PAM sequence: TTT
tatttggctttgtttgttac

SEQ ID NO: 341182 - DNA, 20 bp, Artificial Sequence
  Description of Artificial Sequence: Synthetic oligonucleotide
  Target: LAMA2; (+) strand; PAM type: YTN; PAM sequence: TTT
atttggctttgtttgttact

SEQ ID NO: 341183 - DNA, 20 bp, Artificial Sequence
  Description of Artificial Sequence: Synthetic oligonucleotide
  Target: LAMA2; (+) strand; PAM type: YTN; PAM sequence: TTA
tttggctttgtttgttactc

SEQ ID NO: 341184 - DNA, 20 bp, Artificial Sequence
  Description of Artificial Sequence: Synthetic oligonucleotide
  Target: LAMA2; (+) strand; PAM type: YTN; PAM sequence: TTT
ggctttgtttgttactccag

SEQ ID NO: 341185 - DNA, 20 bp, Artificial Sequence
  Description of Artificial Sequence: Synthetic oligonucleotide
  Target: LAMA2; (+) strand; PAM type: YTN; PAM sequence: TTG
gctttgtttgttactccagt

SEQ ID NO: 341186 - DNA, 20 bp, Artificial Sequence
  Description of Artificial Sequence: Synthetic oligonucleotide
  Target: LAMA2; (+) strand; PAM type: YTN; PAM sequence: CTT
tgtttgttactccagttact

SEQ ID NO: 341187 - DNA, 20 bp, Artificial Sequence
  Description of Artificial Sequence: Synthetic oligonucleotide
  Target: LAMA2; (+) strand; PAM type: YTN; PAM sequence: TTT
gtttgttactccagttactc

SEQ ID NO: 341188 - DNA, 20 bp, Artificial Sequence
  Description of Artificial Sequence: Synthetic oligonucleotide
  Target: LAMA2; (+) strand; PAM type: YTN; PAM sequence: TTG
tttgttactccagttactcc

SEQ ID NO: 341189 - DNA, 20 bp, Artificial Sequence
  Description of Artificial Sequence: Synthetic oligonucleotide
  Target: LAMA2; (+) strand; PAM type: YTN; PAM sequence: TTT
gttactccagttactcccac

SEQ ID NO: 341190 - DNA, 20 bp, Artificial Sequence
  Description of Artificial Sequence: Synthetic oligonucleotide
  Target: LAMA2; (+) strand; PAM type: YTN; PAM sequence: TTG
ttactccagttactcccacc

SEQ ID NO: 341191 - DNA, 20 bp, Artificial Sequence
  Description of Artificial Sequence: Synthetic oligonucleotide
  Target: LAMA2; (+) strand; PAM type: YTN; PAM sequence: TTA
ctccagttactcccacctgt

SEQ ID NO: 341192 - DNA, 20 bp, Artificial Sequence
  Description of Artificial Sequence: Synthetic oligonucleotide
  Target: LAMA2; (+) strand; PAM type: YTN; PAM sequence: CTC
cagttactcccacctgtttc

SEQ ID NO: 341193 - DNA, 20 bp, Artificial Sequence
  Description of Artificial Sequence: Synthetic oligonucleotide
  Target: LAMA2; (+) strand; PAM type: YTN; PAM sequence: TTA
ctcccacctgtttcccttca

SEQ ID NO: 341194 - DNA, 20 bp, Artificial Sequence
  Description of Artificial Sequence: Synthetic oligonucleotide
  Target: LAMA2; (+) strand; PAM type: YTN; PAM sequence: CTC
ccacctgtttcccttcatgg

SEQ ID NO: 341195 - DNA, 20 bp, Artificial Sequence
  Description of Artificial Sequence: Synthetic oligonucleotide
  Target: LAMA2; (+) strand; PAM type: YTN; PAM sequence: CTG
tttcccttcatggtttggtt

SEQ ID NO: 341196 - DNA, 20 bp, Artificial Sequence
  Description of Artificial Sequence: Synthetic oligonucleotide
  Target: LAMA2; (+) strand; PAM type: YTN; PAM sequence: TTT
cccttcatggtttggtttgg

SEQ ID NO: 341197 - DNA, 20 bp, Artificial Sequence
  Description of Artificial Sequence: Synthetic oligonucleotide
  Target: LAMA2; (+) strand; PAM type: YTN; PAM sequence: TTC
ccttcatggtttggtttggc

SEQ ID NO: 341198 - DNA, 20 bp, Artificial Sequence
  Description of Artificial Sequence: Synthetic oligonucleotide
  Target: LAMA2; (+) strand; PAM type: YTN; PAM sequence: CTT
catggtttggtttggcccct

SEQ ID NO: 341199 - DNA, 20 bp, Artificial Sequence
  Description of Artificial Sequence: Synthetic oligonucleotide
  Target: LAMA2; (+) strand; PAM type: YTN; PAM sequence: TTC
atggtttggtttggcccctt

SEQ ID NO: 341200 - DNA, 20 bp, Artificial Sequence
  Description of Artificial Sequence: Synthetic oligonucleotide
  Target: LAMA2; (+) strand; PAM type: YTN; PAM sequence: TTT
ggtttggccccttctctgcc

SEQ ID NO: 341201 - DNA, 20 bp, Artificial Sequence
  Description of Artificial Sequence: Synthetic oligonucleotide
  Target: LAMA2; (+) strand; PAM type: YTN; PAM sequence: TTG
gtttggccccttctctgccc

SEQ ID NO: 341202 - DNA, 20 bp, Artificial Sequence
  Description of Artificial Sequence: Synthetic oligonucleotide
  Target: LAMA2; (+) strand; PAM type: YTN; PAM sequence: TTT
ggccccttctctgccctcca

SEQ ID NO: 341203 - DNA, 20 bp, Artificial Sequence
  Description of Artificial Sequence: Synthetic oligonucleotide
  Target: LAMA2; (+) strand; PAM type: YTN; PAM sequence: TTG
gccccttctctgccctccac

SEQ ID NO: 341204 - DNA, 20 bp, Artificial Sequence
  Description of Artificial Sequence: Synthetic oligonucleotide
  Target: LAMA2; (+) strand; PAM type: YTN; PAM sequence: CTT
ctctgccctccactccacat

SEQ ID NO: 341205 - DNA, 20 bp, Artificial Sequence
  Description of Artificial Sequence: Synthetic oligonucleotide
  Target: LAMA2; (+) strand; PAM type: YTN; PAM sequence: TTC
tctgccctccactccacatt

SEQ ID NO: 341206 - DNA, 20 bp, Artificial Sequence
  Description of Artificial Sequence: Synthetic oligonucleotide
  Target: LAMA2; (+) strand; PAM type: YTN; PAM sequence: CTC
tgccctccactccacattga

SEQ ID NO: 341207 - DNA, 20 bp, Artificial Sequence
  Description of Artificial Sequence: Synthetic oligonucleotide
  Target: LAMA2; (+) strand; PAM type: YTN; PAM sequence: CTG
ccctccactccacattgatt

SEQ ID NO: 341208 - DNA, 20 bp, Artificial Sequence
  Description of Artificial Sequence: Synthetic oligonucleotide
  Target: LAMA2; (+) strand; PAM type: YTN; PAM sequence: CTC
cactccacattgatttcaag

SEQ ID NO: 341209 - DNA, 20 bp, Artificial Sequence
  Description of Artificial Sequence: Synthetic oligonucleotide
  Target: LAMA2; (+) strand; PAM type: YTN; PAM sequence: CTC
cacattgatttcaagagatc

SEQ ID NO: 341210 - DNA, 20 bp, Artificial Sequence
  Description of Artificial Sequence: Synthetic oligonucleotide
  Target: LAMA2; (+) strand; PAM type: YTN; PAM sequence: TTG
atttcaagagatcaacaaat

SEQ ID NO: 341211 - DNA, 20 bp, Artificial Sequence
  Description of Artificial Sequence: Synthetic oligonucleotide
  Target: LAMA2; (+) strand; PAM type: YTN; PAM sequence: TTT
caagagatcaacaaatgtta

SEQ ID NO: 341212 - DNA, 20 bp, Artificial Sequence
  Description of Artificial Sequence: Synthetic oligonucleotide
  Target: LAMA2; (+) strand; PAM type: YTN; PAM sequence: TTC
aagagatcaacaaatgttag

SEQ ID NO: 341213 - DNA, 20 bp, Artificial Sequence
  Description of Artificial Sequence: Synthetic oligonucleotide
  Target: LAMA2; (+) strand; PAM type: YTN; PAM sequence: TTA
gagaactgggttcaactact

SEQ ID NO: 341214 - DNA, 20 bp, Artificial Sequence
  Description of Artificial Sequence: Synthetic oligonucleotide
  Target: LAMA2; (+) strand; PAM type: YTN; PAM sequence: CTG
ggttcaactactaccaagaa

SEQ ID NO: 341215 - DNA, 20 bp, Artificial Sequence
  Description of Artificial Sequence: Synthetic oligonucleotide
  Target: LAMA2; (+) strand; PAM type: YTN; PAM sequence: TTC
aactactaccaagaaagagc

SEQ ID NO: 341216 - DNA, 20 bp, Artificial Sequence
  Description of Artificial Sequence: Synthetic oligonucleotide
  Target: LAMA2; (+) strand; PAM type: YTN; PAM sequence: CTA
ctaccaagaaagagcttaac

SEQ ID NO: 341217 - DNA, 20 bp, Artificial Sequence
  Description of Artificial Sequence: Synthetic oligonucleotide
  Target: LAMA2; (+) strand; PAM type: YTN; PAM sequence: CTA
ccaagaaagagcttaaccct

SEQ ID NO: 341218 - DNA, 20 bp, Artificial Sequence
  Description of Artificial Sequence: Synthetic oligonucleotide
  Target: LAMA2; (+) strand; PAM type: YTN; PAM sequence: CTT
aaccctgaaacctagcatcc

SEQ ID NO: 341219 - DNA, 20 bp, Artificial Sequence
  Description of Artificial Sequence: Synthetic oligonucleotide
  Target: LAMA2; (+) strand; PAM type: YTN; PAM sequence: TTA
accctgaaacctagcatcct

SEQ ID NO: 341220 - DNA, 20 bp, Artificial Sequence
  Description of Artificial Sequence: Synthetic oligonucleotide
  Target: LAMA2; (+) strand; PAM type: YTN; PAM sequence: CTG
aaacctagcatcctaggcct

SEQ ID NO: 341221 - DNA, 20 bp, Artificial Sequence
  Description of Artificial Sequence: Synthetic oligonucleotide
  Target: LAMA2; (+) strand; PAM type: YTN; PAM sequence: CTA
gcatcctaggcctgcaccca

SEQ ID NO: 341222 - DNA, 20 bp, Artificial Sequence
  Description of Artificial Sequence: Synthetic oligonucleotide
  Target: LAMA2; (+) strand; PAM type: YTN; PAM sequence: CTA
ggcctgcacccaaagggaga

SEQ ID NO: 341223 - DNA, 20 bp, Artificial Sequence
  Description of Artificial Sequence: Synthetic oligonucleotide
  Target: LAMA2; (+) strand; PAM type: YTN; PAM sequence: CTG
cacccaaagggagaagagaa

SEQ ID NO: 341224 - DNA, 20 bp, Artificial Sequence
  Description of Artificial Sequence: Synthetic oligonucleotide
  Target: LAMA2; (+) strand; PAM type: YTN; PAM sequence: CTT
attctgagctatgagataat

SEQ ID NO: 341225 - DNA, 20 bp, Artificial Sequence
  Description of Artificial Sequence: Synthetic oligonucleotide
  Target: LAMA2; (+) strand; PAM type: YTN; PAM sequence: TTA
ttctgagctatgagataatc

SEQ ID NO: 341226 - DNA, 20 bp, Artificial Sequence
  Description of Artificial Sequence: Synthetic oligonucleotide
  Target: LAMA2; (+) strand; PAM type: YTN; PAM sequence: TTC
tgagctatgagataatcgta

SEQ ID NO: 341227 - DNA, 20 bp, Artificial Sequence
  Description of Artificial Sequence: Synthetic oligonucleotide
  Target: LAMA2; (+) strand; PAM type: YTN; PAM sequence: CTG
agctatgagataatcgtaag

SEQ ID NO: 341228 - DNA, 20 bp, Artificial Sequence
  Description of Artificial Sequence: Synthetic oligonucleotide
  Target: LAMA2; (+) strand; PAM type: YTN; PAM sequence: CTA
tgagataatcgtaaggtatc

SEQ ID NO: 341229 - DNA, 20 bp, Artificial Sequence
  Description of Artificial Sequence: Synthetic oligonucleotide
  Target: LAMA2; (+) strand; PAM type: YTN; PAM sequence: CTC
agggcctggcaaaggaggga

SEQ ID NO: 341230 - DNA, 20 bp, Artificial Sequence
  Description of Artificial Sequence: Synthetic oligonucleotide
  Target: LAMA2; (+) strand; PAM type: YTN; PAM sequence: CTG
gcaaaggagggataatggag

SEQ ID NO: 341231 - DNA, 20 bp, Artificial Sequence
  Description of Artificial Sequence: Synthetic oligonucleotide
  Target: LAMA2; (+) strand; PAM type: YTN; PAM sequence: CTG
ggtatgtcgttatccaggct

SEQ ID NO: 341232 - DNA, 20 bp, Artificial Sequence
  Description of Artificial Sequence: Synthetic oligonucleotide
  Target: LAMA2; (+) strand; PAM type: YTN; PAM sequence: TTA
tccaggctgcaaatagaagg

SEQ ID NO: 341233 - DNA, 20 bp, Artificial Sequence
  Description of Artificial Sequence: Synthetic oligonucleotide
  Target: LAMA2; (+) strand; PAM type: YTN; PAM sequence: CTG
caaatagaaggaggctttga

SEQ ID NO: 341234 - DNA, 20 bp, Artificial Sequence
  Description of Artificial Sequence: Synthetic oligonucleotide
  Target: LAMA2; (+) strand; PAM type: YTN; PAM sequence: CTT
tgagcaaaagccttaaaaca

SEQ ID NO: 341235 - DNA, 20 bp, Artificial Sequence
  Description of Artificial Sequence: Synthetic oligonucleotide
  Target: LAMA2; (+) strand; PAM type: YTN; PAM sequence: TTT
gagcaaaagccttaaaacag

SEQ ID NO: 341236 - DNA, 20 bp, Artificial Sequence
  Description of Artificial Sequence: Synthetic oligonucleotide
  Target: LAMA2; (+) strand; PAM type: YTN; PAM sequence: TTG
agcaaaagccttaaaacagt

SEQ ID NO: 341237 - DNA, 20 bp, Artificial Sequence
  Description of Artificial Sequence: Synthetic oligonucleotide
  Target: LAMA2; (+) strand; PAM type: YTN; PAM sequence: CTT
aaaacagttttattttagaa

SEQ ID NO: 341238 - DNA, 20 bp, Artificial Sequence
  Description of Artificial Sequence: Synthetic oligonucleotide
  Target: LAMA2; (+) strand; PAM type: YTN; PAM sequence: TTA
aaacagttttattttagaag

SEQ ID NO: 341239 - DNA, 20 bp, Artificial Sequence
  Description of Artificial Sequence: Synthetic oligonucleotide
  Target: LAMA2; (+) strand; PAM type: YTN; PAM sequence: TTT
tattttagaagggcaatttt

SEQ ID NO: 341240 - DNA, 20 bp, Artificial Sequence
  Description of Artificial Sequence: Synthetic oligonucleotide
  Target: LAMA2; (+) strand; PAM type: YTN; PAM sequence: TTT
attttagaagggcaattttc

SEQ ID NO: 341241 - DNA, 20 bp, Artificial Sequence
  Description of Artificial Sequence: Synthetic oligonucleotide
  Target: LAMA2; (+) strand; PAM type: YTN; PAM sequence: TTA
ttttagaagggcaattttct

SEQ ID NO: 341242 - DNA, 20 bp, Artificial Sequence
  Description of Artificial Sequence: Synthetic oligonucleotide
  Target: LAMA2; (+) strand; PAM type: YTN; PAM sequence: TTT
tagaagggcaattttctatc

SEQ ID NO: 341243 - DNA, 20 bp, Artificial Sequence
  Description of Artificial Sequence: Synthetic oligonucleotide
  Target: LAMA2; (+) strand; PAM type: YTN; PAM sequence: TTT
agaagggcaattttctatca

SEQ ID NO: 341244 - DNA, 20 bp, Artificial Sequence
  Description of Artificial Sequence: Synthetic oligonucleotide
  Target: LAMA2; (+) strand; PAM type: YTN; PAM sequence: TTA
gaagggcaattttctatcat

SEQ ID NO: 341245 - DNA, 20 bp, Artificial Sequence
  Description of Artificial Sequence: Synthetic oligonucleotide
  Target: LAMA2; (+) strand; PAM type: YTN; PAM sequence: TTT
tctatcatcaatgccaagag

SEQ ID NO: 341246 - DNA, 20 bp, Artificial Sequence
  Description of Artificial Sequence: Synthetic oligonucleotide
  Target: LAMA2; (+) strand; PAM type: YTN; PAM sequence: TTT
ctatcatcaatgccaagaga

SEQ ID NO: 341247 - DNA, 20 bp, Artificial Sequence
  Description of Artificial Sequence: Synthetic oligonucleotide
  Target: LAMA2; (+) strand; PAM type: YTN; PAM sequence: TTC
tatcatcaatgccaagagaa

SEQ ID NO: 341248 - DNA, 20 bp, Artificial Sequence
  Description of Artificial Sequence: Synthetic oligonucleotide
  Target: LAMA2; (+) strand; PAM type: YTN; PAM sequence: CTA
tcatcaatgccaagagaagg

SEQ ID NO: 341249 - DNA, 20 bp, Artificial Sequence
  Description of Artificial Sequence: Synthetic oligonucleotide
  Target: LAMA2; (+) strand; PAM type: YTN; PAM sequence: CTC
agcagggaccctactttgtc

SEQ ID NO: 341250 - DNA, 20 bp, Artificial Sequence
  Description of Artificial Sequence: Synthetic oligonucleotide
  Target: LAMA2; (+) strand; PAM type: YTN; PAM sequence: CTA
ctttgtcctgctttgagcaa

SEQ ID NO: 341251 - DNA, 20 bp, Artificial Sequence
  Description of Artificial Sequence: Synthetic oligonucleotide
  Target: LAMA2; (+) strand; PAM type: YTN; PAM sequence: CTT
tgtcctgctttgagcaaatg

SEQ ID NO: 341252 - DNA, 20 bp, Artificial Sequence
  Description of Artificial Sequence: Synthetic oligonucleotide
  Target: LAMA2; (+) strand; PAM type: YTN; PAM sequence: TTT
gtcctgctttgagcaaatga

SEQ ID NO: 341253 - DNA, 20 bp, Artificial Sequence
  Description of Artificial Sequence: Synthetic oligonucleotide
  Target: LAMA2; (+) strand; PAM type: YTN; PAM sequence: TTG
tcctgctttgagcaaatgat

SEQ ID NO: 341254 - DNA, 20 bp, Artificial Sequence
  Description of Artificial Sequence: Synthetic oligonucleotide
  Target: LAMA2; (+) strand; PAM type: YTN; PAM sequence: CTG
ctttgagcaaatgatactga

SEQ ID NO: 341255 - DNA, 20 bp, Artificial Sequence
  Description of Artificial Sequence: Synthetic oligonucleotide
  Target: LAMA2; (+) strand; PAM type: YTN; PAM sequence: CTT
tgagcaaatgatactgagct

SEQ ID NO: 341256 - DNA, 20 bp, Artificial Sequence
  Description of Artificial Sequence: Synthetic oligonucleotide
  Target: LAMA2; (+) strand; PAM type: YTN; PAM sequence: TTT
gagcaaatgatactgagctc

SEQ ID NO: 341257 - DNA, 20 bp, Artificial Sequence
  Description of Artificial Sequence: Synthetic oligonucleotide
  Target: LAMA2; (+) strand; PAM type: YTN; PAM sequence: TTG
agcaaatgatactgagctcc

SEQ ID NO: 341258 - DNA, 20 bp, Artificial Sequence
  Description of Artificial Sequence: Synthetic oligonucleotide
  Target: LAMA2; (+) strand; PAM type: YTN; PAM sequence: CTG
agctccctaataggagttgc

SEQ ID NO: 341259 - DNA, 20 bp, Artificial Sequence
  Description of Artificial Sequence: Synthetic oligonucleotide
  Target: LAMA2; (+) strand; PAM type: YTN; PAM sequence: CTC
cctaataggagttgcagggt

SEQ ID NO: 341260 - DNA, 20 bp, Artificial Sequence
  Description of Artificial Sequence: Synthetic oligonucleotide
  Target: LAMA2; (+) strand; PAM type: YTN; PAM sequence: CTA
ataggagttgcagggtatga

SEQ ID NO: 341261 - DNA, 20 bp, Artificial Sequence
  Description of Artificial Sequence: Synthetic oligonucleotide
  Target: LAMA2; (+) strand; PAM type: YTN; PAM sequence: TTG
cagggtatgaagcaacagac

SEQ ID NO: 341262 - DNA, 20 bp, Artificial Sequence
  Description of Artificial Sequence: Synthetic oligonucleotide
  Target: LAMA2; (+) strand; PAM type: YTN; PAM sequence: CTG
caggggcctccattactttg

SEQ ID NO: 341263 - DNA, 20 bp, Artificial Sequence
  Description of Artificial Sequence: Synthetic oligonucleotide
  Target: LAMA2; (+) strand; PAM type: YTN; PAM sequence: CTC
cattactttgaggccaacca

SEQ ID NO: 341264 - DNA, 20 bp, Artificial Sequence
  Description of Artificial Sequence: Synthetic oligonucleotide
  Target: LAMA2; (+) strand; PAM type: YTN; PAM sequence: TTA
ctttgaggccaaccacaggg

SEQ ID NO: 341265 - DNA, 20 bp, Artificial Sequence
  Description of Artificial Sequence: Synthetic oligonucleotide
  Target: LAMA2; (+) strand; PAM type: YTN; PAM sequence: CTT
tgaggccaaccacagggtag

SEQ ID NO: 341266 - DNA, 20 bp, Artificial Sequence
  Description of Artificial Sequence: Synthetic oligonucleotide
  Target: LAMA2; (+) strand; PAM type: YTN; PAM sequence: TTT
gaggccaaccacagggtaga

SEQ ID NO: 341267 - DNA, 20 bp, Artificial Sequence
  Description of Artificial Sequence: Synthetic oligonucleotide
  Target: LAMA2; (+) strand; PAM type: YTN; PAM sequence: TTG
aggccaaccacagggtagag

SEQ ID NO: 341268 - DNA, 20 bp, Artificial Sequence
  Description of Artificial Sequence: Synthetic oligonucleotide
  Target: LAMA2; (+) strand; PAM type: YTN; PAM sequence: CTC
ttgtgggaacagctacataa

SEQ ID NO: 341269 - DNA, 20 bp, Artificial Sequence
  Description of Artificial Sequence: Synthetic oligonucleotide
  Target: LAMA2; (+) strand; PAM type: YTN; PAM sequence: CTT
gtgggaacagctacataaca

SEQ ID NO: 341270 - DNA, 20 bp, Artificial Sequence
  Description of Artificial Sequence: Synthetic oligonucleotide
  Target: LAMA2; (+) strand; PAM type: YTN; PAM sequence: TTG
tgggaacagctacataacat

SEQ ID NO: 341271 - DNA, 20 bp, Artificial Sequence
  Description of Artificial Sequence: Synthetic oligonucleotide
  Target: LAMA2; (+) strand; PAM type: YTN; PAM sequence: CTA
cataacatgcatgtccagca

SEQ ID NO: 341272 - DNA, 20 bp, Artificial Sequence
  Description of Artificial Sequence: Synthetic oligonucleotide
  Target: LAMA2; (+) strand; PAM type: YTN; PAM sequence: CTA
ctatcacagcccaagtgctg

SEQ ID NO: 341273 - DNA, 20 bp, Artificial Sequence
  Description of Artificial Sequence: Synthetic oligonucleotide
  Target: LAMA2; (+) strand; PAM type: YTN; PAM sequence: CTA
tcacagcccaagtgctgcct

SEQ ID NO: 341274 - DNA, 20 bp, Artificial Sequence
  Description of Artificial Sequence: Synthetic oligonucleotide
  Target: LAMA2; (+) strand; PAM type: YTN; PAM sequence: CTG
cctctgcagaaagcagtagc

SEQ ID NO: 341275 - DNA, 20 bp, Artificial Sequence
  Description of Artificial Sequence: Synthetic oligonucleotide
  Target: LAMA2; (+) strand; PAM type: YTN; PAM sequence: CTC
tgcagaaagcagtagcccag

SEQ ID NO: 341276 - DNA, 20 bp, Artificial Sequence
  Description of Artificial Sequence: Synthetic oligonucleotide
  Target: LAMA2; (+) strand; PAM type: YTN; PAM sequence: CTG
cagaaagcagtagcccagat

SEQ ID NO: 341277 - DNA, 20 bp, Artificial Sequence
  Description of Artificial Sequence: Synthetic oligonucleotide
  Target: LAMA2; (+) strand; PAM type: YTN; PAM sequence: CTA
ttgagaactgcttacaagaa

SEQ ID NO: 341278 - DNA, 20 bp, Artificial Sequence
  Description of Artificial Sequence: Synthetic oligonucleotide
  Target: LAMA2; (+) strand; PAM type: YTN; PAM sequence: TTG
agaactgcttacaagaactg

SEQ ID NO: 341279 - DNA, 20 bp, Artificial Sequence
  Description of Artificial Sequence: Synthetic oligonucleotide
  Target: LAMA2; (+) strand; PAM type: YTN; PAM sequence: CTG
cttacaagaactgccacttg

SEQ ID NO: 341280 - DNA, 20 bp, Artificial Sequence
  Description of Artificial Sequence: Synthetic oligonucleotide
  Target: LAMA2; (+) strand; PAM type: YTN; PAM sequence: CTT
acaagaactgccacttggaa

SEQ ID NO: 341281 - DNA, 20 bp, Artificial Sequence
  Description of Artificial Sequence: Synthetic oligonucleotide
  Target: LAMA2; (+) strand; PAM type: YTN; PAM sequence: TTA
caagaactgccacttggaag

SEQ ID NO: 341282 - DNA, 20 bp, Artificial Sequence
  Description of Artificial Sequence: Synthetic oligonucleotide
  Target: LAMA2; (+) strand; PAM type: YTN; PAM sequence: CTG
ccacttggaagcaccctgag

SEQ ID NO: 341283 - DNA, 20 bp, Artificial Sequence
  Description of Artificial Sequence: Synthetic oligonucleotide
  Target: LAMA2; (+) strand; PAM type: YTN; PAM sequence: CTT
ggaagcaccctgagaacttg

SEQ ID NO: 341284 - DNA, 20 bp, Artificial Sequence
  Description of Artificial Sequence: Synthetic oligonucleotide
  Target: LAMA2; (+) strand; PAM type: YTN; PAM sequence: TTG
gaagcaccctgagaacttgg

SEQ ID NO: 341285 - DNA, 20 bp, Artificial Sequence
  Description of Artificial Sequence: Synthetic oligonucleotide
  Target: LAMA2; (+) strand; PAM type: YTN; PAM sequence: CTG
agaacttggctttacttgga

SEQ ID NO: 341286 - DNA, 20 bp, Artificial Sequence
  Description of Artificial Sequence: Synthetic oligonucleotide
  Target: LAMA2; (+) strand; PAM type: YTN; PAM sequence: CTT
ggctttacttggaaatcacc

SEQ ID NO: 341287 - DNA, 20 bp, Artificial Sequence
  Description of Artificial Sequence: Synthetic oligonucleotide
  Target: LAMA2; (+) strand; PAM type: YTN; PAM sequence: TTG
gctttacttggaaatcacct

SEQ ID NO: 341288 - DNA, 20 bp, Artificial Sequence
  Description of Artificial Sequence: Synthetic oligonucleotide
  Target: LAMA2; (+) strand; PAM type: YTN; PAM sequence: CTT
tacttggaaatcacctagga

SEQ ID NO: 341289 - DNA, 20 bp, Artificial Sequence
  Description of Artificial Sequence: Synthetic oligonucleotide
  Target: LAMA2; (+) strand; PAM type: YTN; PAM sequence: TTT
acttggaaatcacctaggag

SEQ ID NO: 341290 - DNA, 20 bp, Artificial Sequence
  Description of Artificial Sequence: Synthetic oligonucleotide
  Target: LAMA2; (+) strand; PAM type: YTN; PAM sequence: TTA
cttggaaatcacctaggagc

SEQ ID NO: 341291 - DNA, 20 bp, Artificial Sequence
  Description of Artificial Sequence: Synthetic oligonucleotide
  Target: LAMA2; (+) strand; PAM type: YTN; PAM sequence: CTT
ggaaatcacctaggagcatt

SEQ ID NO: 341292 - DNA, 20 bp, Artificial Sequence
  Description of Artificial Sequence: Synthetic oligonucleotide
  Target: LAMA2; (+) strand; PAM type: YTN; PAM sequence: TTG
gaaatcacctaggagcattt

SEQ ID NO: 341293 - DNA, 20 bp, Artificial Sequence
  Description of Artificial Sequence: Synthetic oligonucleotide
  Target: LAMA2; (+) strand; PAM type: YTN; PAM sequence: CTA
ggagcatttgaaaaatagct

SEQ ID NO: 341294 - DNA, 20 bp, Artificial Sequence
  Description of Artificial Sequence: Synthetic oligonucleotide
  Target: LAMA2; (+) strand; PAM type: YTN; PAM sequence: TTT
gaaaaatagctactcctgag

SEQ ID NO: 341295 - DNA, 20 bp, Artificial Sequence
  Description of Artificial Sequence: Synthetic oligonucleotide
  Target: LAMA2; (+) strand; PAM type: YTN; PAM sequence: TTG
aaaaatagctactcctgaga

SEQ ID NO: 341296 - DNA, 20 bp, Artificial Sequence
  Description of Artificial Sequence: Synthetic oligonucleotide
  Target: LAMA2; (+) strand; PAM type: YTN; PAM sequence: CTA
ctcctgagaccagaactttt

SEQ ID NO: 341297 - DNA, 20 bp, Artificial Sequence
  Description of Artificial Sequence: Synthetic oligonucleotide
  Target: LAMA2; (+) strand; PAM type: YTN; PAM sequence: CTC
ctgagaccagaacttttaat

SEQ ID NO: 341298 - DNA, 20 bp, Artificial Sequence
  Description of Artificial Sequence: Synthetic oligonucleotide
  Target: LAMA2; (+) strand; PAM type: YTN; PAM sequence: CTG
agaccagaacttttaattca

SEQ ID NO: 341299 - DNA, 20 bp, Artificial Sequence
  Description of Artificial Sequence: Synthetic oligonucleotide
  Target: LAMA2; (+) strand; PAM type: YTN; PAM sequence: CTT
ttaattcattatatttgtca

SEQ ID NO: 341300 - DNA, 20 bp, Artificial Sequence
  Description of Artificial Sequence: Synthetic oligonucleotide
  Target: LAMA2; (+) strand; PAM type: YTN; PAM sequence: TTT
taattcattatatttgtcag

SEQ ID NO: 341301 - DNA, 20 bp, Artificial Sequence
  Description of Artificial Sequence: Synthetic oligonucleotide
  Target: LAMA2; (+) strand; PAM type: YTN; PAM sequence: TTT
aattcattatatttgtcaga

SEQ ID NO: 341302 - DNA, 20 bp, Artificial Sequence
  Description of Artificial Sequence: Synthetic oligonucleotide
  Target: LAMA2; (+) strand; PAM type: YTN; PAM sequence: TTA
attcattatatttgtcagag

SEQ ID NO: 341303 - DNA, 20 bp, Artificial Sequence
  Description of Artificial Sequence: Synthetic oligonucleotide
  Target: LAMA2; (+) strand; PAM type: YTN; PAM sequence: TTC
attatatttgtcagaggctc

SEQ ID NO: 341304 - DNA, 20 bp, Artificial Sequence
  Description of Artificial Sequence: Synthetic oligonucleotide
  Target: LAMA2; (+) strand; PAM type: YTN; PAM sequence: TTA
tatttgtcagaggctcatta

SEQ ID NO: 341305 - DNA, 20 bp, Artificial Sequence
  Description of Artificial Sequence: Synthetic oligonucleotide
  Target: LAMA2; (+) strand; PAM type: YTN; PAM sequence: TTT
gtcagaggctcattaagccc

SEQ ID NO: 341306 - DNA, 20 bp, Artificial Sequence
  Description of Artificial Sequence: Synthetic oligonucleotide
  Target: LAMA2; (+) strand; PAM type: YTN; PAM sequence: TTG
tcagaggctcattaagccct

SEQ ID NO: 341307 - DNA, 20 bp, Artificial Sequence
  Description of Artificial Sequence: Synthetic oligonucleotide
  Target: LAMA2; (+) strand; PAM type: YTN; PAM sequence: CTC
attaagccctatgtatattt

SEQ ID NO: 341308 - DNA, 20 bp, Artificial Sequence
  Description of Artificial Sequence: Synthetic oligonucleotide
  Target: LAMA2; (+) strand; PAM type: YTN; PAM sequence: TTA
agccctatgtatattttaaa

SEQ ID NO: 341309 - DNA, 20 bp, Artificial Sequence
  Description of Artificial Sequence: Synthetic oligonucleotide
  Target: LAMA2; (+) strand; PAM type: YTN; PAM sequence: CTA
tgtatattttaaacaagtac

SEQ ID NO: 341310 - DNA, 20 bp, Artificial Sequence
  Description of Artificial Sequence: Synthetic oligonucleotide
  Target: LAMA2; (+) strand; PAM type: YTN; PAM sequence: TTT
taaacaagtactcttggtga

SEQ ID NO: 341311 - DNA, 20 bp, Artificial Sequence
  Description of Artificial Sequence: Synthetic oligonucleotide
  Target: LAMA2; (+) strand; PAM type: YTN; PAM sequence: TTT
aaacaagtactcttggtgat

SEQ ID NO: 341312 - DNA, 20 bp, Artificial Sequence
  Description of Artificial Sequence: Synthetic oligonucleotide
  Target: LAMA2; (+) strand; PAM type: YTN; PAM sequence: TTA
aacaagtactcttggtgatt

SEQ ID NO: 341313 - DNA, 20 bp, Artificial Sequence
  Description of Artificial Sequence: Synthetic oligonucleotide
  Target: LAMA2; (+) strand; PAM type: YTN; PAM sequence: CTC
ttggtgattcttatgtctgt

SEQ ID NO: 341314 - DNA, 20 bp, Artificial Sequence
  Description of Artificial Sequence: Synthetic oligonucleotide
  Target: LAMA2; (+) strand; PAM type: YTN; PAM sequence: CTT
ggtgattcttatgtctgtat

SEQ ID NO: 341315 - DNA, 20 bp, Artificial Sequence
  Description of Artificial Sequence: Synthetic oligonucleotide
  Target: LAMA2; (+) strand; PAM type: YTN; PAM sequence: TTG
gtgattcttatgtctgtatt

SEQ ID NO: 341316 - DNA, 20 bp, Artificial Sequence
  Description of Artificial Sequence: Synthetic oligonucleotide
  Target: LAMA2; (+) strand; PAM type: YTN; PAM sequence: TTC
ttatgtctgtattcctggct

SEQ ID NO: 341317 - DNA, 20 bp, Artificial Sequence
  Description of Artificial Sequence: Synthetic oligonucleotide
  Target: LAMA2; (+) strand; PAM type: YTN; PAM sequence: CTT
atgtctgtattcctggctta

SEQ ID NO: 341318 - DNA, 20 bp, Artificial Sequence
  Description of Artificial Sequence: Synthetic oligonucleotide
  Target: LAMA2; (+) strand; PAM type: YTN; PAM sequence: TTA
tgtctgtattcctggcttaa

SEQ ID NO: 341319 - DNA, 20 bp, Artificial Sequence
  Description of Artificial Sequence: Synthetic oligonucleotide
  Target: LAMA2; (+) strand; PAM type: YTN; PAM sequence: CTG
tattcctggcttaatgttca

SEQ ID NO: 341320 - DNA, 20 bp, Artificial Sequence
  Description of Artificial Sequence: Synthetic oligonucleotide
  Target: LAMA2; (+) strand; PAM type: YTN; PAM sequence: TTC
ctggcttaatgttcagctat

SEQ ID NO: 341321 - DNA, 20 bp, Artificial Sequence
  Description of Artificial Sequence: Synthetic oligonucleotide
  Target: LAMA2; (+) strand; PAM type: YTN; PAM sequence: CTG
gcttaatgttcagctatttc

SEQ ID NO: 341322 - DNA, 20 bp, Artificial Sequence
  Description of Artificial Sequence: Synthetic oligonucleotide
  Target: LAMA2; (+) strand; PAM type: YTN; PAM sequence: CTT
aatgttcagctatttccagc

SEQ ID NO: 341323 - DNA, 20 bp, Artificial Sequence
  Description of Artificial Sequence: Synthetic oligonucleotide
  Target: LAMA2; (+) strand; PAM type: YTN; PAM sequence: TTA
atgttcagctatttccagcc

SEQ ID NO: 341324 - DNA, 20 bp, Artificial Sequence
  Description of Artificial Sequence: Synthetic oligonucleotide
  Target: LAMA2; (+) strand; PAM type: YTN; PAM sequence: TTC
agctatttccagccttttaa

SEQ ID NO: 341325 - DNA, 20 bp, Artificial Sequence
  Description of Artificial Sequence: Synthetic oligonucleotide
  Target: LAMA2; (+) strand; PAM type: YTN; PAM sequence: CTA
tttccagccttttaaaccct

SEQ ID NO: 341326 - DNA, 20 bp, Artificial Sequence
  Description of Artificial Sequence: Synthetic oligonucleotide
  Target: LAMA2; (+) strand; PAM type: YTN; PAM sequence: TTT
ccagccttttaaaccctgta

SEQ ID NO: 341327 - DNA, 20 bp, Artificial Sequence
  Description of Artificial Sequence: Synthetic oligonucleotide
  Target: LAMA2; (+) strand; PAM type: YTN; PAM sequence: TTC
cagccttttaaaccctgtag

SEQ ID NO: 341328 - DNA, 20 bp, Artificial Sequence
  Description of Artificial Sequence: Synthetic oligonucleotide
  Target: LAMA2; (+) strand; PAM type: YTN; PAM sequence: CTT
ttaaaccctgtaggagaaca

SEQ ID NO: 341329 - DNA, 20 bp, Artificial Sequence
  Description of Artificial Sequence: Synthetic oligonucleotide
  Target: LAMA2; (+) strand; PAM type: YTN; PAM sequence: TTT
taaaccctgtaggagaacag

SEQ ID NO: 341330 - DNA, 20 bp, Artificial Sequence
  Description of Artificial Sequence: Synthetic oligonucleotide
  Target: LAMA2; (+) strand; PAM type: YTN; PAM sequence: TTT
aaaccctgtaggagaacagg

SEQ ID NO: 341331 - DNA, 20 bp, Artificial Sequence
  Description of Artificial Sequence: Synthetic oligonucleotide
  Target: LAMA2; (+) strand; PAM type: YTN; PAM sequence: TTA
aaccctgtaggagaacaggg

SEQ ID NO: 341332 - DNA, 20 bp, Artificial Sequence
  Description of Artificial Sequence: Synthetic oligonucleotide
  Target: LAMA2; (+) strand; PAM type: YTN; PAM sequence: CTG
taggagaacagggcaccagt

SEQ ID NO: 341333 - DNA, 20 bp, Artificial Sequence
  Description of Artificial Sequence: Synthetic oligonucleotide
  Target: LAMA2; (+) strand; PAM type: YTN; PAM sequence: TTA
tttagggaaagaatattggt

SEQ ID NO: 341334 - DNA, 20 bp, Artificial Sequence
  Description of Artificial Sequence: Synthetic oligonucleotide
  Target: LAMA2; (+) strand; PAM type: YTN; PAM sequence: TTT
agggaaagaatattggtcat

SEQ ID NO: 341335 - DNA, 20 bp, Artificial Sequence
  Description of Artificial Sequence: Synthetic oligonucleotide
  Target: LAMA2; (+) strand; PAM type: YTN; PAM sequence: TTA
gggaaagaatattggtcatt

SEQ ID NO: 341336 - DNA, 20 bp, Artificial Sequence
  Description of Artificial Sequence: Synthetic oligonucleotide
  Target: LAMA2; (+) strand; PAM type: YTN; PAM sequence: TTG
gtcattctaactacttccaa

SEQ ID NO: 341337 - DNA, 20 bp, Artificial Sequence
  Description of Artificial Sequence: Synthetic oligonucleotide
  Target: LAMA2; (+) strand; PAM type: YTN; PAM sequence: TTC
taactacttccaactgaaga

SEQ ID NO: 341338 - DNA, 20 bp, Artificial Sequence
  Description of Artificial Sequence: Synthetic oligonucleotide
  Target: LAMA2; (+) strand; PAM type: YTN; PAM sequence: CTA
actacttccaactgaagaaa

SEQ ID NO: 341339 - DNA, 20 bp, Artificial Sequence
  Description of Artificial Sequence: Synthetic oligonucleotide
  Target: LAMA2; (+) strand; PAM type: YTN; PAM sequence: CTA
cttccaactgaagaaagaga

SEQ ID NO: 341340 - DNA, 20 bp, Artificial Sequence
  Description of Artificial Sequence: Synthetic oligonucleotide
  Target: LAMA2; (+) strand; PAM type: YTN; PAM sequence: CTT
ccaactgaagaaagagacta

SEQ ID NO: 341341 - DNA, 20 bp, Artificial Sequence
  Description of Artificial Sequence: Synthetic oligonucleotide
  Target: LAMA2; (+) strand; PAM type: YTN; PAM sequence: TTC
caactgaagaaagagactaa

SEQ ID NO: 341342 - DNA, 20 bp, Artificial Sequence
  Description of Artificial Sequence: Synthetic oligonucleotide
  Target: LAMA2; (+) strand; PAM type: YTN; PAM sequence: CTG
aagaaagagactaacttttt

SEQ ID NO: 341343 - DNA, 20 bp, Artificial Sequence
  Description of Artificial Sequence: Synthetic oligonucleotide
  Target: LAMA2; (+) strand; PAM type: YTN; PAM sequence: CTA
actttttctgtcaacaaatg

SEQ ID NO: 341344 - DNA, 20 bp, Artificial Sequence
  Description of Artificial Sequence: Synthetic oligonucleotide
  Target: LAMA2; (+) strand; PAM type: YTN; PAM sequence: CTT
tttctgtcaacaaatgtgat

SEQ ID NO: 341345 - DNA, 20 bp, Artificial Sequence
  Description of Artificial Sequence: Synthetic oligonucleotide
  Target: LAMA2; (+) strand; PAM type: YTN; PAM sequence: TTT
ttctgtcaacaaatgtgata

SEQ ID NO: 341346 - DNA, 20 bp, Artificial Sequence
  Description of Artificial Sequence: Synthetic oligonucleotide
  Target: LAMA2; (+) strand; PAM type: YTN; PAM sequence: TTT
tctgtcaacaaatgtgatag

SEQ ID NO: 341347 - DNA, 20 bp, Artificial Sequence
  Description of Artificial Sequence: Synthetic oligonucleotide
  Target: LAMA2; (+) strand; PAM type: YTN; PAM sequence: TTT
ctgtcaacaaatgtgatagg

SEQ ID NO: 341348 - DNA, 20 bp, Artificial Sequence
  Description of Artificial Sequence: Synthetic oligonucleotide
  Target: LAMA2; (+) strand; PAM type: YTN; PAM sequence: TTC
tgtcaacaaatgtgataggt

SEQ ID NO: 341349 - DNA, 20 bp, Artificial Sequence
  Description of Artificial Sequence: Synthetic oligonucleotide
  Target: LAMA2; (+) strand; PAM type: YTN; PAM sequence: CTG
tcaacaaatgtgataggttt

SEQ ID NO: 341350 - DNA, 20 bp, Artificial Sequence
  Description of Artificial Sequence: Synthetic oligonucleotide
  Target: LAMA2; (+) strand; PAM type: YTN; PAM sequence: TTT
tggtggactgagtctcttgg

SEQ ID NO: 341351 - DNA, 20 bp, Artificial Sequence
  Description of Artificial Sequence: Synthetic oligonucleotide
  Target: LAMA2; (+) strand; PAM type: YTN; PAM sequence: TTT
ggtggactgagtctcttggc

SEQ ID NO: 341352 - DNA, 20 bp, Artificial Sequence
  Description of Artificial Sequence: Synthetic oligonucleotide
  Target: LAMA2; (+) strand; PAM type: YTN; PAM sequence: TTG
gtggactgagtctcttggca

SEQ ID NO: 341353 - DNA, 20 bp, Artificial Sequence
  Description of Artificial Sequence: Synthetic oligonucleotide
  Target: LAMA2; (+) strand; PAM type: YTN; PAM sequence: CTG
agtctcttggcaggtttgag

SEQ ID NO: 341354 - DNA, 20 bp, Artificial Sequence
  Description of Artificial Sequence: Synthetic oligonucleotide
  Target: LAMA2; (+) strand; PAM type: YTN; PAM sequence: CTC
ttggcaggtttgagttgagc

SEQ ID NO: 341355 - DNA, 20 bp, Artificial Sequence
  Description of Artificial Sequence: Synthetic oligonucleotide
  Target: LAMA2; (+) strand; PAM type: YTN; PAM sequence: CTT
ggcaggtttgagttgagcaa

SEQ ID NO: 341356 - DNA, 20 bp, Artificial Sequence
  Description of Artificial Sequence: Synthetic oligonucleotide
  Target: LAMA2; (+) strand; PAM type: YTN; PAM sequence: TTG
gcaggtttgagttgagcaaa

SEQ ID NO: 341357 - DNA, 20 bp, Artificial Sequence
  Description of Artificial Sequence: Synthetic oligonucleotide
  Target: LAMA2; (+) strand; PAM type: YTN; PAM sequence: TTT
gagttgagcaaataaacttc

SEQ ID NO: 341358 - DNA, 20 bp, Artificial Sequence
  Description of Artificial Sequence: Synthetic oligonucleotide
  Target: LAMA2; (+) strand; PAM type: YTN; PAM sequence: TTG
agttgagcaaataaacttcg

SEQ ID NO: 341359 - DNA, 20 bp, Artificial Sequence
  Description of Artificial Sequence: Synthetic oligonucleotide
  Target: LAMA2; (+) strand; PAM type: YTN; PAM sequence: TTG
agcaaataaacttcgaacta

SEQ ID NO: 341360 - DNA, 20 bp, Artificial Sequence
  Description of Artificial Sequence: Synthetic oligonucleotide
  Target: LAMA2; (+) strand; PAM type: YTN; PAM sequence: CTT
cgaactaaaactaggttatt

SEQ ID NO: 341361 - DNA, 20 bp, Artificial Sequence
  Description of Artificial Sequence: Synthetic oligonucleotide
  Target: LAMA2; (+) strand; PAM type: YTN; PAM sequence: TTC
gaactaaaactaggttattg

SEQ ID NO: 341362 - DNA, 20 bp, Artificial Sequence
  Description of Artificial Sequence: Synthetic oligonucleotide
  Target: LAMA2; (+) strand; PAM type: YTN; PAM sequence: CTA
aaactaggttattgatggtc

SEQ ID NO: 341363 - DNA, 20 bp, Artificial Sequence
  Description of Artificial Sequence: Synthetic oligonucleotide
  Target: LAMA2; (+) strand; PAM type: YTN; PAM sequence: CTA
ggttattgatggtcaaaggg

SEQ ID NO: 341364 - DNA, 20 bp, Artificial Sequence
  Description of Artificial Sequence: Synthetic oligonucleotide
  Target: LAMA2; (+) strand; PAM type: YTN; PAM sequence: TTA
ttgatggtcaaaggggtatc

SEQ ID NO: 341365 - DNA, 20 bp, Artificial Sequence
  Description of Artificial Sequence: Synthetic oligonucleotide
  Target: LAMA2; (+) strand; PAM type: YTN; PAM sequence: TTG
atggtcaaaggggtatctga

SEQ ID NO: 341366 - DNA, 20 bp, Artificial Sequence
  Description of Artificial Sequence: Synthetic oligonucleotide
  Target: LAMA2; (+) strand; PAM type: YTN; PAM sequence: CTG
agagaagaatcacagtaata

SEQ ID NO: 341367 - DNA, 20 bp, Artificial Sequence
  Description of Artificial Sequence: Synthetic oligonucleotide
  Target: LAMA2; (+) strand; PAM type: YTN; PAM sequence: TTG
aggaggacgaactttctaga

SEQ ID NO: 341368 - DNA, 20 bp, Artificial Sequence
  Description of Artificial Sequence: Synthetic oligonucleotide
  Target: LAMA2; (+) strand; PAM type: YTN; PAM sequence: CTT
tctagatggcactgctttag

SEQ ID NO: 341369 - DNA, 20 bp, Artificial Sequence
  Description of Artificial Sequence: Synthetic oligonucleotide
  Target: LAMA2; (+) strand; PAM type: YTN; PAM sequence: TTT
ctagatggcactgctttaga

SEQ ID NO: 341370 - DNA, 20 bp, Artificial Sequence
  Description of Artificial Sequence: Synthetic oligonucleotide
  Target: LAMA2; (+) strand; PAM type: YTN; PAM sequence: TTC
tagatggcactgctttagag

SEQ ID NO: 341371 - DNA, 20 bp, Artificial Sequence
  Description of Artificial Sequence: Synthetic oligonucleotide
  Target: LAMA2; (+) strand; PAM type: YTN; PAM sequence: CTA
gatggcactgctttagagat

SEQ ID NO: 341372 - DNA, 20 bp, Artificial Sequence
  Description of Artificial Sequence: Synthetic oligonucleotide
  Target: LAMA2; (+) strand; PAM type: YTN; PAM sequence: CTG
ctttagagatcctagaatta

SEQ ID NO: 341373 - DNA, 20 bp, Artificial Sequence
  Description of Artificial Sequence: Synthetic oligonucleotide
  Target: LAMA2; (+) strand; PAM type: YTN; PAM sequence: CTT
tagagatcctagaattaaaa

SEQ ID NO: 341374 - DNA, 20 bp, Artificial Sequence
  Description of Artificial Sequence: Synthetic oligonucleotide
  Target: LAMA2; (+) strand; PAM type: YTN; PAM sequence: TTT
agagatcctagaattaaaat

SEQ ID NO: 341375 - DNA, 20 bp, Artificial Sequence
  Description of Artificial Sequence: Synthetic oligonucleotide
  Target: LAMA2; (+) strand; PAM type: YTN; PAM sequence: TTA
gagatcctagaattaaaatt

SEQ ID NO: 341376 - DNA, 20 bp, Artificial Sequence
  Description of Artificial Sequence: Synthetic oligonucleotide
  Target: LAMA2; (+) strand; PAM type: YTN; PAM sequence: CTA
gaattaaaattataatattt

SEQ ID NO: 341377 - DNA, 20 bp, Artificial Sequence
  Description of Artificial Sequence: Synthetic oligonucleotide
  Target: LAMA2; (+) strand; PAM type: YTN; PAM sequence: TTA
aaattataatatttttctgt

SEQ ID NO: 341378 - DNA, 20 bp, Artificial Sequence
  Description of Artificial Sequence: Synthetic oligonucleotide
  Target: LAMA2; (+) strand; PAM type: YTN; PAM sequence: TTA
taatatttttctgttgtatg

SEQ ID NO: 341379 - DNA, 20 bp, Artificial Sequence
  Description of Artificial Sequence: Synthetic oligonucleotide
  Target: LAMA2; (+) strand; PAM type: YTN; PAM sequence: TTT
ttctgttgtatgagactttt

SEQ ID NO: 341380 - DNA, 20 bp, Artificial Sequence
  Description of Artificial Sequence: Synthetic oligonucleotide
  Target: LAMA2; (+) strand; PAM type: YTN; PAM sequence: TTT
tctgttgtatgagacttttc

SEQ ID NO: 341381 - DNA, 20 bp, Artificial Sequence
  Description of Artificial Sequence: Synthetic oligonucleotide
  Target: LAMA2; (+) strand; PAM type: YTN; PAM sequence: TTT
ctgttgtatgagacttttcc

SEQ ID NO: 341382 - DNA, 20 bp, Artificial Sequence
  Description of Artificial Sequence: Synthetic oligonucleotide
  Target: LAMA2; (+) strand; PAM type: YTN; PAM sequence: TTC
tgttgtatgagacttttccc

SEQ ID NO: 341383 - DNA, 20 bp, Artificial Sequence
  Description of Artificial Sequence: Synthetic oligonucleotide
  Target: LAMA2; (+) strand; PAM type: YTN; PAM sequence: CTG
ttgtatgagacttttccctt

SEQ ID NO: 341384 - DNA, 20 bp, Artificial Sequence
  Description of Artificial Sequence: Synthetic oligonucleotide
  Target: LAMA2; (+) strand; PAM type: YTN; PAM sequence: TTG
tatgagacttttccctttct

SEQ ID NO: 341385 - DNA, 20 bp, Artificial Sequence
  Description of Artificial Sequence: Synthetic oligonucleotide
  Target: LAMA2; (+) strand; PAM type: YTN; PAM sequence: CTT
ttccctttctttgactcaca

SEQ ID NO: 341386 - DNA, 20 bp, Artificial Sequence
  Description of Artificial Sequence: Synthetic oligonucleotide
  Target: LAMA2; (+) strand; PAM type: YTN; PAM sequence: TTT
tccctttctttgactcacat

SEQ ID NO: 341387 - DNA, 20 bp, Artificial Sequence
  Description of Artificial Sequence: Synthetic oligonucleotide
  Target: LAMA2; (+) strand; PAM type: YTN; PAM sequence: TTT
ccctttctttgactcacatt

SEQ ID NO: 341388 - DNA, 20 bp, Artificial Sequence
  Description of Artificial Sequence: Synthetic oligonucleotide
  Target: LAMA2; (+) strand; PAM type: YTN; PAM sequence: TTC
cctttctttgactcacatta

SEQ ID NO: 341389 - DNA, 20 bp, Artificial Sequence
  Description of Artificial Sequence: Synthetic oligonucleotide
  Target: LAMA2; (+) strand; PAM type: YTN; PAM sequence: CTT
tctttgactcacattattgc

SEQ ID NO: 341390 - DNA, 20 bp, Artificial Sequence
  Description of Artificial Sequence: Synthetic oligonucleotide
  Target: LAMA2; (+) strand; PAM type: YTN; PAM sequence: TTT
ctttgactcacattattgct

SEQ ID NO: 341391 - DNA, 20 bp, Artificial Sequence
  Description of Artificial Sequence: Synthetic oligonucleotide
  Target: LAMA2; (+) strand; PAM type: YTN; PAM sequence: TTC
tttgactcacattattgctt

SEQ ID NO: 341392 - DNA, 20 bp, Artificial Sequence
  Description of Artificial Sequence: Synthetic oligonucleotide
  Target: LAMA2; (+) strand; PAM type: YTN; PAM sequence: CTT
tgactcacattattgctttt

SEQ ID NO: 341393 - DNA, 20 bp, Artificial Sequence
  Description of Artificial Sequence: Synthetic oligonucleotide
  Target: LAMA2; (+) strand; PAM type: YTN; PAM sequence: TTT
gactcacattattgctttta

SEQ ID NO: 341394 - DNA, 20 bp, Artificial Sequence
  Description of Artificial Sequence: Synthetic oligonucleotide
  Target: LAMA2; (+) strand; PAM type: YTN; PAM sequence: TTG
actcacattattgcttttaa

SEQ ID NO: 341395 - DNA, 20 bp, Artificial Sequence
  Description of Artificial Sequence: Synthetic oligonucleotide
  Target: LAMA2; (+) strand; PAM type: YTN; PAM sequence: CTC
acattattgcttttaattta

SEQ ID NO: 341396 - DNA, 20 bp, Artificial Sequence
  Description of Artificial Sequence: Synthetic oligonucleotide
  Target: LAMA2; (+) strand; PAM type: YTN; PAM sequence: TTA
ttgcttttaatttatttgga

SEQ ID NO: 341397 - DNA, 20 bp, Artificial Sequence
  Description of Artificial Sequence: Synthetic oligonucleotide
  Target: LAMA2; (+) strand; PAM type: YTN; PAM sequence: TTG
cttttaatttatttggattg

SEQ ID NO: 341398 - DNA, 20 bp, Artificial Sequence
  Description of Artificial Sequence: Synthetic oligonucleotide
  Target: LAMA2; (+) strand; PAM type: YTN; PAM sequence: CTT
ttaatttatttggattgtca

SEQ ID NO: 341399 - DNA, 20 bp, Artificial Sequence
  Description of Artificial Sequence: Synthetic oligonucleotide
  Target: LAMA2; (+) strand; PAM type: YTN; PAM sequence: TTT
taatttatttggattgtcac

SEQ ID NO: 341400 - DNA, 20 bp, Artificial Sequence
  Description of Artificial Sequence: Synthetic oligonucleotide
  Target: LAMA2; (+) strand; PAM type: YTN; PAM sequence: TTT
aatttatttggattgtcact

SEQ ID NO: 341401 - DNA, 20 bp, Artificial Sequence
  Description of Artificial Sequence: Synthetic oligonucleotide
  Target: LAMA2; (+) strand; PAM type: YTN; PAM sequence: TTA
atttatttggattgtcacta

SEQ ID NO: 341402 - DNA, 20 bp, Artificial Sequence
  Description of Artificial Sequence: Synthetic oligonucleotide
  Target: LAMA2; (+) strand; PAM type: YTN; PAM sequence: TTT
atttggattgtcactagact

SEQ ID NO: 341403 - DNA, 20 bp, Artificial Sequence
  Description of Artificial Sequence: Synthetic oligonucleotide
  Target: LAMA2; (+) strand; PAM type: YTN; PAM sequence: TTA
tttggattgtcactagactg

SEQ ID NO: 341404 - DNA, 20 bp, Artificial Sequence
  Description of Artificial Sequence: Synthetic oligonucleotide
  Target: LAMA2; (+) strand; PAM type: YTN; PAM sequence: TTT
ggattgtcactagactgcta

SEQ ID NO: 341405 - DNA, 20 bp, Artificial Sequence
  Description of Artificial Sequence: Synthetic oligonucleotide
  Target: LAMA2; (+) strand; PAM type: YTN; PAM sequence: TTG
gattgtcactagactgctag

SEQ ID NO: 341406 - DNA, 20 bp, Artificial Sequence
  Description of Artificial Sequence: Synthetic oligonucleotide
  Target: LAMA2; (+) strand; PAM type: YTN; PAM sequence: TTG
tcactagactgctagctaaa

SEQ ID NO: 341407 - DNA, 20 bp, Artificial Sequence
  Description of Artificial Sequence: Synthetic oligonucleotide
  Target: LAMA2; (+) strand; PAM type: YTN; PAM sequence: CTA
gactgctagctaaatattcg

SEQ ID NO: 341408 - DNA, 20 bp, Artificial Sequence
  Description of Artificial Sequence: Synthetic oligonucleotide
  Target: LAMA2; (+) strand; PAM type: YTN; PAM sequence: CTG
ctagctaaatattcgtggtt

SEQ ID NO: 341409 - DNA, 20 bp, Artificial Sequence
  Description of Artificial Sequence: Synthetic oligonucleotide
  Target: LAMA2; (+) strand; PAM type: YTN; PAM sequence: CTA
gctaaatattcgtggttacc

SEQ ID NO: 341410 - DNA, 20 bp, Artificial Sequence
  Description of Artificial Sequence: Synthetic oligonucleotide
  Target: LAMA2; (+) strand; PAM type: YTN; PAM sequence: CTA
aatattcgtggttaccatag

SEQ ID NO: 341411 - DNA, 20 bp, Artificial Sequence
  Description of Artificial Sequence: Synthetic oligonucleotide
  Target: LAMA2; (+) strand; PAM type: YTN; PAM sequence: TTC
gtggttaccatagtgatttt

SEQ ID NO: 341412 - DNA, 20 bp, Artificial Sequence
  Description of Artificial Sequence: Synthetic oligonucleotide
  Target: LAMA2; (+) strand; PAM type: YTN; PAM sequence: TTA
ccatagtgattttgcttcca

SEQ ID NO: 341413 - DNA, 20 bp, Artificial Sequence
  Description of Artificial Sequence: Synthetic oligonucleotide
  Target: LAMA2; (+) strand; PAM type: YTN; PAM sequence: TTT
tgcttccatttcctcataca

SEQ ID NO: 341414 - DNA, 20 bp, Artificial Sequence
  Description of Artificial Sequence: Synthetic oligonucleotide
  Target: LAMA2; (+) strand; PAM type: YTN; PAM sequence: TTT
gcttccatttcctcatacag

SEQ ID NO: 341415 - DNA, 20 bp, Artificial Sequence
  Description of Artificial Sequence: Synthetic oligonucleotide
  Target: LAMA2; (+) strand; PAM type: YTN; PAM sequence: TTG
cttccatttcctcatacaga

SEQ ID NO: 341416 - DNA, 20 bp, Artificial Sequence
  Description of Artificial Sequence: Synthetic oligonucleotide
  Target: LAMA2; (+) strand; PAM type: YTN; PAM sequence: CTT
ccatttcctcatacagaggc

SEQ ID NO: 341417 - DNA, 20 bp, Artificial Sequence
  Description of Artificial Sequence: Synthetic oligonucleotide
  Target: LAMA2; (+) strand; PAM type: YTN; PAM sequence: TTC
catttcctcatacagaggcc

SEQ ID NO: 341418 - DNA, 20 bp, Artificial Sequence
  Description of Artificial Sequence: Synthetic oligonucleotide
  Target: LAMA2; (+) strand; PAM type: YTN; PAM sequence: TTT
cctcatacagaggcctttaa

SEQ ID NO: 341419 - DNA, 20 bp, Artificial Sequence
  Description of Artificial Sequence: Synthetic oligonucleotide
  Target: LAMA2; (+) strand; PAM type: YTN; PAM sequence: TTC
ctcatacagaggcctttaag

SEQ ID NO: 341420 - DNA, 20 bp, Artificial Sequence
  Description of Artificial Sequence: Synthetic oligonucleotide
  Target: LAMA2; (+) strand; PAM type: YTN; PAM sequence: CTC
atacagaggcctttaagtta

SEQ ID NO: 341421 - DNA, 20 bp, Artificial Sequence
  Description of Artificial Sequence: Synthetic oligonucleotide
  Target: LAMA2; (+) strand; PAM type: YTN; PAM sequence: CTT
taagttatttacatatgatt

SEQ ID NO: 341422 - DNA, 20 bp, Artificial Sequence
  Description of Artificial Sequence: Synthetic oligonucleotide
  Target: LAMA2; (+) strand; PAM type: YTN; PAM sequence: TTT
aagttatttacatatgattt

SEQ ID NO: 341423 - DNA, 20 bp, Artificial Sequence
  Description of Artificial Sequence: Synthetic oligonucleotide
  Target: LAMA2; (+) strand; PAM type: YTN; PAM sequence: TTA
agttatttacatatgatttc

SEQ ID NO: 341424 - DNA, 20 bp, Artificial Sequence
  Description of Artificial Sequence: Synthetic oligonucleotide
  Target: LAMA2; (+) strand; PAM type: YTN; PAM sequence: TTA
tttacatatgatttcctttc

SEQ ID NO: 341425 - DNA, 20 bp, Artificial Sequence
  Description of Artificial Sequence: Synthetic oligonucleotide
  Target: LAMA2; (+) strand; PAM type: YTN; PAM sequence: TTT
acatatgatttcctttcctt

SEQ ID NO: 341426 - DNA, 20 bp, Artificial Sequence
  Description of Artificial Sequence: Synthetic oligonucleotide
  Target: LAMA2; (+) strand; PAM type: YTN; PAM sequence: TTA
catatgatttcctttccttc

SEQ ID NO: 341427 - DNA, 20 bp, Artificial Sequence
  Description of Artificial Sequence: Synthetic oligonucleotide
  Target: LAMA2; (+) strand; PAM type: YTN; PAM sequence: TTT
cctttccttcttaccaccac

SEQ ID NO: 341428 - DNA, 20 bp, Artificial Sequence
  Description of Artificial Sequence: Synthetic oligonucleotide
  Target: LAMA2; (+) strand; PAM type: YTN; PAM sequence: TTC
ctttccttcttaccaccacc

SEQ ID NO: 341429 - DNA, 20 bp, Artificial Sequence
  Description of Artificial Sequence: Synthetic oligonucleotide
  Target: LAMA2; (+) strand; PAM type: YTN; PAM sequence: CTT
tccttcttaccaccaccttc

SEQ ID NO: 341430 - DNA, 20 bp, Artificial Sequence
  Description of Artificial Sequence: Synthetic oligonucleotide
  Target: LAMA2; (+) strand; PAM type: YTN; PAM sequence: TTT
ccttcttaccaccaccttct

SEQ ID NO: 341431 - DNA, 20 bp, Artificial Sequence
  Description of Artificial Sequence: Synthetic oligonucleotide
  Target: LAMA2; (+) strand; PAM type: YTN; PAM sequence: TTC
cttcttaccaccaccttctc

SEQ ID NO: 341432 - DNA, 20 bp, Artificial Sequence
  Description of Artificial Sequence: Synthetic oligonucleotide
  Target: LAMA2; (+) strand; PAM type: YTN; PAM sequence: CTT
cttaccaccaccttctcact

SEQ ID NO: 341433 - DNA, 20 bp, Artificial Sequence
  Description of Artificial Sequence: Synthetic oligonucleotide
  Target: LAMA2; (+) strand; PAM type: YTN; PAM sequence: TTC
ttaccaccaccttctcactc

SEQ ID NO: 341434 - DNA, 20 bp, Artificial Sequence
  Description of Artificial Sequence: Synthetic oligonucleotide
  Target: LAMA2; (+) strand; PAM type: YTN; PAM sequence: CTT
accaccaccttctcactctc

SEQ ID NO: 341435 - DNA, 20 bp, Artificial Sequence
  Description of Artificial Sequence: Synthetic oligonucleotide
  Target: LAMA2; (+) strand; PAM type: YTN; PAM sequence: TTA
ccaccaccttctcactctcc

SEQ ID NO: 341436 - DNA, 20 bp, Artificial Sequence
  Description of Artificial Sequence: Synthetic oligonucleotide
  Target: LAMA2; (+) strand; PAM type: YTN; PAM sequence: CTT
ctcactctcctggactgcag

SEQ ID NO: 341437 - DNA, 20 bp, Artificial Sequence
  Description of Artificial Sequence: Synthetic oligonucleotide
  Target: LAMA2; (+) strand; PAM type: YTN; PAM sequence: TTC
tcactctcctggactgcagc

SEQ ID NO: 341438 - DNA, 20 bp, Artificial Sequence
  Description of Artificial Sequence: Synthetic oligonucleotide
  Target: LAMA2; (+) strand; PAM type: YTN; PAM sequence: CTC
actctcctggactgcagctc

SEQ ID NO: 341439 - DNA, 20 bp, Artificial Sequence
  Description of Artificial Sequence: Synthetic oligonucleotide
  Target: LAMA2; (+) strand; PAM type: YTN; PAM sequence: CTC
tcctggactgcagctcaatg

SEQ ID NO: 341440 - DNA, 20 bp, Artificial Sequence
  Description of Artificial Sequence: Synthetic oligonucleotide
  Target: LAMA2; (+) strand; PAM type: YTN; PAM sequence: CTC
ctggactgcagctcaatgga

SEQ ID NO: 341441 - DNA, 20 bp, Artificial Sequence
  Description of Artificial Sequence: Synthetic oligonucleotide
  Target: LAMA2; (+) strand; PAM type: YTN; PAM sequence: CTG
gactgcagctcaatggaact

SEQ ID NO: 341442 - DNA, 20 bp, Artificial Sequence
  Description of Artificial Sequence: Synthetic oligonucleotide
  Target: LAMA2; (+) strand; PAM type: YTN; PAM sequence: CTG
cagctcaatggaacttagat

SEQ ID NO: 341443 - DNA, 20 bp, Artificial Sequence
  Description of Artificial Sequence: Synthetic oligonucleotide
  Target: LAMA2; (+) strand; PAM type: YTN; PAM sequence: CTC
aatggaacttagattcactt

SEQ ID NO: 341444 - DNA, 20 bp, Artificial Sequence
  Description of Artificial Sequence: Synthetic oligonucleotide
  Target: LAMA2; (+) strand; PAM type: YTN; PAM sequence: CTT
agattcactttgattctgct

SEQ ID NO: 341445 - DNA, 20 bp, Artificial Sequence
  Description of Artificial Sequence: Synthetic oligonucleotide
  Target: LAMA2; (+) strand; PAM type: YTN; PAM sequence: TTA
gattcactttgattctgctt

SEQ ID NO: 341446 - DNA, 20 bp, Artificial Sequence
  Description of Artificial Sequence: Synthetic oligonucleotide
  Target: LAMA2; (+) strand; PAM type: YTN; PAM sequence: TTC
actttgattctgctttgaaa

SEQ ID NO: 341447 - DNA, 20 bp, Artificial Sequence
  Description of Artificial Sequence: Synthetic oligonucleotide
  Target: LAMA2; (+) strand; PAM type: YTN; PAM sequence: CTT
tgattctgctttgaaacatg

SEQ ID NO: 341448 - DNA, 20 bp, Artificial Sequence
  Description of Artificial Sequence: Synthetic oligonucleotide
  Target: LAMA2; (+) strand; PAM type: YTN; PAM sequence: TTT
gattctgctttgaaacatgg

SEQ ID NO: 341449 - DNA, 20 bp, Artificial Sequence
  Description of Artificial Sequence: Synthetic oligonucleotide
  Target: LAMA2; (+) strand; PAM type: YTN; PAM sequence: TTG
attctgctttgaaacatggc

SEQ ID NO: 341450 - DNA, 20 bp, Artificial Sequence
  Description of Artificial Sequence: Synthetic oligonucleotide
  Target: LAMA2; (+) strand; PAM type: YTN; PAM sequence: TTC
tgctttgaaacatggcaggc

SEQ ID NO: 341451 - DNA, 20 bp, Artificial Sequence
  Description of Artificial Sequence: Synthetic oligonucleotide
  Target: LAMA2; (+) strand; PAM type: YTN; PAM sequence: CTG
ctttgaaacatggcaggctt

SEQ ID NO: 341452 - DNA, 20 bp, Artificial Sequence
  Description of Artificial Sequence: Synthetic oligonucleotide
  Target: LAMA2; (+) strand; PAM type: YTN; PAM sequence: CTT
tgaaacatggcaggcttgta

SEQ ID NO: 341453 - DNA, 20 bp, Artificial Sequence
  Description of Artificial Sequence: Synthetic oligonucleotide
  Target: LAMA2; (+) strand; PAM type: YTN; PAM sequence: TTT
gaaacatggcaggcttgtat

SEQ ID NO: 341454 - DNA, 20 bp, Artificial Sequence
  Description of Artificial Sequence: Synthetic oligonucleotide
  Target: LAMA2; (+) strand; PAM type: YTN; PAM sequence: TTG
aaacatggcaggcttgtata

SEQ ID NO: 341455 - DNA, 20 bp, Artificial Sequence
  Description of Artificial Sequence: Synthetic oligonucleotide
  Target: LAMA2; (+) strand; PAM type: YTN; PAM sequence: CTT
gtataaaaatccctggagaa

SEQ ID NO: 341456 - DNA, 20 bp, Artificial Sequence
  Description of Artificial Sequence: Synthetic oligonucleotide
  Target: LAMA2; (+) strand; PAM type: YTN; PAM sequence: TTG
tataaaaatccctggagaaa

SEQ ID NO: 341457 - DNA, 20 bp, Artificial Sequence
  Description of Artificial Sequence: Synthetic oligonucleotide
  Target: LAMA2; (+) strand; PAM type: YTN; PAM sequence: CTG
gagaaaccatcattaaatct

SEQ ID NO: 341458 - DNA, 20 bp, Artificial Sequence
  Description of Artificial Sequence: Synthetic oligonucleotide
  Target: LAMA2; (+) strand; PAM type: YTN; PAM sequence: TTA
aatcttgaagacactttttt

SEQ ID NO: 341459 - DNA, 20 bp, Artificial Sequence
  Description of Artificial Sequence: Synthetic oligonucleotide
  Target: LAMA2; (+) strand; PAM type: YTN; PAM sequence: CTT
gaagacactttttttttttt

SEQ ID NO: 341460 - DNA, 20 bp, Artificial Sequence
  Description of Artificial Sequence: Synthetic oligonucleotide
  Target: LAMA2; (+) strand; PAM type: YTN; PAM sequence: TTG
aagacacttttttttttttt

SEQ ID NO: 341461 - DNA, 20 bp, Artificial Sequence
  Description of Artificial Sequence: Synthetic oligonucleotide
  Target: LAMA2; (+) strand; PAM type: YTN; PAM sequence: CTT
ttttttttttttgtaaactg

SEQ ID NO: 341462 - DNA, 20 bp, Artificial Sequence
  Description of Artificial Sequence: Synthetic oligonucleotide
  Target: LAMA2; (+) strand; PAM type: YTN; PAM sequence: TTT
tttttttttttgtaaactgt

SEQ ID NO: 341463 - DNA, 20 bp, Artificial Sequence
  Description of Artificial Sequence: Synthetic oligonucleotide
  Target: LAMA2; (+) strand; PAM type: YTN; PAM sequence: TTT
ttttttttttgtaaactgta

SEQ ID NO: 341464 - DNA, 20 bp, Artificial Sequence
  Description of Artificial Sequence: Synthetic oligonucleotide
  Target: LAMA2; (+) strand; PAM type: YTN; PAM sequence: TTT
tttttttttgtaaactgtat

SEQ ID NO: 341465 - DNA, 20 bp, Artificial Sequence
  Description of Artificial Sequence: Synthetic oligonucleotide
  Target: LAMA2; (+) strand; PAM type: YTN; PAM sequence: TTT
ttttttttgtaaactgtatg

SEQ ID NO: 341466 - DNA, 20 bp, Artificial Sequence
  Description of Artificial Sequence: Synthetic oligonucleotide
  Target: LAMA2; (+) strand; PAM type: YTN; PAM sequence: TTT
tttttttgtaaactgtatgt

SEQ ID NO: 341467 - DNA, 20 bp, Artificial Sequence
  Description of Artificial Sequence: Synthetic oligonucleotide
  Target: LAMA2; (+) strand; PAM type: YTN; PAM sequence: TTT
ttttttgtaaactgtatgta

SEQ ID NO: 341468 - DNA, 20 bp, Artificial Sequence
  Description of Artificial Sequence: Synthetic oligonucleotide
  Target: LAMA2; (+) strand; PAM type: YTN; PAM sequence: TTT
tttttgtaaactgtatgtag

SEQ ID NO: 341469 - DNA, 20 bp, Artificial Sequence
  Description of Artificial Sequence: Synthetic oligonucleotide
  Target: LAMA2; (+) strand; PAM type: YTN; PAM sequence: TTT
ttttgtaaactgtatgtaga

SEQ ID NO: 341470 - DNA, 20 bp, Artificial Sequence
  Description of Artificial Sequence: Synthetic oligonucleotide
  Target: LAMA2; (+) strand; PAM type: YTN; PAM sequence: TTT
tttgtaaactgtatgtagag

SEQ ID NO: 341471 - DNA, 20 bp, Artificial Sequence
  Description of Artificial Sequence: Synthetic oligonucleotide
  Target: LAMA2; (+) strand; PAM type: YTN; PAM sequence: TTT
ttgtaaactgtatgtagagc

SEQ ID NO: 341472 - DNA, 20 bp, Artificial Sequence
  Description of Artificial Sequence: Synthetic oligonucleotide
  Target: LAMA2; (+) strand; PAM type: YTN; PAM sequence: TTT
tgtaaactgtatgtagagct

SEQ ID NO: 341473 - DNA, 20 bp, Artificial Sequence
  Description of Artificial Sequence: Synthetic oligonucleotide
  Target: LAMA2; (+) strand; PAM type: YTN; PAM sequence: TTT
gtaaactgtatgtagagctt

SEQ ID NO: 341474 - DNA, 20 bp, Artificial Sequence
  Description of Artificial Sequence: Synthetic oligonucleotide
  Target: LAMA2; (+) strand; PAM type: YTN; PAM sequence: TTG
taaactgtatgtagagcttt

SEQ ID NO: 341475 - DNA, 20 bp, Artificial Sequence
  Description of Artificial Sequence: Synthetic oligonucleotide
  Target: LAMA2; (+) strand; PAM type: YTN; PAM sequence: CTG
tatgtagagctttgatatta

SEQ ID NO: 341476 - DNA, 20 bp, Artificial Sequence
  Description of Artificial Sequence: Synthetic oligonucleotide
  Target: LAMA2; (+) strand; PAM type: YTN; PAM sequence: CTT
tgatattattttgatttcct

SEQ ID NO: 341477 - DNA, 20 bp, Artificial Sequence
  Description of Artificial Sequence: Synthetic oligonucleotide
  Target: LAMA2; (+) strand; PAM type: YTN; PAM sequence: TTT
gatattattttgatttccta

SEQ ID NO: 341478 - DNA, 20 bp, Artificial Sequence
  Description of Artificial Sequence: Synthetic oligonucleotide
  Target: LAMA2; (+) strand; PAM type: YTN; PAM sequence: TTG
atattattttgatttcctat

SEQ ID NO: 341479 - DNA, 20 bp, Artificial Sequence
  Description of Artificial Sequence: Synthetic oligonucleotide
  Target: LAMA2; (+) strand; PAM type: YTN; PAM sequence: TTA
ttttgatttcctatgtgaca

SEQ ID NO: 341480 - DNA, 20 bp, Artificial Sequence
  Description of Artificial Sequence: Synthetic oligonucleotide
  Target: LAMA2; (+) strand; PAM type: YTN; PAM sequence: TTT
tgatttcctatgtgacagaa

SEQ ID NO: 341481 - DNA, 20 bp, Artificial Sequence
  Description of Artificial Sequence: Synthetic oligonucleotide
  Target: LAMA2; (+) strand; PAM type: YTN; PAM sequence: TTT
gatttcctatgtgacagaat

SEQ ID NO: 341482 - DNA, 20 bp, Artificial Sequence
  Description of Artificial Sequence: Synthetic oligonucleotide
  Target: LAMA2; (+) strand; PAM type: YTN; PAM sequence: TTG
atttcctatgtgacagaatt

SEQ ID NO: 341483 - DNA, 20 bp, Artificial Sequence
  Description of Artificial Sequence: Synthetic oligonucleotide
  Target: LAMA2; (+) strand; PAM type: YTN; PAM sequence: TTT
cctatgtgacagaattttat

SEQ ID NO: 341484 - DNA, 20 bp, Artificial Sequence
  Description of Artificial Sequence: Synthetic oligonucleotide
  Target: LAMA2; (+) strand; PAM type: YTN; PAM sequence: TTC
ctatgtgacagaattttata

SEQ ID NO: 341485 - DNA, 20 bp, Artificial Sequence
  Description of Artificial Sequence: Synthetic oligonucleotide
  Target: LAMA2; (+) strand; PAM type: YTN; PAM sequence: CTA
tgtgacagaattttatatat

SEQ ID NO: 341486 - DNA, 20 bp, Artificial Sequence
  Description of Artificial Sequence: Synthetic oligonucleotide
  Target: LAMA2; (+) strand; PAM type: YTN; PAM sequence: TTT
tatatatacagacagaatat

SEQ ID NO: 341487 - DNA, 20 bp, Artificial Sequence
  Description of Artificial Sequence: Synthetic oligonucleotide
  Target: LAMA2; (+) strand; PAM type: YTN; PAM sequence: TTT
atatatacagacagaatatt

SEQ ID NO: 341488 - DNA, 20 bp, Artificial Sequence
  Description of Artificial Sequence: Synthetic oligonucleotide
  Target: LAMA2; (+) strand; PAM type: YTN; PAM sequence: TTA
tatatacagacagaatattt

SEQ ID NO: 341489 - DNA, 20 bp, Artificial Sequence
  Description of Artificial Sequence: Synthetic oligonucleotide
  Target: LAMA2; (+) strand; PAM type: YTN; PAM sequence: TTT
ttcttcctcttttcatcatc

SEQ ID NO: 341490 - DNA, 20 bp, Artificial Sequence
  Description of Artificial Sequence: Synthetic oligonucleotide
  Target: LAMA2; (+) strand; PAM type: YTN; PAM sequence: TTT
tcttcctcttttcatcatct

SEQ ID NO: 341491 - DNA, 20 bp, Artificial Sequence
  Description of Artificial Sequence: Synthetic oligonucleotide
  Target: LAMA2; (+) strand; PAM type: YTN; PAM sequence: TTT
cttcctcttttcatcatctg

SEQ ID NO: 341492 - DNA, 20 bp, Artificial Sequence
  Description of Artificial Sequence: Synthetic oligonucleotide
  Target: LAMA2; (+) strand; PAM type: YTN; PAM sequence: TTC
ttcctcttttcatcatctga

SEQ ID NO: 341493 - DNA, 20 bp, Artificial Sequence
  Description of Artificial Sequence: Synthetic oligonucleotide
  Target: LAMA2; (+) strand; PAM type: YTN; PAM sequence: CTT
cctcttttcatcatctgaca

SEQ ID NO: 341494 - DNA, 20 bp, Artificial Sequence
  Description of Artificial Sequence: Synthetic oligonucleotide
  Target: LAMA2; (+) strand; PAM type: YTN; PAM sequence: TTC
ctcttttcatcatctgacat

SEQ ID NO: 341495 - DNA, 20 bp, Artificial Sequence
  Description of Artificial Sequence: Synthetic oligonucleotide
  Target: LAMA2; (+) strand; PAM type: YTN; PAM sequence: CTC
ttttcatcatctgacattat

SEQ ID NO: 341496 - DNA, 20 bp, Artificial Sequence
  Description of Artificial Sequence: Synthetic oligonucleotide
  Target: LAMA2; (+) strand; PAM type: YTN; PAM sequence: CTT
ttcatcatctgacattatgg

SEQ ID NO: 341497 - DNA, 20 bp, Artificial Sequence
  Description of Artificial Sequence: Synthetic oligonucleotide
  Target: LAMA2; (+) strand; PAM type: YTN; PAM sequence: TTT
tcatcatctgacattatggt

SEQ ID NO: 341498 - DNA, 20 bp, Artificial Sequence
  Description of Artificial Sequence: Synthetic oligonucleotide
  Target: LAMA2; (+) strand; PAM type: YTN; PAM sequence: TTT
catcatctgacattatggtg

SEQ ID NO: 341499 - DNA, 20 bp, Artificial Sequence
  Description of Artificial Sequence: Synthetic oligonucleotide
  Target: LAMA2; (+) strand; PAM type: YTN; PAM sequence: TTC
atcatctgacattatggtgg

SEQ ID NO: 341500 - DNA, 20 bp, Artificial Sequence
  Description of Artificial Sequence: Synthetic oligonucleotide
  Target: LAMA2; (+) strand; PAM type: YTN; PAM sequence: CTG
acattatggtggtccttaga

SEQ ID NO: 341501 - DNA, 20 bp, Artificial Sequence
  Description of Artificial Sequence: Synthetic oligonucleotide
  Target: LAMA2; (+) strand; PAM type: YTN; PAM sequence: TTA
tggtggtccttagaattgca

SEQ ID NO: 341502 - DNA, 20 bp, Artificial Sequence
  Description of Artificial Sequence: Synthetic oligonucleotide
  Target: LAMA2; (+) strand; PAM type: YTN; PAM sequence: CTT
agaattgcaaatacaggaga

SEQ ID NO: 341503 - DNA, 20 bp, Artificial Sequence
  Description of Artificial Sequence: Synthetic oligonucleotide
  Target: LAMA2; (+) strand; PAM type: YTN; PAM sequence: TTA
gaattgcaaatacaggagaa

SEQ ID NO: 341504 - DNA, 20 bp, Artificial Sequence
  Description of Artificial Sequence: Synthetic oligonucleotide
  Target: LAMA2; (+) strand; PAM type: YTN; PAM sequence: TTG
caaatacaggagaaggaaga

SEQ ID NO: 341505 - DNA, 20 bp, Artificial Sequence
  Description of Artificial Sequence: Synthetic oligonucleotide
  Target: LAMA2; (+) strand; PAM type: YTN; PAM sequence: CTG
tattaaaaaatgtttcagaa

SEQ ID NO: 341506 - DNA, 20 bp, Artificial Sequence
  Description of Artificial Sequence: Synthetic oligonucleotide
  Target: LAMA2; (+) strand; PAM type: YTN; PAM sequence: TTA
aaaaatgtttcagaaattct

SEQ ID NO: 341507 - DNA, 20 bp, Artificial Sequence
  Description of Artificial Sequence: Synthetic oligonucleotide
  Target: LAMA2; (+) strand; PAM type: YTN; PAM sequence: TTT
cagaaattctcctttgatat

SEQ ID NO: 341508 - DNA, 20 bp, Artificial Sequence
  Description of Artificial Sequence: Synthetic oligonucleotide
  Target: LAMA2; (+) strand; PAM type: YTN; PAM sequence: TTC
agaaattctcctttgatata

SEQ ID NO: 341509 - DNA, 20 bp, Artificial Sequence
  Description of Artificial Sequence: Synthetic oligonucleotide
  Target: LAMA2; (+) strand; PAM type: YTN; PAM sequence: TTC
tcctttgatataacattgtt

SEQ ID NO: 341510 - DNA, 20 bp, Artificial Sequence
  Description of Artificial Sequence: Synthetic oligonucleotide
  Target: LAMA2; (+) strand; PAM type: YTN; PAM sequence: CTC
ctttgatataacattgttaa

SEQ ID NO: 341511 - DNA, 20 bp, Artificial Sequence
  Description of Artificial Sequence: Synthetic oligonucleotide
  Target: LAMA2; (+) strand; PAM type: YTN; PAM sequence: CTT
tgatataacattgttaaggt

SEQ ID NO: 341512 - DNA, 20 bp, Artificial Sequence
  Description of Artificial Sequence: Synthetic oligonucleotide
  Target: LAMA2; (+) strand; PAM type: YTN; PAM sequence: TTT
gatataacattgttaaggtt

SEQ ID NO: 341513 - DNA, 20 bp, Artificial Sequence
  Description of Artificial Sequence: Synthetic oligonucleotide
  Target: LAMA2; (+) strand; PAM type: YTN; PAM sequence: TTG
atataacattgttaaggtta

SEQ ID NO: 341514 - DNA, 20 bp, Artificial Sequence
  Description of Artificial Sequence: Synthetic oligonucleotide
  Target: LAMA2; (+) strand; PAM type: YTN; PAM sequence: TTG
ttaaggttataacatgattt

SEQ ID NO: 341515 - DNA, 20 bp, Artificial Sequence
  Description of Artificial Sequence: Synthetic oligonucleotide
  Target: LAMA2; (+) strand; PAM type: YTN; PAM sequence: TTA
aggttataacatgattttgc

SEQ ID NO: 341516 - DNA, 20 bp, Artificial Sequence
  Description of Artificial Sequence: Synthetic oligonucleotide
  Target: LAMA2; (+) strand; PAM type: YTN; PAM sequence: TTA
taacatgattttgcatgtga

SEQ ID NO: 341517 - DNA, 20 bp, Artificial Sequence
  Description of Artificial Sequence: Synthetic oligonucleotide
  Target: LAMA2; (+) strand; PAM type: YTN; PAM sequence: TTT
tgcatgtgagtttgtatgga

SEQ ID NO: 341518 - DNA, 20 bp, Artificial Sequence
  Description of Artificial Sequence: Synthetic oligonucleotide
  Target: LAMA2; (+) strand; PAM type: YTN; PAM sequence: TTT
gcatgtgagtttgtatggaa

SEQ ID NO: 341519 - DNA, 20 bp, Artificial Sequence
  Description of Artificial Sequence: Synthetic oligonucleotide
  Target: LAMA2; (+) strand; PAM type: YTN; PAM sequence: TTG
catgtgagtttgtatggaaa

SEQ ID NO: 341520 - DNA, 20 bp, Artificial Sequence
  Description of Artificial Sequence: Synthetic oligonucleotide
  Target: LAMA2; (+) strand; PAM type: YTN; PAM sequence: TTT
gtatggaaatgagggaatgg

SEQ ID NO: 341521 - DNA, 20 bp, Artificial Sequence
  Description of Artificial Sequence: Synthetic oligonucleotide
  Target: LAMA2; (+) strand; PAM type: YTN; PAM sequence: TTG
tatggaaatgagggaatgga

SEQ ID NO: 341522 - DNA, 20 bp, Artificial Sequence
  Description of Artificial Sequence: Synthetic oligonucleotide
  Target: LAMA2; (+) strand; PAM type: YTN; PAM sequence: CTA
gcctttctcaattacccttg

SEQ ID NO: 341523 - DNA, 20 bp, Artificial Sequence
  Description of Artificial Sequence: Synthetic oligonucleotide
  Target: LAMA2; (+) strand; PAM type: YTN; PAM sequence: CTT
tctcaattacccttgcaatt

SEQ ID NO: 341524 - DNA, 20 bp, Artificial Sequence
  Description of Artificial Sequence: Synthetic oligonucleotide
  Target: LAMA2; (+) strand; PAM type: YTN; PAM sequence: TTT
ctcaattacccttgcaattg

SEQ ID NO: 341525 - DNA, 20 bp, Artificial Sequence
  Description of Artificial Sequence: Synthetic oligonucleotide
  Target: LAMA2; (+) strand; PAM type: YTN; PAM sequence: TTC
tcaattacccttgcaattgt

SEQ ID NO: 341526 - DNA, 20 bp, Artificial Sequence
  Description of Artificial Sequence: Synthetic oligonucleotide
  Target: LAMA2; (+) strand; PAM type: YTN; PAM sequence: CTC
aattacccttgcaattgttc

SEQ ID NO: 341527 - DNA, 20 bp, Artificial Sequence
  Description of Artificial Sequence: Synthetic oligonucleotide
  Target: LAMA2; (+) strand; PAM type: YTN; PAM sequence: TTA
cccttgcaattgttccttta

SEQ ID NO: 341528 - DNA, 20 bp, Artificial Sequence
  Description of Artificial Sequence: Synthetic oligonucleotide
  Target: LAMA2; (+) strand; PAM type: YTN; PAM sequence: CTT
gcaattgttcctttagggag

SEQ ID NO: 341529 - DNA, 20 bp, Artificial Sequence
  Description of Artificial Sequence: Synthetic oligonucleotide
  Target: LAMA2; (+) strand; PAM type: YTN; PAM sequence: TTG
caattgttcctttagggaga

SEQ ID NO: 341530 - DNA, 20 bp, Artificial Sequence
  Description of Artificial Sequence: Synthetic oligonucleotide
  Target: LAMA2; (+) strand; PAM type: YTN; PAM sequence: TTG
ttcctttagggagaaacagc

SEQ ID NO: 341531 - DNA, 20 bp, Artificial Sequence
  Description of Artificial Sequence: Synthetic oligonucleotide
  Target: LAMA2; (+) strand; PAM type: YTN; PAM sequence: TTC
ctttagggagaaacagcgga

SEQ ID NO: 341532 - DNA, 20 bp, Artificial Sequence
  Description of Artificial Sequence: Synthetic oligonucleotide
  Target: LAMA2; (+) strand; PAM type: YTN; PAM sequence: CTT
tagggagaaacagcggagta

SEQ ID NO: 341533 - DNA, 20 bp, Artificial Sequence
  Description of Artificial Sequence: Synthetic oligonucleotide
  Target: LAMA2; (+) strand; PAM type: YTN; PAM sequence: TTT
agggagaaacagcggagtat

SEQ ID NO: 341534 - DNA, 20 bp, Artificial Sequence
  Description of Artificial Sequence: Synthetic oligonucleotide
  Target: LAMA2; (+) strand; PAM type: YTN; PAM sequence: TTA
gggagaaacagcggagtatt

SEQ ID NO: 341535 - DNA, 20 bp, Artificial Sequence
  Description of Artificial Sequence: Synthetic oligonucleotide
  Target: LAMA2; (+) strand; PAM type: YTN; PAM sequence: TTA
ctaatttgtattggttttca

SEQ ID NO: 341536 - DNA, 20 bp, Artificial Sequence
  Description of Artificial Sequence: Synthetic oligonucleotide
  Target: LAMA2; (+) strand; PAM type: YTN; PAM sequence: CTA
atttgtattggttttcaata

SEQ ID NO: 341537 - DNA, 20 bp, Artificial Sequence
  Description of Artificial Sequence: Synthetic oligonucleotide
  Target: LAMA2; (+) strand; PAM type: YTN; PAM sequence: TTT
gtattggttttcaatagaaa

SEQ ID NO: 341538 - DNA, 20 bp, Artificial Sequence
  Description of Artificial Sequence: Synthetic oligonucleotide
  Target: LAMA2; (+) strand; PAM type: YTN; PAM sequence: TTG
tattggttttcaatagaaat

SEQ ID NO: 341539 - DNA, 20 bp, Artificial Sequence
  Description of Artificial Sequence: Synthetic oligonucleotide
  Target: LAMA2; (+) strand; PAM type: YTN; PAM sequence: TTG
gttttcaatagaaatttagg

SEQ ID NO: 341540 - DNA, 20 bp, Artificial Sequence
  Description of Artificial Sequence: Synthetic oligonucleotide
  Target: LAMA2; (+) strand; PAM type: YTN; PAM sequence: TTT
tcaatagaaatttaggtaaa

SEQ ID NO: 341541 - DNA, 20 bp, Artificial Sequence
  Description of Artificial Sequence: Synthetic oligonucleotide
  Target: LAMA2; (+) strand; PAM type: YTN; PAM sequence: TTT
caatagaaatttaggtaaat

SEQ ID NO: 341542 - DNA, 20 bp, Artificial Sequence
  Description of Artificial Sequence: Synthetic oligonucleotide
  Target: LAMA2; (+) strand; PAM type: YTN; PAM sequence: TTC
aatagaaatttaggtaaata

SEQ ID NO: 341543 - DNA, 20 bp, Artificial Sequence
  Description of Artificial Sequence: Synthetic oligonucleotide
  Target: LAMA2; (+) strand; PAM type: YTN; PAM sequence: TTT
aggtaaataattatttgggg

SEQ ID NO: 341544 - DNA, 20 bp, Artificial Sequence
  Description of Artificial Sequence: Synthetic oligonucleotide
  Target: LAMA2; (+) strand; PAM type: YTN; PAM sequence: TTA
ggtaaataattatttggggt

SEQ ID NO: 341545 - DNA, 20 bp, Artificial Sequence
  Description of Artificial Sequence: Synthetic oligonucleotide
  Target: LAMA2; (+) strand; PAM type: YTN; PAM sequence: TTA
tttggggtttcaggcttcct

SEQ ID NO: 341546 - DNA, 20 bp, Artificial Sequence
  Description of Artificial Sequence: Synthetic oligonucleotide
  Target: LAMA2; (+) strand; PAM type: YTN; PAM sequence: TTT
ggggtttcaggcttcctttc

SEQ ID NO: 341547 - DNA, 20 bp, Artificial Sequence
  Description of Artificial Sequence: Synthetic oligonucleotide
  Target: LAMA2; (+) strand; PAM type: YTN; PAM sequence: TTG
gggtttcaggcttcctttct

SEQ ID NO: 341548 - DNA, 20 bp, Artificial Sequence
  Description of Artificial Sequence: Synthetic oligonucleotide
  Target: LAMA2; (+) strand; PAM type: YTN; PAM sequence: TTT
caggcttcctttctctaaaa

SEQ ID NO: 341549 - DNA, 20 bp, Artificial Sequence
  Description of Artificial Sequence: Synthetic oligonucleotide
  Target: LAMA2; (+) strand; PAM type: YTN; PAM sequence: TTC
aggcttcctttctctaaaaa

SEQ ID NO: 341550 - DNA, 20 bp, Artificial Sequence
  Description of Artificial Sequence: Synthetic oligonucleotide
  Target: LAMA2; (+) strand; PAM type: YTN; PAM sequence: CTT
cctttctctaaaaataattc

SEQ ID NO: 341551 - DNA, 20 bp, Artificial Sequence
  Description of Artificial Sequence: Synthetic oligonucleotide
  Target: LAMA2; (+) strand; PAM type: YTN; PAM sequence: TTC
ctttctctaaaaataattct

SEQ ID NO: 341552 - DNA, 20 bp, Artificial Sequence
  Description of Artificial Sequence: Synthetic oligonucleotide
  Target: LAMA2; (+) strand; PAM type: YTN; PAM sequence: CTT
tctctaaaaataattctttt

SEQ ID NO: 341553 - DNA, 20 bp, Artificial Sequence
  Description of Artificial Sequence: Synthetic oligonucleotide
  Target: LAMA2; (+) strand; PAM type: YTN; PAM sequence: TTT
ctctaaaaataattcttttt

SEQ ID NO: 341554 - DNA, 20 bp, Artificial Sequence
  Description of Artificial Sequence: Synthetic oligonucleotide
  Target: LAMA2; (+) strand; PAM type: YTN; PAM sequence: TTC
tctaaaaataattcttttta

SEQ ID NO: 341555 - DNA, 20 bp, Artificial Sequence
  Description of Artificial Sequence: Synthetic oligonucleotide
  Target: LAMA2; (+) strand; PAM type: YTN; PAM sequence: CTC
taaaaataattctttttaga

SEQ ID NO: 341556 - DNA, 20 bp, Artificial Sequence
  Description of Artificial Sequence: Synthetic oligonucleotide
  Target: LAMA2; (+) strand; PAM type: YTN; PAM sequence: CTA
aaaataattctttttagacc

SEQ ID NO: 341557 - DNA, 20 bp, Artificial Sequence
  Description of Artificial Sequence: Synthetic oligonucleotide
  Target: LAMA2; (+) strand; PAM type: YTN; PAM sequence: TTC
tttttagaccaatgtggggc

SEQ ID NO: 341558 - DNA, 20 bp, Artificial Sequence
  Description of Artificial Sequence: Synthetic oligonucleotide
  Target: LAMA2; (+) strand; PAM type: YTN; PAM sequence: CTT
tttagaccaatgtggggcca

SEQ ID NO: 341559 - DNA, 20 bp, Artificial Sequence
  Description of Artificial Sequence: Synthetic oligonucleotide
  Target: LAMA2; (+) strand; PAM type: YTN; PAM sequence: TTT
ttagaccaatgtggggccaa

SEQ ID NO: 341560 - DNA, 20 bp, Artificial Sequence
  Description of Artificial Sequence: Synthetic oligonucleotide
  Target: LAMA2; (+) strand; PAM type: YTN; PAM sequence: TTT
tagaccaatgtggggccaat

SEQ ID NO: 341561 - DNA, 20 bp, Artificial Sequence
  Description of Artificial Sequence: Synthetic oligonucleotide
  Target: LAMA2; (+) strand; PAM type: YTN; PAM sequence: TTT
agaccaatgtggggccaatc

SEQ ID NO: 341562 - DNA, 20 bp, Artificial Sequence
  Description of Artificial Sequence: Synthetic oligonucleotide
  Target: LAMA2; (+) strand; PAM type: YTN; PAM sequence: TTA
gaccaatgtggggccaatca

SEQ ID NO: 341563 - DNA, 20 bp, Artificial Sequence
  Description of Artificial Sequence: Synthetic oligonucleotide
  Target: LAMA2; (+) strand; PAM type: YTN; PAM sequence: CTG
gagcaacaatattaaagtac

SEQ ID NO: 341564 - DNA, 20 bp, Artificial Sequence
  Description of Artificial Sequence: Synthetic oligonucleotide
  Target: LAMA2; (+) strand; PAM type: YTN; PAM sequence: TTA
aagtacctccttacagtgag

SEQ ID NO: 341565 - DNA, 20 bp, Artificial Sequence
  Description of Artificial Sequence: Synthetic oligonucleotide
  Target: LAMA2; (+) strand; PAM type: YTN; PAM sequence: CTC
cttacagtgaggtttatatg

SEQ ID NO: 341566 - DNA, 20 bp, Artificial Sequence
  Description of Artificial Sequence: Synthetic oligonucleotide
  Target: LAMA2; (+) strand; PAM type: YTN; PAM sequence: CTT
acagtgaggtttatatggag

SEQ ID NO: 341567 - DNA, 20 bp, Artificial Sequence
  Description of Artificial Sequence: Synthetic oligonucleotide
  Target: LAMA2; (+) strand; PAM type: YTN; PAM sequence: TTA
cagtgaggtttatatggagt

SEQ ID NO: 341568 - DNA, 20 bp, Artificial Sequence
  Description of Artificial Sequence: Synthetic oligonucleotide
  Target: LAMA2; (+) strand; PAM type: YTN; PAM sequence: TTT
atatggagtcctctaaaaaa

SEQ ID NO: 341569 - DNA, 20 bp, Artificial Sequence
  Description of Artificial Sequence: Synthetic oligonucleotide
  Target: LAMA2; (+) strand; PAM type: YTN; PAM sequence: TTA
tatggagtcctctaaaaaat

SEQ ID NO: 341570 - DNA, 20 bp, Artificial Sequence
  Description of Artificial Sequence: Synthetic oligonucleotide
  Target: LAMA2; (+) strand; PAM type: YTN; PAM sequence: CTC
taaaaaatgaaatgtttcaa

SEQ ID NO: 341571 - DNA, 20 bp, Artificial Sequence
  Description of Artificial Sequence: Synthetic oligonucleotide
  Target: LAMA2; (+) strand; PAM type: YTN; PAM sequence: CTA
aaaaatgaaatgtttcaact

SEQ ID NO: 341572 - DNA, 20 bp, Artificial Sequence
  Description of Artificial Sequence: Synthetic oligonucleotide
  Target: LAMA2; (+) strand; PAM type: YTN; PAM sequence: TTT
caactctggttggaatacac

SEQ ID NO: 341573 - DNA, 20 bp, Artificial Sequence
  Description of Artificial Sequence: Synthetic oligonucleotide
  Target: LAMA2; (+) strand; PAM type: YTN; PAM sequence: TTC
aactctggttggaatacaca

SEQ ID NO: 341574 - DNA, 20 bp, Artificial Sequence
  Description of Artificial Sequence: Synthetic oligonucleotide
  Target: LAMA2; (+) strand; PAM type: YTN; PAM sequence: CTC
tggttggaatacacagagca

SEQ ID NO: 341575 - DNA, 20 bp, Artificial Sequence
  Description of Artificial Sequence: Synthetic oligonucleotide
  Target: LAMA2; (+) strand; PAM type: YTN; PAM sequence: CTG
gttggaatacacagagcagc

SEQ ID NO: 341576 - DNA, 20 bp, Artificial Sequence
  Description of Artificial Sequence: Synthetic oligonucleotide
  Target: LAMA2; (+) strand; PAM type: YTN; PAM sequence: TTG
gaatacacagagcagctgaa

SEQ ID NO: 341577 - DNA, 20 bp, Artificial Sequence
  Description of Artificial Sequence: Synthetic oligonucleotide
  Target: LAMA2; (+) strand; PAM type: YTN; PAM sequence: CTG
aaatattttgaaatgacaca

SEQ ID NO: 341578 - DNA, 20 bp, Artificial Sequence
  Description of Artificial Sequence: Synthetic oligonucleotide
  Target: LAMA2; (+) strand; PAM type: YTN; PAM sequence: TTT
tgaaatgacacacacataaa

SEQ ID NO: 341579 - DNA, 20 bp, Artificial Sequence
  Description of Artificial Sequence: Synthetic oligonucleotide
  Target: LAMA2; (+) strand; PAM type: YTN; PAM sequence: TTT
gaaatgacacacacataaaa

SEQ ID NO: 341580 - DNA, 20 bp, Artificial Sequence
  Description of Artificial Sequence: Synthetic oligonucleotide
  Target: LAMA2; (+) strand; PAM type: YTN; PAM sequence: TTG
aaatgacacacacataaaat

SEQ ID NO: 341581 - DNA, 20 bp, Artificial Sequence
  Description of Artificial Sequence: Synthetic oligonucleotide
  Target: LAMA2; (+) strand; PAM type: YTN; PAM sequence: TTT
atttaaggtaatttattgtt

SEQ ID NO: 341582 - DNA, 20 bp, Artificial Sequence
  Description of Artificial Sequence: Synthetic oligonucleotide
  Target: LAMA2; (+) strand; PAM type: YTN; PAM sequence: TTA
tttaaggtaatttattgtta

SEQ ID NO: 341583 - DNA, 20 bp, Artificial Sequence
  Description of Artificial Sequence: Synthetic oligonucleotide
  Target: LAMA2; (+) strand; PAM type: YTN; PAM sequence: TTT
aaggtaatttattgttacat

SEQ ID NO: 341584 - DNA, 20 bp, Artificial Sequence
  Description of Artificial Sequence: Synthetic oligonucleotide
  Target: LAMA2; (+) strand; PAM type: YTN; PAM sequence: TTA
aggtaatttattgttacatt

SEQ ID NO: 341585 - DNA, 20 bp, Artificial Sequence
  Description of Artificial Sequence: Synthetic oligonucleotide
  Target: LAMA2; (+) strand; PAM type: YTN; PAM sequence: TTT
attgttacattttaaaaata

SEQ ID NO: 341586 - DNA, 20 bp, Artificial Sequence
  Description of Artificial Sequence: Synthetic oligonucleotide
  Target: LAMA2; (+) strand; PAM type: YTN; PAM sequence: TTA
ttgttacattttaaaaatac

SEQ ID NO: 341587 - DNA, 20 bp, Artificial Sequence
  Description of Artificial Sequence: Synthetic oligonucleotide
  Target: LAMA2; (+) strand; PAM type: YTN; PAM sequence: TTG
ttacattttaaaaatacatc

SEQ ID NO: 341588 - DNA, 20 bp, Artificial Sequence
  Description of Artificial Sequence: Synthetic oligonucleotide
  Target: LAMA2; (+) strand; PAM type: YTN; PAM sequence: TTA
cattttaaaaatacatcttt

SEQ ID NO: 341589 - DNA, 20 bp, Artificial Sequence
  Description of Artificial Sequence: Synthetic oligonucleotide
  Target: LAMA2; (+) strand; PAM type: YTN; PAM sequence: TTT
taaaaatacatctttttaat

SEQ ID NO: 341590 - DNA, 20 bp, Artificial Sequence
  Description of Artificial Sequence: Synthetic oligonucleotide
  Target: LAMA2; (+) strand; PAM type: YTN; PAM sequence: TTT
aaaaatacatctttttaata

SEQ ID NO: 341591 - DNA, 20 bp, Artificial Sequence
  Description of Artificial Sequence: Synthetic oligonucleotide
  Target: LAMA2; (+) strand; PAM type: YTN; PAM sequence: TTA
aaaatacatctttttaataa

SEQ ID NO: 341592 - DNA, 20 bp, Artificial Sequence
  Description of Artificial Sequence: Synthetic oligonucleotide
  Target: LAMA2; (+) strand; PAM type: YTN; PAM sequence: CTT
tttaataaaataaagataaa

SEQ ID NO: 341593 - DNA, 20 bp, Artificial Sequence
  Description of Artificial Sequence: Synthetic oligonucleotide
  Target: LAMA2; (+) strand; PAM type: YTN; PAM sequence: TTT
ttaataaaataaagataaaa

SEQ ID NO: 341594 - DNA, 20 bp, Artificial Sequence
  Description of Artificial Sequence: Synthetic oligonucleotide
  Target: LAMA2; (+) strand; PAM type: YTN; PAM sequence: TTT
taataaaataaagataaaat

SEQ ID NO: 341595 - DNA, 20 bp, Artificial Sequence
  Description of Artificial Sequence: Synthetic oligonucleotide
  Target: LAMA2; (+) strand; PAM type: YTN; PAM sequence: TTT
aataaaataaagataaaatt

SEQ ID NO: 341596 - DNA, 20 bp, Artificial Sequence
  Description of Artificial Sequence: Synthetic oligonucleotide
  Target: LAMA2; (+) strand; PAM type: YTN; PAM sequence: TTA
ataaaataaagataaaatta

SEQ ID NO: 341597 - DNA, 20 bp, Artificial Sequence
  Description of Artificial Sequence: Synthetic oligonucleotide
  Target: LAMA2; (+) strand; PAM type: YTN; PAM sequence: TTA
agaggattatattcctcctt

SEQ ID NO: 341598 - DNA, 20 bp, Artificial Sequence
  Description of Artificial Sequence: Synthetic oligonucleotide
  Target: LAMA2; (+) strand; PAM type: YTN; PAM sequence: TTA
tattcctcctttttctttgt

SEQ ID NO: 341599 - DNA, 20 bp, Artificial Sequence
  Description of Artificial Sequence: Synthetic oligonucleotide
  Target: LAMA2; (+) strand; PAM type: YTN; PAM sequence: TTC
ctcctttttctttgttgatc

SEQ ID NO: 341600 - DNA, 20 bp, Artificial Sequence
  Description of Artificial Sequence: Synthetic oligonucleotide
  Target: LAMA2; (+) strand; PAM type: YTN; PAM sequence: CTC
ctttttctttgttgatcagt

SEQ ID NO: 341601 - DNA, 20 bp, Artificial Sequence
  Description of Artificial Sequence: Synthetic oligonucleotide
  Target: LAMA2; (+) strand; PAM type: YTN; PAM sequence: CTT
tttctttgttgatcagttac

SEQ ID NO: 341602 - DNA, 20 bp, Artificial Sequence
  Description of Artificial Sequence: Synthetic oligonucleotide
  Target: LAMA2; (+) strand; PAM type: YTN; PAM sequence: TTT
ttctttgttgatcagttact

SEQ ID NO: 341603 - DNA, 20 bp, Artificial Sequence
  Description of Artificial Sequence: Synthetic oligonucleotide
  Target: LAMA2; (+) strand; PAM type: YTN; PAM sequence: TTT
tctttgttgatcagttacta

SEQ ID NO: 341604 - DNA, 20 bp, Artificial Sequence
  Description of Artificial Sequence: Synthetic oligonucleotide
  Target: LAMA2; (+) strand; PAM type: YTN; PAM sequence: TTT
ctttgttgatcagttactag

SEQ ID NO: 341605 - DNA, 20 bp, Artificial Sequence
  Description of Artificial Sequence: Synthetic oligonucleotide
  Target: LAMA2; (+) strand; PAM type: YTN; PAM sequence: TTC
tttgttgatcagttactaga

SEQ ID NO: 341606 - DNA, 20 bp, Artificial Sequence
  Description of Artificial Sequence: Synthetic oligonucleotide
  Target: LAMA2; (+) strand; PAM type: YTN; PAM sequence: CTT
tgttgatcagttactagact

SEQ ID NO: 341607 - DNA, 20 bp, Artificial Sequence
  Description of Artificial Sequence: Synthetic oligonucleotide
  Target: LAMA2; (+) strand; PAM type: YTN; PAM sequence: TTT
gttgatcagttactagactc

SEQ ID NO: 341608 - DNA, 20 bp, Artificial Sequence
  Description of Artificial Sequence: Synthetic oligonucleotide
  Target: LAMA2; (+) strand; PAM type: YTN; PAM sequence: TTG
ttgatcagttactagactcc

SEQ ID NO: 341609 - DNA, 20 bp, Artificial Sequence
  Description of Artificial Sequence: Synthetic oligonucleotide
  Target: LAMA2; (+) strand; PAM type: YTN; PAM sequence: TTG
atcagttactagactccctt

SEQ ID NO: 341610 - DNA, 20 bp, Artificial Sequence
  Description of Artificial Sequence: Synthetic oligonucleotide
  Target: LAMA2; (+) strand; PAM type: YTN; PAM sequence: TTA
ctagactcccttactcctcc

SEQ ID NO: 341611 - DNA, 20 bp, Artificial Sequence
  Description of Artificial Sequence: Synthetic oligonucleotide
  Target: LAMA2; (+) strand; PAM type: YTN; PAM sequence: CTA
gactcccttactcctccaaa

SEQ ID NO: 341612 - DNA, 20 bp, Artificial Sequence
  Description of Artificial Sequence: Synthetic oligonucleotide
  Target: LAMA2; (+) strand; PAM type: YTN; PAM sequence: CTC
ccttactcctccaaaaaaaa

SEQ ID NO: 341613 - DNA, 20 bp, Artificial Sequence
  Description of Artificial Sequence: Synthetic oligonucleotide
  Target: LAMA2; (+) strand; PAM type: YTN; PAM sequence: CTT
actcctccaaaaaaaaaaaa

SEQ ID NO: 341614 - DNA, 20 bp, Artificial Sequence
  Description of Artificial Sequence: Synthetic oligonucleotide
  Target: LAMA2; (+) strand; PAM type: YTN; PAM sequence: TTA
ctcctccaaaaaaaaaaaaa

SEQ ID NO: 341615 - DNA, 20 bp, Artificial Sequence
  Description of Artificial Sequence: Synthetic oligonucleotide
  Target: LAMA2; (+) strand; PAM type: YTN; PAM sequence: CTC
ctccaaaaaaaaaaaaaaat

SEQ ID NO: 341616 - DNA, 20 bp, Artificial Sequence
  Description of Artificial Sequence: Synthetic oligonucleotide
  Target: LAMA2; (+) strand; PAM type: YTN; PAM sequence: CTC
caaaaaaaaaaaaaaatata

SEQ ID NO: 341617 - DNA, 20 bp, Artificial Sequence
  Description of Artificial Sequence: Synthetic oligonucleotide
  Target: LAMA2; (+) strand; PAM type: YTN; PAM sequence: CTG
ttaaattaatgcagtattgt

SEQ ID NO: 341618 - DNA, 20 bp, Artificial Sequence
  Description of Artificial Sequence: Synthetic oligonucleotide
  Target: LAMA2; (+) strand; PAM type: YTN; PAM sequence: TTA
aattaatgcagtattgttga

SEQ ID NO: 341619 - DNA, 20 bp, Artificial Sequence
  Description of Artificial Sequence: Synthetic oligonucleotide
  Target: LAMA2; (+) strand; PAM type: YTN; PAM sequence: TTA
atgcagtattgttgaaaaac

SEQ ID NO: 341620 - DNA, 20 bp, Artificial Sequence
  Description of Artificial Sequence: Synthetic oligonucleotide
  Target: LAMA2; (+) strand; PAM type: YTN; PAM sequence: TTG
ttgaaaaacaaagatggcca

SEQ ID NO: 341621 - DNA, 20 bp, Artificial Sequence
  Description of Artificial Sequence: Synthetic oligonucleotide
  Target: LAMA2; (+) strand; PAM type: YTN; PAM sequence: TTG
aaaaacaaagatggccagag

SEQ ID NO: 341622 - DNA, 20 bp, Artificial Sequence
  Description of Artificial Sequence: Synthetic oligonucleotide
  Target: LAMA2; (+) strand; PAM type: YTN; PAM sequence: CTG
aatgagaatggaatcctgag

SEQ ID NO: 341623 - DNA, 20 bp, Artificial Sequence
  Description of Artificial Sequence: Synthetic oligonucleotide
  Target: LAMA2; (+) strand; PAM type: YTN; PAM sequence: CTG
aggagaaaacaccaatattt

SEQ ID NO: 341624 - DNA, 20 bp, Artificial Sequence
  Description of Artificial Sequence: Synthetic oligonucleotide
  Target: LAMA2; (+) strand; PAM type: YTN; PAM sequence: TTT
aagagacctggttctctcag

SEQ ID NO: 341625 - DNA, 20 bp, Artificial Sequence
  Description of Artificial Sequence: Synthetic oligonucleotide
  Target: LAMA2; (+) strand; PAM type: YTN; PAM sequence: TTA
agagacctggttctctcagt

SEQ ID NO: 341626 - DNA, 20 bp, Artificial Sequence
  Description of Artificial Sequence: Synthetic oligonucleotide
  Target: LAMA2; (+) strand; PAM type: YTN; PAM sequence: CTG
gttctctcagtgttgtggaa

SEQ ID NO: 341627 - DNA, 20 bp, Artificial Sequence
  Description of Artificial Sequence: Synthetic oligonucleotide
  Target: LAMA2; (+) strand; PAM type: YTN; PAM sequence: TTC
tctcagtgttgtggaacagg

SEQ ID NO: 341628 - DNA, 20 bp, Artificial Sequence
  Description of Artificial Sequence: Synthetic oligonucleotide
  Target: LAMA2; (+) strand; PAM type: YTN; PAM sequence: CTC
tcagtgttgtggaacaggat

SEQ ID NO: 341629 - DNA, 20 bp, Artificial Sequence
  Description of Artificial Sequence: Synthetic oligonucleotide
  Target: LAMA2; (+) strand; PAM type: YTN; PAM sequence: CTC
agtgttgtggaacaggatcc

SEQ ID NO: 341630 - DNA, 20 bp, Artificial Sequence
  Description of Artificial Sequence: Synthetic oligonucleotide
  Target: LAMA2; (+) strand; PAM type: YTN; PAM sequence: TTG
tggaacaggatccactgata

SEQ ID NO: 341631 - DNA, 20 bp, Artificial Sequence
  Description of Artificial Sequence: Synthetic oligonucleotide
  Target: LAMA2; (+) strand; PAM type: YTN; PAM sequence: CTG
atatggaacagaagggtaag

SEQ ID NO: 341632 - DNA, 20 bp, Artificial Sequence
  Description of Artificial Sequence: Synthetic oligonucleotide
  Target: LAMA2; (+) strand; PAM type: YTN; PAM sequence: CTT
ctgttaagctaggtaaggaa

SEQ ID NO: 341633 - DNA, 20 bp, Artificial Sequence
  Description of Artificial Sequence: Synthetic oligonucleotide
  Target: LAMA2; (+) strand; PAM type: YTN; PAM sequence: TTC
tgttaagctaggtaaggaag

SEQ ID NO: 341634 - DNA, 20 bp, Artificial Sequence
  Description of Artificial Sequence: Synthetic oligonucleotide
  Target: LAMA2; (+) strand; PAM type: YTN; PAM sequence: CTG
ttaagctaggtaaggaagct

SEQ ID NO: 341635 - DNA, 20 bp, Artificial Sequence
  Description of Artificial Sequence: Synthetic oligonucleotide
  Target: LAMA2; (+) strand; PAM type: YTN; PAM sequence: TTA
agctaggtaaggaagcttag

SEQ ID NO: 341636 - DNA, 20 bp, Artificial Sequence
  Description of Artificial Sequence: Synthetic oligonucleotide
  Target: LAMA2; (+) strand; PAM type: YTN; PAM sequence: CTA
ggtaaggaagcttagggttg

SEQ ID NO: 341637 - DNA, 20 bp, Artificial Sequence
  Description of Artificial Sequence: Synthetic oligonucleotide
  Target: LAMA2; (+) strand; PAM type: YTN; PAM sequence: CTT
agggttgtgaaagaaggtac

SEQ ID NO: 341638 - DNA, 20 bp, Artificial Sequence
  Description of Artificial Sequence: Synthetic oligonucleotide
  Target: LAMA2; (+) strand; PAM type: YTN; PAM sequence: TTA
gggttgtgaaagaaggtaca

SEQ ID NO: 341639 - DNA, 20 bp, Artificial Sequence
  Description of Artificial Sequence: Synthetic oligonucleotide
  Target: LAMA2; (+) strand; PAM type: YTN; PAM sequence: TTG
tgaaagaaggtacaaagaca

SEQ ID NO: 341640 - DNA, 20 bp, Artificial Sequence
  Description of Artificial Sequence: Synthetic oligonucleotide
  Target: LAMA2; (+) strand; PAM type: YTN; PAM sequence: CTG
cacactgacttttggggaat

SEQ ID NO: 341641 - DNA, 20 bp, Artificial Sequence
  Description of Artificial Sequence: Synthetic oligonucleotide
  Target: LAMA2; (+) strand; PAM type: YTN; PAM sequence: CTG
acttttggggaattacctgg

SEQ ID NO: 341642 - DNA, 20 bp, Artificial Sequence
  Description of Artificial Sequence: Synthetic oligonucleotide
  Target: LAMA2; (+) strand; PAM type: YTN; PAM sequence: CTT
ttggggaattacctggattt

SEQ ID NO: 341643 - DNA, 20 bp, Artificial Sequence
  Description of Artificial Sequence: Synthetic oligonucleotide
  Target: LAMA2; (+) strand; PAM type: YTN; PAM sequence: TTT
tggggaattacctggatttg

SEQ ID NO: 341644 - DNA, 20 bp, Artificial Sequence
  Description of Artificial Sequence: Synthetic oligonucleotide
  Target: LAMA2; (+) strand; PAM type: YTN; PAM sequence: TTT
ggggaattacctggatttgg

SEQ ID NO: 341645 - DNA, 20 bp, Artificial Sequence
  Description of Artificial Sequence: Synthetic oligonucleotide
  Target: LAMA2; (+) strand; PAM type: YTN; PAM sequence: TTG
gggaattacctggatttggc

SEQ ID NO: 341646 - DNA, 20 bp, Artificial Sequence
  Description of Artificial Sequence: Synthetic oligonucleotide
  Target: LAMA2; (+) strand; PAM type: YTN; PAM sequence: TTA
cctggatttggctttcaggt

SEQ ID NO: 341647 - DNA, 20 bp, Artificial Sequence
  Description of Artificial Sequence: Synthetic oligonucleotide
  Target: LAMA2; (+) strand; PAM type: YTN; PAM sequence: CTG
gatttggctttcaggtagct

SEQ ID NO: 341648 - DNA, 20 bp, Artificial Sequence
  Description of Artificial Sequence: Synthetic oligonucleotide
  Target: LAMA2; (+) strand; PAM type: YTN; PAM sequence: TTT
ggctttcaggtagctctgcc

SEQ ID NO: 341649 - DNA, 20 bp, Artificial Sequence
  Description of Artificial Sequence: Synthetic oligonucleotide
  Target: LAMA2; (+) strand; PAM type: YTN; PAM sequence: TTG
gctttcaggtagctctgcca

SEQ ID NO: 341650 - DNA, 20 bp, Artificial Sequence
  Description of Artificial Sequence: Synthetic oligonucleotide
  Target: LAMA2; (+) strand; PAM type: YTN; PAM sequence: CTT
tcaggtagctctgccaagga

SEQ ID NO: 341651 - DNA, 20 bp, Artificial Sequence
  Description of Artificial Sequence: Synthetic oligonucleotide
  Target: LAMA2; (+) strand; PAM type: YTN; PAM sequence: TTT
caggtagctctgccaaggat

SEQ ID NO: 341652 - DNA, 20 bp, Artificial Sequence
  Description of Artificial Sequence: Synthetic oligonucleotide
  Target: LAMA2; (+) strand; PAM type: YTN; PAM sequence: TTC
aggtagctctgccaaggatt

SEQ ID NO: 341653 - DNA, 20 bp, Artificial Sequence
  Description of Artificial Sequence: Synthetic oligonucleotide
  Target: LAMA2; (+) strand; PAM type: YTN; PAM sequence: CTC
tgccaaggattaacaatagg

SEQ ID NO: 341654 - DNA, 20 bp, Artificial Sequence
  Description of Artificial Sequence: Synthetic oligonucleotide
  Target: LAMA2; (+) strand; PAM type: YTN; PAM sequence: CTG
ccaaggattaacaatagggt

SEQ ID NO: 341655 - DNA, 20 bp, Artificial Sequence
  Description of Artificial Sequence: Synthetic oligonucleotide
  Target: LAMA2; (+) strand; PAM type: YTN; PAM sequence: TTA
acaatagggttcagaaagaa

SEQ ID NO: 341656 - DNA, 20 bp, Artificial Sequence
  Description of Artificial Sequence: Synthetic oligonucleotide
  Target: LAMA2; (+) strand; PAM type: YTN; PAM sequence: TTC
agaaagaagagtaaaccatc

SEQ ID NO: 341657 - DNA, 20 bp, Artificial Sequence
  Description of Artificial Sequence: Synthetic oligonucleotide
  Target: LAMA2; (+) strand; PAM type: YTN; PAM sequence: CTA
atatgtgccccagccagttt

SEQ ID NO: 341658 - DNA, 20 bp, Artificial Sequence
  Description of Artificial Sequence: Synthetic oligonucleotide
  Target: LAMA2; (+) strand; PAM type: YTN; PAM sequence: TTT
acgtggttataataacgatc

SEQ ID NO: 341659 - DNA, 20 bp, Artificial Sequence
  Description of Artificial Sequence: Synthetic oligonucleotide
  Target: LAMA2; (+) strand; PAM type: YTN; PAM sequence: TTA
cgtggttataataacgatca

SEQ ID NO: 341660 - DNA, 20 bp, Artificial Sequence
  Description of Artificial Sequence: Synthetic oligonucleotide
  Target: LAMA2; (+) strand; PAM type: YTN; PAM sequence: TTA
taataacgatcaaattagat

SEQ ID NO: 341661 - DNA, 20 bp, Artificial Sequence
  Description of Artificial Sequence: Synthetic oligonucleotide
  Target: LAMA2; (+) strand; PAM type: YTN; PAM sequence: TTA
gatttttatggcaaaactct

SEQ ID NO: 341662 - DNA, 20 bp, Artificial Sequence
  Description of Artificial Sequence: Synthetic oligonucleotide
  Target: LAMA2; (+) strand; PAM type: YTN; PAM sequence: TTT
ttatggcaaaactctcttta

SEQ ID NO: 341663 - DNA, 20 bp, Artificial Sequence
  Description of Artificial Sequence: Synthetic oligonucleotide
  Target: LAMA2; (+) strand; PAM type: YTN; PAM sequence: TTT
tatggcaaaactctctttaa

SEQ ID NO: 341664 - DNA, 20 bp, Artificial Sequence
  Description of Artificial Sequence: Synthetic oligonucleotide
  Target: LAMA2; (+) strand; PAM type: YTN; PAM sequence: TTT
atggcaaaactctctttaac

SEQ ID NO: 341665 - DNA, 20 bp, Artificial Sequence
  Description of Artificial Sequence: Synthetic oligonucleotide
  Target: LAMA2; (+) strand; PAM type: YTN; PAM sequence: TTA
tggcaaaactctctttaacc

SEQ ID NO: 341666 - DNA, 20 bp, Artificial Sequence
  Description of Artificial Sequence: Synthetic oligonucleotide
  Target: LAMA2; (+) strand; PAM type: YTN; PAM sequence: CTC
tctttaacctctacgatatg

SEQ ID NO: 341667 - DNA, 20 bp, Artificial Sequence
  Description of Artificial Sequence: Synthetic oligonucleotide
  Target: LAMA2; (+) strand; PAM type: YTN; PAM sequence: CTC
tttaacctctacgatatgat

SEQ ID NO: 341668 - DNA, 20 bp, Artificial Sequence
  Description of Artificial Sequence: Synthetic oligonucleotide
  Target: LAMA2; (+) strand; PAM type: YTN; PAM sequence: CTT
taacctctacgatatgatag

SEQ ID NO: 341669 - DNA, 20 bp, Artificial Sequence
  Description of Artificial Sequence: Synthetic oligonucleotide
  Target: LAMA2; (+) strand; PAM type: YTN; PAM sequence: TTT
aacctctacgatatgatagt

SEQ ID NO: 341670 - DNA, 20 bp, Artificial Sequence
  Description of Artificial Sequence: Synthetic oligonucleotide
  Target: LAMA2; (+) strand; PAM type: YTN; PAM sequence: TTA
acctctacgatatgatagta

SEQ ID NO: 341671 - DNA, 20 bp, Artificial Sequence
  Description of Artificial Sequence: Synthetic oligonucleotide
  Target: LAMA2; (+) strand; PAM type: YTN; PAM sequence: CTC
tacgatatgatagtatttcc

SEQ ID NO: 341672 - DNA, 20 bp, Artificial Sequence
  Description of Artificial Sequence: Synthetic oligonucleotide
  Target: LAMA2; (+) strand; PAM type: YTN; PAM sequence: CTA
cgatatgatagtatttccag

SEQ ID NO: 341673 - DNA, 20 bp, Artificial Sequence
  Description of Artificial Sequence: Synthetic oligonucleotide
  Target: LAMA2; (+) strand; PAM type: YTN; PAM sequence: TTT
ccagcctttttattctcaag

SEQ ID NO: 341674 - DNA, 20 bp, Artificial Sequence
  Description of Artificial Sequence: Synthetic oligonucleotide
  Target: LAMA2; (+) strand; PAM type: YTN; PAM sequence: TTC
cagcctttttattctcaagg

SEQ ID NO: 341675 - DNA, 20 bp, Artificial Sequence
  Description of Artificial Sequence: Synthetic oligonucleotide
  Target: LAMA2; (+) strand; PAM type: YTN; PAM sequence: CTT
tttattctcaaggttcagta

SEQ ID NO: 341676 - DNA, 20 bp, Artificial Sequence
  Description of Artificial Sequence: Synthetic oligonucleotide
  Target: LAMA2; (+) strand; PAM type: YTN; PAM sequence: TTT
ttattctcaaggttcagtag

SEQ ID NO: 341677 - DNA, 20 bp, Artificial Sequence
  Description of Artificial Sequence: Synthetic oligonucleotide
  Target: LAMA2; (+) strand; PAM type: YTN; PAM sequence: TTT
tattctcaaggttcagtagc

SEQ ID NO: 341678 - DNA, 20 bp, Artificial Sequence
  Description of Artificial Sequence: Synthetic oligonucleotide
  Target: LAMA2; (+) strand; PAM type: YTN; PAM sequence: TTT
attctcaaggttcagtagct

SEQ ID NO: 341679 - DNA, 20 bp, Artificial Sequence
  Description of Artificial Sequence: Synthetic oligonucleotide
  Target: LAMA2; (+) strand; PAM type: YTN; PAM sequence: TTA
ttctcaaggttcagtagcta

SEQ ID NO: 341680 - DNA, 20 bp, Artificial Sequence
  Description of Artificial Sequence: Synthetic oligonucleotide
  Target: LAMA2; (+) strand; PAM type: YTN; PAM sequence: TTC
tcaaggttcagtagctaaca

SEQ ID NO: 341681 - DNA, 20 bp, Artificial Sequence
  Description of Artificial Sequence: Synthetic oligonucleotide
  Target: LAMA2; (+) strand; PAM type: YTN; PAM sequence: CTC
aaggttcagtagctaacatt

SEQ ID NO: 341682 - DNA, 20 bp, Artificial Sequence
  Description of Artificial Sequence: Synthetic oligonucleotide
  Target: LAMA2; (+) strand; PAM type: YTN; PAM sequence: TTC
agtagctaacattggcttaa

SEQ ID NO: 341683 - DNA, 20 bp, Artificial Sequence
  Description of Artificial Sequence: Synthetic oligonucleotide
  Target: LAMA2; (+) strand; PAM type: YTN; PAM sequence: CTA
acattggcttaagcccactc

SEQ ID NO: 341684 - DNA, 20 bp, Artificial Sequence
  Description of Artificial Sequence: Synthetic oligonucleotide
  Target: LAMA2; (+) strand; PAM type: YTN; PAM sequence: TTG
gcttaagcccactcctaact

SEQ ID NO: 341685 - DNA, 20 bp, Artificial Sequence
  Description of Artificial Sequence: Synthetic oligonucleotide
  Target: LAMA2; (+) strand; PAM type: YTN; PAM sequence: CTT
aagcccactcctaactatga

SEQ ID NO: 341686 - DNA, 20 bp, Artificial Sequence
  Description of Artificial Sequence: Synthetic oligonucleotide
  Target: LAMA2; (+) strand; PAM type: YTN; PAM sequence: TTA
agcccactcctaactatgaa

SEQ ID NO: 341687 - DNA, 20 bp, Artificial Sequence
  Description of Artificial Sequence: Synthetic oligonucleotide
  Target: LAMA2; (+) strand; PAM type: YTN; PAM sequence: CTC
ctaactatgaaatgactgag

SEQ ID NO: 341688 - DNA, 20 bp, Artificial Sequence
  Description of Artificial Sequence: Synthetic oligonucleotide
  Target: LAMA2; (+) strand; PAM type: YTN; PAM sequence: CTA
actatgaaatgactgagctg

SEQ ID NO: 341689 - DNA, 20 bp, Artificial Sequence
  Description of Artificial Sequence: Synthetic oligonucleotide
  Target: LAMA2; (+) strand; PAM type: YTN; PAM sequence: CTA
tgaaatgactgagctggctc

SEQ ID NO: 341690 - DNA, 20 bp, Artificial Sequence
  Description of Artificial Sequence: Synthetic oligonucleotide
  Target: LAMA2; (+) strand; PAM type: YTN; PAM sequence: CTG
agctggctcagcctggaatg

SEQ ID NO: 341691 - DNA, 20 bp, Artificial Sequence
  Description of Artificial Sequence: Synthetic oligonucleotide
  Target: LAMA2; (+) strand; PAM type: YTN; PAM sequence: CTG
gctcagcctggaatgagagt

SEQ ID NO: 341692 - DNA, 20 bp, Artificial Sequence
  Description of Artificial Sequence: Synthetic oligonucleotide
  Target: LAMA2; (+) strand; PAM type: YTN; PAM sequence: CTC
agcctggaatgagagtgggg

SEQ ID NO: 341693 - DNA, 20 bp, Artificial Sequence
  Description of Artificial Sequence: Synthetic oligonucleotide
  Target: LAMA2; (+) strand; PAM type: YTN; PAM sequence: CTG
gaatgagagtggggagcatg

SEQ ID NO: 341694 - DNA, 20 bp, Artificial Sequence
  Description of Artificial Sequence: Synthetic oligonucleotide
  Target: LAMA2; (+) strand; PAM type: YTN; PAM sequence: CTA
gggaaggcagaggctactga

SEQ ID NO: 341695 - DNA, 20 bp, Artificial Sequence
  Description of Artificial Sequence: Synthetic oligonucleotide
  Target: LAMA2; (+) strand; PAM type: YTN; PAM sequence: CTA
ctgaacaagactgaaggaat

SEQ ID NO: 341696 - DNA, 20 bp, Artificial Sequence
  Description of Artificial Sequence: Synthetic oligonucleotide
  Target: LAMA2; (+) strand; PAM type: YTN; PAM sequence: CTG
aacaagactgaaggaataag

SEQ ID NO: 341697 - DNA, 20 bp, Artificial Sequence
  Description of Artificial Sequence: Synthetic oligonucleotide
  Target: LAMA2; (+) strand; PAM type: YTN; PAM sequence: CTG
aaggaataagcaaagcaaaa

SEQ ID NO: 341698 - DNA, 20 bp, Artificial Sequence
  Description of Artificial Sequence: Synthetic oligonucleotide
  Target: LAMA2; (+) strand; PAM type: YTN; PAM sequence: CTT
gctgaagttggaggaccaga

SEQ ID NO: 341699 - DNA, 20 bp, Artificial Sequence
  Description of Artificial Sequence: Synthetic oligonucleotide
  Target: LAMA2; (+) strand; PAM type: YTN; PAM sequence: TTG
ctgaagttggaggaccagaa

SEQ ID NO: 341700 - DNA, 20 bp, Artificial Sequence
  Description of Artificial Sequence: Synthetic oligonucleotide
  Target: LAMA2; (+) strand; PAM type: YTN; PAM sequence: CTG
aagttggaggaccagaagga

SEQ ID NO: 341701 - DNA, 20 bp, Artificial Sequence
  Description of Artificial Sequence: Synthetic oligonucleotide
  Target: LAMA2; (+) strand; PAM type: YTN; PAM sequence: TTG
gaggaccagaaggaataggt

SEQ ID NO: 341702 - DNA, 20 bp, Artificial Sequence
  Description of Artificial Sequence: Synthetic oligonucleotide
  Target: LAMA2; (+) strand; PAM type: YTN; PAM sequence: CTC
agtgctaatgtagggttaat

SEQ ID NO: 341703 - DNA, 20 bp, Artificial Sequence
  Description of Artificial Sequence: Synthetic oligonucleotide
  Target: LAMA2; (+) strand; PAM type: YTN; PAM sequence: CTA
atgtagggttaatccagggc

SEQ ID NO: 341704 - DNA, 20 bp, Artificial Sequence
  Description of Artificial Sequence: Synthetic oligonucleotide
  Target: LAMA2; (+) strand; PAM type: YTN; PAM sequence: TTA
atccagggccaagtagacaa

SEQ ID NO: 341705 - DNA, 20 bp, Artificial Sequence
  Description of Artificial Sequence: Synthetic oligonucleotide
  Target: LAMA2; (+) strand; PAM type: YTN; PAM sequence: CTA
gcatttgttgcacatttatt

SEQ ID NO: 341706 - DNA, 20 bp, Artificial Sequence
  Description of Artificial Sequence: Synthetic oligonucleotide
  Target: LAMA2; (+) strand; PAM type: YTN; PAM sequence: TTT
gttgcacatttattttatgg

SEQ ID NO: 341707 - DNA, 20 bp, Artificial Sequence
  Description of Artificial Sequence: Synthetic oligonucleotide
  Target: LAMA2; (+) strand; PAM type: YTN; PAM sequence: TTG
ttgcacatttattttatgga

SEQ ID NO: 341708 - DNA, 20 bp, Artificial Sequence
  Description of Artificial Sequence: Synthetic oligonucleotide
  Target: LAMA2; (+) strand; PAM type: YTN; PAM sequence: TTG
cacatttattttatggaggg

SEQ ID NO: 341709 - DNA, 20 bp, Artificial Sequence
  Description of Artificial Sequence: Synthetic oligonucleotide
  Target: LAMA2; (+) strand; PAM type: YTN; PAM sequence: TTT
attttatggagggtgttaat

SEQ ID NO: 341710 - DNA, 20 bp, Artificial Sequence
  Description of Artificial Sequence: Synthetic oligonucleotide
  Target: LAMA2; (+) strand; PAM type: YTN; PAM sequence: TTA
ttttatggagggtgttaatc

SEQ ID NO: 341711 - DNA, 20 bp, Artificial Sequence
  Description of Artificial Sequence: Synthetic oligonucleotide
  Target: LAMA2; (+) strand; PAM type: YTN; PAM sequence: TTT
tatggagggtgttaatctaa

SEQ ID NO: 341712 - DNA, 20 bp, Artificial Sequence
  Description of Artificial Sequence: Synthetic oligonucleotide
  Target: LAMA2; (+) strand; PAM type: YTN; PAM sequence: TTT
atggagggtgttaatctaag

SEQ ID NO: 341713 - DNA, 20 bp, Artificial Sequence
  Description of Artificial Sequence: Synthetic oligonucleotide
  Target: LAMA2; (+) strand; PAM type: YTN; PAM sequence: TTA
tggagggtgttaatctaaga

SEQ ID NO: 341714 - DNA, 20 bp, Artificial Sequence
  Description of Artificial Sequence: Synthetic oligonucleotide
  Target: LAMA2; (+) strand; PAM type: YTN; PAM sequence: TTA
atctaagaaatttcccatgt

SEQ ID NO: 341715 - DNA, 20 bp, Artificial Sequence
  Description of Artificial Sequence: Synthetic oligonucleotide
  Target: LAMA2; (+) strand; PAM type: YTN; PAM sequence: CTA
agaaatttcccatgtataaa

SEQ ID NO: 341716 - DNA, 20 bp, Artificial Sequence
  Description of Artificial Sequence: Synthetic oligonucleotide
  Target: LAMA2; (+) strand; PAM type: YTN; PAM sequence: TTT
cccatgtataaattcatata

SEQ ID NO: 341717 - DNA, 20 bp, Artificial Sequence
  Description of Artificial Sequence: Synthetic oligonucleotide
  Target: LAMA2; (+) strand; PAM type: YTN; PAM sequence: TTC
ccatgtataaattcatatat

SEQ ID NO: 341718 - DNA, 20 bp, Artificial Sequence
  Description of Artificial Sequence: Synthetic oligonucleotide
  Target: LAMA2; (+) strand; PAM type: YTN; PAM sequence: TTC
atatatactaatacttgtcg

SEQ ID NO: 341719 - DNA, 20 bp, Artificial Sequence
  Description of Artificial Sequence: Synthetic oligonucleotide
  Target: LAMA2; (+) strand; PAM type: YTN; PAM sequence: CTA
atacttgtcgcattttacag

SEQ ID NO: 341720 - DNA, 20 bp, Artificial Sequence
  Description of Artificial Sequence: Synthetic oligonucleotide
  Target: LAMA2; (+) strand; PAM type: YTN; PAM sequence: CTT
gtcgcattttacagttgaga

SEQ ID NO: 341721 - DNA, 20 bp, Artificial Sequence
  Description of Artificial Sequence: Synthetic oligonucleotide
  Target: LAMA2; (+) strand; PAM type: YTN; PAM sequence: TTG
tcgcattttacagttgagaa

SEQ ID NO: 341722 - DNA, 20 bp, Artificial Sequence
  Description of Artificial Sequence: Synthetic oligonucleotide
  Target: LAMA2; (+) strand; PAM type: YTN; PAM sequence: TTT
tacagttgagaaacaggtat

SEQ ID NO: 341723 - DNA, 20 bp, Artificial Sequence
  Description of Artificial Sequence: Synthetic oligonucleotide
  Target: LAMA2; (+) strand; PAM type: YTN; PAM sequence: TTT
acagttgagaaacaggtatt

SEQ ID NO: 341724 - DNA, 20 bp, Artificial Sequence
  Description of Artificial Sequence: Synthetic oligonucleotide
  Target: LAMA2; (+) strand; PAM type: YTN; PAM sequence: TTA
cagttgagaaacaggtatta

SEQ ID NO: 341725 - DNA, 20 bp, Artificial Sequence
  Description of Artificial Sequence: Synthetic oligonucleotide
  Target: LAMA2; (+) strand; PAM type: YTN; PAM sequence: TTG
agaaacaggtattacagaga

SEQ ID NO: 341726 - DNA, 20 bp, Artificial Sequence
  Description of Artificial Sequence: Synthetic oligonucleotide
  Target: LAMA2; (+) strand; PAM type: YTN; PAM sequence: TTA
cagagaggtcaaataacttt

SEQ ID NO: 341727 - DNA, 20 bp, Artificial Sequence
  Description of Artificial Sequence: Synthetic oligonucleotide
  Target: LAMA2; (+) strand; PAM type: YTN; PAM sequence: CTT
tcccagggttccacagctag

SEQ ID NO: 341728 - DNA, 20 bp, Artificial Sequence
  Description of Artificial Sequence: Synthetic oligonucleotide
  Target: LAMA2; (+) strand; PAM type: YTN; PAM sequence: TTT
cccagggttccacagctagt

SEQ ID NO: 341729 - DNA, 20 bp, Artificial Sequence
  Description of Artificial Sequence: Synthetic oligonucleotide
  Target: LAMA2; (+) strand; PAM type: YTN; PAM sequence: TTC
ccagggttccacagctagta

SEQ ID NO: 341730 - DNA, 20 bp, Artificial Sequence
  Description of Artificial Sequence: Synthetic oligonucleotide
  Target: LAMA2; (+) strand; PAM type: YTN; PAM sequence: TTC
cacagctagtaatttttgga

SEQ ID NO: 341731 - DNA, 20 bp, Artificial Sequence
  Description of Artificial Sequence: Synthetic oligonucleotide
  Target: LAMA2; (+) strand; PAM type: YTN; PAM sequence: CTA
gtaatttttggagctgtgat

SEQ ID NO: 341732 - DNA, 20 bp, Artificial Sequence
  Description of Artificial Sequence: Synthetic oligonucleotide
  Target: LAMA2; (+) strand; PAM type: YTN; PAM sequence: TTT
ttggagctgtgatttgaatt

SEQ ID NO: 341733 - DNA, 20 bp, Artificial Sequence
  Description of Artificial Sequence: Synthetic oligonucleotide
  Target: LAMA2; (+) strand; PAM type: YTN; PAM sequence: TTT
tggagctgtgatttgaattc

SEQ ID NO: 341734 - DNA, 20 bp, Artificial Sequence
  Description of Artificial Sequence: Synthetic oligonucleotide
  Target: LAMA2; (+) strand; PAM type: YTN; PAM sequence: TTT
ggagctgtgatttgaattca

SEQ ID NO: 341735 - DNA, 20 bp, Artificial Sequence
  Description of Artificial Sequence: Synthetic oligonucleotide
  Target: LAMA2; (+) strand; PAM type: YTN; PAM sequence: TTG
gagctgtgatttgaattcag

SEQ ID NO: 341736 - DNA, 20 bp, Artificial Sequence
  Description of Artificial Sequence: Synthetic oligonucleotide
  Target: LAMA2; (+) strand; PAM type: YTN; PAM sequence: CTG
tgatttgaattcagtgtatt

SEQ ID NO: 341737 - DNA, 20 bp, Artificial Sequence
  Description of Artificial Sequence: Synthetic oligonucleotide
  Target: LAMA2; (+) strand; PAM type: YTN; PAM sequence: TTT
gaattcagtgtattctcaga

SEQ ID NO: 341738 - DNA, 20 bp, Artificial Sequence
  Description of Artificial Sequence: Synthetic oligonucleotide
  Target: LAMA2; (+) strand; PAM type: YTN; PAM sequence: TTG
aattcagtgtattctcagag

SEQ ID NO: 341739 - DNA, 20 bp, Artificial Sequence
  Description of Artificial Sequence: Synthetic oligonucleotide
  Target: LAMA2; (+) strand; PAM type: YTN; PAM sequence: TTC
agtgtattctcagagcacca

SEQ ID NO: 341740 - DNA, 20 bp, Artificial Sequence
  Description of Artificial Sequence: Synthetic oligonucleotide
  Target: LAMA2; (+) strand; PAM type: YTN; PAM sequence: TTC
tcagagcaccagaaaggtac

SEQ ID NO: 341741 - DNA, 20 bp, Artificial Sequence
  Description of Artificial Sequence: Synthetic oligonucleotide
  Target: LAMA2; (+) strand; PAM type: YTN; PAM sequence: CTC
agagcaccagaaaggtacaa

SEQ ID NO: 341742 - DNA, 20 bp, Artificial Sequence
  Description of Artificial Sequence: Synthetic oligonucleotide
  Target: LAMA2; (+) strand; PAM type: YTN; PAM sequence: CTA
aaagtttccttctgtgtctg

SEQ ID NO: 341743 - DNA, 20 bp, Artificial Sequence
  Description of Artificial Sequence: Synthetic oligonucleotide
  Target: LAMA2; (+) strand; PAM type: YTN; PAM sequence: TTT
ccttctgtgtctggggtttc

SEQ ID NO: 341744 - DNA, 20 bp, Artificial Sequence
  Description of Artificial Sequence: Synthetic oligonucleotide
  Target: LAMA2; (+) strand; PAM type: YTN; PAM sequence: TTC
cttctgtgtctggggtttcc

SEQ ID NO: 341745 - DNA, 20 bp, Artificial Sequence
  Description of Artificial Sequence: Synthetic oligonucleotide
  Target: LAMA2; (+) strand; PAM type: YTN; PAM sequence: CTT
ctgtgtctggggtttcctgg

SEQ ID NO: 341746 - DNA, 20 bp, Artificial Sequence
  Description of Artificial Sequence: Synthetic oligonucleotide
  Target: LAMA2; (+) strand; PAM type: YTN; PAM sequence: TTC
tgtgtctggggtttcctgga

SEQ ID NO: 341747 - DNA, 20 bp, Artificial Sequence
  Description of Artificial Sequence: Synthetic oligonucleotide
  Target: LAMA2; (+) strand; PAM type: YTN; PAM sequence: CTG
tgtctggggtttcctggaaa

SEQ ID NO: 341748 - DNA, 20 bp, Artificial Sequence
  Description of Artificial Sequence: Synthetic oligonucleotide
  Target: LAMA2; (+) strand; PAM type: YTN; PAM sequence: CTG
gggtttcctggaaaatctgc

SEQ ID NO: 341749 - DNA, 20 bp, Artificial Sequence
  Description of Artificial Sequence: Synthetic oligonucleotide
  Target: LAMA2; (+) strand; PAM type: YTN; PAM sequence: TTT
cctggaaaatctgctctgcc

SEQ ID NO: 341750 - DNA, 20 bp, Artificial Sequence
  Description of Artificial Sequence: Synthetic oligonucleotide
  Target: LAMA2; (+) strand; PAM type: YTN; PAM sequence: TTC
ctggaaaatctgctctgccc

SEQ ID NO: 341751 - DNA, 20 bp, Artificial Sequence
  Description of Artificial Sequence: Synthetic oligonucleotide
  Target: LAMA2; (+) strand; PAM type: YTN; PAM sequence: CTG
gaaaatctgctctgccctat

SEQ ID NO: 341752 - DNA, 20 bp, Artificial Sequence
  Description of Artificial Sequence: Synthetic oligonucleotide
  Target: LAMA2; (+) strand; PAM type: YTN; PAM sequence: CTG
ctctgccctataagctcagg

SEQ ID NO: 341753 - DNA, 20 bp, Artificial Sequence
  Description of Artificial Sequence: Synthetic oligonucleotide
  Target: LAMA2; (+) strand; PAM type: YTN; PAM sequence: CTC
tgccctataagctcaggagt

SEQ ID NO: 341754 - DNA, 20 bp, Artificial Sequence
  Description of Artificial Sequence: Synthetic oligonucleotide
  Target: LAMA2; (+) strand; PAM type: YTN; PAM sequence: CTG
ccctataagctcaggagtcc

SEQ ID NO: 341755 - DNA, 20 bp, Artificial Sequence
  Description of Artificial Sequence: Synthetic oligonucleotide
  Target: LAMA2; (+) strand; PAM type: YTN; PAM sequence: CTA
taagctcaggagtcccccct

SEQ ID NO: 341756 - DNA, 20 bp, Artificial Sequence
  Description of Artificial Sequence: Synthetic oligonucleotide
  Target: LAMA2; (+) strand; PAM type: YTN; PAM sequence: CTC
aggagtcccccctcctagca

SEQ ID NO: 341757 - DNA, 20 bp, Artificial Sequence
  Description of Artificial Sequence: Synthetic oligonucleotide
  Target: LAMA2; (+) strand; PAM type: YTN; PAM sequence: CTC
ctagcagttcctgctgaagc

SEQ ID NO: 341758 - DNA, 20 bp, Artificial Sequence
  Description of Artificial Sequence: Synthetic oligonucleotide
  Target: LAMA2; (+) strand; PAM type: YTN; PAM sequence: CTA
gcagttcctgctgaagctct

SEQ ID NO: 341759 - DNA, 20 bp, Artificial Sequence
  Description of Artificial Sequence: Synthetic oligonucleotide
  Target: LAMA2; (+) strand; PAM type: YTN; PAM sequence: TTC
ctgctgaagctctatgtgag

SEQ ID NO: 341760 - DNA, 20 bp, Artificial Sequence
  Description of Artificial Sequence: Synthetic oligonucleotide
  Target: LAMA2; (+) strand; PAM type: YTN; PAM sequence: CTG
ctgaagctctatgtgagatt

SEQ ID NO: 341761 - DNA, 20 bp, Artificial Sequence
  Description of Artificial Sequence: Synthetic oligonucleotide
  Target: LAMA2; (+) strand; PAM type: YTN; PAM sequence: CTG
aagctctatgtgagattgca

SEQ ID NO: 341762 - DNA, 20 bp, Artificial Sequence
  Description of Artificial Sequence: Synthetic oligonucleotide
  Target: LAMA2; (+) strand; PAM type: YTN; PAM sequence: CTC
tatgtgagattgcacagacc

SEQ ID NO: 341763 - DNA, 20 bp, Artificial Sequence
  Description of Artificial Sequence: Synthetic oligonucleotide
  Target: LAMA2; (+) strand; PAM type: YTN; PAM sequence: CTA
tgtgagattgcacagacctg

SEQ ID NO: 341764 - DNA, 20 bp, Artificial Sequence
  Description of Artificial Sequence: Synthetic oligonucleotide
  Target: LAMA2; (+) strand; PAM type: YTN; PAM sequence: TTG
cacagacctgagtttgagct

SEQ ID NO: 341765 - DNA, 20 bp, Artificial Sequence
  Description of Artificial Sequence: Synthetic oligonucleotide
  Target: LAMA2; (+) strand; PAM type: YTN; PAM sequence: CTG
agtttgagctgctgcttatt

SEQ ID NO: 341766 - DNA, 20 bp, Artificial Sequence
  Description of Artificial Sequence: Synthetic oligonucleotide
  Target: LAMA2; (+) strand; PAM type: YTN; PAM sequence: TTT
gagctgctgcttatttttta

SEQ ID NO: 341767 - DNA, 20 bp, Artificial Sequence
  Description of Artificial Sequence: Synthetic oligonucleotide
  Target: LAMA2; (+) strand; PAM type: YTN; PAM sequence: TTG
agctgctgcttattttttat

SEQ ID NO: 341768 - DNA, 20 bp, Artificial Sequence
  Description of Artificial Sequence: Synthetic oligonucleotide
  Target: LAMA2; (+) strand; PAM type: YTN; PAM sequence: CTG
ctgcttattttttattttgg

SEQ ID NO: 341769 - DNA, 20 bp, Artificial Sequence
  Description of Artificial Sequence: Synthetic oligonucleotide
  Target: LAMA2; (+) strand; PAM type: YTN; PAM sequence: CTG
cttattttttattttggggt

SEQ ID NO: 341770 - DNA, 20 bp, Artificial Sequence
  Description of Artificial Sequence: Synthetic oligonucleotide
  Target: LAMA2; (+) strand; PAM type: YTN; PAM sequence: CTT
attttttattttggggtttt

SEQ ID NO: 341771 - DNA, 20 bp, Artificial Sequence
  Description of Artificial Sequence: Synthetic oligonucleotide
  Target: LAMA2; (+) strand; PAM type: YTN; PAM sequence: TTA
ttttttattttggggtttta

SEQ ID NO: 341772 - DNA, 20 bp, Artificial Sequence
  Description of Artificial Sequence: Synthetic oligonucleotide
  Target: LAMA2; (+) strand; PAM type: YTN; PAM sequence: TTT
tttattttggggttttagta

SEQ ID NO: 341773 - DNA, 20 bp, Artificial Sequence
  Description of Artificial Sequence: Synthetic oligonucleotide
  Target: LAMA2; (+) strand; PAM type: YTN; PAM sequence: TTT
ttattttggggttttagtat

SEQ ID NO: 341774 - DNA, 20 bp, Artificial Sequence
  Description of Artificial Sequence: Synthetic oligonucleotide
  Target: LAMA2; (+) strand; PAM type: YTN; PAM sequence: TTT
tattttggggttttagtatt

SEQ ID NO: 341775 - DNA, 20 bp, Artificial Sequence
  Description of Artificial Sequence: Synthetic oligonucleotide
  Target: LAMA2; (+) strand; PAM type: YTN; PAM sequence: TTT
attttggggttttagtattt

SEQ ID NO: 341776 - DNA, 20 bp, Artificial Sequence
  Description of Artificial Sequence: Synthetic oligonucleotide
  Target: LAMA2; (+) strand; PAM type: YTN; PAM sequence: TTA
ttttggggttttagtatttt

SEQ ID NO: 341777 - DNA, 20 bp, Artificial Sequence
  Description of Artificial Sequence: Synthetic oligonucleotide
  Target: LAMA2; (+) strand; PAM type: YTN; PAM sequence: TTT
tggggttttagtattttcat

SEQ ID NO: 341778 - DNA, 20 bp, Artificial Sequence
  Description of Artificial Sequence: Synthetic oligonucleotide
  Target: LAMA2; (+) strand; PAM type: YTN; PAM sequence: TTT
ggggttttagtattttcatg

SEQ ID NO: 341779 - DNA, 20 bp, Artificial Sequence
  Description of Artificial Sequence: Synthetic oligonucleotide
  Target: LAMA2; (+) strand; PAM type: YTN; PAM sequence: TTG
gggttttagtattttcatgt

SEQ ID NO: 341780 - DNA, 20 bp, Artificial Sequence
  Description of Artificial Sequence: Synthetic oligonucleotide
  Target: LAMA2; (+) strand; PAM type: YTN; PAM sequence: TTT
tagtattttcatgttttagg

SEQ ID NO: 341781 - DNA, 20 bp, Artificial Sequence
  Description of Artificial Sequence: Synthetic oligonucleotide
  Target: LAMA2; (+) strand; PAM type: YTN; PAM sequence: TTT
agtattttcatgttttaggt

SEQ ID NO: 341782 - DNA, 20 bp, Artificial Sequence
  Description of Artificial Sequence: Synthetic oligonucleotide
  Target: LAMA2; (+) strand; PAM type: YTN; PAM sequence: TTA
gtattttcatgttttaggtt

SEQ ID NO: 341783 - DNA, 20 bp, Artificial Sequence
  Description of Artificial Sequence: Synthetic oligonucleotide
  Target: LAMA2; (+) strand; PAM type: YTN; PAM sequence: TTT
tcatgttttaggttaaaaaa

SEQ ID NO: 341784 - DNA, 20 bp, Artificial Sequence
  Description of Artificial Sequence: Synthetic oligonucleotide
  Target: LAMA2; (+) strand; PAM type: YTN; PAM sequence: TTT
catgttttaggttaaaaaaa

SEQ ID NO: 341785 - DNA, 20 bp, Artificial Sequence
  Description of Artificial Sequence: Synthetic oligonucleotide
  Target: LAMA2; (+) strand; PAM type: YTN; PAM sequence: TTC
atgttttaggttaaaaaaat

SEQ ID NO: 341786 - DNA, 20 bp, Artificial Sequence
  Description of Artificial Sequence: Synthetic oligonucleotide
  Target: LAMA2; (+) strand; PAM type: YTN; PAM sequence: TTT
taggttaaaaaaattcttta

SEQ ID NO: 341787 - DNA, 20 bp, Artificial Sequence
  Description of Artificial Sequence: Synthetic oligonucleotide
  Target: LAMA2; (+) strand; PAM type: YTN; PAM sequence: TTT
aggttaaaaaaattctttac

SEQ ID NO: 341788 - DNA, 20 bp, Artificial Sequence
  Description of Artificial Sequence: Synthetic oligonucleotide
  Target: LAMA2; (+) strand; PAM type: YTN; PAM sequence: TTA
ggttaaaaaaattctttacc

SEQ ID NO: 341789 - DNA, 20 bp, Artificial Sequence
  Description of Artificial Sequence: Synthetic oligonucleotide
  Target: LAMA2; (+) strand; PAM type: YTN; PAM sequence: TTA
aaaaaattctttacctttta

SEQ ID NO: 341790 - DNA, 20 bp, Artificial Sequence
  Description of Artificial Sequence: Synthetic oligonucleotide
  Target: LAMA2; (+) strand; PAM type: YTN; PAM sequence: TTC
tttaccttttagctttgatg

SEQ ID NO: 341791 - DNA, 20 bp, Artificial Sequence
  Description of Artificial Sequence: Synthetic oligonucleotide
  Target: LAMA2; (+) strand; PAM type: YTN; PAM sequence: CTT
taccttttagctttgatgaa

SEQ ID NO: 341792 - DNA, 20 bp, Artificial Sequence
  Description of Artificial Sequence: Synthetic oligonucleotide
  Target: LAMA2; (+) strand; PAM type: YTN; PAM sequence: TTT
accttttagctttgatgaat

SEQ ID NO: 341793 - DNA, 20 bp, Artificial Sequence
  Description of Artificial Sequence: Synthetic oligonucleotide
  Target: LAMA2; (+) strand; PAM type: YTN; PAM sequence: TTA
ccttttagctttgatgaatt

SEQ ID NO: 341794 - DNA, 20 bp, Artificial Sequence
  Description of Artificial Sequence: Synthetic oligonucleotide
  Target: LAMA2; (+) strand; PAM type: YTN; PAM sequence: CTT
ttagctttgatgaattactt

SEQ ID NO: 341795 - DNA, 20 bp, Artificial Sequence
  Description of Artificial Sequence: Synthetic oligonucleotide
  Target: LAMA2; (+) strand; PAM type: YTN; PAM sequence: TTT
tagctttgatgaattacttc

SEQ ID NO: 341796 - DNA, 20 bp, Artificial Sequence
  Description of Artificial Sequence: Synthetic oligonucleotide
  Target: LAMA2; (+) strand; PAM type: YTN; PAM sequence: TTT
agctttgatgaattacttca

SEQ ID NO: 341797 - DNA, 20 bp, Artificial Sequence
  Description of Artificial Sequence: Synthetic oligonucleotide
  Target: LAMA2; (+) strand; PAM type: YTN; PAM sequence: TTA
gctttgatgaattacttcat

SEQ ID NO: 341798 - DNA, 20 bp, Artificial Sequence
  Description of Artificial Sequence: Synthetic oligonucleotide
  Target: LAMA2; (+) strand; PAM type: YTN; PAM sequence: CTT
tgatgaattacttcattttt

SEQ ID NO: 341799 - DNA, 20 bp, Artificial Sequence
  Description of Artificial Sequence: Synthetic oligonucleotide
  Target: LAMA2; (+) strand; PAM type: YTN; PAM sequence: TTT
gatgaattacttcattttta

SEQ ID NO: 341800 - DNA, 20 bp, Artificial Sequence
  Description of Artificial Sequence: Synthetic oligonucleotide
  Target: LAMA2; (+) strand; PAM type: YTN; PAM sequence: TTG
atgaattacttcatttttat

SEQ ID NO: 341801 - DNA, 20 bp, Artificial Sequence
  Description of Artificial Sequence: Synthetic oligonucleotide
  Target: LAMA2; (+) strand; PAM type: YTN; PAM sequence: TTA
cttcatttttatatctaata

SEQ ID NO: 341802 - DNA, 20 bp, Artificial Sequence
  Description of Artificial Sequence: Synthetic oligonucleotide
  Target: LAMA2; (+) strand; PAM type: YTN; PAM sequence: CTT
catttttatatctaataggt

SEQ ID NO: 341803 - DNA, 20 bp, Artificial Sequence
  Description of Artificial Sequence: Synthetic oligonucleotide
  Target: LAMA2; (+) strand; PAM type: YTN; PAM sequence: TTC
atttttatatctaataggtt

SEQ ID NO: 341804 - DNA, 20 bp, Artificial Sequence
  Description of Artificial Sequence: Synthetic oligonucleotide
  Target: LAMA2; (+) strand; PAM type: YTN; PAM sequence: TTT
ttatatctaataggtttttt

SEQ ID NO: 341805 - DNA, 20 bp, Artificial Sequence
  Description of Artificial Sequence: Synthetic oligonucleotide
  Target: LAMA2; (+) strand; PAM type: YTN; PAM sequence: TTT
tatatctaataggttttttt

SEQ ID NO: 341806 - DNA, 20 bp, Artificial Sequence
  Description of Artificial Sequence: Synthetic oligonucleotide
  Target: LAMA2; (+) strand; PAM type: YTN; PAM sequence: TTT
atatctaataggttttttta

SEQ ID NO: 341807 - DNA, 20 bp, Artificial Sequence
  Description of Artificial Sequence: Synthetic oligonucleotide
  Target: LAMA2; (+) strand; PAM type: YTN; PAM sequence: TTA
tatctaataggtttttttaa

SEQ ID NO: 341808 - DNA, 20 bp, Artificial Sequence
  Description of Artificial Sequence: Synthetic oligonucleotide
  Target: LAMA2; (+) strand; PAM type: YTN; PAM sequence: CTA
ataggtttttttaaccttca

SEQ ID NO: 341809 - DNA, 20 bp, Artificial Sequence
  Description of Artificial Sequence: Synthetic oligonucleotide
  Target: LAMA2; (+) strand; PAM type: YTN; PAM sequence: TTT
ttttaaccttcactttaatt

SEQ ID NO: 341810 - DNA, 20 bp, Artificial Sequence
  Description of Artificial Sequence: Synthetic oligonucleotide
  Target: LAMA2; (+) strand; PAM type: YTN; PAM sequence: TTT
tttaaccttcactttaattg

SEQ ID NO: 341811 - DNA, 20 bp, Artificial Sequence
  Description of Artificial Sequence: Synthetic oligonucleotide
  Target: LAMA2; (+) strand; PAM type: YTN; PAM sequence: TTT
ttaaccttcactttaattga

SEQ ID NO: 341812 - DNA, 20 bp, Artificial Sequence
  Description of Artificial Sequence: Synthetic oligonucleotide
  Target: LAMA2; (+) strand; PAM type: YTN; PAM sequence: TTT
taaccttcactttaattgat

SEQ ID NO: 341813 - DNA, 20 bp, Artificial Sequence
  Description of Artificial Sequence: Synthetic oligonucleotide
  Target: LAMA2; (+) strand; PAM type: YTN; PAM sequence: TTT
aaccttcactttaattgatt

SEQ ID NO: 341814 - DNA, 20 bp, Artificial Sequence
  Description of Artificial Sequence: Synthetic oligonucleotide
  Target: LAMA2; (+) strand; PAM type: YTN; PAM sequence: TTA
accttcactttaattgattt

SEQ ID NO: 341815 - DNA, 20 bp, Artificial Sequence
  Description of Artificial Sequence: Synthetic oligonucleotide
  Target: LAMA2; (+) strand; PAM type: YTN; PAM sequence: CTT
cactttaattgatttcttaa

SEQ ID NO: 341816 - DNA, 20 bp, Artificial Sequence
  Description of Artificial Sequence: Synthetic oligonucleotide
  Target: LAMA2; (+) strand; PAM type: YTN; PAM sequence: TTC
actttaattgatttcttaac

SEQ ID NO: 341817 - DNA, 20 bp, Artificial Sequence
  Description of Artificial Sequence: Synthetic oligonucleotide
  Target: LAMA2; (+) strand; PAM type: YTN; PAM sequence: CTT
taattgatttcttaacctct

SEQ ID NO: 341818 - DNA, 20 bp, Artificial Sequence
  Description of Artificial Sequence: Synthetic oligonucleotide
  Target: LAMA2; (+) strand; PAM type: YTN; PAM sequence: TTT
aattgatttcttaacctctt

SEQ ID NO: 341819 - DNA, 20 bp, Artificial Sequence
  Description of Artificial Sequence: Synthetic oligonucleotide
  Target: LAMA2; (+) strand; PAM type: YTN; PAM sequence: TTA
attgatttcttaacctcttt

SEQ ID NO: 341820 - DNA, 20 bp, Artificial Sequence
  Description of Artificial Sequence: Synthetic oligonucleotide
  Target: LAMA2; (+) strand; PAM type: YTN; PAM sequence: TTG
atttcttaacctctttatct

SEQ ID NO: 341821 - DNA, 20 bp, Artificial Sequence
  Description of Artificial Sequence: Synthetic oligonucleotide
  Target: LAMA2; (+) strand; PAM type: YTN; PAM sequence: TTT
cttaacctctttatcttgct

SEQ ID NO: 341822 - DNA, 20 bp, Artificial Sequence
  Description of Artificial Sequence: Synthetic oligonucleotide
  Target: LAMA2; (+) strand; PAM type: YTN; PAM sequence: TTC
ttaacctctttatcttgctc

SEQ ID NO: 341823 - DNA, 20 bp, Artificial Sequence
  Description of Artificial Sequence: Synthetic oligonucleotide
  Target: LAMA2; (+) strand; PAM type: YTN; PAM sequence: CTT
aacctctttatcttgctcat

SEQ ID NO: 341824 - DNA, 20 bp, Artificial Sequence
  Description of Artificial Sequence: Synthetic oligonucleotide
  Target: LAMA2; (+) strand; PAM type: YTN; PAM sequence: TTA
acctctttatcttgctcatt

SEQ ID NO: 341825 - DNA, 20 bp, Artificial Sequence
  Description of Artificial Sequence: Synthetic oligonucleotide
  Target: LAMA2; (+) strand; PAM type: YTN; PAM sequence: CTC
tttatcttgctcatttttta

SEQ ID NO: 341826 - DNA, 20 bp, Artificial Sequence
  Description of Artificial Sequence: Synthetic oligonucleotide
  Target: LAMA2; (+) strand; PAM type: YTN; PAM sequence: CTT
tatcttgctcattttttaat

SEQ ID NO: 341827 - DNA, 20 bp, Artificial Sequence
  Description of Artificial Sequence: Synthetic oligonucleotide
  Target: LAMA2; (+) strand; PAM type: YTN; PAM sequence: TTT
atcttgctcattttttaatc

SEQ ID NO: 341828 - DNA, 20 bp, Artificial Sequence
  Description of Artificial Sequence: Synthetic oligonucleotide
  Target: LAMA2; (+) strand; PAM type: YTN; PAM sequence: TTA
tcttgctcattttttaatct

SEQ ID NO: 341829 - DNA, 20 bp, Artificial Sequence
  Description of Artificial Sequence: Synthetic oligonucleotide
  Target: LAMA2; (+) strand; PAM type: YTN; PAM sequence: CTT
gctcattttttaatcttttt

SEQ ID NO: 341830 - DNA, 20 bp, Artificial Sequence
  Description of Artificial Sequence: Synthetic oligonucleotide
  Target: LAMA2; (+) strand; PAM type: YTN; PAM sequence: TTG
ctcattttttaatcttttta

SEQ ID NO: 341831 - DNA, 20 bp, Artificial Sequence
  Description of Artificial Sequence: Synthetic oligonucleotide
  Target: LAMA2; (+) strand; PAM type: YTN; PAM sequence: CTC
attttttaatctttttaatg

SEQ ID NO: 341832 - DNA, 20 bp, Artificial Sequence
  Description of Artificial Sequence: Synthetic oligonucleotide
  Target: LAMA2; (+) strand; PAM type: YTN; PAM sequence: TTT
tttaatctttttaatgattt

SEQ ID NO: 341833 - DNA, 20 bp, Artificial Sequence
  Description of Artificial Sequence: Synthetic oligonucleotide
  Target: LAMA2; (+) strand; PAM type: YTN; PAM sequence: TTT
ttaatctttttaatgatttt

SEQ ID NO: 341834 - DNA, 20 bp, Artificial Sequence
  Description of Artificial Sequence: Synthetic oligonucleotide
  Target: LAMA2; (+) strand; PAM type: YTN; PAM sequence: TTT
taatctttttaatgatttta

SEQ ID NO: 341835 - DNA, 20 bp, Artificial Sequence
  Description of Artificial Sequence: Synthetic oligonucleotide
  Target: LAMA2; (+) strand; PAM type: YTN; PAM sequence: TTT
aatctttttaatgattttaa

SEQ ID NO: 341836 - DNA, 20 bp, Artificial Sequence
  Description of Artificial Sequence: Synthetic oligonucleotide
  Target: LAMA2; (+) strand; PAM type: YTN; PAM sequence: TTA
atctttttaatgattttaaa

SEQ ID NO: 341837 - DNA, 20 bp, Artificial Sequence
  Description of Artificial Sequence: Synthetic oligonucleotide
  Target: LAMA2; (+) strand; PAM type: YTN; PAM sequence: CTT
tttaatgattttaaaatgct

SEQ ID NO: 341838 - DNA, 20 bp, Artificial Sequence
  Description of Artificial Sequence: Synthetic oligonucleotide
  Target: LAMA2; (+) strand; PAM type: YTN; PAM sequence: TTT
ttaatgattttaaaatgctg

SEQ ID NO: 341839 - DNA, 20 bp, Artificial Sequence
  Description of Artificial Sequence: Synthetic oligonucleotide
  Target: LAMA2; (+) strand; PAM type: YTN; PAM sequence: TTT
taatgattttaaaatgctga

SEQ ID NO: 341840 - DNA, 20 bp, Artificial Sequence
  Description of Artificial Sequence: Synthetic oligonucleotide
  Target: LAMA2; (+) strand; PAM type: YTN; PAM sequence: TTT
aatgattttaaaatgctgat

SEQ ID NO: 341841 - DNA, 20 bp, Artificial Sequence
  Description of Artificial Sequence: Synthetic oligonucleotide
  Target: LAMA2; (+) strand; PAM type: YTN; PAM sequence: TTA
atgattttaaaatgctgatt

SEQ ID NO: 341842 - DNA, 20 bp, Artificial Sequence
  Description of Artificial Sequence: Synthetic oligonucleotide
  Target: LAMA2; (+) strand; PAM type: YTN; PAM sequence: TTT
taaaatgctgattttaataa

SEQ ID NO: 341843 - DNA, 20 bp, Artificial Sequence
  Description of Artificial Sequence: Synthetic oligonucleotide
  Target: LAMA2; (+) strand; PAM type: YTN; PAM sequence: TTT
aaaatgctgattttaataat

SEQ ID NO: 341844 - DNA, 20 bp, Artificial Sequence
  Description of Artificial Sequence: Synthetic oligonucleotide
  Target: LAMA2; (+) strand; PAM type: YTN; PAM sequence: TTA
aaatgctgattttaataatt

SEQ ID NO: 341845 - DNA, 20 bp, Artificial Sequence
  Description of Artificial Sequence: Synthetic oligonucleotide
  Target: LAMA2; (+) strand; PAM type: YTN; PAM sequence: CTG
attttaataattttatcttg

SEQ ID NO: 341846 - DNA, 20 bp, Artificial Sequence
  Description of Artificial Sequence: Synthetic oligonucleotide
  Target: LAMA2; (+) strand; PAM type: YTN; PAM sequence: TTT
taataattttatcttggcat

SEQ ID NO: 341847 - DNA, 20 bp, Artificial Sequence
  Description of Artificial Sequence: Synthetic oligonucleotide
  Target: LAMA2; (+) strand; PAM type: YTN; PAM sequence: TTT
aataattttatcttggcata

SEQ ID NO: 341848 - DNA, 20 bp, Artificial Sequence
  Description of Artificial Sequence: Synthetic oligonucleotide
  Target: LAMA2; (+) strand; PAM type: YTN; PAM sequence: TTA
ataattttatcttggcatat

SEQ ID NO: 341849 - DNA, 20 bp, Artificial Sequence
  Description of Artificial Sequence: Synthetic oligonucleotide
  Target: LAMA2; (+) strand; PAM type: YTN; PAM sequence: TTT
tatcttggcatatttatatt

SEQ ID NO: 341850 - DNA, 20 bp, Artificial Sequence
  Description of Artificial Sequence: Synthetic oligonucleotide
  Target: LAMA2; (+) strand; PAM type: YTN; PAM sequence: TTT
atcttggcatatttatattt

SEQ ID NO: 341851 - DNA, 20 bp, Artificial Sequence
  Description of Artificial Sequence: Synthetic oligonucleotide
  Target: LAMA2; (+) strand; PAM type: YTN; PAM sequence: TTA
tcttggcatatttatattta

SEQ ID NO: 341852 - DNA, 20 bp, Artificial Sequence
  Description of Artificial Sequence: Synthetic oligonucleotide
  Target: LAMA2; (+) strand; PAM type: YTN; PAM sequence: CTT
ggcatatttatatttatcag

SEQ ID NO: 341853 - DNA, 20 bp, Artificial Sequence
  Description of Artificial Sequence: Synthetic oligonucleotide
  Target: LAMA2; (+) strand; PAM type: YTN; PAM sequence: TTG
gcatatttatatttatcagt

SEQ ID NO: 341854 - DNA, 20 bp, Artificial Sequence
  Description of Artificial Sequence: Synthetic oligonucleotide
  Target: LAMA2; (+) strand; PAM type: YTN; PAM sequence: TTT
atatttatcagtttttctgc

SEQ ID NO: 341855 - DNA, 20 bp, Artificial Sequence
  Description of Artificial Sequence: Synthetic oligonucleotide
  Target: LAMA2; (+) strand; PAM type: YTN; PAM sequence: TTA
tatttatcagtttttctgct

SEQ ID NO: 341856 - DNA, 20 bp, Artificial Sequence
  Description of Artificial Sequence: Synthetic oligonucleotide
  Target: LAMA2; (+) strand; PAM type: YTN; PAM sequence: TTT
atcagtttttctgcttcaag

SEQ ID NO: 341857 - DNA, 20 bp, Artificial Sequence
  Description of Artificial Sequence: Synthetic oligonucleotide
  Target: LAMA2; (+) strand; PAM type: YTN; PAM sequence: TTA
tcagtttttctgcttcaagc

SEQ ID NO: 341858 - DNA, 20 bp, Artificial Sequence
  Description of Artificial Sequence: Synthetic oligonucleotide
  Target: LAMA2; (+) strand; PAM type: YTN; PAM sequence: TTT
ttctgcttcaagctttattc

SEQ ID NO: 341859 - DNA, 20 bp, Artificial Sequence
  Description of Artificial Sequence: Synthetic oligonucleotide
  Target: LAMA2; (+) strand; PAM type: YTN; PAM sequence: TTT
tctgcttcaagctttattct

SEQ ID NO: 341860 - DNA, 20 bp, Artificial Sequence
  Description of Artificial Sequence: Synthetic oligonucleotide
  Target: LAMA2; (+) strand; PAM type: YTN; PAM sequence: TTT
ctgcttcaagctttattctg

SEQ ID NO: 341861 - DNA, 20 bp, Artificial Sequence
  Description of Artificial Sequence: Synthetic oligonucleotide
  Target: LAMA2; (+) strand; PAM type: YTN; PAM sequence: TTC
tgcttcaagctttattctgg

SEQ ID NO: 341862 - DNA, 20 bp, Artificial Sequence
  Description of Artificial Sequence: Synthetic oligonucleotide
  Target: LAMA2; (+) strand; PAM type: YTN; PAM sequence: CTG
cttcaagctttattctggca

SEQ ID NO: 341863 - DNA, 20 bp, Artificial Sequence
  Description of Artificial Sequence: Synthetic oligonucleotide
  Target: LAMA2; (+) strand; PAM type: YTN; PAM sequence: CTT
caagctttattctggcaaat

SEQ ID NO: 341864 - DNA, 20 bp, Artificial Sequence
  Description of Artificial Sequence: Synthetic oligonucleotide
  Target: LAMA2; (+) strand; PAM type: YTN; PAM sequence: TTC
aagctttattctggcaaatg

SEQ ID NO: 341865 - DNA, 20 bp, Artificial Sequence
  Description of Artificial Sequence: Synthetic oligonucleotide
  Target: LAMA2; (+) strand; PAM type: YTN; PAM sequence: CTT
tattctggcaaatgatgtat

SEQ ID NO: 341866 - DNA, 20 bp, Artificial Sequence
  Description of Artificial Sequence: Synthetic oligonucleotide
  Target: LAMA2; (+) strand; PAM type: YTN; PAM sequence: TTT
attctggcaaatgatgtata

SEQ ID NO: 341867 - DNA, 20 bp, Artificial Sequence
  Description of Artificial Sequence: Synthetic oligonucleotide
  Target: LAMA2; (+) strand; PAM type: YTN; PAM sequence: TTA
ttctggcaaatgatgtatat

SEQ ID NO: 341868 - DNA, 20 bp, Artificial Sequence
  Description of Artificial Sequence: Synthetic oligonucleotide
  Target: LAMA2; (+) strand; PAM type: YTN; PAM sequence: TTC
tggcaaatgatgtatattta

SEQ ID NO: 341869 - DNA, 20 bp, Artificial Sequence
  Description of Artificial Sequence: Synthetic oligonucleotide
  Target: LAMA2; (+) strand; PAM type: YTN; PAM sequence: CTG
gcaaatgatgtatatttata

SEQ ID NO: 341870 - DNA, 20 bp, Artificial Sequence
  Description of Artificial Sequence: Synthetic oligonucleotide
  Target: LAMA2; (+) strand; PAM type: YTN; PAM sequence: TTT
atatttcttttgtgttgttt

SEQ ID NO: 341871 - DNA, 20 bp, Artificial Sequence
  Description of Artificial Sequence: Synthetic oligonucleotide
  Target: LAMA2; (+) strand; PAM type: YTN; PAM sequence: TTA
tatttcttttgtgttgtttt

SEQ ID NO: 341872 - DNA, 20 bp, Artificial Sequence
  Description of Artificial Sequence: Synthetic oligonucleotide
  Target: LAMA2; (+) strand; PAM type: YTN; PAM sequence: TTT
cttttgtgttgttttttaaa

SEQ ID NO: 341873 - DNA, 20 bp, Artificial Sequence
  Description of Artificial Sequence: Synthetic oligonucleotide
  Target: LAMA2; (+) strand; PAM type: YTN; PAM sequence: TTC
ttttgtgttgttttttaaat

SEQ ID NO: 341874 - DNA, 20 bp, Artificial Sequence
  Description of Artificial Sequence: Synthetic oligonucleotide
  Target: LAMA2; (+) strand; PAM type: YTN; PAM sequence: CTT
ttgtgttgttttttaaatat

SEQ ID NO: 341875 - DNA, 20 bp, Artificial Sequence
  Description of Artificial Sequence: Synthetic oligonucleotide
  Target: LAMA2; (+) strand; PAM type: YTN; PAM sequence: TTT
tgtgttgttttttaaatatt

SEQ ID NO: 341876 - DNA, 20 bp, Artificial Sequence
  Description of Artificial Sequence: Synthetic oligonucleotide
  Target: LAMA2; (+) strand; PAM type: YTN; PAM sequence: TTT
gtgttgttttttaaatattt

SEQ ID NO: 341877 - DNA, 20 bp, Artificial Sequence
  Description of Artificial Sequence: Synthetic oligonucleotide
  Target: LAMA2; (+) strand; PAM type: YTN; PAM sequence: TTG
tgttgttttttaaatatttt

SEQ ID NO: 341878 - DNA, 20 bp, Artificial Sequence
  Description of Artificial Sequence: Synthetic oligonucleotide
  Target: LAMA2; (+) strand; PAM type: YTN; PAM sequence: TTG
ttttttaaatattttttatt

SEQ ID NO: 341879 - DNA, 20 bp, Artificial Sequence
  Description of Artificial Sequence: Synthetic oligonucleotide
  Target: LAMA2; (+) strand; PAM type: YTN; PAM sequence: TTT
tttaaatattttttattttt

SEQ ID NO: 341880 - DNA, 20 bp, Artificial Sequence
  Description of Artificial Sequence: Synthetic oligonucleotide
  Target: LAMA2; (+) strand; PAM type: YTN; PAM sequence: TTT
ttaaatattttttatttttg

SEQ ID NO: 341881 - DNA, 20 bp, Artificial Sequence
  Description of Artificial Sequence: Synthetic oligonucleotide
  Target: LAMA2; (+) strand; PAM type: YTN; PAM sequence: TTT
taaatattttttatttttgt

SEQ ID NO: 341882 - DNA, 20 bp, Artificial Sequence
  Description of Artificial Sequence: Synthetic oligonucleotide
  Target: LAMA2; (+) strand; PAM type: YTN; PAM sequence: TTT
aaatattttttatttttgtt

SEQ ID NO: 341883 - DNA, 20 bp, Artificial Sequence
  Description of Artificial Sequence: Synthetic oligonucleotide
  Target: LAMA2; (+) strand; PAM type: YTN; PAM sequence: TTA
aatattttttatttttgttt

SEQ ID NO: 341884 - DNA, 20 bp, Artificial Sequence
  Description of Artificial Sequence: Synthetic oligonucleotide
  Target: LAMA2; (+) strand; PAM type: YTN; PAM sequence: TTT
tttatttttgtttctggaat

SEQ ID NO: 341885 - DNA, 20 bp, Artificial Sequence
  Description of Artificial Sequence: Synthetic oligonucleotide
  Target: LAMA2; (+) strand; PAM type: YTN; PAM sequence: TTT
ttatttttgtttctggaatt

SEQ ID NO: 341886 - DNA, 20 bp, Artificial Sequence
  Description of Artificial Sequence: Synthetic oligonucleotide
  Target: LAMA2; (+) strand; PAM type: YTN; PAM sequence: TTT
tatttttgtttctggaattt

SEQ ID NO: 341887 - DNA, 20 bp, Artificial Sequence
  Description of Artificial Sequence: Synthetic oligonucleotide
  Target: LAMA2; (+) strand; PAM type: YTN; PAM sequence: TTT
atttttgtttctggaattta

SEQ ID NO: 341888 - DNA, 20 bp, Artificial Sequence
  Description of Artificial Sequence: Synthetic oligonucleotide
  Target: LAMA2; (+) strand; PAM type: YTN; PAM sequence: TTA
tttttgtttctggaatttaa

SEQ ID NO: 341889 - DNA, 20 bp, Artificial Sequence
  Description of Artificial Sequence: Synthetic oligonucleotide
  Target: LAMA2; (+) strand; PAM type: YTN; PAM sequence: TTT
ttgtttctggaatttaatgt

SEQ ID NO: 341890 - DNA, 20 bp, Artificial Sequence
  Description of Artificial Sequence: Synthetic oligonucleotide
  Target: LAMA2; (+) strand; PAM type: YTN; PAM sequence: TTT
tgtttctggaatttaatgta

SEQ ID NO: 341891 - DNA, 20 bp, Artificial Sequence
  Description of Artificial Sequence: Synthetic oligonucleotide
  Target: LAMA2; (+) strand; PAM type: YTN; PAM sequence: TTT
gtttctggaatttaatgtat

SEQ ID NO: 341892 - DNA, 20 bp, Artificial Sequence
  Description of Artificial Sequence: Synthetic oligonucleotide
  Target: LAMA2; (+) strand; PAM type: YTN; PAM sequence: TTG
tttctggaatttaatgtatg

SEQ ID NO: 341893 - DNA, 20 bp, Artificial Sequence
  Description of Artificial Sequence: Synthetic oligonucleotide
  Target: LAMA2; (+) strand; PAM type: YTN; PAM sequence: TTT
ctggaatttaatgtatgtca

SEQ ID NO: 341894 - DNA, 20 bp, Artificial Sequence
  Description of Artificial Sequence: Synthetic oligonucleotide
  Target: LAMA2; (+) strand; PAM type: YTN; PAM sequence: TTC
tggaatttaatgtatgtcag

SEQ ID NO: 341895 - DNA, 20 bp, Artificial Sequence
  Description of Artificial Sequence: Synthetic oligonucleotide
  Target: LAMA2; (+) strand; PAM type: YTN; PAM sequence: CTG
gaatttaatgtatgtcagtt

SEQ ID NO: 341896 - DNA, 20 bp, Artificial Sequence
  Description of Artificial Sequence: Synthetic oligonucleotide
  Target: LAMA2; (+) strand; PAM type: YTN; PAM sequence: TTT
aatgtatgtcagttgtgcaa

SEQ ID NO: 341897 - DNA, 20 bp, Artificial Sequence
  Description of Artificial Sequence: Synthetic oligonucleotide
  Target: LAMA2; (+) strand; PAM type: YTN; PAM sequence: TTA
atgtatgtcagttgtgcaat

SEQ ID NO: 341898 - DNA, 20 bp, Artificial Sequence
  Description of Artificial Sequence: Synthetic oligonucleotide
  Target: LAMA2; (+) strand; PAM type: YTN; PAM sequence: TTG
tgcaatagacttgttagaat

SEQ ID NO: 341899 - DNA, 20 bp, Artificial Sequence
  Description of Artificial Sequence: Synthetic oligonucleotide
  Target: LAMA2; (+) strand; PAM type: YTN; PAM sequence: CTT
gttagaattttgtttgcttt

SEQ ID NO: 341900 - DNA, 20 bp, Artificial Sequence
  Description of Artificial Sequence: Synthetic oligonucleotide
  Target: LAMA2; (+) strand; PAM type: YTN; PAM sequence: TTG
ttagaattttgtttgcttta

SEQ ID NO: 341901 - DNA, 20 bp, Artificial Sequence
  Description of Artificial Sequence: Synthetic oligonucleotide
  Target: LAMA2; (+) strand; PAM type: YTN; PAM sequence: TTA
gaattttgtttgctttaata

SEQ ID NO: 341902 - DNA, 20 bp, Artificial Sequence
  Description of Artificial Sequence: Synthetic oligonucleotide
  Target: LAMA2; (+) strand; PAM type: YTN; PAM sequence: TTT
tgtttgctttaataattttt

SEQ ID NO: 341903 - DNA, 20 bp, Artificial Sequence
  Description of Artificial Sequence: Synthetic oligonucleotide
  Target: LAMA2; (+) strand; PAM type: YTN; PAM sequence: TTT
gtttgctttaataattttta

SEQ ID NO: 341904 - DNA, 20 bp, Artificial Sequence
  Description of Artificial Sequence: Synthetic oligonucleotide
  Target: LAMA2; (+) strand; PAM type: YTN; PAM sequence: TTG
tttgctttaataatttttaa

SEQ ID NO: 341905 - DNA, 20 bp, Artificial Sequence
  Description of Artificial Sequence: Synthetic oligonucleotide
  Target: LAMA2; (+) strand; PAM type: YTN; PAM sequence: TTT
gctttaataatttttaaagt

SEQ ID NO: 341906 - DNA, 20 bp, Artificial Sequence
  Description of Artificial Sequence: Synthetic oligonucleotide
  Target: LAMA2; (+) strand; PAM type: YTN; PAM sequence: TTG
ctttaataatttttaaagtg

SEQ ID NO: 341907 - DNA, 20 bp, Artificial Sequence
  Description of Artificial Sequence: Synthetic oligonucleotide
  Target: LAMA2; (+) strand; PAM type: YTN; PAM sequence: CTT
taataatttttaaagtgact

SEQ ID NO: 341908 - DNA, 20 bp, Artificial Sequence
  Description of Artificial Sequence: Synthetic oligonucleotide
  Target: LAMA2; (+) strand; PAM type: YTN; PAM sequence: TTT
aataatttttaaagtgactt

SEQ ID NO: 341909 - DNA, 20 bp, Artificial Sequence
  Description of Artificial Sequence: Synthetic oligonucleotide
  Target: LAMA2; (+) strand; PAM type: YTN; PAM sequence: TTA
ataatttttaaagtgacttt

SEQ ID NO: 341910 - DNA, 20 bp, Artificial Sequence
  Description of Artificial Sequence: Synthetic oligonucleotide
  Target: LAMA2; (+) strand; PAM type: YTN; PAM sequence: TTT
ttaaagtgactttttgcatt

SEQ ID NO: 341911 - DNA, 20 bp, Artificial Sequence
  Description of Artificial Sequence: Synthetic oligonucleotide
  Target: LAMA2; (+) strand; PAM type: YTN; PAM sequence: TTT
taaagtgactttttgcatta

SEQ ID NO: 341912 - DNA, 20 bp, Artificial Sequence
  Description of Artificial Sequence: Synthetic oligonucleotide
  Target: LAMA2; (+) strand; PAM type: YTN; PAM sequence: TTT
aaagtgactttttgcattac

SEQ ID NO: 341913 - DNA, 20 bp, Artificial Sequence
  Description of Artificial Sequence: Synthetic oligonucleotide
  Target: LAMA2; (+) strand; PAM type: YTN; PAM sequence: TTA
aagtgactttttgcattact

SEQ ID NO: 341914 - DNA, 20 bp, Artificial Sequence
  Description of Artificial Sequence: Synthetic oligonucleotide
  Target: LAMA2; (+) strand; PAM type: YTN; PAM sequence: CTT
tttgcattacttttgatcat

SEQ ID NO: 341915 - DNA, 20 bp, Artificial Sequence
  Description of Artificial Sequence: Synthetic oligonucleotide
  Target: LAMA2; (+) strand; PAM type: YTN; PAM sequence: TTT
ttgcattacttttgatcatt

SEQ ID NO: 341916 - DNA, 20 bp, Artificial Sequence
  Description of Artificial Sequence: Synthetic oligonucleotide
  Target: LAMA2; (+) strand; PAM type: YTN; PAM sequence: TTT
tgcattacttttgatcattt

SEQ ID NO: 341917 - DNA, 20 bp, Artificial Sequence
  Description of Artificial Sequence: Synthetic oligonucleotide
  Target: LAMA2; (+) strand; PAM type: YTN; PAM sequence: TTT
gcattacttttgatcatttt

SEQ ID NO: 341918 - DNA, 20 bp, Artificial Sequence
  Description of Artificial Sequence: Synthetic oligonucleotide
  Target: LAMA2; (+) strand; PAM type: YTN; PAM sequence: TTG
cattacttttgatcatttta

SEQ ID NO: 341919 - DNA, 20 bp, Artificial Sequence
  Description of Artificial Sequence: Synthetic oligonucleotide
  Target: LAMA2; (+) strand; PAM type: YTN; PAM sequence: TTA
cttttgatcattttactctt

SEQ ID NO: 341920 - DNA, 20 bp, Artificial Sequence
  Description of Artificial Sequence: Synthetic oligonucleotide
  Target: LAMA2; (+) strand; PAM type: YTN; PAM sequence: CTT
ttgatcattttactcttagc

SEQ ID NO: 341921 - DNA, 20 bp, Artificial Sequence
  Description of Artificial Sequence: Synthetic oligonucleotide
  Target: LAMA2; (+) strand; PAM type: YTN; PAM sequence: TTT
tgatcattttactcttagct

SEQ ID NO: 341922 - DNA, 20 bp, Artificial Sequence
  Description of Artificial Sequence: Synthetic oligonucleotide
  Target: LAMA2; (+) strand; PAM type: YTN; PAM sequence: TTT
gatcattttactcttagctt

SEQ ID NO: 341923 - DNA, 20 bp, Artificial Sequence
  Description of Artificial Sequence: Synthetic oligonucleotide
  Target: LAMA2; (+) strand; PAM type: YTN; PAM sequence: TTG
atcattttactcttagctta

SEQ ID NO: 341924 - DNA, 20 bp, Artificial Sequence
  Description of Artificial Sequence: Synthetic oligonucleotide
  Target: LAMA2; (+) strand; PAM type: YTN; PAM sequence: TTT
tactcttagcttattttgag

SEQ ID NO: 341925 - DNA, 20 bp, Artificial Sequence
  Description of Artificial Sequence: Synthetic oligonucleotide
  Target: LAMA2; (+) strand; PAM type: YTN; PAM sequence: TTT
actcttagcttattttgagc

SEQ ID NO: 341926 - DNA, 20 bp, Artificial Sequence
  Description of Artificial Sequence: Synthetic oligonucleotide
  Target: LAMA2; (+) strand; PAM type: YTN; PAM sequence: TTA
ctcttagcttattttgagct

SEQ ID NO: 341927 - DNA, 20 bp, Artificial Sequence
  Description of Artificial Sequence: Synthetic oligonucleotide
  Target: LAMA2; (+) strand; PAM type: YTN; PAM sequence: CTC
ttagcttattttgagctttt

SEQ ID NO: 341928 - DNA, 20 bp, Artificial Sequence
  Description of Artificial Sequence: Synthetic oligonucleotide
  Target: LAMA2; (+) strand; PAM type: YTN; PAM sequence: CTT
agcttattttgagcttttga

SEQ ID NO: 341929 - DNA, 20 bp, Artificial Sequence
  Description of Artificial Sequence: Synthetic oligonucleotide
  Target: LAMA2; (+) strand; PAM type: YTN; PAM sequence: TTA
gcttattttgagcttttgat

SEQ ID NO: 341930 - DNA, 20 bp, Artificial Sequence
  Description of Artificial Sequence: Synthetic oligonucleotide
  Target: LAMA2; (+) strand; PAM type: YTN; PAM sequence: CTT
attttgagcttttgatgtct

SEQ ID NO: 341931 - DNA, 20 bp, Artificial Sequence
  Description of Artificial Sequence: Synthetic oligonucleotide
  Target: LAMA2; (+) strand; PAM type: YTN; PAM sequence: TTA
ttttgagcttttgatgtcta

SEQ ID NO: 341932 - DNA, 20 bp, Artificial Sequence
  Description of Artificial Sequence: Synthetic oligonucleotide
  Target: LAMA2; (+) strand; PAM type: YTN; PAM sequence: TTT
tgagcttttgatgtctaaat

SEQ ID NO: 341933 - DNA, 20 bp, Artificial Sequence
  Description of Artificial Sequence: Synthetic oligonucleotide
  Target: LAMA2; (+) strand; PAM type: YTN; PAM sequence: TTT
gagcttttgatgtctaaata

SEQ ID NO: 341934 - DNA, 20 bp, Artificial Sequence
  Description of Artificial Sequence: Synthetic oligonucleotide
  Target: LAMA2; (+) strand; PAM type: YTN; PAM sequence: TTG
agcttttgatgtctaaatat

SEQ ID NO: 341935 - DNA, 20 bp, Artificial Sequence
  Description of Artificial Sequence: Synthetic oligonucleotide
  Target: LAMA2; (+) strand; PAM type: YTN; PAM sequence: CTT
ttgatgtctaaatataactt

SEQ ID NO: 341936 - DNA, 20 bp, Artificial Sequence
  Description of Artificial Sequence: Synthetic oligonucleotide
  Target: LAMA2; (+) strand; PAM type: YTN; PAM sequence: TTT
tgatgtctaaatataacttt

SEQ ID NO: 341937 - DNA, 20 bp, Artificial Sequence
  Description of Artificial Sequence: Synthetic oligonucleotide
  Target: LAMA2; (+) strand; PAM type: YTN; PAM sequence: TTT
gatgtctaaatataactttg

SEQ ID NO: 341938 - DNA, 20 bp, Artificial Sequence
  Description of Artificial Sequence: Synthetic oligonucleotide
  Target: LAMA2; (+) strand; PAM type: YTN; PAM sequence: TTG
atgtctaaatataactttgt

SEQ ID NO: 341939 - DNA, 20 bp, Artificial Sequence
  Description of Artificial Sequence: Synthetic oligonucleotide
  Target: LAMA2; (+) strand; PAM type: YTN; PAM sequence: CTA
aatataactttgtttgtcta

SEQ ID NO: 341940 - DNA, 20 bp, Artificial Sequence
  Description of Artificial Sequence: Synthetic oligonucleotide
  Target: LAMA2; (+) strand; PAM type: YTN; PAM sequence: CTT
tgtttgtctagtgttttagt

SEQ ID NO: 341941 - DNA, 20 bp, Artificial Sequence
  Description of Artificial Sequence: Synthetic oligonucleotide
  Target: LAMA2; (+) strand; PAM type: YTN; PAM sequence: TTT
gtttgtctagtgttttagtg

SEQ ID NO: 341942 - DNA, 20 bp, Artificial Sequence
  Description of Artificial Sequence: Synthetic oligonucleotide
  Target: LAMA2; (+) strand; PAM type: YTN; PAM sequence: TTG
tttgtctagtgttttagtgt

SEQ ID NO: 341943 - DNA, 20 bp, Artificial Sequence
  Description of Artificial Sequence: Synthetic oligonucleotide
  Target: LAMA2; (+) strand; PAM type: YTN; PAM sequence: TTT
gtctagtgttttagtgtctt

SEQ ID NO: 341944 - DNA, 20 bp, Artificial Sequence
  Description of Artificial Sequence: Synthetic oligonucleotide
  Target: LAMA2; (+) strand; PAM type: YTN; PAM sequence: TTG
tctagtgttttagtgtcttt

SEQ ID NO: 341945 - DNA, 20 bp, Artificial Sequence
  Description of Artificial Sequence: Synthetic oligonucleotide
  Target: LAMA2; (+) strand; PAM type: YTN; PAM sequence: CTA
gtgttttagtgtctttagtc

SEQ ID NO: 341946 - DNA, 20 bp, Artificial Sequence
  Description of Artificial Sequence: Synthetic oligonucleotide
  Target: LAMA2; (+) strand; PAM type: YTN; PAM sequence: TTT
tagtgtctttagtcattgct

SEQ ID NO: 341947 - DNA, 20 bp, Artificial Sequence
  Description of Artificial Sequence: Synthetic oligonucleotide
  Target: LAMA2; (+) strand; PAM type: YTN; PAM sequence: TTT
agtgtctttagtcattgctt

SEQ ID NO: 341948 - DNA, 20 bp, Artificial Sequence
  Description of Artificial Sequence: Synthetic oligonucleotide
  Target: LAMA2; (+) strand; PAM type: YTN; PAM sequence: TTA
gtgtctttagtcattgcttc

SEQ ID NO: 341949 - DNA, 20 bp, Artificial Sequence
  Description of Artificial Sequence: Synthetic oligonucleotide
  Target: LAMA2; (+) strand; PAM type: YTN; PAM sequence: CTT
tagtcattgcttctacatgg

SEQ ID NO: 341950 - DNA, 20 bp, Artificial Sequence
  Description of Artificial Sequence: Synthetic oligonucleotide
  Target: LAMA2; (+) strand; PAM type: YTN; PAM sequence: TTT
agtcattgcttctacatggc

SEQ ID NO: 341951 - DNA, 20 bp, Artificial Sequence
  Description of Artificial Sequence: Synthetic oligonucleotide
  Target: LAMA2; (+) strand; PAM type: YTN; PAM sequence: TTA
gtcattgcttctacatggca

SEQ ID NO: 341952 - DNA, 20 bp, Artificial Sequence
  Description of Artificial Sequence: Synthetic oligonucleotide
  Target: LAMA2; (+) strand; PAM type: YTN; PAM sequence: TTG
cttctacatggcaataggaa

SEQ ID NO: 341953 - DNA, 20 bp, Artificial Sequence
  Description of Artificial Sequence: Synthetic oligonucleotide
  Target: LAMA2; (+) strand; PAM type: YTN; PAM sequence: CTT
ctacatggcaataggaaata

SEQ ID NO: 341954 - DNA, 20 bp, Artificial Sequence
  Description of Artificial Sequence: Synthetic oligonucleotide
  Target: LAMA2; (+) strand; PAM type: YTN; PAM sequence: TTC
tacatggcaataggaaatat

SEQ ID NO: 341955 - DNA, 20 bp, Artificial Sequence
  Description of Artificial Sequence: Synthetic oligonucleotide
  Target: LAMA2; (+) strand; PAM type: YTN; PAM sequence: CTA
catggcaataggaaatatga

SEQ ID NO: 341956 - DNA, 20 bp, Artificial Sequence
  Description of Artificial Sequence: Synthetic oligonucleotide
  Target: LAMA2; (+) strand; PAM type: YTN; PAM sequence: CTC
agtgaaagtaacccacattt

SEQ ID NO: 341957 - DNA, 20 bp, Artificial Sequence
  Description of Artificial Sequence: Synthetic oligonucleotide
  Target: LAMA2; (+) strand; PAM type: YTN; PAM sequence: TTT
agagaaggcttgtattcctt

SEQ ID NO: 341958 - DNA, 20 bp, Artificial Sequence
  Description of Artificial Sequence: Synthetic oligonucleotide
  Target: LAMA2; (+) strand; PAM type: YTN; PAM sequence: TTA
gagaaggcttgtattcctta

SEQ ID NO: 341959 - DNA, 20 bp, Artificial Sequence
  Description of Artificial Sequence: Synthetic oligonucleotide
  Target: LAMA2; (+) strand; PAM type: YTN; PAM sequence: CTT
gtattccttaatcccgcccc

SEQ ID NO: 341960 - DNA, 20 bp, Artificial Sequence
  Description of Artificial Sequence: Synthetic oligonucleotide
  Target: LAMA2; (+) strand; PAM type: YTN; PAM sequence: TTG
tattccttaatcccgcccct

SEQ ID NO: 341961 - DNA, 20 bp, Artificial Sequence
  Description of Artificial Sequence: Synthetic oligonucleotide
  Target: LAMA2; (+) strand; PAM type: YTN; PAM sequence: TTC
cttaatcccgcccctctaca

SEQ ID NO: 341962 - DNA, 20 bp, Artificial Sequence
  Description of Artificial Sequence: Synthetic oligonucleotide
  Target: LAMA2; (+) strand; PAM type: YTN; PAM sequence: CTT
aatcccgcccctctacacac

SEQ ID NO: 341963 - DNA, 20 bp, Artificial Sequence
  Description of Artificial Sequence: Synthetic oligonucleotide
  Target: LAMA2; (+) strand; PAM type: YTN; PAM sequence: TTA
atcccgcccctctacacacc

SEQ ID NO: 341964 - DNA, 20 bp, Artificial Sequence
  Description of Artificial Sequence: Synthetic oligonucleotide
  Target: LAMA2; (+) strand; PAM type: YTN; PAM sequence: CTC
tacacaccccacccattcaa

SEQ ID NO: 341965 - DNA, 20 bp, Artificial Sequence
  Description of Artificial Sequence: Synthetic oligonucleotide
  Target: LAMA2; (+) strand; PAM type: YTN; PAM sequence: CTA
cacaccccacccattcaacc

SEQ ID NO: 341966 - DNA, 20 bp, Artificial Sequence
  Description of Artificial Sequence: Synthetic oligonucleotide
  Target: LAMA2; (+) strand; PAM type: YTN; PAM sequence: TTC
aacccatctgtagcctccct

SEQ ID NO: 341967 - DNA, 20 bp, Artificial Sequence
  Description of Artificial Sequence: Synthetic oligonucleotide
  Target: LAMA2; (+) strand; PAM type: YTN; PAM sequence: CTG
tagcctccctttcagctgtt

SEQ ID NO: 341968 - DNA, 20 bp, Artificial Sequence
  Description of Artificial Sequence: Synthetic oligonucleotide
  Target: LAMA2; (+) strand; PAM type: YTN; PAM sequence: CTC
cctttcagctgttcttaaaa

SEQ ID NO: 341969 - DNA, 20 bp, Artificial Sequence
  Description of Artificial Sequence: Synthetic oligonucleotide
  Target: LAMA2; (+) strand; PAM type: YTN; PAM sequence: CTT
tcagctgttcttaaaagacc

SEQ ID NO: 341970 - DNA, 20 bp, Artificial Sequence
  Description of Artificial Sequence: Synthetic oligonucleotide
  Target: LAMA2; (+) strand; PAM type: YTN; PAM sequence: TTT
cagctgttcttaaaagacct

SEQ ID NO: 341971 - DNA, 20 bp, Artificial Sequence
  Description of Artificial Sequence: Synthetic oligonucleotide
  Target: LAMA2; (+) strand; PAM type: YTN; PAM sequence: TTC
agctgttcttaaaagacctt

SEQ ID NO: 341972 - DNA, 20 bp, Artificial Sequence
  Description of Artificial Sequence: Synthetic oligonucleotide
  Target: LAMA2; (+) strand; PAM type: YTN; PAM sequence: CTG
ttcttaaaagaccttccctt

SEQ ID NO: 341973 - DNA, 20 bp, Artificial Sequence
  Description of Artificial Sequence: Synthetic oligonucleotide
  Target: LAMA2; (+) strand; PAM type: YTN; PAM sequence: TTC
ttaaaagaccttccctttta

SEQ ID NO: 341974 - DNA, 20 bp, Artificial Sequence
  Description of Artificial Sequence: Synthetic oligonucleotide
  Target: LAMA2; (+) strand; PAM type: YTN; PAM sequence: CTT
aaaagaccttcccttttaag

SEQ ID NO: 341975 - DNA, 20 bp, Artificial Sequence
  Description of Artificial Sequence: Synthetic oligonucleotide
  Target: LAMA2; (+) strand; PAM type: YTN; PAM sequence: TTA
aaagaccttcccttttaagg

SEQ ID NO: 341976 - DNA, 20 bp, Artificial Sequence
  Description of Artificial Sequence: Synthetic oligonucleotide
  Target: LAMA2; (+) strand; PAM type: YTN; PAM sequence: CTT
cccttttaagggaacttaca

SEQ ID NO: 341977 - DNA, 20 bp, Artificial Sequence
  Description of Artificial Sequence: Synthetic oligonucleotide
  Target: LAMA2; (+) strand; PAM type: YTN; PAM sequence: TTC
ccttttaagggaacttacat

SEQ ID NO: 341978 - DNA, 20 bp, Artificial Sequence
  Description of Artificial Sequence: Synthetic oligonucleotide
  Target: LAMA2; (+) strand; PAM type: YTN; PAM sequence: CTT
ttaagggaacttacattttc

SEQ ID NO: 341979 - DNA, 20 bp, Artificial Sequence
  Description of Artificial Sequence: Synthetic oligonucleotide
  Target: LAMA2; (+) strand; PAM type: YTN; PAM sequence: TTT
taagggaacttacattttcc

SEQ ID NO: 341980 - DNA, 20 bp, Artificial Sequence
  Description of Artificial Sequence: Synthetic oligonucleotide
  Target: LAMA2; (+) strand; PAM type: YTN; PAM sequence: TTT
aagggaacttacattttccc

SEQ ID NO: 341981 - DNA, 20 bp, Artificial Sequence
  Description of Artificial Sequence: Synthetic oligonucleotide
  Target: LAMA2; (+) strand; PAM type: YTN; PAM sequence: TTA
agggaacttacattttccct

SEQ ID NO: 341982 - DNA, 20 bp, Artificial Sequence
  Description of Artificial Sequence: Synthetic oligonucleotide
  Target: LAMA2; (+) strand; PAM type: YTN; PAM sequence: CTT
acattttcccttcaatacta

SEQ ID NO: 341983 - DNA, 20 bp, Artificial Sequence
  Description of Artificial Sequence: Synthetic oligonucleotide
  Target: LAMA2; (+) strand; PAM type: YTN; PAM sequence: TTA
cattttcccttcaatactaa

SEQ ID NO: 341984 - DNA, 20 bp, Artificial Sequence
  Description of Artificial Sequence: Synthetic oligonucleotide
  Target: LAMA2; (+) strand; PAM type: YTN; PAM sequence: TTT
tcccttcaatactaaatccc

SEQ ID NO: 341985 - DNA, 20 bp, Artificial Sequence
  Description of Artificial Sequence: Synthetic oligonucleotide
  Target: LAMA2; (+) strand; PAM type: YTN; PAM sequence: TTT
cccttcaatactaaatccca

SEQ ID NO: 341986 - DNA, 20 bp, Artificial Sequence
  Description of Artificial Sequence: Synthetic oligonucleotide
  Target: LAMA2; (+) strand; PAM type: YTN; PAM sequence: TTC
ccttcaatactaaatcccaa

SEQ ID NO: 341987 - DNA, 20 bp, Artificial Sequence
  Description of Artificial Sequence: Synthetic oligonucleotide
  Target: LAMA2; (+) strand; PAM type: YTN; PAM sequence: CTT
caatactaaatcccaaaagc

SEQ ID NO: 341988 - DNA, 20 bp, Artificial Sequence
  Description of Artificial Sequence: Synthetic oligonucleotide
  Target: LAMA2; (+) strand; PAM type: YTN; PAM sequence: TTC
aatactaaatcccaaaagct

SEQ ID NO: 341989 - DNA, 20 bp, Artificial Sequence
  Description of Artificial Sequence: Synthetic oligonucleotide
  Target: LAMA2; (+) strand; PAM type: YTN; PAM sequence: CTA
aatcccaaaagctaatagca

SEQ ID NO: 341990 - DNA, 20 bp, Artificial Sequence
  Description of Artificial Sequence: Synthetic oligonucleotide
  Target: LAMA2; (+) strand; PAM type: YTN; PAM sequence: CTA
atagcaatacagaagatcca

SEQ ID NO: 341991 - DNA, 20 bp, Artificial Sequence
  Description of Artificial Sequence: Synthetic oligonucleotide
  Target: LAMA2; (+) strand; PAM type: YTN; PAM sequence: CTG
accaacatttcttcccaaga

SEQ ID NO: 341992 - DNA, 20 bp, Artificial Sequence
  Description of Artificial Sequence: Synthetic oligonucleotide
  Target: LAMA2; (+) strand; PAM type: YTN; PAM sequence: TTT
cttcccaagacaataatagt

SEQ ID NO: 341993 - DNA, 20 bp, Artificial Sequence
  Description of Artificial Sequence: Synthetic oligonucleotide
  Target: LAMA2; (+) strand; PAM type: YTN; PAM sequence: TTC
ttcccaagacaataatagta

SEQ ID NO: 341994 - DNA, 20 bp, Artificial Sequence
  Description of Artificial Sequence: Synthetic oligonucleotide
  Target: LAMA2; (+) strand; PAM type: YTN; PAM sequence: CTT
cccaagacaataatagtaac

SEQ ID NO: 341995 - DNA, 20 bp, Artificial Sequence
  Description of Artificial Sequence: Synthetic oligonucleotide
  Target: LAMA2; (+) strand; PAM type: YTN; PAM sequence: TTC
ccaagacaataatagtaact

SEQ ID NO: 341996 - DNA, 20 bp, Artificial Sequence
  Description of Artificial Sequence: Synthetic oligonucleotide
  Target: LAMA2; (+) strand; PAM type: YTN; PAM sequence: CTT
atatgcataattgttaaagc

SEQ ID NO: 341997 - DNA, 20 bp, Artificial Sequence
  Description of Artificial Sequence: Synthetic oligonucleotide
  Target: LAMA2; (+) strand; PAM type: YTN; PAM sequence: TTA
tatgcataattgttaaagca

SEQ ID NO: 341998 - DNA, 20 bp, Artificial Sequence
  Description of Artificial Sequence: Synthetic oligonucleotide
  Target: LAMA2; (+) strand; PAM type: YTN; PAM sequence: TTG
ttaaagcaattttaagattt

SEQ ID NO: 341999 - DNA, 20 bp, Artificial Sequence
  Description of Artificial Sequence: Synthetic oligonucleotide
  Target: LAMA2; (+) strand; PAM type: YTN; PAM sequence: TTA
aagcaattttaagattttgt

SEQ ID NO: 342000 - DNA, 20 bp, Artificial Sequence
  Description of Artificial Sequence: Synthetic oligonucleotide
  Target: LAMA2; (+) strand; PAM type: YTN; PAM sequence: TTT
taagattttgttttgttttt

SEQ ID NO: 342001 - DNA, 20 bp, Artificial Sequence
  Description of Artificial Sequence: Synthetic oligonucleotide
  Target: LAMA2; (+) strand; PAM type: YTN; PAM sequence: TTT
aagattttgttttgtttttt

SEQ ID NO: 342002 - DNA, 20 bp, Artificial Sequence
  Description of Artificial Sequence: Synthetic oligonucleotide
  Target: LAMA2; (+) strand; PAM type: YTN; PAM sequence: TTA
agattttgttttgttttttg

SEQ ID NO: 342003 - DNA, 20 bp, Artificial Sequence
  Description of Artificial Sequence: Synthetic oligonucleotide
  Target: LAMA2; (+) strand; PAM type: YTN; PAM sequence: TTT
tgttttgttttttgctatcc

SEQ ID NO: 342004 - DNA, 20 bp, Artificial Sequence
  Description of Artificial Sequence: Synthetic oligonucleotide
  Target: LAMA2; (+) strand; PAM type: YTN; PAM sequence: TTT
gttttgttttttgctatcca

SEQ ID NO: 342005 - DNA, 20 bp, Artificial Sequence
  Description of Artificial Sequence: Synthetic oligonucleotide
  Target: LAMA2; (+) strand; PAM type: YTN; PAM sequence: TTG
ttttgttttttgctatccaa

SEQ ID NO: 342006 - DNA, 20 bp, Artificial Sequence
  Description of Artificial Sequence: Synthetic oligonucleotide
  Target: LAMA2; (+) strand; PAM type: YTN; PAM sequence: TTT
tgttttttgctatccaagtt

SEQ ID NO: 342007 - DNA, 20 bp, Artificial Sequence
  Description of Artificial Sequence: Synthetic oligonucleotide
  Target: LAMA2; (+) strand; PAM type: YTN; PAM sequence: TTT
gttttttgctatccaagttc

SEQ ID NO: 342008 - DNA, 20 bp, Artificial Sequence
  Description of Artificial Sequence: Synthetic oligonucleotide
  Target: LAMA2; (+) strand; PAM type: YTN; PAM sequence: TTG
ttttttgctatccaagttcc

SEQ ID NO: 342009 - DNA, 20 bp, Artificial Sequence
  Description of Artificial Sequence: Synthetic oligonucleotide
  Target: LAMA2; (+) strand; PAM type: YTN; PAM sequence: TTT
tttgctatccaagttcctaa

SEQ ID NO: 342010 - DNA, 20 bp, Artificial Sequence
  Description of Artificial Sequence: Synthetic oligonucleotide
  Target: LAMA2; (+) strand; PAM type: YTN; PAM sequence: TTT
ttgctatccaagttcctaag

SEQ ID NO: 342011 - DNA, 20 bp, Artificial Sequence
  Description of Artificial Sequence: Synthetic oligonucleotide
  Target: LAMA2; (+) strand; PAM type: YTN; PAM sequence: TTT
tgctatccaagttcctaaga

SEQ ID NO: 342012 - DNA, 20 bp, Artificial Sequence
  Description of Artificial Sequence: Synthetic oligonucleotide
  Target: LAMA2; (+) strand; PAM type: YTN; PAM sequence: TTT
gctatccaagttcctaagac

SEQ ID NO: 342013 - DNA, 20 bp, Artificial Sequence
  Description of Artificial Sequence: Synthetic oligonucleotide
  Target: LAMA2; (+) strand; PAM type: YTN; PAM sequence: TTG
ctatccaagttcctaagaca

SEQ ID NO: 342014 - DNA, 20 bp, Artificial Sequence
  Description of Artificial Sequence: Synthetic oligonucleotide
  Target: LAMA2; (+) strand; PAM type: YTN; PAM sequence: CTA
tccaagttcctaagacatgt

SEQ ID NO: 342015 - DNA, 20 bp, Artificial Sequence
  Description of Artificial Sequence: Synthetic oligonucleotide
  Target: LAMA2; (+) strand; PAM type: YTN; PAM sequence: TTC
ctaagacatgttattcctct

SEQ ID NO: 342016 - DNA, 20 bp, Artificial Sequence
  Description of Artificial Sequence: Synthetic oligonucleotide
  Target: LAMA2; (+) strand; PAM type: YTN; PAM sequence: CTA
agacatgttattcctctaaa

SEQ ID NO: 342017 - DNA, 20 bp, Artificial Sequence
  Description of Artificial Sequence: Synthetic oligonucleotide
  Target: LAMA2; (+) strand; PAM type: YTN; PAM sequence: TTA
ttcctctaaaagtttactat

SEQ ID NO: 342018 - DNA, 20 bp, Artificial Sequence
  Description of Artificial Sequence: Synthetic oligonucleotide
  Target: LAMA2; (+) strand; PAM type: YTN; PAM sequence: TTC
ctctaaaagtttactatatg

SEQ ID NO: 342019 - DNA, 20 bp, Artificial Sequence
  Description of Artificial Sequence: Synthetic oligonucleotide
  Target: LAMA2; (+) strand; PAM type: YTN; PAM sequence: CTC
taaaagtttactatatgaaa

SEQ ID NO: 342020 - DNA, 20 bp, Artificial Sequence
  Description of Artificial Sequence: Synthetic oligonucleotide
  Target: LAMA2; (+) strand; PAM type: YTN; PAM sequence: CTA
aaagtttactatatgaaatg

SEQ ID NO: 342021 - DNA, 20 bp, Artificial Sequence
  Description of Artificial Sequence: Synthetic oligonucleotide
  Target: LAMA2; (+) strand; PAM type: YTN; PAM sequence: TTT
actatatgaaatgattgact

SEQ ID NO: 342022 - DNA, 20 bp, Artificial Sequence
  Description of Artificial Sequence: Synthetic oligonucleotide
  Target: LAMA2; (+) strand; PAM type: YTN; PAM sequence: TTA
ctatatgaaatgattgacta

SEQ ID NO: 342023 - DNA, 20 bp, Artificial Sequence
  Description of Artificial Sequence: Synthetic oligonucleotide
  Target: LAMA2; (+) strand; PAM type: YTN; PAM sequence: CTA
tatgaaatgattgactaatg

SEQ ID NO: 342024 - DNA, 20 bp, Artificial Sequence
  Description of Artificial Sequence: Synthetic oligonucleotide
  Target: LAMA2; (+) strand; PAM type: YTN; PAM sequence: TTG
actaatggttgaacaaatac

SEQ ID NO: 342025 - DNA, 20 bp, Artificial Sequence
  Description of Artificial Sequence: Synthetic oligonucleotide
  Target: LAMA2; (+) strand; PAM type: YTN; PAM sequence: CTA
atggttgaacaaatactata

SEQ ID NO: 342026 - DNA, 20 bp, Artificial Sequence
  Description of Artificial Sequence: Synthetic oligonucleotide
  Target: LAMA2; (+) strand; PAM type: YTN; PAM sequence: TTG
aacaaatactataaacacat

SEQ ID NO: 342027 - DNA, 20 bp, Artificial Sequence
  Description of Artificial Sequence: Synthetic oligonucleotide
  Target: LAMA2; (+) strand; PAM type: YTN; PAM sequence: CTA
taaacacataaggaaggtga

SEQ ID NO: 342028 - DNA, 20 bp, Artificial Sequence
  Description of Artificial Sequence: Synthetic oligonucleotide
  Target: LAMA2; (+) strand; PAM type: YTN; PAM sequence: TTT
tactcacagaagattcctca

SEQ ID NO: 342029 - DNA, 20 bp, Artificial Sequence
  Description of Artificial Sequence: Synthetic oligonucleotide
  Target: LAMA2; (+) strand; PAM type: YTN; PAM sequence: TTT
actcacagaagattcctcaa

SEQ ID NO: 342030 - DNA, 20 bp, Artificial Sequence
  Description of Artificial Sequence: Synthetic oligonucleotide
  Target: LAMA2; (+) strand; PAM type: YTN; PAM sequence: TTA
ctcacagaagattcctcaaa

SEQ ID NO: 342031 - DNA, 20 bp, Artificial Sequence
  Description of Artificial Sequence: Synthetic oligonucleotide
  Target: LAMA2; (+) strand; PAM type: YTN; PAM sequence: CTC
acagaagattcctcaaaacg

SEQ ID NO: 342032 - DNA, 20 bp, Artificial Sequence
  Description of Artificial Sequence: Synthetic oligonucleotide
  Target: LAMA2; (+) strand; PAM type: YTN; PAM sequence: TTC
ctcaaaacgcatacctgatt

SEQ ID NO: 342033 - DNA, 20 bp, Artificial Sequence
  Description of Artificial Sequence: Synthetic oligonucleotide
  Target: LAMA2; (+) strand; PAM type: YTN; PAM sequence: CTC
aaaacgcatacctgatttgg

SEQ ID NO: 342034 - DNA, 20 bp, Artificial Sequence
  Description of Artificial Sequence: Synthetic oligonucleotide
  Target: LAMA2; (+) strand; PAM type: YTN; PAM sequence: CTG
atttggttttaataaggatc

SEQ ID NO: 342035 - DNA, 20 bp, Artificial Sequence
  Description of Artificial Sequence: Synthetic oligonucleotide
  Target: LAMA2; (+) strand; PAM type: YTN; PAM sequence: TTT
ggttttaataaggatcacat

SEQ ID NO: 342036 - DNA, 20 bp, Artificial Sequence
  Description of Artificial Sequence: Synthetic oligonucleotide
  Target: LAMA2; (+) strand; PAM type: YTN; PAM sequence: TTG
gttttaataaggatcacatt

SEQ ID NO: 342037 - DNA, 20 bp, Artificial Sequence
  Description of Artificial Sequence: Synthetic oligonucleotide
  Target: LAMA2; (+) strand; PAM type: YTN; PAM sequence: TTT
taataaggatcacattacag

SEQ ID NO: 342038 - DNA, 20 bp, Artificial Sequence
  Description of Artificial Sequence: Synthetic oligonucleotide
  Target: LAMA2; (+) strand; PAM type: YTN; PAM sequence: TTT
aataaggatcacattacagg

SEQ ID NO: 342039 - DNA, 20 bp, Artificial Sequence
  Description of Artificial Sequence: Synthetic oligonucleotide
  Target: LAMA2; (+) strand; PAM type: YTN; PAM sequence: TTA
ataaggatcacattacagga

SEQ ID NO: 342040 - DNA, 20 bp, Artificial Sequence
  Description of Artificial Sequence: Synthetic oligonucleotide
  Target: LAMA2; (+) strand; PAM type: YTN; PAM sequence: TTA
caggagatccaatagaagct

SEQ ID NO: 342041 - DNA, 20 bp, Artificial Sequence
  Description of Artificial Sequence: Synthetic oligonucleotide
  Target: LAMA2; (+) strand; PAM type: YTN; PAM sequence: CTA
cttaaaaagtgttttagaaa

SEQ ID NO: 342042 - DNA, 20 bp, Artificial Sequence
  Description of Artificial Sequence: Synthetic oligonucleotide
  Target: LAMA2; (+) strand; PAM type: YTN; PAM sequence: CTT
aaaaagtgttttagaaaatg

SEQ ID NO: 342043 - DNA, 20 bp, Artificial Sequence
  Description of Artificial Sequence: Synthetic oligonucleotide
  Target: LAMA2; (+) strand; PAM type: YTN; PAM sequence: TTA
aaaagtgttttagaaaatgt

SEQ ID NO: 342044 - DNA, 20 bp, Artificial Sequence
  Description of Artificial Sequence: Synthetic oligonucleotide
  Target: LAMA2; (+) strand; PAM type: YTN; PAM sequence: TTT
tagaaaatgtttttaaatat

SEQ ID NO: 342045 - DNA, 20 bp, Artificial Sequence
  Description of Artificial Sequence: Synthetic oligonucleotide
  Target: LAMA2; (+) strand; PAM type: YTN; PAM sequence: TTT
agaaaatgtttttaaatatt

SEQ ID NO: 342046 - DNA, 20 bp, Artificial Sequence
  Description of Artificial Sequence: Synthetic oligonucleotide
  Target: LAMA2; (+) strand; PAM type: YTN; PAM sequence: TTA
gaaaatgtttttaaatatta

SEQ ID NO: 342047 - DNA, 20 bp, Artificial Sequence
  Description of Artificial Sequence: Synthetic oligonucleotide
  Target: LAMA2; (+) strand; PAM type: YTN; PAM sequence: TTT
ttaaatattaatttgcatcc

SEQ ID NO: 342048 - DNA, 20 bp, Artificial Sequence
  Description of Artificial Sequence: Synthetic oligonucleotide
  Target: LAMA2; (+) strand; PAM type: YTN; PAM sequence: TTT
taaatattaatttgcatcca

SEQ ID NO: 342049 - DNA, 20 bp, Artificial Sequence
  Description of Artificial Sequence: Synthetic oligonucleotide
  Target: LAMA2; (+) strand; PAM type: YTN; PAM sequence: TTT
aaatattaatttgcatccat

SEQ ID NO: 342050 - DNA, 20 bp, Artificial Sequence
  Description of Artificial Sequence: Synthetic oligonucleotide
  Target: LAMA2; (+) strand; PAM type: YTN; PAM sequence: TTA
aatattaatttgcatccatt

SEQ ID NO: 342051 - DNA, 20 bp, Artificial Sequence
  Description of Artificial Sequence: Synthetic oligonucleotide
  Target: LAMA2; (+) strand; PAM type: YTN; PAM sequence: TTA
atttgcatccattataacat

SEQ ID NO: 342052 - DNA, 20 bp, Artificial Sequence
  Description of Artificial Sequence: Synthetic oligonucleotide
  Target: LAMA2; (+) strand; PAM type: YTN; PAM sequence: TTT
gcatccattataacattact

SEQ ID NO: 342053 - DNA, 20 bp, Artificial Sequence
  Description of Artificial Sequence: Synthetic oligonucleotide
  Target: LAMA2; (+) strand; PAM type: YTN; PAM sequence: TTG
catccattataacattacta

SEQ ID NO: 342054 - DNA, 20 bp, Artificial Sequence
  Description of Artificial Sequence: Synthetic oligonucleotide
  Target: LAMA2; (+) strand; PAM type: YTN; PAM sequence: TTA
taacattactatttgaattt

SEQ ID NO: 342055 - DNA, 20 bp, Artificial Sequence
  Description of Artificial Sequence: Synthetic oligonucleotide
  Target: LAMA2; (+) strand; PAM type: YTN; PAM sequence: TTA
ctatttgaatttaacttcct

SEQ ID NO: 342056 - DNA, 20 bp, Artificial Sequence
  Description of Artificial Sequence: Synthetic oligonucleotide
  Target: LAMA2; (+) strand; PAM type: YTN; PAM sequence: CTA
tttgaatttaacttccttcc

SEQ ID NO: 342057 - DNA, 20 bp, Artificial Sequence
  Description of Artificial Sequence: Synthetic oligonucleotide
  Target: LAMA2; (+) strand; PAM type: YTN; PAM sequence: TTT
gaatttaacttccttccaat

SEQ ID NO: 342058 - DNA, 20 bp, Artificial Sequence
  Description of Artificial Sequence: Synthetic oligonucleotide
  Target: LAMA2; (+) strand; PAM type: YTN; PAM sequence: TTG
aatttaacttccttccaata

SEQ ID NO: 342059 - DNA, 20 bp, Artificial Sequence
  Description of Artificial Sequence: Synthetic oligonucleotide
  Target: LAMA2; (+) strand; PAM type: YTN; PAM sequence: TTT
aacttccttccaatatacct

SEQ ID NO: 342060 - DNA, 20 bp, Artificial Sequence
  Description of Artificial Sequence: Synthetic oligonucleotide
  Target: LAMA2; (+) strand; PAM type: YTN; PAM sequence: TTA
acttccttccaatatacctg

SEQ ID NO: 342061 - DNA, 20 bp, Artificial Sequence
  Description of Artificial Sequence: Synthetic oligonucleotide
  Target: LAMA2; (+) strand; PAM type: YTN; PAM sequence: CTT
ccttccaatatacctgtaga

SEQ ID NO: 342062 - DNA, 20 bp, Artificial Sequence
  Description of Artificial Sequence: Synthetic oligonucleotide
  Target: LAMA2; (+) strand; PAM type: YTN; PAM sequence: TTC
cttccaatatacctgtagaa

SEQ ID NO: 342063 - DNA, 20 bp, Artificial Sequence
  Description of Artificial Sequence: Synthetic oligonucleotide
  Target: LAMA2; (+) strand; PAM type: YTN; PAM sequence: CTT
ccaatatacctgtagaatga

SEQ ID NO: 342064 - DNA, 20 bp, Artificial Sequence
  Description of Artificial Sequence: Synthetic oligonucleotide
  Target: LAMA2; (+) strand; PAM type: YTN; PAM sequence: TTC
caatatacctgtagaatgag

SEQ ID NO: 342065 - DNA, 20 bp, Artificial Sequence
  Description of Artificial Sequence: Synthetic oligonucleotide
  Target: LAMA2; (+) strand; PAM type: YTN; PAM sequence: CTG
tagaatgagctattgagttt

SEQ ID NO: 342066 - DNA, 20 bp, Artificial Sequence
  Description of Artificial Sequence: Synthetic oligonucleotide
  Target: LAMA2; (+) strand; PAM type: YTN; PAM sequence: CTA
ttgagtttaacttctttcca

SEQ ID NO: 342067 - DNA, 20 bp, Artificial Sequence
  Description of Artificial Sequence: Synthetic oligonucleotide
  Target: LAMA2; (+) strand; PAM type: YTN; PAM sequence: TTG
agtttaacttctttccaggc

SEQ ID NO: 342068 - DNA, 20 bp, Artificial Sequence
  Description of Artificial Sequence: Synthetic oligonucleotide
  Target: LAMA2; (+) strand; PAM type: YTN; PAM sequence: TTT
aacttctttccaggcatggt

SEQ ID NO: 342069 - DNA, 20 bp, Artificial Sequence
  Description of Artificial Sequence: Synthetic oligonucleotide
  Target: LAMA2; (+) strand; PAM type: YTN; PAM sequence: TTA
acttctttccaggcatggtt

SEQ ID NO: 342070 - DNA, 20 bp, Artificial Sequence
  Description of Artificial Sequence: Synthetic oligonucleotide
  Target: LAMA2; (+) strand; PAM type: YTN; PAM sequence: CTT
ctttccaggcatggttatgg

SEQ ID NO: 342071 - DNA, 20 bp, Artificial Sequence
  Description of Artificial Sequence: Synthetic oligonucleotide
  Target: LAMA2; (+) strand; PAM type: YTN; PAM sequence: TTC
tttccaggcatggttatgga

SEQ ID NO: 342072 - DNA, 20 bp, Artificial Sequence
  Description of Artificial Sequence: Synthetic oligonucleotide
  Target: LAMA2; (+) strand; PAM type: YTN; PAM sequence: CTT
tccaggcatggttatggagc

SEQ ID NO: 342073 - DNA, 20 bp, Artificial Sequence
  Description of Artificial Sequence: Synthetic oligonucleotide
  Target: LAMA2; (+) strand; PAM type: YTN; PAM sequence: TTT
ccaggcatggttatggagcc

SEQ ID NO: 342074 - DNA, 20 bp, Artificial Sequence
  Description of Artificial Sequence: Synthetic oligonucleotide
  Target: LAMA2; (+) strand; PAM type: YTN; PAM sequence: TTC
caggcatggttatggagcct

SEQ ID NO: 342075 - DNA, 20 bp, Artificial Sequence
  Description of Artificial Sequence: Synthetic oligonucleotide
  Target: LAMA2; (+) strand; PAM type: YTN; PAM sequence: TTA
tggagcctgctagtgtgtgg

SEQ ID NO: 342076 - DNA, 20 bp, Artificial Sequence
  Description of Artificial Sequence: Synthetic oligonucleotide
  Target: LAMA2; (+) strand; PAM type: YTN; PAM sequence: CTG
ctagtgtgtgggtgtcccgg

SEQ ID NO: 342077 - DNA, 20 bp, Artificial Sequence
  Description of Artificial Sequence: Synthetic oligonucleotide
  Target: LAMA2; (+) strand; PAM type: YTN; PAM sequence: CTA
gtgtgtgggtgtcccggggc

SEQ ID NO: 342078 - DNA, 20 bp, Artificial Sequence
  Description of Artificial Sequence: Synthetic oligonucleotide
  Target: LAMA2; (+) strand; PAM type: YTN; PAM sequence: TTA
aataggctagtgataaaatg

SEQ ID NO: 342079 - DNA, 20 bp, Artificial Sequence
  Description of Artificial Sequence: Synthetic oligonucleotide
  Target: LAMA2; (+) strand; PAM type: YTN; PAM sequence: CTA
gtgataaaatggataggaca

SEQ ID NO: 342080 - DNA, 20 bp, Artificial Sequence
  Description of Artificial Sequence: Synthetic oligonucleotide
  Target: LAMA2; (+) strand; PAM type: YTN; PAM sequence: TTT
ctcatcaggaacatttttaa

SEQ ID NO: 342081 - DNA, 20 bp, Artificial Sequence
  Description of Artificial Sequence: Synthetic oligonucleotide
  Target: LAMA2; (+) strand; PAM type: YTN; PAM sequence: TTC
tcatcaggaacatttttaaa

SEQ ID NO: 342082 - DNA, 20 bp, Artificial Sequence
  Description of Artificial Sequence: Synthetic oligonucleotide
  Target: LAMA2; (+) strand; PAM type: YTN; PAM sequence: CTC
atcaggaacatttttaaaca

SEQ ID NO: 342083 - DNA, 20 bp, Artificial Sequence
  Description of Artificial Sequence: Synthetic oligonucleotide
  Target: LAMA2; (+) strand; PAM type: YTN; PAM sequence: TTT
ttaaacacagaatctgttga

SEQ ID NO: 342084 - DNA, 20 bp, Artificial Sequence
  Description of Artificial Sequence: Synthetic oligonucleotide
  Target: LAMA2; (+) strand; PAM type: YTN; PAM sequence: TTT
taaacacagaatctgttgat

SEQ ID NO: 342085 - DNA, 20 bp, Artificial Sequence
  Description of Artificial Sequence: Synthetic oligonucleotide
  Target: LAMA2; (+) strand; PAM type: YTN; PAM sequence: TTT
aaacacagaatctgttgatt

SEQ ID NO: 342086 - DNA, 20 bp, Artificial Sequence
  Description of Artificial Sequence: Synthetic oligonucleotide
  Target: LAMA2; (+) strand; PAM type: YTN; PAM sequence: TTA
aacacagaatctgttgattc

SEQ ID NO: 342087 - DNA, 20 bp, Artificial Sequence
  Description of Artificial Sequence: Synthetic oligonucleotide
  Target: LAMA2; (+) strand; PAM type: YTN; PAM sequence: CTG
ttgattctgtgttgggggca

SEQ ID NO: 342088 - DNA, 20 bp, Artificial Sequence
  Description of Artificial Sequence: Synthetic oligonucleotide
  Target: LAMA2; (+) strand; PAM type: YTN; PAM sequence: TTG
attctgtgttgggggcagag

SEQ ID NO: 342089 - DNA, 20 bp, Artificial Sequence
  Description of Artificial Sequence: Synthetic oligonucleotide
  Target: LAMA2; (+) strand; PAM type: YTN; PAM sequence: TTC
tgtgttgggggcagaggctg

SEQ ID NO: 342090 - DNA, 20 bp, Artificial Sequence
  Description of Artificial Sequence: Synthetic oligonucleotide
  Target: LAMA2; (+) strand; PAM type: YTN; PAM sequence: CTG
tgttgggggcagaggctggg

SEQ ID NO: 342091 - DNA, 20 bp, Artificial Sequence
  Description of Artificial Sequence: Synthetic oligonucleotide
  Target: LAMA2; (+) strand; PAM type: YTN; PAM sequence: TTG
ggggcagaggctgggagaaa

SEQ ID NO: 342092 - DNA, 20 bp, Artificial Sequence
  Description of Artificial Sequence: Synthetic oligonucleotide
  Target: LAMA2; (+) strand; PAM type: YTN; PAM sequence: CTG
ggagaaatagggagatatta

SEQ ID NO: 342093 - DNA, 20 bp, Artificial Sequence
  Description of Artificial Sequence: Synthetic oligonucleotide
  Target: LAMA2; (+) strand; PAM type: YTN; PAM sequence: TTA
gtcaatgcattacttttata

SEQ ID NO: 342094 - DNA, 20 bp, Artificial Sequence
  Description of Artificial Sequence: Synthetic oligonucleotide
  Target: LAMA2; (+) strand; PAM type: YTN; PAM sequence: TTA
cttttataagtgggcaacag

SEQ ID NO: 342095 - DNA, 20 bp, Artificial Sequence
  Description of Artificial Sequence: Synthetic oligonucleotide
  Target: LAMA2; (+) strand; PAM type: YTN; PAM sequence: CTT
ttataagtgggcaacagaac

SEQ ID NO: 342096 - DNA, 20 bp, Artificial Sequence
  Description of Artificial Sequence: Synthetic oligonucleotide
  Target: LAMA2; (+) strand; PAM type: YTN; PAM sequence: TTT
tataagtgggcaacagaacc

SEQ ID NO: 342097 - DNA, 20 bp, Artificial Sequence
  Description of Artificial Sequence: Synthetic oligonucleotide
  Target: LAMA2; (+) strand; PAM type: YTN; PAM sequence: TTT
ataagtgggcaacagaaccc

SEQ ID NO: 342098 - DNA, 20 bp, Artificial Sequence
  Description of Artificial Sequence: Synthetic oligonucleotide
  Target: LAMA2; (+) strand; PAM type: YTN; PAM sequence: TTA
taagtgggcaacagaaccca

SEQ ID NO: 342099 - DNA, 20 bp, Artificial Sequence
  Description of Artificial Sequence: Synthetic oligonucleotide
  Target: LAMA2; (+) strand; PAM type: YTN; PAM sequence: TTG
tgtggtcaaagtactgcaga

SEQ ID NO: 342100 - DNA, 20 bp, Artificial Sequence
  Description of Artificial Sequence: Synthetic oligonucleotide
  Target: LAMA2; (+) strand; PAM type: YTN; PAM sequence: CTG
cagaacttctcaagcattgt

SEQ ID NO: 342101 - DNA, 20 bp, Artificial Sequence
  Description of Artificial Sequence: Synthetic oligonucleotide
  Target: LAMA2; (+) strand; PAM type: YTN; PAM sequence: CTT
ctcaagcattgtacacgttt

SEQ ID NO: 342102 - DNA, 20 bp, Artificial Sequence
  Description of Artificial Sequence: Synthetic oligonucleotide
  Target: LAMA2; (+) strand; PAM type: YTN; PAM sequence: TTC
tcaagcattgtacacgtttc

SEQ ID NO: 342103 - DNA, 20 bp, Artificial Sequence
  Description of Artificial Sequence: Synthetic oligonucleotide
  Target: LAMA2; (+) strand; PAM type: YTN; PAM sequence: CTC
aagcattgtacacgtttcag

SEQ ID NO: 342104 - DNA, 20 bp, Artificial Sequence
  Description of Artificial Sequence: Synthetic oligonucleotide
  Target: LAMA2; (+) strand; PAM type: YTN; PAM sequence: TTG
tacacgtttcagtttttgac

SEQ ID NO: 342105 - DNA, 20 bp, Artificial Sequence
  Description of Artificial Sequence: Synthetic oligonucleotide
  Target: LAMA2; (+) strand; PAM type: YTN; PAM sequence: TTT
cagtttttgactacgacttt

SEQ ID NO: 342106 - DNA, 20 bp, Artificial Sequence
  Description of Artificial Sequence: Synthetic oligonucleotide
  Target: LAMA2; (+) strand; PAM type: YTN; PAM sequence: TTC
agtttttgactacgacttta

SEQ ID NO: 342107 - DNA, 20 bp, Artificial Sequence
  Description of Artificial Sequence: Synthetic oligonucleotide
  Target: LAMA2; (+) strand; PAM type: YTN; PAM sequence: TTT
ttgactacgactttaatggt

SEQ ID NO: 342108 - DNA, 20 bp, Artificial Sequence
  Description of Artificial Sequence: Synthetic oligonucleotide
  Target: LAMA2; (+) strand; PAM type: YTN; PAM sequence: TTT
tgactacgactttaatggtc

SEQ ID NO: 342109 - DNA, 20 bp, Artificial Sequence
  Description of Artificial Sequence: Synthetic oligonucleotide
  Target: LAMA2; (+) strand; PAM type: YTN; PAM sequence: TTT
gactacgactttaatggtcc

SEQ ID NO: 342110 - DNA, 20 bp, Artificial Sequence
  Description of Artificial Sequence: Synthetic oligonucleotide
  Target: LAMA2; (+) strand; PAM type: YTN; PAM sequence: TTG
actacgactttaatggtcca

SEQ ID NO: 342111 - DNA, 20 bp, Artificial Sequence
  Description of Artificial Sequence: Synthetic oligonucleotide
  Target: LAMA2; (+) strand; PAM type: YTN; PAM sequence: CTA
cgactttaatggtccacaag

SEQ ID NO: 342112 - DNA, 20 bp, Artificial Sequence
  Description of Artificial Sequence: Synthetic oligonucleotide
  Target: LAMA2; (+) strand; PAM type: YTN; PAM sequence: CTT
taatggtccacaagaaaggc

SEQ ID NO: 342113 - DNA, 20 bp, Artificial Sequence
  Description of Artificial Sequence: Synthetic oligonucleotide
  Target: LAMA2; (+) strand; PAM type: YTN; PAM sequence: TTT
aatggtccacaagaaaggcc

SEQ ID NO: 342114 - DNA, 20 bp, Artificial Sequence
  Description of Artificial Sequence: Synthetic oligonucleotide
  Target: LAMA2; (+) strand; PAM type: YTN; PAM sequence: TTA
atggtccacaagaaaggcct

SEQ ID NO: 342115 - DNA, 20 bp, Artificial Sequence
  Description of Artificial Sequence: Synthetic oligonucleotide
  Target: LAMA2; (+) strand; PAM type: YTN; PAM sequence: CTC
taagaatctttttcgtgtcc

SEQ ID NO: 342116 - DNA, 20 bp, Artificial Sequence
  Description of Artificial Sequence: Synthetic oligonucleotide
  Target: LAMA2; (+) strand; PAM type: YTN; PAM sequence: CTA
agaatctttttcgtgtccat

SEQ ID NO: 342117 - DNA, 20 bp, Artificial Sequence
  Description of Artificial Sequence: Synthetic oligonucleotide
  Target: LAMA2; (+) strand; PAM type: YTN; PAM sequence: CTT
tttcgtgtccatttctataa

SEQ ID NO: 342118 - DNA, 20 bp, Artificial Sequence
  Description of Artificial Sequence: Synthetic oligonucleotide
  Target: LAMA2; (+) strand; PAM type: YTN; PAM sequence: TTT
ttcgtgtccatttctataag

SEQ ID NO: 342119 - DNA, 20 bp, Artificial Sequence
  Description of Artificial Sequence: Synthetic oligonucleotide
  Target: LAMA2; (+) strand; PAM type: YTN; PAM sequence: TTT
tcgtgtccatttctataaga

SEQ ID NO: 342120 - DNA, 20 bp, Artificial Sequence
  Description of Artificial Sequence: Synthetic oligonucleotide
  Target: LAMA2; (+) strand; PAM type: YTN; PAM sequence: TTT
cgtgtccatttctataagag

SEQ ID NO: 342121 - DNA, 20 bp, Artificial Sequence
  Description of Artificial Sequence: Synthetic oligonucleotide
  Target: LAMA2; (+) strand; PAM type: YTN; PAM sequence: TTC
gtgtccatttctataagaga

SEQ ID NO: 342122 - DNA, 20 bp, Artificial Sequence
  Description of Artificial Sequence: Synthetic oligonucleotide
  Target: LAMA2; (+) strand; PAM type: YTN; PAM sequence: TTT
ctataagagagaacataatg

SEQ ID NO: 342123 - DNA, 20 bp, Artificial Sequence
  Description of Artificial Sequence: Synthetic oligonucleotide
  Target: LAMA2; (+) strand; PAM type: YTN; PAM sequence: TTC
tataagagagaacataatgc

SEQ ID NO: 342124 - DNA, 20 bp, Artificial Sequence
  Description of Artificial Sequence: Synthetic oligonucleotide
  Target: LAMA2; (+) strand; PAM type: YTN; PAM sequence: CTA
taagagagaacataatgctg

SEQ ID NO: 342125 - DNA, 20 bp, Artificial Sequence
  Description of Artificial Sequence: Synthetic oligonucleotide
  Target: LAMA2; (+) strand; PAM type: YTN; PAM sequence: CTG
tgttagacatagttgagatc

SEQ ID NO: 342126 - DNA, 20 bp, Artificial Sequence
  Description of Artificial Sequence: Synthetic oligonucleotide
  Target: LAMA2; (+) strand; PAM type: YTN; PAM sequence: TTA
gacatagttgagatccatta

SEQ ID NO: 342127 - DNA, 20 bp, Artificial Sequence
  Description of Artificial Sequence: Synthetic oligonucleotide
  Target: LAMA2; (+) strand; PAM type: YTN; PAM sequence: TTG
agatccattataataatgtc

SEQ ID NO: 342128 - DNA, 20 bp, Artificial Sequence
  Description of Artificial Sequence: Synthetic oligonucleotide
  Target: LAMA2; (+) strand; PAM type: YTN; PAM sequence: TTA
taataatgtcactacatttt

SEQ ID NO: 342129 - DNA, 20 bp, Artificial Sequence
  Description of Artificial Sequence: Synthetic oligonucleotide
  Target: LAMA2; (+) strand; PAM type: YTN; PAM sequence: CTA
cattttgaaataaaattctg

SEQ ID NO: 342130 - DNA, 20 bp, Artificial Sequence
  Description of Artificial Sequence: Synthetic oligonucleotide
  Target: LAMA2; (+) strand; PAM type: YTN; PAM sequence: TTT
tgaaataaaattctgaaatg

SEQ ID NO: 342131 - DNA, 20 bp, Artificial Sequence
  Description of Artificial Sequence: Synthetic oligonucleotide
  Target: LAMA2; (+) strand; PAM type: YTN; PAM sequence: TTT
gaaataaaattctgaaatgc

SEQ ID NO: 342132 - DNA, 20 bp, Artificial Sequence
  Description of Artificial Sequence: Synthetic oligonucleotide
  Target: LAMA2; (+) strand; PAM type: YTN; PAM sequence: TTG
aaataaaattctgaaatgcc

SEQ ID NO: 342133 - DNA, 20 bp, Artificial Sequence
  Description of Artificial Sequence: Synthetic oligonucleotide
  Target: LAMA2; (+) strand; PAM type: YTN; PAM sequence: TTC
tgaaatgccttaatacataa

SEQ ID NO: 342134 - DNA, 20 bp, Artificial Sequence
  Description of Artificial Sequence: Synthetic oligonucleotide
  Target: LAMA2; (+) strand; PAM type: YTN; PAM sequence: CTG
aaatgccttaatacataaat

SEQ ID NO: 342135 - DNA, 20 bp, Artificial Sequence
  Description of Artificial Sequence: Synthetic oligonucleotide
  Target: LAMA2; (+) strand; PAM type: YTN; PAM sequence: CTT
aatacataaatccttttatg

SEQ ID NO: 342136 - DNA, 20 bp, Artificial Sequence
  Description of Artificial Sequence: Synthetic oligonucleotide
  Target: LAMA2; (+) strand; PAM type: YTN; PAM sequence: TTA
atacataaatccttttatga

SEQ ID NO: 342137 - DNA, 20 bp, Artificial Sequence
  Description of Artificial Sequence: Synthetic oligonucleotide
  Target: LAMA2; (+) strand; PAM type: YTN; PAM sequence: CTT
ttatgaagtctttaaaattg

SEQ ID NO: 342138 - DNA, 20 bp, Artificial Sequence
  Description of Artificial Sequence: Synthetic oligonucleotide
  Target: LAMA2; (+) strand; PAM type: YTN; PAM sequence: TTT
tatgaagtctttaaaattgg

SEQ ID NO: 342139 - DNA, 20 bp, Artificial Sequence
  Description of Artificial Sequence: Synthetic oligonucleotide
  Target: LAMA2; (+) strand; PAM type: YTN; PAM sequence: TTT
atgaagtctttaaaattggc

SEQ ID NO: 342140 - DNA, 20 bp, Artificial Sequence
  Description of Artificial Sequence: Synthetic oligonucleotide
  Target: LAMA2; (+) strand; PAM type: YTN; PAM sequence: TTA
tgaagtctttaaaattggct

SEQ ID NO: 342141 - DNA, 20 bp, Artificial Sequence
  Description of Artificial Sequence: Synthetic oligonucleotide
  Target: LAMA2; (+) strand; PAM type: YTN; PAM sequence: CTT
taaaattggctgctaaaacc

SEQ ID NO: 342142 - DNA, 20 bp, Artificial Sequence
  Description of Artificial Sequence: Synthetic oligonucleotide
  Target: LAMA2; (+) strand; PAM type: YTN; PAM sequence: TTT
aaaattggctgctaaaacca

SEQ ID NO: 342143 - DNA, 20 bp, Artificial Sequence
  Description of Artificial Sequence: Synthetic oligonucleotide
  Target: LAMA2; (+) strand; PAM type: YTN; PAM sequence: TTA
aaattggctgctaaaaccaa

SEQ ID NO: 342144 - DNA, 20 bp, Artificial Sequence
  Description of Artificial Sequence: Synthetic oligonucleotide
  Target: LAMA2; (+) strand; PAM type: YTN; PAM sequence: TTG
gctgctaaaaccaataaaat

SEQ ID NO: 342145 - DNA, 20 bp, Artificial Sequence
  Description of Artificial Sequence: Synthetic oligonucleotide
  Target: LAMA2; (+) strand; PAM type: YTN; PAM sequence: CTG
ctaaaaccaataaaattata

SEQ ID NO: 342146 - DNA, 20 bp, Artificial Sequence
  Description of Artificial Sequence: Synthetic oligonucleotide
  Target: LAMA2; (+) strand; PAM type: YTN; PAM sequence: CTA
aaaccaataaaattatattt

SEQ ID NO: 342147 - DNA, 20 bp, Artificial Sequence
  Description of Artificial Sequence: Synthetic oligonucleotide
  Target: LAMA2; (+) strand; PAM type: YTN; PAM sequence: TTA
tatttttggaacatagttaa

SEQ ID NO: 342148 - DNA, 20 bp, Artificial Sequence
  Description of Artificial Sequence: Synthetic oligonucleotide
  Target: LAMA2; (+) strand; PAM type: YTN; PAM sequence: TTT
ttggaacatagttaaccact

SEQ ID NO: 342149 - DNA, 20 bp, Artificial Sequence
  Description of Artificial Sequence: Synthetic oligonucleotide
  Target: LAMA2; (+) strand; PAM type: YTN; PAM sequence: TTT
tggaacatagttaaccactt

SEQ ID NO: 342150 - DNA, 20 bp, Artificial Sequence
  Description of Artificial Sequence: Synthetic oligonucleotide
  Target: LAMA2; (+) strand; PAM type: YTN; PAM sequence: TTT
ggaacatagttaaccacttt

SEQ ID NO: 342151 - DNA, 20 bp, Artificial Sequence
  Description of Artificial Sequence: Synthetic oligonucleotide
  Target: LAMA2; (+) strand; PAM type: YTN; PAM sequence: TTG
gaacatagttaaccactttg

SEQ ID NO: 342152 - DNA, 20 bp, Artificial Sequence
  Description of Artificial Sequence: Synthetic oligonucleotide
  Target: LAMA2; (+) strand; PAM type: YTN; PAM sequence: TTA
accactttgtgcacataagt

SEQ ID NO: 342153 - DNA, 20 bp, Artificial Sequence
  Description of Artificial Sequence: Synthetic oligonucleotide
  Target: LAMA2; (+) strand; PAM type: YTN; PAM sequence: CTT
tgtgcacataagtgaggctg

SEQ ID NO: 342154 - DNA, 20 bp, Artificial Sequence
  Description of Artificial Sequence: Synthetic oligonucleotide
  Target: LAMA2; (+) strand; PAM type: YTN; PAM sequence: TTT
gtgcacataagtgaggctgt

SEQ ID NO: 342155 - DNA, 20 bp, Artificial Sequence
  Description of Artificial Sequence: Synthetic oligonucleotide
  Target: LAMA2; (+) strand; PAM type: YTN; PAM sequence: TTG
tgcacataagtgaggctgta

SEQ ID NO: 342156 - DNA, 20 bp, Artificial Sequence
  Description of Artificial Sequence: Synthetic oligonucleotide
  Target: LAMA2; (+) strand; PAM type: YTN; PAM sequence: CTG
tagaaactagggtttttaaa

SEQ ID NO: 342157 - DNA, 20 bp, Artificial Sequence
  Description of Artificial Sequence: Synthetic oligonucleotide
  Target: LAMA2; (+) strand; PAM type: YTN; PAM sequence: CTA
gggtttttaaatgacttaaa

SEQ ID NO: 342158 - DNA, 20 bp, Artificial Sequence
  Description of Artificial Sequence: Synthetic oligonucleotide
  Target: LAMA2; (+) strand; PAM type: YTN; PAM sequence: TTT
ttaaatgacttaaaagatat

SEQ ID NO: 342159 - DNA, 20 bp, Artificial Sequence
  Description of Artificial Sequence: Synthetic oligonucleotide
  Target: LAMA2; (+) strand; PAM type: YTN; PAM sequence: TTT
taaatgacttaaaagatata

SEQ ID NO: 342160 - DNA, 20 bp, Artificial Sequence
  Description of Artificial Sequence: Synthetic oligonucleotide
  Target: LAMA2; (+) strand; PAM type: YTN; PAM sequence: TTT
aaatgacttaaaagatatat

SEQ ID NO: 342161 - DNA, 20 bp, Artificial Sequence
  Description of Artificial Sequence: Synthetic oligonucleotide
  Target: LAMA2; (+) strand; PAM type: YTN; PAM sequence: TTA
aatgacttaaaagatatata

SEQ ID NO: 342162 - DNA, 20 bp, Artificial Sequence
  Description of Artificial Sequence: Synthetic oligonucleotide
  Target: LAMA2; (+) strand; PAM type: YTN; PAM sequence: CTT
aaaagatatatatttctcca

SEQ ID NO: 342163 - DNA, 20 bp, Artificial Sequence
  Description of Artificial Sequence: Synthetic oligonucleotide
  Target: LAMA2; (+) strand; PAM type: YTN; PAM sequence: TTA
aaagatatatatttctccaa

SEQ ID NO: 342164 - DNA, 20 bp, Artificial Sequence
  Description of Artificial Sequence: Synthetic oligonucleotide
  Target: LAMA2; (+) strand; PAM type: YTN; PAM sequence: TTT
ctccaaactataggtaatta

SEQ ID NO: 342165 - DNA, 20 bp, Artificial Sequence
  Description of Artificial Sequence: Synthetic oligonucleotide
  Target: LAMA2; (+) strand; PAM type: YTN; PAM sequence: TTC
tccaaactataggtaattat

SEQ ID NO: 342166 - DNA, 20 bp, Artificial Sequence
  Description of Artificial Sequence: Synthetic oligonucleotide
  Target: LAMA2; (+) strand; PAM type: YTN; PAM sequence: CTC
caaactataggtaattatat

SEQ ID NO: 342167 - DNA, 20 bp, Artificial Sequence
  Description of Artificial Sequence: Synthetic oligonucleotide
  Target: LAMA2; (+) strand; PAM type: YTN; PAM sequence: CTA
taggtaattatatcaatatt

SEQ ID NO: 342168 - DNA, 20 bp, Artificial Sequence
  Description of Artificial Sequence: Synthetic oligonucleotide
  Target: LAMA2; (+) strand; PAM type: YTN; PAM sequence: TTA
tatcaatattactttgacag

SEQ ID NO: 342169 - DNA, 20 bp, Artificial Sequence
  Description of Artificial Sequence: Synthetic oligonucleotide
  Target: LAMA2; (+) strand; PAM type: YTN; PAM sequence: TTA
ctttgacagagatatagtaa

SEQ ID NO: 342170 - DNA, 20 bp, Artificial Sequence
  Description of Artificial Sequence: Synthetic oligonucleotide
  Target: LAMA2; (+) strand; PAM type: YTN; PAM sequence: CTT
tgacagagatatagtaattc

SEQ ID NO: 342171 - DNA, 20 bp, Artificial Sequence
  Description of Artificial Sequence: Synthetic oligonucleotide
  Target: LAMA2; (+) strand; PAM type: YTN; PAM sequence: TTT
gacagagatatagtaattct

SEQ ID NO: 342172 - DNA, 20 bp, Artificial Sequence
  Description of Artificial Sequence: Synthetic oligonucleotide
  Target: LAMA2; (+) strand; PAM type: YTN; PAM sequence: TTG
acagagatatagtaattctc

SEQ ID NO: 342173 - DNA, 20 bp, Artificial Sequence
  Description of Artificial Sequence: Synthetic oligonucleotide
  Target: LAMA2; (+) strand; PAM type: YTN; PAM sequence: TTC
tccatcttatagtaaaattt

SEQ ID NO: 342174 - DNA, 20 bp, Artificial Sequence
  Description of Artificial Sequence: Synthetic oligonucleotide
  Target: LAMA2; (+) strand; PAM type: YTN; PAM sequence: CTC
catcttatagtaaaatttat

SEQ ID NO: 342175 - DNA, 20 bp, Artificial Sequence
  Description of Artificial Sequence: Synthetic oligonucleotide
  Target: LAMA2; (+) strand; PAM type: YTN; PAM sequence: CTT
atagtaaaatttatgaaaac

SEQ ID NO: 342176 - DNA, 20 bp, Artificial Sequence
  Description of Artificial Sequence: Synthetic oligonucleotide
  Target: LAMA2; (+) strand; PAM type: YTN; PAM sequence: TTA
tagtaaaatttatgaaaaca

SEQ ID NO: 342177 - DNA, 20 bp, Artificial Sequence
  Description of Artificial Sequence: Synthetic oligonucleotide
  Target: LAMA2; (+) strand; PAM type: YTN; PAM sequence: TTT
atgaaaacattaagtaaacc

SEQ ID NO: 342178 - DNA, 20 bp, Artificial Sequence
  Description of Artificial Sequence: Synthetic oligonucleotide
  Target: LAMA2; (+) strand; PAM type: YTN; PAM sequence: TTA
tgaaaacattaagtaaacca

SEQ ID NO: 342179 - DNA, 20 bp, Artificial Sequence
  Description of Artificial Sequence: Synthetic oligonucleotide
  Target: LAMA2; (+) strand; PAM type: YTN; PAM sequence: TTA
agtaaaccaacaggtaaata

SEQ ID NO: 342180 - DNA, 20 bp, Artificial Sequence
  Description of Artificial Sequence: Synthetic oligonucleotide
  Target: LAMA2; (+) strand; PAM type: YTN; PAM sequence: TTT
ttggtcaaacaaaactttaa

SEQ ID NO: 342181 - DNA, 20 bp, Artificial Sequence
  Description of Artificial Sequence: Synthetic oligonucleotide
  Target: LAMA2; (+) strand; PAM type: YTN; PAM sequence: TTT
tggtcaaacaaaactttaaa

SEQ ID NO: 342182 - DNA, 20 bp, Artificial Sequence
  Description of Artificial Sequence: Synthetic oligonucleotide
  Target: LAMA2; (+) strand; PAM type: YTN; PAM sequence: TTT
ggtcaaacaaaactttaaaa

SEQ ID NO: 342183 - DNA, 20 bp, Artificial Sequence
  Description of Artificial Sequence: Synthetic oligonucleotide
  Target: LAMA2; (+) strand; PAM type: YTN; PAM sequence: TTG
gtcaaacaaaactttaaaaa

SEQ ID NO: 342184 - DNA, 20 bp, Artificial Sequence
  Description of Artificial Sequence: Synthetic oligonucleotide
  Target: LAMA2; (+) strand; PAM type: YTN; PAM sequence: CTT
taaaaattatgtttttcttt

SEQ ID NO: 342185 - DNA, 20 bp, Artificial Sequence
  Description of Artificial Sequence: Synthetic oligonucleotide
  Target: LAMA2; (+) strand; PAM type: YTN; PAM sequence: TTT
aaaaattatgtttttctttt

SEQ ID NO: 342186 - DNA, 20 bp, Artificial Sequence
  Description of Artificial Sequence: Synthetic oligonucleotide
  Target: LAMA2; (+) strand; PAM type: YTN; PAM sequence: TTA
aaaattatgtttttctttta

SEQ ID NO: 342187 - DNA, 20 bp, Artificial Sequence
  Description of Artificial Sequence: Synthetic oligonucleotide
  Target: LAMA2; (+) strand; PAM type: YTN; PAM sequence: TTA
tgtttttcttttatttggct

SEQ ID NO: 342188 - DNA, 20 bp, Artificial Sequence
  Description of Artificial Sequence: Synthetic oligonucleotide
  Target: LAMA2; (+) strand; PAM type: YTN; PAM sequence: TTT
ttcttttatttggctcaagc

SEQ ID NO: 342189 - DNA, 20 bp, Artificial Sequence
  Description of Artificial Sequence: Synthetic oligonucleotide
  Target: LAMA2; (+) strand; PAM type: YTN; PAM sequence: TTT
tcttttatttggctcaagct

SEQ ID NO: 342190 - DNA, 20 bp, Artificial Sequence
  Description of Artificial Sequence: Synthetic oligonucleotide
  Target: LAMA2; (+) strand; PAM type: YTN; PAM sequence: TTT
cttttatttggctcaagcta

SEQ ID NO: 342191 - DNA, 20 bp, Artificial Sequence
  Description of Artificial Sequence: Synthetic oligonucleotide
  Target: LAMA2; (+) strand; PAM type: YTN; PAM sequence: TTC
ttttatttggctcaagctaa

SEQ ID NO: 342192 - DNA, 20 bp, Artificial Sequence
  Description of Artificial Sequence: Synthetic oligonucleotide
  Target: LAMA2; (+) strand; PAM type: YTN; PAM sequence: CTT
ttatttggctcaagctaatt

SEQ ID NO: 342193 - DNA, 20 bp, Artificial Sequence
  Description of Artificial Sequence: Synthetic oligonucleotide
  Target: LAMA2; (+) strand; PAM type: YTN; PAM sequence: TTT
tatttggctcaagctaattc

SEQ ID NO: 342194 - DNA, 20 bp, Artificial Sequence
  Description of Artificial Sequence: Synthetic oligonucleotide
  Target: LAMA2; (+) strand; PAM type: YTN; PAM sequence: TTT
atttggctcaagctaattct

SEQ ID NO: 342195 - DNA, 20 bp, Artificial Sequence
  Description of Artificial Sequence: Synthetic oligonucleotide
  Target: LAMA2; (+) strand; PAM type: YTN; PAM sequence: TTA
tttggctcaagctaattctt

SEQ ID NO: 342196 - DNA, 20 bp, Artificial Sequence
  Description of Artificial Sequence: Synthetic oligonucleotide
  Target: LAMA2; (+) strand; PAM type: YTN; PAM sequence: TTT
ggctcaagctaattctttct

SEQ ID NO: 342197 - DNA, 20 bp, Artificial Sequence
  Description of Artificial Sequence: Synthetic oligonucleotide
  Target: LAMA2; (+) strand; PAM type: YTN; PAM sequence: TTG
gctcaagctaattctttctg

SEQ ID NO: 342198 - DNA, 20 bp, Artificial Sequence
  Description of Artificial Sequence: Synthetic oligonucleotide
  Target: LAMA2; (+) strand; PAM type: YTN; PAM sequence: CTC
aagctaattctttctgttat

SEQ ID NO: 342199 - DNA, 20 bp, Artificial Sequence
  Description of Artificial Sequence: Synthetic oligonucleotide
  Target: LAMA2; (+) strand; PAM type: YTN; PAM sequence: CTA
attctttctgttatttttat

SEQ ID NO: 342200 - DNA, 20 bp, Artificial Sequence
  Description of Artificial Sequence: Synthetic oligonucleotide
  Target: LAMA2; (+) strand; PAM type: YTN; PAM sequence: TTC
tttctgttatttttattatt

SEQ ID NO: 342201 - DNA, 20 bp, Artificial Sequence
  Description of Artificial Sequence: Synthetic oligonucleotide
  Target: LAMA2; (+) strand; PAM type: YTN; PAM sequence: CTT
tctgttatttttattattaa

SEQ ID NO: 342202 - DNA, 20 bp, Artificial Sequence
  Description of Artificial Sequence: Synthetic oligonucleotide
  Target: LAMA2; (+) strand; PAM type: YTN; PAM sequence: TTT
ctgttatttttattattaat

SEQ ID NO: 342203 - DNA, 20 bp, Artificial Sequence
  Description of Artificial Sequence: Synthetic oligonucleotide
  Target: LAMA2; (+) strand; PAM type: YTN; PAM sequence: TTC
tgttatttttattattaatt

SEQ ID NO: 342204 - DNA, 20 bp, Artificial Sequence
  Description of Artificial Sequence: Synthetic oligonucleotide
  Target: LAMA2; (+) strand; PAM type: YTN; PAM sequence: CTG
ttatttttattattaattga

SEQ ID NO: 342205 - DNA, 20 bp, Artificial Sequence
  Description of Artificial Sequence: Synthetic oligonucleotide
  Target: LAMA2; (+) strand; PAM type: YTN; PAM sequence: TTA
tttttattattaattgacta

SEQ ID NO: 342206 - DNA, 20 bp, Artificial Sequence
  Description of Artificial Sequence: Synthetic oligonucleotide
  Target: LAMA2; (+) strand; PAM type: YTN; PAM sequence: TTT
ttattattaattgactactc

SEQ ID NO: 342207 - DNA, 20 bp, Artificial Sequence
  Description of Artificial Sequence: Synthetic oligonucleotide
  Target: LAMA2; (+) strand; PAM type: YTN; PAM sequence: TTT
tattattaattgactactca

SEQ ID NO: 342208 - DNA, 20 bp, Artificial Sequence
  Description of Artificial Sequence: Synthetic oligonucleotide
  Target: LAMA2; (+) strand; PAM type: YTN; PAM sequence: TTT
attattaattgactactcag

SEQ ID NO: 342209 - DNA, 20 bp, Artificial Sequence
  Description of Artificial Sequence: Synthetic oligonucleotide
  Target: LAMA2; (+) strand; PAM type: YTN; PAM sequence: TTA
ttattaattgactactcagg

SEQ ID NO: 342210 - DNA, 20 bp, Artificial Sequence
  Description of Artificial Sequence: Synthetic oligonucleotide
  Target: LAMA2; (+) strand; PAM type: YTN; PAM sequence: TTA
ttaattgactactcaggtaa

SEQ ID NO: 342211 - DNA, 20 bp, Artificial Sequence
  Description of Artificial Sequence: Synthetic oligonucleotide
  Target: LAMA2; (+) strand; PAM type: YTN; PAM sequence: TTA
attgactactcaggtaaaat

SEQ ID NO: 342212 - DNA, 20 bp, Artificial Sequence
  Description of Artificial Sequence: Synthetic oligonucleotide
  Target: LAMA2; (+) strand; PAM type: YTN; PAM sequence: TTG
actactcaggtaaaattcta

SEQ ID NO: 342213 - DNA, 20 bp, Artificial Sequence
  Description of Artificial Sequence: Synthetic oligonucleotide
  Target: LAMA2; (+) strand; PAM type: YTN; PAM sequence: CTA
ctcaggtaaaattctatctg

SEQ ID NO: 342214 - DNA, 20 bp, Artificial Sequence
  Description of Artificial Sequence: Synthetic oligonucleotide
  Target: LAMA2; (+) strand; PAM type: YTN; PAM sequence: CTC
aggtaaaattctatctgaat

SEQ ID NO: 342215 - DNA, 20 bp, Artificial Sequence
  Description of Artificial Sequence: Synthetic oligonucleotide
  Target: LAMA2; (+) strand; PAM type: YTN; PAM sequence: TTC
tatctgaattgaattgacat

SEQ ID NO: 342216 - DNA, 20 bp, Artificial Sequence
  Description of Artificial Sequence: Synthetic oligonucleotide
  Target: LAMA2; (+) strand; PAM type: YTN; PAM sequence: CTA
tctgaattgaattgacatca

SEQ ID NO: 342217 - DNA, 20 bp, Artificial Sequence
  Description of Artificial Sequence: Synthetic oligonucleotide
  Target: LAMA2; (+) strand; PAM type: YTN; PAM sequence: CTG
aattgaattgacatcattga

SEQ ID NO: 342218 - DNA, 20 bp, Artificial Sequence
  Description of Artificial Sequence: Synthetic oligonucleotide
  Target: LAMA2; (+) strand; PAM type: YTN; PAM sequence: TTG
aattgacatcattgatccca

SEQ ID NO: 342219 - DNA, 20 bp, Artificial Sequence
  Description of Artificial Sequence: Synthetic oligonucleotide
  Target: LAMA2; (+) strand; PAM type: YTN; PAM sequence: TTG
acatcattgatcccattgtc

SEQ ID NO: 342220 - DNA, 20 bp, Artificial Sequence
  Description of Artificial Sequence: Synthetic oligonucleotide
  Target: LAMA2; (+) strand; PAM type: YTN; PAM sequence: TTG
atcccattgtcagaaaagac

SEQ ID NO: 342221 - DNA, 20 bp, Artificial Sequence
  Description of Artificial Sequence: Synthetic oligonucleotide
  Target: LAMA2; (+) strand; PAM type: YTN; PAM sequence: TTG
tcagaaaagacagccctcta

SEQ ID NO: 342222 - DNA, 20 bp, Artificial Sequence
  Description of Artificial Sequence: Synthetic oligonucleotide
  Target: LAMA2; (+) strand; PAM type: YTN; PAM sequence: CTC
tatcccattcaatttattaa

SEQ ID NO: 342223 - DNA, 20 bp, Artificial Sequence
  Description of Artificial Sequence: Synthetic oligonucleotide
  Target: LAMA2; (+) strand; PAM type: YTN; PAM sequence: CTA
tcccattcaatttattaaac

SEQ ID NO: 342224 - DNA, 20 bp, Artificial Sequence
  Description of Artificial Sequence: Synthetic oligonucleotide
  Target: LAMA2; (+) strand; PAM type: YTN; PAM sequence: TTC
aatttattaaactgctaatc

SEQ ID NO: 342225 - DNA, 20 bp, Artificial Sequence
  Description of Artificial Sequence: Synthetic oligonucleotide
  Target: LAMA2; (+) strand; PAM type: YTN; PAM sequence: TTT
attaaactgctaatcttctg

SEQ ID NO: 342226 - DNA, 20 bp, Artificial Sequence
  Description of Artificial Sequence: Synthetic oligonucleotide
  Target: LAMA2; (+) strand; PAM type: YTN; PAM sequence: TTA
ttaaactgctaatcttctgg

SEQ ID NO: 342227 - DNA, 20 bp, Artificial Sequence
  Description of Artificial Sequence: Synthetic oligonucleotide
  Target: LAMA2; (+) strand; PAM type: YTN; PAM sequence: TTA
aactgctaatcttctggact

SEQ ID NO: 342228 - DNA, 20 bp, Artificial Sequence
  Description of Artificial Sequence: Synthetic oligonucleotide
  Target: LAMA2; (+) strand; PAM type: YTN; PAM sequence: CTG
ctaatcttctggacttttct

SEQ ID NO: 342229 - DNA, 20 bp, Artificial Sequence
  Description of Artificial Sequence: Synthetic oligonucleotide
  Target: LAMA2; (+) strand; PAM type: YTN; PAM sequence: CTA
atcttctggacttttcttca

SEQ ID NO: 342230 - DNA, 20 bp, Artificial Sequence
  Description of Artificial Sequence: Synthetic oligonucleotide
  Target: LAMA2; (+) strand; PAM type: YTN; PAM sequence: CTT
ctggacttttcttcaaagct

SEQ ID NO: 342231 - DNA, 20 bp, Artificial Sequence
  Description of Artificial Sequence: Synthetic oligonucleotide
  Target: LAMA2; (+) strand; PAM type: YTN; PAM sequence: TTC
tggacttttcttcaaagctt

SEQ ID NO: 342232 - DNA, 20 bp, Artificial Sequence
  Description of Artificial Sequence: Synthetic oligonucleotide
  Target: LAMA2; (+) strand; PAM type: YTN; PAM sequence: CTG
gacttttcttcaaagcttgt

SEQ ID NO: 342233 - DNA, 20 bp, Artificial Sequence
  Description of Artificial Sequence: Synthetic oligonucleotide
  Target: LAMA2; (+) strand; PAM type: YTN; PAM sequence: CTT
ttcttcaaagcttgtcagtt

SEQ ID NO: 342234 - DNA, 20 bp, Artificial Sequence
  Description of Artificial Sequence: Synthetic oligonucleotide
  Target: LAMA2; (+) strand; PAM type: YTN; PAM sequence: TTT
tcttcaaagcttgtcagttt

SEQ ID NO: 342235 - DNA, 20 bp, Artificial Sequence
  Description of Artificial Sequence: Synthetic oligonucleotide
  Target: LAMA2; (+) strand; PAM type: YTN; PAM sequence: TTT
cttcaaagcttgtcagtttt

SEQ ID NO: 342236 - DNA, 20 bp, Artificial Sequence
  Description of Artificial Sequence: Synthetic oligonucleotide
  Target: LAMA2; (+) strand; PAM type: YTN; PAM sequence: TTC
ttcaaagcttgtcagttttg

SEQ ID NO: 342237 - DNA, 20 bp, Artificial Sequence
  Description of Artificial Sequence: Synthetic oligonucleotide
  Target: LAMA2; (+) strand; PAM type: YTN; PAM sequence: CTT
caaagcttgtcagttttgat

SEQ ID NO: 342238 - DNA, 20 bp, Artificial Sequence
  Description of Artificial Sequence: Synthetic oligonucleotide
  Target: LAMA2; (+) strand; PAM type: YTN; PAM sequence: TTC
aaagcttgtcagttttgatc

SEQ ID NO: 342239 - DNA, 20 bp, Artificial Sequence
  Description of Artificial Sequence: Synthetic oligonucleotide
  Target: LAMA2; (+) strand; PAM type: YTN; PAM sequence: CTT
gtcagttttgatccaaaaaa

SEQ ID NO: 342240 - DNA, 20 bp, Artificial Sequence
  Description of Artificial Sequence: Synthetic oligonucleotide
  Target: LAMA2; (+) strand; PAM type: YTN; PAM sequence: TTG
tcagttttgatccaaaaaaa

SEQ ID NO: 342241 - DNA, 20 bp, Artificial Sequence
  Description of Artificial Sequence: Synthetic oligonucleotide
  Target: LAMA2; (+) strand; PAM type: YTN; PAM sequence: TTT
tgatccaaaaaaacttcaga

SEQ ID NO: 342242 - DNA, 20 bp, Artificial Sequence
  Description of Artificial Sequence: Synthetic oligonucleotide
  Target: LAMA2; (+) strand; PAM type: YTN; PAM sequence: TTT
gatccaaaaaaacttcagat

SEQ ID NO: 342243 - DNA, 20 bp, Artificial Sequence
  Description of Artificial Sequence: Synthetic oligonucleotide
  Target: LAMA2; (+) strand; PAM type: YTN; PAM sequence: TTG
atccaaaaaaacttcagatt

SEQ ID NO: 342244 - DNA, 20 bp, Artificial Sequence
  Description of Artificial Sequence: Synthetic oligonucleotide
  Target: LAMA2; (+) strand; PAM type: YTN; PAM sequence: CTT
cagatttcattgtgtggacc

SEQ ID NO: 342245 - DNA, 20 bp, Artificial Sequence
  Description of Artificial Sequence: Synthetic oligonucleotide
  Target: LAMA2; (+) strand; PAM type: YTN; PAM sequence: TTC
agatttcattgtgtggacct

SEQ ID NO: 342246 - DNA, 20 bp, Artificial Sequence
  Description of Artificial Sequence: Synthetic oligonucleotide
  Target: LAMA2; (+) strand; PAM type: YTN; PAM sequence: TTT
cattgtgtggacctgttact

SEQ ID NO: 342247 - DNA, 20 bp, Artificial Sequence
  Description of Artificial Sequence: Synthetic oligonucleotide
  Target: LAMA2; (+) strand; PAM type: YTN; PAM sequence: TTC
attgtgtggacctgttactt

SEQ ID NO: 342248 - DNA, 20 bp, Artificial Sequence
  Description of Artificial Sequence: Synthetic oligonucleotide
  Target: LAMA2; (+) strand; PAM type: YTN; PAM sequence: TTG
tgtggacctgttacttcttg

SEQ ID NO: 342249 - DNA, 20 bp, Artificial Sequence
  Description of Artificial Sequence: Synthetic oligonucleotide
  Target: LAMA2; (+) strand; PAM type: YTN; PAM sequence: CTG
ttacttcttgtgtgaaaaac

SEQ ID NO: 342250 - DNA, 20 bp, Artificial Sequence
  Description of Artificial Sequence: Synthetic oligonucleotide
  Target: LAMA2; (+) strand; PAM type: YTN; PAM sequence: TTA
cttcttgtgtgaaaaacagt

SEQ ID NO: 342251 - DNA, 20 bp, Artificial Sequence
  Description of Artificial Sequence: Synthetic oligonucleotide
  Target: LAMA2; (+) strand; PAM type: YTN; PAM sequence: CTT
cttgtgtgaaaaacagtatg

SEQ ID NO: 342252 - DNA, 20 bp, Artificial Sequence
  Description of Artificial Sequence: Synthetic oligonucleotide
  Target: LAMA2; (+) strand; PAM type: YTN; PAM sequence: TTC
ttgtgtgaaaaacagtatgg

SEQ ID NO: 342253 - DNA, 20 bp, Artificial Sequence
  Description of Artificial Sequence: Synthetic oligonucleotide
  Target: LAMA2; (+) strand; PAM type: YTN; PAM sequence: CTT
gtgtgaaaaacagtatggtt

SEQ ID NO: 342254 - DNA, 20 bp, Artificial Sequence
  Description of Artificial Sequence: Synthetic oligonucleotide
  Target: LAMA2; (+) strand; PAM type: YTN; PAM sequence: TTG
tgtgaaaaacagtatggttt

SEQ ID NO: 342255 - DNA, 20 bp, Artificial Sequence
  Description of Artificial Sequence: Synthetic oligonucleotide
  Target: LAMA2; (+) strand; PAM type: YTN; PAM sequence: TTT
catggaatccactcttggcc

SEQ ID NO: 342256 - DNA, 20 bp, Artificial Sequence
  Description of Artificial Sequence: Synthetic oligonucleotide
  Target: LAMA2; (+) strand; PAM type: YTN; PAM sequence: TTC
atggaatccactcttggcca

SEQ ID NO: 342257 - DNA, 20 bp, Artificial Sequence
  Description of Artificial Sequence: Synthetic oligonucleotide
  Target: LAMA2; (+) strand; PAM type: YTN; PAM sequence: CTC
ttggccattgttaatattgt

SEQ ID NO: 342258 - DNA, 20 bp, Artificial Sequence
  Description of Artificial Sequence: Synthetic oligonucleotide
  Target: LAMA2; (+) strand; PAM type: YTN; PAM sequence: CTT
ggccattgttaatattgtac

SEQ ID NO: 342259 - DNA, 20 bp, Artificial Sequence
  Description of Artificial Sequence: Synthetic oligonucleotide
  Target: LAMA2; (+) strand; PAM type: YTN; PAM sequence: TTG
gccattgttaatattgtaca

SEQ ID NO: 342260 - DNA, 20 bp, Artificial Sequence
  Description of Artificial Sequence: Synthetic oligonucleotide
  Target: LAMA2; (+) strand; PAM type: YTN; PAM sequence: TTG
ttaatattgtacagataggc

SEQ ID NO: 342261 - DNA, 20 bp, Artificial Sequence
  Description of Artificial Sequence: Synthetic oligonucleotide
  Target: LAMA2; (+) strand; PAM type: YTN; PAM sequence: TTA
atattgtacagataggcaca

SEQ ID NO: 342262 - DNA, 20 bp, Artificial Sequence
  Description of Artificial Sequence: Synthetic oligonucleotide
  Target: LAMA2; (+) strand; PAM type: YTN; PAM sequence: TTG
tacagataggcacacaagca

SEQ ID NO: 342263 - DNA, 20 bp, Artificial Sequence
  Description of Artificial Sequence: Synthetic oligonucleotide
  Target: LAMA2; (+) strand; PAM type: YTN; PAM sequence: TTT
aaatatgctagcaccttatt

SEQ ID NO: 342264 - DNA, 20 bp, Artificial Sequence
  Description of Artificial Sequence: Synthetic oligonucleotide
  Target: LAMA2; (+) strand; PAM type: YTN; PAM sequence: TTA
aatatgctagcaccttattg

SEQ ID NO: 342265 - DNA, 20 bp, Artificial Sequence
  Description of Artificial Sequence: Synthetic oligonucleotide
  Target: LAMA2; (+) strand; PAM type: YTN; PAM sequence: CTA
gcaccttattgcaaaaaaaa

SEQ ID NO: 342266 - DNA, 20 bp, Artificial Sequence
  Description of Artificial Sequence: Synthetic oligonucleotide
  Target: LAMA2; (+) strand; PAM type: YTN; PAM sequence: CTT
attgcaaaaaaaaaaaagtt

SEQ ID NO: 342267 - DNA, 20 bp, Artificial Sequence
  Description of Artificial Sequence: Synthetic oligonucleotide
  Target: LAMA2; (+) strand; PAM type: YTN; PAM sequence: TTA
ttgcaaaaaaaaaaaagttc

SEQ ID NO: 342268 - DNA, 20 bp, Artificial Sequence
  Description of Artificial Sequence: Synthetic oligonucleotide
  Target: LAMA2; (+) strand; PAM type: YTN; PAM sequence: TTG
caaaaaaaaaaaagttctac

SEQ ID NO: 342269 - DNA, 20 bp, Artificial Sequence
  Description of Artificial Sequence: Synthetic oligonucleotide
  Target: LAMA2; (+) strand; PAM type: YTN; PAM sequence: TTC
tacttatattcattgcaatt

SEQ ID NO: 342270 - DNA, 20 bp, Artificial Sequence
  Description of Artificial Sequence: Synthetic oligonucleotide
  Target: LAMA2; (+) strand; PAM type: YTN; PAM sequence: CTA
cttatattcattgcaattta

SEQ ID NO: 342271 - DNA, 20 bp, Artificial Sequence
  Description of Artificial Sequence: Synthetic oligonucleotide
  Target: LAMA2; (+) strand; PAM type: YTN; PAM sequence: CTT
atattcattgcaatttatta

SEQ ID NO: 342272 - DNA, 20 bp, Artificial Sequence
  Description of Artificial Sequence: Synthetic oligonucleotide
  Target: LAMA2; (+) strand; PAM type: YTN; PAM sequence: TTA
tattcattgcaatttattat

SEQ ID NO: 342273 - DNA, 20 bp, Artificial Sequence
  Description of Artificial Sequence: Synthetic oligonucleotide
  Target: LAMA2; (+) strand; PAM type: YTN; PAM sequence: TTC
attgcaatttattatagaaa

SEQ ID NO: 342274 - DNA, 20 bp, Artificial Sequence
  Description of Artificial Sequence: Synthetic oligonucleotide
  Target: LAMA2; (+) strand; PAM type: YTN; PAM sequence: TTG
caatttattatagaaaatgt

SEQ ID NO: 342275 - DNA, 20 bp, Artificial Sequence
  Description of Artificial Sequence: Synthetic oligonucleotide
  Target: LAMA2; (+) strand; PAM type: YTN; PAM sequence: TTT
attatagaaaatgttttctg

SEQ ID NO: 342276 - DNA, 20 bp, Artificial Sequence
  Description of Artificial Sequence: Synthetic oligonucleotide
  Target: LAMA2; (+) strand; PAM type: YTN; PAM sequence: TTA
ttatagaaaatgttttctga

SEQ ID NO: 342277 - DNA, 20 bp, Artificial Sequence
  Description of Artificial Sequence: Synthetic oligonucleotide
  Target: LAMA2; (+) strand; PAM type: YTN; PAM sequence: TTA
tagaaaatgttttctgaact

SEQ ID NO: 342278 - DNA, 20 bp, Artificial Sequence
  Description of Artificial Sequence: Synthetic oligonucleotide
  Target: LAMA2; (+) strand; PAM type: YTN; PAM sequence: TTT
tctgaactgaaaattataaa

SEQ ID NO: 342279 - DNA, 20 bp, Artificial Sequence
  Description of Artificial Sequence: Synthetic oligonucleotide
  Target: LAMA2; (+) strand; PAM type: YTN; PAM sequence: TTT
ctgaactgaaaattataaac

SEQ ID NO: 342280 - DNA, 20 bp, Artificial Sequence
  Description of Artificial Sequence: Synthetic oligonucleotide
  Target: LAMA2; (+) strand; PAM type: YTN; PAM sequence: TTC
tgaactgaaaattataaact

SEQ ID NO: 342281 - DNA, 20 bp, Artificial Sequence
  Description of Artificial Sequence: Synthetic oligonucleotide
  Target: LAMA2; (+) strand; PAM type: YTN; PAM sequence: CTG
aactgaaaattataaactgt

SEQ ID NO: 342282 - DNA, 20 bp, Artificial Sequence
  Description of Artificial Sequence: Synthetic oligonucleotide
  Target: LAMA2; (+) strand; PAM type: YTN; PAM sequence: CTG
aaaattataaactgttgtca

SEQ ID NO: 342283 - DNA, 20 bp, Artificial Sequence
  Description of Artificial Sequence: Synthetic oligonucleotide
  Target: LAMA2; (+) strand; PAM type: YTN; PAM sequence: TTA
taaactgttgtcaataattc

SEQ ID NO: 342284 - DNA, 20 bp, Artificial Sequence
  Description of Artificial Sequence: Synthetic oligonucleotide
  Target: LAMA2; (+) strand; PAM type: YTN; PAM sequence: CTG
ttgtcaataattcaggtccc

SEQ ID NO: 342285 - DNA, 20 bp, Artificial Sequence
  Description of Artificial Sequence: Synthetic oligonucleotide
  Target: LAMA2; (+) strand; PAM type: YTN; PAM sequence: TTG
tcaataattcaggtcccaat

SEQ ID NO: 342286 - DNA, 20 bp, Artificial Sequence
  Description of Artificial Sequence: Synthetic oligonucleotide
  Target: LAMA2; (+) strand; PAM type: YTN; PAM sequence: TTC
aggtcccaattctgaagtgt

SEQ ID NO: 342287 - DNA, 20 bp, Artificial Sequence
  Description of Artificial Sequence: Synthetic oligonucleotide
  Target: LAMA2; (+) strand; PAM type: YTN; PAM sequence: TTC
tgaagtgtattgagattacc

SEQ ID NO: 342288 - DNA, 20 bp, Artificial Sequence
  Description of Artificial Sequence: Synthetic oligonucleotide
  Target: LAMA2; (+) strand; PAM type: YTN; PAM sequence: CTG
aagtgtattgagattaccaa

SEQ ID NO: 342289 - DNA, 20 bp, Artificial Sequence
  Description of Artificial Sequence: Synthetic oligonucleotide
  Target: LAMA2; (+) strand; PAM type: YTN; PAM sequence: TTG
agattaccaaactgtgaagc

SEQ ID NO: 342290 - DNA, 20 bp, Artificial Sequence
  Description of Artificial Sequence: Synthetic oligonucleotide
  Target: LAMA2; (+) strand; PAM type: YTN; PAM sequence: TTA
ccaaactgtgaagcaggaac

SEQ ID NO: 342291 - DNA, 20 bp, Artificial Sequence
  Description of Artificial Sequence: Synthetic oligonucleotide
  Target: LAMA2; (+) strand; PAM type: YTN; PAM sequence: CTG
tgaagcaggaacaatattta

SEQ ID NO: 342292 - DNA, 20 bp, Artificial Sequence
  Description of Artificial Sequence: Synthetic oligonucleotide
  Target: LAMA2; (+) strand; PAM type: YTN; PAM sequence: TTT
attctctacataaagaaaga

SEQ ID NO: 342293 - DNA, 20 bp, Artificial Sequence
  Description of Artificial Sequence: Synthetic oligonucleotide
  Target: LAMA2; (+) strand; PAM type: YTN; PAM sequence: TTA
ttctctacataaagaaagaa

SEQ ID NO: 342294 - DNA, 20 bp, Artificial Sequence
  Description of Artificial Sequence: Synthetic oligonucleotide
  Target: LAMA2; (+) strand; PAM type: YTN; PAM sequence: TTC
tctacataaagaaagaaaag

SEQ ID NO: 342295 - DNA, 20 bp, Artificial Sequence
  Description of Artificial Sequence: Synthetic oligonucleotide
  Target: LAMA2; (+) strand; PAM type: YTN; PAM sequence: CTC
tacataaagaaagaaaagaa

SEQ ID NO: 342296 - DNA, 20 bp, Artificial Sequence
  Description of Artificial Sequence: Synthetic oligonucleotide
  Target: LAMA2; (+) strand; PAM type: YTN; PAM sequence: CTA
cataaagaaagaaaagaact

SEQ ID NO: 342297 - DNA, 20 bp, Artificial Sequence
  Description of Artificial Sequence: Synthetic oligonucleotide
  Target: LAMA2; (+) strand; PAM type: YTN; PAM sequence: CTA
ttaaatgaacttgatattat

SEQ ID NO: 342298 - DNA, 20 bp, Artificial Sequence
  Description of Artificial Sequence: Synthetic oligonucleotide
  Target: LAMA2; (+) strand; PAM type: YTN; PAM sequence: TTA
aatgaacttgatattataag

SEQ ID NO: 342299 - DNA, 20 bp, Artificial Sequence
  Description of Artificial Sequence: Synthetic oligonucleotide
  Target: LAMA2; (+) strand; PAM type: YTN; PAM sequence: CTT
gatattataagaagcacttc

SEQ ID NO: 342300 - DNA, 20 bp, Artificial Sequence
  Description of Artificial Sequence: Synthetic oligonucleotide
  Target: LAMA2; (+) strand; PAM type: YTN; PAM sequence: TTG
atattataagaagcacttca

SEQ ID NO: 342301 - DNA, 20 bp, Artificial Sequence
  Description of Artificial Sequence: Synthetic oligonucleotide
  Target: LAMA2; (+) strand; PAM type: YTN; PAM sequence: TTA
taagaagcacttcaggttgt

SEQ ID NO: 342302 - DNA, 20 bp, Artificial Sequence
  Description of Artificial Sequence: Synthetic oligonucleotide
  Target: LAMA2; (+) strand; PAM type: YTN; PAM sequence: CTT
caggttgtcaaaactcatat

SEQ ID NO: 342303 - DNA, 20 bp, Artificial Sequence
  Description of Artificial Sequence: Synthetic oligonucleotide
  Target: LAMA2; (+) strand; PAM type: YTN; PAM sequence: TTC
aggttgtcaaaactcatatt

SEQ ID NO: 342304 - DNA, 20 bp, Artificial Sequence
  Description of Artificial Sequence: Synthetic oligonucleotide
  Target: LAMA2; (+) strand; PAM type: YTN; PAM sequence: TTG
tcaaaactcatattatgaca

SEQ ID NO: 342305 - DNA, 20 bp, Artificial Sequence
  Description of Artificial Sequence: Synthetic oligonucleotide
  Target: LAMA2; (+) strand; PAM type: YTN; PAM sequence: CTC
atattatgacatctataatc

SEQ ID NO: 342306 - DNA, 20 bp, Artificial Sequence
  Description of Artificial Sequence: Synthetic oligonucleotide
  Target: LAMA2; (+) strand; PAM type: YTN; PAM sequence: TTA
tgacatctataatctggcct

SEQ ID NO: 342307 - DNA, 20 bp, Artificial Sequence
  Description of Artificial Sequence: Synthetic oligonucleotide
  Target: LAMA2; (+) strand; PAM type: YTN; PAM sequence: CTA
taatctggcctaaaatcaca

SEQ ID NO: 342308 - DNA, 20 bp, Artificial Sequence
  Description of Artificial Sequence: Synthetic oligonucleotide
  Target: LAMA2; (+) strand; PAM type: YTN; PAM sequence: CTG
gcctaaaatcacaagcaaac

SEQ ID NO: 342309 - DNA, 20 bp, Artificial Sequence
  Description of Artificial Sequence: Synthetic oligonucleotide
  Target: LAMA2; (+) strand; PAM type: YTN; PAM sequence: CTA
aaatcacaagcaaacattcc

SEQ ID NO: 342310 - DNA, 20 bp, Artificial Sequence
  Description of Artificial Sequence: Synthetic oligonucleotide
  Target: LAMA2; (+) strand; PAM type: YTN; PAM sequence: TTC
catgatggaatggcagatca

SEQ ID NO: 342311 - DNA, 20 bp, Artificial Sequence
  Description of Artificial Sequence: Synthetic oligonucleotide
  Target: LAMA2; (+) strand; PAM type: YTN; PAM sequence: CTA
gatttgctggttattatcag

SEQ ID NO: 342312 - DNA, 20 bp, Artificial Sequence
  Description of Artificial Sequence: Synthetic oligonucleotide
  Target: LAMA2; (+) strand; PAM type: YTN; PAM sequence: TTT
gctggttattatcagtttta

SEQ ID NO: 342313 - DNA, 20 bp, Artificial Sequence
  Description of Artificial Sequence: Synthetic oligonucleotide
  Target: LAMA2; (+) strand; PAM type: YTN; PAM sequence: TTG
ctggttattatcagttttat

SEQ ID NO: 342314 - DNA, 20 bp, Artificial Sequence
  Description of Artificial Sequence: Synthetic oligonucleotide
  Target: LAMA2; (+) strand; PAM type: YTN; PAM sequence: CTG
gttattatcagttttatttt

SEQ ID NO: 342315 - DNA, 20 bp, Artificial Sequence
  Description of Artificial Sequence: Synthetic oligonucleotide
  Target: LAMA2; (+) strand; PAM type: YTN; PAM sequence: TTA
ttatcagttttattttacgt

SEQ ID NO: 342316 - DNA, 20 bp, Artificial Sequence
  Description of Artificial Sequence: Synthetic oligonucleotide
  Target: LAMA2; (+) strand; PAM type: YTN; PAM sequence: TTA
tcagttttattttacgttac

SEQ ID NO: 342317 - DNA, 20 bp, Artificial Sequence
  Description of Artificial Sequence: Synthetic oligonucleotide
  Target: LAMA2; (+) strand; PAM type: YTN; PAM sequence: TTT
tattttacgttacctaagta

SEQ ID NO: 342318 - DNA, 20 bp, Artificial Sequence
  Description of Artificial Sequence: Synthetic oligonucleotide
  Target: LAMA2; (+) strand; PAM type: YTN; PAM sequence: TTT
attttacgttacctaagtag

SEQ ID NO: 342319 - DNA, 20 bp, Artificial Sequence
  Description of Artificial Sequence: Synthetic oligonucleotide
  Target: LAMA2; (+) strand; PAM type: YTN; PAM sequence: TTA
ttttacgttacctaagtaga

SEQ ID NO: 342320 - DNA, 20 bp, Artificial Sequence
  Description of Artificial Sequence: Synthetic oligonucleotide
  Target: LAMA2; (+) strand; PAM type: YTN; PAM sequence: TTT
tacgttacctaagtagaatt

SEQ ID NO: 342321 - DNA, 20 bp, Artificial Sequence
  Description of Artificial Sequence: Synthetic oligonucleotide
  Target: LAMA2; (+) strand; PAM type: YTN; PAM sequence: TTT
acgttacctaagtagaattt

SEQ ID NO: 342322 - DNA, 20 bp, Artificial Sequence
  Description of Artificial Sequence: Synthetic oligonucleotide
  Target: LAMA2; (+) strand; PAM type: YTN; PAM sequence: TTA
cgttacctaagtagaattta

SEQ ID NO: 342323 - DNA, 20 bp, Artificial Sequence
  Description of Artificial Sequence: Synthetic oligonucleotide
  Target: LAMA2; (+) strand; PAM type: YTN; PAM sequence: TTA
cctaagtagaatttaagcct

SEQ ID NO: 342324 - DNA, 20 bp, Artificial Sequence
  Description of Artificial Sequence: Synthetic oligonucleotide
  Target: LAMA2; (+) strand; PAM type: YTN; PAM sequence: CTA
agtagaatttaagcctttca

SEQ ID NO: 342325 - DNA, 20 bp, Artificial Sequence
  Description of Artificial Sequence: Synthetic oligonucleotide
  Target: LAMA2; (+) strand; PAM type: YTN; PAM sequence: TTT
aagcctttcagttaaaatat

SEQ ID NO: 342326 - DNA, 20 bp, Artificial Sequence
  Description of Artificial Sequence: Synthetic oligonucleotide
  Target: LAMA2; (+) strand; PAM type: YTN; PAM sequence: TTA
agcctttcagttaaaatatg

SEQ ID NO: 342327 - DNA, 20 bp, Artificial Sequence
  Description of Artificial Sequence: Synthetic oligonucleotide
  Target: LAMA2; (+) strand; PAM type: YTN; PAM sequence: CTT
tcagttaaaatatgactccc

SEQ ID NO: 342328 - DNA, 20 bp, Artificial Sequence
  Description of Artificial Sequence: Synthetic oligonucleotide
  Target: LAMA2; (+) strand; PAM type: YTN; PAM sequence: TTT
cagttaaaatatgactccca

SEQ ID NO: 342329 - DNA, 20 bp, Artificial Sequence
  Description of Artificial Sequence: Synthetic oligonucleotide
  Target: LAMA2; (+) strand; PAM type: YTN; PAM sequence: TTC
agttaaaatatgactcccaa

SEQ ID NO: 342330 - DNA, 20 bp, Artificial Sequence
  Description of Artificial Sequence: Synthetic oligonucleotide
  Target: LAMA2; (+) strand; PAM type: YTN; PAM sequence: TTA
aaatatgactcccaagcaaa

SEQ ID NO: 342331 - DNA, 20 bp, Artificial Sequence
  Description of Artificial Sequence: Synthetic oligonucleotide
  Target: LAMA2; (+) strand; PAM type: YTN; PAM sequence: CTC
ccaagcaaaaggaagaggat

SEQ ID NO: 342332 - DNA, 20 bp, Artificial Sequence
  Description of Artificial Sequence: Synthetic oligonucleotide
  Target: LAMA2; (+) strand; PAM type: YTN; PAM sequence: TTA
atggattaactattgtttgt

SEQ ID NO: 342333 - DNA, 20 bp, Artificial Sequence
  Description of Artificial Sequence: Synthetic oligonucleotide
  Target: LAMA2; (+) strand; PAM type: YTN; PAM sequence: TTA
actattgtttgtgttatcaa

SEQ ID NO: 342334 - DNA, 20 bp, Artificial Sequence
  Description of Artificial Sequence: Synthetic oligonucleotide
  Target: LAMA2; (+) strand; PAM type: YTN; PAM sequence: CTA
ttgtttgtgttatcaataat

SEQ ID NO: 342335 - DNA, 20 bp, Artificial Sequence
  Description of Artificial Sequence: Synthetic oligonucleotide
  Target: LAMA2; (+) strand; PAM type: YTN; PAM sequence: TTG
tttgtgttatcaataatatt

SEQ ID NO: 342336 - DNA, 20 bp, Artificial Sequence
  Description of Artificial Sequence: Synthetic oligonucleotide
  Target: LAMA2; (+) strand; PAM type: YTN; PAM sequence: TTT
gtgttatcaataatattggc

SEQ ID NO: 342337 - DNA, 20 bp, Artificial Sequence
  Description of Artificial Sequence: Synthetic oligonucleotide
  Target: LAMA2; (+) strand; PAM type: YTN; PAM sequence: TTG
tgttatcaataatattggca

SEQ ID NO: 342338 - DNA, 20 bp, Artificial Sequence
  Description of Artificial Sequence: Synthetic oligonucleotide
  Target: LAMA2; (+) strand; PAM type: YTN; PAM sequence: TTA
tcaataatattggcaataac

SEQ ID NO: 342339 - DNA, 20 bp, Artificial Sequence
  Description of Artificial Sequence: Synthetic oligonucleotide
  Target: LAMA2; (+) strand; PAM type: YTN; PAM sequence: TTG
gcaataactatttgtctatg

SEQ ID NO: 342340 - DNA, 20 bp, Artificial Sequence
  Description of Artificial Sequence: Synthetic oligonucleotide
  Target: LAMA2; (+) strand; PAM type: YTN; PAM sequence: CTA
tttgtctatggtgctgtgtc

SEQ ID NO: 342341 - DNA, 20 bp, Artificial Sequence
  Description of Artificial Sequence: Synthetic oligonucleotide
  Target: LAMA2; (+) strand; PAM type: YTN; PAM sequence: TTT
gtctatggtgctgtgtcagt

SEQ ID NO: 342342 - DNA, 20 bp, Artificial Sequence
  Description of Artificial Sequence: Synthetic oligonucleotide
  Target: LAMA2; (+) strand; PAM type: YTN; PAM sequence: TTG
tctatggtgctgtgtcagtt

SEQ ID NO: 342343 - DNA, 20 bp, Artificial Sequence
  Description of Artificial Sequence: Synthetic oligonucleotide
  Target: LAMA2; (+) strand; PAM type: YTN; PAM sequence: CTA
tggtgctgtgtcagttacaa

SEQ ID NO: 342344 - DNA, 20 bp, Artificial Sequence
  Description of Artificial Sequence: Synthetic oligonucleotide
  Target: LAMA2; (+) strand; PAM type: YTN; PAM sequence: CTG
tgtcagttacaaggcactct

SEQ ID NO: 342345 - DNA, 20 bp, Artificial Sequence
  Description of Artificial Sequence: Synthetic oligonucleotide
  Target: LAMA2; (+) strand; PAM type: YTN; PAM sequence: TTA
caaggcactctgccatgcat

SEQ ID NO: 342346 - DNA, 20 bp, Artificial Sequence
  Description of Artificial Sequence: Synthetic oligonucleotide
  Target: LAMA2; (+) strand; PAM type: YTN; PAM sequence: CTC
tgccatgcattcttccatct

SEQ ID NO: 342347 - DNA, 20 bp, Artificial Sequence
  Description of Artificial Sequence: Synthetic oligonucleotide
  Target: LAMA2; (+) strand; PAM type: YTN; PAM sequence: CTG
ccatgcattcttccatctga

SEQ ID NO: 342348 - DNA, 20 bp, Artificial Sequence
  Description of Artificial Sequence: Synthetic oligonucleotide
  Target: LAMA2; (+) strand; PAM type: YTN; PAM sequence: TTC
ttccatctgatcctcaccaa

SEQ ID NO: 342349 - DNA, 20 bp, Artificial Sequence
  Description of Artificial Sequence: Synthetic oligonucleotide
  Target: LAMA2; (+) strand; PAM type: YTN; PAM sequence: CTT
ccatctgatcctcaccaaag

SEQ ID NO: 342350 - DNA, 20 bp, Artificial Sequence
  Description of Artificial Sequence: Synthetic oligonucleotide
  Target: LAMA2; (+) strand; PAM type: YTN; PAM sequence: TTC
catctgatcctcaccaaagc

SEQ ID NO: 342351 - DNA, 20 bp, Artificial Sequence
  Description of Artificial Sequence: Synthetic oligonucleotide
  Target: LAMA2; (+) strand; PAM type: YTN; PAM sequence: CTG
atcctcaccaaagccttgga

SEQ ID NO: 342352 - DNA, 20 bp, Artificial Sequence
  Description of Artificial Sequence: Synthetic oligonucleotide
  Target: LAMA2; (+) strand; PAM type: YTN; PAM sequence: CTC
accaaagccttggagatgct

SEQ ID NO: 342353 - DNA, 20 bp, Artificial Sequence
  Description of Artificial Sequence: Synthetic oligonucleotide
  Target: LAMA2; (+) strand; PAM type: YTN; PAM sequence: CTT
ggagatgcttcaagccaaaa

SEQ ID NO: 342354 - DNA, 20 bp, Artificial Sequence
  Description of Artificial Sequence: Synthetic oligonucleotide
  Target: LAMA2; (+) strand; PAM type: YTN; PAM sequence: TTG
gagatgcttcaagccaaaat

SEQ ID NO: 342355 - DNA, 20 bp, Artificial Sequence
  Description of Artificial Sequence: Synthetic oligonucleotide
  Target: LAMA2; (+) strand; PAM type: YTN; PAM sequence: CTT
caagccaaaattgttattat

SEQ ID NO: 342356 - DNA, 20 bp, Artificial Sequence
  Description of Artificial Sequence: Synthetic oligonucleotide
  Target: LAMA2; (+) strand; PAM type: YTN; PAM sequence: TTC
aagccaaaattgttattatt

SEQ ID NO: 342357 - DNA, 20 bp, Artificial Sequence
  Description of Artificial Sequence: Synthetic oligonucleotide
  Target: LAMA2; (+) strand; PAM type: YTN; PAM sequence: TTG
ttattattctcattttacag

SEQ ID NO: 342358 - DNA, 20 bp, Artificial Sequence
  Description of Artificial Sequence: Synthetic oligonucleotide
  Target: LAMA2; (+) strand; PAM type: YTN; PAM sequence: TTA
ttattctcattttacagatg

SEQ ID NO: 342359 - DNA, 20 bp, Artificial Sequence
  Description of Artificial Sequence: Synthetic oligonucleotide
  Target: LAMA2; (+) strand; PAM type: YTN; PAM sequence: TTA
ttctcattttacagatggag

SEQ ID NO: 342360 - DNA, 20 bp, Artificial Sequence
  Description of Artificial Sequence: Synthetic oligonucleotide
  Target: LAMA2; (+) strand; PAM type: YTN; PAM sequence: TTC
tcattttacagatggaggtg

SEQ ID NO: 342361 - DNA, 20 bp, Artificial Sequence
  Description of Artificial Sequence: Synthetic oligonucleotide
  Target: LAMA2; (+) strand; PAM type: YTN; PAM sequence: CTC
attttacagatggaggtgaa

SEQ ID NO: 342362 - DNA, 20 bp, Artificial Sequence
  Description of Artificial Sequence: Synthetic oligonucleotide
  Target: LAMA2; (+) strand; PAM type: YTN; PAM sequence: TTT
tacagatggaggtgaaggaa

SEQ ID NO: 342363 - DNA, 20 bp, Artificial Sequence
  Description of Artificial Sequence: Synthetic oligonucleotide
  Target: LAMA2; (+) strand; PAM type: YTN; PAM sequence: TTT
acagatggaggtgaaggaac

SEQ ID NO: 342364 - DNA, 20 bp, Artificial Sequence
  Description of Artificial Sequence: Synthetic oligonucleotide
  Target: LAMA2; (+) strand; PAM type: YTN; PAM sequence: TTA
cagatggaggtgaaggaact

SEQ ID NO: 342365 - DNA, 20 bp, Artificial Sequence
  Description of Artificial Sequence: Synthetic oligonucleotide
  Target: LAMA2; (+) strand; PAM type: YTN; PAM sequence: CTG
atttgaggtcacactgtggt

SEQ ID NO: 342366 - DNA, 20 bp, Artificial Sequence
  Description of Artificial Sequence: Synthetic oligonucleotide
  Target: LAMA2; (+) strand; PAM type: YTN; PAM sequence: TTT
gaggtcacactgtggtaaat

SEQ ID NO: 342367 - DNA, 20 bp, Artificial Sequence
  Description of Artificial Sequence: Synthetic oligonucleotide
  Target: LAMA2; (+) strand; PAM type: YTN; PAM sequence: TTG
aggtcacactgtggtaaatg

SEQ ID NO: 342368 - DNA, 20 bp, Artificial Sequence
  Description of Artificial Sequence: Synthetic oligonucleotide
  Target: LAMA2; (+) strand; PAM type: YTN; PAM sequence: CTG
tggtaaatgttcaacactaa

SEQ ID NO: 342369 - DNA, 20 bp, Artificial Sequence
  Description of Artificial Sequence: Synthetic oligonucleotide
  Target: LAMA2; (+) strand; PAM type: YTN; PAM sequence: TTC
aacactaatctctggtccag

SEQ ID NO: 342370 - DNA, 20 bp, Artificial Sequence
  Description of Artificial Sequence: Synthetic oligonucleotide
  Target: LAMA2; (+) strand; PAM type: YTN; PAM sequence: CTA
atctctggtccaggtccagt

SEQ ID NO: 342371 - DNA, 20 bp, Artificial Sequence
  Description of Artificial Sequence: Synthetic oligonucleotide
  Target: LAMA2; (+) strand; PAM type: YTN; PAM sequence: CTC
tggtccaggtccagtccaga

SEQ ID NO: 342372 - DNA, 20 bp, Artificial Sequence
  Description of Artificial Sequence: Synthetic oligonucleotide
  Target: LAMA2; (+) strand; PAM type: YTN; PAM sequence: CTG
gtccaggtccagtccagatc

SEQ ID NO: 342373 - DNA, 20 bp, Artificial Sequence
  Description of Artificial Sequence: Synthetic oligonucleotide
  Target: LAMA2; (+) strand; PAM type: YTN; PAM sequence: CTT
ctgatggcaaaccttataat

SEQ ID NO: 342374 - DNA, 20 bp, Artificial Sequence
  Description of Artificial Sequence: Synthetic oligonucleotide
  Target: LAMA2; (+) strand; PAM type: YTN; PAM sequence: TTC
tgatggcaaaccttataatc

SEQ ID NO: 342375 - DNA, 20 bp, Artificial Sequence
  Description of Artificial Sequence: Synthetic oligonucleotide
  Target: LAMA2; (+) strand; PAM type: YTN; PAM sequence: CTG
atggcaaaccttataatcat

SEQ ID NO: 342376 - DNA, 20 bp, Artificial Sequence
  Description of Artificial Sequence: Synthetic oligonucleotide
  Target: LAMA2; (+) strand; PAM type: YTN; PAM sequence: CTT
ataatcattccacttcataa

SEQ ID NO: 342377 - DNA, 20 bp, Artificial Sequence
  Description of Artificial Sequence: Synthetic oligonucleotide
  Target: LAMA2; (+) strand; PAM type: YTN; PAM sequence: TTA
taatcattccacttcataaa

SEQ ID NO: 342378 - DNA, 20 bp, Artificial Sequence
  Description of Artificial Sequence: Synthetic oligonucleotide
  Target: LAMA2; (+) strand; PAM type: YTN; PAM sequence: TTC
cacttcataaatggaacact

SEQ ID NO: 342379 - DNA, 20 bp, Artificial Sequence
  Description of Artificial Sequence: Synthetic oligonucleotide
  Target: LAMA2; (+) strand; PAM type: YTN; PAM sequence: CTT
cataaatggaacacttaggt

SEQ ID NO: 342380 - DNA, 20 bp, Artificial Sequence
  Description of Artificial Sequence: Synthetic oligonucleotide
  Target: LAMA2; (+) strand; PAM type: YTN; PAM sequence: TTC
ataaatggaacacttaggtc

SEQ ID NO: 342381 - DNA, 20 bp, Artificial Sequence
  Description of Artificial Sequence: Synthetic oligonucleotide
  Target: LAMA2; (+) strand; PAM type: YTN; PAM sequence: CTT
aggtccaatcagtcattttc

SEQ ID NO: 342382 - DNA, 20 bp, Artificial Sequence
  Description of Artificial Sequence: Synthetic oligonucleotide
  Target: LAMA2; (+) strand; PAM type: YTN; PAM sequence: TTA
ggtccaatcagtcattttct

SEQ ID NO: 342383 - DNA, 20 bp, Artificial Sequence
  Description of Artificial Sequence: Synthetic oligonucleotide
  Target: LAMA2; (+) strand; PAM type: YTN; PAM sequence: TTT
tctaaatgtgtatttactgt

SEQ ID NO: 342384 - DNA, 20 bp, Artificial Sequence
  Description of Artificial Sequence: Synthetic oligonucleotide
  Target: LAMA2; (+) strand; PAM type: YTN; PAM sequence: TTT
ctaaatgtgtatttactgtt

SEQ ID NO: 342385 - DNA, 20 bp, Artificial Sequence
  Description of Artificial Sequence: Synthetic oligonucleotide
  Target: LAMA2; (+) strand; PAM type: YTN; PAM sequence: TTC
taaatgtgtatttactgttg

SEQ ID NO: 342386 - DNA, 20 bp, Artificial Sequence
  Description of Artificial Sequence: Synthetic oligonucleotide
  Target: LAMA2; (+) strand; PAM type: YTN; PAM sequence: CTA
aatgtgtatttactgttggt

SEQ ID NO: 342387 - DNA, 20 bp, Artificial Sequence
  Description of Artificial Sequence: Synthetic oligonucleotide
  Target: LAMA2; (+) strand; PAM type: YTN; PAM sequence: TTT
actgttggtcacaagagttt

SEQ ID NO: 342388 - DNA, 20 bp, Artificial Sequence
  Description of Artificial Sequence: Synthetic oligonucleotide
  Target: LAMA2; (+) strand; PAM type: YTN; PAM sequence: TTA
ctgttggtcacaagagtttg

SEQ ID NO: 342389 - DNA, 20 bp, Artificial Sequence
  Description of Artificial Sequence: Synthetic oligonucleotide
  Target: LAMA2; (+) strand; PAM type: YTN; PAM sequence: CTG
ttggtcacaagagtttgtgt

SEQ ID NO: 342390 - DNA, 20 bp, Artificial Sequence
  Description of Artificial Sequence: Synthetic oligonucleotide
  Target: LAMA2; (+) strand; PAM type: YTN; PAM sequence: TTG
gtcacaagagtttgtgtgac

SEQ ID NO: 342391 - DNA, 20 bp, Artificial Sequence
  Description of Artificial Sequence: Synthetic oligonucleotide
  Target: LAMA2; (+) strand; PAM type: YTN; PAM sequence: TTT
gtgtgacactgtgtggataa

SEQ ID NO: 342392 - DNA, 20 bp, Artificial Sequence
  Description of Artificial Sequence: Synthetic oligonucleotide
  Target: LAMA2; (+) strand; PAM type: YTN; PAM sequence: TTG
tgtgacactgtgtggataat

SEQ ID NO: 342393 - DNA, 20 bp, Artificial Sequence
  Description of Artificial Sequence: Synthetic oligonucleotide
  Target: LAMA2; (+) strand; PAM type: YTN; PAM sequence: CTG
tgtggataattaaatgccat

SEQ ID NO: 342394 - DNA, 20 bp, Artificial Sequence
  Description of Artificial Sequence: Synthetic oligonucleotide
  Target: LAMA2; (+) strand; PAM type: YTN; PAM sequence: TTA
aatgccatccaccatctcta

SEQ ID NO: 342395 - DNA, 20 bp, Artificial Sequence
  Description of Artificial Sequence: Synthetic oligonucleotide
  Target: LAMA2; (+) strand; PAM type: YTN; PAM sequence: CTC
tactcggaaaaacccaaggg

SEQ ID NO: 342396 - DNA, 20 bp, Artificial Sequence
  Description of Artificial Sequence: Synthetic oligonucleotide
  Target: LAMA2; (+) strand; PAM type: YTN; PAM sequence: CTA
ctcggaaaaacccaagggtg

SEQ ID NO: 342397 - DNA, 20 bp, Artificial Sequence
  Description of Artificial Sequence: Synthetic oligonucleotide
  Target: LAMA2; (+) strand; PAM type: YTN; PAM sequence: CTC
ggaaaaacccaagggtgtgt

SEQ ID NO: 342398 - DNA, 20 bp, Artificial Sequence
  Description of Artificial Sequence: Synthetic oligonucleotide
  Target: LAMA2; (+) strand; PAM type: YTN; PAM sequence: TTA
atcagtcttaacaggaaaga

SEQ ID NO: 342399 - DNA, 20 bp, Artificial Sequence
  Description of Artificial Sequence: Synthetic oligonucleotide
  Target: LAMA2; (+) strand; PAM type: YTN; PAM sequence: CTT
aacaggaaagataatgtact

SEQ ID NO: 342400 - DNA, 20 bp, Artificial Sequence
  Description of Artificial Sequence: Synthetic oligonucleotide
  Target: LAMA2; (+) strand; PAM type: YTN; PAM sequence: TTA
acaggaaagataatgtacta

SEQ ID NO: 342401 - DNA, 20 bp, Artificial Sequence
  Description of Artificial Sequence: Synthetic oligonucleotide
  Target: LAMA2; (+) strand; PAM type: YTN; PAM sequence: CTA
ttatcattatggcaaaagta

SEQ ID NO: 342402 - DNA, 20 bp, Artificial Sequence
  Description of Artificial Sequence: Synthetic oligonucleotide
  Target: LAMA2; (+) strand; PAM type: YTN; PAM sequence: TTA
tcattatggcaaaagtacac

SEQ ID NO: 342403 - DNA, 20 bp, Artificial Sequence
  Description of Artificial Sequence: Synthetic oligonucleotide
  Target: LAMA2; (+) strand; PAM type: YTN; PAM sequence: TTA
tggcaaaagtacacttgaaa

SEQ ID NO: 342404 - DNA, 20 bp, Artificial Sequence
  Description of Artificial Sequence: Synthetic oligonucleotide
  Target: LAMA2; (+) strand; PAM type: YTN; PAM sequence: CTT
gaaaatacaacaaaggatat

SEQ ID NO: 342405 - DNA, 20 bp, Artificial Sequence
  Description of Artificial Sequence: Synthetic oligonucleotide
  Target: LAMA2; (+) strand; PAM type: YTN; PAM sequence: TTG
aaaatacaacaaaggatatt

SEQ ID NO: 342406 - DNA, 20 bp, Artificial Sequence
  Description of Artificial Sequence: Synthetic oligonucleotide
  Target: LAMA2; (+) strand; PAM type: YTN; PAM sequence: TTG
aagctattaaaataagcttc

SEQ ID NO: 342407 - DNA, 20 bp, Artificial Sequence
  Description of Artificial Sequence: Synthetic oligonucleotide
  Target: LAMA2; (+) strand; PAM type: YTN; PAM sequence: CTA
ttaaaataagcttcttatcc

SEQ ID NO: 342408 - DNA, 20 bp, Artificial Sequence
  Description of Artificial Sequence: Synthetic oligonucleotide
  Target: LAMA2; (+) strand; PAM type: YTN; PAM sequence: TTA
aaataagcttcttatcctta

SEQ ID NO: 342409 - DNA, 20 bp, Artificial Sequence
  Description of Artificial Sequence: Synthetic oligonucleotide
  Target: LAMA2; (+) strand; PAM type: YTN; PAM sequence: CTT
cttatccttagggaaactat

SEQ ID NO: 342410 - DNA, 20 bp, Artificial Sequence
  Description of Artificial Sequence: Synthetic oligonucleotide
  Target: LAMA2; (+) strand; PAM type: YTN; PAM sequence: TTC
ttatccttagggaaactatt

SEQ ID NO: 342411 - DNA, 20 bp, Artificial Sequence
  Description of Artificial Sequence: Synthetic oligonucleotide
  Target: LAMA2; (+) strand; PAM type: YTN; PAM sequence: CTT
atccttagggaaactatttc

SEQ ID NO: 342412 - DNA, 20 bp, Artificial Sequence
  Description of Artificial Sequence: Synthetic oligonucleotide
  Target: LAMA2; (+) strand; PAM type: YTN; PAM sequence: TTA
tccttagggaaactatttca

SEQ ID NO: 342413 - DNA, 20 bp, Artificial Sequence
  Description of Artificial Sequence: Synthetic oligonucleotide
  Target: LAMA2; (+) strand; PAM type: YTN; PAM sequence: CTT
agggaaactatttcaacact

SEQ ID NO: 342414 - DNA, 20 bp, Artificial Sequence
  Description of Artificial Sequence: Synthetic oligonucleotide
  Target: LAMA2; (+) strand; PAM type: YTN; PAM sequence: TTA
gggaaactatttcaacacta

SEQ ID NO: 342415 - DNA, 20 bp, Artificial Sequence
  Description of Artificial Sequence: Synthetic oligonucleotide
  Target: LAMA2; (+) strand; PAM type: YTN; PAM sequence: CTA
tttcaacactagagctatca

SEQ ID NO: 342416 - DNA, 20 bp, Artificial Sequence
  Description of Artificial Sequence: Synthetic oligonucleotide
  Target: LAMA2; (+) strand; PAM type: YTN; PAM sequence: TTT
caacactagagctatcatca

SEQ ID NO: 342417 - DNA, 20 bp, Artificial Sequence
  Description of Artificial Sequence: Synthetic oligonucleotide
  Target: LAMA2; (+) strand; PAM type: YTN; PAM sequence: TTC
aacactagagctatcatcaa

SEQ ID NO: 342418 - DNA, 20 bp, Artificial Sequence
  Description of Artificial Sequence: Synthetic oligonucleotide
  Target: LAMA2; (+) strand; PAM type: YTN; PAM sequence: CTA
gagctatcatcaaaagtcct

SEQ ID NO: 342419 - DNA, 20 bp, Artificial Sequence
  Description of Artificial Sequence: Synthetic oligonucleotide
  Target: LAMA2; (+) strand; PAM type: YTN; PAM sequence: CTA
tcatcaaaagtccttgagac

SEQ ID NO: 342420 - DNA, 20 bp, Artificial Sequence
  Description of Artificial Sequence: Synthetic oligonucleotide
  Target: LAMA2; (+) strand; PAM type: YTN; PAM sequence: CTT
gagacaagtaacccaggagt

SEQ ID NO: 342421 - DNA, 20 bp, Artificial Sequence
  Description of Artificial Sequence: Synthetic oligonucleotide
  Target: LAMA2; (+) strand; PAM type: YTN; PAM sequence: TTG
agacaagtaacccaggagtg

SEQ ID NO: 342422 - DNA, 20 bp, Artificial Sequence
  Description of Artificial Sequence: Synthetic oligonucleotide
  Target: LAMA2; (+) strand; PAM type: YTN; PAM sequence: TTA
tgattacactttataagcaa

SEQ ID NO: 342423 - DNA, 20 bp, Artificial Sequence
  Description of Artificial Sequence: Synthetic oligonucleotide
  Target: LAMA2; (+) strand; PAM type: YTN; PAM sequence: TTA
cactttataagcaaacttaa

SEQ ID NO: 342424 - DNA, 20 bp, Artificial Sequence
  Description of Artificial Sequence: Synthetic oligonucleotide
  Target: LAMA2; (+) strand; PAM type: YTN; PAM sequence: CTT
tataagcaaacttaaaaaga

SEQ ID NO: 342425 - DNA, 20 bp, Artificial Sequence
  Description of Artificial Sequence: Synthetic oligonucleotide
  Target: LAMA2; (+) strand; PAM type: YTN; PAM sequence: TTT
ataagcaaacttaaaaagat

SEQ ID NO: 342426 - DNA, 20 bp, Artificial Sequence
  Description of Artificial Sequence: Synthetic oligonucleotide
  Target: LAMA2; (+) strand; PAM type: YTN; PAM sequence: TTA
taagcaaacttaaaaagata

SEQ ID NO: 342427 - DNA, 20 bp, Artificial Sequence
  Description of Artificial Sequence: Synthetic oligonucleotide
  Target: LAMA2; (+) strand; PAM type: YTN; PAM sequence: CTT
aaaaagatatcaggagctgc

SEQ ID NO: 342428 - DNA, 20 bp, Artificial Sequence
  Description of Artificial Sequence: Synthetic oligonucleotide
  Target: LAMA2; (+) strand; PAM type: YTN; PAM sequence: TTA
aaaagatatcaggagctgct

SEQ ID NO: 342429 - DNA, 20 bp, Artificial Sequence
  Description of Artificial Sequence: Synthetic oligonucleotide
  Target: LAMA2; (+) strand; PAM type: YTN; PAM sequence: CTG
ctttactaggcccctgctat

SEQ ID NO: 342430 - DNA, 20 bp, Artificial Sequence
  Description of Artificial Sequence: Synthetic oligonucleotide
  Target: LAMA2; (+) strand; PAM type: YTN; PAM sequence: CTT
tactaggcccctgctatgaa

SEQ ID NO: 342431 - DNA, 20 bp, Artificial Sequence
  Description of Artificial Sequence: Synthetic oligonucleotide
  Target: LAMA2; (+) strand; PAM type: YTN; PAM sequence: TTT
actaggcccctgctatgaag

SEQ ID NO: 342432 - DNA, 20 bp, Artificial Sequence
  Description of Artificial Sequence: Synthetic oligonucleotide
  Target: LAMA2; (+) strand; PAM type: YTN; PAM sequence: TTA
ctaggcccctgctatgaagt

SEQ ID NO: 342433 - DNA, 20 bp, Artificial Sequence
  Description of Artificial Sequence: Synthetic oligonucleotide
  Target: LAMA2; (+) strand; PAM type: YTN; PAM sequence: CTA
ggcccctgctatgaagtgaa

SEQ ID NO: 342434 - DNA, 20 bp, Artificial Sequence
  Description of Artificial Sequence: Synthetic oligonucleotide
  Target: LAMA2; (+) strand; PAM type: YTN; PAM sequence: CTG
ctatgaagtgaaaactggag

SEQ ID NO: 342435 - DNA, 20 bp, Artificial Sequence
  Description of Artificial Sequence: Synthetic oligonucleotide
  Target: LAMA2; (+) strand; PAM type: YTN; PAM sequence: CTA
tgaagtgaaaactggagaaa

SEQ ID NO: 342436 - DNA, 20 bp, Artificial Sequence
  Description of Artificial Sequence: Synthetic oligonucleotide
  Target: LAMA2; (+) strand; PAM type: YTN; PAM sequence: CTG
gagaaaaatctacagcaaag

SEQ ID NO: 342437 - DNA, 20 bp, Artificial Sequence
  Description of Artificial Sequence: Synthetic oligonucleotide
  Target: LAMA2; (+) strand; PAM type: YTN; PAM sequence: CTA
cagcaaagcattctagcctg

SEQ ID NO: 342438 - DNA, 20 bp, Artificial Sequence
  Description of Artificial Sequence: Synthetic oligonucleotide
  Target: LAMA2; (+) strand; PAM type: YTN; PAM sequence: TTC
tagcctgaggatgtgtacta

SEQ ID NO: 342439 - DNA, 20 bp, Artificial Sequence
  Description of Artificial Sequence: Synthetic oligonucleotide
  Target: LAMA2; (+) strand; PAM type: YTN; PAM sequence: CTA
gcctgaggatgtgtactatt

SEQ ID NO: 342440 - DNA, 20 bp, Artificial Sequence
  Description of Artificial Sequence: Synthetic oligonucleotide
  Target: LAMA2; (+) strand; PAM type: YTN; PAM sequence: CTG
aggatgtgtactattttgca

SEQ ID NO: 342441 - DNA, 20 bp, Artificial Sequence
  Description of Artificial Sequence: Synthetic oligonucleotide
  Target: LAMA2; (+) strand; PAM type: YTN; PAM sequence: CTA
ttttgcaacacagcagactg

SEQ ID NO: 342442 - DNA, 20 bp, Artificial Sequence
  Description of Artificial Sequence: Synthetic oligonucleotide
  Target: LAMA2; (+) strand; PAM type: YTN; PAM sequence: TTT
tgcaacacagcagactgact

SEQ ID NO: 342443 - DNA, 20 bp, Artificial Sequence
  Description of Artificial Sequence: Synthetic oligonucleotide
  Target: LAMA2; (+) strand; PAM type: YTN; PAM sequence: TTT
gcaacacagcagactgacta

SEQ ID NO: 342444 - DNA, 20 bp, Artificial Sequence
  Description of Artificial Sequence: Synthetic oligonucleotide
  Target: LAMA2; (+) strand; PAM type: YTN; PAM sequence: TTG
caacacagcagactgactac

SEQ ID NO: 342445 - DNA, 20 bp, Artificial Sequence
  Description of Artificial Sequence: Synthetic oligonucleotide
  Target: LAMA2; (+) strand; PAM type: YTN; PAM sequence: CTG
actacagccaaatattttca

SEQ ID NO: 342446 - DNA, 20 bp, Artificial Sequence
  Description of Artificial Sequence: Synthetic oligonucleotide
  Target: LAMA2; (+) strand; PAM type: YTN; PAM sequence: CTA
cagccaaatattttcattgg

SEQ ID NO: 342447 - DNA, 20 bp, Artificial Sequence
  Description of Artificial Sequence: Synthetic oligonucleotide
  Target: LAMA2; (+) strand; PAM type: YTN; PAM sequence: TTT
tcattggaaaaatgtaaatg

SEQ ID NO: 342448 - DNA, 20 bp, Artificial Sequence
  Description of Artificial Sequence: Synthetic oligonucleotide
  Target: LAMA2; (+) strand; PAM type: YTN; PAM sequence: TTT
cattggaaaaatgtaaatga

SEQ ID NO: 342449 - DNA, 20 bp, Artificial Sequence
  Description of Artificial Sequence: Synthetic oligonucleotide
  Target: LAMA2; (+) strand; PAM type: YTN; PAM sequence: TTC
attggaaaaatgtaaatgaa

SEQ ID NO: 342450 - DNA, 20 bp, Artificial Sequence
  Description of Artificial Sequence: Synthetic oligonucleotide
  Target: LAMA2; (+) strand; PAM type: YTN; PAM sequence: TTG
gaaaaatgtaaatgaaaaat

SEQ ID NO: 342451 - DNA, 20 bp, Artificial Sequence
  Description of Artificial Sequence: Synthetic oligonucleotide
  Target: LAMA2; (+) strand; PAM type: YTN; PAM sequence: TTG
ctcaattctgctacctgggt

SEQ ID NO: 342452 - DNA, 20 bp, Artificial Sequence
  Description of Artificial Sequence: Synthetic oligonucleotide
  Target: LAMA2; (+) strand; PAM type: YTN; PAM sequence: CTC
aattctgctacctgggtagt

SEQ ID NO: 342453 - DNA, 20 bp, Artificial Sequence
  Description of Artificial Sequence: Synthetic oligonucleotide
  Target: LAMA2; (+) strand; PAM type: YTN; PAM sequence: TTC
tgctacctgggtagtacata

SEQ ID NO: 342454 - DNA, 20 bp, Artificial Sequence
  Description of Artificial Sequence: Synthetic oligonucleotide
  Target: LAMA2; (+) strand; PAM type: YTN; PAM sequence: CTG
ctacctgggtagtacataag

SEQ ID NO: 342455 - DNA, 20 bp, Artificial Sequence
  Description of Artificial Sequence: Synthetic oligonucleotide
  Target: LAMA2; (+) strand; PAM type: YTN; PAM sequence: CTA
cctgggtagtacataagaca

SEQ ID NO: 342456 - DNA, 20 bp, Artificial Sequence
  Description of Artificial Sequence: Synthetic oligonucleotide
  Target: LAMA2; (+) strand; PAM type: YTN; PAM sequence: CTG
ggtagtacataagacatgta

SEQ ID NO: 342457 - DNA, 20 bp, Artificial Sequence
  Description of Artificial Sequence: Synthetic oligonucleotide
  Target: LAMA2; (+) strand; PAM type: YTN; PAM sequence: TTT
aaattctaatcagggataac

SEQ ID NO: 342458 - DNA, 20 bp, Artificial Sequence
  Description of Artificial Sequence: Synthetic oligonucleotide
  Target: LAMA2; (+) strand; PAM type: YTN; PAM sequence: TTA
aattctaatcagggataaca

SEQ ID NO: 342459 - DNA, 20 bp, Artificial Sequence
  Description of Artificial Sequence: Synthetic oligonucleotide
  Target: LAMA2; (+) strand; PAM type: YTN; PAM sequence: TTC
taatcagggataacaaaaat

SEQ ID NO: 342460 - DNA, 20 bp, Artificial Sequence
  Description of Artificial Sequence: Synthetic oligonucleotide
  Target: LAMA2; (+) strand; PAM type: YTN; PAM sequence: CTA
atcagggataacaaaaatcc

SEQ ID NO: 342461 - DNA, 20 bp, Artificial Sequence
  Description of Artificial Sequence: Synthetic oligonucleotide
  Target: LAMA2; (+) strand; PAM type: YTN; PAM sequence: CTA
tgatacttattttgcaaagg

SEQ ID NO: 342462 - DNA, 20 bp, Artificial Sequence
  Description of Artificial Sequence: Synthetic oligonucleotide
  Target: LAMA2; (+) strand; PAM type: YTN; PAM sequence: CTT
attttgcaaaggaaaatggc

SEQ ID NO: 342463 - DNA, 20 bp, Artificial Sequence
  Description of Artificial Sequence: Synthetic oligonucleotide
  Target: LAMA2; (+) strand; PAM type: YTN; PAM sequence: TTA
ttttgcaaaggaaaatggca

SEQ ID NO: 342464 - DNA, 20 bp, Artificial Sequence
  Description of Artificial Sequence: Synthetic oligonucleotide
  Target: LAMA2; (+) strand; PAM type: YTN; PAM sequence: TTT
tgcaaaggaaaatggcagtc

SEQ ID NO: 342465 - DNA, 20 bp, Artificial Sequence
  Description of Artificial Sequence: Synthetic oligonucleotide
  Target: LAMA2; (+) strand; PAM type: YTN; PAM sequence: TTT
gcaaaggaaaatggcagtcc

SEQ ID NO: 342466 - DNA, 20 bp, Artificial Sequence
  Description of Artificial Sequence: Synthetic oligonucleotide
  Target: LAMA2; (+) strand; PAM type: YTN; PAM sequence: TTG
caaaggaaaatggcagtcct

SEQ ID NO: 342467 - DNA, 20 bp, Artificial Sequence
  Description of Artificial Sequence: Synthetic oligonucleotide
  Target: LAMA2; (+) strand; PAM type: YTN; PAM sequence: CTG
gcaaggttataagttagaaa

SEQ ID NO: 342468 - DNA, 20 bp, Artificial Sequence
  Description of Artificial Sequence: Synthetic oligonucleotide
  Target: LAMA2; (+) strand; PAM type: YTN; PAM sequence: TTA
taagttagaaaattatattt

SEQ ID NO: 342469 - DNA, 20 bp, Artificial Sequence
  Description of Artificial Sequence: Synthetic oligonucleotide
  Target: LAMA2; (+) strand; PAM type: YTN; PAM sequence: TTA
gaaaattatattttctttgt

SEQ ID NO: 342470 - DNA, 20 bp, Artificial Sequence
  Description of Artificial Sequence: Synthetic oligonucleotide
  Target: LAMA2; (+) strand; PAM type: YTN; PAM sequence: TTA
tattttctttgtgtaaattt

SEQ ID NO: 342471 - DNA, 20 bp, Artificial Sequence
  Description of Artificial Sequence: Synthetic oligonucleotide
  Target: LAMA2; (+) strand; PAM type: YTN; PAM sequence: TTT
tctttgtgtaaatttgttct

SEQ ID NO: 342472 - DNA, 20 bp, Artificial Sequence
  Description of Artificial Sequence: Synthetic oligonucleotide
  Target: LAMA2; (+) strand; PAM type: YTN; PAM sequence: TTT
ctttgtgtaaatttgttctt

SEQ ID NO: 342473 - DNA, 20 bp, Artificial Sequence
  Description of Artificial Sequence: Synthetic oligonucleotide
  Target: LAMA2; (+) strand; PAM type: YTN; PAM sequence: TTC
tttgtgtaaatttgttcttt

SEQ ID NO: 342474 - DNA, 20 bp, Artificial Sequence
  Description of Artificial Sequence: Synthetic oligonucleotide
  Target: LAMA2; (+) strand; PAM type: YTN; PAM sequence: CTT
tgtgtaaatttgttctttag

SEQ ID NO: 342475 - DNA, 20 bp, Artificial Sequence
  Description of Artificial Sequence: Synthetic oligonucleotide
  Target: LAMA2; (+) strand; PAM type: YTN; PAM sequence: TTT
gtgtaaatttgttctttagc

SEQ ID NO: 342476 - DNA, 20 bp, Artificial Sequence
  Description of Artificial Sequence: Synthetic oligonucleotide
  Target: LAMA2; (+) strand; PAM type: YTN; PAM sequence: TTG
tgtaaatttgttctttagct

SEQ ID NO: 342477 - DNA, 20 bp, Artificial Sequence
  Description of Artificial Sequence: Synthetic oligonucleotide
  Target: LAMA2; (+) strand; PAM type: YTN; PAM sequence: TTT
gttctttagcttcattcagt

SEQ ID NO: 342478 - DNA, 20 bp, Artificial Sequence
  Description of Artificial Sequence: Synthetic oligonucleotide
  Target: LAMA2; (+) strand; PAM type: YTN; PAM sequence: TTG
ttctttagcttcattcagta

SEQ ID NO: 342479 - DNA, 20 bp, Artificial Sequence
  Description of Artificial Sequence: Synthetic oligonucleotide
  Target: LAMA2; (+) strand; PAM type: YTN; PAM sequence: TTC
tttagcttcattcagtaatc

SEQ ID NO: 342480 - DNA, 20 bp, Artificial Sequence
  Description of Artificial Sequence: Synthetic oligonucleotide
  Target: LAMA2; (+) strand; PAM type: YTN; PAM sequence: CTT
tagcttcattcagtaatcag

SEQ ID NO: 342481 - DNA, 20 bp, Artificial Sequence
  Description of Artificial Sequence: Synthetic oligonucleotide
  Target: LAMA2; (+) strand; PAM type: YTN; PAM sequence: TTT
agcttcattcagtaatcaga

SEQ ID NO: 342482 - DNA, 20 bp, Artificial Sequence
  Description of Artificial Sequence: Synthetic oligonucleotide
  Target: LAMA2; (+) strand; PAM type: YTN; PAM sequence: TTA
gcttcattcagtaatcagaa

SEQ ID NO: 342483 - DNA, 20 bp, Artificial Sequence
  Description of Artificial Sequence: Synthetic oligonucleotide
  Target: LAMA2; (+) strand; PAM type: YTN; PAM sequence: CTT
cattcagtaatcagaattat

SEQ ID NO: 342484 - DNA, 20 bp, Artificial Sequence
  Description of Artificial Sequence: Synthetic oligonucleotide
  Target: LAMA2; (+) strand; PAM type: YTN; PAM sequence: TTC
attcagtaatcagaattatt

SEQ ID NO: 342485 - DNA, 20 bp, Artificial Sequence
  Description of Artificial Sequence: Synthetic oligonucleotide
  Target: LAMA2; (+) strand; PAM type: YTN; PAM sequence: TTC
agtaatcagaattatttatt

SEQ ID NO: 342486 - DNA, 20 bp, Artificial Sequence
  Description of Artificial Sequence: Synthetic oligonucleotide
  Target: LAMA2; (+) strand; PAM type: YTN; PAM sequence: TTA
tttatttccttattcaaatt

SEQ ID NO: 342487 - DNA, 20 bp, Artificial Sequence
  Description of Artificial Sequence: Synthetic oligonucleotide
  Target: LAMA2; (+) strand; PAM type: YTN; PAM sequence: TTT
atttccttattcaaattgta

SEQ ID NO: 342488 - DNA, 20 bp, Artificial Sequence
  Description of Artificial Sequence: Synthetic oligonucleotide
  Target: LAMA2; (+) strand; PAM type: YTN; PAM sequence: TTA
tttccttattcaaattgtaa

SEQ ID NO: 342489 - DNA, 20 bp, Artificial Sequence
  Description of Artificial Sequence: Synthetic oligonucleotide
  Target: LAMA2; (+) strand; PAM type: YTN; PAM sequence: TTT
ccttattcaaattgtaagtg

SEQ ID NO: 342490 - DNA, 20 bp, Artificial Sequence
  Description of Artificial Sequence: Synthetic oligonucleotide
  Target: LAMA2; (+) strand; PAM type: YTN; PAM sequence: TTC
cttattcaaattgtaagtgc

SEQ ID NO: 342491 - DNA, 20 bp, Artificial Sequence
  Description of Artificial Sequence: Synthetic oligonucleotide
  Target: LAMA2; (+) strand; PAM type: YTN; PAM sequence: CTT
attcaaattgtaagtgcctt

SEQ ID NO: 342492 - DNA, 20 bp, Artificial Sequence
  Description of Artificial Sequence: Synthetic oligonucleotide
  Target: LAMA2; (+) strand; PAM type: YTN; PAM sequence: TTA
ttcaaattgtaagtgccttc

SEQ ID NO: 342493 - DNA, 20 bp, Artificial Sequence
  Description of Artificial Sequence: Synthetic oligonucleotide
  Target: LAMA2; (+) strand; PAM type: YTN; PAM sequence: TTC
aaattgtaagtgccttctaa

SEQ ID NO: 342494 - DNA, 20 bp, Artificial Sequence
  Description of Artificial Sequence: Synthetic oligonucleotide
  Target: LAMA2; (+) strand; PAM type: YTN; PAM sequence: TTG
taagtgccttctaaacccga

SEQ ID NO: 342495 - DNA, 20 bp, Artificial Sequence
  Description of Artificial Sequence: Synthetic oligonucleotide
  Target: LAMA2; (+) strand; PAM type: YTN; PAM sequence: CTT
ctaaacccgagcctactact

SEQ ID NO: 342496 - DNA, 20 bp, Artificial Sequence
  Description of Artificial Sequence: Synthetic oligonucleotide
  Target: LAMA2; (+) strand; PAM type: YTN; PAM sequence: TTC
taaacccgagcctactacta

SEQ ID NO: 342497 - DNA, 20 bp, Artificial Sequence
  Description of Artificial Sequence: Synthetic oligonucleotide
  Target: LAMA2; (+) strand; PAM type: YTN; PAM sequence: CTA
aacccgagcctactactatt

SEQ ID NO: 342498 - DNA, 20 bp, Artificial Sequence
  Description of Artificial Sequence: Synthetic oligonucleotide
  Target: LAMA2; (+) strand; PAM type: YTN; PAM sequence: CTA
ctactattatgttgagccat

SEQ ID NO: 342499 - DNA, 20 bp, Artificial Sequence
  Description of Artificial Sequence: Synthetic oligonucleotide
  Target: LAMA2; (+) strand; PAM type: YTN; PAM sequence: CTA
ctattatgttgagccatggg

SEQ ID NO: 342500 - DNA, 20 bp, Artificial Sequence
  Description of Artificial Sequence: Synthetic oligonucleotide
  Target: LAMA2; (+) strand; PAM type: YTN; PAM sequence: CTA
ttatgttgagccatgggaaa

SEQ ID NO: 342501 - DNA, 20 bp, Artificial Sequence
  Description of Artificial Sequence: Synthetic oligonucleotide
  Target: LAMA2; (+) strand; PAM type: YTN; PAM sequence: TTA
tgttgagccatgggaaattg

SEQ ID NO: 342502 - DNA, 20 bp, Artificial Sequence
  Description of Artificial Sequence: Synthetic oligonucleotide
  Target: LAMA2; (+) strand; PAM type: YTN; PAM sequence: TTG
agccatgggaaattgccaat

SEQ ID NO: 342503 - DNA, 20 bp, Artificial Sequence
  Description of Artificial Sequence: Synthetic oligonucleotide
  Target: LAMA2; (+) strand; PAM type: YTN; PAM sequence: TTG
ccaatatttgactattttag

SEQ ID NO: 342504 - DNA, 20 bp, Artificial Sequence
  Description of Artificial Sequence: Synthetic oligonucleotide
  Target: LAMA2; (+) strand; PAM type: YTN; PAM sequence: TTT
gactattttagtccattaaa

SEQ ID NO: 342505 - DNA, 20 bp, Artificial Sequence
  Description of Artificial Sequence: Synthetic oligonucleotide
  Target: LAMA2; (+) strand; PAM type: YTN; PAM sequence: TTG
actattttagtccattaaaa

SEQ ID NO: 342506 - DNA, 20 bp, Artificial Sequence
  Description of Artificial Sequence: Synthetic oligonucleotide
  Target: LAMA2; (+) strand; PAM type: YTN; PAM sequence: CTA
ttttagtccattaaaatgca

SEQ ID NO: 342507 - DNA, 20 bp, Artificial Sequence
  Description of Artificial Sequence: Synthetic oligonucleotide
  Target: LAMA2; (+) strand; PAM type: YTN; PAM sequence: TTT
tagtccattaaaatgcagtt

SEQ ID NO: 342508 - DNA, 20 bp, Artificial Sequence
  Description of Artificial Sequence: Synthetic oligonucleotide
  Target: LAMA2; (+) strand; PAM type: YTN; PAM sequence: TTT
agtccattaaaatgcagttt

SEQ ID NO: 342509 - DNA, 20 bp, Artificial Sequence
  Description of Artificial Sequence: Synthetic oligonucleotide
  Target: LAMA2; (+) strand; PAM type: YTN; PAM sequence: TTA
gtccattaaaatgcagtttc

SEQ ID NO: 342510 - DNA, 20 bp, Artificial Sequence
  Description of Artificial Sequence: Synthetic oligonucleotide
  Target: LAMA2; (+) strand; PAM type: YTN; PAM sequence: TTA
aaatgcagtttcatatggtt

SEQ ID NO: 342511 - DNA, 20 bp, Artificial Sequence
  Description of Artificial Sequence: Synthetic oligonucleotide
  Target: LAMA2; (+) strand; PAM type: YTN; PAM sequence: TTT
catatggtttaaactaatat

SEQ ID NO: 342512 - DNA, 20 bp, Artificial Sequence
  Description of Artificial Sequence: Synthetic oligonucleotide
  Target: LAMA2; (+) strand; PAM type: YTN; PAM sequence: TTC
atatggtttaaactaatatg

SEQ ID NO: 342513 - DNA, 20 bp, Artificial Sequence
  Description of Artificial Sequence: Synthetic oligonucleotide
  Target: LAMA2; (+) strand; PAM type: YTN; PAM sequence: TTT
aaactaatatgtgccaaagc

SEQ ID NO: 342514 - DNA, 20 bp, Artificial Sequence
  Description of Artificial Sequence: Synthetic oligonucleotide
  Target: LAMA2; (+) strand; PAM type: YTN; PAM sequence: TTA
aactaatatgtgccaaagca

SEQ ID NO: 342515 - DNA, 20 bp, Artificial Sequence
  Description of Artificial Sequence: Synthetic oligonucleotide
  Target: LAMA2; (+) strand; PAM type: YTN; PAM sequence: CTA
atatgtgccaaagcatgaat

SEQ ID NO: 342516 - DNA, 20 bp, Artificial Sequence
  Description of Artificial Sequence: Synthetic oligonucleotide
  Target: LAMA2; (+) strand; PAM type: YTN; PAM sequence: CTT
gcaggaatactgtcctaagt

SEQ ID NO: 342517 - DNA, 20 bp, Artificial Sequence
  Description of Artificial Sequence: Synthetic oligonucleotide
  Target: LAMA2; (+) strand; PAM type: YTN; PAM sequence: TTG
caggaatactgtcctaagta

SEQ ID NO: 342518 - DNA, 20 bp, Artificial Sequence
  Description of Artificial Sequence: Synthetic oligonucleotide
  Target: LAMA2; (+) strand; PAM type: YTN; PAM sequence: CTG
tcctaagtataacctcagat

SEQ ID NO: 342519 - DNA, 20 bp, Artificial Sequence
  Description of Artificial Sequence: Synthetic oligonucleotide
  Target: LAMA2; (+) strand; PAM type: YTN; PAM sequence: CTA
agtataacctcagatgcaca

SEQ ID NO: 342520 - DNA, 20 bp, Artificial Sequence
  Description of Artificial Sequence: Synthetic oligonucleotide
  Target: LAMA2; (+) strand; PAM type: YTN; PAM sequence: CTC
agatgcacacagtattttag

SEQ ID NO: 342521 - DNA, 20 bp, Artificial Sequence
  Description of Artificial Sequence: Synthetic oligonucleotide
  Target: LAMA2; (+) strand; PAM type: YTN; PAM sequence: TTT
tagcaaaagtatcaatggga

SEQ ID NO: 342522 - DNA, 20 bp, Artificial Sequence
  Description of Artificial Sequence: Synthetic oligonucleotide
  Target: LAMA2; (+) strand; PAM type: YTN; PAM sequence: TTT
agcaaaagtatcaatgggaa

SEQ ID NO: 342523 - DNA, 20 bp, Artificial Sequence
  Description of Artificial Sequence: Synthetic oligonucleotide
  Target: LAMA2; (+) strand; PAM type: YTN; PAM sequence: TTA
gcaaaagtatcaatgggaaa

SEQ ID NO: 342524 - DNA, 20 bp, Artificial Sequence
  Description of Artificial Sequence: Synthetic oligonucleotide
  Target: LAMA2; (+) strand; PAM type: YTN; PAM sequence: CTT
tcactgaaacaatttataag

SEQ ID NO: 342525 - DNA, 20 bp, Artificial Sequence
  Description of Artificial Sequence: Synthetic oligonucleotide
  Target: LAMA2; (+) strand; PAM type: YTN; PAM sequence: TTT
cactgaaacaatttataagt

SEQ ID NO: 342526 - DNA, 20 bp, Artificial Sequence
  Description of Artificial Sequence: Synthetic oligonucleotide
  Target: LAMA2; (+) strand; PAM type: YTN; PAM sequence: TTC
actgaaacaatttataagta

SEQ ID NO: 342527 - DNA, 20 bp, Artificial Sequence
  Description of Artificial Sequence: Synthetic oligonucleotide
  Target: LAMA2; (+) strand; PAM type: YTN; PAM sequence: CTG
aaacaatttataagtataat

SEQ ID NO: 342528 - DNA, 20 bp, Artificial Sequence
  Description of Artificial Sequence: Synthetic oligonucleotide
  Target: LAMA2; (+) strand; PAM type: YTN; PAM sequence: TTT
ataagtataataatttattt

SEQ ID NO: 342529 - DNA, 20 bp, Artificial Sequence
  Description of Artificial Sequence: Synthetic oligonucleotide
  Target: LAMA2; (+) strand; PAM type: YTN; PAM sequence: TTA
taagtataataatttatttt

SEQ ID NO: 342530 - DNA, 20 bp, Artificial Sequence
  Description of Artificial Sequence: Synthetic oligonucleotide
  Target: LAMA2; (+) strand; PAM type: YTN; PAM sequence: TTT
attttgtgaaggccttttct

SEQ ID NO: 342531 - DNA, 20 bp, Artificial Sequence
  Description of Artificial Sequence: Synthetic oligonucleotide
  Target: LAMA2; (+) strand; PAM type: YTN; PAM sequence: TTA
ttttgtgaaggccttttctt

SEQ ID NO: 342532 - DNA, 20 bp, Artificial Sequence
  Description of Artificial Sequence: Synthetic oligonucleotide
  Target: LAMA2; (+) strand; PAM type: YTN; PAM sequence: TTT
tgtgaaggccttttctttac

SEQ ID NO: 342533 - DNA, 20 bp, Artificial Sequence
  Description of Artificial Sequence: Synthetic oligonucleotide
  Target: LAMA2; (+) strand; PAM type: YTN; PAM sequence: TTT
gtgaaggccttttctttacc

SEQ ID NO: 342534 - DNA, 20 bp, Artificial Sequence
  Description of Artificial Sequence: Synthetic oligonucleotide
  Target: LAMA2; (+) strand; PAM type: YTN; PAM sequence: TTG
tgaaggccttttctttacca

SEQ ID NO: 342535 - DNA, 20 bp, Artificial Sequence
  Description of Artificial Sequence: Synthetic oligonucleotide
  Target: LAMA2; (+) strand; PAM type: YTN; PAM sequence: CTT
ttctttaccaaattagtaat

SEQ ID NO: 342536 - DNA, 20 bp, Artificial Sequence
  Description of Artificial Sequence: Synthetic oligonucleotide
  Target: LAMA2; (+) strand; PAM type: YTN; PAM sequence: TTT
tctttaccaaattagtaata

SEQ ID NO: 342537 - DNA, 20 bp, Artificial Sequence
  Description of Artificial Sequence: Synthetic oligonucleotide
  Target: LAMA2; (+) strand; PAM type: YTN; PAM sequence: TTT
ctttaccaaattagtaatat

SEQ ID NO: 342538 - DNA, 20 bp, Artificial Sequence
  Description of Artificial Sequence: Synthetic oligonucleotide
  Target: LAMA2; (+) strand; PAM type: YTN; PAM sequence: TTC
tttaccaaattagtaatatg

SEQ ID NO: 342539 - DNA, 20 bp, Artificial Sequence
  Description of Artificial Sequence: Synthetic oligonucleotide
  Target: LAMA2; (+) strand; PAM type: YTN; PAM sequence: CTT
taccaaattagtaatatggt

SEQ ID NO: 342540 - DNA, 20 bp, Artificial Sequence
  Description of Artificial Sequence: Synthetic oligonucleotide
  Target: LAMA2; (+) strand; PAM type: YTN; PAM sequence: TTT
accaaattagtaatatggtg

SEQ ID NO: 342541 - DNA, 20 bp, Artificial Sequence
  Description of Artificial Sequence: Synthetic oligonucleotide
  Target: LAMA2; (+) strand; PAM type: YTN; PAM sequence: TTA
ccaaattagtaatatggtga

SEQ ID NO: 342542 - DNA, 20 bp, Artificial Sequence
  Description of Artificial Sequence: Synthetic oligonucleotide
  Target: LAMA2; (+) strand; PAM type: YTN; PAM sequence: TTA
gtaatatggtgaatattaaa

SEQ ID NO: 342543 - DNA, 20 bp, Artificial Sequence
  Description of Artificial Sequence: Synthetic oligonucleotide
  Target: LAMA2; (+) strand; PAM type: YTN; PAM sequence: TTA
aactaaacctgagtcatact

SEQ ID NO: 342544 - DNA, 20 bp, Artificial Sequence
  Description of Artificial Sequence: Synthetic oligonucleotide
  Target: LAMA2; (+) strand; PAM type: YTN; PAM sequence: CTA
aacctgagtcatactacatt

SEQ ID NO: 342545 - DNA, 20 bp, Artificial Sequence
  Description of Artificial Sequence: Synthetic oligonucleotide
  Target: LAMA2; (+) strand; PAM type: YTN; PAM sequence: CTG
agtcatactacatttgtttt

SEQ ID NO: 342546 - DNA, 20 bp, Artificial Sequence
  Description of Artificial Sequence: Synthetic oligonucleotide
  Target: LAMA2; (+) strand; PAM type: YTN; PAM sequence: CTA
catttgtttttaaattttgt

SEQ ID NO: 342547 - DNA, 20 bp, Artificial Sequence
  Description of Artificial Sequence: Synthetic oligonucleotide
  Target: LAMA2; (+) strand; PAM type: YTN; PAM sequence: TTT
gtttttaaattttgtaggga

SEQ ID NO: 342548 - DNA, 20 bp, Artificial Sequence
  Description of Artificial Sequence: Synthetic oligonucleotide
  Target: LAMA2; (+) strand; PAM type: YTN; PAM sequence: TTG
tttttaaattttgtagggaa

SEQ ID NO: 342549 - DNA, 20 bp, Artificial Sequence
  Description of Artificial Sequence: Synthetic oligonucleotide
  Target: LAMA2; (+) strand; PAM type: YTN; PAM sequence: TTT
ttaaattttgtagggaaggg

SEQ ID NO: 342550 - DNA, 20 bp, Artificial Sequence
  Description of Artificial Sequence: Synthetic oligonucleotide
  Target: LAMA2; (+) strand; PAM type: YTN; PAM sequence: TTT
taaattttgtagggaagggg

SEQ ID NO: 342551 - DNA, 20 bp, Artificial Sequence
  Description of Artificial Sequence: Synthetic oligonucleotide
  Target: LAMA2; (+) strand; PAM type: YTN; PAM sequence: TTT
aaattttgtagggaaggggg

SEQ ID NO: 342552 - DNA, 20 bp, Artificial Sequence
  Description of Artificial Sequence: Synthetic oligonucleotide
  Target: LAMA2; (+) strand; PAM type: YTN; PAM sequence: TTA
aattttgtagggaagggggg

SEQ ID NO: 342553 - DNA, 20 bp, Artificial Sequence
  Description of Artificial Sequence: Synthetic oligonucleotide
  Target: LAMA2; (+) strand; PAM type: YTN; PAM sequence: TTT
tgtagggaaggggggaatag

SEQ ID NO: 342554 - DNA, 20 bp, Artificial Sequence
  Description of Artificial Sequence: Synthetic oligonucleotide
  Target: LAMA2; (+) strand; PAM type: YTN; PAM sequence: TTT
gtagggaaggggggaatagc

SEQ ID NO: 342555 - DNA, 20 bp, Artificial Sequence
  Description of Artificial Sequence: Synthetic oligonucleotide
  Target: LAMA2; (+) strand; PAM type: YTN; PAM sequence: TTG
tagggaaggggggaatagca

SEQ ID NO: 342556 - DNA, 20 bp, Artificial Sequence
  Description of Artificial Sequence: Synthetic oligonucleotide
  Target: LAMA2; (+) strand; PAM type: YTN; PAM sequence: TTT
tatgctagtaatcaggcatt

SEQ ID NO: 342557 - DNA, 20 bp, Artificial Sequence
  Description of Artificial Sequence: Synthetic oligonucleotide
  Target: LAMA2; (+) strand; PAM type: YTN; PAM sequence: TTT
atgctagtaatcaggcatta

SEQ ID NO: 342558 - DNA, 20 bp, Artificial Sequence
  Description of Artificial Sequence: Synthetic oligonucleotide
  Target: LAMA2; (+) strand; PAM type: YTN; PAM sequence: TTA
tgctagtaatcaggcattat

SEQ ID NO: 342559 - DNA, 20 bp, Artificial Sequence
  Description of Artificial Sequence: Synthetic oligonucleotide
  Target: LAMA2; (+) strand; PAM type: YTN; PAM sequence: CTA
gtaatcaggcattatatcag

SEQ ID NO: 342560 - DNA, 20 bp, Artificial Sequence
  Description of Artificial Sequence: Synthetic oligonucleotide
  Target: LAMA2; (+) strand; PAM type: YTN; PAM sequence: TTA
tatcagttgttgtaaggaac

SEQ ID NO: 342561 - DNA, 20 bp, Artificial Sequence
  Description of Artificial Sequence: Synthetic oligonucleotide
  Target: LAMA2; (+) strand; PAM type: YTN; PAM sequence: TTG
ttgtaaggaactacatgaaa

SEQ ID NO: 342562 - DNA, 20 bp, Artificial Sequence
  Description of Artificial Sequence: Synthetic oligonucleotide
  Target: LAMA2; (+) strand; PAM type: YTN; PAM sequence: TTG
taaggaactacatgaaagtt

SEQ ID NO: 342563 - DNA, 20 bp, Artificial Sequence
  Description of Artificial Sequence: Synthetic oligonucleotide
  Target: LAMA2; (+) strand; PAM type: YTN; PAM sequence: CTA
catgaaagttggtggtatac

SEQ ID NO: 342564 - DNA, 20 bp, Artificial Sequence
  Description of Artificial Sequence: Synthetic oligonucleotide
  Target: LAMA2; (+) strand; PAM type: YTN; PAM sequence: TTG
gtggtatacaggttaccagt

SEQ ID NO: 342565 - DNA, 20 bp, Artificial Sequence
  Description of Artificial Sequence: Synthetic oligonucleotide
  Target: LAMA2; (+) strand; PAM type: YTN; PAM sequence: TTA
ccagtagtaagtttgggaac

SEQ ID NO: 342566 - DNA, 20 bp, Artificial Sequence
  Description of Artificial Sequence: Synthetic oligonucleotide
  Target: LAMA2; (+) strand; PAM type: YTN; PAM sequence: TTT
gggaactgtgttgttttggc

SEQ ID NO: 342567 - DNA, 20 bp, Artificial Sequence
  Description of Artificial Sequence: Synthetic oligonucleotide
  Target: LAMA2; (+) strand; PAM type: YTN; PAM sequence: TTG
ggaactgtgttgttttggct

SEQ ID NO: 342568 - DNA, 20 bp, Artificial Sequence
  Description of Artificial Sequence: Synthetic oligonucleotide
  Target: LAMA2; (+) strand; PAM type: YTN; PAM sequence: CTG
tgttgttttggctcacagaa

SEQ ID NO: 342569 - DNA, 20 bp, Artificial Sequence
  Description of Artificial Sequence: Synthetic oligonucleotide
  Target: LAMA2; (+) strand; PAM type: YTN; PAM sequence: TTG
ttttggctcacagaatataa

SEQ ID NO: 342570 - DNA, 20 bp, Artificial Sequence
  Description of Artificial Sequence: Synthetic oligonucleotide
  Target: LAMA2; (+) strand; PAM type: YTN; PAM sequence: TTT
tggctcacagaatataaagc

SEQ ID NO: 342571 - DNA, 20 bp, Artificial Sequence
  Description of Artificial Sequence: Synthetic oligonucleotide
  Target: LAMA2; (+) strand; PAM type: YTN; PAM sequence: TTT
ggctcacagaatataaagcg

SEQ ID NO: 342572 - DNA, 20 bp, Artificial Sequence
  Description of Artificial Sequence: Synthetic oligonucleotide
  Target: LAMA2; (+) strand; PAM type: YTN; PAM sequence: TTG
gctcacagaatataaagcgt

SEQ ID NO: 342573 - DNA, 20 bp, Artificial Sequence
  Description of Artificial Sequence: Synthetic oligonucleotide
  Target: LAMA2; (+) strand; PAM type: YTN; PAM sequence: CTC
acagaatataaagcgtgtat

SEQ ID NO: 342574 - DNA, 20 bp, Artificial Sequence
  Description of Artificial Sequence: Synthetic oligonucleotide
  Target: LAMA2; (+) strand; PAM type: YTN; PAM sequence: CTG
tgtttccacatagacacact

SEQ ID NO: 342575 - DNA, 20 bp, Artificial Sequence
  Description of Artificial Sequence: Synthetic oligonucleotide
  Target: LAMA2; (+) strand; PAM type: YTN; PAM sequence: TTT
ccacatagacacactctgtt

SEQ ID NO: 342576 - DNA, 20 bp, Artificial Sequence
  Description of Artificial Sequence: Synthetic oligonucleotide
  Target: LAMA2; (+) strand; PAM type: YTN; PAM sequence: TTC
cacatagacacactctgtta

SEQ ID NO: 342577 - DNA, 20 bp, Artificial Sequence
  Description of Artificial Sequence: Synthetic oligonucleotide
  Target: LAMA2; (+) strand; PAM type: YTN; PAM sequence: CTC
tgttacccttatatgtattg

SEQ ID NO: 342578 - DNA, 20 bp, Artificial Sequence
  Description of Artificial Sequence: Synthetic oligonucleotide
  Target: LAMA2; (+) strand; PAM type: YTN; PAM sequence: CTG
ttacccttatatgtattgta

SEQ ID NO: 342579 - DNA, 20 bp, Artificial Sequence
  Description of Artificial Sequence: Synthetic oligonucleotide
  Target: LAMA2; (+) strand; PAM type: YTN; PAM sequence: TTA
cccttatatgtattgtataa

SEQ ID NO: 342580 - DNA, 20 bp, Artificial Sequence
  Description of Artificial Sequence: Synthetic oligonucleotide
  Target: LAMA2; (+) strand; PAM type: YTN; PAM sequence: CTT
atatgtattgtataatcaca

SEQ ID NO: 342581 - DNA, 20 bp, Artificial Sequence
  Description of Artificial Sequence: Synthetic oligonucleotide
  Target: LAMA2; (+) strand; PAM type: YTN; PAM sequence: TTA
tatgtattgtataatcacat

SEQ ID NO: 342582 - DNA, 20 bp, Artificial Sequence
  Description of Artificial Sequence: Synthetic oligonucleotide
  Target: LAMA2; (+) strand; PAM type: YTN; PAM sequence: TTG
tataatcacatgtgtagatg

SEQ ID NO: 342583 - DNA, 20 bp, Artificial Sequence
  Description of Artificial Sequence: Synthetic oligonucleotide
  Target: LAMA2; (+) strand; PAM type: YTN; PAM sequence: TTC
attgtatctggagtgacagt

SEQ ID NO: 342584 - DNA, 20 bp, Artificial Sequence
  Description of Artificial Sequence: Synthetic oligonucleotide
  Target: LAMA2; (+) strand; PAM type: YTN; PAM sequence: TTG
tatctggagtgacagttgac

SEQ ID NO: 342585 - DNA, 20 bp, Artificial Sequence
  Description of Artificial Sequence: Synthetic oligonucleotide
  Target: LAMA2; (+) strand; PAM type: YTN; PAM sequence: CTG
gagtgacagttgacaccttt

SEQ ID NO: 342586 - DNA, 20 bp, Artificial Sequence
  Description of Artificial Sequence: Synthetic oligonucleotide
  Target: LAMA2; (+) strand; PAM type: YTN; PAM sequence: TTG
acaccttttaggggcatttt

SEQ ID NO: 342587 - DNA, 20 bp, Artificial Sequence
  Description of Artificial Sequence: Synthetic oligonucleotide
  Target: LAMA2; (+) strand; PAM type: YTN; PAM sequence: CTT
ttaggggcattttacatgtt

SEQ ID NO: 342588 - DNA, 20 bp, Artificial Sequence
  Description of Artificial Sequence: Synthetic oligonucleotide
  Target: LAMA2; (+) strand; PAM type: YTN; PAM sequence: TTT
taggggcattttacatgttt

SEQ ID NO: 342589 - DNA, 20 bp, Artificial Sequence
  Description of Artificial Sequence: Synthetic oligonucleotide
  Target: LAMA2; (+) strand; PAM type: YTN; PAM sequence: TTT
aggggcattttacatgtttt

SEQ ID NO: 342590 - DNA, 20 bp, Artificial Sequence
  Description of Artificial Sequence: Synthetic oligonucleotide
  Target: LAMA2; (+) strand; PAM type: YTN; PAM sequence: TTA
ggggcattttacatgtttta

SEQ ID NO: 342591 - DNA, 20 bp, Artificial Sequence
  Description of Artificial Sequence: Synthetic oligonucleotide
  Target: LAMA2; (+) strand; PAM type: YTN; PAM sequence: TTT
tacatgttttaaaacctgac

SEQ ID NO: 342592 - DNA, 20 bp, Artificial Sequence
  Description of Artificial Sequence: Synthetic oligonucleotide
  Target: LAMA2; (+) strand; PAM type: YTN; PAM sequence: TTT
acatgttttaaaacctgaca

SEQ ID NO: 342593 - DNA, 20 bp, Artificial Sequence
  Description of Artificial Sequence: Synthetic oligonucleotide
  Target: LAMA2; (+) strand; PAM type: YTN; PAM sequence: TTA
catgttttaaaacctgacat

SEQ ID NO: 342594 - DNA, 20 bp, Artificial Sequence
  Description of Artificial Sequence: Synthetic oligonucleotide
  Target: LAMA2; (+) strand; PAM type: YTN; PAM sequence: TTT
taaaacctgacatccactta

SEQ ID NO: 342595 - DNA, 20 bp, Artificial Sequence
  Description of Artificial Sequence: Synthetic oligonucleotide
  Target: LAMA2; (+) strand; PAM type: YTN; PAM sequence: TTT
aaaacctgacatccacttac

SEQ ID NO: 342596 - DNA, 20 bp, Artificial Sequence
  Description of Artificial Sequence: Synthetic oligonucleotide
  Target: LAMA2; (+) strand; PAM type: YTN; PAM sequence: TTA
aaacctgacatccacttaca

SEQ ID NO: 342597 - DNA, 20 bp, Artificial Sequence
  Description of Artificial Sequence: Synthetic oligonucleotide
  Target: LAMA2; (+) strand; PAM type: YTN; PAM sequence: CTG
acatccacttacagcactta

SEQ ID NO: 342598 - DNA, 20 bp, Artificial Sequence
  Description of Artificial Sequence: Synthetic oligonucleotide
  Target: LAMA2; (+) strand; PAM type: YTN; PAM sequence: CTT
acagcacttatctactactc

SEQ ID NO: 342599 - DNA, 20 bp, Artificial Sequence
  Description of Artificial Sequence: Synthetic oligonucleotide
  Target: LAMA2; (+) strand; PAM type: YTN; PAM sequence: TTA
cagcacttatctactactct

SEQ ID NO: 342600 - DNA, 20 bp, Artificial Sequence
  Description of Artificial Sequence: Synthetic oligonucleotide
  Target: LAMA2; (+) strand; PAM type: YTN; PAM sequence: CTT
atctactactctcttcagga

SEQ ID NO: 342601 - DNA, 20 bp, Artificial Sequence
  Description of Artificial Sequence: Synthetic oligonucleotide
  Target: LAMA2; (+) strand; PAM type: YTN; PAM sequence: TTA
tctactactctcttcaggat

SEQ ID NO: 342602 - DNA, 20 bp, Artificial Sequence
  Description of Artificial Sequence: Synthetic oligonucleotide
  Target: LAMA2; (+) strand; PAM type: YTN; PAM sequence: CTA
ctactctcttcaggataaac

SEQ ID NO: 342603 - DNA, 20 bp, Artificial Sequence
  Description of Artificial Sequence: Synthetic oligonucleotide
  Target: LAMA2; (+) strand; PAM type: YTN; PAM sequence: CTA
ctctcttcaggataaactac

SEQ ID NO: 342604 - DNA, 20 bp, Artificial Sequence
  Description of Artificial Sequence: Synthetic oligonucleotide
  Target: LAMA2; (+) strand; PAM type: YTN; PAM sequence: CTC
tcttcaggataaactacctt

SEQ ID NO: 342605 - DNA, 20 bp, Artificial Sequence
  Description of Artificial Sequence: Synthetic oligonucleotide
  Target: LAMA2; (+) strand; PAM type: YTN; PAM sequence: CTC
ttcaggataaactaccttta

SEQ ID NO: 342606 - DNA, 20 bp, Artificial Sequence
  Description of Artificial Sequence: Synthetic oligonucleotide
  Target: LAMA2; (+) strand; PAM type: YTN; PAM sequence: CTT
caggataaactacctttatt

SEQ ID NO: 342607 - DNA, 20 bp, Artificial Sequence
  Description of Artificial Sequence: Synthetic oligonucleotide
  Target: LAMA2; (+) strand; PAM type: YTN; PAM sequence: TTC
aggataaactacctttattg

SEQ ID NO: 342608 - DNA, 20 bp, Artificial Sequence
  Description of Artificial Sequence: Synthetic oligonucleotide
  Target: LAMA2; (+) strand; PAM type: YTN; PAM sequence: CTA
cctttattgcaagacttttg

SEQ ID NO: 342609 - DNA, 20 bp, Artificial Sequence
  Description of Artificial Sequence: Synthetic oligonucleotide
  Target: LAMA2; (+) strand; PAM type: YTN; PAM sequence: CTT
tattgcaagacttttgctaa

SEQ ID NO: 342610 - DNA, 20 bp, Artificial Sequence
  Description of Artificial Sequence: Synthetic oligonucleotide
  Target: LAMA2; (+) strand; PAM type: YTN; PAM sequence: TTT
attgcaagacttttgctaaa

SEQ ID NO: 342611 - DNA, 20 bp, Artificial Sequence
  Description of Artificial Sequence: Synthetic oligonucleotide
  Target: LAMA2; (+) strand; PAM type: YTN; PAM sequence: TTA
ttgcaagacttttgctaaaa

SEQ ID NO: 342612 - DNA, 20 bp, Artificial Sequence
  Description of Artificial Sequence: Synthetic oligonucleotide
  Target: LAMA2; (+) strand; PAM type: YTN; PAM sequence: TTG
caagacttttgctaaaaatt

SEQ ID NO: 342613 - DNA, 20 bp, Artificial Sequence
  Description of Artificial Sequence: Synthetic oligonucleotide
  Target: LAMA2; (+) strand; PAM type: YTN; PAM sequence: CTT
ttgctaaaaattcttagatt

SEQ ID NO: 342614 - DNA, 20 bp, Artificial Sequence
  Description of Artificial Sequence: Synthetic oligonucleotide
  Target: LAMA2; (+) strand; PAM type: YTN; PAM sequence: TTT
tgctaaaaattcttagatta

SEQ ID NO: 342615 - DNA, 20 bp, Artificial Sequence
  Description of Artificial Sequence: Synthetic oligonucleotide
  Target: LAMA2; (+) strand; PAM type: YTN; PAM sequence: TTT
gctaaaaattcttagattat

SEQ ID NO: 342616 - DNA, 20 bp, Artificial Sequence
  Description of Artificial Sequence: Synthetic oligonucleotide
  Target: LAMA2; (+) strand; PAM type: YTN; PAM sequence: TTG
ctaaaaattcttagattatg

SEQ ID NO: 342617 - DNA, 20 bp, Artificial Sequence
  Description of Artificial Sequence: Synthetic oligonucleotide
  Target: LAMA2; (+) strand; PAM type: YTN; PAM sequence: CTA
aaaattcttagattatgtca

SEQ ID NO: 342618 - DNA, 20 bp, Artificial Sequence
  Description of Artificial Sequence: Synthetic oligonucleotide
  Target: LAMA2; (+) strand; PAM type: YTN; PAM sequence: TTC
ttagattatgtcaagggaaa

SEQ ID NO: 342619 - DNA, 20 bp, Artificial Sequence
  Description of Artificial Sequence: Synthetic oligonucleotide
  Target: LAMA2; (+) strand; PAM type: YTN; PAM sequence: CTT
agattatgtcaagggaaaaa

SEQ ID NO: 342620 - DNA, 20 bp, Artificial Sequence
  Description of Artificial Sequence: Synthetic oligonucleotide
  Target: LAMA2; (+) strand; PAM type: YTN; PAM sequence: TTA
gattatgtcaagggaaaaaa

SEQ ID NO: 342621 - DNA, 20 bp, Artificial Sequence
  Description of Artificial Sequence: Synthetic oligonucleotide
  Target: LAMA2; (+) strand; PAM type: YTN; PAM sequence: TTA
tgtcaagggaaaaaaatcct

SEQ ID NO: 342622 - DNA, 20 bp, Artificial Sequence
  Description of Artificial Sequence: Synthetic oligonucleotide
  Target: LAMA2; (+) strand; PAM type: YTN; PAM sequence: CTC
tattgctttttaaagaaaaa

SEQ ID NO: 342623 - DNA, 20 bp, Artificial Sequence
  Description of Artificial Sequence: Synthetic oligonucleotide
  Target: LAMA2; (+) strand; PAM type: YTN; PAM sequence: CTA
ttgctttttaaagaaaaaat

SEQ ID NO: 342624 - DNA, 20 bp, Artificial Sequence
  Description of Artificial Sequence: Synthetic oligonucleotide
  Target: LAMA2; (+) strand; PAM type: YTN; PAM sequence: TTG
ctttttaaagaaaaaattat

SEQ ID NO: 342625 - DNA, 20 bp, Artificial Sequence
  Description of Artificial Sequence: Synthetic oligonucleotide
  Target: LAMA2; (+) strand; PAM type: YTN; PAM sequence: CTT
tttaaagaaaaaattatcag

SEQ ID NO: 342626 - DNA, 20 bp, Artificial Sequence
  Description of Artificial Sequence: Synthetic oligonucleotide
  Target: LAMA2; (+) strand; PAM type: YTN; PAM sequence: TTT
ttaaagaaaaaattatcaga

SEQ ID NO: 342627 - DNA, 20 bp, Artificial Sequence
  Description of Artificial Sequence: Synthetic oligonucleotide
  Target: LAMA2; (+) strand; PAM type: YTN; PAM sequence: TTT
taaagaaaaaattatcagaa

SEQ ID NO: 342628 - DNA, 20 bp, Artificial Sequence
  Description of Artificial Sequence: Synthetic oligonucleotide
  Target: LAMA2; (+) strand; PAM type: YTN; PAM sequence: TTT
aaagaaaaaattatcagaat

SEQ ID NO: 342629 - DNA, 20 bp, Artificial Sequence
  Description of Artificial Sequence: Synthetic oligonucleotide
  Target: LAMA2; (+) strand; PAM type: YTN; PAM sequence: TTA
aagaaaaaattatcagaatg

SEQ ID NO: 342630 - DNA, 20 bp, Artificial Sequence
  Description of Artificial Sequence: Synthetic oligonucleotide
  Target: LAMA2; (+) strand; PAM type: YTN; PAM sequence: TTA
tcagaatgatttaattttgt

SEQ ID NO: 342631 - DNA, 20 bp, Artificial Sequence
  Description of Artificial Sequence: Synthetic oligonucleotide
  Target: LAMA2; (+) strand; PAM type: YTN; PAM sequence: TTT
aattttgtgttattttttat

SEQ ID NO: 342632 - DNA, 20 bp, Artificial Sequence
  Description of Artificial Sequence: Synthetic oligonucleotide
  Target: LAMA2; (+) strand; PAM type: YTN; PAM sequence: TTA
attttgtgttattttttatc

SEQ ID NO: 342633 - DNA, 20 bp, Artificial Sequence
  Description of Artificial Sequence: Synthetic oligonucleotide
  Target: LAMA2; (+) strand; PAM type: YTN; PAM sequence: TTT
tgtgttattttttatctcca

SEQ ID NO: 342634 - DNA, 20 bp, Artificial Sequence
  Description of Artificial Sequence: Synthetic oligonucleotide
  Target: LAMA2; (+) strand; PAM type: YTN; PAM sequence: TTT
gtgttattttttatctccac

SEQ ID NO: 342635 - DNA, 20 bp, Artificial Sequence
  Description of Artificial Sequence: Synthetic oligonucleotide
  Target: LAMA2; (+) strand; PAM type: YTN; PAM sequence: TTG
tgttattttttatctccaca

SEQ ID NO: 342636 - DNA, 20 bp, Artificial Sequence
  Description of Artificial Sequence: Synthetic oligonucleotide
  Target: LAMA2; (+) strand; PAM type: YTN; PAM sequence: TTA
ttttttatctccacattagt

SEQ ID NO: 342637 - DNA, 20 bp, Artificial Sequence
  Description of Artificial Sequence: Synthetic oligonucleotide
  Target: LAMA2; (+) strand; PAM type: YTN; PAM sequence: TTT
tttatctccacattagtttg

SEQ ID NO: 342638 - DNA, 20 bp, Artificial Sequence
  Description of Artificial Sequence: Synthetic oligonucleotide
  Target: LAMA2; (+) strand; PAM type: YTN; PAM sequence: TTT
ttatctccacattagtttgt

SEQ ID NO: 342639 - DNA, 20 bp, Artificial Sequence
  Description of Artificial Sequence: Synthetic oligonucleotide
  Target: LAMA2; (+) strand; PAM type: YTN; PAM sequence: TTT
tatctccacattagtttgtt

SEQ ID NO: 342640 - DNA, 20 bp, Artificial Sequence
  Description of Artificial Sequence: Synthetic oligonucleotide
  Target: LAMA2; (+) strand; PAM type: YTN; PAM sequence: TTT
atctccacattagtttgtta

SEQ ID NO: 342641 - DNA, 20 bp, Artificial Sequence
  Description of Artificial Sequence: Synthetic oligonucleotide
  Target: LAMA2; (+) strand; PAM type: YTN; PAM sequence: TTA
tctccacattagtttgttat

SEQ ID NO: 342642 - DNA, 20 bp, Artificial Sequence
  Description of Artificial Sequence: Synthetic oligonucleotide
  Target: LAMA2; (+) strand; PAM type: YTN; PAM sequence: CTC
cacattagtttgttatttca

SEQ ID NO: 342643 - DNA, 20 bp, Artificial Sequence
  Description of Artificial Sequence: Synthetic oligonucleotide
  Target: LAMA2; (+) strand; PAM type: YTN; PAM sequence: TTA
gtttgttatttcagtggtta

SEQ ID NO: 342644 - DNA, 20 bp, Artificial Sequence
  Description of Artificial Sequence: Synthetic oligonucleotide
  Target: LAMA2; (+) strand; PAM type: YTN; PAM sequence: TTT
gttatttcagtggttatttc

SEQ ID NO: 342645 - DNA, 20 bp, Artificial Sequence
  Description of Artificial Sequence: Synthetic oligonucleotide
  Target: LAMA2; (+) strand; PAM type: YTN; PAM sequence: TTG
ttatttcagtggttatttca

SEQ ID NO: 342646 - DNA, 20 bp, Artificial Sequence
  Description of Artificial Sequence: Synthetic oligonucleotide
  Target: LAMA2; (+) strand; PAM type: YTN; PAM sequence: TTA
tttcagtggttatttcagtt

SEQ ID NO: 342647 - DNA, 20 bp, Artificial Sequence
  Description of Artificial Sequence: Synthetic oligonucleotide
  Target: LAMA2; (+) strand; PAM type: YTN; PAM sequence: TTT
cagtggttatttcagttaaa

SEQ ID NO: 342648 - DNA, 20 bp, Artificial Sequence
  Description of Artificial Sequence: Synthetic oligonucleotide
  Target: LAMA2; (+) strand; PAM type: YTN; PAM sequence: TTC
agtggttatttcagttaaag

SEQ ID NO: 342649 - DNA, 20 bp, Artificial Sequence
  Description of Artificial Sequence: Synthetic oligonucleotide
  Target: LAMA2; (+) strand; PAM type: YTN; PAM sequence: TTA
tttcagttaaagacattttt

SEQ ID NO: 342650 - DNA, 20 bp, Artificial Sequence
  Description of Artificial Sequence: Synthetic oligonucleotide
  Target: LAMA2; (+) strand; PAM type: YTN; PAM sequence: TTT
cagttaaagacatttttctc

SEQ ID NO: 342651 - DNA, 20 bp, Artificial Sequence
  Description of Artificial Sequence: Synthetic oligonucleotide
  Target: LAMA2; (+) strand; PAM type: YTN; PAM sequence: TTC
agttaaagacatttttctct

SEQ ID NO: 342652 - DNA, 20 bp, Artificial Sequence
  Description of Artificial Sequence: Synthetic oligonucleotide
  Target: LAMA2; (+) strand; PAM type: YTN; PAM sequence: TTA
aagacatttttctcttccat

SEQ ID NO: 342653 - DNA, 20 bp, Artificial Sequence
  Description of Artificial Sequence: Synthetic oligonucleotide
  Target: LAMA2; (+) strand; PAM type: YTN; PAM sequence: TTT
ttctcttccattatttcaat

SEQ ID NO: 342654 - DNA, 20 bp, Artificial Sequence
  Description of Artificial Sequence: Synthetic oligonucleotide
  Target: LAMA2; (+) strand; PAM type: YTN; PAM sequence: TTT
tctcttccattatttcaatt

SEQ ID NO: 342655 - DNA, 20 bp, Artificial Sequence
  Description of Artificial Sequence: Synthetic oligonucleotide
  Target: LAMA2; (+) strand; PAM type: YTN; PAM sequence: TTT
ctcttccattatttcaattt

SEQ ID NO: 342656 - DNA, 20 bp, Artificial Sequence
  Description of Artificial Sequence: Synthetic oligonucleotide
  Target: LAMA2; (+) strand; PAM type: YTN; PAM sequence: TTC
tcttccattatttcaatttg

SEQ ID NO: 342657 - DNA, 20 bp, Artificial Sequence
  Description of Artificial Sequence: Synthetic oligonucleotide
  Target: LAMA2; (+) strand; PAM type: YTN; PAM sequence: CTC
ttccattatttcaatttgtt

SEQ ID NO: 342658 - DNA, 20 bp, Artificial Sequence
  Description of Artificial Sequence: Synthetic oligonucleotide
  Target: LAMA2; (+) strand; PAM type: YTN; PAM sequence: CTT
ccattatttcaatttgttac

SEQ ID NO: 342659 - DNA, 20 bp, Artificial Sequence
  Description of Artificial Sequence: Synthetic oligonucleotide
  Target: LAMA2; (+) strand; PAM type: YTN; PAM sequence: TTC
cattatttcaatttgttaca

SEQ ID NO: 342660 - DNA, 20 bp, Artificial Sequence
  Description of Artificial Sequence: Synthetic oligonucleotide
  Target: LAMA2; (+) strand; PAM type: YTN; PAM sequence: TTA
tttcaatttgttacattgta

SEQ ID NO: 342661 - DNA, 20 bp, Artificial Sequence
  Description of Artificial Sequence: Synthetic oligonucleotide
  Target: LAMA2; (+) strand; PAM type: YTN; PAM sequence: TTT
caatttgttacattgtatcc

SEQ ID NO: 342662 - DNA, 20 bp, Artificial Sequence
  Description of Artificial Sequence: Synthetic oligonucleotide
  Target: LAMA2; (+) strand; PAM type: YTN; PAM sequence: TTC
aatttgttacattgtatcca

SEQ ID NO: 342663 - DNA, 20 bp, Artificial Sequence
  Description of Artificial Sequence: Synthetic oligonucleotide
  Target: LAMA2; (+) strand; PAM type: YTN; PAM sequence: TTT
gttacattgtatccatttat

SEQ ID NO: 342664 - DNA, 20 bp, Artificial Sequence
  Description of Artificial Sequence: Synthetic oligonucleotide
  Target: LAMA2; (+) strand; PAM type: YTN; PAM sequence: TTG
ttacattgtatccatttatc

SEQ ID NO: 342665 - DNA, 20 bp, Artificial Sequence
  Description of Artificial Sequence: Synthetic oligonucleotide
  Target: LAMA2; (+) strand; PAM type: YTN; PAM sequence: TTA
cattgtatccatttatctca

SEQ ID NO: 342666 - DNA, 20 bp, Artificial Sequence
  Description of Artificial Sequence: Synthetic oligonucleotide
  Target: LAMA2; (+) strand; PAM type: YTN; PAM sequence: TTG
tatccatttatctcatagaa

SEQ ID NO: 342667 - DNA, 20 bp, Artificial Sequence
  Description of Artificial Sequence: Synthetic oligonucleotide
  Target: LAMA2; (+) strand; PAM type: YTN; PAM sequence: TTT
atctcatagaaagataaact

SEQ ID NO: 342668 - DNA, 20 bp, Artificial Sequence
  Description of Artificial Sequence: Synthetic oligonucleotide
  Target: LAMA2; (+) strand; PAM type: YTN; PAM sequence: TTA
tctcatagaaagataaactt

SEQ ID NO: 342669 - DNA, 20 bp, Artificial Sequence
  Description of Artificial Sequence: Synthetic oligonucleotide
  Target: LAMA2; (+) strand; PAM type: YTN; PAM sequence: CTC
atagaaagataaacttttgt

SEQ ID NO: 342670 - DNA, 20 bp, Artificial Sequence
  Description of Artificial Sequence: Synthetic oligonucleotide
  Target: LAMA2; (+) strand; PAM type: YTN; PAM sequence: CTT
ttgtgttgaattagctgtgg

SEQ ID NO: 342671 - DNA, 20 bp, Artificial Sequence
  Description of Artificial Sequence: Synthetic oligonucleotide
  Target: LAMA2; (+) strand; PAM type: YTN; PAM sequence: TTT
tgtgttgaattagctgtgga

SEQ ID NO: 342672 - DNA, 20 bp, Artificial Sequence
  Description of Artificial Sequence: Synthetic oligonucleotide
  Target: LAMA2; (+) strand; PAM type: YTN; PAM sequence: TTT
gtgttgaattagctgtggaa

SEQ ID NO: 342673 - DNA, 20 bp, Artificial Sequence
  Description of Artificial Sequence: Synthetic oligonucleotide
  Target: LAMA2; (+) strand; PAM type: YTN; PAM sequence: TTG
tgttgaattagctgtggaag

SEQ ID NO: 342674 - DNA, 20 bp, Artificial Sequence
  Description of Artificial Sequence: Synthetic oligonucleotide
  Target: LAMA2; (+) strand; PAM type: YTN; PAM sequence: TTG
aattagctgtggaagaccag

SEQ ID NO: 342675 - DNA, 20 bp, Artificial Sequence
  Description of Artificial Sequence: Synthetic oligonucleotide
  Target: LAMA2; (+) strand; PAM type: YTN; PAM sequence: TTA
gctgtggaagaccagctcac

SEQ ID NO: 342676 - DNA, 20 bp, Artificial Sequence
  Description of Artificial Sequence: Synthetic oligonucleotide
  Target: LAMA2; (+) strand; PAM type: YTN; PAM sequence: CTG
tggaagaccagctcacacat

SEQ ID NO: 342677 - DNA, 20 bp, Artificial Sequence
  Description of Artificial Sequence: Synthetic oligonucleotide
  Target: LAMA2; (+) strand; PAM type: YTN; PAM sequence: CTC
acacattaatcactactaag

SEQ ID NO: 342678 - DNA, 20 bp, Artificial Sequence
  Description of Artificial Sequence: Synthetic oligonucleotide
  Target: LAMA2; (+) strand; PAM type: YTN; PAM sequence: TTA
atcactactaagcaaatgcg

SEQ ID NO: 342679 - DNA, 20 bp, Artificial Sequence
  Description of Artificial Sequence: Synthetic oligonucleotide
  Target: LAMA2; (+) strand; PAM type: YTN; PAM sequence: CTA
ctaagcaaatgcgttacaaa

SEQ ID NO: 342680 - DNA, 20 bp, Artificial Sequence
  Description of Artificial Sequence: Synthetic oligonucleotide
  Target: LAMA2; (+) strand; PAM type: YTN; PAM sequence: CTA
agcaaatgcgttacaaaaaa

SEQ ID NO: 342681 - DNA, 20 bp, Artificial Sequence
  Description of Artificial Sequence: Synthetic oligonucleotide
  Target: LAMA2; (+) strand; PAM type: YTN; PAM sequence: TTA
caaaaaagagaggacaacaa

SEQ ID NO: 342682 - DNA, 20 bp, Artificial Sequence
  Description of Artificial Sequence: Synthetic oligonucleotide
  Target: LAMA2; (+) strand; PAM type: YTN; PAM sequence: CTG
gaatacagtttcagttcaac

SEQ ID NO: 342683 - DNA, 20 bp, Artificial Sequence
  Description of Artificial Sequence: Synthetic oligonucleotide
  Target: LAMA2; (+) strand; PAM type: YTN; PAM sequence: TTT
cagttcaaccaccaaacgat

SEQ ID NO: 342684 - DNA, 20 bp, Artificial Sequence
  Description of Artificial Sequence: Synthetic oligonucleotide
  Target: LAMA2; (+) strand; PAM type: YTN; PAM sequence: TTC
agttcaaccaccaaacgatt

SEQ ID NO: 342685 - DNA, 20 bp, Artificial Sequence
  Description of Artificial Sequence: Synthetic oligonucleotide
  Target: LAMA2; (+) strand; PAM type: YTN; PAM sequence: TTC
aaccaccaaacgatttgata

SEQ ID NO: 342686 - DNA, 20 bp, Artificial Sequence
  Description of Artificial Sequence: Synthetic oligonucleotide
  Target: LAMA2; (+) strand; PAM type: YTN; PAM sequence: TTT
gatatcatgaataaatttct

SEQ ID NO: 342687 - DNA, 20 bp, Artificial Sequence
  Description of Artificial Sequence: Synthetic oligonucleotide
  Target: LAMA2; (+) strand; PAM type: YTN; PAM sequence: TTG
atatcatgaataaatttctt

SEQ ID NO: 342688 - DNA, 20 bp, Artificial Sequence
  Description of Artificial Sequence: Synthetic oligonucleotide
  Target: LAMA2; (+) strand; PAM type: YTN; PAM sequence: TTT
cttgggtatatgtagccagt

SEQ ID NO: 342689 - DNA, 20 bp, Artificial Sequence
  Description of Artificial Sequence: Synthetic oligonucleotide
  Target: LAMA2; (+) strand; PAM type: YTN; PAM sequence: TTC
ttgggtatatgtagccagta

SEQ ID NO: 342690 - DNA, 20 bp, Artificial Sequence
  Description of Artificial Sequence: Synthetic oligonucleotide
  Target: LAMA2; (+) strand; PAM type: YTN; PAM sequence: CTT
gggtatatgtagccagtaag

SEQ ID NO: 342691 - DNA, 20 bp, Artificial Sequence
  Description of Artificial Sequence: Synthetic oligonucleotide
  Target: LAMA2; (+) strand; PAM type: YTN; PAM sequence: TTG
ggtatatgtagccagtaagt

SEQ ID NO: 342692 - DNA, 20 bp, Artificial Sequence
  Description of Artificial Sequence: Synthetic oligonucleotide
  Target: LAMA2; (+) strand; PAM type: YTN; PAM sequence: CTC
aacatttagctatttttttc

SEQ ID NO: 342693 - DNA, 20 bp, Artificial Sequence
  Description of Artificial Sequence: Synthetic oligonucleotide
  Target: LAMA2; (+) strand; PAM type: YTN; PAM sequence: TTT
agctatttttttcaataaat

SEQ ID NO: 342694 - DNA, 20 bp, Artificial Sequence
  Description of Artificial Sequence: Synthetic oligonucleotide
  Target: LAMA2; (+) strand; PAM type: YTN; PAM sequence: TTA
gctatttttttcaataaata

SEQ ID NO: 342695 - DNA, 20 bp, Artificial Sequence
  Description of Artificial Sequence: Synthetic oligonucleotide
  Target: LAMA2; (+) strand; PAM type: YTN; PAM sequence: CTA
tttttttcaataaataaata

SEQ ID NO: 342696 - DNA, 20 bp, Artificial Sequence
  Description of Artificial Sequence: Synthetic oligonucleotide
  Target: LAMA2; (+) strand; PAM type: YTN; PAM sequence: TTT
ttttcaataaataaatattg

SEQ ID NO: 342697 - DNA, 20 bp, Artificial Sequence
  Description of Artificial Sequence: Synthetic oligonucleotide
  Target: LAMA2; (+) strand; PAM type: YTN; PAM sequence: TTT
tttcaataaataaatattga

SEQ ID NO: 342698 - DNA, 20 bp, Artificial Sequence
  Description of Artificial Sequence: Synthetic oligonucleotide
  Target: LAMA2; (+) strand; PAM type: YTN; PAM sequence: TTT
ttcaataaataaatattgag

SEQ ID NO: 342699 - DNA, 20 bp, Artificial Sequence
  Description of Artificial Sequence: Synthetic oligonucleotide
  Target: LAMA2; (+) strand; PAM type: YTN; PAM sequence: TTT
tcaataaataaatattgagc

SEQ ID NO: 342700 - DNA, 20 bp, Artificial Sequence
  Description of Artificial Sequence: Synthetic oligonucleotide
  Target: LAMA2; (+) strand; PAM type: YTN; PAM sequence: TTT
caataaataaatattgagca

SEQ ID NO: 342701 - DNA, 20 bp, Artificial Sequence
  Description of Artificial Sequence: Synthetic oligonucleotide
  Target: LAMA2; (+) strand; PAM type: YTN; PAM sequence: TTC
aataaataaatattgagcac

SEQ ID NO: 342702 - DNA, 20 bp, Artificial Sequence
  Description of Artificial Sequence: Synthetic oligonucleotide
  Target: LAMA2; (+) strand; PAM type: YTN; PAM sequence: TTG
agcactgtctttatggcaaa

SEQ ID NO: 342703 - DNA, 20 bp, Artificial Sequence
  Description of Artificial Sequence: Synthetic oligonucleotide
  Target: LAMA2; (+) strand; PAM type: YTN; PAM sequence: CTG
tctttatggcaaacactgtc

SEQ ID NO: 342704 - DNA, 20 bp, Artificial Sequence
  Description of Artificial Sequence: Synthetic oligonucleotide
  Target: LAMA2; (+) strand; PAM type: YTN; PAM sequence: CTT
tatggcaaacactgtcttag

SEQ ID NO: 342705 - DNA, 20 bp, Artificial Sequence
  Description of Artificial Sequence: Synthetic oligonucleotide
  Target: LAMA2; (+) strand; PAM type: YTN; PAM sequence: TTT
atggcaaacactgtcttagg

SEQ ID NO: 342706 - DNA, 20 bp, Artificial Sequence
  Description of Artificial Sequence: Synthetic oligonucleotide
  Target: LAMA2; (+) strand; PAM type: YTN; PAM sequence: TTA
tggcaaacactgtcttaggt

SEQ ID NO: 342707 - DNA, 20 bp, Artificial Sequence
  Description of Artificial Sequence: Synthetic oligonucleotide
  Target: LAMA2; (+) strand; PAM type: YTN; PAM sequence: CTG
tcttaggtgcaggggataat

SEQ ID NO: 342708 - DNA, 20 bp, Artificial Sequence
  Description of Artificial Sequence: Synthetic oligonucleotide
  Target: LAMA2; (+) strand; PAM type: YTN; PAM sequence: CTT
aggtgcaggggataatggac

SEQ ID NO: 342709 - DNA, 20 bp, Artificial Sequence
  Description of Artificial Sequence: Synthetic oligonucleotide
  Target: LAMA2; (+) strand; PAM type: YTN; PAM sequence: TTA
ggtgcaggggataatggaca

SEQ ID NO: 342710 - DNA, 20 bp, Artificial Sequence
  Description of Artificial Sequence: Synthetic oligonucleotide
  Target: LAMA2; (+) strand; PAM type: YTN; PAM sequence: TTA
tgcttttgggggattagata

SEQ ID NO: 342711 - DNA, 20 bp, Artificial Sequence
  Description of Artificial Sequence: Synthetic oligonucleotide
  Target: LAMA2; (+) strand; PAM type: YTN; PAM sequence: CTT
ttgggggattagataagaga

SEQ ID NO: 342712 - DNA, 20 bp, Artificial Sequence
  Description of Artificial Sequence: Synthetic oligonucleotide
  Target: LAMA2; (+) strand; PAM type: YTN; PAM sequence: TTT
tgggggattagataagagag

SEQ ID NO: 342713 - DNA, 20 bp, Artificial Sequence
  Description of Artificial Sequence: Synthetic oligonucleotide
  Target: LAMA2; (+) strand; PAM type: YTN; PAM sequence: TTT
gggggattagataagagagg

SEQ ID NO: 342714 - DNA, 20 bp, Artificial Sequence
  Description of Artificial Sequence: Synthetic oligonucleotide
  Target: LAMA2; (+) strand; PAM type: YTN; PAM sequence: TTG
ggggattagataagagagga

SEQ ID NO: 342715 - DNA, 20 bp, Artificial Sequence
  Description of Artificial Sequence: Synthetic oligonucleotide
  Target: LAMA2; (+) strand; PAM type: YTN; PAM sequence: TTA
gataagagaggaaataagtc

SEQ ID NO: 342716 - DNA, 20 bp, Artificial Sequence
  Description of Artificial Sequence: Synthetic oligonucleotide
  Target: LAMA2; (+) strand; PAM type: YTN; PAM sequence: CTC
tagcacagaaaagtctggtt

SEQ ID NO: 342717 - DNA, 20 bp, Artificial Sequence
  Description of Artificial Sequence: Synthetic oligonucleotide
  Target: LAMA2; (+) strand; PAM type: YTN; PAM sequence: CTA
gcacagaaaagtctggttac

SEQ ID NO: 342718 - DNA, 20 bp, Artificial Sequence
  Description of Artificial Sequence: Synthetic oligonucleotide
  Target: LAMA2; (+) strand; PAM type: YTN; PAM sequence: CTG
gttacaagattacagagaga

SEQ ID NO: 342719 - DNA, 20 bp, Artificial Sequence
  Description of Artificial Sequence: Synthetic oligonucleotide
  Target: LAMA2; (+) strand; PAM type: YTN; PAM sequence: TTA
caagattacagagagagaga

SEQ ID NO: 342720 - DNA, 20 bp, Artificial Sequence
  Description of Artificial Sequence: Synthetic oligonucleotide
  Target: LAMA2; (+) strand; PAM type: YTN; PAM sequence: TTA
cagagagagagagaaaaaaa

SEQ ID NO: 342721 - DNA, 20 bp, Artificial Sequence
  Description of Artificial Sequence: Synthetic oligonucleotide
  Target: LAMA2; (+) strand; PAM type: YTN; PAM sequence: CTG
tagtgacttgtctagggaac

SEQ ID NO: 342722 - DNA, 20 bp, Artificial Sequence
  Description of Artificial Sequence: Synthetic oligonucleotide
  Target: LAMA2; (+) strand; PAM type: YTN; PAM sequence: CTT
gtctagggaactgtgtggtt

SEQ ID NO: 342723 - DNA, 20 bp, Artificial Sequence
  Description of Artificial Sequence: Synthetic oligonucleotide
  Target: LAMA2; (+) strand; PAM type: YTN; PAM sequence: TTG
tctagggaactgtgtggttg

SEQ ID NO: 342724 - DNA, 20 bp, Artificial Sequence
  Description of Artificial Sequence: Synthetic oligonucleotide
  Target: LAMA2; (+) strand; PAM type: YTN; PAM sequence: CTA
gggaactgtgtggttgccac

SEQ ID NO: 342725 - DNA, 20 bp, Artificial Sequence
  Description of Artificial Sequence: Synthetic oligonucleotide
  Target: LAMA2; (+) strand; PAM type: YTN; PAM sequence: CTG
tgtggttgccacatagaaaa

SEQ ID NO: 342726 - DNA, 20 bp, Artificial Sequence
  Description of Artificial Sequence: Synthetic oligonucleotide
  Target: LAMA2; (+) strand; PAM type: YTN; PAM sequence: TTG
ccacatagaaaatgtggaag

SEQ ID NO: 342727 - DNA, 20 bp, Artificial Sequence
  Description of Artificial Sequence: Synthetic oligonucleotide
  Target: LAMA2; (+) strand; PAM type: YTN; PAM sequence: CTA
tgttcctagcaattgccttg

SEQ ID NO: 342728 - DNA, 20 bp, Artificial Sequence
  Description of Artificial Sequence: Synthetic oligonucleotide
  Target: LAMA2; (+) strand; PAM type: YTN; PAM sequence: TTC
ctagcaattgccttgactca

SEQ ID NO: 342729 - DNA, 20 bp, Artificial Sequence
  Description of Artificial Sequence: Synthetic oligonucleotide
  Target: LAMA2; (+) strand; PAM type: YTN; PAM sequence: CTA
gcaattgccttgactcacca

SEQ ID NO: 342730 - DNA, 20 bp, Artificial Sequence
  Description of Artificial Sequence: Synthetic oligonucleotide
  Target: LAMA2; (+) strand; PAM type: YTN; PAM sequence: TTG
ccttgactcaccataattat

SEQ ID NO: 342731 - DNA, 20 bp, Artificial Sequence
  Description of Artificial Sequence: Synthetic oligonucleotide
  Target: LAMA2; (+) strand; PAM type: YTN; PAM sequence: CTT
gactcaccataattatttca

SEQ ID NO: 342732 - DNA, 20 bp, Artificial Sequence
  Description of Artificial Sequence: Synthetic oligonucleotide
  Target: LAMA2; (+) strand; PAM type: YTN; PAM sequence: TTG
actcaccataattatttcac

SEQ ID NO: 342733 - DNA, 20 bp, Artificial Sequence
  Description of Artificial Sequence: Synthetic oligonucleotide
  Target: LAMA2; (+) strand; PAM type: YTN; PAM sequence: CTC
accataattatttcacctac

SEQ ID NO: 342734 - DNA, 20 bp, Artificial Sequence
  Description of Artificial Sequence: Synthetic oligonucleotide
  Target: LAMA2; (+) strand; PAM type: YTN; PAM sequence: TTA
tttcacctactgaataactg

SEQ ID NO: 342735 - DNA, 20 bp, Artificial Sequence
  Description of Artificial Sequence: Synthetic oligonucleotide
  Target: LAMA2; (+) strand; PAM type: YTN; PAM sequence: TTT
cacctactgaataactgaat

SEQ ID NO: 342736 - DNA, 20 bp, Artificial Sequence
  Description of Artificial Sequence: Synthetic oligonucleotide
  Target: LAMA2; (+) strand; PAM type: YTN; PAM sequence: TTC
acctactgaataactgaata

SEQ ID NO: 342737 - DNA, 20 bp, Artificial Sequence
  Description of Artificial Sequence: Synthetic oligonucleotide
  Target: LAMA2; (+) strand; PAM type: YTN; PAM sequence: CTA
ctgaataactgaataaattg

SEQ ID NO: 342738 - DNA, 20 bp, Artificial Sequence
  Description of Artificial Sequence: Synthetic oligonucleotide
  Target: LAMA2; (+) strand; PAM type: YTN; PAM sequence: CTG
aataactgaataaattgagt

SEQ ID NO: 342739 - DNA, 20 bp, Artificial Sequence
  Description of Artificial Sequence: Synthetic oligonucleotide
  Target: LAMA2; (+) strand; PAM type: YTN; PAM sequence: CTG
aataaattgagtagagaggc

SEQ ID NO: 342740 - DNA, 20 bp, Artificial Sequence
  Description of Artificial Sequence: Synthetic oligonucleotide
  Target: LAMA2; (+) strand; PAM type: YTN; PAM sequence: TTG
agtagagaggctgcttgtac

SEQ ID NO: 342741 - DNA, 20 bp, Artificial Sequence
  Description of Artificial Sequence: Synthetic oligonucleotide
  Target: LAMA2; (+) strand; PAM type: YTN; PAM sequence: CTG
cttgtaccaaactgtaaaac

SEQ ID NO: 342742 - DNA, 20 bp, Artificial Sequence
  Description of Artificial Sequence: Synthetic oligonucleotide
  Target: LAMA2; (+) strand; PAM type: YTN; PAM sequence: CTT
gtaccaaactgtaaaacagt

SEQ ID NO: 342743 - DNA, 20 bp, Artificial Sequence
  Description of Artificial Sequence: Synthetic oligonucleotide
  Target: LAMA2; (+) strand; PAM type: YTN; PAM sequence: TTG
taccaaactgtaaaacagtt

SEQ ID NO: 342744 - DNA, 20 bp, Artificial Sequence
  Description of Artificial Sequence: Synthetic oligonucleotide
  Target: LAMA2; (+) strand; PAM type: YTN; PAM sequence: CTG
taaaacagtttcaggatgag

SEQ ID NO: 342745 - DNA, 20 bp, Artificial Sequence
  Description of Artificial Sequence: Synthetic oligonucleotide
  Target: LAMA2; (+) strand; PAM type: YTN; PAM sequence: TTT
caggatgagaaaattacatt

SEQ ID NO: 342746 - DNA, 20 bp, Artificial Sequence
  Description of Artificial Sequence: Synthetic oligonucleotide
  Target: LAMA2; (+) strand; PAM type: YTN; PAM sequence: TTC
aggatgagaaaattacattt

SEQ ID NO: 342747 - DNA, 20 bp, Artificial Sequence
  Description of Artificial Sequence: Synthetic oligonucleotide
  Target: LAMA2; (+) strand; PAM type: YTN; PAM sequence: TTA
cattttaaacatacacttag

SEQ ID NO: 342748 - DNA, 20 bp, Artificial Sequence
  Description of Artificial Sequence: Synthetic oligonucleotide
  Target: LAMA2; (+) strand; PAM type: YTN; PAM sequence: TTT
taaacatacacttagggaaa

SEQ ID NO: 342749 - DNA, 20 bp, Artificial Sequence
  Description of Artificial Sequence: Synthetic oligonucleotide
  Target: LAMA2; (+) strand; PAM type: YTN; PAM sequence: TTT
aaacatacacttagggaaaa

SEQ ID NO: 342750 - DNA, 20 bp, Artificial Sequence
  Description of Artificial Sequence: Synthetic oligonucleotide
  Target: LAMA2; (+) strand; PAM type: YTN; PAM sequence: TTA
aacatacacttagggaaaac

SEQ ID NO: 342751 - DNA, 20 bp, Artificial Sequence
  Description of Artificial Sequence: Synthetic oligonucleotide
  Target: LAMA2; (+) strand; PAM type: YTN; PAM sequence: CTT
agggaaaacaaaaacaaaaa

SEQ ID NO: 342752 - DNA, 20 bp, Artificial Sequence
  Description of Artificial Sequence: Synthetic oligonucleotide
  Target: LAMA2; (+) strand; PAM type: YTN; PAM sequence: TTA
gggaaaacaaaaacaaaaac

SEQ ID NO: 342753 - DNA, 20 bp, Artificial Sequence
  Description of Artificial Sequence: Synthetic oligonucleotide
  Target: LAMA2; (+) strand; PAM type: YTN; PAM sequence: CTG
ccttgcagaaacatgtcata

SEQ ID NO: 342754 - DNA, 20 bp, Artificial Sequence
  Description of Artificial Sequence: Synthetic oligonucleotide
  Target: LAMA2; (+) strand; PAM type: YTN; PAM sequence: CTT
gcagaaacatgtcatagaaa

SEQ ID NO: 342755 - DNA, 20 bp, Artificial Sequence
  Description of Artificial Sequence: Synthetic oligonucleotide
  Target: LAMA2; (+) strand; PAM type: YTN; PAM sequence: TTG
cagaaacatgtcatagaaac

SEQ ID NO: 342756 - DNA, 20 bp, Artificial Sequence
  Description of Artificial Sequence: Synthetic oligonucleotide
  Target: LAMA2; (+) strand; PAM type: YTN; PAM sequence: TTT
taggcagaattatttccctg

SEQ ID NO: 342757 - DNA, 20 bp, Artificial Sequence
  Description of Artificial Sequence: Synthetic oligonucleotide
  Target: LAMA2; (+) strand; PAM type: YTN; PAM sequence: TTT
aggcagaattatttccctgt

SEQ ID NO: 342758 - DNA, 20 bp, Artificial Sequence
  Description of Artificial Sequence: Synthetic oligonucleotide
  Target: LAMA2; (+) strand; PAM type: YTN; PAM sequence: TTA
ggcagaattatttccctgta

SEQ ID NO: 342759 - DNA, 20 bp, Artificial Sequence
  Description of Artificial Sequence: Synthetic oligonucleotide
  Target: LAMA2; (+) strand; PAM type: YTN; PAM sequence: TTA
tttccctgtacaacaattgt

SEQ ID NO: 342760 - DNA, 20 bp, Artificial Sequence
  Description of Artificial Sequence: Synthetic oligonucleotide
  Target: LAMA2; (+) strand; PAM type: YTN; PAM sequence: TTT
ccctgtacaacaattgtgat

SEQ ID NO: 342761 - DNA, 20 bp, Artificial Sequence
  Description of Artificial Sequence: Synthetic oligonucleotide
  Target: LAMA2; (+) strand; PAM type: YTN; PAM sequence: TTC
cctgtacaacaattgtgatt

SEQ ID NO: 342762 - DNA, 20 bp, Artificial Sequence
  Description of Artificial Sequence: Synthetic oligonucleotide
  Target: LAMA2; (+) strand; PAM type: YTN; PAM sequence: CTG
tacaacaattgtgattaagt

SEQ ID NO: 342763 - DNA, 20 bp, Artificial Sequence
  Description of Artificial Sequence: Synthetic oligonucleotide
  Target: LAMA2; (+) strand; PAM type: YTN; PAM sequence: TTG
tgattaagtaaatgttaaaa

SEQ ID NO: 342764 - DNA, 20 bp, Artificial Sequence
  Description of Artificial Sequence: Synthetic oligonucleotide
  Target: LAMA2; (+) strand; PAM type: YTN; PAM sequence: TTA
agtaaatgttaaaataaaaa

SEQ ID NO: 342765 - DNA, 20 bp, Artificial Sequence
  Description of Artificial Sequence: Synthetic oligonucleotide
  Target: LAMA2; (+) strand; PAM type: YTN; PAM sequence: TTA
aaataaaaagaaggatgttt

SEQ ID NO: 342766 - DNA, 20 bp, Artificial Sequence
  Description of Artificial Sequence: Synthetic oligonucleotide
  Target: LAMA2; (+) strand; PAM type: YTN; PAM sequence: TTT
agcagcataaggaatagaaa

SEQ ID NO: 342767 - DNA, 20 bp, Artificial Sequence
  Description of Artificial Sequence: Synthetic oligonucleotide
  Target: LAMA2; (+) strand; PAM type: YTN; PAM sequence: TTA
gcagcataaggaatagaaac

SEQ ID NO: 342768 - DNA, 20 bp, Artificial Sequence
  Description of Artificial Sequence: Synthetic oligonucleotide
  Target: LAMA2; (+) strand; PAM type: YTN; PAM sequence: TTT
ggagttttagctttagctta

SEQ ID NO: 342769 - DNA, 20 bp, Artificial Sequence
  Description of Artificial Sequence: Synthetic oligonucleotide
  Target: LAMA2; (+) strand; PAM type: YTN; PAM sequence: TTG
gagttttagctttagcttat

SEQ ID NO: 342770 - DNA, 20 bp, Artificial Sequence
  Description of Artificial Sequence: Synthetic oligonucleotide
  Target: LAMA2; (+) strand; PAM type: YTN; PAM sequence: TTT
tagctttagcttatacaatg

SEQ ID NO: 342771 - DNA, 20 bp, Artificial Sequence
  Description of Artificial Sequence: Synthetic oligonucleotide
  Target: LAMA2; (+) strand; PAM type: YTN; PAM sequence: TTT
agctttagcttatacaatgc

SEQ ID NO: 342772 - DNA, 20 bp, Artificial Sequence
  Description of Artificial Sequence: Synthetic oligonucleotide
  Target: LAMA2; (+) strand; PAM type: YTN; PAM sequence: TTA
gctttagcttatacaatgca

SEQ ID NO: 342773 - DNA, 20 bp, Artificial Sequence
  Description of Artificial Sequence: Synthetic oligonucleotide
  Target: LAMA2; (+) strand; PAM type: YTN; PAM sequence: CTT
tagcttatacaatgcatcct

SEQ ID NO: 342774 - DNA, 20 bp, Artificial Sequence
  Description of Artificial Sequence: Synthetic oligonucleotide
  Target: LAMA2; (+) strand; PAM type: YTN; PAM sequence: TTT
agcttatacaatgcatcctg

SEQ ID NO: 342775 - DNA, 20 bp, Artificial Sequence
  Description of Artificial Sequence: Synthetic oligonucleotide
  Target: LAMA2; (+) strand; PAM type: YTN; PAM sequence: TTA
gcttatacaatgcatcctgt

SEQ ID NO: 342776 - DNA, 20 bp, Artificial Sequence
  Description of Artificial Sequence: Synthetic oligonucleotide
  Target: LAMA2; (+) strand; PAM type: YTN; PAM sequence: CTT
atacaatgcatcctgtttta

SEQ ID NO: 342777 - DNA, 20 bp, Artificial Sequence
  Description of Artificial Sequence: Synthetic oligonucleotide
  Target: LAMA2; (+) strand; PAM type: YTN; PAM sequence: TTA
tacaatgcatcctgttttat

SEQ ID NO: 342778 - DNA, 20 bp, Artificial Sequence
  Description of Artificial Sequence: Synthetic oligonucleotide
  Target: LAMA2; (+) strand; PAM type: YTN; PAM sequence: CTG
ttttataattgttttccaac

SEQ ID NO: 342779 - DNA, 20 bp, Artificial Sequence
  Description of Artificial Sequence: Synthetic oligonucleotide
  Target: LAMA2; (+) strand; PAM type: YTN; PAM sequence: TTT
tataattgttttccaacaat

SEQ ID NO: 342780 - DNA, 20 bp, Artificial Sequence
  Description of Artificial Sequence: Synthetic oligonucleotide
  Target: LAMA2; (+) strand; PAM type: YTN; PAM sequence: TTT
ataattgttttccaacaatg

SEQ ID NO: 342781 - DNA, 20 bp, Artificial Sequence
  Description of Artificial Sequence: Synthetic oligonucleotide
  Target: LAMA2; (+) strand; PAM type: YTN; PAM sequence: TTA
taattgttttccaacaatgt

SEQ ID NO: 342782 - DNA, 20 bp, Artificial Sequence
  Description of Artificial Sequence: Synthetic oligonucleotide
  Target: LAMA2; (+) strand; PAM type: YTN; PAM sequence: TTG
ttttccaacaatgtttacat

SEQ ID NO: 342783 - DNA, 20 bp, Artificial Sequence
  Description of Artificial Sequence: Synthetic oligonucleotide
  Target: LAMA2; (+) strand; PAM type: YTN; PAM sequence: TTT
tccaacaatgtttacataat

SEQ ID NO: 342784 - DNA, 20 bp, Artificial Sequence
  Description of Artificial Sequence: Synthetic oligonucleotide
  Target: LAMA2; (+) strand; PAM type: YTN; PAM sequence: TTT
ccaacaatgtttacataatg

SEQ ID NO: 342785 - DNA, 20 bp, Artificial Sequence
  Description of Artificial Sequence: Synthetic oligonucleotide
  Target: LAMA2; (+) strand; PAM type: YTN; PAM sequence: TTC
caacaatgtttacataatgg

SEQ ID NO: 342786 - DNA, 20 bp, Artificial Sequence
  Description of Artificial Sequence: Synthetic oligonucleotide
  Target: LAMA2; (+) strand; PAM type: YTN; PAM sequence: TTT
acataatgggagggtcactc

SEQ ID NO: 342787 - DNA, 20 bp, Artificial Sequence
  Description of Artificial Sequence: Synthetic oligonucleotide
  Target: LAMA2; (+) strand; PAM type: YTN; PAM sequence: TTA
cataatgggagggtcactct

SEQ ID NO: 342788 - DNA, 20 bp, Artificial Sequence
  Description of Artificial Sequence: Synthetic oligonucleotide
  Target: LAMA2; (+) strand; PAM type: YTN; PAM sequence: CTC
tttaacatgaggggctctgt

SEQ ID NO: 342789 - DNA, 20 bp, Artificial Sequence
  Description of Artificial Sequence: Synthetic oligonucleotide
  Target: LAMA2; (+) strand; PAM type: YTN; PAM sequence: CTT
taacatgaggggctctgtca

SEQ ID NO: 342790 - DNA, 20 bp, Artificial Sequence
  Description of Artificial Sequence: Synthetic oligonucleotide
  Target: LAMA2; (+) strand; PAM type: YTN; PAM sequence: TTT
aacatgaggggctctgtcac

SEQ ID NO: 342791 - DNA, 20 bp, Artificial Sequence
  Description of Artificial Sequence: Synthetic oligonucleotide
  Target: LAMA2; (+) strand; PAM type: YTN; PAM sequence: TTA
acatgaggggctctgtcact

SEQ ID NO: 342792 - DNA, 20 bp, Artificial Sequence
  Description of Artificial Sequence: Synthetic oligonucleotide
  Target: LAMA2; (+) strand; PAM type: YTN; PAM sequence: CTC
tgtcactagaattgcagtgt

SEQ ID NO: 342793 - DNA, 20 bp, Artificial Sequence
  Description of Artificial Sequence: Synthetic oligonucleotide
  Target: LAMA2; (+) strand; PAM type: YTN; PAM sequence: CTG
tcactagaattgcagtgtgt

SEQ ID NO: 342794 - DNA, 20 bp, Artificial Sequence
  Description of Artificial Sequence: Synthetic oligonucleotide
  Target: LAMA2; (+) strand; PAM type: YTN; PAM sequence: CTA
gaattgcagtgtgttagccc

SEQ ID NO: 342795 - DNA, 20 bp, Artificial Sequence
  Description of Artificial Sequence: Synthetic oligonucleotide
  Target: LAMA2; (+) strand; PAM type: YTN; PAM sequence: TTG
cagtgtgttagcccctcatt

SEQ ID NO: 342796 - DNA, 20 bp, Artificial Sequence
  Description of Artificial Sequence: Synthetic oligonucleotide
  Target: LAMA2; (+) strand; PAM type: YTN; PAM sequence: TTA
gcccctcattttctccagtg

SEQ ID NO: 342797 - DNA, 20 bp, Artificial Sequence
  Description of Artificial Sequence: Synthetic oligonucleotide
  Target: LAMA2; (+) strand; PAM type: YTN; PAM sequence: CTC
attttctccagtgtttttgt

SEQ ID NO: 342798 - DNA, 20 bp, Artificial Sequence
  Description of Artificial Sequence: Synthetic oligonucleotide
  Target: LAMA2; (+) strand; PAM type: YTN; PAM sequence: TTT
tctccagtgtttttgtaaat

SEQ ID NO: 342799 - DNA, 20 bp, Artificial Sequence
  Description of Artificial Sequence: Synthetic oligonucleotide
  Target: LAMA2; (+) strand; PAM type: YTN; PAM sequence: TTT
ctccagtgtttttgtaaatc

SEQ ID NO: 342800 - DNA, 20 bp, Artificial Sequence
  Description of Artificial Sequence: Synthetic oligonucleotide
  Target: LAMA2; (+) strand; PAM type: YTN; PAM sequence: TTC
tccagtgtttttgtaaatct

SEQ ID NO: 342801 - DNA, 20 bp, Artificial Sequence
  Description of Artificial Sequence: Synthetic oligonucleotide
  Target: LAMA2; (+) strand; PAM type: YTN; PAM sequence: CTC
cagtgtttttgtaaatcttt

SEQ ID NO: 342802 - DNA, 20 bp, Artificial Sequence
  Description of Artificial Sequence: Synthetic oligonucleotide
  Target: LAMA2; (+) strand; PAM type: YTN; PAM sequence: TTT
ttgtaaatctttccattgac

SEQ ID NO: 342803 - DNA, 20 bp, Artificial Sequence
  Description of Artificial Sequence: Synthetic oligonucleotide
  Target: LAMA2; (+) strand; PAM type: YTN; PAM sequence: TTT
tgtaaatctttccattgaca

SEQ ID NO: 342804 - DNA, 20 bp, Artificial Sequence
  Description of Artificial Sequence: Synthetic oligonucleotide
  Target: LAMA2; (+) strand; PAM type: YTN; PAM sequence: TTT
gtaaatctttccattgacaa

SEQ ID NO: 342805 - DNA, 20 bp, Artificial Sequence
  Description of Artificial Sequence: Synthetic oligonucleotide
  Target: LAMA2; (+) strand; PAM type: YTN; PAM sequence: TTG
taaatctttccattgacaat

SEQ ID NO: 342806 - DNA, 20 bp, Artificial Sequence
  Description of Artificial Sequence: Synthetic oligonucleotide
  Target: LAMA2; (+) strand; PAM type: YTN; PAM sequence: CTT
tccattgacaatcttttaat

SEQ ID NO: 342807 - DNA, 20 bp, Artificial Sequence
  Description of Artificial Sequence: Synthetic oligonucleotide
  Target: LAMA2; (+) strand; PAM type: YTN; PAM sequence: TTT
ccattgacaatcttttaata

SEQ ID NO: 342808 - DNA, 20 bp, Artificial Sequence
  Description of Artificial Sequence: Synthetic oligonucleotide
  Target: LAMA2; (+) strand; PAM type: YTN; PAM sequence: TTC
cattgacaatcttttaataa

SEQ ID NO: 342809 - DNA, 20 bp, Artificial Sequence
  Description of Artificial Sequence: Synthetic oligonucleotide
  Target: LAMA2; (+) strand; PAM type: YTN; PAM sequence: TTG
acaatcttttaataatttcc

SEQ ID NO: 342810 - DNA, 20 bp, Artificial Sequence
  Description of Artificial Sequence: Synthetic oligonucleotide
  Target: LAMA2; (+) strand; PAM type: YTN; PAM sequence: CTT
ttaataatttccaaaacaat

SEQ ID NO: 342811 - DNA, 20 bp, Artificial Sequence
  Description of Artificial Sequence: Synthetic oligonucleotide
  Target: LAMA2; (+) strand; PAM type: YTN; PAM sequence: TTT
taataatttccaaaacaatc

SEQ ID NO: 342812 - DNA, 20 bp, Artificial Sequence
  Description of Artificial Sequence: Synthetic oligonucleotide
  Target: LAMA2; (+) strand; PAM type: YTN; PAM sequence: TTT
aataatttccaaaacaatcg

SEQ ID NO: 342813 - DNA, 20 bp, Artificial Sequence
  Description of Artificial Sequence: Synthetic oligonucleotide
  Target: LAMA2; (+) strand; PAM type: YTN; PAM sequence: TTA
ataatttccaaaacaatcgg

SEQ ID NO: 342814 - DNA, 20 bp, Artificial Sequence
  Description of Artificial Sequence: Synthetic oligonucleotide
  Target: LAMA2; (+) strand; PAM type: YTN; PAM sequence: TTT
ccaaaacaatcgggggtaat

SEQ ID NO: 342815 - DNA, 20 bp, Artificial Sequence
  Description of Artificial Sequence: Synthetic oligonucleotide
  Target: LAMA2; (+) strand; PAM type: YTN; PAM sequence: TTC
caaaacaatcgggggtaatg

SEQ ID NO: 342816 - DNA, 20 bp, Artificial Sequence
  Description of Artificial Sequence: Synthetic oligonucleotide
  Target: LAMA2; (+) strand; PAM type: YTN; PAM sequence: TTC
gaattctaagttcttgtcat

SEQ ID NO: 342817 - DNA, 20 bp, Artificial Sequence
  Description of Artificial Sequence: Synthetic oligonucleotide
  Target: LAMA2; (+) strand; PAM type: YTN; PAM sequence: TTC
taagttcttgtcataaatga

SEQ ID NO: 342818 - DNA, 20 bp, Artificial Sequence
  Description of Artificial Sequence: Synthetic oligonucleotide
  Target: LAMA2; (+) strand; PAM type: YTN; PAM sequence: CTA
agttcttgtcataaatgaat

SEQ ID NO: 342819 - DNA, 20 bp, Artificial Sequence
  Description of Artificial Sequence: Synthetic oligonucleotide
  Target: LAMA2; (+) strand; PAM type: YTN; PAM sequence: TTC
ttgtcataaatgaatcaatc

SEQ ID NO: 342820 - DNA, 20 bp, Artificial Sequence
  Description of Artificial Sequence: Synthetic oligonucleotide
  Target: LAMA2; (+) strand; PAM type: YTN; PAM sequence: CTT
gtcataaatgaatcaatcca

SEQ ID NO: 342821 - DNA, 20 bp, Artificial Sequence
  Description of Artificial Sequence: Synthetic oligonucleotide
  Target: LAMA2; (+) strand; PAM type: YTN; PAM sequence: TTG
tcataaatgaatcaatccag

SEQ ID NO: 342822 - DNA, 20 bp, Artificial Sequence
  Description of Artificial Sequence: Synthetic oligonucleotide
  Target: LAMA2; (+) strand; PAM type: YTN; PAM sequence: TTG
gcaggagatggatgtagtct

SEQ ID NO: 342823 - DNA, 20 bp, Artificial Sequence
  Description of Artificial Sequence: Synthetic oligonucleotide
  Target: LAMA2; (+) strand; PAM type: YTN; PAM sequence: CTT
tttgctggtgttccgtgcta

SEQ ID NO: 342824 - DNA, 20 bp, Artificial Sequence
  Description of Artificial Sequence: Synthetic oligonucleotide
  Target: LAMA2; (+) strand; PAM type: YTN; PAM sequence: TTT
ttgctggtgttccgtgctaa

SEQ ID NO: 342825 - DNA, 20 bp, Artificial Sequence
  Description of Artificial Sequence: Synthetic oligonucleotide
  Target: LAMA2; (+) strand; PAM type: YTN; PAM sequence: TTT
tgctggtgttccgtgctaag

SEQ ID NO: 342826 - DNA, 20 bp, Artificial Sequence
  Description of Artificial Sequence: Synthetic oligonucleotide
  Target: LAMA2; (+) strand; PAM type: YTN; PAM sequence: TTT
gctggtgttccgtgctaaga

SEQ ID NO: 342827 - DNA, 20 bp, Artificial Sequence
  Description of Artificial Sequence: Synthetic oligonucleotide
  Target: LAMA2; (+) strand; PAM type: YTN; PAM sequence: TTG
ctggtgttccgtgctaagaa

SEQ ID NO: 342828 - DNA, 20 bp, Artificial Sequence
  Description of Artificial Sequence: Synthetic oligonucleotide
  Target: LAMA2; (+) strand; PAM type: YTN; PAM sequence: CTG
gtgttccgtgctaagaaaag

SEQ ID NO: 342829 - DNA, 20 bp, Artificial Sequence
  Description of Artificial Sequence: Synthetic oligonucleotide
  Target: LAMA2; (+) strand; PAM type: YTN; PAM sequence: TTC
cgtgctaagaaaagcacaca

SEQ ID NO: 342830 - DNA, 20 bp, Artificial Sequence
  Description of Artificial Sequence: Synthetic oligonucleotide
  Target: LAMA2; (+) strand; PAM type: YTN; PAM sequence: CTA
agaaaagcacacacattttt

SEQ ID NO: 342831 - DNA, 20 bp, Artificial Sequence
  Description of Artificial Sequence: Synthetic oligonucleotide
  Target: LAMA2; (+) strand; PAM type: YTN; PAM sequence: TTT
ttcttgagagtatggctagc

SEQ ID NO: 342832 - DNA, 20 bp, Artificial Sequence
  Description of Artificial Sequence: Synthetic oligonucleotide
  Target: LAMA2; (+) strand; PAM type: YTN; PAM sequence: TTT
tcttgagagtatggctagcc

SEQ ID NO: 342833 - DNA, 20 bp, Artificial Sequence
  Description of Artificial Sequence: Synthetic oligonucleotide
  Target: LAMA2; (+) strand; PAM type: YTN; PAM sequence: TTT
cttgagagtatggctagccg

SEQ ID NO: 342834 - DNA, 20 bp, Artificial Sequence
  Description of Artificial Sequence: Synthetic oligonucleotide
  Target: LAMA2; (+) strand; PAM type: YTN; PAM sequence: TTC
ttgagagtatggctagccga

SEQ ID NO: 342835 - DNA, 20 bp, Artificial Sequence
  Description of Artificial Sequence: Synthetic oligonucleotide
  Target: LAMA2; (+) strand; PAM type: YTN; PAM sequence: CTT
gagagtatggctagccgaaa

SEQ ID NO: 342836 - DNA, 20 bp, Artificial Sequence
  Description of Artificial Sequence: Synthetic oligonucleotide
  Target: LAMA2; (+) strand; PAM type: YTN; PAM sequence: TTG
agagtatggctagccgaaaa

SEQ ID NO: 342837 - DNA, 20 bp, Artificial Sequence
  Description of Artificial Sequence: Synthetic oligonucleotide
  Target: LAMA2; (+) strand; PAM type: YTN; PAM sequence: CTA
gccgaaaagcatctgagaat

SEQ ID NO: 342838 - DNA, 20 bp, Artificial Sequence
  Description of Artificial Sequence: Synthetic oligonucleotide
  Target: LAMA2; (+) strand; PAM type: YTN; PAM sequence: CTG
agaattgatggaatcctaag

SEQ ID NO: 342839 - DNA, 20 bp, Artificial Sequence
  Description of Artificial Sequence: Synthetic oligonucleotide
  Target: LAMA2; (+) strand; PAM type: YTN; PAM sequence: TTG
atggaatcctaaggcagaca

SEQ ID NO: 342840 - DNA, 20 bp, Artificial Sequence
  Description of Artificial Sequence: Synthetic oligonucleotide
  Target: LAMA2; (+) strand; PAM type: YTN; PAM sequence: CTA
aggcagacagaaacgccaaa

SEQ ID NO: 342841 - DNA, 20 bp, Artificial Sequence
  Description of Artificial Sequence: Synthetic oligonucleotide
  Target: LAMA2; (+) strand; PAM type: YTN; PAM sequence: CTG
gttttgtctccagcacttac

SEQ ID NO: 342842 - DNA, 20 bp, Artificial Sequence
  Description of Artificial Sequence: Synthetic oligonucleotide
  Target: LAMA2; (+) strand; PAM type: YTN; PAM sequence: TTT
tgtctccagcacttacagtt

SEQ ID NO: 342843 - DNA, 20 bp, Artificial Sequence
  Description of Artificial Sequence: Synthetic oligonucleotide
  Target: LAMA2; (+) strand; PAM type: YTN; PAM sequence: TTT
gtctccagcacttacagttt

SEQ ID NO: 342844 - DNA, 20 bp, Artificial Sequence
  Description of Artificial Sequence: Synthetic oligonucleotide
  Target: LAMA2; (+) strand; PAM type: YTN; PAM sequence: TTG
tctccagcacttacagtttg

SEQ ID NO: 342845 - DNA, 20 bp, Artificial Sequence
  Description of Artificial Sequence: Synthetic oligonucleotide
  Target: LAMA2; (+) strand; PAM type: YTN; PAM sequence: CTC
cagcacttacagtttgttgt

SEQ ID NO: 342846 - DNA, 20 bp, Artificial Sequence
  Description of Artificial Sequence: Synthetic oligonucleotide
  Target: LAMA2; (+) strand; PAM type: YTN; PAM sequence: CTT
acagtttgttgtctgggtgc

SEQ ID NO: 342847 - DNA, 20 bp, Artificial Sequence
  Description of Artificial Sequence: Synthetic oligonucleotide
  Target: LAMA2; (+) strand; PAM type: YTN; PAM sequence: TTA
cagtttgttgtctgggtgcc

SEQ ID NO: 342848 - DNA, 20 bp, Artificial Sequence
  Description of Artificial Sequence: Synthetic oligonucleotide
  Target: LAMA2; (+) strand; PAM type: YTN; PAM sequence: TTT
gttgtctgggtgccatgaca

SEQ ID NO: 342849 - DNA, 20 bp, Artificial Sequence
  Description of Artificial Sequence: Synthetic oligonucleotide
  Target: LAMA2; (+) strand; PAM type: YTN; PAM sequence: TTG
ttgtctgggtgccatgacat

SEQ ID NO: 342850 - DNA, 20 bp, Artificial Sequence
  Description of Artificial Sequence: Synthetic oligonucleotide
  Target: LAMA2; (+) strand; PAM type: YTN; PAM sequence: TTG
tctgggtgccatgacatacc

SEQ ID NO: 342851 - DNA, 20 bp, Artificial Sequence
  Description of Artificial Sequence: Synthetic oligonucleotide
  Target: LAMA2; (+) strand; PAM type: YTN; PAM sequence: CTG
ggtgccatgacataccctct

SEQ ID NO: 342852 - DNA, 20 bp, Artificial Sequence
  Description of Artificial Sequence: Synthetic oligonucleotide
  Target: LAMA2; (+) strand; PAM type: YTN; PAM sequence: CTC
tactagttaattccattaag

SEQ ID NO: 342853 - DNA, 20 bp, Artificial Sequence
  Description of Artificial Sequence: Synthetic oligonucleotide
  Target: LAMA2; (+) strand; PAM type: YTN; PAM sequence: CTA
ctagttaattccattaagca

SEQ ID NO: 342854 - DNA, 20 bp, Artificial Sequence
  Description of Artificial Sequence: Synthetic oligonucleotide
  Target: LAMA2; (+) strand; PAM type: YTN; PAM sequence: CTA
gttaattccattaagcaaca

SEQ ID NO: 342855 - DNA, 20 bp, Artificial Sequence
  Description of Artificial Sequence: Synthetic oligonucleotide
  Target: LAMA2; (+) strand; PAM type: YTN; PAM sequence: TTA
attccattaagcaacatggg

SEQ ID NO: 342856 - DNA, 20 bp, Artificial Sequence
  Description of Artificial Sequence: Synthetic oligonucleotide
  Target: LAMA2; (+) strand; PAM type: YTN; PAM sequence: TTC
cattaagcaacatgggccat

SEQ ID NO: 342857 - DNA, 20 bp, Artificial Sequence
  Description of Artificial Sequence: Synthetic oligonucleotide
  Target: LAMA2; (+) strand; PAM type: YTN; PAM sequence: TTA
agcaacatgggccatttaaa

SEQ ID NO: 342858 - DNA, 20 bp, Artificial Sequence
  Description of Artificial Sequence: Synthetic oligonucleotide
  Target: LAMA2; (+) strand; PAM type: YTN; PAM sequence: TTT
aaatataggcaaaacaacaa

SEQ ID NO: 342859 - DNA, 20 bp, Artificial Sequence
  Description of Artificial Sequence: Synthetic oligonucleotide
  Target: LAMA2; (+) strand; PAM type: YTN; PAM sequence: TTA
aatataggcaaaacaacaac

SEQ ID NO: 342860 - DNA, 20 bp, Artificial Sequence
  Description of Artificial Sequence: Synthetic oligonucleotide
  Target: LAMA2; (+) strand; PAM type: YTN; PAM sequence: CTC
tgtgaccacagaaagagcct

SEQ ID NO: 342861 - DNA, 20 bp, Artificial Sequence
  Description of Artificial Sequence: Synthetic oligonucleotide
  Target: LAMA2; (+) strand; PAM type: YTN; PAM sequence: CTG
tgaccacagaaagagcctgt

SEQ ID NO: 342862 - DNA, 20 bp, Artificial Sequence
  Description of Artificial Sequence: Synthetic oligonucleotide
  Target: LAMA2; (+) strand; PAM type: YTN; PAM sequence: CTG
taacatagacagaagactac

SEQ ID NO: 342863 - DNA, 20 bp, Artificial Sequence
  Description of Artificial Sequence: Synthetic oligonucleotide
  Target: LAMA2; (+) strand; PAM type: YTN; PAM sequence: CTA
caaatagtgttcttagaaga

SEQ ID NO: 342864 - DNA, 20 bp, Artificial Sequence
  Description of Artificial Sequence: Synthetic oligonucleotide
  Target: LAMA2; (+) strand; PAM type: YTN; PAM sequence: TTC
ttagaagataaatcattaag

SEQ ID NO: 342865 - DNA, 20 bp, Artificial Sequence
  Description of Artificial Sequence: Synthetic oligonucleotide
  Target: LAMA2; (+) strand; PAM type: YTN; PAM sequence: CTT
agaagataaatcattaagac

SEQ ID NO: 342866 - DNA, 20 bp, Artificial Sequence
  Description of Artificial Sequence: Synthetic oligonucleotide
  Target: LAMA2; (+) strand; PAM type: YTN; PAM sequence: TTA
gaagataaatcattaagaca

SEQ ID NO: 342867 - DNA, 20 bp, Artificial Sequence
  Description of Artificial Sequence: Synthetic oligonucleotide
  Target: LAMA2; (+) strand; PAM type: YTN; PAM sequence: TTA
agacagtagcaaaatgagaa

SEQ ID NO: 342868 - DNA, 20 bp, Artificial Sequence
  Description of Artificial Sequence: Synthetic oligonucleotide
  Target: LAMA2; (+) strand; PAM type: YTN; PAM sequence: CTG
ggcaacataaagtgtgtgta

SEQ ID NO: 342869 - DNA, 20 bp, Artificial Sequence
  Description of Artificial Sequence: Synthetic oligonucleotide
  Target: LAMA2; (+) strand; PAM type: YTN; PAM sequence: CTT
ctacctgcacaaacactcaa

SEQ ID NO: 342870 - DNA, 20 bp, Artificial Sequence
  Description of Artificial Sequence: Synthetic oligonucleotide
  Target: LAMA2; (+) strand; PAM type: YTN; PAM sequence: TTC
tacctgcacaaacactcaac

SEQ ID NO: 342871 - DNA, 20 bp, Artificial Sequence
  Description of Artificial Sequence: Synthetic oligonucleotide
  Target: LAMA2; (+) strand; PAM type: YTN; PAM sequence: CTA
cctgcacaaacactcaactg

SEQ ID NO: 342872 - DNA, 20 bp, Artificial Sequence
  Description of Artificial Sequence: Synthetic oligonucleotide
  Target: LAMA2; (+) strand; PAM type: YTN; PAM sequence: CTG
cacaaacactcaactgaaat

SEQ ID NO: 342873 - DNA, 20 bp, Artificial Sequence
  Description of Artificial Sequence: Synthetic oligonucleotide
  Target: LAMA2; (+) strand; PAM type: YTN; PAM sequence: CTC
aactgaaatttgccaaggct

SEQ ID NO: 342874 - DNA, 20 bp, Artificial Sequence
  Description of Artificial Sequence: Synthetic oligonucleotide
  Target: LAMA2; (+) strand; PAM type: YTN; PAM sequence: CTG
aaatttgccaaggctcacta

SEQ ID NO: 342875 - DNA, 20 bp, Artificial Sequence
  Description of Artificial Sequence: Synthetic oligonucleotide
  Target: LAMA2; (+) strand; PAM type: YTN; PAM sequence: TTT
gccaaggctcactagtgtct

SEQ ID NO: 342876 - DNA, 20 bp, Artificial Sequence
  Description of Artificial Sequence: Synthetic oligonucleotide
  Target: LAMA2; (+) strand; PAM type: YTN; PAM sequence: TTG
ccaaggctcactagtgtctt

SEQ ID NO: 342877 - DNA, 20 bp, Artificial Sequence
  Description of Artificial Sequence: Synthetic oligonucleotide
  Target: LAMA2; (+) strand; PAM type: YTN; PAM sequence: CTC
actagtgtctttgaggcacc

SEQ ID NO: 342878 - DNA, 20 bp, Artificial Sequence
  Description of Artificial Sequence: Synthetic oligonucleotide
  Target: LAMA2; (+) strand; PAM type: YTN; PAM sequence: CTA
gtgtctttgaggcaccctag

SEQ ID NO: 342879 - DNA, 20 bp, Artificial Sequence
  Description of Artificial Sequence: Synthetic oligonucleotide
  Target: LAMA2; (+) strand; PAM type: YTN; PAM sequence: CTT
tgaggcaccctagagagggg

SEQ ID NO: 342880 - DNA, 20 bp, Artificial Sequence
  Description of Artificial Sequence: Synthetic oligonucleotide
  Target: LAMA2; (+) strand; PAM type: YTN; PAM sequence: TTT
gaggcaccctagagagggga

SEQ ID NO: 342881 - DNA, 20 bp, Artificial Sequence
  Description of Artificial Sequence: Synthetic oligonucleotide
  Target: LAMA2; (+) strand; PAM type: YTN; PAM sequence: TTG
aggcaccctagagaggggag

SEQ ID NO: 342882 - DNA, 20 bp, Artificial Sequence
  Description of Artificial Sequence: Synthetic oligonucleotide
  Target: LAMA2; (+) strand; PAM type: YTN; PAM sequence: CTA
gagaggggaggctagaaata

SEQ ID NO: 342883 - DNA, 20 bp, Artificial Sequence
  Description of Artificial Sequence: Synthetic oligonucleotide
  Target: LAMA2; (+) strand; PAM type: YTN; PAM sequence: CTA
gaaataaccatcatcctcag

SEQ ID NO: 342884 - DNA, 20 bp, Artificial Sequence
  Description of Artificial Sequence: Synthetic oligonucleotide
  Target: LAMA2; (+) strand; PAM type: YTN; PAM sequence: CTC
agctgttccatggtaaggcc

SEQ ID NO: 342885 - DNA, 20 bp, Artificial Sequence
  Description of Artificial Sequence: Synthetic oligonucleotide
  Target: LAMA2; (+) strand; PAM type: YTN; PAM sequence: CTG
ttccatggtaaggccctaca

SEQ ID NO: 342886 - DNA, 20 bp, Artificial Sequence
  Description of Artificial Sequence: Synthetic oligonucleotide
  Target: LAMA2; (+) strand; PAM type: YTN; PAM sequence: TTC
catggtaaggccctacacta

SEQ ID NO: 342887 - DNA, 20 bp, Artificial Sequence
  Description of Artificial Sequence: Synthetic oligonucleotide
  Target: LAMA2; (+) strand; PAM type: YTN; PAM sequence: CTA
cactaggactcagaggagag

SEQ ID NO: 342888 - DNA, 20 bp, Artificial Sequence
  Description of Artificial Sequence: Synthetic oligonucleotide
  Target: LAMA2; (+) strand; PAM type: YTN; PAM sequence: CTA
ggactcagaggagagatagt

SEQ ID NO: 342889 - DNA, 20 bp, Artificial Sequence
  Description of Artificial Sequence: Synthetic oligonucleotide
  Target: LAMA2; (+) strand; PAM type: YTN; PAM sequence: CTC
agaggagagatagtttggaa

SEQ ID NO: 342890 - DNA, 20 bp, Artificial Sequence
  Description of Artificial Sequence: Synthetic oligonucleotide
  Target: LAMA2; (+) strand; PAM type: YTN; PAM sequence: TTT
ggaacattttatccctatca

SEQ ID NO: 342891 - DNA, 20 bp, Artificial Sequence
  Description of Artificial Sequence: Synthetic oligonucleotide
  Target: LAMA2; (+) strand; PAM type: YTN; PAM sequence: TTG
gaacattttatccctatcag

SEQ ID NO: 342892 - DNA, 20 bp, Artificial Sequence
  Description of Artificial Sequence: Synthetic oligonucleotide
  Target: LAMA2; (+) strand; PAM type: YTN; PAM sequence: TTT
tatccctatcagtggaaaat

SEQ ID NO: 342893 - DNA, 20 bp, Artificial Sequence
  Description of Artificial Sequence: Synthetic oligonucleotide
  Target: LAMA2; (+) strand; PAM type: YTN; PAM sequence: TTT
atccctatcagtggaaaata

SEQ ID NO: 342894 - DNA, 20 bp, Artificial Sequence
  Description of Artificial Sequence: Synthetic oligonucleotide
  Target: LAMA2; (+) strand; PAM type: YTN; PAM sequence: TTA
tccctatcagtggaaaatag

SEQ ID NO: 342895 - DNA, 20 bp, Artificial Sequence
  Description of Artificial Sequence: Synthetic oligonucleotide
  Target: LAMA2; (+) strand; PAM type: YTN; PAM sequence: CTA
tcagtggaaaatagcacagt

SEQ ID NO: 342896 - DNA, 20 bp, Artificial Sequence
  Description of Artificial Sequence: Synthetic oligonucleotide
  Target: LAMA2; (+) strand; PAM type: YTN; PAM sequence: TTG
gtgcctaacttcctttcgtt

SEQ ID NO: 342897 - DNA, 20 bp, Artificial Sequence
  Description of Artificial Sequence: Synthetic oligonucleotide
  Target: LAMA2; (+) strand; PAM type: YTN; PAM sequence: CTA
acttcctttcgttgaaaata

SEQ ID NO: 342898 - DNA, 20 bp, Artificial Sequence
  Description of Artificial Sequence: Synthetic oligonucleotide
  Target: LAMA2; (+) strand; PAM type: YTN; PAM sequence: CTT
cctttcgttgaaaataacac

SEQ ID NO: 342899 - DNA, 20 bp, Artificial Sequence
  Description of Artificial Sequence: Synthetic oligonucleotide
  Target: LAMA2; (+) strand; PAM type: YTN; PAM sequence: TTC
ctttcgttgaaaataacaca

SEQ ID NO: 342900 - DNA, 20 bp, Artificial Sequence
  Description of Artificial Sequence: Synthetic oligonucleotide
  Target: LAMA2; (+) strand; PAM type: YTN; PAM sequence: CTT
tcgttgaaaataacacaggt

SEQ ID NO: 342901 - DNA, 20 bp, Artificial Sequence
  Description of Artificial Sequence: Synthetic oligonucleotide
  Target: LAMA2; (+) strand; PAM type: YTN; PAM sequence: TTT
cgttgaaaataacacaggta

SEQ ID NO: 342902 - DNA, 20 bp, Artificial Sequence
  Description of Artificial Sequence: Synthetic oligonucleotide
  Target: LAMA2; (+) strand; PAM type: YTN; PAM sequence: TTC
gttgaaaataacacaggtaa

SEQ ID NO: 342903 - DNA, 20 bp, Artificial Sequence
  Description of Artificial Sequence: Synthetic oligonucleotide
  Target: LAMA2; (+) strand; PAM type: YTN; PAM sequence: TTG
aaaataacacaggtaatttt

SEQ ID NO: 342904 - DNA, 20 bp, Artificial Sequence
  Description of Artificial Sequence: Synthetic oligonucleotide
  Target: LAMA2; (+) strand; PAM type: YTN; PAM sequence: TTT
tttagccaaatgagattttt

SEQ ID NO: 342905 - DNA, 20 bp, Artificial Sequence
  Description of Artificial Sequence: Synthetic oligonucleotide
  Target: LAMA2; (+) strand; PAM type: YTN; PAM sequence: TTT
ttagccaaatgagattttta

SEQ ID NO: 342906 - DNA, 20 bp, Artificial Sequence
  Description of Artificial Sequence: Synthetic oligonucleotide
  Target: LAMA2; (+) strand; PAM type: YTN; PAM sequence: TTT
tagccaaatgagatttttat

SEQ ID NO: 342907 - DNA, 20 bp, Artificial Sequence
  Description of Artificial Sequence: Synthetic oligonucleotide
  Target: LAMA2; (+) strand; PAM type: YTN; PAM sequence: TTT
agccaaatgagatttttatc

SEQ ID NO: 342908 - DNA, 20 bp, Artificial Sequence
  Description of Artificial Sequence: Synthetic oligonucleotide
  Target: LAMA2; (+) strand; PAM type: YTN; PAM sequence: TTA
gccaaatgagatttttatca

SEQ ID NO: 342909 - DNA, 20 bp, Artificial Sequence
  Description of Artificial Sequence: Synthetic oligonucleotide
  Target: LAMA2; (+) strand; PAM type: YTN; PAM sequence: TTT
ttatcaaaaaagcaagcaaa

SEQ ID NO: 342910 - DNA, 20 bp, Artificial Sequence
  Description of Artificial Sequence: Synthetic oligonucleotide
  Target: LAMA2; (+) strand; PAM type: YTN; PAM sequence: TTT
tatcaaaaaagcaagcaaag

SEQ ID NO: 342911 - DNA, 20 bp, Artificial Sequence
  Description of Artificial Sequence: Synthetic oligonucleotide
  Target: LAMA2; (+) strand; PAM type: YTN; PAM sequence: TTT
atcaaaaaagcaagcaaagg

SEQ ID NO: 342912 - DNA, 20 bp, Artificial Sequence
  Description of Artificial Sequence: Synthetic oligonucleotide
  Target: LAMA2; (+) strand; PAM type: YTN; PAM sequence: TTA
tcaaaaaagcaagcaaaggc

SEQ ID NO: 342913 - DNA, 20 bp, Artificial Sequence
  Description of Artificial Sequence: Synthetic oligonucleotide
  Target: LAMA2; (+) strand; PAM type: YTN; PAM sequence: CTG
atatcagtaattccaaggat

SEQ ID NO: 342914 - DNA, 20 bp, Artificial Sequence
  Description of Artificial Sequence: Synthetic oligonucleotide
  Target: LAMA2; (+) strand; PAM type: YTN; PAM sequence: TTC
caaggatactaaaatttgtt

SEQ ID NO: 342915 - DNA, 20 bp, Artificial Sequence
  Description of Artificial Sequence: Synthetic oligonucleotide
  Target: LAMA2; (+) strand; PAM type: YTN; PAM sequence: CTA
aaatttgttttaaataataa

SEQ ID NO: 342916 - DNA, 20 bp, Artificial Sequence
  Description of Artificial Sequence: Synthetic oligonucleotide
  Target: LAMA2; (+) strand; PAM type: YTN; PAM sequence: TTT
gttttaaataataaagaaat

SEQ ID NO: 342917 - DNA, 20 bp, Artificial Sequence
  Description of Artificial Sequence: Synthetic oligonucleotide
  Target: LAMA2; (+) strand; PAM type: YTN; PAM sequence: TTG
ttttaaataataaagaaata

SEQ ID NO: 342918 - DNA, 20 bp, Artificial Sequence
  Description of Artificial Sequence: Synthetic oligonucleotide
  Target: LAMA2; (+) strand; PAM type: YTN; PAM sequence: TTT
taaataataaagaaatagca

SEQ ID NO: 342919 - DNA, 20 bp, Artificial Sequence
  Description of Artificial Sequence: Synthetic oligonucleotide
  Target: LAMA2; (+) strand; PAM type: YTN; PAM sequence: TTT
aaataataaagaaatagcat

SEQ ID NO: 342920 - DNA, 20 bp, Artificial Sequence
  Description of Artificial Sequence: Synthetic oligonucleotide
  Target: LAMA2; (+) strand; PAM type: YTN; PAM sequence: TTA
aataataaagaaatagcatc

SEQ ID NO: 342921 - DNA, 20 bp, Artificial Sequence
  Description of Artificial Sequence: Synthetic oligonucleotide
  Target: LAMA2; (+) strand; PAM type: YTN; PAM sequence: CTT
caggccctttagactttgga

SEQ ID NO: 342922 - DNA, 20 bp, Artificial Sequence
  Description of Artificial Sequence: Synthetic oligonucleotide
  Target: LAMA2; (+) strand; PAM type: YTN; PAM sequence: TTC
aggccctttagactttggac

SEQ ID NO: 342923 - DNA, 20 bp, Artificial Sequence
  Description of Artificial Sequence: Synthetic oligonucleotide
  Target: LAMA2; (+) strand; PAM type: YTN; PAM sequence: CTT
tagactttggactccaaaat

SEQ ID NO: 342924 - DNA, 20 bp, Artificial Sequence
  Description of Artificial Sequence: Synthetic oligonucleotide
  Target: LAMA2; (+) strand; PAM type: YTN; PAM sequence: TTT
agactttggactccaaaatt

SEQ ID NO: 342925 - DNA, 20 bp, Artificial Sequence
  Description of Artificial Sequence: Synthetic oligonucleotide
  Target: LAMA2; (+) strand; PAM type: YTN; PAM sequence: TTA
gactttggactccaaaattg

SEQ ID NO: 342926 - DNA, 20 bp, Artificial Sequence
  Description of Artificial Sequence: Synthetic oligonucleotide
  Target: LAMA2; (+) strand; PAM type: YTN; PAM sequence: CTT
tggactccaaaattggatgc

SEQ ID NO: 342927 - DNA, 20 bp, Artificial Sequence
  Description of Artificial Sequence: Synthetic oligonucleotide
  Target: LAMA2; (+) strand; PAM type: YTN; PAM sequence: TTT
ggactccaaaattggatgca

SEQ ID NO: 342928 - DNA, 20 bp, Artificial Sequence
  Description of Artificial Sequence: Synthetic oligonucleotide
  Target: LAMA2; (+) strand; PAM type: YTN; PAM sequence: TTG
gactccaaaattggatgcag

SEQ ID NO: 342929 - DNA, 20 bp, Artificial Sequence
  Description of Artificial Sequence: Synthetic oligonucleotide
  Target: LAMA2; (+) strand; PAM type: YTN; PAM sequence: CTC
caaaattggatgcagatcaa

SEQ ID NO: 342930 - DNA, 20 bp, Artificial Sequence
  Description of Artificial Sequence: Synthetic oligonucleotide
  Target: LAMA2; (+) strand; PAM type: YTN; PAM sequence: TTG
gatgcagatcaaataggata

SEQ ID NO: 342931 - DNA, 20 bp, Artificial Sequence
  Description of Artificial Sequence: Synthetic oligonucleotide
  Target: LAMA2; (+) strand; PAM type: YTN; PAM sequence: TTT
atatattaaaaaatcccaag

SEQ ID NO: 342932 - DNA, 20 bp, Artificial Sequence
  Description of Artificial Sequence: Synthetic oligonucleotide
  Target: LAMA2; (+) strand; PAM type: YTN; PAM sequence: TTA
tatattaaaaaatcccaaga

SEQ ID NO: 342933 - DNA, 20 bp, Artificial Sequence
  Description of Artificial Sequence: Synthetic oligonucleotide
  Target: LAMA2; (+) strand; PAM type: YTN; PAM sequence: TTA
aaaaatcccaagagaacttg

SEQ ID NO: 342934 - DNA, 20 bp, Artificial Sequence
  Description of Artificial Sequence: Synthetic oligonucleotide
  Target: LAMA2; (+) strand; PAM type: YTN; PAM sequence: CTT
gtacagcataaggtaaatac

SEQ ID NO: 342935 - DNA, 20 bp, Artificial Sequence
  Description of Artificial Sequence: Synthetic oligonucleotide
  Target: LAMA2; (+) strand; PAM type: YTN; PAM sequence: TTG
tacagcataaggtaaataca

SEQ ID NO: 342936 - DNA, 20 bp, Artificial Sequence
  Description of Artificial Sequence: Synthetic oligonucleotide
  Target: LAMA2; (+) strand; PAM type: YTN; PAM sequence: TTG
aacaggtataaaataattag

SEQ ID NO: 342937 - DNA, 20 bp, Artificial Sequence
  Description of Artificial Sequence: Synthetic oligonucleotide
  Target: LAMA2; (+) strand; PAM type: YTN; PAM sequence: TTA
ggtcaagagcaatcagcaaa

SEQ ID NO: 342938 - DNA, 20 bp, Artificial Sequence
  Description of Artificial Sequence: Synthetic oligonucleotide
  Target: LAMA2; (+) strand; PAM type: YTN; PAM sequence: CTT
tgatattctggtctggaaag

SEQ ID NO: 342939 - DNA, 20 bp, Artificial Sequence
  Description of Artificial Sequence: Synthetic oligonucleotide
  Target: LAMA2; (+) strand; PAM type: YTN; PAM sequence: TTT
gatattctggtctggaaaga

SEQ ID NO: 342940 - DNA, 20 bp, Artificial Sequence
  Description of Artificial Sequence: Synthetic oligonucleotide
  Target: LAMA2; (+) strand; PAM type: YTN; PAM sequence: TTG
atattctggtctggaaagag

SEQ ID NO: 342941 - DNA, 20 bp, Artificial Sequence
  Description of Artificial Sequence: Synthetic oligonucleotide
  Target: LAMA2; (+) strand; PAM type: YTN; PAM sequence: TTC
tggtctggaaagagaatttg

SEQ ID NO: 342942 - DNA, 20 bp, Artificial Sequence
  Description of Artificial Sequence: Synthetic oligonucleotide
  Target: LAMA2; (+) strand; PAM type: YTN; PAM sequence: CTG
gtctggaaagagaatttggg

SEQ ID NO: 342943 - DNA, 20 bp, Artificial Sequence
  Description of Artificial Sequence: Synthetic oligonucleotide
  Target: LAMA2; (+) strand; PAM type: YTN; PAM sequence: CTG
gaaagagaatttggggttat

SEQ ID NO: 342944 - DNA, 20 bp, Artificial Sequence
  Description of Artificial Sequence: Synthetic oligonucleotide
  Target: LAMA2; (+) strand; PAM type: YTN; PAM sequence: TTT
ggggttattctgaaaaatac

SEQ ID NO: 342945 - DNA, 20 bp, Artificial Sequence
  Description of Artificial Sequence: Synthetic oligonucleotide
  Target: LAMA2; (+) strand; PAM type: YTN; PAM sequence: TTG
gggttattctgaaaaatact

SEQ ID NO: 342946 - DNA, 20 bp, Artificial Sequence
  Description of Artificial Sequence: Synthetic oligonucleotide
  Target: LAMA2; (+) strand; PAM type: YTN; PAM sequence: TTA
ttctgaaaaatactgtcact

SEQ ID NO: 342947 - DNA, 20 bp, Artificial Sequence
  Description of Artificial Sequence: Synthetic oligonucleotide
  Target: LAMA2; (+) strand; PAM type: YTN; PAM sequence: TTC
tgaaaaatactgtcactaca

SEQ ID NO: 342948 - DNA, 20 bp, Artificial Sequence
  Description of Artificial Sequence: Synthetic oligonucleotide
  Target: LAMA2; (+) strand; PAM type: YTN; PAM sequence: CTG
aaaaatactgtcactacaac

SEQ ID NO: 342949 - DNA, 20 bp, Artificial Sequence
  Description of Artificial Sequence: Synthetic oligonucleotide
  Target: LAMA2; (+) strand; PAM type: YTN; PAM sequence: CTG
tcactacaactctgtccaga

SEQ ID NO: 342950 - DNA, 20 bp, Artificial Sequence
  Description of Artificial Sequence: Synthetic oligonucleotide
  Target: LAMA2; (+) strand; PAM type: YTN; PAM sequence: CTA
caactctgtccagaacccac

SEQ ID NO: 342951 - DNA, 20 bp, Artificial Sequence
  Description of Artificial Sequence: Synthetic oligonucleotide
  Target: LAMA2; (+) strand; PAM type: YTN; PAM sequence: CTC
tgtccagaacccacagctgc

SEQ ID NO: 342952 - DNA, 20 bp, Artificial Sequence
  Description of Artificial Sequence: Synthetic oligonucleotide
  Target: LAMA2; (+) strand; PAM type: YTN; PAM sequence: CTG
tccagaacccacagctgcag

SEQ ID NO: 342953 - DNA, 20 bp, Artificial Sequence
  Description of Artificial Sequence: Synthetic oligonucleotide
  Target: LAMA2; (+) strand; PAM type: YTN; PAM sequence: CTG
cagaaatgagtaaacaagtc

SEQ ID NO: 342954 - DNA, 20 bp, Artificial Sequence
  Description of Artificial Sequence: Synthetic oligonucleotide
  Target: LAMA2; (+) strand; PAM type: YTN; PAM sequence: CTT
attagaagactgcaaggtta

SEQ ID NO: 342955 - DNA, 20 bp, Artificial Sequence
  Description of Artificial Sequence: Synthetic oligonucleotide
  Target: LAMA2; (+) strand; PAM type: YTN; PAM sequence: TTA
ttagaagactgcaaggttaa

SEQ ID NO: 342956 - DNA, 20 bp, Artificial Sequence
  Description of Artificial Sequence: Synthetic oligonucleotide
  Target: LAMA2; (+) strand; PAM type: YTN; PAM sequence: TTA
gaagactgcaaggttaaaga

SEQ ID NO: 342957 - DNA, 20 bp, Artificial Sequence
  Description of Artificial Sequence: Synthetic oligonucleotide
  Target: LAMA2; (+) strand; PAM type: YTN; PAM sequence: CTG
caaggttaaagaacagctaa

SEQ ID NO: 342958 - DNA, 20 bp, Artificial Sequence
  Description of Artificial Sequence: Synthetic oligonucleotide
  Target: LAMA2; (+) strand; PAM type: YTN; PAM sequence: TTA
aagaacagctaaagattcaa

SEQ ID NO: 342959 - DNA, 20 bp, Artificial Sequence
  Description of Artificial Sequence: Synthetic oligonucleotide
  Target: LAMA2; (+) strand; PAM type: YTN; PAM sequence: CTA
aagattcaaaactaaatgac

SEQ ID NO: 342960 - DNA, 20 bp, Artificial Sequence
  Description of Artificial Sequence: Synthetic oligonucleotide
  Target: LAMA2; (+) strand; PAM type: YTN; PAM sequence: TTC
aaaactaaatgacattcttg

SEQ ID NO: 342961 - DNA, 20 bp, Artificial Sequence
  Description of Artificial Sequence: Synthetic oligonucleotide
  Target: LAMA2; (+) strand; PAM type: YTN; PAM sequence: CTA
aatgacattcttgttagttc

SEQ ID NO: 342962 - DNA, 20 bp, Artificial Sequence
  Description of Artificial Sequence: Synthetic oligonucleotide
  Target: LAMA2; (+) strand; PAM type: YTN; PAM sequence: TTC
ttgttagttcccattgatac

SEQ ID NO: 342963 - DNA, 20 bp, Artificial Sequence
  Description of Artificial Sequence: Synthetic oligonucleotide
  Target: LAMA2; (+) strand; PAM type: YTN; PAM sequence: CTT
gttagttcccattgatacga

SEQ ID NO: 342964 - DNA, 20 bp, Artificial Sequence
  Description of Artificial Sequence: Synthetic oligonucleotide
  Target: LAMA2; (+) strand; PAM type: YTN; PAM sequence: TTG
ttagttcccattgatacgat

SEQ ID NO: 342965 - DNA, 20 bp, Artificial Sequence
  Description of Artificial Sequence: Synthetic oligonucleotide
  Target: LAMA2; (+) strand; PAM type: YTN; PAM sequence: TTA
gttcccattgatacgattat

SEQ ID NO: 342966 - DNA, 20 bp, Artificial Sequence
  Description of Artificial Sequence: Synthetic oligonucleotide
  Target: LAMA2; (+) strand; PAM type: YTN; PAM sequence: TTC
ccattgatacgattataact

SEQ ID NO: 342967 - DNA, 20 bp, Artificial Sequence
  Description of Artificial Sequence: Synthetic oligonucleotide
  Target: LAMA2; (+) strand; PAM type: YTN; PAM sequence: TTG
atacgattataactcacaca

SEQ ID NO: 342968 - DNA, 20 bp, Artificial Sequence
  Description of Artificial Sequence: Synthetic oligonucleotide
  Target: LAMA2; (+) strand; PAM type: YTN; PAM sequence: TTA
taactcacacaattccctaa

SEQ ID NO: 342969 - DNA, 20 bp, Artificial Sequence
  Description of Artificial Sequence: Synthetic oligonucleotide
  Target: LAMA2; (+) strand; PAM type: YTN; PAM sequence: CTC
acacaattccctaaaggaaa

SEQ ID NO: 342970 - DNA, 20 bp, Artificial Sequence
  Description of Artificial Sequence: Synthetic oligonucleotide
  Target: LAMA2; (+) strand; PAM type: YTN; PAM sequence: TTC
cctaaaggaaaactacaaaa

SEQ ID NO: 342971 - DNA, 20 bp, Artificial Sequence
  Description of Artificial Sequence: Synthetic oligonucleotide
  Target: LAMA2; (+) strand; PAM type: YTN; PAM sequence: CTA
aaggaaaactacaaaaagga

SEQ ID NO: 342972 - DNA, 20 bp, Artificial Sequence
  Description of Artificial Sequence: Synthetic oligonucleotide
  Target: LAMA2; (+) strand; PAM type: YTN; PAM sequence: CTA
caaaaaggatgtttcttgag

SEQ ID NO: 342973 - DNA, 20 bp, Artificial Sequence
  Description of Artificial Sequence: Synthetic oligonucleotide
  Target: LAMA2; (+) strand; PAM type: YTN; PAM sequence: TTT
cttgagataggaatacaaat

SEQ ID NO: 342974 - DNA, 20 bp, Artificial Sequence
  Description of Artificial Sequence: Synthetic oligonucleotide
  Target: LAMA2; (+) strand; PAM type: YTN; PAM sequence: TTC
ttgagataggaatacaaata

SEQ ID NO: 342975 - DNA, 20 bp, Artificial Sequence
  Description of Artificial Sequence: Synthetic oligonucleotide
  Target: LAMA2; (+) strand; PAM type: YTN; PAM sequence: CTT
gagataggaatacaaataaa

SEQ ID NO: 342976 - DNA, 20 bp, Artificial Sequence
  Description of Artificial Sequence: Synthetic oligonucleotide
  Target: LAMA2; (+) strand; PAM type: YTN; PAM sequence: TTG
agataggaatacaaataaac

SEQ ID NO: 342977 - DNA, 20 bp, Artificial Sequence
  Description of Artificial Sequence: Synthetic oligonucleotide
  Target: LAMA2; (+) strand; PAM type: YTN; PAM sequence: CTT
ttgcttgtttgtttgttttg

SEQ ID NO: 342978 - DNA, 20 bp, Artificial Sequence
  Description of Artificial Sequence: Synthetic oligonucleotide
  Target: LAMA2; (+) strand; PAM type: YTN; PAM sequence: TTT
tgcttgtttgtttgttttgt

SEQ ID NO: 342979 - DNA, 20 bp, Artificial Sequence
  Description of Artificial Sequence: Synthetic oligonucleotide
  Target: LAMA2; (+) strand; PAM type: YTN; PAM sequence: TTT
gcttgtttgtttgttttgtt

SEQ ID NO: 342980 - DNA, 20 bp, Artificial Sequence
  Description of Artificial Sequence: Synthetic oligonucleotide
  Target: LAMA2; (+) strand; PAM type: YTN; PAM sequence: TTG
cttgtttgtttgttttgttt

SEQ ID NO: 342981 - DNA, 20 bp, Artificial Sequence
  Description of Artificial Sequence: Synthetic oligonucleotide
  Target: LAMA2; (+) strand; PAM type: YTN; PAM sequence: CTT
gtttgtttgttttgttttaa

SEQ ID NO: 342982 - DNA, 20 bp, Artificial Sequence
  Description of Artificial Sequence: Synthetic oligonucleotide
  Target: LAMA2; (+) strand; PAM type: YTN; PAM sequence: TTG
tttgtttgttttgttttaaa

SEQ ID NO: 342983 - DNA, 20 bp, Artificial Sequence
  Description of Artificial Sequence: Synthetic oligonucleotide
  Target: LAMA2; (+) strand; PAM type: YTN; PAM sequence: TTT
gtttgttttgttttaaatcc

SEQ ID NO: 342984 - DNA, 20 bp, Artificial Sequence
  Description of Artificial Sequence: Synthetic oligonucleotide
  Target: LAMA2; (+) strand; PAM type: YTN; PAM sequence: TTG
tttgttttgttttaaatcca

SEQ ID NO: 342985 - DNA, 20 bp, Artificial Sequence
  Description of Artificial Sequence: Synthetic oligonucleotide
  Target: LAMA2; (+) strand; PAM type: YTN; PAM sequence: TTT
gttttgttttaaatccagtg

SEQ ID NO: 342986 - DNA, 20 bp, Artificial Sequence
  Description of Artificial Sequence: Synthetic oligonucleotide
  Target: LAMA2; (+) strand; PAM type: YTN; PAM sequence: TTG
ttttgttttaaatccagtga

SEQ ID NO: 342987 - DNA, 20 bp, Artificial Sequence
  Description of Artificial Sequence: Synthetic oligonucleotide
  Target: LAMA2; (+) strand; PAM type: YTN; PAM sequence: TTT
tgttttaaatccagtgataa

SEQ ID NO: 342988 - DNA, 20 bp, Artificial Sequence
  Description of Artificial Sequence: Synthetic oligonucleotide
  Target: LAMA2; (+) strand; PAM type: YTN; PAM sequence: TTT
gttttaaatccagtgataag

SEQ ID NO: 342989 - DNA, 20 bp, Artificial Sequence
  Description of Artificial Sequence: Synthetic oligonucleotide
  Target: LAMA2; (+) strand; PAM type: YTN; PAM sequence: TTG
ttttaaatccagtgataaga

SEQ ID NO: 342990 - DNA, 20 bp, Artificial Sequence
  Description of Artificial Sequence: Synthetic oligonucleotide
  Target: LAMA2; (+) strand; PAM type: YTN; PAM sequence: TTT
taaatccagtgataagaatg

SEQ ID NO: 342991 - DNA, 20 bp, Artificial Sequence
  Description of Artificial Sequence: Synthetic oligonucleotide
  Target: LAMA2; (+) strand; PAM type: YTN; PAM sequence: TTT
aaatccagtgataagaatga

SEQ ID NO: 342992 - DNA, 20 bp, Artificial Sequence
  Description of Artificial Sequence: Synthetic oligonucleotide
  Target: LAMA2; (+) strand; PAM type: YTN; PAM sequence: TTA
aatccagtgataagaatgaa

SEQ ID NO: 342993 - DNA, 20 bp, Artificial Sequence
  Description of Artificial Sequence: Synthetic oligonucleotide
  Target: LAMA2; (+) strand; PAM type: YTN; PAM sequence: TTT
tctgtatttgctttttttaa

SEQ ID NO: 342994 - DNA, 20 bp, Artificial Sequence
  Description of Artificial Sequence: Synthetic oligonucleotide
  Target: LAMA2; (+) strand; PAM type: YTN; PAM sequence: TTT
ctgtatttgctttttttaaa

SEQ ID NO: 342995 - DNA, 20 bp, Artificial Sequence
  Description of Artificial Sequence: Synthetic oligonucleotide
  Target: LAMA2; (+) strand; PAM type: YTN; PAM sequence: TTC
tgtatttgctttttttaaaa

SEQ ID NO: 342996 - DNA, 20 bp, Artificial Sequence
  Description of Artificial Sequence: Synthetic oligonucleotide
  Target: LAMA2; (+) strand; PAM type: YTN; PAM sequence: CTG
tatttgctttttttaaaaaa

SEQ ID NO: 342997 - DNA, 20 bp, Artificial Sequence
  Description of Artificial Sequence: Synthetic oligonucleotide
  Target: LAMA2; (+) strand; PAM type: YTN; PAM sequence: TTT
gctttttttaaaaaaactct

SEQ ID NO: 342998 - DNA, 20 bp, Artificial Sequence
  Description of Artificial Sequence: Synthetic oligonucleotide
  Target: LAMA2; (+) strand; PAM type: YTN; PAM sequence: TTG
ctttttttaaaaaaactcta

SEQ ID NO: 342999 - DNA, 20 bp, Artificial Sequence
  Description of Artificial Sequence: Synthetic oligonucleotide
  Target: LAMA2; (+) strand; PAM type: YTN; PAM sequence: CTT
tttttaaaaaaactctatat

SEQ ID NO: 343000 - DNA, 20 bp, Artificial Sequence
  Description of Artificial Sequence: Synthetic oligonucleotide
  Target: LAMA2; (+) strand; PAM type: YTN; PAM sequence: TTT
ttttaaaaaaactctatatt

SEQ ID NO: 343001 - DNA, 20 bp, Artificial Sequence
  Description of Artificial Sequence: Synthetic oligonucleotide
  Target: LAMA2; (+) strand; PAM type: YTN; PAM sequence: TTT
tttaaaaaaactctatattt

SEQ ID NO: 343002 - DNA, 20 bp, Artificial Sequence
  Description of Artificial Sequence: Synthetic oligonucleotide
  Target: LAMA2; (+) strand; PAM type: YTN; PAM sequence: TTT
ttaaaaaaactctatatttt

SEQ ID NO: 343003 - DNA, 20 bp, Artificial Sequence
  Description of Artificial Sequence: Synthetic oligonucleotide
  Target: LAMA2; (+) strand; PAM type: YTN; PAM sequence: TTT
taaaaaaactctatatttta

SEQ ID NO: 343004 - DNA, 20 bp, Artificial Sequence
  Description of Artificial Sequence: Synthetic oligonucleotide
  Target: LAMA2; (+) strand; PAM type: YTN; PAM sequence: TTT
aaaaaaactctatattttat

SEQ ID NO: 343005 - DNA, 20 bp, Artificial Sequence
  Description of Artificial Sequence: Synthetic oligonucleotide
  Target: LAMA2; (+) strand; PAM type: YTN; PAM sequence: TTA
aaaaaactctatattttatg

SEQ ID NO: 343006 - DNA, 20 bp, Artificial Sequence
  Description of Artificial Sequence: Synthetic oligonucleotide
  Target: LAMA2; (+) strand; PAM type: YTN; PAM sequence: CTC
tatattttatgtgcagacat

SEQ ID NO: 343007 - DNA, 20 bp, Artificial Sequence
  Description of Artificial Sequence: Synthetic oligonucleotide
  Target: LAMA2; (+) strand; PAM type: YTN; PAM sequence: CTA
tattttatgtgcagacattt

SEQ ID NO: 343008 - DNA, 20 bp, Artificial Sequence
  Description of Artificial Sequence: Synthetic oligonucleotide
  Target: LAMA2; (+) strand; PAM type: YTN; PAM sequence: TTT
tatgtgcagacatttaacat

SEQ ID NO: 343009 - DNA, 20 bp, Artificial Sequence
  Description of Artificial Sequence: Synthetic oligonucleotide
  Target: LAMA2; (+) strand; PAM type: YTN; PAM sequence: TTT
atgtgcagacatttaacata

SEQ ID NO: 343010 - DNA, 20 bp, Artificial Sequence
  Description of Artificial Sequence: Synthetic oligonucleotide
  Target: LAMA2; (+) strand; PAM type: YTN; PAM sequence: TTA
tgtgcagacatttaacataa

SEQ ID NO: 343011 - DNA, 20 bp, Artificial Sequence
  Description of Artificial Sequence: Synthetic oligonucleotide
  Target: LAMA2; (+) strand; PAM type: YTN; PAM sequence: TTT
aacataaaatcttttcccaa

SEQ ID NO: 343012 - DNA, 20 bp, Artificial Sequence
  Description of Artificial Sequence: Synthetic oligonucleotide
  Target: LAMA2; (+) strand; PAM type: YTN; PAM sequence: TTA
acataaaatcttttcccaat

SEQ ID NO: 343013 - DNA, 20 bp, Artificial Sequence
  Description of Artificial Sequence: Synthetic oligonucleotide
  Target: LAMA2; (+) strand; PAM type: YTN; PAM sequence: CTT
ttcccaatgtctttcttaga

SEQ ID NO: 343014 - DNA, 20 bp, Artificial Sequence
  Description of Artificial Sequence: Synthetic oligonucleotide
  Target: LAMA2; (+) strand; PAM type: YTN; PAM sequence: TTT
tcccaatgtctttcttagat

SEQ ID NO: 343015 - DNA, 20 bp, Artificial Sequence
  Description of Artificial Sequence: Synthetic oligonucleotide
  Target: LAMA2; (+) strand; PAM type: YTN; PAM sequence: TTT
cccaatgtctttcttagatg

SEQ ID NO: 343016 - DNA, 20 bp, Artificial Sequence
  Description of Artificial Sequence: Synthetic oligonucleotide
  Target: LAMA2; (+) strand; PAM type: YTN; PAM sequence: TTC
ccaatgtctttcttagatga

SEQ ID NO: 343017 - DNA, 20 bp, Artificial Sequence
  Description of Artificial Sequence: Synthetic oligonucleotide
  Target: LAMA2; (+) strand; PAM type: YTN; PAM sequence: CTT
tcttagatgattaggtagtt

SEQ ID NO: 343018 - DNA, 20 bp, Artificial Sequence
  Description of Artificial Sequence: Synthetic oligonucleotide
  Target: LAMA2; (+) strand; PAM type: YTN; PAM sequence: TTT
cttagatgattaggtagttg

SEQ ID NO: 343019 - DNA, 20 bp, Artificial Sequence
  Description of Artificial Sequence: Synthetic oligonucleotide
  Target: LAMA2; (+) strand; PAM type: YTN; PAM sequence: TTC
ttagatgattaggtagttga

SEQ ID NO: 343020 - DNA, 20 bp, Artificial Sequence
  Description of Artificial Sequence: Synthetic oligonucleotide
  Target: LAMA2; (+) strand; PAM type: YTN; PAM sequence: CTT
agatgattaggtagttgaaa

SEQ ID NO: 343021 - DNA, 20 bp, Artificial Sequence
  Description of Artificial Sequence: Synthetic oligonucleotide
  Target: LAMA2; (+) strand; PAM type: YTN; PAM sequence: TTA
gatgattaggtagttgaaag

SEQ ID NO: 343022 - DNA, 20 bp, Artificial Sequence
  Description of Artificial Sequence: Synthetic oligonucleotide
  Target: LAMA2; (+) strand; PAM type: YTN; PAM sequence: TTA
ggtagttgaaagacgctact

SEQ ID NO: 343023 - DNA, 20 bp, Artificial Sequence
  Description of Artificial Sequence: Synthetic oligonucleotide
  Target: LAMA2; (+) strand; PAM type: YTN; PAM sequence: TTG
aaagacgctactgtttacga

SEQ ID NO: 343024 - DNA, 20 bp, Artificial Sequence
  Description of Artificial Sequence: Synthetic oligonucleotide
  Target: LAMA2; (+) strand; PAM type: YTN; PAM sequence: CTA
ctgtttacgaggcattgcta

SEQ ID NO: 343025 - DNA, 20 bp, Artificial Sequence
  Description of Artificial Sequence: Synthetic oligonucleotide
  Target: LAMA2; (+) strand; PAM type: YTN; PAM sequence: CTG
tttacgaggcattgctaaaa

SEQ ID NO: 343026 - DNA, 20 bp, Artificial Sequence
  Description of Artificial Sequence: Synthetic oligonucleotide
  Target: LAMA2; (+) strand; PAM type: YTN; PAM sequence: TTT
acgaggcattgctaaaagct

SEQ ID NO: 343027 - DNA, 20 bp, Artificial Sequence
  Description of Artificial Sequence: Synthetic oligonucleotide
  Target: LAMA2; (+) strand; PAM type: YTN; PAM sequence: TTA
cgaggcattgctaaaagctt

SEQ ID NO: 343028 - DNA, 20 bp, Artificial Sequence
  Description of Artificial Sequence: Synthetic oligonucleotide
  Target: LAMA2; (+) strand; PAM type: YTN; PAM sequence: TTG
ctaaaagcttttgggttcca

SEQ ID NO: 343029 - DNA, 20 bp, Artificial Sequence
  Description of Artificial Sequence: Synthetic oligonucleotide
  Target: LAMA2; (+) strand; PAM type: YTN; PAM sequence: CTA
aaagcttttgggttccatga

SEQ ID NO: 343030 - DNA, 20 bp, Artificial Sequence
  Description of Artificial Sequence: Synthetic oligonucleotide
  Target: LAMA2; (+) strand; PAM type: YTN; PAM sequence: CTT
ttgggttccatgagggagag

SEQ ID NO: 343031 - DNA, 20 bp, Artificial Sequence
  Description of Artificial Sequence: Synthetic oligonucleotide
  Target: LAMA2; (+) strand; PAM type: YTN; PAM sequence: TTT
tgggttccatgagggagagg

SEQ ID NO: 343032 - DNA, 20 bp, Artificial Sequence
  Description of Artificial Sequence: Synthetic oligonucleotide
  Target: LAMA2; (+) strand; PAM type: YTN; PAM sequence: TTT
gggttccatgagggagaggg

SEQ ID NO: 343033 - DNA, 20 bp, Artificial Sequence
  Description of Artificial Sequence: Synthetic oligonucleotide
  Target: LAMA2; (+) strand; PAM type: YTN; PAM sequence: TTG
ggttccatgagggagagggc

SEQ ID NO: 343034 - DNA, 20 bp, Artificial Sequence
  Description of Artificial Sequence: Synthetic oligonucleotide
  Target: LAMA2; (+) strand; PAM type: YTN; PAM sequence: TTC
catgagggagagggccatga

SEQ ID NO: 343035 - DNA, 20 bp, Artificial Sequence
  Description of Artificial Sequence: Synthetic oligonucleotide
  Target: LAMA2; (+) strand; PAM type: YTN; PAM sequence: CTA
ctcctttgtacatttcccca

SEQ ID NO: 343036 - DNA, 20 bp, Artificial Sequence
  Description of Artificial Sequence: Synthetic oligonucleotide
  Target: LAMA2; (+) strand; PAM type: YTN; PAM sequence: CTC
ctttgtacatttccccactc

SEQ ID NO: 343037 - DNA, 20 bp, Artificial Sequence
  Description of Artificial Sequence: Synthetic oligonucleotide
  Target: LAMA2; (+) strand; PAM type: YTN; PAM sequence: CTT
tgtacatttccccactcctc

SEQ ID NO: 343038 - DNA, 20 bp, Artificial Sequence
  Description of Artificial Sequence: Synthetic oligonucleotide
  Target: LAMA2; (+) strand; PAM type: YTN; PAM sequence: TTT
gtacatttccccactcctcc

SEQ ID NO: 343039 - DNA, 20 bp, Artificial Sequence
  Description of Artificial Sequence: Synthetic oligonucleotide
  Target: LAMA2; (+) strand; PAM type: YTN; PAM sequence: TTG
tacatttccccactcctccg

SEQ ID NO: 343040 - DNA, 20 bp, Artificial Sequence
  Description of Artificial Sequence: Synthetic oligonucleotide
  Target: LAMA2; (+) strand; PAM type: YTN; PAM sequence: TTT
ccccactcctccgtttacat

SEQ ID NO: 343041 - DNA, 20 bp, Artificial Sequence
  Description of Artificial Sequence: Synthetic oligonucleotide
  Target: LAMA2; (+) strand; PAM type: YTN; PAM sequence: TTC
cccactcctccgtttacatc

SEQ ID NO: 343042 - DNA, 20 bp, Artificial Sequence
  Description of Artificial Sequence: Synthetic oligonucleotide
  Target: LAMA2; (+) strand; PAM type: YTN; PAM sequence: CTC
ctccgtttacatcacataaa

SEQ ID NO: 343043 - DNA, 20 bp, Artificial Sequence
  Description of Artificial Sequence: Synthetic oligonucleotide
  Target: LAMA2; (+) strand; PAM type: YTN; PAM sequence: CTC
cgtttacatcacataaacat

SEQ ID NO: 343044 - DNA, 20 bp, Artificial Sequence
  Description of Artificial Sequence: Synthetic oligonucleotide
  Target: LAMA2; (+) strand; PAM type: YTN; PAM sequence: TTT
acatcacataaacatatatg

SEQ ID NO: 343045 - DNA, 20 bp, Artificial Sequence
  Description of Artificial Sequence: Synthetic oligonucleotide
  Target: LAMA2; (+) strand; PAM type: YTN; PAM sequence: TTA
catcacataaacatatatgt

SEQ ID NO: 343046 - DNA, 20 bp, Artificial Sequence
  Description of Artificial Sequence: Synthetic oligonucleotide
  Target: LAMA2; (+) strand; PAM type: YTN; PAM sequence: CTT
ccatgcagtcagccaaatca

SEQ ID NO: 343047 - DNA, 20 bp, Artificial Sequence
  Description of Artificial Sequence: Synthetic oligonucleotide
  Target: LAMA2; (+) strand; PAM type: YTN; PAM sequence: TTC
catgcagtcagccaaatcag

SEQ ID NO: 343048 - DNA, 20 bp, Artificial Sequence
  Description of Artificial Sequence: Synthetic oligonucleotide
  Target: LAMA2; (+) strand; PAM type: YTN; PAM sequence: CTA
ggagttgaaagtgggaactg

SEQ ID NO: 343049 - DNA, 20 bp, Artificial Sequence
  Description of Artificial Sequence: Synthetic oligonucleotide
  Target: LAMA2; (+) strand; PAM type: YTN; PAM sequence: TTG
aaagtgggaactgatttgtc

SEQ ID NO: 343050 - DNA, 20 bp, Artificial Sequence
  Description of Artificial Sequence: Synthetic oligonucleotide
  Target: LAMA2; (+) strand; PAM type: YTN; PAM sequence: CTG
atttgtctagtttgaatatt

SEQ ID NO: 343051 - DNA, 20 bp, Artificial Sequence
  Description of Artificial Sequence: Synthetic oligonucleotide
  Target: LAMA2; (+) strand; PAM type: YTN; PAM sequence: TTT
gtctagtttgaatattctga

SEQ ID NO: 343052 - DNA, 20 bp, Artificial Sequence
  Description of Artificial Sequence: Synthetic oligonucleotide
  Target: LAMA2; (+) strand; PAM type: YTN; PAM sequence: TTG
tctagtttgaatattctgat

SEQ ID NO: 343053 - DNA, 20 bp, Artificial Sequence
  Description of Artificial Sequence: Synthetic oligonucleotide
  Target: LAMA2; (+) strand; PAM type: YTN; PAM sequence: CTA
gtttgaatattctgattagt

SEQ ID NO: 343054 - DNA, 20 bp, Artificial Sequence
  Description of Artificial Sequence: Synthetic oligonucleotide
  Target: LAMA2; (+) strand; PAM type: YTN; PAM sequence: TTT
gaatattctgattagtgaac

SEQ ID NO: 343055 - DNA, 20 bp, Artificial Sequence
  Description of Artificial Sequence: Synthetic oligonucleotide
  Target: LAMA2; (+) strand; PAM type: YTN; PAM sequence: TTG
aatattctgattagtgaact

SEQ ID NO: 343056 - DNA, 20 bp, Artificial Sequence
  Description of Artificial Sequence: Synthetic oligonucleotide
  Target: LAMA2; (+) strand; PAM type: YTN; PAM sequence: TTC
tgattagtgaactagctagc

SEQ ID NO: 343057 - DNA, 20 bp, Artificial Sequence
  Description of Artificial Sequence: Synthetic oligonucleotide
  Target: LAMA2; (+) strand; PAM type: YTN; PAM sequence: CTG
attagtgaactagctagctt

SEQ ID NO: 343058 - DNA, 20 bp, Artificial Sequence
  Description of Artificial Sequence: Synthetic oligonucleotide
  Target: LAMA2; (+) strand; PAM type: YTN; PAM sequence: TTA
gtgaactagctagcttagaa

SEQ ID NO: 343059 - DNA, 20 bp, Artificial Sequence
  Description of Artificial Sequence: Synthetic oligonucleotide
  Target: LAMA2; (+) strand; PAM type: YTN; PAM sequence: CTA
gctagcttagaattttgtgg

SEQ ID NO: 343060 - DNA, 20 bp, Artificial Sequence
  Description of Artificial Sequence: Synthetic oligonucleotide
  Target: LAMA2; (+) strand; PAM type: YTN; PAM sequence: CTA
gcttagaattttgtggtatt

SEQ ID NO: 343061 - DNA, 20 bp, Artificial Sequence
  Description of Artificial Sequence: Synthetic oligonucleotide
  Target: LAMA2; (+) strand; PAM type: YTN; PAM sequence: CTT
agaattttgtggtatttgca

SEQ ID NO: 343062 - DNA, 20 bp, Artificial Sequence
  Description of Artificial Sequence: Synthetic oligonucleotide
  Target: LAMA2; (+) strand; PAM type: YTN; PAM sequence: TTA
gaattttgtggtatttgcat

SEQ ID NO: 343063 - DNA, 20 bp, Artificial Sequence
  Description of Artificial Sequence: Synthetic oligonucleotide
  Target: LAMA2; (+) strand; PAM type: YTN; PAM sequence: TTT
tgtggtatttgcatatgtca

SEQ ID NO: 343064 - DNA, 20 bp, Artificial Sequence
  Description of Artificial Sequence: Synthetic oligonucleotide
  Target: LAMA2; (+) strand; PAM type: YTN; PAM sequence: TTT
gtggtatttgcatatgtcat

SEQ ID NO: 343065 - DNA, 20 bp, Artificial Sequence
  Description of Artificial Sequence: Synthetic oligonucleotide
  Target: LAMA2; (+) strand; PAM type: YTN; PAM sequence: TTG
tggtatttgcatatgtcatt

SEQ ID NO: 343066 - DNA, 20 bp, Artificial Sequence
  Description of Artificial Sequence: Synthetic oligonucleotide
  Target: LAMA2; (+) strand; PAM type: YTN; PAM sequence: TTT
gcatatgtcattcatttatg

SEQ ID NO: 343067 - DNA, 20 bp, Artificial Sequence
  Description of Artificial Sequence: Synthetic oligonucleotide
  Target: LAMA2; (+) strand; PAM type: YTN; PAM sequence: TTG
catatgtcattcatttatgt

SEQ ID NO: 343068 - DNA, 20 bp, Artificial Sequence
  Description of Artificial Sequence: Synthetic oligonucleotide
  Target: LAMA2; (+) strand; PAM type: YTN; PAM sequence: TTC
atttatgtactacagctaca

SEQ ID NO: 343069 - DNA, 20 bp, Artificial Sequence
  Description of Artificial Sequence: Synthetic oligonucleotide
  Target: LAMA2; (+) strand; PAM type: YTN; PAM sequence: TTT
atgtactacagctacaccta

SEQ ID NO: 343070 - DNA, 20 bp, Artificial Sequence
  Description of Artificial Sequence: Synthetic oligonucleotide
  Target: LAMA2; (+) strand; PAM type: YTN; PAM sequence: TTA
tgtactacagctacacctaa

SEQ ID NO: 343071 - DNA, 20 bp, Artificial Sequence
  Description of Artificial Sequence: Synthetic oligonucleotide
  Target: LAMA2; (+) strand; PAM type: YTN; PAM sequence: CTA
cagctacacctaaatcccag

SEQ ID NO: 343072 - DNA, 20 bp, Artificial Sequence
  Description of Artificial Sequence: Synthetic oligonucleotide
  Target: LAMA2; (+) strand; PAM type: YTN; PAM sequence: CTA
cacctaaatcccagaaaaat

SEQ ID NO: 343073 - DNA, 20 bp, Artificial Sequence
  Description of Artificial Sequence: Synthetic oligonucleotide
  Target: LAMA2; (+) strand; PAM type: YTN; PAM sequence: CTA
aatcccagaaaaatcggtaa

SEQ ID NO: 343074 - DNA, 20 bp, Artificial Sequence
  Description of Artificial Sequence: Synthetic oligonucleotide
  Target: LAMA2; (+) strand; PAM type: YTN; PAM sequence: CTA
ttattctagatttaaatttt

SEQ ID NO: 343075 - DNA, 20 bp, Artificial Sequence
  Description of Artificial Sequence: Synthetic oligonucleotide
  Target: LAMA2; (+) strand; PAM type: YTN; PAM sequence: TTA
ttctagatttaaattttaaa

SEQ ID NO: 343076 - DNA, 20 bp, Artificial Sequence
  Description of Artificial Sequence: Synthetic oligonucleotide
  Target: LAMA2; (+) strand; PAM type: YTN; PAM sequence: TTC
tagatttaaattttaaaatc

SEQ ID NO: 343077 - DNA, 20 bp, Artificial Sequence
  Description of Artificial Sequence: Synthetic oligonucleotide
  Target: LAMA2; (+) strand; PAM type: YTN; PAM sequence: CTA
gatttaaattttaaaatcca

SEQ ID NO: 343078 - DNA, 20 bp, Artificial Sequence
  Description of Artificial Sequence: Synthetic oligonucleotide
  Target: LAMA2; (+) strand; PAM type: YTN; PAM sequence: TTT
aaattttaaaatccacataa

SEQ ID NO: 343079 - DNA, 20 bp, Artificial Sequence
  Description of Artificial Sequence: Synthetic oligonucleotide
  Target: LAMA2; (+) strand; PAM type: YTN; PAM sequence: TTA
aattttaaaatccacataag

SEQ ID NO: 343080 - DNA, 20 bp, Artificial Sequence
  Description of Artificial Sequence: Synthetic oligonucleotide
  Target: LAMA2; (+) strand; PAM type: YTN; PAM sequence: TTT
taaaatccacataagaatat

SEQ ID NO: 343081 - DNA, 20 bp, Artificial Sequence
  Description of Artificial Sequence: Synthetic oligonucleotide
  Target: LAMA2; (+) strand; PAM type: YTN; PAM sequence: TTT
aaaatccacataagaatatt

SEQ ID NO: 343082 - DNA, 20 bp, Artificial Sequence
  Description of Artificial Sequence: Synthetic oligonucleotide
  Target: LAMA2; (+) strand; PAM type: YTN; PAM sequence: TTA
aaatccacataagaatatta

SEQ ID NO: 343083 - DNA, 20 bp, Artificial Sequence
  Description of Artificial Sequence: Synthetic oligonucleotide
  Target: LAMA2; (+) strand; PAM type: YTN; PAM sequence: TTA
ataacacaaattatttgtat

SEQ ID NO: 343084 - DNA, 20 bp, Artificial Sequence
  Description of Artificial Sequence: Synthetic oligonucleotide
  Target: LAMA2; (+) strand; PAM type: YTN; PAM sequence: TTA
tttgtatgacaatgacttct

SEQ ID NO: 343085 - DNA, 20 bp, Artificial Sequence
  Description of Artificial Sequence: Synthetic oligonucleotide
  Target: LAMA2; (+) strand; PAM type: YTN; PAM sequence: TTT
gtatgacaatgacttctatt

SEQ ID NO: 343086 - DNA, 20 bp, Artificial Sequence
  Description of Artificial Sequence: Synthetic oligonucleotide
  Target: LAMA2; (+) strand; PAM type: YTN; PAM sequence: TTG
tatgacaatgacttctattt

SEQ ID NO: 343087 - DNA, 20 bp, Artificial Sequence
  Description of Artificial Sequence: Synthetic oligonucleotide
  Target: LAMA2; (+) strand; PAM type: YTN; PAM sequence: CTT
ctatttttttcatttcaccc

SEQ ID NO: 343088 - DNA, 20 bp, Artificial Sequence
  Description of Artificial Sequence: Synthetic oligonucleotide
  Target: LAMA2; (+) strand; PAM type: YTN; PAM sequence: TTC
tatttttttcatttcaccct

SEQ ID NO: 343089 - DNA, 20 bp, Artificial Sequence
  Description of Artificial Sequence: Synthetic oligonucleotide
  Target: LAMA2; (+) strand; PAM type: YTN; PAM sequence: CTA
tttttttcatttcaccctca

SEQ ID NO: 343090 - DNA, 20 bp, Artificial Sequence
  Description of Artificial Sequence: Synthetic oligonucleotide
  Target: LAMA2; (+) strand; PAM type: YTN; PAM sequence: TTT
ttttcatttcaccctcagag

SEQ ID NO: 343091 - DNA, 20 bp, Artificial Sequence
  Description of Artificial Sequence: Synthetic oligonucleotide
  Target: LAMA2; (+) strand; PAM type: YTN; PAM sequence: TTT
tttcatttcaccctcagaga

SEQ ID NO: 343092 - DNA, 20 bp, Artificial Sequence
  Description of Artificial Sequence: Synthetic oligonucleotide
  Target: LAMA2; (+) strand; PAM type: YTN; PAM sequence: TTT
ttcatttcaccctcagagat

SEQ ID NO: 343093 - DNA, 20 bp, Artificial Sequence
  Description of Artificial Sequence: Synthetic oligonucleotide
  Target: LAMA2; (+) strand; PAM type: YTN; PAM sequence: TTT
tcatttcaccctcagagatc

SEQ ID NO: 343094 - DNA, 20 bp, Artificial Sequence
  Description of Artificial Sequence: Synthetic oligonucleotide
  Target: LAMA2; (+) strand; PAM type: YTN; PAM sequence: TTT
catttcaccctcagagatct

SEQ ID NO: 343095 - DNA, 20 bp, Artificial Sequence
  Description of Artificial Sequence: Synthetic oligonucleotide
  Target: LAMA2; (+) strand; PAM type: YTN; PAM sequence: TTC
atttcaccctcagagatcta

SEQ ID NO: 343096 - DNA, 20 bp, Artificial Sequence
  Description of Artificial Sequence: Synthetic oligonucleotide
  Target: LAMA2; (+) strand; PAM type: YTN; PAM sequence: TTT
caccctcagagatctatata

SEQ ID NO: 343097 - DNA, 20 bp, Artificial Sequence
  Description of Artificial Sequence: Synthetic oligonucleotide
  Target: LAMA2; (+) strand; PAM type: YTN; PAM sequence: TTC
accctcagagatctatatac

SEQ ID NO: 343098 - DNA, 20 bp, Artificial Sequence
  Description of Artificial Sequence: Synthetic oligonucleotide
  Target: LAMA2; (+) strand; PAM type: YTN; PAM sequence: CTC
agagatctatatacttcctc

SEQ ID NO: 343099 - DNA, 20 bp, Artificial Sequence
  Description of Artificial Sequence: Synthetic oligonucleotide
  Target: LAMA2; (+) strand; PAM type: YTN; PAM sequence: CTA
tatacttcctctatccaaaa

SEQ ID NO: 343100 - DNA, 20 bp, Artificial Sequence
  Description of Artificial Sequence: Synthetic oligonucleotide
  Target: LAMA2; (+) strand; PAM type: YTN; PAM sequence: CTT
cctctatccaaaaacaacac

SEQ ID NO: 343101 - DNA, 20 bp, Artificial Sequence
  Description of Artificial Sequence: Synthetic oligonucleotide
  Target: LAMA2; (+) strand; PAM type: YTN; PAM sequence: TTC
ctctatccaaaaacaacaca

SEQ ID NO: 343102 - DNA, 20 bp, Artificial Sequence
  Description of Artificial Sequence: Synthetic oligonucleotide
  Target: LAMA2; (+) strand; PAM type: YTN; PAM sequence: CTC
tatccaaaaacaacacagaa

SEQ ID NO: 343103 - DNA, 20 bp, Artificial Sequence
  Description of Artificial Sequence: Synthetic oligonucleotide
  Target: LAMA2; (+) strand; PAM type: YTN; PAM sequence: CTA
tccaaaaacaacacagaagc

SEQ ID NO: 343104 - DNA, 20 bp, Artificial Sequence
  Description of Artificial Sequence: Synthetic oligonucleotide
  Target: LAMA2; (+) strand; PAM type: YTN; PAM sequence: TTA
cagagacaccagaatgttgc

SEQ ID NO: 343105 - DNA, 20 bp, Artificial Sequence
  Description of Artificial Sequence: Synthetic oligonucleotide
  Target: LAMA2; (+) strand; PAM type: YTN; PAM sequence: TTG
cccagaaaaccatgcattaa

SEQ ID NO: 343106 - DNA, 20 bp, Artificial Sequence
  Description of Artificial Sequence: Synthetic oligonucleotide
  Target: LAMA2; (+) strand; PAM type: YTN; PAM sequence: TTA
attactcaagccaggaaatt

SEQ ID NO: 343107 - DNA, 20 bp, Artificial Sequence
  Description of Artificial Sequence: Synthetic oligonucleotide
  Target: LAMA2; (+) strand; PAM type: YTN; PAM sequence: TTA
ctcaagccaggaaattccca

SEQ ID NO: 343108 - DNA, 20 bp, Artificial Sequence
  Description of Artificial Sequence: Synthetic oligonucleotide
  Target: LAMA2; (+) strand; PAM type: YTN; PAM sequence: CTC
aagccaggaaattcccaatt

SEQ ID NO: 343109 - DNA, 20 bp, Artificial Sequence
  Description of Artificial Sequence: Synthetic oligonucleotide
  Target: LAMA2; (+) strand; PAM type: YTN; PAM sequence: TTC
ccaattttgcaactctattt

SEQ ID NO: 343110 - DNA, 20 bp, Artificial Sequence
  Description of Artificial Sequence: Synthetic oligonucleotide
  Target: LAMA2; (+) strand; PAM type: YTN; PAM sequence: TTT
tgcaactctattttatcatt

SEQ ID NO: 343111 - DNA, 20 bp, Artificial Sequence
  Description of Artificial Sequence: Synthetic oligonucleotide
  Target: LAMA2; (+) strand; PAM type: YTN; PAM sequence: TTT
gcaactctattttatcattt

SEQ ID NO: 343112 - DNA, 20 bp, Artificial Sequence
  Description of Artificial Sequence: Synthetic oligonucleotide
  Target: LAMA2; (+) strand; PAM type: YTN; PAM sequence: TTG
caactctattttatcattta

SEQ ID NO: 343113 - DNA, 20 bp, Artificial Sequence
  Description of Artificial Sequence: Synthetic oligonucleotide
  Target: LAMA2; (+) strand; PAM type: YTN; PAM sequence: CTC
tattttatcatttaagagag

SEQ ID NO: 343114 - DNA, 20 bp, Artificial Sequence
  Description of Artificial Sequence: Synthetic oligonucleotide
  Target: LAMA2; (+) strand; PAM type: YTN; PAM sequence: CTA
ttttatcatttaagagagat

SEQ ID NO: 343115 - DNA, 20 bp, Artificial Sequence
  Description of Artificial Sequence: Synthetic oligonucleotide
  Target: LAMA2; (+) strand; PAM type: YTN; PAM sequence: TTT
tatcatttaagagagatctt

SEQ ID NO: 343116 - DNA, 20 bp, Artificial Sequence
  Description of Artificial Sequence: Synthetic oligonucleotide
  Target: LAMA2; (+) strand; PAM type: YTN; PAM sequence: TTT
atcatttaagagagatcttt

SEQ ID NO: 343117 - DNA, 20 bp, Artificial Sequence
  Description of Artificial Sequence: Synthetic oligonucleotide
  Target: LAMA2; (+) strand; PAM type: YTN; PAM sequence: TTA
tcatttaagagagatctttc

SEQ ID NO: 343118 - DNA, 20 bp, Artificial Sequence
  Description of Artificial Sequence: Synthetic oligonucleotide
  Target: LAMA2; (+) strand; PAM type: YTN; PAM sequence: TTT
aagagagatctttccacatg

SEQ ID NO: 343119 - DNA, 20 bp, Artificial Sequence
  Description of Artificial Sequence: Synthetic oligonucleotide
  Target: LAMA2; (+) strand; PAM type: YTN; PAM sequence: TTA
agagagatctttccacatgt

SEQ ID NO: 343120 - DNA, 20 bp, Artificial Sequence
  Description of Artificial Sequence: Synthetic oligonucleotide
  Target: LAMA2; (+) strand; PAM type: YTN; PAM sequence: CTT
tccacatgtgtgttctaaaa

SEQ ID NO: 343121 - DNA, 20 bp, Artificial Sequence
  Description of Artificial Sequence: Synthetic oligonucleotide
  Target: LAMA2; (+) strand; PAM type: YTN; PAM sequence: TTT
ccacatgtgtgttctaaaaa

SEQ ID NO: 343122 - DNA, 20 bp, Artificial Sequence
  Description of Artificial Sequence: Synthetic oligonucleotide
  Target: LAMA2; (+) strand; PAM type: YTN; PAM sequence: TTC
cacatgtgtgttctaaaaaa

SEQ ID NO: 343123 - DNA, 20 bp, Artificial Sequence
  Description of Artificial Sequence: Synthetic oligonucleotide
  Target: LAMA2; (+) strand; PAM type: YTN; PAM sequence: TTC
taaaaaagaacagagaaata

SEQ ID NO: 343124 - DNA, 20 bp, Artificial Sequence
  Description of Artificial Sequence: Synthetic oligonucleotide
  Target: LAMA2; (+) strand; PAM type: YTN; PAM sequence: CTA
aaaaagaacagagaaataac

SEQ ID NO: 343125 - DNA, 20 bp, Artificial Sequence
  Description of Artificial Sequence: Synthetic oligonucleotide
  Target: LAMA2; (+) strand; PAM type: YTN; PAM sequence: CTC
tgtaacttagcaaaaataca

SEQ ID NO: 343126 - DNA, 20 bp, Artificial Sequence
  Description of Artificial Sequence: Synthetic oligonucleotide
  Target: LAMA2; (+) strand; PAM type: YTN; PAM sequence: CTG
taacttagcaaaaatacaaa

SEQ ID NO: 343127 - DNA, 20 bp, Artificial Sequence
  Description of Artificial Sequence: Synthetic oligonucleotide
  Target: LAMA2; (+) strand; PAM type: YTN; PAM sequence: CTT
agcaaaaatacaaattggtg

SEQ ID NO: 343128 - DNA, 20 bp, Artificial Sequence
  Description of Artificial Sequence: Synthetic oligonucleotide
  Target: LAMA2; (+) strand; PAM type: YTN; PAM sequence: TTA
gcaaaaatacaaattggtgt

SEQ ID NO: 343129 - DNA, 20 bp, Artificial Sequence
  Description of Artificial Sequence: Synthetic oligonucleotide
  Target: LAMA2; (+) strand; PAM type: YTN; PAM sequence: TTG
gtgtttccactttgatttct

SEQ ID NO: 343130 - DNA, 20 bp, Artificial Sequence
  Description of Artificial Sequence: Synthetic oligonucleotide
  Target: LAMA2; (+) strand; PAM type: YTN; PAM sequence: TTT
ccactttgatttctcttttt

SEQ ID NO: 343131 - DNA, 20 bp, Artificial Sequence
  Description of Artificial Sequence: Synthetic oligonucleotide
  Target: LAMA2; (+) strand; PAM type: YTN; PAM sequence: TTC
cactttgatttctctttttg

SEQ ID NO: 343132 - DNA, 20 bp, Artificial Sequence
  Description of Artificial Sequence: Synthetic oligonucleotide
  Target: LAMA2; (+) strand; PAM type: YTN; PAM sequence: CTT
tgatttctctttttgaaata

SEQ ID NO: 343133 - DNA, 20 bp, Artificial Sequence
  Description of Artificial Sequence: Synthetic oligonucleotide
  Target: LAMA2; (+) strand; PAM type: YTN; PAM sequence: TTT
gatttctctttttgaaataa

SEQ ID NO: 343134 - DNA, 20 bp, Artificial Sequence
  Description of Artificial Sequence: Synthetic oligonucleotide
  Target: LAMA2; (+) strand; PAM type: YTN; PAM sequence: TTG
atttctctttttgaaataaa

SEQ ID NO: 343135 - DNA, 20 bp, Artificial Sequence
  Description of Artificial Sequence: Synthetic oligonucleotide
  Target: LAMA2; (+) strand; PAM type: YTN; PAM sequence: TTT
ctctttttgaaataaatttt

SEQ ID NO: 343136 - DNA, 20 bp, Artificial Sequence
  Description of Artificial Sequence: Synthetic oligonucleotide
  Target: LAMA2; (+) strand; PAM type: YTN; PAM sequence: TTC
tctttttgaaataaattttc

SEQ ID NO: 343137 - DNA, 20 bp, Artificial Sequence
  Description of Artificial Sequence: Synthetic oligonucleotide
  Target: LAMA2; (+) strand; PAM type: YTN; PAM sequence: CTC
tttttgaaataaattttcag

SEQ ID NO: 343138 - DNA, 20 bp, Artificial Sequence
  Description of Artificial Sequence: Synthetic oligonucleotide
  Target: LAMA2; (+) strand; PAM type: YTN; PAM sequence: CTT
tttgaaataaattttcagct

SEQ ID NO: 343139 - DNA, 20 bp, Artificial Sequence
  Description of Artificial Sequence: Synthetic oligonucleotide
  Target: LAMA2; (+) strand; PAM type: YTN; PAM sequence: TTT
ttgaaataaattttcagctt

SEQ ID NO: 343140 - DNA, 20 bp, Artificial Sequence
  Description of Artificial Sequence: Synthetic oligonucleotide
  Target: LAMA2; (+) strand; PAM type: YTN; PAM sequence: TTT
tgaaataaattttcagcttg

SEQ ID NO: 343141 - DNA, 20 bp, Artificial Sequence
  Description of Artificial Sequence: Synthetic oligonucleotide
  Target: LAMA2; (+) strand; PAM type: YTN; PAM sequence: TTT
gaaataaattttcagcttga

SEQ ID NO: 343142 - DNA, 20 bp, Artificial Sequence
  Description of Artificial Sequence: Synthetic oligonucleotide
  Target: LAMA2; (+) strand; PAM type: YTN; PAM sequence: TTG
aaataaattttcagcttgac

SEQ ID NO: 343143 - DNA, 20 bp, Artificial Sequence
  Description of Artificial Sequence: Synthetic oligonucleotide
  Target: LAMA2; (+) strand; PAM type: YTN; PAM sequence: TTT
tcagcttgactttcttttgc

SEQ ID NO: 343144 - DNA, 20 bp, Artificial Sequence
  Description of Artificial Sequence: Synthetic oligonucleotide
  Target: LAMA2; (+) strand; PAM type: YTN; PAM sequence: TTT
cagcttgactttcttttgcc

SEQ ID NO: 343145 - DNA, 20 bp, Artificial Sequence
  Description of Artificial Sequence: Synthetic oligonucleotide
  Target: LAMA2; (+) strand; PAM type: YTN; PAM sequence: TTC
agcttgactttcttttgcct

SEQ ID NO: 343146 - DNA, 20 bp, Artificial Sequence
  Description of Artificial Sequence: Synthetic oligonucleotide
  Target: LAMA2; (+) strand; PAM type: YTN; PAM sequence: CTT
gactttcttttgcctcgggt

SEQ ID NO: 343147 - DNA, 20 bp, Artificial Sequence
  Description of Artificial Sequence: Synthetic oligonucleotide
  Target: LAMA2; (+) strand; PAM type: YTN; PAM sequence: TTG
actttcttttgcctcgggta

SEQ ID NO: 343148 - DNA, 20 bp, Artificial Sequence
  Description of Artificial Sequence: Synthetic oligonucleotide
  Target: LAMA2; (+) strand; PAM type: YTN; PAM sequence: CTT
tcttttgcctcgggtattct

SEQ ID NO: 343149 - DNA, 20 bp, Artificial Sequence
  Description of Artificial Sequence: Synthetic oligonucleotide
  Target: LAMA2; (+) strand; PAM type: YTN; PAM sequence: TTT
cttttgcctcgggtattctg

SEQ ID NO: 343150 - DNA, 20 bp, Artificial Sequence
  Description of Artificial Sequence: Synthetic oligonucleotide
  Target: LAMA2; (+) strand; PAM type: YTN; PAM sequence: TTC
ttttgcctcgggtattctgg

SEQ ID NO: 343151 - DNA, 20 bp, Artificial Sequence
  Description of Artificial Sequence: Synthetic oligonucleotide
  Target: LAMA2; (+) strand; PAM type: YTN; PAM sequence: CTT
ttgcctcgggtattctggat

SEQ ID NO: 343152 - DNA, 20 bp, Artificial Sequence
  Description of Artificial Sequence: Synthetic oligonucleotide
  Target: LAMA2; (+) strand; PAM type: YTN; PAM sequence: TTT
tgcctcgggtattctggatt

SEQ ID NO: 343153 - DNA, 20 bp, Artificial Sequence
  Description of Artificial Sequence: Synthetic oligonucleotide
  Target: LAMA2; (+) strand; PAM type: YTN; PAM sequence: TTT
gcctcgggtattctggatta

SEQ ID NO: 343154 - DNA, 20 bp, Artificial Sequence
  Description of Artificial Sequence: Synthetic oligonucleotide
  Target: LAMA2; (+) strand; PAM type: YTN; PAM sequence: TTG
cctcgggtattctggattat

SEQ ID NO: 343155 - DNA, 20 bp, Artificial Sequence
  Description of Artificial Sequence: Synthetic oligonucleotide
  Target: LAMA2; (+) strand; PAM type: YTN; PAM sequence: CTC
gggtattctggattatcatt

SEQ ID NO: 343156 - DNA, 20 bp, Artificial Sequence
  Description of Artificial Sequence: Synthetic oligonucleotide
  Target: LAMA2; (+) strand; PAM type: YTN; PAM sequence: TTC
tggattatcattttgtagca

SEQ ID NO: 343157 - DNA, 20 bp, Artificial Sequence
  Description of Artificial Sequence: Synthetic oligonucleotide
  Target: LAMA2; (+) strand; PAM type: YTN; PAM sequence: CTG
gattatcattttgtagcatc

SEQ ID NO: 343158 - DNA, 20 bp, Artificial Sequence
  Description of Artificial Sequence: Synthetic oligonucleotide
  Target: LAMA2; (+) strand; PAM type: YTN; PAM sequence: TTA
tcattttgtagcatctggat

SEQ ID NO: 343159 - DNA, 20 bp, Artificial Sequence
  Description of Artificial Sequence: Synthetic oligonucleotide
  Target: LAMA2; (+) strand; PAM type: YTN; PAM sequence: TTT
tgtagcatctggataatttt

SEQ ID NO: 343160 - DNA, 20 bp, Artificial Sequence
  Description of Artificial Sequence: Synthetic oligonucleotide
  Target: LAMA2; (+) strand; PAM type: YTN; PAM sequence: TTT
gtagcatctggataatttta

SEQ ID NO: 343161 - DNA, 20 bp, Artificial Sequence
  Description of Artificial Sequence: Synthetic oligonucleotide
  Target: LAMA2; (+) strand; PAM type: YTN; PAM sequence: TTG
tagcatctggataattttac

SEQ ID NO: 343162 - DNA, 20 bp, Artificial Sequence
  Description of Artificial Sequence: Synthetic oligonucleotide
  Target: LAMA2; (+) strand; PAM type: YTN; PAM sequence: CTG
gataattttacattaacatc

SEQ ID NO: 343163 - DNA, 20 bp, Artificial Sequence
  Description of Artificial Sequence: Synthetic oligonucleotide
  Target: LAMA2; (+) strand; PAM type: YTN; PAM sequence: TTT
tacattaacatctggagttg

SEQ ID NO: 343164 - DNA, 20 bp, Artificial Sequence
  Description of Artificial Sequence: Synthetic oligonucleotide
  Target: LAMA2; (+) strand; PAM type: YTN; PAM sequence: TTT
acattaacatctggagttga

SEQ ID NO: 343165 - DNA, 20 bp, Artificial Sequence
  Description of Artificial Sequence: Synthetic oligonucleotide
  Target: LAMA2; (+) strand; PAM type: YTN; PAM sequence: TTA
cattaacatctggagttgag

SEQ ID NO: 343166 - DNA, 20 bp, Artificial Sequence
  Description of Artificial Sequence: Synthetic oligonucleotide
  Target: LAMA2; (+) strand; PAM type: YTN; PAM sequence: TTA
acatctggagttgagggtct

SEQ ID NO: 343167 - DNA, 20 bp, Artificial Sequence
  Description of Artificial Sequence: Synthetic oligonucleotide
  Target: LAMA2; (+) strand; PAM type: YTN; PAM sequence: CTG
gagttgagggtctttttatt

SEQ ID NO: 343168 - DNA, 20 bp, Artificial Sequence
  Description of Artificial Sequence: Synthetic oligonucleotide
  Target: LAMA2; (+) strand; PAM type: YTN; PAM sequence: TTG
agggtctttttatttgtcgg

SEQ ID NO: 343169 - DNA, 20 bp, Artificial Sequence
  Description of Artificial Sequence: Synthetic oligonucleotide
  Target: LAMA2; (+) strand; PAM type: YTN; PAM sequence: CTT
tttatttgtcggatgcatat

SEQ ID NO: 343170 - DNA, 20 bp, Artificial Sequence
  Description of Artificial Sequence: Synthetic oligonucleotide
  Target: LAMA2; (+) strand; PAM type: YTN; PAM sequence: TTT
ttatttgtcggatgcatata

SEQ ID NO: 343171 - DNA, 20 bp, Artificial Sequence
  Description of Artificial Sequence: Synthetic oligonucleotide
  Target: LAMA2; (+) strand; PAM type: YTN; PAM sequence: TTT
tatttgtcggatgcatatag

SEQ ID NO: 343172 - DNA, 20 bp, Artificial Sequence
  Description of Artificial Sequence: Synthetic oligonucleotide
  Target: LAMA2; (+) strand; PAM type: YTN; PAM sequence: TTT
atttgtcggatgcatataga

SEQ ID NO: 343173 - DNA, 20 bp, Artificial Sequence
  Description of Artificial Sequence: Synthetic oligonucleotide
  Target: LAMA2; (+) strand; PAM type: YTN; PAM sequence: TTA
tttgtcggatgcatatagaa

SEQ ID NO: 343174 - DNA, 20 bp, Artificial Sequence
  Description of Artificial Sequence: Synthetic oligonucleotide
  Target: LAMA2; (+) strand; PAM type: YTN; PAM sequence: TTT
gtcggatgcatatagaatac

SEQ ID NO: 343175 - DNA, 20 bp, Artificial Sequence
  Description of Artificial Sequence: Synthetic oligonucleotide
  Target: LAMA2; (+) strand; PAM type: YTN; PAM sequence: TTG
tcggatgcatatagaatact

SEQ ID NO: 343176 - DNA, 20 bp, Artificial Sequence
  Description of Artificial Sequence: Synthetic oligonucleotide
  Target: LAMA2; (+) strand; PAM type: YTN; PAM sequence: CTT
ctgtaagaaatgtattttcc

SEQ ID NO: 343177 - DNA, 20 bp, Artificial Sequence
  Description of Artificial Sequence: Synthetic oligonucleotide
  Target: LAMA2; (+) strand; PAM type: YTN; PAM sequence: TTC
tgtaagaaatgtattttccc

SEQ ID NO: 343178 - DNA, 20 bp, Artificial Sequence
  Description of Artificial Sequence: Synthetic oligonucleotide
  Target: LAMA2; (+) strand; PAM type: YTN; PAM sequence: CTG
taagaaatgtattttcccag

SEQ ID NO: 343179 - DNA, 20 bp, Artificial Sequence
  Description of Artificial Sequence: Synthetic oligonucleotide
  Target: LAMA2; (+) strand; PAM type: YTN; PAM sequence: TTT
tcccagctgctgtttattca

SEQ ID NO: 343180 - DNA, 20 bp, Artificial Sequence
  Description of Artificial Sequence: Synthetic oligonucleotide
  Target: LAMA2; (+) strand; PAM type: YTN; PAM sequence: TTT
cccagctgctgtttattcat

SEQ ID NO: 343181 - DNA, 20 bp, Artificial Sequence
  Description of Artificial Sequence: Synthetic oligonucleotide
  Target: LAMA2; (+) strand; PAM type: YTN; PAM sequence: TTC
ccagctgctgtttattcatt

SEQ ID NO: 343182 - DNA, 20 bp, Artificial Sequence
  Description of Artificial Sequence: Synthetic oligonucleotide
  Target: LAMA2; (+) strand; PAM type: YTN; PAM sequence: CTG
ctgtttattcattttaaaga

SEQ ID NO: 343183 - DNA, 20 bp, Artificial Sequence
  Description of Artificial Sequence: Synthetic oligonucleotide
  Target: LAMA2; (+) strand; PAM type: YTN; PAM sequence: CTG
tttattcattttaaagagac

SEQ ID NO: 343184 - DNA, 20 bp, Artificial Sequence
  Description of Artificial Sequence: Synthetic oligonucleotide
  Target: LAMA2; (+) strand; PAM type: YTN; PAM sequence: TTT
attcattttaaagagacatg

SEQ ID NO: 343185 - DNA, 20 bp, Artificial Sequence
  Description of Artificial Sequence: Synthetic oligonucleotide
  Target: LAMA2; (+) strand; PAM type: YTN; PAM sequence: TTA
ttcattttaaagagacatgg

SEQ ID NO: 343186 - DNA, 20 bp, Artificial Sequence
  Description of Artificial Sequence: Synthetic oligonucleotide
  Target: LAMA2; (+) strand; PAM type: YTN; PAM sequence: TTC
attttaaagagacatggtta

SEQ ID NO: 343187 - DNA, 20 bp, Artificial Sequence
  Description of Artificial Sequence: Synthetic oligonucleotide
  Target: LAMA2; (+) strand; PAM type: YTN; PAM sequence: TTT
taaagagacatggttaagta

SEQ ID NO: 343188 - DNA, 20 bp, Artificial Sequence
  Description of Artificial Sequence: Synthetic oligonucleotide
  Target: LAMA2; (+) strand; PAM type: YTN; PAM sequence: TTT
aaagagacatggttaagtaa

SEQ ID NO: 343189 - DNA, 20 bp, Artificial Sequence
  Description of Artificial Sequence: Synthetic oligonucleotide
  Target: LAMA2; (+) strand; PAM type: YTN; PAM sequence: TTA
aagagacatggttaagtaag

SEQ ID NO: 343190 - DNA, 20 bp, Artificial Sequence
  Description of Artificial Sequence: Synthetic oligonucleotide
  Target: LAMA2; (+) strand; PAM type: YTN; PAM sequence: TTA
agtaagtctaacagcctcct

SEQ ID NO: 343191 - DNA, 20 bp, Artificial Sequence
  Description of Artificial Sequence: Synthetic oligonucleotide
  Target: LAMA2; (+) strand; PAM type: YTN; PAM sequence: CTA
acagcctccttaggaaattc

SEQ ID NO: 343192 - DNA, 20 bp, Artificial Sequence
  Description of Artificial Sequence: Synthetic oligonucleotide
  Target: LAMA2; (+) strand; PAM type: YTN; PAM sequence: CTC
cttaggaaattcaattccta

SEQ ID NO: 343193 - DNA, 20 bp, Artificial Sequence
  Description of Artificial Sequence: Synthetic oligonucleotide
  Target: LAMA2; (+) strand; PAM type: YTN; PAM sequence: CTT
aggaaattcaattcctaaat

SEQ ID NO: 343194 - DNA, 20 bp, Artificial Sequence
  Description of Artificial Sequence: Synthetic oligonucleotide
  Target: LAMA2; (+) strand; PAM type: YTN; PAM sequence: TTA
ggaaattcaattcctaaatt

SEQ ID NO: 343195 - DNA, 20 bp, Artificial Sequence
  Description of Artificial Sequence: Synthetic oligonucleotide
  Target: LAMA2; (+) strand; PAM type: YTN; PAM sequence: TTC
aattcctaaattccttagga

SEQ ID NO: 343196 - DNA, 20 bp, Artificial Sequence
  Description of Artificial Sequence: Synthetic oligonucleotide
  Target: LAMA2; (+) strand; PAM type: YTN; PAM sequence: TTC
ctaaattccttaggaaacac

SEQ ID NO: 343197 - DNA, 20 bp, Artificial Sequence
  Description of Artificial Sequence: Synthetic oligonucleotide
  Target: LAMA2; (+) strand; PAM type: YTN; PAM sequence: CTA
aattccttaggaaacacaaa

SEQ ID NO: 343198 - DNA, 20 bp, Artificial Sequence
  Description of Artificial Sequence: Synthetic oligonucleotide
  Target: LAMA2; (+) strand; PAM type: YTN; PAM sequence: TTC
cttaggaaacacaaaccatg

SEQ ID NO: 343199 - DNA, 20 bp, Artificial Sequence
  Description of Artificial Sequence: Synthetic oligonucleotide
  Target: LAMA2; (+) strand; PAM type: YTN; PAM sequence: CTT
aggaaacacaaaccatgttt

SEQ ID NO: 343200 - DNA, 20 bp, Artificial Sequence
  Description of Artificial Sequence: Synthetic oligonucleotide
  Target: LAMA2; (+) strand; PAM type: YTN; PAM sequence: TTA
ggaaacacaaaccatgttta

SEQ ID NO: 343201 - DNA, 20 bp, Artificial Sequence
  Description of Artificial Sequence: Synthetic oligonucleotide
  Target: LAMA2; (+) strand; PAM type: YTN; PAM sequence: TTT
aatctgaagtcctgccagtc

SEQ ID NO: 343202 - DNA, 20 bp, Artificial Sequence
  Description of Artificial Sequence: Synthetic oligonucleotide
  Target: LAMA2; (+) strand; PAM type: YTN; PAM sequence: TTA
atctgaagtcctgccagtct

SEQ ID NO: 343203 - DNA, 20 bp, Artificial Sequence
  Description of Artificial Sequence: Synthetic oligonucleotide
  Target: LAMA2; (+) strand; PAM type: YTN; PAM sequence: CTG
aagtcctgccagtctgtttt

SEQ ID NO: 343204 - DNA, 20 bp, Artificial Sequence
  Description of Artificial Sequence: Synthetic oligonucleotide
  Target: LAMA2; (+) strand; PAM type: YTN; PAM sequence: CTG
ccagtctgttttctctccta

SEQ ID NO: 343205 - DNA, 20 bp, Artificial Sequence
  Description of Artificial Sequence: Synthetic oligonucleotide
  Target: LAMA2; (+) strand; PAM type: YTN; PAM sequence: CTG
ttttctctcctaccagcttt

SEQ ID NO: 343206 - DNA, 20 bp, Artificial Sequence
  Description of Artificial Sequence: Synthetic oligonucleotide
  Target: LAMA2; (+) strand; PAM type: YTN; PAM sequence: TTT
tctctcctaccagcttttcc

SEQ ID NO: 343207 - DNA, 20 bp, Artificial Sequence
  Description of Artificial Sequence: Synthetic oligonucleotide
  Target: LAMA2; (+) strand; PAM type: YTN; PAM sequence: TTT
ctctcctaccagcttttccc

SEQ ID NO: 343208 - DNA, 20 bp, Artificial Sequence
  Description of Artificial Sequence: Synthetic oligonucleotide
  Target: LAMA2; (+) strand; PAM type: YTN; PAM sequence: TTC
tctcctaccagcttttccca

SEQ ID NO: 343209 - DNA, 20 bp, Artificial Sequence
  Description of Artificial Sequence: Synthetic oligonucleotide
  Target: LAMA2; (+) strand; PAM type: YTN; PAM sequence: CTC
tcctaccagcttttcccatg

SEQ ID NO: 343210 - DNA, 20 bp, Artificial Sequence
  Description of Artificial Sequence: Synthetic oligonucleotide
  Target: LAMA2; (+) strand; PAM type: YTN; PAM sequence: CTC
ctaccagcttttcccatggc

SEQ ID NO: 343211 - DNA, 20 bp, Artificial Sequence
  Description of Artificial Sequence: Synthetic oligonucleotide
  Target: LAMA2; (+) strand; PAM type: YTN; PAM sequence: CTA
ccagcttttcccatggcaga

SEQ ID NO: 343212 - DNA, 20 bp, Artificial Sequence
  Description of Artificial Sequence: Synthetic oligonucleotide
  Target: LAMA2; (+) strand; PAM type: YTN; PAM sequence: CTT
ttcccatggcagaaatggtt

SEQ ID NO: 343213 - DNA, 20 bp, Artificial Sequence
  Description of Artificial Sequence: Synthetic oligonucleotide
  Target: LAMA2; (+) strand; PAM type: YTN; PAM sequence: TTT
tcccatggcagaaatggttg

SEQ ID NO: 343214 - DNA, 20 bp, Artificial Sequence
  Description of Artificial Sequence: Synthetic oligonucleotide
  Target: LAMA2; (+) strand; PAM type: YTN; PAM sequence: TTT
cccatggcagaaatggttga

SEQ ID NO: 343215 - DNA, 20 bp, Artificial Sequence
  Description of Artificial Sequence: Synthetic oligonucleotide
  Target: LAMA2; (+) strand; PAM type: YTN; PAM sequence: TTC
ccatggcagaaatggttgag

SEQ ID NO: 343216 - DNA, 20 bp, Artificial Sequence
  Description of Artificial Sequence: Synthetic oligonucleotide
  Target: LAMA2; (+) strand; PAM type: YTN; PAM sequence: TTG
agatctgtacagaaggagga

SEQ ID NO: 343217 - DNA, 20 bp, Artificial Sequence
  Description of Artificial Sequence: Synthetic oligonucleotide
  Target: LAMA2; (+) strand; PAM type: YTN; PAM sequence: CTG
tacagaaggaggactttagt

SEQ ID NO: 343218 - DNA, 20 bp, Artificial Sequence
  Description of Artificial Sequence: Synthetic oligonucleotide
  Target: LAMA2; (+) strand; PAM type: YTN; PAM sequence: CTT
tagtctggtaacaggtggtg

SEQ ID NO: 343219 - DNA, 20 bp, Artificial Sequence
  Description of Artificial Sequence: Synthetic oligonucleotide
  Target: LAMA2; (+) strand; PAM type: YTN; PAM sequence: TTT
agtctggtaacaggtggtgt

SEQ ID NO: 343220 - DNA, 20 bp, Artificial Sequence
  Description of Artificial Sequence: Synthetic oligonucleotide
  Target: LAMA2; (+) strand; PAM type: YTN; PAM sequence: TTA
gtctggtaacaggtggtgtt

SEQ ID NO: 343221 - DNA, 20 bp, Artificial Sequence
  Description of Artificial Sequence: Synthetic oligonucleotide
  Target: LAMA2; (+) strand; PAM type: YTN; PAM sequence: CTG
gtaacaggtggtgttgctga

SEQ ID NO: 343222 - DNA, 20 bp, Artificial Sequence
  Description of Artificial Sequence: Synthetic oligonucleotide
  Target: LAMA2; (+) strand; PAM type: YTN; PAM sequence: TTG
ctgagtgcaagggcctttga

SEQ ID NO: 343223 - DNA, 20 bp, Artificial Sequence
  Description of Artificial Sequence: Synthetic oligonucleotide
  Target: LAMA2; (+) strand; PAM type: YTN; PAM sequence: CTG
agtgcaagggcctttgaaat

SEQ ID NO: 343224 - DNA, 20 bp, Artificial Sequence
  Description of Artificial Sequence: Synthetic oligonucleotide
  Target: LAMA2; (+) strand; PAM type: YTN; PAM sequence: CTT
tgaaatcaggcctggtttgg

SEQ ID NO: 343225 - DNA, 20 bp, Artificial Sequence
  Description of Artificial Sequence: Synthetic oligonucleotide
  Target: LAMA2; (+) strand; PAM type: YTN; PAM sequence: TTT
gaaatcaggcctggtttgga

SEQ ID NO: 343226 - DNA, 20 bp, Artificial Sequence
  Description of Artificial Sequence: Synthetic oligonucleotide
  Target: LAMA2; (+) strand; PAM type: YTN; PAM sequence: TTG
aaatcaggcctggtttggaa

SEQ ID NO: 343227 - DNA, 20 bp, Artificial Sequence
  Description of Artificial Sequence: Synthetic oligonucleotide
  Target: LAMA2; (+) strand; PAM type: YTN; PAM sequence: CTG
gtttggaatcttggtccagc

SEQ ID NO: 343228 - DNA, 20 bp, Artificial Sequence
  Description of Artificial Sequence: Synthetic oligonucleotide
  Target: LAMA2; (+) strand; PAM type: YTN; PAM sequence: TTT
ggaatcttggtccagcaatc

SEQ ID NO: 343229 - DNA, 20 bp, Artificial Sequence
  Description of Artificial Sequence: Synthetic oligonucleotide
  Target: LAMA2; (+) strand; PAM type: YTN; PAM sequence: TTG
gaatcttggtccagcaatca

SEQ ID NO: 343230 - DNA, 20 bp, Artificial Sequence
  Description of Artificial Sequence: Synthetic oligonucleotide
  Target: LAMA2; (+) strand; PAM type: YTN; PAM sequence: CTT
ggtccagcaatcaatagctg

SEQ ID NO: 343231 - DNA, 20 bp, Artificial Sequence
  Description of Artificial Sequence: Synthetic oligonucleotide
  Target: LAMA2; (+) strand; PAM type: YTN; PAM sequence: TTG
gtccagcaatcaatagctgt

SEQ ID NO: 343232 - DNA, 20 bp, Artificial Sequence
  Description of Artificial Sequence: Synthetic oligonucleotide
  Target: LAMA2; (+) strand; PAM type: YTN; PAM sequence: CTG
tgtaatcttaggtaactctt

SEQ ID NO: 343233 - DNA, 20 bp, Artificial Sequence
  Description of Artificial Sequence: Synthetic oligonucleotide
  Target: LAMA2; (+) strand; PAM type: YTN; PAM sequence: CTT
aggtaactctttgaagttta

SEQ ID NO: 343234 - DNA, 20 bp, Artificial Sequence
  Description of Artificial Sequence: Synthetic oligonucleotide
  Target: LAMA2; (+) strand; PAM type: YTN; PAM sequence: TTA
ggtaactctttgaagtttag

SEQ ID NO: 343235 - DNA, 20 bp, Artificial Sequence
  Description of Artificial Sequence: Synthetic oligonucleotide
  Target: LAMA2; (+) strand; PAM type: YTN; PAM sequence: CTC
tttgaagtttagtttccgca

SEQ ID NO: 343236 - DNA, 20 bp, Artificial Sequence
  Description of Artificial Sequence: Synthetic oligonucleotide
  Target: LAMA2; (+) strand; PAM type: YTN; PAM sequence: CTT
tgaagtttagtttccgcatc

SEQ ID NO: 343237 - DNA, 20 bp, Artificial Sequence
  Description of Artificial Sequence: Synthetic oligonucleotide
  Target: LAMA2; (+) strand; PAM type: YTN; PAM sequence: TTT
gaagtttagtttccgcatct

SEQ ID NO: 343238 - DNA, 20 bp, Artificial Sequence
  Description of Artificial Sequence: Synthetic oligonucleotide
  Target: LAMA2; (+) strand; PAM type: YTN; PAM sequence: TTG
aagtttagtttccgcatcta

SEQ ID NO: 343239 - DNA, 20 bp, Artificial Sequence
  Description of Artificial Sequence: Synthetic oligonucleotide
  Target: LAMA2; (+) strand; PAM type: YTN; PAM sequence: TTT
agtttccgcatctaagaatg

SEQ ID NO: 343240 - DNA, 20 bp, Artificial Sequence
  Description of Artificial Sequence: Synthetic oligonucleotide
  Target: LAMA2; (+) strand; PAM type: YTN; PAM sequence: TTA
gtttccgcatctaagaatga

SEQ ID NO: 343241 - DNA, 20 bp, Artificial Sequence
  Description of Artificial Sequence: Synthetic oligonucleotide
  Target: LAMA2; (+) strand; PAM type: YTN; PAM sequence: TTT
ccgcatctaagaatgaggaa

SEQ ID NO: 343242 - DNA, 20 bp, Artificial Sequence
  Description of Artificial Sequence: Synthetic oligonucleotide
  Target: LAMA2; (+) strand; PAM type: YTN; PAM sequence: TTC
cgcatctaagaatgaggaag

SEQ ID NO: 343243 - DNA, 20 bp, Artificial Sequence
  Description of Artificial Sequence: Synthetic oligonucleotide
  Target: LAMA2; (+) strand; PAM type: YTN; PAM sequence: CTA
agaatgaggaagtataaata

SEQ ID NO: 343244 - DNA, 20 bp, Artificial Sequence
  Description of Artificial Sequence: Synthetic oligonucleotide
  Target: LAMA2; (+) strand; PAM type: YTN; PAM sequence: CTG
cccacgttggttgtattaaa

SEQ ID NO: 343245 - DNA, 20 bp, Artificial Sequence
  Description of Artificial Sequence: Synthetic oligonucleotide
  Target: LAMA2; (+) strand; PAM type: YTN; PAM sequence: TTG
gttgtattaaatgagataat

SEQ ID NO: 343246 - DNA, 20 bp, Artificial Sequence
  Description of Artificial Sequence: Synthetic oligonucleotide
  Target: LAMA2; (+) strand; PAM type: YTN; PAM sequence: TTG
tattaaatgagataatttac

SEQ ID NO: 343247 - DNA, 20 bp, Artificial Sequence
  Description of Artificial Sequence: Synthetic oligonucleotide
  Target: LAMA2; (+) strand; PAM type: YTN; PAM sequence: TTA
aatgagataatttacataac

SEQ ID NO: 343248 - DNA, 20 bp, Artificial Sequence
  Description of Artificial Sequence: Synthetic oligonucleotide
  Target: LAMA2; (+) strand; PAM type: YTN; PAM sequence: TTT
acataacacatccgactaag

SEQ ID NO: 343249 - DNA, 20 bp, Artificial Sequence
  Description of Artificial Sequence: Synthetic oligonucleotide
  Target: LAMA2; (+) strand; PAM type: YTN; PAM sequence: TTA
cataacacatccgactaagg

SEQ ID NO: 343250 - DNA, 20 bp, Artificial Sequence
  Description of Artificial Sequence: Synthetic oligonucleotide
  Target: LAMA2; (+) strand; PAM type: YTN; PAM sequence: CTA
aggtgcagatgtaataaatg

SEQ ID NO: 343251 - DNA, 20 bp, Artificial Sequence
  Description of Artificial Sequence: Synthetic oligonucleotide
  Target: LAMA2; (+) strand; PAM type: YTN; PAM sequence: CTG
ttattatcatttatttcagc

SEQ ID NO: 343252 - DNA, 20 bp, Artificial Sequence
  Description of Artificial Sequence: Synthetic oligonucleotide
  Target: LAMA2; (+) strand; PAM type: YTN; PAM sequence: TTA
ttatcatttatttcagcacg

SEQ ID NO: 343253 - DNA, 20 bp, Artificial Sequence
  Description of Artificial Sequence: Synthetic oligonucleotide
  Target: LAMA2; (+) strand; PAM type: YTN; PAM sequence: TTA
tcatttatttcagcacgttg

SEQ ID NO: 343254 - DNA, 20 bp, Artificial Sequence
  Description of Artificial Sequence: Synthetic oligonucleotide
  Target: LAMA2; (+) strand; PAM type: YTN; PAM sequence: TTT
atttcagcacgttgcagaaa

SEQ ID NO: 343255 - DNA, 20 bp, Artificial Sequence
  Description of Artificial Sequence: Synthetic oligonucleotide
  Target: LAMA2; (+) strand; PAM type: YTN; PAM sequence: TTA
tttcagcacgttgcagaaag

SEQ ID NO: 343256 - DNA, 20 bp, Artificial Sequence
  Description of Artificial Sequence: Synthetic oligonucleotide
  Target: LAMA2; (+) strand; PAM type: YTN; PAM sequence: TTT
cagcacgttgcagaaagcaa

SEQ ID NO: 343257 - DNA, 20 bp, Artificial Sequence
  Description of Artificial Sequence: Synthetic oligonucleotide
  Target: LAMA2; (+) strand; PAM type: YTN; PAM sequence: TTC
agcacgttgcagaaagcaac

SEQ ID NO: 343258 - DNA, 20 bp, Artificial Sequence
  Description of Artificial Sequence: Synthetic oligonucleotide
  Target: LAMA2; (+) strand; PAM type: YTN; PAM sequence: TTG
cagaaagcaacttacaattt

SEQ ID NO: 343259 - DNA, 20 bp, Artificial Sequence
  Description of Artificial Sequence: Synthetic oligonucleotide
  Target: LAMA2; (+) strand; PAM type: YTN; PAM sequence: CTT
acaatttcttcttttcctga

SEQ ID NO: 343260 - DNA, 20 bp, Artificial Sequence
  Description of Artificial Sequence: Synthetic oligonucleotide
  Target: LAMA2; (+) strand; PAM type: YTN; PAM sequence: TTA
caatttcttcttttcctgac

SEQ ID NO: 343261 - DNA, 20 bp, Artificial Sequence
  Description of Artificial Sequence: Synthetic oligonucleotide
  Target: LAMA2; (+) strand; PAM type: YTN; PAM sequence: TTT
cttcttttcctgacctccta

SEQ ID NO: 343262 - DNA, 20 bp, Artificial Sequence
  Description of Artificial Sequence: Synthetic oligonucleotide
  Target: LAMA2; (+) strand; PAM type: YTN; PAM sequence: TTC
ttcttttcctgacctcctag

SEQ ID NO: 343263 - DNA, 20 bp, Artificial Sequence
  Description of Artificial Sequence: Synthetic oligonucleotide
  Target: LAMA2; (+) strand; PAM type: YTN; PAM sequence: CTT
cttttcctgacctcctaggg

SEQ ID NO: 343264 - DNA, 20 bp, Artificial Sequence
  Description of Artificial Sequence: Synthetic oligonucleotide
  Target: LAMA2; (+) strand; PAM type: YTN; PAM sequence: TTC
ttttcctgacctcctagggc

SEQ ID NO: 343265 - DNA, 20 bp, Artificial Sequence
  Description of Artificial Sequence: Synthetic oligonucleotide
  Target: LAMA2; (+) strand; PAM type: YTN; PAM sequence: CTT
ttcctgacctcctagggctt

SEQ ID NO: 343266 - DNA, 20 bp, Artificial Sequence
  Description of Artificial Sequence: Synthetic oligonucleotide
  Target: LAMA2; (+) strand; PAM type: YTN; PAM sequence: TTT
tcctgacctcctagggcttt

SEQ ID NO: 343267 - DNA, 20 bp, Artificial Sequence
  Description of Artificial Sequence: Synthetic oligonucleotide
  Target: LAMA2; (+) strand; PAM type: YTN; PAM sequence: TTT
cctgacctcctagggctttt

SEQ ID NO: 343268 - DNA, 20 bp, Artificial Sequence
  Description of Artificial Sequence: Synthetic oligonucleotide
  Target: LAMA2; (+) strand; PAM type: YTN; PAM sequence: TTC
ctgacctcctagggctttta

SEQ ID NO: 343269 - DNA, 20 bp, Artificial Sequence
  Description of Artificial Sequence: Synthetic oligonucleotide
  Target: LAMA2; (+) strand; PAM type: YTN; PAM sequence: CTG
acctcctagggcttttatgc

SEQ ID NO: 343270 - DNA, 20 bp, Artificial Sequence
  Description of Artificial Sequence: Synthetic oligonucleotide
  Target: LAMA2; (+) strand; PAM type: YTN; PAM sequence: CTC
ctagggcttttatgcatgca

SEQ ID NO: 343271 - DNA, 20 bp, Artificial Sequence
  Description of Artificial Sequence: Synthetic oligonucleotide
  Target: LAMA2; (+) strand; PAM type: YTN; PAM sequence: CTA
gggcttttatgcatgcaatt

SEQ ID NO: 343272 - DNA, 20 bp, Artificial Sequence
  Description of Artificial Sequence: Synthetic oligonucleotide
  Target: LAMA2; (+) strand; PAM type: YTN; PAM sequence: CTT
ttatgcatgcaattagcaat

SEQ ID NO: 343273 - DNA, 20 bp, Artificial Sequence
  Description of Artificial Sequence: Synthetic oligonucleotide
  Target: LAMA2; (+) strand; PAM type: YTN; PAM sequence: TTT
tatgcatgcaattagcaatt

SEQ ID NO: 343274 - DNA, 20 bp, Artificial Sequence
  Description of Artificial Sequence: Synthetic oligonucleotide
  Target: LAMA2; (+) strand; PAM type: YTN; PAM sequence: TTT
atgcatgcaattagcaattt

SEQ ID NO: 343275 - DNA, 20 bp, Artificial Sequence
  Description of Artificial Sequence: Synthetic oligonucleotide
  Target: LAMA2; (+) strand; PAM type: YTN; PAM sequence: TTA
tgcatgcaattagcaatttg

SEQ ID NO: 343276 - DNA, 20 bp, Artificial Sequence
  Description of Artificial Sequence: Synthetic oligonucleotide
  Target: LAMA2; (+) strand; PAM type: YTN; PAM sequence: TTA
gcaatttgggatttgcacaa

SEQ ID NO: 343277 - DNA, 20 bp, Artificial Sequence
  Description of Artificial Sequence: Synthetic oligonucleotide
  Target: LAMA2; (+) strand; PAM type: YTN; PAM sequence: TTT
gggatttgcacaaggttttt

SEQ ID NO: 343278 - DNA, 20 bp, Artificial Sequence
  Description of Artificial Sequence: Synthetic oligonucleotide
  Target: LAMA2; (+) strand; PAM type: YTN; PAM sequence: TTG
ggatttgcacaaggtttttc

SEQ ID NO: 343279 - DNA, 20 bp, Artificial Sequence
  Description of Artificial Sequence: Synthetic oligonucleotide
  Target: LAMA2; (+) strand; PAM type: YTN; PAM sequence: TTT
gcacaaggtttttccagagt

SEQ ID NO: 343280 - DNA, 20 bp, Artificial Sequence
  Description of Artificial Sequence: Synthetic oligonucleotide
  Target: LAMA2; (+) strand; PAM type: YTN; PAM sequence: TTG
cacaaggtttttccagagta

SEQ ID NO: 343281 - DNA, 20 bp, Artificial Sequence
  Description of Artificial Sequence: Synthetic oligonucleotide
  Target: LAMA2; (+) strand; PAM type: YTN; PAM sequence: TTT
ttccagagtacaagattttt

SEQ ID NO: 343282 - DNA, 20 bp, Artificial Sequence
  Description of Artificial Sequence: Synthetic oligonucleotide
  Target: LAMA2; (+) strand; PAM type: YTN; PAM sequence: TTT
tccagagtacaagatttttg

SEQ ID NO: 343283 - DNA, 20 bp, Artificial Sequence
  Description of Artificial Sequence: Synthetic oligonucleotide
  Target: LAMA2; (+) strand; PAM type: YTN; PAM sequence: TTT
ccagagtacaagatttttga

SEQ ID NO: 343284 - DNA, 20 bp, Artificial Sequence
  Description of Artificial Sequence: Synthetic oligonucleotide
  Target: LAMA2; (+) strand; PAM type: YTN; PAM sequence: TTC
cagagtacaagatttttgag

SEQ ID NO: 343285 - DNA, 20 bp, Artificial Sequence
  Description of Artificial Sequence: Synthetic oligonucleotide
  Target: LAMA2; (+) strand; PAM type: YTN; PAM sequence: TTT
ttgagagctgtgactgaatc

SEQ ID NO: 343286 - DNA, 20 bp, Artificial Sequence
  Description of Artificial Sequence: Synthetic oligonucleotide
  Target: LAMA2; (+) strand; PAM type: YTN; PAM sequence: TTT
tgagagctgtgactgaatct

SEQ ID NO: 343287 - DNA, 20 bp, Artificial Sequence
  Description of Artificial Sequence: Synthetic oligonucleotide
  Target: LAMA2; (+) strand; PAM type: YTN; PAM sequence: TTT
gagagctgtgactgaatctt

SEQ ID NO: 343288 - DNA, 20 bp, Artificial Sequence
  Description of Artificial Sequence: Synthetic oligonucleotide
  Target: LAMA2; (+) strand; PAM type: YTN; PAM sequence: TTG
agagctgtgactgaatctta

SEQ ID NO: 343289 - DNA, 20 bp, Artificial Sequence
  Description of Artificial Sequence: Synthetic oligonucleotide
  Target: LAMA2; (+) strand; PAM type: YTN; PAM sequence: CTG
tgactgaatcttattcttta

SEQ ID NO: 343290 - DNA, 20 bp, Artificial Sequence
  Description of Artificial Sequence: Synthetic oligonucleotide
  Target: LAMA2; (+) strand; PAM type: YTN; PAM sequence: CTG
aatcttattctttagaaact

SEQ ID NO: 343291 - DNA, 20 bp, Artificial Sequence
  Description of Artificial Sequence: Synthetic oligonucleotide
  Target: LAMA2; (+) strand; PAM type: YTN; PAM sequence: CTT
attctttagaaacttgctct

SEQ ID NO: 343292 - DNA, 20 bp, Artificial Sequence
  Description of Artificial Sequence: Synthetic oligonucleotide
  Target: LAMA2; (+) strand; PAM type: YTN; PAM sequence: TTA
ttctttagaaacttgctctt

SEQ ID NO: 343293 - DNA, 20 bp, Artificial Sequence
  Description of Artificial Sequence: Synthetic oligonucleotide
  Target: LAMA2; (+) strand; PAM type: YTN; PAM sequence: TTC
tttagaaacttgctctttga

SEQ ID NO: 343294 - DNA, 20 bp, Artificial Sequence
  Description of Artificial Sequence: Synthetic oligonucleotide
  Target: LAMA2; (+) strand; PAM type: YTN; PAM sequence: CTT
tagaaacttgctctttgagt

SEQ ID NO: 343295 - DNA, 20 bp, Artificial Sequence
  Description of Artificial Sequence: Synthetic oligonucleotide
  Target: LAMA2; (+) strand; PAM type: YTN; PAM sequence: TTT
agaaacttgctctttgagtg

SEQ ID NO: 343296 - DNA, 20 bp, Artificial Sequence
  Description of Artificial Sequence: Synthetic oligonucleotide
  Target: LAMA2; (+) strand; PAM type: YTN; PAM sequence: TTA
gaaacttgctctttgagtgg

SEQ ID NO: 343297 - DNA, 20 bp, Artificial Sequence
  Description of Artificial Sequence: Synthetic oligonucleotide
  Target: LAMA2; (+) strand; PAM type: YTN; PAM sequence: CTT
gctctttgagtggaggaaaa

SEQ ID NO: 343298 - DNA, 20 bp, Artificial Sequence
  Description of Artificial Sequence: Synthetic oligonucleotide
  Target: LAMA2; (+) strand; PAM type: YTN; PAM sequence: TTG
ctctttgagtggaggaaaag

SEQ ID NO: 343299 - DNA, 20 bp, Artificial Sequence
  Description of Artificial Sequence: Synthetic oligonucleotide
  Target: LAMA2; (+) strand; PAM type: YTN; PAM sequence: CTC
tttgagtggaggaaaaggaa

SEQ ID NO: 343300 - DNA, 20 bp, Artificial Sequence
  Description of Artificial Sequence: Synthetic oligonucleotide
  Target: LAMA2; (+) strand; PAM type: YTN; PAM sequence: CTT
tgagtggaggaaaaggaaga

SEQ ID NO: 343301 - DNA, 20 bp, Artificial Sequence
  Description of Artificial Sequence: Synthetic oligonucleotide
  Target: LAMA2; (+) strand; PAM type: YTN; PAM sequence: TTT
gagtggaggaaaaggaagaa

SEQ ID NO: 343302 - DNA, 20 bp, Artificial Sequence
  Description of Artificial Sequence: Synthetic oligonucleotide
  Target: LAMA2; (+) strand; PAM type: YTN; PAM sequence: TTG
agtggaggaaaaggaagaaa

SEQ ID NO: 343303 - DNA, 20 bp, Artificial Sequence
  Description of Artificial Sequence: Synthetic oligonucleotide
  Target: LAMA2; (+) strand; PAM type: YTN; PAM sequence: CTA
agttgactaatgacattata

SEQ ID NO: 343304 - DNA, 20 bp, Artificial Sequence
  Description of Artificial Sequence: Synthetic oligonucleotide
  Target: LAMA2; (+) strand; PAM type: YTN; PAM sequence: TTG
actaatgacattataaaagc

SEQ ID NO: 343305 - DNA, 20 bp, Artificial Sequence
  Description of Artificial Sequence: Synthetic oligonucleotide
  Target: LAMA2; (+) strand; PAM type: YTN; PAM sequence: CTA
atgacattataaaagcaggt

SEQ ID NO: 343306 - DNA, 20 bp, Artificial Sequence
  Description of Artificial Sequence: Synthetic oligonucleotide
  Target: LAMA2; (+) strand; PAM type: YTN; PAM sequence: TTA
taaaagcaggtagagaatca

SEQ ID NO: 343307 - DNA, 20 bp, Artificial Sequence
  Description of Artificial Sequence: Synthetic oligonucleotide
  Target: LAMA2; (+) strand; PAM type: YTN; PAM sequence: TTT
ctttctgagcttctgtagca

SEQ ID NO: 343308 - DNA, 20 bp, Artificial Sequence
  Description of Artificial Sequence: Synthetic oligonucleotide
  Target: LAMA2; (+) strand; PAM type: YTN; PAM sequence: TTC
tttctgagcttctgtagcac

SEQ ID NO: 343309 - DNA, 20 bp, Artificial Sequence
  Description of Artificial Sequence: Synthetic oligonucleotide
  Target: LAMA2; (+) strand; PAM type: YTN; PAM sequence: CTT
tctgagcttctgtagcacag

SEQ ID NO: 343310 - DNA, 20 bp, Artificial Sequence
  Description of Artificial Sequence: Synthetic oligonucleotide
  Target: LAMA2; (+) strand; PAM type: YTN; PAM sequence: TTT
ctgagcttctgtagcacagg

SEQ ID NO: 343311 - DNA, 20 bp, Artificial Sequence
  Description of Artificial Sequence: Synthetic oligonucleotide
  Target: LAMA2; (+) strand; PAM type: YTN; PAM sequence: TTC
tgagcttctgtagcacaggc

SEQ ID NO: 343312 - DNA, 20 bp, Artificial Sequence
  Description of Artificial Sequence: Synthetic oligonucleotide
  Target: LAMA2; (+) strand; PAM type: YTN; PAM sequence: CTG
agcttctgtagcacaggcta

SEQ ID NO: 343313 - DNA, 20 bp, Artificial Sequence
  Description of Artificial Sequence: Synthetic oligonucleotide
  Target: LAMA2; (+) strand; PAM type: YTN; PAM sequence: CTT
ctgtagcacaggctatgaag

SEQ ID NO: 343314 - DNA, 20 bp, Artificial Sequence
  Description of Artificial Sequence: Synthetic oligonucleotide
  Target: LAMA2; (+) strand; PAM type: YTN; PAM sequence: TTC
tgtagcacaggctatgaagt

SEQ ID NO: 343315 - DNA, 20 bp, Artificial Sequence
  Description of Artificial Sequence: Synthetic oligonucleotide
  Target: LAMA2; (+) strand; PAM type: YTN; PAM sequence: CTG
tagcacaggctatgaagtgt

SEQ ID NO: 343316 - DNA, 20 bp, Artificial Sequence
  Description of Artificial Sequence: Synthetic oligonucleotide
  Target: LAMA2; (+) strand; PAM type: YTN; PAM sequence: CTA
tgaagtgtgctagtaaagta

SEQ ID NO: 343317 - DNA, 20 bp, Artificial Sequence
  Description of Artificial Sequence: Synthetic oligonucleotide
  Target: LAMA2; (+) strand; PAM type: YTN; PAM sequence: CTA
gtaaagtaaatacaatttta

SEQ ID NO: 343318 - DNA, 20 bp, Artificial Sequence
  Description of Artificial Sequence: Synthetic oligonucleotide
  Target: LAMA2; (+) strand; PAM type: YTN; PAM sequence: TTT
taagcaaagtttcagaaatc

SEQ ID NO: 343319 - DNA, 20 bp, Artificial Sequence
  Description of Artificial Sequence: Synthetic oligonucleotide
  Target: LAMA2; (+) strand; PAM type: YTN; PAM sequence: TTT
aagcaaagtttcagaaatca

SEQ ID NO: 343320 - DNA, 20 bp, Artificial Sequence
  Description of Artificial Sequence: Synthetic oligonucleotide
  Target: LAMA2; (+) strand; PAM type: YTN; PAM sequence: TTA
agcaaagtttcagaaatcac

SEQ ID NO: 343321 - DNA, 20 bp, Artificial Sequence
  Description of Artificial Sequence: Synthetic oligonucleotide
  Target: LAMA2; (+) strand; PAM type: YTN; PAM sequence: TTT
cagaaatcaccataataaaa

SEQ ID NO: 343322 - DNA, 20 bp, Artificial Sequence
  Description of Artificial Sequence: Synthetic oligonucleotide
  Target: LAMA2; (+) strand; PAM type: YTN; PAM sequence: TTC
agaaatcaccataataaaat

SEQ ID NO: 343323 - DNA, 20 bp, Artificial Sequence
  Description of Artificial Sequence: Synthetic oligonucleotide
  Target: LAMA2; (+) strand; PAM type: YTN; PAM sequence: CTG
taagtcccagctattaaact

SEQ ID NO: 343324 - DNA, 20 bp, Artificial Sequence
  Description of Artificial Sequence: Synthetic oligonucleotide
  Target: LAMA2; (+) strand; PAM type: YTN; PAM sequence: CTA
ttaaactggcagggacctac

SEQ ID NO: 343325 - DNA, 20 bp, Artificial Sequence
  Description of Artificial Sequence: Synthetic oligonucleotide
  Target: LAMA2; (+) strand; PAM type: YTN; PAM sequence: TTA
aactggcagggacctacatt

SEQ ID NO: 343326 - DNA, 20 bp, Artificial Sequence
  Description of Artificial Sequence: Synthetic oligonucleotide
  Target: LAMA2; (+) strand; PAM type: YTN; PAM sequence: CTG
gcagggacctacattcatta

SEQ ID NO: 343327 - DNA, 20 bp, Artificial Sequence
  Description of Artificial Sequence: Synthetic oligonucleotide
  Target: LAMA2; (+) strand; PAM type: YTN; PAM sequence: CTA
cattcattaaattaaatgca

SEQ ID NO: 343328 - DNA, 20 bp, Artificial Sequence
  Description of Artificial Sequence: Synthetic oligonucleotide
  Target: LAMA2; (+) strand; PAM type: YTN; PAM sequence: TTC
attaaattaaatgcaatgtg

SEQ ID NO: 343329 - DNA, 20 bp, Artificial Sequence
  Description of Artificial Sequence: Synthetic oligonucleotide
  Target: LAMA2; (+) strand; PAM type: YTN; PAM sequence: TTA
aattaaatgcaatgtgcaat

SEQ ID NO: 343330 - DNA, 20 bp, Artificial Sequence
  Description of Artificial Sequence: Synthetic oligonucleotide
  Target: LAMA2; (+) strand; PAM type: YTN; PAM sequence: TTA
aatgcaatgtgcaatgttgt

SEQ ID NO: 343331 - DNA, 20 bp, Artificial Sequence
  Description of Artificial Sequence: Synthetic oligonucleotide
  Target: LAMA2; (+) strand; PAM type: YTN; PAM sequence: TTG
ttcgaaagttgttcaaaatg

SEQ ID NO: 343332 - DNA, 20 bp, Artificial Sequence
  Description of Artificial Sequence: Synthetic oligonucleotide
  Target: LAMA2; (+) strand; PAM type: YTN; PAM sequence: TTC
gaaagttgttcaaaatgttt

SEQ ID NO: 343333 - DNA, 20 bp, Artificial Sequence
  Description of Artificial Sequence: Synthetic oligonucleotide
  Target: LAMA2; (+) strand; PAM type: YTN; PAM sequence: TTG
ttcaaaatgtttttagaatt

SEQ ID NO: 343334 - DNA, 20 bp, Artificial Sequence
  Description of Artificial Sequence: Synthetic oligonucleotide
  Target: LAMA2; (+) strand; PAM type: YTN; PAM sequence: TTC
aaaatgtttttagaattttt

SEQ ID NO: 343335 - DNA, 20 bp, Artificial Sequence
  Description of Artificial Sequence: Synthetic oligonucleotide
  Target: LAMA2; (+) strand; PAM type: YTN; PAM sequence: TTT
ttagaatttttcttggagtt

SEQ ID NO: 343336 - DNA, 20 bp, Artificial Sequence
  Description of Artificial Sequence: Synthetic oligonucleotide
  Target: LAMA2; (+) strand; PAM type: YTN; PAM sequence: TTT
tagaatttttcttggagttg

SEQ ID NO: 343337 - DNA, 20 bp, Artificial Sequence
  Description of Artificial Sequence: Synthetic oligonucleotide
  Target: LAMA2; (+) strand; PAM type: YTN; PAM sequence: TTT
agaatttttcttggagttga

SEQ ID NO: 343338 - DNA, 20 bp, Artificial Sequence
  Description of Artificial Sequence: Synthetic oligonucleotide
  Target: LAMA2; (+) strand; PAM type: YTN; PAM sequence: TTA
gaatttttcttggagttgat

SEQ ID NO: 343339 - DNA, 20 bp, Artificial Sequence
  Description of Artificial Sequence: Synthetic oligonucleotide
  Target: LAMA2; (+) strand; PAM type: YTN; PAM sequence: TTT
ttcttggagttgattgcttt

SEQ ID NO: 343340 - DNA, 20 bp, Artificial Sequence
  Description of Artificial Sequence: Synthetic oligonucleotide
  Target: LAMA2; (+) strand; PAM type: YTN; PAM sequence: TTT
tcttggagttgattgctttt

SEQ ID NO: 343341 - DNA, 20 bp, Artificial Sequence
  Description of Artificial Sequence: Synthetic oligonucleotide
  Target: LAMA2; (+) strand; PAM type: YTN; PAM sequence: TTT
cttggagttgattgctttta

SEQ ID NO: 343342 - DNA, 20 bp, Artificial Sequence
  Description of Artificial Sequence: Synthetic oligonucleotide
  Target: LAMA2; (+) strand; PAM type: YTN; PAM sequence: TTC
ttggagttgattgcttttat

SEQ ID NO: 343343 - DNA, 20 bp, Artificial Sequence
  Description of Artificial Sequence: Synthetic oligonucleotide
  Target: LAMA2; (+) strand; PAM type: YTN; PAM sequence: CTT
ggagttgattgcttttataa

SEQ ID NO: 343344 - DNA, 20 bp, Artificial Sequence
  Description of Artificial Sequence: Synthetic oligonucleotide
  Target: LAMA2; (+) strand; PAM type: YTN; PAM sequence: TTG
gagttgattgcttttataat

SEQ ID NO: 343345 - DNA, 20 bp, Artificial Sequence
  Description of Artificial Sequence: Synthetic oligonucleotide
  Target: LAMA2; (+) strand; PAM type: YTN; PAM sequence: TTG
attgcttttataatgatgac

SEQ ID NO: 343346 - DNA, 20 bp, Artificial Sequence
  Description of Artificial Sequence: Synthetic oligonucleotide
  Target: LAMA2; (+) strand; PAM type: YTN; PAM sequence: TTG
cttttataatgatgacttca

SEQ ID NO: 343347 - DNA, 20 bp, Artificial Sequence
  Description of Artificial Sequence: Synthetic oligonucleotide
  Target: LAMA2; (+) strand; PAM type: YTN; PAM sequence: CTT
ttataatgatgacttcacgt

SEQ ID NO: 343348 - DNA, 20 bp, Artificial Sequence
  Description of Artificial Sequence: Synthetic oligonucleotide
  Target: LAMA2; (+) strand; PAM type: YTN; PAM sequence: TTT
tataatgatgacttcacgtc

SEQ ID NO: 343349 - DNA, 20 bp, Artificial Sequence
  Description of Artificial Sequence: Synthetic oligonucleotide
  Target: LAMA2; (+) strand; PAM type: YTN; PAM sequence: TTT
ataatgatgacttcacgtct

SEQ ID NO: 343350 - DNA, 20 bp, Artificial Sequence
  Description of Artificial Sequence: Synthetic oligonucleotide
  Target: LAMA2; (+) strand; PAM type: YTN; PAM sequence: TTA
taatgatgacttcacgtctt

SEQ ID NO: 343351 - DNA, 20 bp, Artificial Sequence
  Description of Artificial Sequence: Synthetic oligonucleotide
  Target: LAMA2; (+) strand; PAM type: YTN; PAM sequence: CTT
cacgtcttgactctcagtga

SEQ ID NO: 343352 - DNA, 20 bp, Artificial Sequence
  Description of Artificial Sequence: Synthetic oligonucleotide
  Target: LAMA2; (+) strand; PAM type: YTN; PAM sequence: TTC
acgtcttgactctcagtgat

SEQ ID NO: 343353 - DNA, 20 bp, Artificial Sequence
  Description of Artificial Sequence: Synthetic oligonucleotide
  Target: LAMA2; (+) strand; PAM type: YTN; PAM sequence: CTT
gactctcagtgattttgttt

SEQ ID NO: 343354 - DNA, 20 bp, Artificial Sequence
  Description of Artificial Sequence: Synthetic oligonucleotide
  Target: LAMA2; (+) strand; PAM type: YTN; PAM sequence: TTG
actctcagtgattttgtttg

SEQ ID NO: 343355 - DNA, 20 bp, Artificial Sequence
  Description of Artificial Sequence: Synthetic oligonucleotide
  Target: LAMA2; (+) strand; PAM type: YTN; PAM sequence: CTC
tcagtgattttgtttgtctc

SEQ ID NO: 343356 - DNA, 20 bp, Artificial Sequence
  Description of Artificial Sequence: Synthetic oligonucleotide
  Target: LAMA2; (+) strand; PAM type: YTN; PAM sequence: CTC
agtgattttgtttgtctcct

SEQ ID NO: 343357 - DNA, 20 bp, Artificial Sequence
  Description of Artificial Sequence: Synthetic oligonucleotide
  Target: LAMA2; (+) strand; PAM type: YTN; PAM sequence: TTT
tgtttgtctccttagcccca

SEQ ID NO: 343358 - DNA, 20 bp, Artificial Sequence
  Description of Artificial Sequence: Synthetic oligonucleotide
  Target: LAMA2; (+) strand; PAM type: YTN; PAM sequence: TTT
gtttgtctccttagccccaa

SEQ ID NO: 343359 - DNA, 20 bp, Artificial Sequence
  Description of Artificial Sequence: Synthetic oligonucleotide
  Target: LAMA2; (+) strand; PAM type: YTN; PAM sequence: TTG
tttgtctccttagccccaaa

SEQ ID NO: 343360 - DNA, 20 bp, Artificial Sequence
  Description of Artificial Sequence: Synthetic oligonucleotide
  Target: LAMA2; (+) strand; PAM type: YTN; PAM sequence: TTT
gtctccttagccccaaaatt

SEQ ID NO: 343361 - DNA, 20 bp, Artificial Sequence
  Description of Artificial Sequence: Synthetic oligonucleotide
  Target: LAMA2; (+) strand; PAM type: YTN; PAM sequence: TTG
tctccttagccccaaaatta

SEQ ID NO: 343362 - DNA, 20 bp, Artificial Sequence
  Description of Artificial Sequence: Synthetic oligonucleotide
  Target: LAMA2; (+) strand; PAM type: YTN; PAM sequence: CTC
cttagccccaaaattattca

SEQ ID NO: 343363 - DNA, 20 bp, Artificial Sequence
  Description of Artificial Sequence: Synthetic oligonucleotide
  Target: LAMA2; (+) strand; PAM type: YTN; PAM sequence: CTT
agccccaaaattattcacct

SEQ ID NO: 343364 - DNA, 20 bp, Artificial Sequence
  Description of Artificial Sequence: Synthetic oligonucleotide
  Target: LAMA2; (+) strand; PAM type: YTN; PAM sequence: TTA
gccccaaaattattcacctt

SEQ ID NO: 343365 - DNA, 20 bp, Artificial Sequence
  Description of Artificial Sequence: Synthetic oligonucleotide
  Target: LAMA2; (+) strand; PAM type: YTN; PAM sequence: TTA
ttcaccttaaaagatgaaat

SEQ ID NO: 343366 - DNA, 20 bp, Artificial Sequence
  Description of Artificial Sequence: Synthetic oligonucleotide
  Target: LAMA2; (+) strand; PAM type: YTN; PAM sequence: TTC
accttaaaagatgaaatttg

SEQ ID NO: 343367 - DNA, 20 bp, Artificial Sequence
  Description of Artificial Sequence: Synthetic oligonucleotide
  Target: LAMA2; (+) strand; PAM type: YTN; PAM sequence: CTT
aaaagatgaaatttggtaat

SEQ ID NO: 343368 - DNA, 20 bp, Artificial Sequence
  Description of Artificial Sequence: Synthetic oligonucleotide
  Target: LAMA2; (+) strand; PAM type: YTN; PAM sequence: TTA
aaagatgaaatttggtaata

SEQ ID NO: 343369 - DNA, 20 bp, Artificial Sequence
  Description of Artificial Sequence: Synthetic oligonucleotide
  Target: LAMA2; (+) strand; PAM type: YTN; PAM sequence: TTT
ggtaatattaagacagtcaa

SEQ ID NO: 343370 - DNA, 20 bp, Artificial Sequence
  Description of Artificial Sequence: Synthetic oligonucleotide
  Target: LAMA2; (+) strand; PAM type: YTN; PAM sequence: TTG
gtaatattaagacagtcaaa

SEQ ID NO: 343371 - DNA, 20 bp, Artificial Sequence
  Description of Artificial Sequence: Synthetic oligonucleotide
  Target: LAMA2; (+) strand; PAM type: YTN; PAM sequence: TTA
agacagtcaaaggaatgtcc

SEQ ID NO: 343372 - DNA, 20 bp, Artificial Sequence
  Description of Artificial Sequence: Synthetic oligonucleotide
  Target: LAMA2; (+) strand; PAM type: YTN; PAM sequence: CTG
aagttctgatcacagctatg

SEQ ID NO: 343373 - DNA, 20 bp, Artificial Sequence
  Description of Artificial Sequence: Synthetic oligonucleotide
  Target: LAMA2; (+) strand; PAM type: YTN; PAM sequence: TTC
tgatcacagctatgaatagt

SEQ ID NO: 343374 - DNA, 20 bp, Artificial Sequence
  Description of Artificial Sequence: Synthetic oligonucleotide
  Target: LAMA2; (+) strand; PAM type: YTN; PAM sequence: CTG
atcacagctatgaatagttc

SEQ ID NO: 343375 - DNA, 20 bp, Artificial Sequence
  Description of Artificial Sequence: Synthetic oligonucleotide
  Target: LAMA2; (+) strand; PAM type: YTN; PAM sequence: CTA
tgaatagttctaaaatcttc

SEQ ID NO: 343376 - DNA, 20 bp, Artificial Sequence
  Description of Artificial Sequence: Synthetic oligonucleotide
  Target: LAMA2; (+) strand; PAM type: YTN; PAM sequence: TTC
taaaatcttctaaatatttt

SEQ ID NO: 343377 - DNA, 20 bp, Artificial Sequence
  Description of Artificial Sequence: Synthetic oligonucleotide
  Target: LAMA2; (+) strand; PAM type: YTN; PAM sequence: CTA
aaatcttctaaatatttttg

SEQ ID NO: 343378 - DNA, 20 bp, Artificial Sequence
  Description of Artificial Sequence: Synthetic oligonucleotide
  Target: LAMA2; (+) strand; PAM type: YTN; PAM sequence: CTT
ctaaatatttttgggatatg

SEQ ID NO: 343379 - DNA, 20 bp, Artificial Sequence
  Description of Artificial Sequence: Synthetic oligonucleotide
  Target: LAMA2; (+) strand; PAM type: YTN; PAM sequence: TTC
taaatatttttgggatatgt

SEQ ID NO: 343380 - DNA, 20 bp, Artificial Sequence
  Description of Artificial Sequence: Synthetic oligonucleotide
  Target: LAMA2; (+) strand; PAM type: YTN; PAM sequence: CTA
aatatttttgggatatgtat

SEQ ID NO: 343381 - DNA, 20 bp, Artificial Sequence
  Description of Artificial Sequence: Synthetic oligonucleotide
  Target: LAMA2; (+) strand; PAM type: YTN; PAM sequence: TTT
ttgggatatgtatagaacca

SEQ ID NO: 343382 - DNA, 20 bp, Artificial Sequence
  Description of Artificial Sequence: Synthetic oligonucleotide
  Target: LAMA2; (+) strand; PAM type: YTN; PAM sequence: TTT
tgggatatgtatagaaccaa

SEQ ID NO: 343383 - DNA, 20 bp, Artificial Sequence
  Description of Artificial Sequence: Synthetic oligonucleotide
  Target: LAMA2; (+) strand; PAM type: YTN; PAM sequence: TTT
gggatatgtatagaaccaag

SEQ ID NO: 343384 - DNA, 20 bp, Artificial Sequence
  Description of Artificial Sequence: Synthetic oligonucleotide
  Target: LAMA2; (+) strand; PAM type: YTN; PAM sequence: TTG
ggatatgtatagaaccaaga

SEQ ID NO: 343385 - DNA, 20 bp, Artificial Sequence
  Description of Artificial Sequence: Synthetic oligonucleotide
  Target: LAMA2; (+) strand; PAM type: YTN; PAM sequence: TTT
gtgtgaagggtttttccatt

SEQ ID NO: 343386 - DNA, 20 bp, Artificial Sequence
  Description of Artificial Sequence: Synthetic oligonucleotide
  Target: LAMA2; (+) strand; PAM type: YTN; PAM sequence: TTG
tgtgaagggtttttccattc

SEQ ID NO: 343387 - DNA, 20 bp, Artificial Sequence
  Description of Artificial Sequence: Synthetic oligonucleotide
  Target: LAMA2; (+) strand; PAM type: YTN; PAM sequence: TTT
ttccattcacttagttgtat

SEQ ID NO: 343388 - DNA, 20 bp, Artificial Sequence
  Description of Artificial Sequence: Synthetic oligonucleotide
  Target: LAMA2; (+) strand; PAM type: YTN; PAM sequence: TTT
tccattcacttagttgtatt

SEQ ID NO: 343389 - DNA, 20 bp, Artificial Sequence
  Description of Artificial Sequence: Synthetic oligonucleotide
  Target: LAMA2; (+) strand; PAM type: YTN; PAM sequence: TTT
ccattcacttagttgtatta

SEQ ID NO: 343390 - DNA, 20 bp, Artificial Sequence
  Description of Artificial Sequence: Synthetic oligonucleotide
  Target: LAMA2; (+) strand; PAM type: YTN; PAM sequence: TTC
cattcacttagttgtattat

SEQ ID NO: 343391 - DNA, 20 bp, Artificial Sequence
  Description of Artificial Sequence: Synthetic oligonucleotide
  Target: LAMA2; (+) strand; PAM type: YTN; PAM sequence: TTC
acttagttgtattatatttt

SEQ ID NO: 343392 - DNA, 20 bp, Artificial Sequence
  Description of Artificial Sequence: Synthetic oligonucleotide
  Target: LAMA2; (+) strand; PAM type: YTN; PAM sequence: CTT
agttgtattatattttaata

SEQ ID NO: 343393 - DNA, 20 bp, Artificial Sequence
  Description of Artificial Sequence: Synthetic oligonucleotide
  Target: LAMA2; (+) strand; PAM type: YTN; PAM sequence: TTA
gttgtattatattttaatat

SEQ ID NO: 343394 - DNA, 20 bp, Artificial Sequence
  Description of Artificial Sequence: Synthetic oligonucleotide
  Target: LAMA2; (+) strand; PAM type: YTN; PAM sequence: TTG
tattatattttaatataatt

SEQ ID NO: 343395 - DNA, 20 bp, Artificial Sequence
  Description of Artificial Sequence: Synthetic oligonucleotide
  Target: LAMA2; (+) strand; PAM type: YTN; PAM sequence: TTA
tattttaatataattgttta

SEQ ID NO: 343396 - DNA, 20 bp, Artificial Sequence
  Description of Artificial Sequence: Synthetic oligonucleotide
  Target: LAMA2; (+) strand; PAM type: YTN; PAM sequence: TTT
taatataattgtttaaaaaa

SEQ ID NO: 343397 - DNA, 20 bp, Artificial Sequence
  Description of Artificial Sequence: Synthetic oligonucleotide
  Target: LAMA2; (+) strand; PAM type: YTN; PAM sequence: TTT
aatataattgtttaaaaaag

SEQ ID NO: 343398 - DNA, 20 bp, Artificial Sequence
  Description of Artificial Sequence: Synthetic oligonucleotide
  Target: LAMA2; (+) strand; PAM type: YTN; PAM sequence: TTA
atataattgtttaaaaaaga

SEQ ID NO: 343399 - DNA, 20 bp, Artificial Sequence
  Description of Artificial Sequence: Synthetic oligonucleotide
  Target: LAMA2; (+) strand; PAM type: YTN; PAM sequence: TTG
tttaaaaaagattcatgtta

SEQ ID NO: 343400 - DNA, 20 bp, Artificial Sequence
  Description of Artificial Sequence: Synthetic oligonucleotide
  Target: LAMA2; (+) strand; PAM type: YTN; PAM sequence: TTT
aaaaaagattcatgttatag

SEQ ID NO: 343401 - DNA, 20 bp, Artificial Sequence
  Description of Artificial Sequence: Synthetic oligonucleotide
  Target: LAMA2; (+) strand; PAM type: YTN; PAM sequence: TTA
aaaaagattcatgttatagt

SEQ ID NO: 343402 - DNA, 20 bp, Artificial Sequence
  Description of Artificial Sequence: Synthetic oligonucleotide
  Target: LAMA2; (+) strand; PAM type: YTN; PAM sequence: TTC
atgttatagtcacagattaa

SEQ ID NO: 343403 - DNA, 20 bp, Artificial Sequence
  Description of Artificial Sequence: Synthetic oligonucleotide
  Target: LAMA2; (+) strand; PAM type: YTN; PAM sequence: TTA
tagtcacagattaaaaggca

SEQ ID NO: 343404 - DNA, 20 bp, Artificial Sequence
  Description of Artificial Sequence: Synthetic oligonucleotide
  Target: LAMA2; (+) strand; PAM type: YTN; PAM sequence: TTA
aaaggcagtttttaaaggag

SEQ ID NO: 343405 - DNA, 20 bp, Artificial Sequence
  Description of Artificial Sequence: Synthetic oligonucleotide
  Target: LAMA2; (+) strand; PAM type: YTN; PAM sequence: TTT
ttaaaggagatgaattaaca

SEQ ID NO: 343406 - DNA, 20 bp, Artificial Sequence
  Description of Artificial Sequence: Synthetic oligonucleotide
  Target: LAMA2; (+) strand; PAM type: YTN; PAM sequence: TTT
taaaggagatgaattaacag

SEQ ID NO: 343407 - DNA, 20 bp, Artificial Sequence
  Description of Artificial Sequence: Synthetic oligonucleotide
  Target: LAMA2; (+) strand; PAM type: YTN; PAM sequence: TTT
aaaggagatgaattaacagt

SEQ ID NO: 343408 - DNA, 20 bp, Artificial Sequence
  Description of Artificial Sequence: Synthetic oligonucleotide
  Target: LAMA2; (+) strand; PAM type: YTN; PAM sequence: TTA
aaggagatgaattaacagtt

SEQ ID NO: 343409 - DNA, 20 bp, Artificial Sequence
  Description of Artificial Sequence: Synthetic oligonucleotide
  Target: LAMA2; (+) strand; PAM type: YTN; PAM sequence: TTA
acagtttcagagaaacaatt

SEQ ID NO: 343410 - DNA, 20 bp, Artificial Sequence
  Description of Artificial Sequence: Synthetic oligonucleotide
  Target: LAMA2; (+) strand; PAM type: YTN; PAM sequence: TTT
cagagaaacaattttaataa

SEQ ID NO: 343411 - DNA, 20 bp, Artificial Sequence
  Description of Artificial Sequence: Synthetic oligonucleotide
  Target: LAMA2; (+) strand; PAM type: YTN; PAM sequence: TTC
agagaaacaattttaataac

SEQ ID NO: 343412 - DNA, 20 bp, Artificial Sequence
  Description of Artificial Sequence: Synthetic oligonucleotide
  Target: LAMA2; (+) strand; PAM type: YTN; PAM sequence: TTT
taataacatgcattttatac

SEQ ID NO: 343413 - DNA, 20 bp, Artificial Sequence
  Description of Artificial Sequence: Synthetic oligonucleotide
  Target: LAMA2; (+) strand; PAM type: YTN; PAM sequence: TTT
aataacatgcattttataca

SEQ ID NO: 343414 - DNA, 20 bp, Artificial Sequence
  Description of Artificial Sequence: Synthetic oligonucleotide
  Target: LAMA2; (+) strand; PAM type: YTN; PAM sequence: TTA
ataacatgcattttatacat

SEQ ID NO: 343415 - DNA, 20 bp, Artificial Sequence
  Description of Artificial Sequence: Synthetic oligonucleotide
  Target: LAMA2; (+) strand; PAM type: YTN; PAM sequence: TTT
tatacatttatttattctga

SEQ ID NO: 343416 - DNA, 20 bp, Artificial Sequence
  Description of Artificial Sequence: Synthetic oligonucleotide
  Target: LAMA2; (+) strand; PAM type: YTN; PAM sequence: TTT
atacatttatttattctgaa

SEQ ID NO: 343417 - DNA, 20 bp, Artificial Sequence
  Description of Artificial Sequence: Synthetic oligonucleotide
  Target: LAMA2; (+) strand; PAM type: YTN; PAM sequence: TTA
tacatttatttattctgaaa

SEQ ID NO: 343418 - DNA, 20 bp, Artificial Sequence
  Description of Artificial Sequence: Synthetic oligonucleotide
  Target: LAMA2; (+) strand; PAM type: YTN; PAM sequence: TTT
atttattctgaaaacagtaa

SEQ ID NO: 343419 - DNA, 20 bp, Artificial Sequence
  Description of Artificial Sequence: Synthetic oligonucleotide
  Target: LAMA2; (+) strand; PAM type: YTN; PAM sequence: TTA
tttattctgaaaacagtaat

SEQ ID NO: 343420 - DNA, 20 bp, Artificial Sequence
  Description of Artificial Sequence: Synthetic oligonucleotide
  Target: LAMA2; (+) strand; PAM type: YTN; PAM sequence: TTT
attctgaaaacagtaatttt

SEQ ID NO: 343421 - DNA, 20 bp, Artificial Sequence
  Description of Artificial Sequence: Synthetic oligonucleotide
  Target: LAMA2; (+) strand; PAM type: YTN; PAM sequence: TTA
ttctgaaaacagtaattttc

SEQ ID NO: 343422 - DNA, 20 bp, Artificial Sequence
  Description of Artificial Sequence: Synthetic oligonucleotide
  Target: LAMA2; (+) strand; PAM type: YTN; PAM sequence: TTC
tgaaaacagtaattttcaat

SEQ ID NO: 343423 - DNA, 20 bp, Artificial Sequence
  Description of Artificial Sequence: Synthetic oligonucleotide
  Target: LAMA2; (+) strand; PAM type: YTN; PAM sequence: CTG
aaaacagtaattttcaatat

SEQ ID NO: 343424 - DNA, 20 bp, Artificial Sequence
  Description of Artificial Sequence: Synthetic oligonucleotide
  Target: LAMA2; (+) strand; PAM type: YTN; PAM sequence: TTT
tcaatatactattttcttat

SEQ ID NO: 343425 - DNA, 20 bp, Artificial Sequence
  Description of Artificial Sequence: Synthetic oligonucleotide
  Target: LAMA2; (+) strand; PAM type: YTN; PAM sequence: TTT
caatatactattttcttata

SEQ ID NO: 343426 - DNA, 20 bp, Artificial Sequence
  Description of Artificial Sequence: Synthetic oligonucleotide
  Target: LAMA2; (+) strand; PAM type: YTN; PAM sequence: TTC
aatatactattttcttataa

SEQ ID NO: 343427 - DNA, 20 bp, Artificial Sequence
  Description of Artificial Sequence: Synthetic oligonucleotide
  Target: LAMA2; (+) strand; PAM type: YTN; PAM sequence: CTA
ttttcttataaccactttaa

SEQ ID NO: 343428 - DNA, 20 bp, Artificial Sequence
  Description of Artificial Sequence: Synthetic oligonucleotide
  Target: LAMA2; (+) strand; PAM type: YTN; PAM sequence: TTT
tcttataaccactttaaaga

SEQ ID NO: 343429 - DNA, 20 bp, Artificial Sequence
  Description of Artificial Sequence: Synthetic oligonucleotide
  Target: LAMA2; (+) strand; PAM type: YTN; PAM sequence: TTT
cttataaccactttaaagaa

SEQ ID NO: 343430 - DNA, 20 bp, Artificial Sequence
  Description of Artificial Sequence: Synthetic oligonucleotide
  Target: LAMA2; (+) strand; PAM type: YTN; PAM sequence: TTC
ttataaccactttaaagaaa

SEQ ID NO: 343431 - DNA, 20 bp, Artificial Sequence
  Description of Artificial Sequence: Synthetic oligonucleotide
  Target: LAMA2; (+) strand; PAM type: YTN; PAM sequence: CTT
ataaccactttaaagaaatt

SEQ ID NO: 343432 - DNA, 20 bp, Artificial Sequence
  Description of Artificial Sequence: Synthetic oligonucleotide
  Target: LAMA2; (+) strand; PAM type: YTN; PAM sequence: TTA
taaccactttaaagaaatta

SEQ ID NO: 343433 - DNA, 20 bp, Artificial Sequence
  Description of Artificial Sequence: Synthetic oligonucleotide
  Target: LAMA2; (+) strand; PAM type: YTN; PAM sequence: CTT
taaagaaattaaggacttgc

SEQ ID NO: 343434 - DNA, 20 bp, Artificial Sequence
  Description of Artificial Sequence: Synthetic oligonucleotide
  Target: LAMA2; (+) strand; PAM type: YTN; PAM sequence: TTT
aaagaaattaaggacttgca

SEQ ID NO: 343435 - DNA, 20 bp, Artificial Sequence
  Description of Artificial Sequence: Synthetic oligonucleotide
  Target: LAMA2; (+) strand; PAM type: YTN; PAM sequence: TTA
aagaaattaaggacttgcag

SEQ ID NO: 343436 - DNA, 20 bp, Artificial Sequence
  Description of Artificial Sequence: Synthetic oligonucleotide
  Target: LAMA2; (+) strand; PAM type: YTN; PAM sequence: TTA
aggacttgcaggttgtctgg

SEQ ID NO: 343437 - DNA, 20 bp, Artificial Sequence
  Description of Artificial Sequence: Synthetic oligonucleotide
  Target: LAMA2; (+) strand; PAM type: YTN; PAM sequence: CTT
gcaggttgtctggtttttta

SEQ ID NO: 343438 - DNA, 20 bp, Artificial Sequence
  Description of Artificial Sequence: Synthetic oligonucleotide
  Target: LAMA2; (+) strand; PAM type: YTN; PAM sequence: TTG
caggttgtctggttttttac

SEQ ID NO: 343439 - DNA, 20 bp, Artificial Sequence
  Description of Artificial Sequence: Synthetic oligonucleotide
  Target: LAMA2; (+) strand; PAM type: YTN; PAM sequence: TTG
tctggttttttactattttt

SEQ ID NO: 343440 - DNA, 20 bp, Artificial Sequence
  Description of Artificial Sequence: Synthetic oligonucleotide
  Target: LAMA2; (+) strand; PAM type: YTN; PAM sequence: CTG
gttttttactatttttctta

SEQ ID NO: 343441 - DNA, 20 bp, Artificial Sequence
  Description of Artificial Sequence: Synthetic oligonucleotide
  Target: LAMA2; (+) strand; PAM type: YTN; PAM sequence: TTT
tttactatttttcttatcca

SEQ ID NO: 343442 - DNA, 20 bp, Artificial Sequence
  Description of Artificial Sequence: Synthetic oligonucleotide
  Target: LAMA2; (+) strand; PAM type: YTN; PAM sequence: TTT
ttactatttttcttatccat

SEQ ID NO: 343443 - DNA, 20 bp, Artificial Sequence
  Description of Artificial Sequence: Synthetic oligonucleotide
  Target: LAMA2; (+) strand; PAM type: YTN; PAM sequence: TTT
tactatttttcttatccata

SEQ ID NO: 343444 - DNA, 20 bp, Artificial Sequence
  Description of Artificial Sequence: Synthetic oligonucleotide
  Target: LAMA2; (+) strand; PAM type: YTN; PAM sequence: TTT
actatttttcttatccatag

SEQ ID NO: 343445 - DNA, 20 bp, Artificial Sequence
  Description of Artificial Sequence: Synthetic oligonucleotide
  Target: LAMA2; (+) strand; PAM type: YTN; PAM sequence: TTA
ctatttttcttatccatagc

SEQ ID NO: 343446 - DNA, 20 bp, Artificial Sequence
  Description of Artificial Sequence: Synthetic oligonucleotide
  Target: LAMA2; (+) strand; PAM type: YTN; PAM sequence: CTA
tttttcttatccatagcaag

SEQ ID NO: 343447 - DNA, 20 bp, Artificial Sequence
  Description of Artificial Sequence: Synthetic oligonucleotide
  Target: LAMA2; (+) strand; PAM type: YTN; PAM sequence: TTT
ttcttatccatagcaaggtt

SEQ ID NO: 343448 - DNA, 20 bp, Artificial Sequence
  Description of Artificial Sequence: Synthetic oligonucleotide
  Target: LAMA2; (+) strand; PAM type: YTN; PAM sequence: TTT
tcttatccatagcaaggttg

SEQ ID NO: 343449 - DNA, 20 bp, Artificial Sequence
  Description of Artificial Sequence: Synthetic oligonucleotide
  Target: LAMA2; (+) strand; PAM type: YTN; PAM sequence: TTT
cttatccatagcaaggttgg

SEQ ID NO: 343450 - DNA, 20 bp, Artificial Sequence
  Description of Artificial Sequence: Synthetic oligonucleotide
  Target: LAMA2; (+) strand; PAM type: YTN; PAM sequence: TTC
ttatccatagcaaggttggt

SEQ ID NO: 343451 - DNA, 20 bp, Artificial Sequence
  Description of Artificial Sequence: Synthetic oligonucleotide
  Target: LAMA2; (+) strand; PAM type: YTN; PAM sequence: CTT
atccatagcaaggttggtgc

SEQ ID NO: 343452 - DNA, 20 bp, Artificial Sequence
  Description of Artificial Sequence: Synthetic oligonucleotide
  Target: LAMA2; (+) strand; PAM type: YTN; PAM sequence: TTA
tccatagcaaggttggtgct

SEQ ID NO: 343453 - DNA, 20 bp, Artificial Sequence
  Description of Artificial Sequence: Synthetic oligonucleotide
  Target: LAMA2; (+) strand; PAM type: YTN; PAM sequence: TTG
gtgctcaataatactagatg

SEQ ID NO: 343454 - DNA, 20 bp, Artificial Sequence
  Description of Artificial Sequence: Synthetic oligonucleotide
  Target: LAMA2; (+) strand; PAM type: YTN; PAM sequence: CTC
aataatactagatgagcaac

SEQ ID NO: 343455 - DNA, 20 bp, Artificial Sequence
  Description of Artificial Sequence: Synthetic oligonucleotide
  Target: LAMA2; (+) strand; PAM type: YTN; PAM sequence: CTA
gatgagcaactgaatgaaga

SEQ ID NO: 343456 - DNA, 20 bp, Artificial Sequence
  Description of Artificial Sequence: Synthetic oligonucleotide
  Target: LAMA2; (+) strand; PAM type: YTN; PAM sequence: CTG
aatgaagagatgacaaaaat

SEQ ID NO: 343457 - DNA, 20 bp, Artificial Sequence
  Description of Artificial Sequence: Synthetic oligonucleotide
  Target: LAMA2; (+) strand; PAM type: YTN; PAM sequence: TTT
attaccactgcatgttaaag

SEQ ID NO: 343458 - DNA, 20 bp, Artificial Sequence
  Description of Artificial Sequence: Synthetic oligonucleotide
  Target: LAMA2; (+) strand; PAM type: YTN; PAM sequence: TTA
ttaccactgcatgttaaaga

SEQ ID NO: 343459 - DNA, 20 bp, Artificial Sequence
  Description of Artificial Sequence: Synthetic oligonucleotide
  Target: LAMA2; (+) strand; PAM type: YTN; PAM sequence: TTA
ccactgcatgttaaagaagt

SEQ ID NO: 343460 - DNA, 20 bp, Artificial Sequence
  Description of Artificial Sequence: Synthetic oligonucleotide
  Target: LAMA2; (+) strand; PAM type: YTN; PAM sequence: CTG
catgttaaagaagtgtactt

SEQ ID NO: 343461 - DNA, 20 bp, Artificial Sequence
  Description of Artificial Sequence: Synthetic oligonucleotide
  Target: LAMA2; (+) strand; PAM type: YTN; PAM sequence: TTA
aagaagtgtacttttttatg

SEQ ID NO: 343462 - DNA, 20 bp, Artificial Sequence
  Description of Artificial Sequence: Synthetic oligonucleotide
  Target: LAMA2; (+) strand; PAM type: YTN; PAM sequence: CTT
ttttatgcttgtctttgaga

SEQ ID NO: 343463 - DNA, 20 bp, Artificial Sequence
  Description of Artificial Sequence: Synthetic oligonucleotide
  Target: LAMA2; (+) strand; PAM type: YTN; PAM sequence: TTT
tttatgcttgtctttgagaa

SEQ ID NO: 343464 - DNA, 20 bp, Artificial Sequence
  Description of Artificial Sequence: Synthetic oligonucleotide
  Target: LAMA2; (+) strand; PAM type: YTN; PAM sequence: TTT
ttatgcttgtctttgagaaa

SEQ ID NO: 343465 - DNA, 20 bp, Artificial Sequence
  Description of Artificial Sequence: Synthetic oligonucleotide
  Target: LAMA2; (+) strand; PAM type: YTN; PAM sequence: TTT
tatgcttgtctttgagaaaa

SEQ ID NO: 343466 - DNA, 20 bp, Artificial Sequence
  Description of Artificial Sequence: Synthetic oligonucleotide
  Target: LAMA2; (+) strand; PAM type: YTN; PAM sequence: TTT
atgcttgtctttgagaaaag

SEQ ID NO: 343467 - DNA, 20 bp, Artificial Sequence
  Description of Artificial Sequence: Synthetic oligonucleotide
  Target: LAMA2; (+) strand; PAM type: YTN; PAM sequence: TTA
tgcttgtctttgagaaaagt

SEQ ID NO: 343468 - DNA, 20 bp, Artificial Sequence
  Description of Artificial Sequence: Synthetic oligonucleotide
  Target: LAMA2; (+) strand; PAM type: YTN; PAM sequence: CTT
gtctttgagaaaagtgtcaa

SEQ ID NO: 343469 - DNA, 20 bp, Artificial Sequence
  Description of Artificial Sequence: Synthetic oligonucleotide
  Target: LAMA2; (+) strand; PAM type: YTN; PAM sequence: TTG
tctttgagaaaagtgtcaag

SEQ ID NO: 343470 - DNA, 20 bp, Artificial Sequence
  Description of Artificial Sequence: Synthetic oligonucleotide
  Target: LAMA2; (+) strand; PAM type: YTN; PAM sequence: CTT
tgagaaaagtgtcaaggtgg

SEQ ID NO: 343471 - DNA, 20 bp, Artificial Sequence
  Description of Artificial Sequence: Synthetic oligonucleotide
  Target: LAMA2; (+) strand; PAM type: YTN; PAM sequence: TTT
gagaaaagtgtcaaggtggc

SEQ ID NO: 343472 - DNA, 20 bp, Artificial Sequence
  Description of Artificial Sequence: Synthetic oligonucleotide
  Target: LAMA2; (+) strand; PAM type: YTN; PAM sequence: TTG
agaaaagtgtcaaggtggca

SEQ ID NO: 343473 - DNA, 20 bp, Artificial Sequence
  Description of Artificial Sequence: Synthetic oligonucleotide
  Target: LAMA2; (+) strand; PAM type: YTN; PAM sequence: CTT
taaaatgacaacaaaaaatt

SEQ ID NO: 343474 - DNA, 20 bp, Artificial Sequence
  Description of Artificial Sequence: Synthetic oligonucleotide
  Target: LAMA2; (+) strand; PAM type: YTN; PAM sequence: TTT
aaaatgacaacaaaaaatta

SEQ ID NO: 343475 - DNA, 20 bp, Artificial Sequence
  Description of Artificial Sequence: Synthetic oligonucleotide
  Target: LAMA2; (+) strand; PAM type: YTN; PAM sequence: TTA
aaatgacaacaaaaaattaa

SEQ ID NO: 343476 - DNA, 20 bp, Artificial Sequence
  Description of Artificial Sequence: Synthetic oligonucleotide
  Target: LAMA2; (+) strand; PAM type: YTN; PAM sequence: TTA
aaatttcactgaacaaaata

SEQ ID NO: 343477 - DNA, 20 bp, Artificial Sequence
  Description of Artificial Sequence: Synthetic oligonucleotide
  Target: LAMA2; (+) strand; PAM type: YTN; PAM sequence: TTT
cactgaacaaaataaaataa

SEQ ID NO: 343478 - DNA, 20 bp, Artificial Sequence
  Description of Artificial Sequence: Synthetic oligonucleotide
  Target: LAMA2; (+) strand; PAM type: YTN; PAM sequence: TTC
actgaacaaaataaaataaa

SEQ ID NO: 343479 - DNA, 20 bp, Artificial Sequence
  Description of Artificial Sequence: Synthetic oligonucleotide
  Target: LAMA2; (+) strand; PAM type: YTN; PAM sequence: CTG
aacaaaataaaataaaagaa

SEQ ID NO: 343480 - DNA, 20 bp, Artificial Sequence
  Description of Artificial Sequence: Synthetic oligonucleotide
  Target: LAMA2; (+) strand; PAM type: YTN; PAM sequence: CTA
gctgctcatctgggatgagt

SEQ ID NO: 343481 - DNA, 20 bp, Artificial Sequence
  Description of Artificial Sequence: Synthetic oligonucleotide
  Target: LAMA2; (+) strand; PAM type: YTN; PAM sequence: CTG
ctcatctgggatgagttagt

SEQ ID NO: 343482 - DNA, 20 bp, Artificial Sequence
  Description of Artificial Sequence: Synthetic oligonucleotide
  Target: LAMA2; (+) strand; PAM type: YTN; PAM sequence: CTC
atctgggatgagttagttat

SEQ ID NO: 343483 - DNA, 20 bp, Artificial Sequence
  Description of Artificial Sequence: Synthetic oligonucleotide
  Target: LAMA2; (+) strand; PAM type: YTN; PAM sequence: CTG
ggatgagttagttattgcaa

SEQ ID NO: 343484 - DNA, 20 bp, Artificial Sequence
  Description of Artificial Sequence: Synthetic oligonucleotide
  Target: LAMA2; (+) strand; PAM type: YTN; PAM sequence: TTA
gttattgcaattcaacttgt

SEQ ID NO: 343485 - DNA, 20 bp, Artificial Sequence
  Description of Artificial Sequence: Synthetic oligonucleotide
  Target: LAMA2; (+) strand; PAM type: YTN; PAM sequence: TTA
ttgcaattcaacttgtaatt

SEQ ID NO: 343486 - DNA, 20 bp, Artificial Sequence
  Description of Artificial Sequence: Synthetic oligonucleotide
  Target: LAMA2; (+) strand; PAM type: YTN; PAM sequence: TTG
caattcaacttgtaatttaa

SEQ ID NO: 343487 - DNA, 20 bp, Artificial Sequence
  Description of Artificial Sequence: Synthetic oligonucleotide
  Target: LAMA2; (+) strand; PAM type: YTN; PAM sequence: TTC
aacttgtaatttaatgcaga

SEQ ID NO: 343488 - DNA, 20 bp, Artificial Sequence
  Description of Artificial Sequence: Synthetic oligonucleotide
  Target: LAMA2; (+) strand; PAM type: YTN; PAM sequence: CTT
gtaatttaatgcagaatttt

SEQ ID NO: 343489 - DNA, 20 bp, Artificial Sequence
  Description of Artificial Sequence: Synthetic oligonucleotide
  Target: LAMA2; (+) strand; PAM type: YTN; PAM sequence: TTG
taatttaatgcagaattttc

SEQ ID NO: 343490 - DNA, 20 bp, Artificial Sequence
  Description of Artificial Sequence: Synthetic oligonucleotide
  Target: LAMA2; (+) strand; PAM type: YTN; PAM sequence: TTT
aatgcagaattttcagacaa

SEQ ID NO: 343491 - DNA, 20 bp, Artificial Sequence
  Description of Artificial Sequence: Synthetic oligonucleotide
  Target: LAMA2; (+) strand; PAM type: YTN; PAM sequence: TTA
atgcagaattttcagacaat

SEQ ID NO: 343492 - DNA, 20 bp, Artificial Sequence
  Description of Artificial Sequence: Synthetic oligonucleotide
  Target: LAMA2; (+) strand; PAM type: YTN; PAM sequence: TTT
tcagacaattagggccaaaa

SEQ ID NO: 343493 - DNA, 20 bp, Artificial Sequence
  Description of Artificial Sequence: Synthetic oligonucleotide
  Target: LAMA2; (+) strand; PAM type: YTN; PAM sequence: TTT
cagacaattagggccaaaaa

SEQ ID NO: 343494 - DNA, 20 bp, Artificial Sequence
  Description of Artificial Sequence: Synthetic oligonucleotide
  Target: LAMA2; (+) strand; PAM type: YTN; PAM sequence: TTC
agacaattagggccaaaaaa

SEQ ID NO: 343495 - DNA, 20 bp, Artificial Sequence
  Description of Artificial Sequence: Synthetic oligonucleotide
  Target: LAMA2; (+) strand; PAM type: YTN; PAM sequence: TTA
gggccaaaaaagaaaatgtt

SEQ ID NO: 343496 - DNA, 20 bp, Artificial Sequence
  Description of Artificial Sequence: Synthetic oligonucleotide
  Target: LAMA2; (+) strand; PAM type: YTN; PAM sequence: TTA
aattagctagtgtctgacaa

SEQ ID NO: 343497 - DNA, 20 bp, Artificial Sequence
  Description of Artificial Sequence: Synthetic oligonucleotide
  Target: LAMA2; (+) strand; PAM type: YTN; PAM sequence: TTA
gctagtgtctgacaaagaag

SEQ ID NO: 343498 - DNA, 20 bp, Artificial Sequence
  Description of Artificial Sequence: Synthetic oligonucleotide
  Target: LAMA2; (+) strand; PAM type: YTN; PAM sequence: CTA
gtgtctgacaaagaagaaag

SEQ ID NO: 343499 - DNA, 20 bp, Artificial Sequence
  Description of Artificial Sequence: Synthetic oligonucleotide
  Target: LAMA2; (+) strand; PAM type: YTN; PAM sequence: CTG
acaaagaagaaagctttcaa

SEQ ID NO: 343500 - DNA, 20 bp, Artificial Sequence
  Description of Artificial Sequence: Synthetic oligonucleotide
  Target: LAMA2; (+) strand; PAM type: YTN; PAM sequence: CTT
tcaaactttcaagacgaaca

SEQ ID NO: 343501 - DNA, 20 bp, Artificial Sequence
  Description of Artificial Sequence: Synthetic oligonucleotide
  Target: LAMA2; (+) strand; PAM type: YTN; PAM sequence: TTT
caaactttcaagacgaacat

SEQ ID NO: 343502 - DNA, 20 bp, Artificial Sequence
  Description of Artificial Sequence: Synthetic oligonucleotide
  Target: LAMA2; (+) strand; PAM type: YTN; PAM sequence: TTC
aaactttcaagacgaacatt

SEQ ID NO: 343503 - DNA, 20 bp, Artificial Sequence
  Description of Artificial Sequence: Synthetic oligonucleotide
  Target: LAMA2; (+) strand; PAM type: YTN; PAM sequence: CTT
tcaagacgaacattttatta

SEQ ID NO: 343504 - DNA, 20 bp, Artificial Sequence
  Description of Artificial Sequence: Synthetic oligonucleotide
  Target: LAMA2; (+) strand; PAM type: YTN; PAM sequence: TTT
caagacgaacattttattag

SEQ ID NO: 343505 - DNA, 20 bp, Artificial Sequence
  Description of Artificial Sequence: Synthetic oligonucleotide
  Target: LAMA2; (+) strand; PAM type: YTN; PAM sequence: TTC
aagacgaacattttattagc

SEQ ID NO: 343506 - DNA, 20 bp, Artificial Sequence
  Description of Artificial Sequence: Synthetic oligonucleotide
  Target: LAMA2; (+) strand; PAM type: YTN; PAM sequence: TTT
tattagcaatgaattctcag

SEQ ID NO: 343507 - DNA, 20 bp, Artificial Sequence
  Description of Artificial Sequence: Synthetic oligonucleotide
  Target: LAMA2; (+) strand; PAM type: YTN; PAM sequence: TTT
attagcaatgaattctcaga

SEQ ID NO: 343508 - DNA, 20 bp, Artificial Sequence
  Description of Artificial Sequence: Synthetic oligonucleotide
  Target: LAMA2; (+) strand; PAM type: YTN; PAM sequence: TTA
ttagcaatgaattctcagag

SEQ ID NO: 343509 - DNA, 20 bp, Artificial Sequence
  Description of Artificial Sequence: Synthetic oligonucleotide
  Target: LAMA2; (+) strand; PAM type: YTN; PAM sequence: TTA
gcaatgaattctcagagcaa

SEQ ID NO: 343510 - DNA, 20 bp, Artificial Sequence
  Description of Artificial Sequence: Synthetic oligonucleotide
  Target: LAMA2; (+) strand; PAM type: YTN; PAM sequence: TTC
tcagagcaaatttaatgcag

SEQ ID NO: 343511 - DNA, 20 bp, Artificial Sequence
  Description of Artificial Sequence: Synthetic oligonucleotide
  Target: LAMA2; (+) strand; PAM type: YTN; PAM sequence: CTC
agagcaaatttaatgcagtc

SEQ ID NO: 343512 - DNA, 20 bp, Artificial Sequence
  Description of Artificial Sequence: Synthetic oligonucleotide
  Target: LAMA2; (+) strand; PAM type: YTN; PAM sequence: TTT
aatgcagtccttatgtaagg

SEQ ID NO: 343513 - DNA, 20 bp, Artificial Sequence
  Description of Artificial Sequence: Synthetic oligonucleotide
  Target: LAMA2; (+) strand; PAM type: YTN; PAM sequence: TTA
atgcagtccttatgtaagga

SEQ ID NO: 343514 - DNA, 20 bp, Artificial Sequence
  Description of Artificial Sequence: Synthetic oligonucleotide
  Target: LAMA2; (+) strand; PAM type: YTN; PAM sequence: CTT
atgtaaggatgtcagataga

SEQ ID NO: 343515 - DNA, 20 bp, Artificial Sequence
  Description of Artificial Sequence: Synthetic oligonucleotide
  Target: LAMA2; (+) strand; PAM type: YTN; PAM sequence: TTA
tgtaaggatgtcagatagaa

SEQ ID NO: 343516 - DNA, 20 bp, Artificial Sequence
  Description of Artificial Sequence: Synthetic oligonucleotide
  Target: LAMA2; (+) strand; PAM type: YTN; PAM sequence: TTT
caagcatcactagtgcaaag

SEQ ID NO: 343517 - DNA, 20 bp, Artificial Sequence
  Description of Artificial Sequence: Synthetic oligonucleotide
  Target: LAMA2; (+) strand; PAM type: YTN; PAM sequence: TTC
aagcatcactagtgcaaagg

SEQ ID NO: 343518 - DNA, 20 bp, Artificial Sequence
  Description of Artificial Sequence: Synthetic oligonucleotide
  Target: LAMA2; (+) strand; PAM type: YTN; PAM sequence: CTA
gtgcaaaggacaatattact

SEQ ID NO: 343519 - DNA, 20 bp, Artificial Sequence
  Description of Artificial Sequence: Synthetic oligonucleotide
  Target: LAMA2; (+) strand; PAM type: YTN; PAM sequence: TTA
cttgcttatttctgcagtgt

SEQ ID NO: 343520 - DNA, 20 bp, Artificial Sequence
  Description of Artificial Sequence: Synthetic oligonucleotide
  Target: LAMA2; (+) strand; PAM type: YTN; PAM sequence: CTT
gcttatttctgcagtgtaac

SEQ ID NO: 343521 - DNA, 20 bp, Artificial Sequence
  Description of Artificial Sequence: Synthetic oligonucleotide
  Target: LAMA2; (+) strand; PAM type: YTN; PAM sequence: TTG
cttatttctgcagtgtaaca

SEQ ID NO: 343522 - DNA, 20 bp, Artificial Sequence
  Description of Artificial Sequence: Synthetic oligonucleotide
  Target: LAMA2; (+) strand; PAM type: YTN; PAM sequence: CTT
atttctgcagtgtaacaaag

SEQ ID NO: 343523 - DNA, 20 bp, Artificial Sequence
  Description of Artificial Sequence: Synthetic oligonucleotide
  Target: LAMA2; (+) strand; PAM type: YTN; PAM sequence: TTA
tttctgcagtgtaacaaaga

SEQ ID NO: 343524 - DNA, 20 bp, Artificial Sequence
  Description of Artificial Sequence: Synthetic oligonucleotide
  Target: LAMA2; (+) strand; PAM type: YTN; PAM sequence: TTT
ctgcagtgtaacaaagatga

SEQ ID NO: 343525 - DNA, 20 bp, Artificial Sequence
  Description of Artificial Sequence: Synthetic oligonucleotide
  Target: LAMA2; (+) strand; PAM type: YTN; PAM sequence: TTC
tgcagtgtaacaaagatgaa

SEQ ID NO: 343526 - DNA, 20 bp, Artificial Sequence
  Description of Artificial Sequence: Synthetic oligonucleotide
  Target: LAMA2; (+) strand; PAM type: YTN; PAM sequence: CTG
cagtgtaacaaagatgaaga

SEQ ID NO: 343527 - DNA, 20 bp, Artificial Sequence
  Description of Artificial Sequence: Synthetic oligonucleotide
  Target: LAMA2; (+) strand; PAM type: YTN; PAM sequence: TTC
tcttaaattttttactcaat

SEQ ID NO: 343528 - DNA, 20 bp, Artificial Sequence
  Description of Artificial Sequence: Synthetic oligonucleotide
  Target: LAMA2; (+) strand; PAM type: YTN; PAM sequence: CTC
ttaaattttttactcaatga

SEQ ID NO: 343529 - DNA, 20 bp, Artificial Sequence
  Description of Artificial Sequence: Synthetic oligonucleotide
  Target: LAMA2; (+) strand; PAM type: YTN; PAM sequence: CTT
aaattttttactcaatgatg

SEQ ID NO: 343530 - DNA, 20 bp, Artificial Sequence
  Description of Artificial Sequence: Synthetic oligonucleotide
  Target: LAMA2; (+) strand; PAM type: YTN; PAM sequence: TTA
aattttttactcaatgatga

SEQ ID NO: 343531 - DNA, 20 bp, Artificial Sequence
  Description of Artificial Sequence: Synthetic oligonucleotide
  Target: LAMA2; (+) strand; PAM type: YTN; PAM sequence: TTT
tttactcaatgatgattcat

SEQ ID NO: 343532 - DNA, 20 bp, Artificial Sequence
  Description of Artificial Sequence: Synthetic oligonucleotide
  Target: LAMA2; (+) strand; PAM type: YTN; PAM sequence: TTT
ttactcaatgatgattcatg

SEQ ID NO: 343533 - DNA, 20 bp, Artificial Sequence
  Description of Artificial Sequence: Synthetic oligonucleotide
  Target: LAMA2; (+) strand; PAM type: YTN; PAM sequence: TTT
tactcaatgatgattcatgt

SEQ ID NO: 343534 - DNA, 20 bp, Artificial Sequence
  Description of Artificial Sequence: Synthetic oligonucleotide
  Target: LAMA2; (+) strand; PAM type: YTN; PAM sequence: TTT
actcaatgatgattcatgtg

SEQ ID NO: 343535 - DNA, 20 bp, Artificial Sequence
  Description of Artificial Sequence: Synthetic oligonucleotide
  Target: LAMA2; (+) strand; PAM type: YTN; PAM sequence: TTA
ctcaatgatgattcatgtgt

SEQ ID NO: 343536 - DNA, 20 bp, Artificial Sequence
  Description of Artificial Sequence: Synthetic oligonucleotide
  Target: LAMA2; (+) strand; PAM type: YTN; PAM sequence: CTC
aatgatgattcatgtgtctc

SEQ ID NO: 343537 - DNA, 20 bp, Artificial Sequence
  Description of Artificial Sequence: Synthetic oligonucleotide
  Target: LAMA2; (+) strand; PAM type: YTN; PAM sequence: TTC
atgtgtctctgagaaactaa

SEQ ID NO: 343538 - DNA, 20 bp, Artificial Sequence
  Description of Artificial Sequence: Synthetic oligonucleotide
  Target: LAMA2; (+) strand; PAM type: YTN; PAM sequence: CTC
tgagaaactaagataatatg

SEQ ID NO: 343539 - DNA, 20 bp, Artificial Sequence
  Description of Artificial Sequence: Synthetic oligonucleotide
  Target: LAMA2; (+) strand; PAM type: YTN; PAM sequence: CTG
agaaactaagataatatgat

SEQ ID NO: 343540 - DNA, 20 bp, Artificial Sequence
  Description of Artificial Sequence: Synthetic oligonucleotide
  Target: LAMA2; (+) strand; PAM type: YTN; PAM sequence: CTA
agataatatgatttaattct

SEQ ID NO: 343541 - DNA, 20 bp, Artificial Sequence
  Description of Artificial Sequence: Synthetic oligonucleotide
  Target: LAMA2; (+) strand; PAM type: YTN; PAM sequence: TTT
aattctgtgcttttgggata

SEQ ID NO: 343542 - DNA, 20 bp, Artificial Sequence
  Description of Artificial Sequence: Synthetic oligonucleotide
  Target: LAMA2; (+) strand; PAM type: YTN; PAM sequence: TTA
attctgtgcttttgggatag

SEQ ID NO: 343543 - DNA, 20 bp, Artificial Sequence
  Description of Artificial Sequence: Synthetic oligonucleotide
  Target: LAMA2; (+) strand; PAM type: YTN; PAM sequence: TTC
tgtgcttttgggatagtcta

SEQ ID NO: 343544 - DNA, 20 bp, Artificial Sequence
  Description of Artificial Sequence: Synthetic oligonucleotide
  Target: LAMA2; (+) strand; PAM type: YTN; PAM sequence: CTG
tgcttttgggatagtctaac

SEQ ID NO: 343545 - DNA, 20 bp, Artificial Sequence
  Description of Artificial Sequence: Synthetic oligonucleotide
  Target: LAMA2; (+) strand; PAM type: YTN; PAM sequence: CTT
ttgggatagtctaacttaat

SEQ ID NO: 343546 - DNA, 20 bp, Artificial Sequence
  Description of Artificial Sequence: Synthetic oligonucleotide
  Target: LAMA2; (+) strand; PAM type: YTN; PAM sequence: TTT
tgggatagtctaacttaatt

SEQ ID NO: 343547 - DNA, 20 bp, Artificial Sequence
  Description of Artificial Sequence: Synthetic oligonucleotide
  Target: LAMA2; (+) strand; PAM type: YTN; PAM sequence: TTT
gggatagtctaacttaattc

SEQ ID NO: 343548 - DNA, 20 bp, Artificial Sequence
  Description of Artificial Sequence: Synthetic oligonucleotide
  Target: LAMA2; (+) strand; PAM type: YTN; PAM sequence: TTG
ggatagtctaacttaattca

SEQ ID NO: 343549 - DNA, 20 bp, Artificial Sequence
  Description of Artificial Sequence: Synthetic oligonucleotide
  Target: LAMA2; (+) strand; PAM type: YTN; PAM sequence: CTA
acttaattcatgaaggagta

SEQ ID NO: 343550 - DNA, 20 bp, Artificial Sequence
  Description of Artificial Sequence: Synthetic oligonucleotide
  Target: LAMA2; (+) strand; PAM type: YTN; PAM sequence: CTT
aattcatgaaggagtacagg

SEQ ID NO: 343551 - DNA, 20 bp, Artificial Sequence
  Description of Artificial Sequence: Synthetic oligonucleotide
  Target: LAMA2; (+) strand; PAM type: YTN; PAM sequence: TTA
attcatgaaggagtacaggg

SEQ ID NO: 343552 - DNA, 20 bp, Artificial Sequence
  Description of Artificial Sequence: Synthetic oligonucleotide
  Target: LAMA2; (+) strand; PAM type: YTN; PAM sequence: TTC
atgaaggagtacaggggatg

SEQ ID NO: 343553 - DNA, 20 bp, Artificial Sequence
  Description of Artificial Sequence: Synthetic oligonucleotide
  Target: LAMA2; (+) strand; PAM type: YTN; PAM sequence: CTT
tgtgtgtccactttgtttgt

SEQ ID NO: 343554 - DNA, 20 bp, Artificial Sequence
  Description of Artificial Sequence: Synthetic oligonucleotide
  Target: LAMA2; (+) strand; PAM type: YTN; PAM sequence: TTT
gtgtgtccactttgtttgtc

SEQ ID NO: 343555 - DNA, 20 bp, Artificial Sequence
  Description of Artificial Sequence: Synthetic oligonucleotide
  Target: LAMA2; (+) strand; PAM type: YTN; PAM sequence: TTG
tgtgtccactttgtttgtca

SEQ ID NO: 343556 - DNA, 20 bp, Artificial Sequence
  Description of Artificial Sequence: Synthetic oligonucleotide
  Target: LAMA2; (+) strand; PAM type: YTN; PAM sequence: CTT
tgtttgtcactctcaaatgt

SEQ ID NO: 343557 - DNA, 20 bp, Artificial Sequence
  Description of Artificial Sequence: Synthetic oligonucleotide
  Target: LAMA2; (+) strand; PAM type: YTN; PAM sequence: TTT
gtttgtcactctcaaatgtc

SEQ ID NO: 343558 - DNA, 20 bp, Artificial Sequence
  Description of Artificial Sequence: Synthetic oligonucleotide
  Target: LAMA2; (+) strand; PAM type: YTN; PAM sequence: TTG
tttgtcactctcaaatgtca

SEQ ID NO: 343559 - DNA, 20 bp, Artificial Sequence
  Description of Artificial Sequence: Synthetic oligonucleotide
  Target: LAMA2; (+) strand; PAM type: YTN; PAM sequence: TTT
gtcactctcaaatgtcagat

SEQ ID NO: 343560 - DNA, 20 bp, Artificial Sequence
  Description of Artificial Sequence: Synthetic oligonucleotide
  Target: LAMA2; (+) strand; PAM type: YTN; PAM sequence: TTG
tcactctcaaatgtcagatg

SEQ ID NO: 343561 - DNA, 20 bp, Artificial Sequence
  Description of Artificial Sequence: Synthetic oligonucleotide
  Target: LAMA2; (+) strand; PAM type: YTN; PAM sequence: CTC
tcaaatgtcagatgtgcagg

SEQ ID NO: 343562 - DNA, 20 bp, Artificial Sequence
  Description of Artificial Sequence: Synthetic oligonucleotide
  Target: LAMA2; (+) strand; PAM type: YTN; PAM sequence: CTC
aaatgtcagatgtgcaggca

SEQ ID NO: 343563 - DNA, 20 bp, Artificial Sequence
  Description of Artificial Sequence: Synthetic oligonucleotide
  Target: LAMA2; (+) strand; PAM type: YTN; PAM sequence: TTC
tcagagttaaattacttgac

SEQ ID NO: 343564 - DNA, 20 bp, Artificial Sequence
  Description of Artificial Sequence: Synthetic oligonucleotide
  Target: LAMA2; (+) strand; PAM type: YTN; PAM sequence: CTC
agagttaaattacttgacag

SEQ ID NO: 343565 - DNA, 20 bp, Artificial Sequence
  Description of Artificial Sequence: Synthetic oligonucleotide
  Target: LAMA2; (+) strand; PAM type: YTN; PAM sequence: TTA
aattacttgacaggaactta

SEQ ID NO: 343566 - DNA, 20 bp, Artificial Sequence
  Description of Artificial Sequence: Synthetic oligonucleotide
  Target: LAMA2; (+) strand; PAM type: YTN; PAM sequence: TTA
cttgacaggaacttaagcat

SEQ ID NO: 343567 - DNA, 20 bp, Artificial Sequence
  Description of Artificial Sequence: Synthetic oligonucleotide
  Target: LAMA2; (+) strand; PAM type: YTN; PAM sequence: CTT
gacaggaacttaagcatccg

SEQ ID NO: 343568 - DNA, 20 bp, Artificial Sequence
  Description of Artificial Sequence: Synthetic oligonucleotide
  Target: LAMA2; (+) strand; PAM type: YTN; PAM sequence: TTG
acaggaacttaagcatccgt

SEQ ID NO: 343569 - DNA, 20 bp, Artificial Sequence
  Description of Artificial Sequence: Synthetic oligonucleotide
  Target: LAMA2; (+) strand; PAM type: YTN; PAM sequence: CTT
aagcatccgtatttgttgcc

SEQ ID NO: 343570 - DNA, 20 bp, Artificial Sequence
  Description of Artificial Sequence: Synthetic oligonucleotide
  Target: LAMA2; (+) strand; PAM type: YTN; PAM sequence: TTA
agcatccgtatttgttgcca

SEQ ID NO: 343571 - DNA, 20 bp, Artificial Sequence
  Description of Artificial Sequence: Synthetic oligonucleotide
  Target: LAMA2; (+) strand; PAM type: YTN; PAM sequence: TTT
gttgccaggtagtcttctgt

SEQ ID NO: 343572 - DNA, 20 bp, Artificial Sequence
  Description of Artificial Sequence: Synthetic oligonucleotide
  Target: LAMA2; (+) strand; PAM type: YTN; PAM sequence: TTG
ttgccaggtagtcttctgtg

SEQ ID NO: 343573 - DNA, 20 bp, Artificial Sequence
  Description of Artificial Sequence: Synthetic oligonucleotide
  Target: LAMA2; (+) strand; PAM type: YTN; PAM sequence: TTG
ccaggtagtcttctgtgtgg

SEQ ID NO: 343574 - DNA, 20 bp, Artificial Sequence
  Description of Artificial Sequence: Synthetic oligonucleotide
  Target: LAMA2; (+) strand; PAM type: YTN; PAM sequence: CTT
ctgtgtggttaaagtacaga

SEQ ID NO: 343575 - DNA, 20 bp, Artificial Sequence
  Description of Artificial Sequence: Synthetic oligonucleotide
  Target: LAMA2; (+) strand; PAM type: YTN; PAM sequence: TTC
tgtgtggttaaagtacagaa

SEQ ID NO: 343576 - DNA, 20 bp, Artificial Sequence
  Description of Artificial Sequence: Synthetic oligonucleotide
  Target: LAMA2; (+) strand; PAM type: YTN; PAM sequence: CTG
tgtggttaaagtacagaatg

SEQ ID NO: 343577 - DNA, 20 bp, Artificial Sequence
  Description of Artificial Sequence: Synthetic oligonucleotide
  Target: LAMA2; (+) strand; PAM type: YTN; PAM sequence: TTA
aagtacagaatgtactccta

SEQ ID NO: 343578 - DNA, 20 bp, Artificial Sequence
  Description of Artificial Sequence: Synthetic oligonucleotide
  Target: LAMA2; (+) strand; PAM type: YTN; PAM sequence: CTC
ctacaaaagcagagaggcgg

SEQ ID NO: 343579 - DNA, 20 bp, Artificial Sequence
  Description of Artificial Sequence: Synthetic oligonucleotide
  Target: LAMA2; (+) strand; PAM type: YTN; PAM sequence: CTA
caaaagcagagaggcggccc

SEQ ID NO: 343580 - DNA, 20 bp, Artificial Sequence
  Description of Artificial Sequence: Synthetic oligonucleotide
  Target: LAMA2; (+) strand; PAM type: YTN; PAM sequence: TTG
ccacacaaaagtgttttttc

SEQ ID NO: 343581 - DNA, 20 bp, Artificial Sequence
  Description of Artificial Sequence: Synthetic oligonucleotide
  Target: LAMA2; (+) strand; PAM type: YTN; PAM sequence: TTT
tttcagatggcttatggtta

SEQ ID NO: 343582 - DNA, 20 bp, Artificial Sequence
  Description of Artificial Sequence: Synthetic oligonucleotide
  Target: LAMA2; (+) strand; PAM type: YTN; PAM sequence: TTT
ttcagatggcttatggttag

SEQ ID NO: 343583 - DNA, 20 bp, Artificial Sequence
  Description of Artificial Sequence: Synthetic oligonucleotide
  Target: LAMA2; (+) strand; PAM type: YTN; PAM sequence: TTT
tcagatggcttatggttaga

SEQ ID NO: 343584 - DNA, 20 bp, Artificial Sequence
  Description of Artificial Sequence: Synthetic oligonucleotide
  Target: LAMA2; (+) strand; PAM type: YTN; PAM sequence: TTT
cagatggcttatggttagaa

SEQ ID NO: 343585 - DNA, 20 bp, Artificial Sequence
  Description of Artificial Sequence: Synthetic oligonucleotide
  Target: LAMA2; (+) strand; PAM type: YTN; PAM sequence: TTC
agatggcttatggttagaac

SEQ ID NO: 343586 - DNA, 20 bp, Artificial Sequence
  Description of Artificial Sequence: Synthetic oligonucleotide
  Target: LAMA2; (+) strand; PAM type: YTN; PAM sequence: CTT
atggttagaaccaatatatt

SEQ ID NO: 343587 - DNA, 20 bp, Artificial Sequence
  Description of Artificial Sequence: Synthetic oligonucleotide
  Target: LAMA2; (+) strand; PAM type: YTN; PAM sequence: TTA
tggttagaaccaatatattt

SEQ ID NO: 343588 - DNA, 20 bp, Artificial Sequence
  Description of Artificial Sequence: Synthetic oligonucleotide
  Target: LAMA2; (+) strand; PAM type: YTN; PAM sequence: TTA
gaaccaatatatttttctag

SEQ ID NO: 343589 - DNA, 20 bp, Artificial Sequence
  Description of Artificial Sequence: Synthetic oligonucleotide
  Target: LAMA2; (+) strand; PAM type: YTN; PAM sequence: TTT
ttctagcatacagtttgagt

SEQ ID NO: 343590 - DNA, 20 bp, Artificial Sequence
  Description of Artificial Sequence: Synthetic oligonucleotide
  Target: LAMA2; (+) strand; PAM type: YTN; PAM sequence: TTT
tctagcatacagtttgagtg

SEQ ID NO: 343591 - DNA, 20 bp, Artificial Sequence
  Description of Artificial Sequence: Synthetic oligonucleotide
  Target: LAMA2; (+) strand; PAM type: YTN; PAM sequence: TTT
ctagcatacagtttgagtga

SEQ ID NO: 343592 - DNA, 20 bp, Artificial Sequence
  Description of Artificial Sequence: Synthetic oligonucleotide
  Target: LAMA2; (+) strand; PAM type: YTN; PAM sequence: TTC
tagcatacagtttgagtgat

SEQ ID NO: 343593 - DNA, 20 bp, Artificial Sequence
  Description of Artificial Sequence: Synthetic oligonucleotide
  Target: LAMA2; (+) strand; PAM type: YTN; PAM sequence: CTA
gcatacagtttgagtgataa

SEQ ID NO: 343594 - DNA, 20 bp, Artificial Sequence
  Description of Artificial Sequence: Synthetic oligonucleotide
  Target: LAMA2; (+) strand; PAM type: YTN; PAM sequence: TTT
gagtgataatagctcacatt

SEQ ID NO: 343595 - DNA, 20 bp, Artificial Sequence
  Description of Artificial Sequence: Synthetic oligonucleotide
  Target: LAMA2; (+) strand; PAM type: YTN; PAM sequence: TTG
agtgataatagctcacattc

SEQ ID NO: 343596 - DNA, 20 bp, Artificial Sequence
  Description of Artificial Sequence: Synthetic oligonucleotide
  Target: LAMA2; (+) strand; PAM type: YTN; PAM sequence: CTC
acattccccgatcacatgcc

SEQ ID NO: 343597 - DNA, 20 bp, Artificial Sequence
  Description of Artificial Sequence: Synthetic oligonucleotide
  Target: LAMA2; (+) strand; PAM type: YTN; PAM sequence: TTC
cccgatcacatgccttgtgc

SEQ ID NO: 343598 - DNA, 20 bp, Artificial Sequence
  Description of Artificial Sequence: Synthetic oligonucleotide
  Target: LAMA2; (+) strand; PAM type: YTN; PAM sequence: CTT
gtgccaagtaccattctaaa

SEQ ID NO: 343599 - DNA, 20 bp, Artificial Sequence
  Description of Artificial Sequence: Synthetic oligonucleotide
  Target: LAMA2; (+) strand; PAM type: YTN; PAM sequence: TTG
tgccaagtaccattctaaat

SEQ ID NO: 343600 - DNA, 20 bp, Artificial Sequence
  Description of Artificial Sequence: Synthetic oligonucleotide
  Target: LAMA2; (+) strand; PAM type: YTN; PAM sequence: TTC
taaatgccttgcatcttgta

SEQ ID NO: 343601 - DNA, 20 bp, Artificial Sequence
  Description of Artificial Sequence: Synthetic oligonucleotide
  Target: LAMA2; (+) strand; PAM type: YTN; PAM sequence: CTA
aatgccttgcatcttgtaac

SEQ ID NO: 343602 - DNA, 20 bp, Artificial Sequence
  Description of Artificial Sequence: Synthetic oligonucleotide
  Target: LAMA2; (+) strand; PAM type: YTN; PAM sequence: CTT
gcatcttgtaactcattaaa

SEQ ID NO: 343603 - DNA, 20 bp, Artificial Sequence
  Description of Artificial Sequence: Synthetic oligonucleotide
  Target: LAMA2; (+) strand; PAM type: YTN; PAM sequence: TTG
catcttgtaactcattaaac

SEQ ID NO: 343604 - DNA, 20 bp, Artificial Sequence
  Description of Artificial Sequence: Synthetic oligonucleotide
  Target: LAMA2; (+) strand; PAM type: YTN; PAM sequence: CTT
gtaactcattaaacctttac

SEQ ID NO: 343605 - DNA, 20 bp, Artificial Sequence
  Description of Artificial Sequence: Synthetic oligonucleotide
  Target: LAMA2; (+) strand; PAM type: YTN; PAM sequence: TTG
taactcattaaacctttaca

SEQ ID NO: 343606 - DNA, 20 bp, Artificial Sequence
  Description of Artificial Sequence: Synthetic oligonucleotide
  Target: LAMA2; (+) strand; PAM type: YTN; PAM sequence: CTC
attaaacctttacagtaacc

SEQ ID NO: 343607 - DNA, 20 bp, Artificial Sequence
  Description of Artificial Sequence: Synthetic oligonucleotide
  Target: LAMA2; (+) strand; PAM type: YTN; PAM sequence: TTA
aacctttacagtaacctcat

SEQ ID NO: 343608 - DNA, 20 bp, Artificial Sequence
  Description of Artificial Sequence: Synthetic oligonucleotide
  Target: LAMA2; (+) strand; PAM type: YTN; PAM sequence: CTT
tacagtaacctcatgcaatg

SEQ ID NO: 343609 - DNA, 20 bp, Artificial Sequence
  Description of Artificial Sequence: Synthetic oligonucleotide
  Target: LAMA2; (+) strand; PAM type: YTN; PAM sequence: TTT
acagtaacctcatgcaatgt

SEQ ID NO: 343610 - DNA, 20 bp, Artificial Sequence
  Description of Artificial Sequence: Synthetic oligonucleotide
  Target: LAMA2; (+) strand; PAM type: YTN; PAM sequence: TTA
cagtaacctcatgcaatgta

SEQ ID NO: 343611 - DNA, 20 bp, Artificial Sequence
  Description of Artificial Sequence: Synthetic oligonucleotide
  Target: LAMA2; (+) strand; PAM type: YTN; PAM sequence: CTC
atgcaatgtacactcttgtt

SEQ ID NO: 343612 - DNA, 20 bp, Artificial Sequence
  Description of Artificial Sequence: Synthetic oligonucleotide
  Target: LAMA2; (+) strand; PAM type: YTN; PAM sequence: CTC
ttgttgttcccattttgcaa

SEQ ID NO: 343613 - DNA, 20 bp, Artificial Sequence
  Description of Artificial Sequence: Synthetic oligonucleotide
  Target: LAMA2; (+) strand; PAM type: YTN; PAM sequence: CTT
gttgttcccattttgcaaat

SEQ ID NO: 343614 - DNA, 20 bp, Artificial Sequence
  Description of Artificial Sequence: Synthetic oligonucleotide
  Target: LAMA2; (+) strand; PAM type: YTN; PAM sequence: TTG
ttgttcccattttgcaaata

SEQ ID NO: 343615 - DNA, 20 bp, Artificial Sequence
  Description of Artificial Sequence: Synthetic oligonucleotide
  Target: LAMA2; (+) strand; PAM type: YTN; PAM sequence: TTG
ttcccattttgcaaataaga

SEQ ID NO: 343616 - DNA, 20 bp, Artificial Sequence
  Description of Artificial Sequence: Synthetic oligonucleotide
  Target: LAMA2; (+) strand; PAM type: YTN; PAM sequence: TTC
ccattttgcaaataagaaaa

SEQ ID NO: 343617 - DNA, 20 bp, Artificial Sequence
  Description of Artificial Sequence: Synthetic oligonucleotide
  Target: LAMA2; (+) strand; PAM type: YTN; PAM sequence: TTT
tgcaaataagaaaactgatg

SEQ ID NO: 343618 - DNA, 20 bp, Artificial Sequence
  Description of Artificial Sequence: Synthetic oligonucleotide
  Target: LAMA2; (+) strand; PAM type: YTN; PAM sequence: TTT
gcaaataagaaaactgatgg

SEQ ID NO: 343619 - DNA, 20 bp, Artificial Sequence
  Description of Artificial Sequence: Synthetic oligonucleotide
  Target: LAMA2; (+) strand; PAM type: YTN; PAM sequence: TTG
caaataagaaaactgatggg

SEQ ID NO: 343620 - DNA, 20 bp, Artificial Sequence
  Description of Artificial Sequence: Synthetic oligonucleotide
  Target: LAMA2; (+) strand; PAM type: YTN; PAM sequence: CTG
atgggcaatattaccttgcc

SEQ ID NO: 343621 - DNA, 20 bp, Artificial Sequence
  Description of Artificial Sequence: Synthetic oligonucleotide
  Target: LAMA2; (+) strand; PAM type: YTN; PAM sequence: TTA
ccttgcccaagtttatacag

SEQ ID NO: 343622 - DNA, 20 bp, Artificial Sequence
  Description of Artificial Sequence: Synthetic oligonucleotide
  Target: LAMA2; (+) strand; PAM type: YTN; PAM sequence: CTT
gcccaagtttatacagctgg

SEQ ID NO: 343623 - DNA, 20 bp, Artificial Sequence
  Description of Artificial Sequence: Synthetic oligonucleotide
  Target: LAMA2; (+) strand; PAM type: YTN; PAM sequence: TTG
cccaagtttatacagctggt

SEQ ID NO: 343624 - DNA, 20 bp, Artificial Sequence
  Description of Artificial Sequence: Synthetic oligonucleotide
  Target: LAMA2; (+) strand; PAM type: YTN; PAM sequence: TTT
atacagctggtaagtggcag

SEQ ID NO: 343625 - DNA, 20 bp, Artificial Sequence
  Description of Artificial Sequence: Synthetic oligonucleotide
  Target: LAMA2; (+) strand; PAM type: YTN; PAM sequence: TTA
tacagctggtaagtggcaga

SEQ ID NO: 343626 - DNA, 20 bp, Artificial Sequence
  Description of Artificial Sequence: Synthetic oligonucleotide
  Target: LAMA2; (+) strand; PAM type: YTN; PAM sequence: CTG
gtaagtggcagagtcaggat

SEQ ID NO: 343627 - DNA, 20 bp, Artificial Sequence
  Description of Artificial Sequence: Synthetic oligonucleotide
  Target: LAMA2; (+) strand; PAM type: YTN; PAM sequence: TTT
gaacccaggctgatggtata

SEQ ID NO: 343628 - DNA, 20 bp, Artificial Sequence
  Description of Artificial Sequence: Synthetic oligonucleotide
  Target: LAMA2; (+) strand; PAM type: YTN; PAM sequence: TTG
aacccaggctgatggtatag

SEQ ID NO: 343629 - DNA, 20 bp, Artificial Sequence
  Description of Artificial Sequence: Synthetic oligonucleotide
  Target: LAMA2; (+) strand; PAM type: YTN; PAM sequence: CTG
atggtatagtctgcgtgctc

SEQ ID NO: 343630 - DNA, 20 bp, Artificial Sequence
  Description of Artificial Sequence: Synthetic oligonucleotide
  Target: LAMA2; (+) strand; PAM type: YTN; PAM sequence: CTG
cgtgctcagccacaatcatg

SEQ ID NO: 343631 - DNA, 20 bp, Artificial Sequence
  Description of Artificial Sequence: Synthetic oligonucleotide
  Target: LAMA2; (+) strand; PAM type: YTN; PAM sequence: CTC
agccacaatcatgaacttac

SEQ ID NO: 343632 - DNA, 20 bp, Artificial Sequence
  Description of Artificial Sequence: Synthetic oligonucleotide
  Target: LAMA2; (+) strand; PAM type: YTN; PAM sequence: CTT
accctcaaactgcctgtgtt

SEQ ID NO: 343633 - DNA, 20 bp, Artificial Sequence
  Description of Artificial Sequence: Synthetic oligonucleotide
  Target: LAMA2; (+) strand; PAM type: YTN; PAM sequence: TTA
ccctcaaactgcctgtgttt

SEQ ID NO: 343634 - DNA, 20 bp, Artificial Sequence
  Description of Artificial Sequence: Synthetic oligonucleotide
  Target: LAMA2; (+) strand; PAM type: YTN; PAM sequence: CTC
aaactgcctgtgtttgcata

SEQ ID NO: 343635 - DNA, 20 bp, Artificial Sequence
  Description of Artificial Sequence: Synthetic oligonucleotide
  Target: LAMA2; (+) strand; PAM type: YTN; PAM sequence: CTG
cctgtgtttgcataatcatg

SEQ ID NO: 343636 - DNA, 20 bp, Artificial Sequence
  Description of Artificial Sequence: Synthetic oligonucleotide
  Target: LAMA2; (+) strand; PAM type: YTN; PAM sequence: CTG
tgtttgcataatcatgtgga

SEQ ID NO: 343637 - DNA, 20 bp, Artificial Sequence
  Description of Artificial Sequence: Synthetic oligonucleotide
  Target: LAMA2; (+) strand; PAM type: YTN; PAM sequence: TTT
gcataatcatgtggatacta

SEQ ID NO: 343638 - DNA, 20 bp, Artificial Sequence
  Description of Artificial Sequence: Synthetic oligonucleotide
  Target: LAMA2; (+) strand; PAM type: YTN; PAM sequence: TTG
cataatcatgtggatactac

SEQ ID NO: 343639 - DNA, 20 bp, Artificial Sequence
  Description of Artificial Sequence: Synthetic oligonucleotide
  Target: LAMA2; (+) strand; PAM type: YTN; PAM sequence: CTA
caggatagattctttagact

SEQ ID NO: 343640 - DNA, 20 bp, Artificial Sequence
  Description of Artificial Sequence: Synthetic oligonucleotide
  Target: LAMA2; (+) strand; PAM type: YTN; PAM sequence: TTC
tttagactcatcttatgtag

SEQ ID NO: 343641 - DNA, 20 bp, Artificial Sequence
  Description of Artificial Sequence: Synthetic oligonucleotide
  Target: LAMA2; (+) strand; PAM type: YTN; PAM sequence: CTT
tagactcatcttatgtagga

SEQ ID NO: 343642 - DNA, 20 bp, Artificial Sequence
  Description of Artificial Sequence: Synthetic oligonucleotide
  Target: LAMA2; (+) strand; PAM type: YTN; PAM sequence: TTT
agactcatcttatgtaggag

SEQ ID NO: 343643 - DNA, 20 bp, Artificial Sequence
  Description of Artificial Sequence: Synthetic oligonucleotide
  Target: LAMA2; (+) strand; PAM type: YTN; PAM sequence: TTA
gactcatcttatgtaggagg

SEQ ID NO: 343644 - DNA, 20 bp, Artificial Sequence
  Description of Artificial Sequence: Synthetic oligonucleotide
  Target: LAMA2; (+) strand; PAM type: YTN; PAM sequence: CTC
atcttatgtaggaggaatag

SEQ ID NO: 343645 - DNA, 20 bp, Artificial Sequence
  Description of Artificial Sequence: Synthetic oligonucleotide
  Target: LAMA2; (+) strand; PAM type: YTN; PAM sequence: CTT
atgtaggaggaatagtgaca

SEQ ID NO: 343646 - DNA, 20 bp, Artificial Sequence
  Description of Artificial Sequence: Synthetic oligonucleotide
  Target: LAMA2; (+) strand; PAM type: YTN; PAM sequence: TTA
tgtaggaggaatagtgacat

SEQ ID NO: 343647 - DNA, 20 bp, Artificial Sequence
  Description of Artificial Sequence: Synthetic oligonucleotide
  Target: LAMA2; (+) strand; PAM type: YTN; PAM sequence: TTA
actaaactttgcttgtctta

SEQ ID NO: 343648 - DNA, 20 bp, Artificial Sequence
  Description of Artificial Sequence: Synthetic oligonucleotide
  Target: LAMA2; (+) strand; PAM type: YTN; PAM sequence: CTA
aactttgcttgtcttaccca

SEQ ID NO: 343649 - DNA, 20 bp, Artificial Sequence
  Description of Artificial Sequence: Synthetic oligonucleotide
  Target: LAMA2; (+) strand; PAM type: YTN; PAM sequence: CTT
tgcttgtcttacccatgaaa

SEQ ID NO: 343650 - DNA, 20 bp, Artificial Sequence
  Description of Artificial Sequence: Synthetic oligonucleotide
  Target: LAMA2; (+) strand; PAM type: YTN; PAM sequence: TTT
gcttgtcttacccatgaaag

SEQ ID NO: 343651 - DNA, 20 bp, Artificial Sequence
  Description of Artificial Sequence: Synthetic oligonucleotide
  Target: LAMA2; (+) strand; PAM type: YTN; PAM sequence: TTG
cttgtcttacccatgaaaga

SEQ ID NO: 343652 - DNA, 20 bp, Artificial Sequence
  Description of Artificial Sequence: Synthetic oligonucleotide
  Target: LAMA2; (+) strand; PAM type: YTN; PAM sequence: CTT
gtcttacccatgaaagaaca

SEQ ID NO: 343653 - DNA, 20 bp, Artificial Sequence
  Description of Artificial Sequence: Synthetic oligonucleotide
  Target: LAMA2; (+) strand; PAM type: YTN; PAM sequence: TTG
tcttacccatgaaagaacat

SEQ ID NO: 343654 - DNA, 20 bp, Artificial Sequence
  Description of Artificial Sequence: Synthetic oligonucleotide
  Target: LAMA2; (+) strand; PAM type: YTN; PAM sequence: CTT
acccatgaaagaacatcagt

SEQ ID NO: 343655 - DNA, 20 bp, Artificial Sequence
  Description of Artificial Sequence: Synthetic oligonucleotide
  Target: LAMA2; (+) strand; PAM type: YTN; PAM sequence: TTA
cccatgaaagaacatcagtg

SEQ ID NO: 343656 - DNA, 20 bp, Artificial Sequence
  Description of Artificial Sequence: Synthetic oligonucleotide
  Target: LAMA2; (+) strand; PAM type: YTN; PAM sequence: CTC
cctgccaaatatctgataat

SEQ ID NO: 343657 - DNA, 20 bp, Artificial Sequence
  Description of Artificial Sequence: Synthetic oligonucleotide
  Target: LAMA2; (+) strand; PAM type: YTN; PAM sequence: CTG
ccaaatatctgataatgaaa

SEQ ID NO: 343658 - DNA, 20 bp, Artificial Sequence
  Description of Artificial Sequence: Synthetic oligonucleotide
  Target: LAMA2; (+) strand; PAM type: YTN; PAM sequence: CTG
ataatgaaaagaaatgcatt

SEQ ID NO: 343659 - DNA, 20 bp, Artificial Sequence
  Description of Artificial Sequence: Synthetic oligonucleotide
  Target: LAMA2; (+) strand; PAM type: YTN; PAM sequence: TTG
tgatcagcaagataaaatga

SEQ ID NO: 343660 - DNA, 20 bp, Artificial Sequence
  Description of Artificial Sequence: Synthetic oligonucleotide
  Target: LAMA2; (+) strand; PAM type: YTN; PAM sequence: CTG
aaatagctgaacgaatgaat

SEQ ID NO: 343661 - DNA, 20 bp, Artificial Sequence
  Description of Artificial Sequence: Synthetic oligonucleotide
  Target: LAMA2; (+) strand; PAM type: YTN; PAM sequence: CTG
aacgaatgaattaacaacct

SEQ ID NO: 343662 - DNA, 20 bp, Artificial Sequence
  Description of Artificial Sequence: Synthetic oligonucleotide
  Target: LAMA2; (+) strand; PAM type: YTN; PAM sequence: TTA
acaacctattttatagcatt

SEQ ID NO: 343663 - DNA, 20 bp, Artificial Sequence
  Description of Artificial Sequence: Synthetic oligonucleotide
  Target: LAMA2; (+) strand; PAM type: YTN; PAM sequence: CTA
ttttatagcattgtgctgga

SEQ ID NO: 343664 - DNA, 20 bp, Artificial Sequence
  Description of Artificial Sequence: Synthetic oligonucleotide
  Target: LAMA2; (+) strand; PAM type: YTN; PAM sequence: TTT
tatagcattgtgctggagaa

SEQ ID NO: 343665 - DNA, 20 bp, Artificial Sequence
  Description of Artificial Sequence: Synthetic oligonucleotide
  Target: LAMA2; (+) strand; PAM type: YTN; PAM sequence: TTT
atagcattgtgctggagaag

SEQ ID NO: 343666 - DNA, 20 bp, Artificial Sequence
  Description of Artificial Sequence: Synthetic oligonucleotide
  Target: LAMA2; (+) strand; PAM type: YTN; PAM sequence: TTA
tagcattgtgctggagaaga

SEQ ID NO: 343667 - DNA, 20 bp, Artificial Sequence
  Description of Artificial Sequence: Synthetic oligonucleotide
  Target: LAMA2; (+) strand; PAM type: YTN; PAM sequence: TTG
tgctggagaagaatgctcat

SEQ ID NO: 343668 - DNA, 20 bp, Artificial Sequence
  Description of Artificial Sequence: Synthetic oligonucleotide
  Target: LAMA2; (+) strand; PAM type: YTN; PAM sequence: CTG
gagaagaatgctcatcttac

SEQ ID NO: 343669 - DNA, 20 bp, Artificial Sequence
  Description of Artificial Sequence: Synthetic oligonucleotide
  Target: LAMA2; (+) strand; PAM type: YTN; PAM sequence: CTC
atcttacagaggtgattgtg

SEQ ID NO: 343670 - DNA, 20 bp, Artificial Sequence
  Description of Artificial Sequence: Synthetic oligonucleotide
  Target: LAMA2; (+) strand; PAM type: YTN; PAM sequence: CTT
acagaggtgattgtgtctaa

SEQ ID NO: 343671 - DNA, 20 bp, Artificial Sequence
  Description of Artificial Sequence: Synthetic oligonucleotide
  Target: LAMA2; (+) strand; PAM type: YTN; PAM sequence: TTA
cagaggtgattgtgtctaat

SEQ ID NO: 343672 - DNA, 20 bp, Artificial Sequence
  Description of Artificial Sequence: Synthetic oligonucleotide
  Target: LAMA2; (+) strand; PAM type: YTN; PAM sequence: TTG
tgtctaataaaaactgcact

SEQ ID NO: 343673 - DNA, 20 bp, Artificial Sequence
  Description of Artificial Sequence: Synthetic oligonucleotide
  Target: LAMA2; (+) strand; PAM type: YTN; PAM sequence: CTA
ataaaaactgcactggattt

SEQ ID NO: 343674 - DNA, 20 bp, Artificial Sequence
  Description of Artificial Sequence: Synthetic oligonucleotide
  Target: LAMA2; (+) strand; PAM type: YTN; PAM sequence: CTG
cactggatttgaagtaaaaa

SEQ ID NO: 343675 - DNA, 20 bp, Artificial Sequence
  Description of Artificial Sequence: Synthetic oligonucleotide
  Target: LAMA2; (+) strand; PAM type: YTN; PAM sequence: CTG
gatttgaagtaaaaaataaa

SEQ ID NO: 343676 - DNA, 20 bp, Artificial Sequence
  Description of Artificial Sequence: Synthetic oligonucleotide
  Target: LAMA2; (+) strand; PAM type: YTN; PAM sequence: TTT
gaagtaaaaaataaaaaaca

SEQ ID NO: 343677 - DNA, 20 bp, Artificial Sequence
  Description of Artificial Sequence: Synthetic oligonucleotide
  Target: LAMA2; (+) strand; PAM type: YTN; PAM sequence: TTG
aagtaaaaaataaaaaacaa

SEQ ID NO: 343678 - DNA, 20 bp, Artificial Sequence
  Description of Artificial Sequence: Synthetic oligonucleotide
  Target: LAMA2; (+) strand; PAM type: YTN; PAM sequence: CTG
gatctaatttccaattctat

SEQ ID NO: 343679 - DNA, 20 bp, Artificial Sequence
  Description of Artificial Sequence: Synthetic oligonucleotide
  Target: LAMA2; (+) strand; PAM type: YTN; PAM sequence: CTA
atttccaattctatcactcg

SEQ ID NO: 343680 - DNA, 20 bp, Artificial Sequence
  Description of Artificial Sequence: Synthetic oligonucleotide
  Target: LAMA2; (+) strand; PAM type: YTN; PAM sequence: TTT
ccaattctatcactcgtagt

SEQ ID NO: 343681 - DNA, 20 bp, Artificial Sequence
  Description of Artificial Sequence: Synthetic oligonucleotide
  Target: LAMA2; (+) strand; PAM type: YTN; PAM sequence: TTC
caattctatcactcgtagtc

SEQ ID NO: 343682 - DNA, 20 bp, Artificial Sequence
  Description of Artificial Sequence: Synthetic oligonucleotide
  Target: LAMA2; (+) strand; PAM type: YTN; PAM sequence: TTC
tatcactcgtagtctctgta

SEQ ID NO: 343683 - DNA, 20 bp, Artificial Sequence
  Description of Artificial Sequence: Synthetic oligonucleotide
  Target: LAMA2; (+) strand; PAM type: YTN; PAM sequence: CTA
tcactcgtagtctctgtaac

SEQ ID NO: 343684 - DNA, 20 bp, Artificial Sequence
  Description of Artificial Sequence: Synthetic oligonucleotide
  Target: LAMA2; (+) strand; PAM type: YTN; PAM sequence: CTC
gtagtctctgtaacctccta

SEQ ID NO: 343685 - DNA, 20 bp, Artificial Sequence
  Description of Artificial Sequence: Synthetic oligonucleotide
  Target: LAMA2; (+) strand; PAM type: YTN; PAM sequence: CTC
tgtaacctcctagtctcttt

SEQ ID NO: 343686 - DNA, 20 bp, Artificial Sequence
  Description of Artificial Sequence: Synthetic oligonucleotide
  Target: LAMA2; (+) strand; PAM type: YTN; PAM sequence: CTG
taacctcctagtctctttca

SEQ ID NO: 343687 - DNA, 20 bp, Artificial Sequence
  Description of Artificial Sequence: Synthetic oligonucleotide
  Target: LAMA2; (+) strand; PAM type: YTN; PAM sequence: CTC
ctagtctctttcactgggat

SEQ ID NO: 343688 - DNA, 20 bp, Artificial Sequence
  Description of Artificial Sequence: Synthetic oligonucleotide
  Target: LAMA2; (+) strand; PAM type: YTN; PAM sequence: CTA
gtctctttcactgggatctt

SEQ ID NO: 343689 - DNA, 20 bp, Artificial Sequence
  Description of Artificial Sequence: Synthetic oligonucleotide
  Target: LAMA2; (+) strand; PAM type: YTN; PAM sequence: CTC
tttcactgggatcttagatg

SEQ ID NO: 343690 - DNA, 20 bp, Artificial Sequence
  Description of Artificial Sequence: Synthetic oligonucleotide
  Target: LAMA2; (+) strand; PAM type: YTN; PAM sequence: CTT
tcactgggatcttagatgtg

SEQ ID NO: 343691 - DNA, 20 bp, Artificial Sequence
  Description of Artificial Sequence: Synthetic oligonucleotide
  Target: LAMA2; (+) strand; PAM type: YTN; PAM sequence: TTT
cactgggatcttagatgtgc

SEQ ID NO: 343692 - DNA, 20 bp, Artificial Sequence
  Description of Artificial Sequence: Synthetic oligonucleotide
  Target: LAMA2; (+) strand; PAM type: YTN; PAM sequence: TTC
actgggatcttagatgtgcc

SEQ ID NO: 343693 - DNA, 20 bp, Artificial Sequence
  Description of Artificial Sequence: Synthetic oligonucleotide
  Target: LAMA2; (+) strand; PAM type: YTN; PAM sequence: CTG
ggatcttagatgtgccttct

SEQ ID NO: 343694 - DNA, 20 bp, Artificial Sequence
  Description of Artificial Sequence: Synthetic oligonucleotide
  Target: LAMA2; (+) strand; PAM type: YTN; PAM sequence: CTT
agatgtgccttcttagaagc

SEQ ID NO: 343695 - DNA, 20 bp, Artificial Sequence
  Description of Artificial Sequence: Synthetic oligonucleotide
  Target: LAMA2; (+) strand; PAM type: YTN; PAM sequence: TTA
gatgtgccttcttagaagct

SEQ ID NO: 343696 - DNA, 20 bp, Artificial Sequence
  Description of Artificial Sequence: Synthetic oligonucleotide
  Target: LAMA2; (+) strand; PAM type: YTN; PAM sequence: CTT
cttagaagctaaattttctt

SEQ ID NO: 343697 - DNA, 20 bp, Artificial Sequence
  Description of Artificial Sequence: Synthetic oligonucleotide
  Target: LAMA2; (+) strand; PAM type: YTN; PAM sequence: TTC
ttagaagctaaattttctta

SEQ ID NO: 343698 - DNA, 20 bp, Artificial Sequence
  Description of Artificial Sequence: Synthetic oligonucleotide
  Target: LAMA2; (+) strand; PAM type: YTN; PAM sequence: CTT
agaagctaaattttcttatc

SEQ ID NO: 343699 - DNA, 20 bp, Artificial Sequence
  Description of Artificial Sequence: Synthetic oligonucleotide
  Target: LAMA2; (+) strand; PAM type: YTN; PAM sequence: TTA
gaagctaaattttcttatct

SEQ ID NO: 343700 - DNA, 20 bp, Artificial Sequence
  Description of Artificial Sequence: Synthetic oligonucleotide
  Target: LAMA2; (+) strand; PAM type: YTN; PAM sequence: CTA
aattttcttatctgtgagtt

SEQ ID NO: 343701 - DNA, 20 bp, Artificial Sequence
  Description of Artificial Sequence: Synthetic oligonucleotide
  Target: LAMA2; (+) strand; PAM type: YTN; PAM sequence: TTT
tcttatctgtgagttggttt

SEQ ID NO: 343702 - DNA, 20 bp, Artificial Sequence
  Description of Artificial Sequence: Synthetic oligonucleotide
  Target: LAMA2; (+) strand; PAM type: YTN; PAM sequence: TTT
cttatctgtgagttggttta

SEQ ID NO: 343703 - DNA, 20 bp, Artificial Sequence
  Description of Artificial Sequence: Synthetic oligonucleotide
  Target: LAMA2; (+) strand; PAM type: YTN; PAM sequence: TTC
ttatctgtgagttggtttac

SEQ ID NO: 343704 - DNA, 20 bp, Artificial Sequence
  Description of Artificial Sequence: Synthetic oligonucleotide
  Target: LAMA2; (+) strand; PAM type: YTN; PAM sequence: CTT
atctgtgagttggtttacga

SEQ ID NO: 343705 - DNA, 20 bp, Artificial Sequence
  Description of Artificial Sequence: Synthetic oligonucleotide
  Target: LAMA2; (+) strand; PAM type: YTN; PAM sequence: TTA
tctgtgagttggtttacgat

SEQ ID NO: 343706 - DNA, 20 bp, Artificial Sequence
  Description of Artificial Sequence: Synthetic oligonucleotide
  Target: LAMA2; (+) strand; PAM type: YTN; PAM sequence: CTG
tgagttggtttacgattcct

SEQ ID NO: 343707 - DNA, 20 bp, Artificial Sequence
  Description of Artificial Sequence: Synthetic oligonucleotide
  Target: LAMA2; (+) strand; PAM type: YTN; PAM sequence: TTG
gtttacgattccttcttcct

SEQ ID NO: 343708 - DNA, 20 bp, Artificial Sequence
  Description of Artificial Sequence: Synthetic oligonucleotide
  Target: LAMA2; (+) strand; PAM type: YTN; PAM sequence: TTT
acgattccttcttcctctat

SEQ ID NO: 343709 - DNA, 20 bp, Artificial Sequence
  Description of Artificial Sequence: Synthetic oligonucleotide
  Target: LAMA2; (+) strand; PAM type: YTN; PAM sequence: TTA
cgattccttcttcctctatc

SEQ ID NO: 343710 - DNA, 20 bp, Artificial Sequence
  Description of Artificial Sequence: Synthetic oligonucleotide
  Target: LAMA2; (+) strand; PAM type: YTN; PAM sequence: TTC
cttcttcctctatccactca

SEQ ID NO: 343711 - DNA, 20 bp, Artificial Sequence
  Description of Artificial Sequence: Synthetic oligonucleotide
  Target: LAMA2; (+) strand; PAM type: YTN; PAM sequence: CTT
cttcctctatccactcactt

SEQ ID NO: 343712 - DNA, 20 bp, Artificial Sequence
  Description of Artificial Sequence: Synthetic oligonucleotide
  Target: LAMA2; (+) strand; PAM type: YTN; PAM sequence: TTC
ttcctctatccactcacttt

SEQ ID NO: 343713 - DNA, 20 bp, Artificial Sequence
  Description of Artificial Sequence: Synthetic oligonucleotide
  Target: LAMA2; (+) strand; PAM type: YTN; PAM sequence: CTT
cctctatccactcactttat

SEQ ID NO: 343714 - DNA, 20 bp, Artificial Sequence
  Description of Artificial Sequence: Synthetic oligonucleotide
  Target: LAMA2; (+) strand; PAM type: YTN; PAM sequence: TTC
ctctatccactcactttatt

SEQ ID NO: 343715 - DNA, 20 bp, Artificial Sequence
  Description of Artificial Sequence: Synthetic oligonucleotide
  Target: LAMA2; (+) strand; PAM type: YTN; PAM sequence: CTC
tatccactcactttattgtg

SEQ ID NO: 343716 - DNA, 20 bp, Artificial Sequence
  Description of Artificial Sequence: Synthetic oligonucleotide
  Target: LAMA2; (+) strand; PAM type: YTN; PAM sequence: CTA
tccactcactttattgtgat

SEQ ID NO: 343717 - DNA, 20 bp, Artificial Sequence
  Description of Artificial Sequence: Synthetic oligonucleotide
  Target: LAMA2; (+) strand; PAM type: YTN; PAM sequence: CTC
actttattgtgatatcaaaa

SEQ ID NO: 343718 - DNA, 20 bp, Artificial Sequence
  Description of Artificial Sequence: Synthetic oligonucleotide
  Target: LAMA2; (+) strand; PAM type: YTN; PAM sequence: CTT
tattgtgatatcaaaataag

SEQ ID NO: 343719 - DNA, 20 bp, Artificial Sequence
  Description of Artificial Sequence: Synthetic oligonucleotide
  Target: LAMA2; (+) strand; PAM type: YTN; PAM sequence: TTT
attgtgatatcaaaataaga

SEQ ID NO: 343720 - DNA, 20 bp, Artificial Sequence
  Description of Artificial Sequence: Synthetic oligonucleotide
  Target: LAMA2; (+) strand; PAM type: YTN; PAM sequence: TTA
ttgtgatatcaaaataagat

SEQ ID NO: 343721 - DNA, 20 bp, Artificial Sequence
  Description of Artificial Sequence: Synthetic oligonucleotide
  Target: LAMA2; (+) strand; PAM type: YTN; PAM sequence: TTG
tgatatcaaaataagatagc

SEQ ID NO: 343722 - DNA, 20 bp, Artificial Sequence
  Description of Artificial Sequence: Synthetic oligonucleotide
  Target: LAMA2; (+) strand; PAM type: YTN; PAM sequence: CTT
ggagattttaaagctatctg

SEQ ID NO: 343723 - DNA, 20 bp, Artificial Sequence
  Description of Artificial Sequence: Synthetic oligonucleotide
  Target: LAMA2; (+) strand; PAM type: YTN; PAM sequence: TTG
gagattttaaagctatctga

SEQ ID NO: 343724 - DNA, 20 bp, Artificial Sequence
  Description of Artificial Sequence: Synthetic oligonucleotide
  Target: LAMA2; (+) strand; PAM type: YTN; PAM sequence: TTT
taaagctatctgaaaatgtg

SEQ ID NO: 343725 - DNA, 20 bp, Artificial Sequence
  Description of Artificial Sequence: Synthetic oligonucleotide
  Target: LAMA2; (+) strand; PAM type: YTN; PAM sequence: TTT
aaagctatctgaaaatgtgc

SEQ ID NO: 343726 - DNA, 20 bp, Artificial Sequence
  Description of Artificial Sequence: Synthetic oligonucleotide
  Target: LAMA2; (+) strand; PAM type: YTN; PAM sequence: TTA
aagctatctgaaaatgtgcc

SEQ ID NO: 343727 - DNA, 20 bp, Artificial Sequence
  Description of Artificial Sequence: Synthetic oligonucleotide
  Target: LAMA2; (+) strand; PAM type: YTN; PAM sequence: CTA
tctgaaaatgtgccatattt

SEQ ID NO: 343728 - DNA, 20 bp, Artificial Sequence
  Description of Artificial Sequence: Synthetic oligonucleotide
  Target: LAMA2; (+) strand; PAM type: YTN; PAM sequence: CTG
aaaatgtgccatatttaaac

SEQ ID NO: 343729 - DNA, 20 bp, Artificial Sequence
  Description of Artificial Sequence: Synthetic oligonucleotide
  Target: LAMA2; (+) strand; PAM type: YTN; PAM sequence: TTT
aaacatactgaacatagtta

SEQ ID NO: 343730 - DNA, 20 bp, Artificial Sequence
  Description of Artificial Sequence: Synthetic oligonucleotide
  Target: LAMA2; (+) strand; PAM type: YTN; PAM sequence: TTA
aacatactgaacatagttaa

SEQ ID NO: 343731 - DNA, 20 bp, Artificial Sequence
  Description of Artificial Sequence: Synthetic oligonucleotide
  Target: LAMA2; (+) strand; PAM type: YTN; PAM sequence: CTG
aacatagttaaaagacatgc

SEQ ID NO: 343732 - DNA, 20 bp, Artificial Sequence
  Description of Artificial Sequence: Synthetic oligonucleotide
  Target: LAMA2; (+) strand; PAM type: YTN; PAM sequence: TTA
aaagacatgcatctgattaa

SEQ ID NO: 343733 - DNA, 20 bp, Artificial Sequence
  Description of Artificial Sequence: Synthetic oligonucleotide
  Target: LAMA2; (+) strand; PAM type: YTN; PAM sequence: CTG
attaatgtaaaaactatacc

SEQ ID NO: 343734 - DNA, 20 bp, Artificial Sequence
  Description of Artificial Sequence: Synthetic oligonucleotide
  Target: LAMA2; (+) strand; PAM type: YTN; PAM sequence: TTA
atgtaaaaactataccaatt

SEQ ID NO: 343735 - DNA, 20 bp, Artificial Sequence
  Description of Artificial Sequence: Synthetic oligonucleotide
  Target: LAMA2; (+) strand; PAM type: YTN; PAM sequence: CTA
taccaatttattgtagtcca

SEQ ID NO: 343736 - DNA, 20 bp, Artificial Sequence
  Description of Artificial Sequence: Synthetic oligonucleotide
  Target: LAMA2; (+) strand; PAM type: YTN; PAM sequence: TTT
attgtagtccacttggaaag

SEQ ID NO: 343737 - DNA, 20 bp, Artificial Sequence
  Description of Artificial Sequence: Synthetic oligonucleotide
  Target: LAMA2; (+) strand; PAM type: YTN; PAM sequence: TTA
ttgtagtccacttggaaaga

SEQ ID NO: 343738 - DNA, 20 bp, Artificial Sequence
  Description of Artificial Sequence: Synthetic oligonucleotide
  Target: LAMA2; (+) strand; PAM type: YTN; PAM sequence: TTG
tagtccacttggaaagacaa

SEQ ID NO: 343739 - DNA, 20 bp, Artificial Sequence
  Description of Artificial Sequence: Synthetic oligonucleotide
  Target: LAMA2; (+) strand; PAM type: YTN; PAM sequence: CTT
ggaaagacaagtagcttact

SEQ ID NO: 343740 - DNA, 20 bp, Artificial Sequence
  Description of Artificial Sequence: Synthetic oligonucleotide
  Target: LAMA2; (+) strand; PAM type: YTN; PAM sequence: TTG
gaaagacaagtagcttactt

SEQ ID NO: 343741 - DNA, 20 bp, Artificial Sequence
  Description of Artificial Sequence: Synthetic oligonucleotide
  Target: LAMA2; (+) strand; PAM type: YTN; PAM sequence: CTT
acttaaagatctattttgtt

SEQ ID NO: 343742 - DNA, 20 bp, Artificial Sequence
  Description of Artificial Sequence: Synthetic oligonucleotide
  Target: LAMA2; (+) strand; PAM type: YTN; PAM sequence: TTA
cttaaagatctattttgttg

SEQ ID NO: 343743 - DNA, 20 bp, Artificial Sequence
  Description of Artificial Sequence: Synthetic oligonucleotide
  Target: LAMA2; (+) strand; PAM type: YTN; PAM sequence: CTT
aaagatctattttgttgcat

SEQ ID NO: 343744 - DNA, 20 bp, Artificial Sequence
  Description of Artificial Sequence: Synthetic oligonucleotide
  Target: LAMA2; (+) strand; PAM type: YTN; PAM sequence: TTA
aagatctattttgttgcatt

SEQ ID NO: 343745 - DNA, 20 bp, Artificial Sequence
  Description of Artificial Sequence: Synthetic oligonucleotide
  Target: LAMA2; (+) strand; PAM type: YTN; PAM sequence: CTA
ttttgttgcatttaaagttg

SEQ ID NO: 343746 - DNA, 20 bp, Artificial Sequence
  Description of Artificial Sequence: Synthetic oligonucleotide
  Target: LAMA2; (+) strand; PAM type: YTN; PAM sequence: TTT
tgttgcatttaaagttggaa

SEQ ID NO: 343747 - DNA, 20 bp, Artificial Sequence
  Description of Artificial Sequence: Synthetic oligonucleotide
  Target: LAMA2; (+) strand; PAM type: YTN; PAM sequence: TTT
gttgcatttaaagttggaaa

SEQ ID NO: 343748 - DNA, 20 bp, Artificial Sequence
  Description of Artificial Sequence: Synthetic oligonucleotide
  Target: LAMA2; (+) strand; PAM type: YTN; PAM sequence: TTG
ttgcatttaaagttggaaat

SEQ ID NO: 343749 - DNA, 20 bp, Artificial Sequence
  Description of Artificial Sequence: Synthetic oligonucleotide
  Target: LAMA2; (+) strand; PAM type: YTN; PAM sequence: TTG
catttaaagttggaaatgaa

SEQ ID NO: 343750 - DNA, 20 bp, Artificial Sequence
  Description of Artificial Sequence: Synthetic oligonucleotide
  Target: LAMA2; (+) strand; PAM type: YTN; PAM sequence: TTT
aaagttggaaatgaacctga

SEQ ID NO: 343751 - DNA, 20 bp, Artificial Sequence
  Description of Artificial Sequence: Synthetic oligonucleotide
  Target: LAMA2; (+) strand; PAM type: YTN; PAM sequence: TTA
aagttggaaatgaacctgat

SEQ ID NO: 343752 - DNA, 20 bp, Artificial Sequence
  Description of Artificial Sequence: Synthetic oligonucleotide
  Target: LAMA2; (+) strand; PAM type: YTN; PAM sequence: TTG
gaaatgaacctgatataaat

SEQ ID NO: 343753 - DNA, 20 bp, Artificial Sequence
  Description of Artificial Sequence: Synthetic oligonucleotide
  Target: LAMA2; (+) strand; PAM type: YTN; PAM sequence: CTG
atataaatctcttcccaact

SEQ ID NO: 343754 - DNA, 20 bp, Artificial Sequence
  Description of Artificial Sequence: Synthetic oligonucleotide
  Target: LAMA2; (+) strand; PAM type: YTN; PAM sequence: CTC
ttcccaactactgtgatcct

SEQ ID NO: 343755 - DNA, 20 bp, Artificial Sequence
  Description of Artificial Sequence: Synthetic oligonucleotide
  Target: LAMA2; (+) strand; PAM type: YTN; PAM sequence: CTT
cccaactactgtgatcctgt

SEQ ID NO: 343756 - DNA, 20 bp, Artificial Sequence
  Description of Artificial Sequence: Synthetic oligonucleotide
  Target: LAMA2; (+) strand; PAM type: YTN; PAM sequence: TTC
ccaactactgtgatcctgtc

SEQ ID NO: 343757 - DNA, 20 bp, Artificial Sequence
  Description of Artificial Sequence: Synthetic oligonucleotide
  Target: LAMA2; (+) strand; PAM type: YTN; PAM sequence: CTA
ctgtgatcctgtctttaata

SEQ ID NO: 343758 - DNA, 20 bp, Artificial Sequence
  Description of Artificial Sequence: Synthetic oligonucleotide
  Target: LAMA2; (+) strand; PAM type: YTN; PAM sequence: CTG
tgatcctgtctttaatacaa

SEQ ID NO: 343759 - DNA, 20 bp, Artificial Sequence
  Description of Artificial Sequence: Synthetic oligonucleotide
  Target: LAMA2; (+) strand; PAM type: YTN; PAM sequence: CTG
tctttaatacaactttaata

SEQ ID NO: 343760 - DNA, 20 bp, Artificial Sequence
  Description of Artificial Sequence: Synthetic oligonucleotide
  Target: LAMA2; (+) strand; PAM type: YTN; PAM sequence: CTT
taatacaactttaatagact

SEQ ID NO: 343761 - DNA, 20 bp, Artificial Sequence
  Description of Artificial Sequence: Synthetic oligonucleotide
  Target: LAMA2; (+) strand; PAM type: YTN; PAM sequence: TTT
aatacaactttaatagactg

SEQ ID NO: 343762 - DNA, 20 bp, Artificial Sequence
  Description of Artificial Sequence: Synthetic oligonucleotide
  Target: LAMA2; (+) strand; PAM type: YTN; PAM sequence: TTA
atacaactttaatagactgg

SEQ ID NO: 343763 - DNA, 20 bp, Artificial Sequence
  Description of Artificial Sequence: Synthetic oligonucleotide
  Target: LAMA2; (+) strand; PAM type: YTN; PAM sequence: CTT
taatagactggaacatatgc

SEQ ID NO: 343764 - DNA, 20 bp, Artificial Sequence
  Description of Artificial Sequence: Synthetic oligonucleotide
  Target: LAMA2; (+) strand; PAM type: YTN; PAM sequence: TTT
aatagactggaacatatgcc

SEQ ID NO: 343765 - DNA, 20 bp, Artificial Sequence
  Description of Artificial Sequence: Synthetic oligonucleotide
  Target: LAMA2; (+) strand; PAM type: YTN; PAM sequence: TTA
atagactggaacatatgcca

SEQ ID NO: 343766 - DNA, 20 bp, Artificial Sequence
  Description of Artificial Sequence: Synthetic oligonucleotide
  Target: LAMA2; (+) strand; PAM type: YTN; PAM sequence: CTG
gaacatatgccaagagtata

SEQ ID NO: 343767 - DNA, 20 bp, Artificial Sequence
  Description of Artificial Sequence: Synthetic oligonucleotide
  Target: LAMA2; (+) strand; PAM type: YTN; PAM sequence: CTC
tctaagaatcaaagactgat

SEQ ID NO: 343768 - DNA, 20 bp, Artificial Sequence
  Description of Artificial Sequence: Synthetic oligonucleotide
  Target: LAMA2; (+) strand; PAM type: YTN; PAM sequence: CTC
taagaatcaaagactgatga

SEQ ID NO: 343769 - DNA, 20 bp, Artificial Sequence
  Description of Artificial Sequence: Synthetic oligonucleotide
  Target: LAMA2; (+) strand; PAM type: YTN; PAM sequence: CTA
agaatcaaagactgatgaga

SEQ ID NO: 343770 - DNA, 20 bp, Artificial Sequence
  Description of Artificial Sequence: Synthetic oligonucleotide
  Target: LAMA2; (+) strand; PAM type: YTN; PAM sequence: CTG
atgagaaacctctgaaagct

SEQ ID NO: 343771 - DNA, 20 bp, Artificial Sequence
  Description of Artificial Sequence: Synthetic oligonucleotide
  Target: LAMA2; (+) strand; PAM type: YTN; PAM sequence: CTC
tgaaagctgtgaaaagtgtg

SEQ ID NO: 343772 - DNA, 20 bp, Artificial Sequence
  Description of Artificial Sequence: Synthetic oligonucleotide
  Target: LAMA2; (+) strand; PAM type: YTN; PAM sequence: CTG
aaagctgtgaaaagtgtgtt

SEQ ID NO: 343773 - DNA, 20 bp, Artificial Sequence
  Description of Artificial Sequence: Synthetic oligonucleotide
  Target: LAMA2; (+) strand; PAM type: YTN; PAM sequence: CTG
tgaaaagtgtgttattgttt

SEQ ID NO: 343774 - DNA, 20 bp, Artificial Sequence
  Description of Artificial Sequence: Synthetic oligonucleotide
  Target: LAMA2; (+) strand; PAM type: YTN; PAM sequence: TTA
ttgtttttaattgcttccct

SEQ ID NO: 343775 - DNA, 20 bp, Artificial Sequence
  Description of Artificial Sequence: Synthetic oligonucleotide
  Target: LAMA2; (+) strand; PAM type: YTN; PAM sequence: TTG
tttttaattgcttccctaaa

SEQ ID NO: 343776 - DNA, 20 bp, Artificial Sequence
  Description of Artificial Sequence: Synthetic oligonucleotide
  Target: LAMA2; (+) strand; PAM type: YTN; PAM sequence: TTT
ttaattgcttccctaaagaa

SEQ ID NO: 343777 - DNA, 20 bp, Artificial Sequence
  Description of Artificial Sequence: Synthetic oligonucleotide
  Target: LAMA2; (+) strand; PAM type: YTN; PAM sequence: TTT
taattgcttccctaaagaat

SEQ ID NO: 343778 - DNA, 20 bp, Artificial Sequence
  Description of Artificial Sequence: Synthetic oligonucleotide
  Target: LAMA2; (+) strand; PAM type: YTN; PAM sequence: TTT
aattgcttccctaaagaatg

SEQ ID NO: 343779 - DNA, 20 bp, Artificial Sequence
  Description of Artificial Sequence: Synthetic oligonucleotide
  Target: LAMA2; (+) strand; PAM type: YTN; PAM sequence: TTA
attgcttccctaaagaatga

SEQ ID NO: 343780 - DNA, 20 bp, Artificial Sequence
  Description of Artificial Sequence: Synthetic oligonucleotide
  Target: LAMA2; (+) strand; PAM type: YTN; PAM sequence: TTG
cttccctaaagaatgagaga

SEQ ID NO: 343781 - DNA, 20 bp, Artificial Sequence
  Description of Artificial Sequence: Synthetic oligonucleotide
  Target: LAMA2; (+) strand; PAM type: YTN; PAM sequence: CTT
ccctaaagaatgagagaagg

SEQ ID NO: 343782 - DNA, 20 bp, Artificial Sequence
  Description of Artificial Sequence: Synthetic oligonucleotide
  Target: LAMA2; (+) strand; PAM type: YTN; PAM sequence: TTC
cctaaagaatgagagaaggc

SEQ ID NO: 343783 - DNA, 20 bp, Artificial Sequence
  Description of Artificial Sequence: Synthetic oligonucleotide
  Target: LAMA2; (+) strand; PAM type: YTN; PAM sequence: CTA
aagaatgagagaaggcaaag

SEQ ID NO: 343784 - DNA, 20 bp, Artificial Sequence
  Description of Artificial Sequence: Synthetic oligonucleotide
  Target: LAMA2; (+) strand; PAM type: YTN; PAM sequence: CTG
ggaccctagtggtattgatg

SEQ ID NO: 343785 - DNA, 20 bp, Artificial Sequence
  Description of Artificial Sequence: Synthetic oligonucleotide
  Target: LAMA2; (+) strand; PAM type: YTN; PAM sequence: CTA
gtggtattgatgggctgttg

SEQ ID NO: 343786 - DNA, 20 bp, Artificial Sequence
  Description of Artificial Sequence: Synthetic oligonucleotide
  Target: LAMA2; (+) strand; PAM type: YTN; PAM sequence: TTG
atgggctgttgctccttatc

SEQ ID NO: 343787 - DNA, 20 bp, Artificial Sequence
  Description of Artificial Sequence: Synthetic oligonucleotide
  Target: LAMA2; (+) strand; PAM type: YTN; PAM sequence: CTG
ttgctccttatccatgatgt

SEQ ID NO: 343788 - DNA, 20 bp, Artificial Sequence
  Description of Artificial Sequence: Synthetic oligonucleotide
  Target: LAMA2; (+) strand; PAM type: YTN; PAM sequence: TTG
ctccttatccatgatgtgta

SEQ ID NO: 343789 - DNA, 20 bp, Artificial Sequence
  Description of Artificial Sequence: Synthetic oligonucleotide
  Target: LAMA2; (+) strand; PAM type: YTN; PAM sequence: CTC
cttatccatgatgtgtaaga

SEQ ID NO: 343790 - DNA, 20 bp, Artificial Sequence
  Description of Artificial Sequence: Synthetic oligonucleotide
  Target: LAMA2; (+) strand; PAM type: YTN; PAM sequence: CTT
atccatgatgtgtaagagtg

SEQ ID NO: 343791 - DNA, 20 bp, Artificial Sequence
  Description of Artificial Sequence: Synthetic oligonucleotide
  Target: LAMA2; (+) strand; PAM type: YTN; PAM sequence: TTA
tccatgatgtgtaagagtga

SEQ ID NO: 343792 - DNA, 20 bp, Artificial Sequence
  Description of Artificial Sequence: Synthetic oligonucleotide
  Target: LAMA2; (+) strand; PAM type: YTN; PAM sequence: CTA
agtctgaaaactttttaagg

SEQ ID NO: 343793 - DNA, 20 bp, Artificial Sequence
  Description of Artificial Sequence: Synthetic oligonucleotide
  Target: LAMA2; (+) strand; PAM type: YTN; PAM sequence: CTG
aaaactttttaaggggaaaa

SEQ ID NO: 343794 - DNA, 20 bp, Artificial Sequence
  Description of Artificial Sequence: Synthetic oligonucleotide
  Target: LAMA2; (+) strand; PAM type: YTN; PAM sequence: CTT
tttaaggggaaaatagcagt

SEQ ID NO: 343795 - DNA, 20 bp, Artificial Sequence
  Description of Artificial Sequence: Synthetic oligonucleotide
  Target: LAMA2; (+) strand; PAM type: YTN; PAM sequence: TTT
ttaaggggaaaatagcagta

SEQ ID NO: 343796 - DNA, 20 bp, Artificial Sequence
  Description of Artificial Sequence: Synthetic oligonucleotide
  Target: LAMA2; (+) strand; PAM type: YTN; PAM sequence: TTT
taaggggaaaatagcagtat

SEQ ID NO: 343797 - DNA, 20 bp, Artificial Sequence
  Description of Artificial Sequence: Synthetic oligonucleotide
  Target: LAMA2; (+) strand; PAM type: YTN; PAM sequence: TTT
aaggggaaaatagcagtata

SEQ ID NO: 343798 - DNA, 20 bp, Artificial Sequence
  Description of Artificial Sequence: Synthetic oligonucleotide
  Target: LAMA2; (+) strand; PAM type: YTN; PAM sequence: TTA
aggggaaaatagcagtatag

SEQ ID NO: 343799 - DNA, 20 bp, Artificial Sequence
  Description of Artificial Sequence: Synthetic oligonucleotide
  Target: LAMA2; (+) strand; PAM type: YTN; PAM sequence: CTG
aaagttttgttgtaatattt

SEQ ID NO: 343800 - DNA, 20 bp, Artificial Sequence
  Description of Artificial Sequence: Synthetic oligonucleotide
  Target: LAMA2; (+) strand; PAM type: YTN; PAM sequence: TTT
tgttgtaatatttaaaaatg

SEQ ID NO: 343801 - DNA, 20 bp, Artificial Sequence
  Description of Artificial Sequence: Synthetic oligonucleotide
  Target: LAMA2; (+) strand; PAM type: YTN; PAM sequence: TTT
gttgtaatatttaaaaatgc

SEQ ID NO: 343802 - DNA, 20 bp, Artificial Sequence
  Description of Artificial Sequence: Synthetic oligonucleotide
  Target: LAMA2; (+) strand; PAM type: YTN; PAM sequence: TTG
ttgtaatatttaaaaatgcc

SEQ ID NO: 343803 - DNA, 20 bp, Artificial Sequence
  Description of Artificial Sequence: Synthetic oligonucleotide
  Target: LAMA2; (+) strand; PAM type: YTN; PAM sequence: TTG
taatatttaaaaatgccaat

SEQ ID NO: 343804 - DNA, 20 bp, Artificial Sequence
  Description of Artificial Sequence: Synthetic oligonucleotide
  Target: LAMA2; (+) strand; PAM type: YTN; PAM sequence: TTT
aaaaatgccaattaaaaaat

SEQ ID NO: 343805 - DNA, 20 bp, Artificial Sequence
  Description of Artificial Sequence: Synthetic oligonucleotide
  Target: LAMA2; (+) strand; PAM type: YTN; PAM sequence: TTA
aaaatgccaattaaaaaata

SEQ ID NO: 343806 - DNA, 20 bp, Artificial Sequence
  Description of Artificial Sequence: Synthetic oligonucleotide
  Target: LAMA2; (+) strand; PAM type: YTN; PAM sequence: TTA
aaaaatagtgcaaaattgta

SEQ ID NO: 343807 - DNA, 20 bp, Artificial Sequence
  Description of Artificial Sequence: Synthetic oligonucleotide
  Target: LAMA2; (+) strand; PAM type: YTN; PAM sequence: TTG
tataacgcaattatatgaga

SEQ ID NO: 343808 - DNA, 20 bp, Artificial Sequence
  Description of Artificial Sequence: Synthetic oligonucleotide
  Target: LAMA2; (+) strand; PAM type: YTN; PAM sequence: TTA
tatgagaattgttttgggat

SEQ ID NO: 343809 - DNA, 20 bp, Artificial Sequence
  Description of Artificial Sequence: Synthetic oligonucleotide
  Target: LAMA2; (+) strand; PAM type: YTN; PAM sequence: TTG
ttttgggatcagcggtccaa

SEQ ID NO: 343810 - DNA, 20 bp, Artificial Sequence
  Description of Artificial Sequence: Synthetic oligonucleotide
  Target: LAMA2; (+) strand; PAM type: YTN; PAM sequence: TTT
tgggatcagcggtccaaaga

SEQ ID NO: 343811 - DNA, 20 bp, Artificial Sequence
  Description of Artificial Sequence: Synthetic oligonucleotide
  Target: LAMA2; (+) strand; PAM type: YTN; PAM sequence: TTT
gggatcagcggtccaaagac

SEQ ID NO: 343812 - DNA, 20 bp, Artificial Sequence
  Description of Artificial Sequence: Synthetic oligonucleotide
  Target: LAMA2; (+) strand; PAM type: YTN; PAM sequence: TTG
ggatcagcggtccaaagaca

SEQ ID NO: 343813 - DNA, 20 bp, Artificial Sequence
  Description of Artificial Sequence: Synthetic oligonucleotide
  Target: LAMA2; (+) strand; PAM type: YTN; PAM sequence: CTC
ttctctccatgttcttttca

SEQ ID NO: 343814 - DNA, 20 bp, Artificial Sequence
  Description of Artificial Sequence: Synthetic oligonucleotide
  Target: LAMA2; (+) strand; PAM type: YTN; PAM sequence: CTT
ctctccatgttcttttcact

SEQ ID NO: 343815 - DNA, 20 bp, Artificial Sequence
  Description of Artificial Sequence: Synthetic oligonucleotide
  Target: LAMA2; (+) strand; PAM type: YTN; PAM sequence: TTC
tctccatgttcttttcactg

SEQ ID NO: 343816 - DNA, 20 bp, Artificial Sequence
  Description of Artificial Sequence: Synthetic oligonucleotide
  Target: LAMA2; (+) strand; PAM type: YTN; PAM sequence: CTC
tccatgttcttttcactgct

SEQ ID NO: 343817 - DNA, 20 bp, Artificial Sequence
  Description of Artificial Sequence: Synthetic oligonucleotide
  Target: LAMA2; (+) strand; PAM type: YTN; PAM sequence: CTC
catgttcttttcactgctag

SEQ ID NO: 343818 - DNA, 20 bp, Artificial Sequence
  Description of Artificial Sequence: Synthetic oligonucleotide
  Target: LAMA2; (+) strand; PAM type: YTN; PAM sequence: TTC
ttttcactgctagcagcaat

SEQ ID NO: 343819 - DNA, 20 bp, Artificial Sequence
  Description of Artificial Sequence: Synthetic oligonucleotide
  Target: LAMA2; (+) strand; PAM type: YTN; PAM sequence: CTT
ttcactgctagcagcaatta

SEQ ID NO: 343820 - DNA, 20 bp, Artificial Sequence
  Description of Artificial Sequence: Synthetic oligonucleotide
  Target: LAMA2; (+) strand; PAM type: YTN; PAM sequence: TTT
tcactgctagcagcaattaa

SEQ ID NO: 343821 - DNA, 20 bp, Artificial Sequence
  Description of Artificial Sequence: Synthetic oligonucleotide
  Target: LAMA2; (+) strand; PAM type: YTN; PAM sequence: TTT
cactgctagcagcaattaac

SEQ ID NO: 343822 - DNA, 20 bp, Artificial Sequence
  Description of Artificial Sequence: Synthetic oligonucleotide
  Target: LAMA2; (+) strand; PAM type: YTN; PAM sequence: TTC
actgctagcagcaattaaca

SEQ ID NO: 343823 - DNA, 20 bp, Artificial Sequence
  Description of Artificial Sequence: Synthetic oligonucleotide
  Target: LAMA2; (+) strand; PAM type: YTN; PAM sequence: CTG
ctagcagcaattaacatttg

SEQ ID NO: 343824 - DNA, 20 bp, Artificial Sequence
  Description of Artificial Sequence: Synthetic oligonucleotide
  Target: LAMA2; (+) strand; PAM type: YTN; PAM sequence: CTA
gcagcaattaacatttggca

SEQ ID NO: 343825 - DNA, 20 bp, Artificial Sequence
  Description of Artificial Sequence: Synthetic oligonucleotide
  Target: LAMA2; (+) strand; PAM type: YTN; PAM sequence: TTA
acatttggcatatatcctcc

SEQ ID NO: 343826 - DNA, 20 bp, Artificial Sequence
  Description of Artificial Sequence: Synthetic oligonucleotide
  Target: LAMA2; (+) strand; PAM type: YTN; PAM sequence: TTT
ggcatatatcctcctagatt

SEQ ID NO: 343827 - DNA, 20 bp, Artificial Sequence
  Description of Artificial Sequence: Synthetic oligonucleotide
  Target: LAMA2; (+) strand; PAM type: YTN; PAM sequence: TTG
gcatatatcctcctagattt

SEQ ID NO: 343828 - DNA, 20 bp, Artificial Sequence
  Description of Artificial Sequence: Synthetic oligonucleotide
  Target: LAMA2; (+) strand; PAM type: YTN; PAM sequence: CTC
ctagatttcattttttatgc

SEQ ID NO: 343829 - DNA, 20 bp, Artificial Sequence
  Description of Artificial Sequence: Synthetic oligonucleotide
  Target: LAMA2; (+) strand; PAM type: YTN; PAM sequence: CTA
gatttcattttttatgcata

SEQ ID NO: 343830 - DNA, 20 bp, Artificial Sequence
  Description of Artificial Sequence: Synthetic oligonucleotide
  Target: LAMA2; (+) strand; PAM type: YTN; PAM sequence: TTT
cattttttatgcataagtga

SEQ ID NO: 343831 - DNA, 20 bp, Artificial Sequence
  Description of Artificial Sequence: Synthetic oligonucleotide
  Target: LAMA2; (+) strand; PAM type: YTN; PAM sequence: TTC
attttttatgcataagtgaa

SEQ ID NO: 343832 - DNA, 20 bp, Artificial Sequence
  Description of Artificial Sequence: Synthetic oligonucleotide
  Target: LAMA2; (+) strand; PAM type: YTN; PAM sequence: TTT
tttatgcataagtgaagaca

SEQ ID NO: 343833 - DNA, 20 bp, Artificial Sequence
  Description of Artificial Sequence: Synthetic oligonucleotide
  Target: LAMA2; (+) strand; PAM type: YTN; PAM sequence: TTT
ttatgcataagtgaagacat

SEQ ID NO: 343834 - DNA, 20 bp, Artificial Sequence
  Description of Artificial Sequence: Synthetic oligonucleotide
  Target: LAMA2; (+) strand; PAM type: YTN; PAM sequence: TTT
tatgcataagtgaagacata

SEQ ID NO: 343835 - DNA, 20 bp, Artificial Sequence
  Description of Artificial Sequence: Synthetic oligonucleotide
  Target: LAMA2; (+) strand; PAM type: YTN; PAM sequence: TTT
atgcataagtgaagacatat

SEQ ID NO: 343836 - DNA, 20 bp, Artificial Sequence
  Description of Artificial Sequence: Synthetic oligonucleotide
  Target: LAMA2; (+) strand; PAM type: YTN; PAM sequence: TTA
tgcataagtgaagacatatc

SEQ ID NO: 343837 - DNA, 20 bp, Artificial Sequence
  Description of Artificial Sequence: Synthetic oligonucleotide
  Target: LAMA2; (+) strand; PAM type: YTN; PAM sequence: TTC
ttgttatattacatagttct

SEQ ID NO: 343838 - DNA, 20 bp, Artificial Sequence
  Description of Artificial Sequence: Synthetic oligonucleotide
  Target: LAMA2; (+) strand; PAM type: YTN; PAM sequence: CTT
gttatattacatagttcttg

SEQ ID NO: 343839 - DNA, 20 bp, Artificial Sequence
  Description of Artificial Sequence: Synthetic oligonucleotide
  Target: LAMA2; (+) strand; PAM type: YTN; PAM sequence: TTG
ttatattacatagttcttgt

SEQ ID NO: 343840 - DNA, 20 bp, Artificial Sequence
  Description of Artificial Sequence: Synthetic oligonucleotide
  Target: LAMA2; (+) strand; PAM type: YTN; PAM sequence: TTA
tattacatagttcttgtttt

SEQ ID NO: 343841 - DNA, 20 bp, Artificial Sequence
  Description of Artificial Sequence: Synthetic oligonucleotide
  Target: LAMA2; (+) strand; PAM type: YTN; PAM sequence: TTA
catagttcttgttttaacac

SEQ ID NO: 343842 - DNA, 20 bp, Artificial Sequence
  Description of Artificial Sequence: Synthetic oligonucleotide
  Target: LAMA2; (+) strand; PAM type: YTN; PAM sequence: TTC
ttgttttaacacaagtggaa

SEQ ID NO: 343843 - DNA, 20 bp, Artificial Sequence
  Description of Artificial Sequence: Synthetic oligonucleotide
  Target: LAMA2; (+) strand; PAM type: YTN; PAM sequence: CTT
gttttaacacaagtggaatt

SEQ ID NO: 343844 - DNA, 20 bp, Artificial Sequence
  Description of Artificial Sequence: Synthetic oligonucleotide
  Target: LAMA2; (+) strand; PAM type: YTN; PAM sequence: TTG
ttttaacacaagtggaatta

SEQ ID NO: 343845 - DNA, 20 bp, Artificial Sequence
  Description of Artificial Sequence: Synthetic oligonucleotide
  Target: LAMA2; (+) strand; PAM type: YTN; PAM sequence: TTT
taacacaagtggaattatcc

SEQ ID NO: 343846 - DNA, 20 bp, Artificial Sequence
  Description of Artificial Sequence: Synthetic oligonucleotide
  Target: LAMA2; (+) strand; PAM type: YTN; PAM sequence: TTT
aacacaagtggaattatcct

SEQ ID NO: 343847 - DNA, 20 bp, Artificial Sequence
  Description of Artificial Sequence: Synthetic oligonucleotide
  Target: LAMA2; (+) strand; PAM type: YTN; PAM sequence: TTA
acacaagtggaattatcctc

SEQ ID NO: 343848 - DNA, 20 bp, Artificial Sequence
  Description of Artificial Sequence: Synthetic oligonucleotide
  Target: LAMA2; (+) strand; PAM type: YTN; PAM sequence: TTA
tcctctacatggtgtttatg

SEQ ID NO: 343849 - DNA, 20 bp, Artificial Sequence
  Description of Artificial Sequence: Synthetic oligonucleotide
  Target: LAMA2; (+) strand; PAM type: YTN; PAM sequence: CTC
tacatggtgtttatgatttg

SEQ ID NO: 343850 - DNA, 20 bp, Artificial Sequence
  Description of Artificial Sequence: Synthetic oligonucleotide
  Target: LAMA2; (+) strand; PAM type: YTN; PAM sequence: CTA
catggtgtttatgatttgtt

SEQ ID NO: 343851 - DNA, 20 bp, Artificial Sequence
  Description of Artificial Sequence: Synthetic oligonucleotide
  Target: LAMA2; (+) strand; PAM type: YTN; PAM sequence: TTT
atgatttgtttttgcactta

SEQ ID NO: 343852 - DNA, 20 bp, Artificial Sequence
  Description of Artificial Sequence: Synthetic oligonucleotide
  Target: LAMA2; (+) strand; PAM type: YTN; PAM sequence: TTA
tgatttgtttttgcacttat

SEQ ID NO: 343853 - DNA, 20 bp, Artificial Sequence
  Description of Artificial Sequence: Synthetic oligonucleotide
  Target: LAMA2; (+) strand; PAM type: YTN; PAM sequence: TTT
gtttttgcacttatgaggtt

SEQ ID NO: 343854 - DNA, 20 bp, Artificial Sequence
  Description of Artificial Sequence: Synthetic oligonucleotide
  Target: LAMA2; (+) strand; PAM type: YTN; PAM sequence: TTG
tttttgcacttatgaggttg

SEQ ID NO: 343855 - DNA, 20 bp, Artificial Sequence
  Description of Artificial Sequence: Synthetic oligonucleotide
  Target: LAMA2; (+) strand; PAM type: YTN; PAM sequence: TTT
ttgcacttatgaggttgtgt

SEQ ID NO: 343856 - DNA, 20 bp, Artificial Sequence
  Description of Artificial Sequence: Synthetic oligonucleotide
  Target: LAMA2; (+) strand; PAM type: YTN; PAM sequence: TTT
tgcacttatgaggttgtgtt

SEQ ID NO: 343857 - DNA, 20 bp, Artificial Sequence
  Description of Artificial Sequence: Synthetic oligonucleotide
  Target: LAMA2; (+) strand; PAM type: YTN; PAM sequence: TTT
gcacttatgaggttgtgttt

SEQ ID NO: 343858 - DNA, 20 bp, Artificial Sequence
  Description of Artificial Sequence: Synthetic oligonucleotide
  Target: LAMA2; (+) strand; PAM type: YTN; PAM sequence: TTG
cacttatgaggttgtgttta

SEQ ID NO: 343859 - DNA, 20 bp, Artificial Sequence
  Description of Artificial Sequence: Synthetic oligonucleotide
  Target: LAMA2; (+) strand; PAM type: YTN; PAM sequence: CTT
atgaggttgtgtttaaaatg

SEQ ID NO: 343860 - DNA, 20 bp, Artificial Sequence
  Description of Artificial Sequence: Synthetic oligonucleotide
  Target: LAMA2; (+) strand; PAM type: YTN; PAM sequence: TTA
tgaggttgtgtttaaaatgt

SEQ ID NO: 343861 - DNA, 20 bp, Artificial Sequence
  Description of Artificial Sequence: Synthetic oligonucleotide
  Target: LAMA2; (+) strand; PAM type: YTN; PAM sequence: TTG
tgtttaaaatgttgtacatt

SEQ ID NO: 343862 - DNA, 20 bp, Artificial Sequence
  Description of Artificial Sequence: Synthetic oligonucleotide
  Target: LAMA2; (+) strand; PAM type: YTN; PAM sequence: TTT
aaaatgttgtacattttttt

SEQ ID NO: 343863 - DNA, 20 bp, Artificial Sequence
  Description of Artificial Sequence: Synthetic oligonucleotide
  Target: LAMA2; (+) strand; PAM type: YTN; PAM sequence: TTA
aaatgttgtacattttttta

SEQ ID NO: 343864 - DNA, 20 bp, Artificial Sequence
  Description of Artificial Sequence: Synthetic oligonucleotide
  Target: LAMA2; (+) strand; PAM type: YTN; PAM sequence: TTG
tacatttttttaattttagc

SEQ ID NO: 343865 - DNA, 20 bp, Artificial Sequence
  Description of Artificial Sequence: Synthetic oligonucleotide
  Target: LAMA2; (+) strand; PAM type: YTN; PAM sequence: TTT
ttttaattttagcattggta

SEQ ID NO: 343866 - DNA, 20 bp, Artificial Sequence
  Description of Artificial Sequence: Synthetic oligonucleotide
  Target: LAMA2; (+) strand; PAM type: YTN; PAM sequence: TTT
tttaattttagcattggtaa

SEQ ID NO: 343867 - DNA, 20 bp, Artificial Sequence
  Description of Artificial Sequence: Synthetic oligonucleotide
  Target: LAMA2; (+) strand; PAM type: YTN; PAM sequence: TTT
ttaattttagcattggtaaa

SEQ ID NO: 343868 - DNA, 20 bp, Artificial Sequence
  Description of Artificial Sequence: Synthetic oligonucleotide
  Target: LAMA2; (+) strand; PAM type: YTN; PAM sequence: TTT
taattttagcattggtaaat

SEQ ID NO: 343869 - DNA, 20 bp, Artificial Sequence
  Description of Artificial Sequence: Synthetic oligonucleotide
  Target: LAMA2; (+) strand; PAM type: YTN; PAM sequence: TTT
aattttagcattggtaaatt

SEQ ID NO: 343870 - DNA, 20 bp, Artificial Sequence
  Description of Artificial Sequence: Synthetic oligonucleotide
  Target: LAMA2; (+) strand; PAM type: YTN; PAM sequence: TTA
attttagcattggtaaattt

SEQ ID NO: 343871 - DNA, 20 bp, Artificial Sequence
  Description of Artificial Sequence: Synthetic oligonucleotide
  Target: LAMA2; (+) strand; PAM type: YTN; PAM sequence: TTT
tagcattggtaaatttactt

SEQ ID NO: 343872 - DNA, 20 bp, Artificial Sequence
  Description of Artificial Sequence: Synthetic oligonucleotide
  Target: LAMA2; (+) strand; PAM type: YTN; PAM sequence: TTT
agcattggtaaatttacttt

SEQ ID NO: 343873 - DNA, 20 bp, Artificial Sequence
  Description of Artificial Sequence: Synthetic oligonucleotide
  Target: LAMA2; (+) strand; PAM type: YTN; PAM sequence: TTA
gcattggtaaatttactttg

SEQ ID NO: 343874 - DNA, 20 bp, Artificial Sequence
  Description of Artificial Sequence: Synthetic oligonucleotide
  Target: LAMA2; (+) strand; PAM type: YTN; PAM sequence: TTG
gtaaatttactttgttttta

SEQ ID NO: 343875 - DNA, 20 bp, Artificial Sequence
  Description of Artificial Sequence: Synthetic oligonucleotide
  Target: LAMA2; (+) strand; PAM type: YTN; PAM sequence: TTT
actttgtttttattttaaca

SEQ ID NO: 343876 - DNA, 20 bp, Artificial Sequence
  Description of Artificial Sequence: Synthetic oligonucleotide
  Target: LAMA2; (+) strand; PAM type: YTN; PAM sequence: TTA
ctttgtttttattttaacat

SEQ ID NO: 343877 - DNA, 20 bp, Artificial Sequence
  Description of Artificial Sequence: Synthetic oligonucleotide
  Target: LAMA2; (+) strand; PAM type: YTN; PAM sequence: CTT
tgtttttattttaacatagt

SEQ ID NO: 343878 - DNA, 20 bp, Artificial Sequence
  Description of Artificial Sequence: Synthetic oligonucleotide
  Target: LAMA2; (+) strand; PAM type: YTN; PAM sequence: TTT
gtttttattttaacatagta

SEQ ID NO: 343879 - DNA, 20 bp, Artificial Sequence
  Description of Artificial Sequence: Synthetic oligonucleotide
  Target: LAMA2; (+) strand; PAM type: YTN; PAM sequence: TTG
tttttattttaacatagtat

SEQ ID NO: 343880 - DNA, 20 bp, Artificial Sequence
  Description of Artificial Sequence: Synthetic oligonucleotide
  Target: LAMA2; (+) strand; PAM type: YTN; PAM sequence: TTT
ttattttaacatagtattcc

SEQ ID NO: 343881 - DNA, 20 bp, Artificial Sequence
  Description of Artificial Sequence: Synthetic oligonucleotide
  Target: LAMA2; (+) strand; PAM type: YTN; PAM sequence: TTT
tattttaacatagtattcca

SEQ ID NO: 343882 - DNA, 20 bp, Artificial Sequence
  Description of Artificial Sequence: Synthetic oligonucleotide
  Target: LAMA2; (+) strand; PAM type: YTN; PAM sequence: TTT
attttaacatagtattccac

SEQ ID NO: 343883 - DNA, 20 bp, Artificial Sequence
  Description of Artificial Sequence: Synthetic oligonucleotide
  Target: LAMA2; (+) strand; PAM type: YTN; PAM sequence: TTA
ttttaacatagtattccact

SEQ ID NO: 343884 - DNA, 20 bp, Artificial Sequence
  Description of Artificial Sequence: Synthetic oligonucleotide
  Target: LAMA2; (+) strand; PAM type: YTN; PAM sequence: TTT
taacatagtattccactgaa

SEQ ID NO: 343885 - DNA, 20 bp, Artificial Sequence
  Description of Artificial Sequence: Synthetic oligonucleotide
  Target: LAMA2; (+) strand; PAM type: YTN; PAM sequence: TTT
aacatagtattccactgaaa

SEQ ID NO: 343886 - DNA, 20 bp, Artificial Sequence
  Description of Artificial Sequence: Synthetic oligonucleotide
  Target: LAMA2; (+) strand; PAM type: YTN; PAM sequence: TTA
acatagtattccactgaaat

SEQ ID NO: 343887 - DNA, 20 bp, Artificial Sequence
  Description of Artificial Sequence: Synthetic oligonucleotide
  Target: LAMA2; (+) strand; PAM type: YTN; PAM sequence: TTC
cactgaaatgtaattatact

SEQ ID NO: 343888 - DNA, 20 bp, Artificial Sequence
  Description of Artificial Sequence: Synthetic oligonucleotide
  Target: LAMA2; (+) strand; PAM type: YTN; PAM sequence: CTG
aaatgtaattatactgcaaa

SEQ ID NO: 343889 - DNA, 20 bp, Artificial Sequence
  Description of Artificial Sequence: Synthetic oligonucleotide
  Target: LAMA2; (+) strand; PAM type: YTN; PAM sequence: TTA
tactgcaaattatttatcat

SEQ ID NO: 343890 - DNA, 20 bp, Artificial Sequence
  Description of Artificial Sequence: Synthetic oligonucleotide
  Target: LAMA2; (+) strand; PAM type: YTN; PAM sequence: CTG
caaattatttatcatatctc

SEQ ID NO: 343891 - DNA, 20 bp, Artificial Sequence
  Description of Artificial Sequence: Synthetic oligonucleotide
  Target: LAMA2; (+) strand; PAM type: YTN; PAM sequence: TTA
tttatcatatctccactgac

SEQ ID NO: 343892 - DNA, 20 bp, Artificial Sequence
  Description of Artificial Sequence: Synthetic oligonucleotide
  Target: LAMA2; (+) strand; PAM type: YTN; PAM sequence: TTT
atcatatctccactgacggt

SEQ ID NO: 343893 - DNA, 20 bp, Artificial Sequence
  Description of Artificial Sequence: Synthetic oligonucleotide
  Target: LAMA2; (+) strand; PAM type: YTN; PAM sequence: TTA
tcatatctccactgacggtc

SEQ ID NO: 343894 - DNA, 20 bp, Artificial Sequence
  Description of Artificial Sequence: Synthetic oligonucleotide
  Target: LAMA2; (+) strand; PAM type: YTN; PAM sequence: CTC
cactgacggtccttcaggtt

SEQ ID NO: 343895 - DNA, 20 bp, Artificial Sequence
  Description of Artificial Sequence: Synthetic oligonucleotide
  Target: LAMA2; (+) strand; PAM type: YTN; PAM sequence: CTG
acggtccttcaggttatttc

SEQ ID NO: 343896 - DNA, 20 bp, Artificial Sequence
  Description of Artificial Sequence: Synthetic oligonucleotide
  Target: LAMA2; (+) strand; PAM type: YTN; PAM sequence: CTT
caggttatttctaacttttc

SEQ ID NO: 343897 - DNA, 20 bp, Artificial Sequence
  Description of Artificial Sequence: Synthetic oligonucleotide
  Target: LAMA2; (+) strand; PAM type: YTN; PAM sequence: TTC
aggttatttctaacttttct

SEQ ID NO: 343898 - DNA, 20 bp, Artificial Sequence
  Description of Artificial Sequence: Synthetic oligonucleotide
  Target: LAMA2; (+) strand; PAM type: YTN; PAM sequence: TTA
tttctaacttttcttgatta

SEQ ID NO: 343899 - DNA, 20 bp, Artificial Sequence
  Description of Artificial Sequence: Synthetic oligonucleotide
  Target: LAMA2; (+) strand; PAM type: YTN; PAM sequence: TTT
ctaacttttcttgattataa

SEQ ID NO: 343900 - DNA, 20 bp, Artificial Sequence
  Description of Artificial Sequence: Synthetic oligonucleotide
  Target: LAMA2; (+) strand; PAM type: YTN; PAM sequence: TTC
taacttttcttgattataag

SEQ ID NO: 343901 - DNA, 20 bp, Artificial Sequence
  Description of Artificial Sequence: Synthetic oligonucleotide
  Target: LAMA2; (+) strand; PAM type: YTN; PAM sequence: CTA
acttttcttgattataagca

SEQ ID NO: 343902 - DNA, 20 bp, Artificial Sequence
  Description of Artificial Sequence: Synthetic oligonucleotide
  Target: LAMA2; (+) strand; PAM type: YTN; PAM sequence: CTT
ttcttgattataagcaatgt

SEQ ID NO: 343903 - DNA, 20 bp, Artificial Sequence
  Description of Artificial Sequence: Synthetic oligonucleotide
  Target: LAMA2; (+) strand; PAM type: YTN; PAM sequence: TTT
tcttgattataagcaatgtt

SEQ ID NO: 343904 - DNA, 20 bp, Artificial Sequence
  Description of Artificial Sequence: Synthetic oligonucleotide
  Target: LAMA2; (+) strand; PAM type: YTN; PAM sequence: TTT
cttgattataagcaatgttg

SEQ ID NO: 343905 - DNA, 20 bp, Artificial Sequence
  Description of Artificial Sequence: Synthetic oligonucleotide
  Target: LAMA2; (+) strand; PAM type: YTN; PAM sequence: TTC
ttgattataagcaatgttgt

SEQ ID NO: 343906 - DNA, 20 bp, Artificial Sequence
  Description of Artificial Sequence: Synthetic oligonucleotide
  Target: LAMA2; (+) strand; PAM type: YTN; PAM sequence: CTT
gattataagcaatgttgtaa

SEQ ID NO: 343907 - DNA, 20 bp, Artificial Sequence
  Description of Artificial Sequence: Synthetic oligonucleotide
  Target: LAMA2; (+) strand; PAM type: YTN; PAM sequence: TTG
attataagcaatgttgtaat

SEQ ID NO: 343908 - DNA, 20 bp, Artificial Sequence
  Description of Artificial Sequence: Synthetic oligonucleotide
  Target: LAMA2; (+) strand; PAM type: YTN; PAM sequence: TTA
taagcaatgttgtaatgact

SEQ ID NO: 343909 - DNA, 20 bp, Artificial Sequence
  Description of Artificial Sequence: Synthetic oligonucleotide
  Target: LAMA2; (+) strand; PAM type: YTN; PAM sequence: TTG
taatgactatcttgtacaag

SEQ ID NO: 343910 - DNA, 20 bp, Artificial Sequence
  Description of Artificial Sequence: Synthetic oligonucleotide
  Target: LAMA2; (+) strand; PAM type: YTN; PAM sequence: CTA
tcttgtacaagtatgtttat

SEQ ID NO: 343911 - DNA, 20 bp, Artificial Sequence
  Description of Artificial Sequence: Synthetic oligonucleotide
  Target: LAMA2; (+) strand; PAM type: YTN; PAM sequence: CTT
gtacaagtatgtttatactc

SEQ ID NO: 343912 - DNA, 20 bp, Artificial Sequence
  Description of Artificial Sequence: Synthetic oligonucleotide
  Target: LAMA2; (+) strand; PAM type: YTN; PAM sequence: TTG
tacaagtatgtttatactct

SEQ ID NO: 343913 - DNA, 20 bp, Artificial Sequence
  Description of Artificial Sequence: Synthetic oligonucleotide
  Target: LAMA2; (+) strand; PAM type: YTN; PAM sequence: TTT
atactcttccattaatactt

SEQ ID NO: 343914 - DNA, 20 bp, Artificial Sequence
  Description of Artificial Sequence: Synthetic oligonucleotide
  Target: LAMA2; (+) strand; PAM type: YTN; PAM sequence: TTA
tactcttccattaatactta

SEQ ID NO: 343915 - DNA, 20 bp, Artificial Sequence
  Description of Artificial Sequence: Synthetic oligonucleotide
  Target: LAMA2; (+) strand; PAM type: YTN; PAM sequence: CTC
ttccattaatacttatgtaa

SEQ ID NO: 343916 - DNA, 20 bp, Artificial Sequence
  Description of Artificial Sequence: Synthetic oligonucleotide
  Target: LAMA2; (+) strand; PAM type: YTN; PAM sequence: CTT
ccattaatacttatgtaaat

SEQ ID NO: 343917 - DNA, 20 bp, Artificial Sequence
  Description of Artificial Sequence: Synthetic oligonucleotide
  Target: LAMA2; (+) strand; PAM type: YTN; PAM sequence: TTC
cattaatacttatgtaaata

SEQ ID NO: 343918 - DNA, 20 bp, Artificial Sequence
  Description of Artificial Sequence: Synthetic oligonucleotide
  Target: LAMA2; (+) strand; PAM type: YTN; PAM sequence: TTA
atacttatgtaaataaatct

SEQ ID NO: 343919 - DNA, 20 bp, Artificial Sequence
  Description of Artificial Sequence: Synthetic oligonucleotide
  Target: LAMA2; (+) strand; PAM type: YTN; PAM sequence: CTT
atgtaaataaatctgataag

SEQ ID NO: 343920 - DNA, 20 bp, Artificial Sequence
  Description of Artificial Sequence: Synthetic oligonucleotide
  Target: LAMA2; (+) strand; PAM type: YTN; PAM sequence: TTA
tgtaaataaatctgataagg

SEQ ID NO: 343921 - DNA, 20 bp, Artificial Sequence
  Description of Artificial Sequence: Synthetic oligonucleotide
  Target: LAMA2; (+) strand; PAM type: YTN; PAM sequence: CTG
ataagggaaattgtaggcta

SEQ ID NO: 343922 - DNA, 20 bp, Artificial Sequence
  Description of Artificial Sequence: Synthetic oligonucleotide
  Target: LAMA2; (+) strand; PAM type: YTN; PAM sequence: TTG
taggctaaagcatatattat

SEQ ID NO: 343923 - DNA, 20 bp, Artificial Sequence
  Description of Artificial Sequence: Synthetic oligonucleotide
  Target: LAMA2; (+) strand; PAM type: YTN; PAM sequence: CTA
aagcatatattatacatttt

SEQ ID NO: 343924 - DNA, 20 bp, Artificial Sequence
  Description of Artificial Sequence: Synthetic oligonucleotide
  Target: LAMA2; (+) strand; PAM type: YTN; PAM sequence: TTA
tacattttattttatttttt

SEQ ID NO: 343925 - DNA, 20 bp, Artificial Sequence
  Description of Artificial Sequence: Synthetic oligonucleotide
  Target: LAMA2; (+) strand; PAM type: YTN; PAM sequence: TTT
tattttattttttattaatt

SEQ ID NO: 343926 - DNA, 20 bp, Artificial Sequence
  Description of Artificial Sequence: Synthetic oligonucleotide
  Target: LAMA2; (+) strand; PAM type: YTN; PAM sequence: TTT
attttattttttattaatta

SEQ ID NO: 343927 - DNA, 20 bp, Artificial Sequence
  Description of Artificial Sequence: Synthetic oligonucleotide
  Target: LAMA2; (+) strand; PAM type: YTN; PAM sequence: TTA
ttttattttttattaattaa

SEQ ID NO: 343928 - DNA, 20 bp, Artificial Sequence
  Description of Artificial Sequence: Synthetic oligonucleotide
  Target: LAMA2; (+) strand; PAM type: YTN; PAM sequence: TTT
tattttttattaattaatta

SEQ ID NO: 343929 - DNA, 20 bp, Artificial Sequence
  Description of Artificial Sequence: Synthetic oligonucleotide
  Target: LAMA2; (+) strand; PAM type: YTN; PAM sequence: TTT
attttttattaattaattaa

SEQ ID NO: 343930 - DNA, 20 bp, Artificial Sequence
  Description of Artificial Sequence: Synthetic oligonucleotide
  Target: LAMA2; (+) strand; PAM type: YTN; PAM sequence: TTA
ttttttattaattaattaat

SEQ ID NO: 343931 - DNA, 20 bp, Artificial Sequence
  Description of Artificial Sequence: Synthetic oligonucleotide
  Target: LAMA2; (+) strand; PAM type: YTN; PAM sequence: TTT
tttattaattaattaattaa

SEQ ID NO: 343932 - DNA, 20 bp, Artificial Sequence
  Description of Artificial Sequence: Synthetic oligonucleotide
  Target: LAMA2; (+) strand; PAM type: YTN; PAM sequence: TTT
ttattaattaattaattaat

SEQ ID NO: 343933 - DNA, 20 bp, Artificial Sequence
  Description of Artificial Sequence: Synthetic oligonucleotide
  Target: LAMA2; (+) strand; PAM type: YTN; PAM sequence: TTT
tattaattaattaattaatt

SEQ ID NO: 343934 - DNA, 20 bp, Artificial Sequence
  Description of Artificial Sequence: Synthetic oligonucleotide
  Target: LAMA2; (+) strand; PAM type: YTN; PAM sequence: TTT
attaattaattaattaatta

SEQ ID NO: 343935 - DNA, 20 bp, Artificial Sequence
  Description of Artificial Sequence: Synthetic oligonucleotide
  Target: LAMA2; (+) strand; PAM type: YTN; PAM sequence: TTA
ttaattaattaattaattat

SEQ ID NO: 343936 - DNA, 20 bp, Artificial Sequence
  Description of Artificial Sequence: Synthetic oligonucleotide
  Target: LAMA2; (+) strand; PAM type: YTN; PAM sequence: TTA
attaattaattaattattta

SEQ ID NO: 343937 - DNA, 20 bp, Artificial Sequence
  Description of Artificial Sequence: Synthetic oligonucleotide
  Target: LAMA2; (+) strand; PAM type: YTN; PAM sequence: TTA
attaattaattatttattta

SEQ ID NO: 343938 - DNA, 20 bp, Artificial Sequence
  Description of Artificial Sequence: Synthetic oligonucleotide
  Target: LAMA2; (+) strand; PAM type: YTN; PAM sequence: TTA
attaattatttatttatttt

SEQ ID NO: 343939 - DNA, 20 bp, Artificial Sequence
  Description of Artificial Sequence: Synthetic oligonucleotide
  Target: LAMA2; (+) strand; PAM type: YTN; PAM sequence: TTA
attatttatttatttttgag

SEQ ID NO: 343940 - DNA, 20 bp, Artificial Sequence
  Description of Artificial Sequence: Synthetic oligonucleotide
  Target: LAMA2; (+) strand; PAM type: YTN; PAM sequence: TTA
tttatttatttttgagacgg

SEQ ID NO: 343941 - DNA, 20 bp, Artificial Sequence
  Description of Artificial Sequence: Synthetic oligonucleotide
  Target: LAMA2; (+) strand; PAM type: YTN; PAM sequence: TTT
atttatttttgagacggagt

SEQ ID NO: 343942 - DNA, 20 bp, Artificial Sequence
  Description of Artificial Sequence: Synthetic oligonucleotide
  Target: LAMA2; (+) strand; PAM type: YTN; PAM sequence: TTA
tttatttttgagacggagtc

SEQ ID NO: 343943 - DNA, 20 bp, Artificial Sequence
  Description of Artificial Sequence: Synthetic oligonucleotide
  Target: LAMA2; (+) strand; PAM type: YTN; PAM sequence: TTT
atttttgagacggagtctcg

SEQ ID NO: 343944 - DNA, 20 bp, Artificial Sequence
  Description of Artificial Sequence: Synthetic oligonucleotide
  Target: LAMA2; (+) strand; PAM type: YTN; PAM sequence: TTA
tttttgagacggagtctcga

SEQ ID NO: 343945 - DNA, 20 bp, Artificial Sequence
  Description of Artificial Sequence: Synthetic oligonucleotide
  Target: LAMA2; (+) strand; PAM type: YTN; PAM sequence: TTT
ttgagacggagtctcgatct

SEQ ID NO: 343946 - DNA, 20 bp, Artificial Sequence
  Description of Artificial Sequence: Synthetic oligonucleotide
  Target: LAMA2; (+) strand; PAM type: YTN; PAM sequence: TTT
tgagacggagtctcgatctg

SEQ ID NO: 343947 - DNA, 20 bp, Artificial Sequence
  Description of Artificial Sequence: Synthetic oligonucleotide
  Target: LAMA2; (+) strand; PAM type: YTN; PAM sequence: TTT
gagacggagtctcgatctgt

SEQ ID NO: 343948 - DNA, 20 bp, Artificial Sequence
  Description of Artificial Sequence: Synthetic oligonucleotide
  Target: LAMA2; (+) strand; PAM type: YTN; PAM sequence: TTG
agacggagtctcgatctgtc

SEQ ID NO: 343949 - DNA, 20 bp, Artificial Sequence
  Description of Artificial Sequence: Synthetic oligonucleotide
  Target: LAMA2; (+) strand; PAM type: YTN; PAM sequence: CTC
gatctgtcgcccaggctgga

SEQ ID NO: 343950 - DNA, 20 bp, Artificial Sequence
  Description of Artificial Sequence: Synthetic oligonucleotide
  Target: LAMA2; (+) strand; PAM type: YTN; PAM sequence: CTG
tcgcccaggctggactgcag

SEQ ID NO: 343951 - DNA, 20 bp, Artificial Sequence
  Description of Artificial Sequence: Synthetic oligonucleotide
  Target: LAMA2; (+) strand; PAM type: YTN; PAM sequence: CTG
gactgcagtggctcgatctt

SEQ ID NO: 343952 - DNA, 20 bp, Artificial Sequence
  Description of Artificial Sequence: Synthetic oligonucleotide
  Target: LAMA2; (+) strand; PAM type: YTN; PAM sequence: CTG
cagtggctcgatcttggctc

SEQ ID NO: 343953 - DNA, 20 bp, Artificial Sequence
  Description of Artificial Sequence: Synthetic oligonucleotide
  Target: LAMA2; (+) strand; PAM type: YTN; PAM sequence: CTC
gatcttggctcactgcaagc

SEQ ID NO: 343954 - DNA, 20 bp, Artificial Sequence
  Description of Artificial Sequence: Synthetic oligonucleotide
  Target: LAMA2; (+) strand; PAM type: YTN; PAM sequence: CTT
ggctcactgcaagctccgcc

SEQ ID NO: 343955 - DNA, 20 bp, Artificial Sequence
  Description of Artificial Sequence: Synthetic oligonucleotide
  Target: LAMA2; (+) strand; PAM type: YTN; PAM sequence: TTG
gctcactgcaagctccgcct

SEQ ID NO: 343956 - DNA, 20 bp, Artificial Sequence
  Description of Artificial Sequence: Synthetic oligonucleotide
  Target: LAMA2; (+) strand; PAM type: YTN; PAM sequence: CTC
actgcaagctccgcctcccg

SEQ ID NO: 343957 - DNA, 20 bp, Artificial Sequence
  Description of Artificial Sequence: Synthetic oligonucleotide
  Target: LAMA2; (+) strand; PAM type: YTN; PAM sequence: CTG
caagctccgcctcccgggtt

SEQ ID NO: 343958 - DNA, 20 bp, Artificial Sequence
  Description of Artificial Sequence: Synthetic oligonucleotide
  Target: LAMA2; (+) strand; PAM type: YTN; PAM sequence: CTC
cgcctcccgggttcacgcca

SEQ ID NO: 343959 - DNA, 20 bp, Artificial Sequence
  Description of Artificial Sequence: Synthetic oligonucleotide
  Target: LAMA2; (+) strand; PAM type: YTN; PAM sequence: CTC
ccgggttcacgccattctcc

SEQ ID NO: 343960 - DNA, 20 bp, Artificial Sequence
  Description of Artificial Sequence: Synthetic oligonucleotide
  Target: LAMA2; (+) strand; PAM type: YTN; PAM sequence: TTC
acgccattctcctgcctcag

SEQ ID NO: 343961 - DNA, 20 bp, Artificial Sequence
  Description of Artificial Sequence: Synthetic oligonucleotide
  Target: LAMA2; (+) strand; PAM type: YTN; PAM sequence: TTC
tcctgcctcagcctcctgag

SEQ ID NO: 343962 - DNA, 20 bp, Artificial Sequence
  Description of Artificial Sequence: Synthetic oligonucleotide
  Target: LAMA2; (+) strand; PAM type: YTN; PAM sequence: CTC
ctgcctcagcctcctgagta

SEQ ID NO: 343963 - DNA, 20 bp, Artificial Sequence
  Description of Artificial Sequence: Synthetic oligonucleotide
  Target: LAMA2; (+) strand; PAM type: YTN; PAM sequence: CTG
cctcagcctcctgagtagct

SEQ ID NO: 343964 - DNA, 20 bp, Artificial Sequence
  Description of Artificial Sequence: Synthetic oligonucleotide
  Target: LAMA2; (+) strand; PAM type: YTN; PAM sequence: CTC
agcctcctgagtagctggaa

SEQ ID NO: 343965 - DNA, 20 bp, Artificial Sequence
  Description of Artificial Sequence: Synthetic oligonucleotide
  Target: LAMA2; (+) strand; PAM type: YTN; PAM sequence: CTC
ctgagtagctggaactacag

SEQ ID NO: 343966 - DNA, 20 bp, Artificial Sequence
  Description of Artificial Sequence: Synthetic oligonucleotide
  Target: LAMA2; (+) strand; PAM type: YTN; PAM sequence: CTG
agtagctggaactacaggcg

SEQ ID NO: 343967 - DNA, 20 bp, Artificial Sequence
  Description of Artificial Sequence: Synthetic oligonucleotide
  Target: LAMA2; (+) strand; PAM type: YTN; PAM sequence: CTG
gaactacaggcgcccgccac

SEQ ID NO: 343968 - DNA, 20 bp, Artificial Sequence
  Description of Artificial Sequence: Synthetic oligonucleotide
  Target: LAMA2; (+) strand; PAM type: YTN; PAM sequence: CTA
caggcgcccgccaccacgcc

SEQ ID NO: 343969 - DNA, 20 bp, Artificial Sequence
  Description of Artificial Sequence: Synthetic oligonucleotide
  Target: LAMA2; (+) strand; PAM type: YTN; PAM sequence: CTG
gctaatttttttgtattttt

SEQ ID NO: 343970 - DNA, 20 bp, Artificial Sequence
  Description of Artificial Sequence: Synthetic oligonucleotide
  Target: LAMA2; (+) strand; PAM type: YTN; PAM sequence: CTA
atttttttgtatttttagta

SEQ ID NO: 343971 - DNA, 20 bp, Artificial Sequence
  Description of Artificial Sequence: Synthetic oligonucleotide
  Target: LAMA2; (+) strand; PAM type: YTN; PAM sequence: TTT
ttttgtatttttagtacaga

SEQ ID NO: 343972 - DNA, 20 bp, Artificial Sequence
  Description of Artificial Sequence: Synthetic oligonucleotide
  Target: LAMA2; (+) strand; PAM type: YTN; PAM sequence: TTT
tttgtatttttagtacagac

SEQ ID NO: 343973 - DNA, 20 bp, Artificial Sequence
  Description of Artificial Sequence: Synthetic oligonucleotide
  Target: LAMA2; (+) strand; PAM type: YTN; PAM sequence: TTT
ttgtatttttagtacagacg

SEQ ID NO: 343974 - DNA, 20 bp, Artificial Sequence
  Description of Artificial Sequence: Synthetic oligonucleotide
  Target: LAMA2; (+) strand; PAM type: YTN; PAM sequence: TTT
tgtatttttagtacagacgg

SEQ ID NO: 343975 - DNA, 20 bp, Artificial Sequence
  Description of Artificial Sequence: Synthetic oligonucleotide
  Target: LAMA2; (+) strand; PAM type: YTN; PAM sequence: TTT
gtatttttagtacagacggg

SEQ ID NO: 343976 - DNA, 20 bp, Artificial Sequence
  Description of Artificial Sequence: Synthetic oligonucleotide
  Target: LAMA2; (+) strand; PAM type: YTN; PAM sequence: TTG
tatttttagtacagacgggg

SEQ ID NO: 343977 - DNA, 20 bp, Artificial Sequence
  Description of Artificial Sequence: Synthetic oligonucleotide
  Target: LAMA2; (+) strand; PAM type: YTN; PAM sequence: TTT
ttagtacagacggggtttca

SEQ ID NO: 343978 - DNA, 20 bp, Artificial Sequence
  Description of Artificial Sequence: Synthetic oligonucleotide
  Target: LAMA2; (+) strand; PAM type: YTN; PAM sequence: TTT
tagtacagacggggtttcac

SEQ ID NO: 343979 - DNA, 20 bp, Artificial Sequence
  Description of Artificial Sequence: Synthetic oligonucleotide
  Target: LAMA2; (+) strand; PAM type: YTN; PAM sequence: TTT
agtacagacggggtttcacc

SEQ ID NO: 343980 - DNA, 20 bp, Artificial Sequence
  Description of Artificial Sequence: Synthetic oligonucleotide
  Target: LAMA2; (+) strand; PAM type: YTN; PAM sequence: TTA
gtacagacggggtttcaccg

SEQ ID NO: 343981 - DNA, 20 bp, Artificial Sequence
  Description of Artificial Sequence: Synthetic oligonucleotide
  Target: LAMA2; (+) strand; PAM type: YTN; PAM sequence: TTT
caccgtgttagccaggatgg

SEQ ID NO: 343982 - DNA, 20 bp, Artificial Sequence
  Description of Artificial Sequence: Synthetic oligonucleotide
  Target: LAMA2; (+) strand; PAM type: YTN; PAM sequence: TTC
accgtgttagccaggatggt

SEQ ID NO: 343983 - DNA, 20 bp, Artificial Sequence
  Description of Artificial Sequence: Synthetic oligonucleotide
  Target: LAMA2; (+) strand; PAM type: YTN; PAM sequence: TTA
gccaggatggtctcgatctt

SEQ ID NO: 343984 - DNA, 20 bp, Artificial Sequence
  Description of Artificial Sequence: Synthetic oligonucleotide
  Target: LAMA2; (+) strand; PAM type: YTN; PAM sequence: CTC
gatcttctgacctcgtgatc

SEQ ID NO: 343985 - DNA, 20 bp, Artificial Sequence
  Description of Artificial Sequence: Synthetic oligonucleotide
  Target: LAMA2; (+) strand; PAM type: YTN; PAM sequence: CTT
ctgacctcgtgatctgccca

SEQ ID NO: 343986 - DNA, 20 bp, Artificial Sequence
  Description of Artificial Sequence: Synthetic oligonucleotide
  Target: LAMA2; (+) strand; PAM type: YTN; PAM sequence: TTC
tgacctcgtgatctgcccac

SEQ ID NO: 343987 - DNA, 20 bp, Artificial Sequence
  Description of Artificial Sequence: Synthetic oligonucleotide
  Target: LAMA2; (+) strand; PAM type: YTN; PAM sequence: CTG
acctcgtgatctgcccacct

SEQ ID NO: 343988 - DNA, 20 bp, Artificial Sequence
  Description of Artificial Sequence: Synthetic oligonucleotide
  Target: LAMA2; (+) strand; PAM type: YTN; PAM sequence: CTC
gtgatctgcccacctcggcc

SEQ ID NO: 343989 - DNA, 20 bp, Artificial Sequence
  Description of Artificial Sequence: Synthetic oligonucleotide
  Target: LAMA2; (+) strand; PAM type: YTN; PAM sequence: CTG
cccacctcggcctcttaaag

SEQ ID NO: 343990 - DNA, 20 bp, Artificial Sequence
  Description of Artificial Sequence: Synthetic oligonucleotide
  Target: LAMA2; (+) strand; PAM type: YTN; PAM sequence: CTC
ggcctcttaaagtgctgaga

SEQ ID NO: 343991 - DNA, 20 bp, Artificial Sequence
  Description of Artificial Sequence: Synthetic oligonucleotide
  Target: LAMA2; (+) strand; PAM type: YTN; PAM sequence: CTC
ttaaagtgctgagattacag

SEQ ID NO: 343992 - DNA, 20 bp, Artificial Sequence
  Description of Artificial Sequence: Synthetic oligonucleotide
  Target: LAMA2; (+) strand; PAM type: YTN; PAM sequence: CTT
aaagtgctgagattacaggc

SEQ ID NO: 343993 - DNA, 20 bp, Artificial Sequence
  Description of Artificial Sequence: Synthetic oligonucleotide
  Target: LAMA2; (+) strand; PAM type: YTN; PAM sequence: TTA
aagtgctgagattacaggcg

SEQ ID NO: 343994 - DNA, 20 bp, Artificial Sequence
  Description of Artificial Sequence: Synthetic oligonucleotide
  Target: LAMA2; (+) strand; PAM type: YTN; PAM sequence: CTG
agattacaggcgtgagccac

SEQ ID NO: 343995 - DNA, 20 bp, Artificial Sequence
  Description of Artificial Sequence: Synthetic oligonucleotide
  Target: LAMA2; (+) strand; PAM type: YTN; PAM sequence: TTA
caggcgtgagccactgctcc

SEQ ID NO: 343996 - DNA, 20 bp, Artificial Sequence
  Description of Artificial Sequence: Synthetic oligonucleotide
  Target: LAMA2; (+) strand; PAM type: YTN; PAM sequence: CTG
ctcccggcccacattttatt

SEQ ID NO: 343997 - DNA, 20 bp, Artificial Sequence
  Description of Artificial Sequence: Synthetic oligonucleotide
  Target: LAMA2; (+) strand; PAM type: YTN; PAM sequence: CTC
ccggcccacattttattttt

SEQ ID NO: 343998 - DNA, 20 bp, Artificial Sequence
  Description of Artificial Sequence: Synthetic oligonucleotide
  Target: LAMA2; (+) strand; PAM type: YTN; PAM sequence: TTT
tatttttgatatgcactggc

SEQ ID NO: 343999 - DNA, 20 bp, Artificial Sequence
  Description of Artificial Sequence: Synthetic oligonucleotide
  Target: LAMA2; (+) strand; PAM type: YTN; PAM sequence: TTT
atttttgatatgcactggca

SEQ ID NO: 344000 - DNA, 20 bp, Artificial Sequence
  Description of Artificial Sequence: Synthetic oligonucleotide
  Target: LAMA2; (+) strand; PAM type: YTN; PAM sequence: TTA
tttttgatatgcactggcac

SEQ ID NO: 344001 - DNA, 20 bp, Artificial Sequence
  Description of Artificial Sequence: Synthetic oligonucleotide
  Target: LAMA2; (+) strand; PAM type: YTN; PAM sequence: TTT
ttgatatgcactggcacaaa

SEQ ID NO: 344002 - DNA, 20 bp, Artificial Sequence
  Description of Artificial Sequence: Synthetic oligonucleotide
  Target: LAMA2; (+) strand; PAM type: YTN; PAM sequence: TTT
tgatatgcactggcacaaaa

SEQ ID NO: 344003 - DNA, 20 bp, Artificial Sequence
  Description of Artificial Sequence: Synthetic oligonucleotide
  Target: LAMA2; (+) strand; PAM type: YTN; PAM sequence: TTT
gatatgcactggcacaaaat

SEQ ID NO: 344004 - DNA, 20 bp, Artificial Sequence
  Description of Artificial Sequence: Synthetic oligonucleotide
  Target: LAMA2; (+) strand; PAM type: YTN; PAM sequence: TTG
atatgcactggcacaaaatt

SEQ ID NO: 344005 - DNA, 20 bp, Artificial Sequence
  Description of Artificial Sequence: Synthetic oligonucleotide
  Target: LAMA2; (+) strand; PAM type: YTN; PAM sequence: CTG
gcacaaaattgtgtgaagaa

SEQ ID NO: 344006 - DNA, 20 bp, Artificial Sequence
  Description of Artificial Sequence: Synthetic oligonucleotide
  Target: LAMA2; (+) strand; PAM type: YTN; PAM sequence: TTG
tgtgaagaaccaattaataa

SEQ ID NO: 344007 - DNA, 20 bp, Artificial Sequence
  Description of Artificial Sequence: Synthetic oligonucleotide
  Target: LAMA2; (+) strand; PAM type: YTN; PAM sequence: TTA
ataaatatgtctaaggaata

SEQ ID NO: 344008 - DNA, 20 bp, Artificial Sequence
  Description of Artificial Sequence: Synthetic oligonucleotide
  Target: LAMA2; (+) strand; PAM type: YTN; PAM sequence: CTA
aggaatatagtttccattgt

SEQ ID NO: 344009 - DNA, 20 bp, Artificial Sequence
  Description of Artificial Sequence: Synthetic oligonucleotide
  Target: LAMA2; (+) strand; PAM type: YTN; PAM sequence: TTT
ccattgttttaattatcaaa

SEQ ID NO: 344010 - DNA, 20 bp, Artificial Sequence
  Description of Artificial Sequence: Synthetic oligonucleotide
  Target: LAMA2; (+) strand; PAM type: YTN; PAM sequence: TTC
cattgttttaattatcaaaa

SEQ ID NO: 344011 - DNA, 20 bp, Artificial Sequence
  Description of Artificial Sequence: Synthetic oligonucleotide
  Target: LAMA2; (+) strand; PAM type: YTN; PAM sequence: TTG
ttttaattatcaaaaaatta

SEQ ID NO: 344012 - DNA, 20 bp, Artificial Sequence
  Description of Artificial Sequence: Synthetic oligonucleotide
  Target: LAMA2; (+) strand; PAM type: YTN; PAM sequence: TTT
taattatcaaaaaattatca

SEQ ID NO: 344013 - DNA, 20 bp, Artificial Sequence
  Description of Artificial Sequence: Synthetic oligonucleotide
  Target: LAMA2; (+) strand; PAM type: YTN; PAM sequence: TTT
aattatcaaaaaattatcac

SEQ ID NO: 344014 - DNA, 20 bp, Artificial Sequence
  Description of Artificial Sequence: Synthetic oligonucleotide
  Target: LAMA2; (+) strand; PAM type: YTN; PAM sequence: TTA
attatcaaaaaattatcact

SEQ ID NO: 344015 - DNA, 20 bp, Artificial Sequence
  Description of Artificial Sequence: Synthetic oligonucleotide
  Target: LAMA2; (+) strand; PAM type: YTN; PAM sequence: TTA
tcaaaaaattatcacttaca

SEQ ID NO: 344016 - DNA, 20 bp, Artificial Sequence
  Description of Artificial Sequence: Synthetic oligonucleotide
  Target: LAMA2; (+) strand; PAM type: YTN; PAM sequence: TTA
tcacttacatgggctctagt

SEQ ID NO: 344017 - DNA, 20 bp, Artificial Sequence
  Description of Artificial Sequence: Synthetic oligonucleotide
  Target: LAMA2; (+) strand; PAM type: YTN; PAM sequence: CTT
acatgggctctagttatacc

SEQ ID NO: 344018 - DNA, 20 bp, Artificial Sequence
  Description of Artificial Sequence: Synthetic oligonucleotide
  Target: LAMA2; (+) strand; PAM type: YTN; PAM sequence: TTA
catgggctctagttataccc

SEQ ID NO: 344019 - DNA, 20 bp, Artificial Sequence
  Description of Artificial Sequence: Synthetic oligonucleotide
  Target: LAMA2; (+) strand; PAM type: YTN; PAM sequence: CTC
tagttatacccatgatatga

SEQ ID NO: 344020 - DNA, 20 bp, Artificial Sequence
  Description of Artificial Sequence: Synthetic oligonucleotide
  Target: LAMA2; (+) strand; PAM type: YTN; PAM sequence: CTA
gttatacccatgatatgacc

SEQ ID NO: 344021 - DNA, 20 bp, Artificial Sequence
  Description of Artificial Sequence: Synthetic oligonucleotide
  Target: LAMA2; (+) strand; PAM type: YTN; PAM sequence: TTA
tacccatgatatgaccaatt

SEQ ID NO: 344022 - DNA, 20 bp, Artificial Sequence
  Description of Artificial Sequence: Synthetic oligonucleotide
  Target: LAMA2; (+) strand; PAM type: YTN; PAM sequence: TTT
aagaaacttgaaaatataat

SEQ ID NO: 344023 - DNA, 20 bp, Artificial Sequence
  Description of Artificial Sequence: Synthetic oligonucleotide
  Target: LAMA2; (+) strand; PAM type: YTN; PAM sequence: TTA
agaaacttgaaaatataatt

SEQ ID NO: 344024 - DNA, 20 bp, Artificial Sequence
  Description of Artificial Sequence: Synthetic oligonucleotide
  Target: LAMA2; (+) strand; PAM type: YTN; PAM sequence: CTT
gaaaatataatttctagcac

SEQ ID NO: 344025 - DNA, 20 bp, Artificial Sequence
  Description of Artificial Sequence: Synthetic oligonucleotide
  Target: LAMA2; (+) strand; PAM type: YTN; PAM sequence: TTG
aaaatataatttctagcacg

SEQ ID NO: 344026 - DNA, 20 bp, Artificial Sequence
  Description of Artificial Sequence: Synthetic oligonucleotide
  Target: LAMA2; (+) strand; PAM type: YTN; PAM sequence: TTT
ctagcacgtgtatactaatg

SEQ ID NO: 344027 - DNA, 20 bp, Artificial Sequence
  Description of Artificial Sequence: Synthetic oligonucleotide
  Target: LAMA2; (+) strand; PAM type: YTN; PAM sequence: TTC
tagcacgtgtatactaatgc

SEQ ID NO: 344028 - DNA, 20 bp, Artificial Sequence
  Description of Artificial Sequence: Synthetic oligonucleotide
  Target: LAMA2; (+) strand; PAM type: YTN; PAM sequence: CTA
gcacgtgtatactaatgcga

SEQ ID NO: 344029 - DNA, 20 bp, Artificial Sequence
  Description of Artificial Sequence: Synthetic oligonucleotide
  Target: LAMA2; (+) strand; PAM type: YTN; PAM sequence: CTA
atgcgagatagagaagtttt

SEQ ID NO: 344030 - DNA, 20 bp, Artificial Sequence
  Description of Artificial Sequence: Synthetic oligonucleotide
  Target: LAMA2; (+) strand; PAM type: YTN; PAM sequence: TTT
tatttacaaccagaaattgt

SEQ ID NO: 344031 - DNA, 20 bp, Artificial Sequence
  Description of Artificial Sequence: Synthetic oligonucleotide
  Target: LAMA2; (+) strand; PAM type: YTN; PAM sequence: TTT
atttacaaccagaaattgtt

SEQ ID NO: 344032 - DNA, 20 bp, Artificial Sequence
  Description of Artificial Sequence: Synthetic oligonucleotide
  Target: LAMA2; (+) strand; PAM type: YTN; PAM sequence: TTA
tttacaaccagaaattgttg

SEQ ID NO: 344033 - DNA, 20 bp, Artificial Sequence
  Description of Artificial Sequence: Synthetic oligonucleotide
  Target: LAMA2; (+) strand; PAM type: YTN; PAM sequence: TTT
acaaccagaaattgttgggt

SEQ ID NO: 344034 - DNA, 20 bp, Artificial Sequence
  Description of Artificial Sequence: Synthetic oligonucleotide
  Target: LAMA2; (+) strand; PAM type: YTN; PAM sequence: TTA
caaccagaaattgttgggtc

SEQ ID NO: 344035 - DNA, 20 bp, Artificial Sequence
  Description of Artificial Sequence: Synthetic oligonucleotide
  Target: LAMA2; (+) strand; PAM type: YTN; PAM sequence: TTG
ttgggtccataaaagaaaca

SEQ ID NO: 344036 - DNA, 20 bp, Artificial Sequence
  Description of Artificial Sequence: Synthetic oligonucleotide
  Target: LAMA2; (+) strand; PAM type: YTN; PAM sequence: TTG
ggtccataaaagaaacaaat

SEQ ID NO: 344037 - DNA, 20 bp, Artificial Sequence
  Description of Artificial Sequence: Synthetic oligonucleotide
  Target: LAMA2; (+) strand; PAM type: YTN; PAM sequence: CTA
gaacattttaaagttgccag

SEQ ID NO: 344038 - DNA, 20 bp, Artificial Sequence
  Description of Artificial Sequence: Synthetic oligonucleotide
  Target: LAMA2; (+) strand; PAM type: YTN; PAM sequence: TTT
taaagttgccagagcagatt

SEQ ID NO: 344039 - DNA, 20 bp, Artificial Sequence
  Description of Artificial Sequence: Synthetic oligonucleotide
  Target: LAMA2; (+) strand; PAM type: YTN; PAM sequence: TTT
aaagttgccagagcagattt

SEQ ID NO: 344040 - DNA, 20 bp, Artificial Sequence
  Description of Artificial Sequence: Synthetic oligonucleotide
  Target: LAMA2; (+) strand; PAM type: YTN; PAM sequence: TTA
aagttgccagagcagatttc

SEQ ID NO: 344041 - DNA, 20 bp, Artificial Sequence
  Description of Artificial Sequence: Synthetic oligonucleotide
  Target: LAMA2; (+) strand; PAM type: YTN; PAM sequence: TTG
ccagagcagatttcaagata

SEQ ID NO: 344042 - DNA, 20 bp, Artificial Sequence
  Description of Artificial Sequence: Synthetic oligonucleotide
  Target: LAMA2; (+) strand; PAM type: YTN; PAM sequence: TTT
caagatattccagcctgagt

SEQ ID NO: 344043 - DNA, 20 bp, Artificial Sequence
  Description of Artificial Sequence: Synthetic oligonucleotide
  Target: LAMA2; (+) strand; PAM type: YTN; PAM sequence: TTC
aagatattccagcctgagtc

SEQ ID NO: 344044 - DNA, 20 bp, Artificial Sequence
  Description of Artificial Sequence: Synthetic oligonucleotide
  Target: LAMA2; (+) strand; PAM type: YTN; PAM sequence: TTC
cagcctgagtccctcagata

SEQ ID NO: 344045 - DNA, 20 bp, Artificial Sequence
  Description of Artificial Sequence: Synthetic oligonucleotide
  Target: LAMA2; (+) strand; PAM type: YTN; PAM sequence: CTG
agtccctcagatatgtattt

SEQ ID NO: 344046 - DNA, 20 bp, Artificial Sequence
  Description of Artificial Sequence: Synthetic oligonucleotide
  Target: LAMA2; (+) strand; PAM type: YTN; PAM sequence: CTC
agatatgtattttggtgatt

SEQ ID NO: 344047 - DNA, 20 bp, Artificial Sequence
  Description of Artificial Sequence: Synthetic oligonucleotide
  Target: LAMA2; (+) strand; PAM type: YTN; PAM sequence: TTT
tggtgattgtaaaaatatca

SEQ ID NO: 344048 - DNA, 20 bp, Artificial Sequence
  Description of Artificial Sequence: Synthetic oligonucleotide
  Target: LAMA2; (+) strand; PAM type: YTN; PAM sequence: TTT
ggtgattgtaaaaatatcaa

SEQ ID NO: 344049 - DNA, 20 bp, Artificial Sequence
  Description of Artificial Sequence: Synthetic oligonucleotide
  Target: LAMA2; (+) strand; PAM type: YTN; PAM sequence: TTG
gtgattgtaaaaatatcaaa

SEQ ID NO: 344050 - DNA, 20 bp, Artificial Sequence
  Description of Artificial Sequence: Synthetic oligonucleotide
  Target: LAMA2; (+) strand; PAM type: YTN; PAM sequence: TTG
taaaaatatcaaaagaaatt

SEQ ID NO: 344051 - DNA, 20 bp, Artificial Sequence
  Description of Artificial Sequence: Synthetic oligonucleotide
  Target: LAMA2; (+) strand; PAM type: YTN; PAM sequence: TTA
tttgtgtccgaaagtcacaa

SEQ ID NO: 344052 - DNA, 20 bp, Artificial Sequence
  Description of Artificial Sequence: Synthetic oligonucleotide
  Target: LAMA2; (+) strand; PAM type: YTN; PAM sequence: TTT
gtgtccgaaagtcacaatat

SEQ ID NO: 344053 - DNA, 20 bp, Artificial Sequence
  Description of Artificial Sequence: Synthetic oligonucleotide
  Target: LAMA2; (+) strand; PAM type: YTN; PAM sequence: TTG
tgtccgaaagtcacaatatg

SEQ ID NO: 344054 - DNA, 20 bp, Artificial Sequence
  Description of Artificial Sequence: Synthetic oligonucleotide
  Target: LAMA2; (+) strand; PAM type: YTN; PAM sequence: CTA
aaattgagtttcagatattt

SEQ ID NO: 344055 - DNA, 20 bp, Artificial Sequence
  Description of Artificial Sequence: Synthetic oligonucleotide
  Target: LAMA2; (+) strand; PAM type: YTN; PAM sequence: TTG
agtttcagatattttgggat

SEQ ID NO: 344056 - DNA, 20 bp, Artificial Sequence
  Description of Artificial Sequence: Synthetic oligonucleotide
  Target: LAMA2; (+) strand; PAM type: YTN; PAM sequence: TTT
cagatattttgggatttctg

SEQ ID NO: 344057 - DNA, 20 bp, Artificial Sequence
  Description of Artificial Sequence: Synthetic oligonucleotide
  Target: LAMA2; (+) strand; PAM type: YTN; PAM sequence: TTC
agatattttgggatttctga

SEQ ID NO: 344058 - DNA, 20 bp, Artificial Sequence
  Description of Artificial Sequence: Synthetic oligonucleotide
  Target: LAMA2; (+) strand; PAM type: YTN; PAM sequence: TTT
tgggatttctgaaaaaaatt

SEQ ID NO: 344059 - DNA, 20 bp, Artificial Sequence
  Description of Artificial Sequence: Synthetic oligonucleotide
  Target: LAMA2; (+) strand; PAM type: YTN; PAM sequence: TTT
gggatttctgaaaaaaattt

SEQ ID NO: 344060 - DNA, 20 bp, Artificial Sequence
  Description of Artificial Sequence: Synthetic oligonucleotide
  Target: LAMA2; (+) strand; PAM type: YTN; PAM sequence: TTG
ggatttctgaaaaaaattta

SEQ ID NO: 344061 - DNA, 20 bp, Artificial Sequence
  Description of Artificial Sequence: Synthetic oligonucleotide
  Target: LAMA2; (+) strand; PAM type: YTN; PAM sequence: TTT
ctgaaaaaaatttataaaaa

SEQ ID NO: 344062 - DNA, 20 bp, Artificial Sequence
  Description of Artificial Sequence: Synthetic oligonucleotide
  Target: LAMA2; (+) strand; PAM type: YTN; PAM sequence: TTC
tgaaaaaaatttataaaaat

SEQ ID NO: 344063 - DNA, 20 bp, Artificial Sequence
  Description of Artificial Sequence: Synthetic oligonucleotide
  Target: LAMA2; (+) strand; PAM type: YTN; PAM sequence: CTG
aaaaaaatttataaaaatcc

SEQ ID NO: 344064 - DNA, 20 bp, Artificial Sequence
  Description of Artificial Sequence: Synthetic oligonucleotide
  Target: LAMA2; (+) strand; PAM type: YTN; PAM sequence: TTT
ataaaaatccataatgtaat

SEQ ID NO: 344065 - DNA, 20 bp, Artificial Sequence
  Description of Artificial Sequence: Synthetic oligonucleotide
  Target: LAMA2; (+) strand; PAM type: YTN; PAM sequence: TTA
taaaaatccataatgtaatc

SEQ ID NO: 344066 - DNA, 20 bp, Artificial Sequence
  Description of Artificial Sequence: Synthetic oligonucleotide
  Target: LAMA2; (+) strand; PAM type: YTN; PAM sequence: TTT
gtaaaattttaaagtttatc

SEQ ID NO: 344067 - DNA, 20 bp, Artificial Sequence
  Description of Artificial Sequence: Synthetic oligonucleotide
  Target: LAMA2; (+) strand; PAM type: YTN; PAM sequence: TTG
taaaattttaaagtttatca

SEQ ID NO: 344068 - DNA, 20 bp, Artificial Sequence
  Description of Artificial Sequence: Synthetic oligonucleotide
  Target: LAMA2; (+) strand; PAM type: YTN; PAM sequence: TTT
taaagtttatcattacgaaa

SEQ ID NO: 344069 - DNA, 20 bp, Artificial Sequence
  Description of Artificial Sequence: Synthetic oligonucleotide
  Target: LAMA2; (+) strand; PAM type: YTN; PAM sequence: TTT
aaagtttatcattacgaaaa

SEQ ID NO: 344070 - DNA, 20 bp, Artificial Sequence
  Description of Artificial Sequence: Synthetic oligonucleotide
  Target: LAMA2; (+) strand; PAM type: YTN; PAM sequence: TTA
aagtttatcattacgaaaag

SEQ ID NO: 344071 - DNA, 20 bp, Artificial Sequence
  Description of Artificial Sequence: Synthetic oligonucleotide
  Target: LAMA2; (+) strand; PAM type: YTN; PAM sequence: TTT
atcattacgaaaaggaaagt

SEQ ID NO: 344072 - DNA, 20 bp, Artificial Sequence
  Description of Artificial Sequence: Synthetic oligonucleotide
  Target: LAMA2; (+) strand; PAM type: YTN; PAM sequence: TTA
tcattacgaaaaggaaagtc

SEQ ID NO: 344073 - DNA, 20 bp, Artificial Sequence
  Description of Artificial Sequence: Synthetic oligonucleotide
  Target: LAMA2; (+) strand; PAM type: YTN; PAM sequence: TTA
cgaaaaggaaagtcaaaatc

SEQ ID NO: 344074 - DNA, 20 bp, Artificial Sequence
  Description of Artificial Sequence: Synthetic oligonucleotide
  Target: LAMA2; (+) strand; PAM type: YTN; PAM sequence: CTT
tgttccatgggatagtgtca

SEQ ID NO: 344075 - DNA, 20 bp, Artificial Sequence
  Description of Artificial Sequence: Synthetic oligonucleotide
  Target: LAMA2; (+) strand; PAM type: YTN; PAM sequence: TTT
gttccatgggatagtgtcag

SEQ ID NO: 344076 - DNA, 20 bp, Artificial Sequence
  Description of Artificial Sequence: Synthetic oligonucleotide
  Target: LAMA2; (+) strand; PAM type: YTN; PAM sequence: TTG
ttccatgggatagtgtcagt

SEQ ID NO: 344077 - DNA, 20 bp, Artificial Sequence
  Description of Artificial Sequence: Synthetic oligonucleotide
  Target: LAMA2; (+) strand; PAM type: YTN; PAM sequence: TTC
catgggatagtgtcagtcat

SEQ ID NO: 344078 - DNA, 20 bp, Artificial Sequence
  Description of Artificial Sequence: Synthetic oligonucleotide
  Target: LAMA2; (+) strand; PAM type: YTN; PAM sequence: CTT
actagttaggtgctaattca

SEQ ID NO: 344079 - DNA, 20 bp, Artificial Sequence
  Description of Artificial Sequence: Synthetic oligonucleotide
  Target: LAMA2; (+) strand; PAM type: YTN; PAM sequence: TTA
ctagttaggtgctaattcat

SEQ ID NO: 344080 - DNA, 20 bp, Artificial Sequence
  Description of Artificial Sequence: Synthetic oligonucleotide
  Target: LAMA2; (+) strand; PAM type: YTN; PAM sequence: CTA
gttaggtgctaattcatttt

SEQ ID NO: 344081 - DNA, 20 bp, Artificial Sequence
  Description of Artificial Sequence: Synthetic oligonucleotide
  Target: LAMA2; (+) strand; PAM type: YTN; PAM sequence: TTA
ggtgctaattcattttgagc

SEQ ID NO: 344082 - DNA, 20 bp, Artificial Sequence
  Description of Artificial Sequence: Synthetic oligonucleotide
  Target: LAMA2; (+) strand; PAM type: YTN; PAM sequence: CTA
attcattttgagcttacagg

SEQ ID NO: 344083 - DNA, 20 bp, Artificial Sequence
  Description of Artificial Sequence: Synthetic oligonucleotide
  Target: LAMA2; (+) strand; PAM type: YTN; PAM sequence: TTC
attttgagcttacagggttt

SEQ ID NO: 344084 - DNA, 20 bp, Artificial Sequence
  Description of Artificial Sequence: Synthetic oligonucleotide
  Target: LAMA2; (+) strand; PAM type: YTN; PAM sequence: TTT
tgagcttacagggttttatc

SEQ ID NO: 344085 - DNA, 20 bp, Artificial Sequence
  Description of Artificial Sequence: Synthetic oligonucleotide
  Target: LAMA2; (+) strand; PAM type: YTN; PAM sequence: TTT
gagcttacagggttttatca

SEQ ID NO: 344086 - DNA, 20 bp, Artificial Sequence
  Description of Artificial Sequence: Synthetic oligonucleotide
  Target: LAMA2; (+) strand; PAM type: YTN; PAM sequence: TTG
agcttacagggttttatcag

SEQ ID NO: 344087 - DNA, 20 bp, Artificial Sequence
  Description of Artificial Sequence: Synthetic oligonucleotide
  Target: LAMA2; (+) strand; PAM type: YTN; PAM sequence: CTT
acagggttttatcaggatca

SEQ ID NO: 344088 - DNA, 20 bp, Artificial Sequence
  Description of Artificial Sequence: Synthetic oligonucleotide
  Target: LAMA2; (+) strand; PAM type: YTN; PAM sequence: TTA
cagggttttatcaggatcag

SEQ ID NO: 344089 - DNA, 20 bp, Artificial Sequence
  Description of Artificial Sequence: Synthetic oligonucleotide
  Target: LAMA2; (+) strand; PAM type: YTN; PAM sequence: TTT
tatcaggatcagactaagta

SEQ ID NO: 344090 - DNA, 20 bp, Artificial Sequence
  Description of Artificial Sequence: Synthetic oligonucleotide
  Target: LAMA2; (+) strand; PAM type: YTN; PAM sequence: TTT
atcaggatcagactaagtaa

SEQ ID NO: 344091 - DNA, 20 bp, Artificial Sequence
  Description of Artificial Sequence: Synthetic oligonucleotide
  Target: LAMA2; (+) strand; PAM type: YTN; PAM sequence: TTA
tcaggatcagactaagtaaa

SEQ ID NO: 344092 - DNA, 20 bp, Artificial Sequence
  Description of Artificial Sequence: Synthetic oligonucleotide
  Target: LAMA2; (+) strand; PAM type: YTN; PAM sequence: CTA
agtaaaaatgtataattatt

SEQ ID NO: 344093 - DNA, 20 bp, Artificial Sequence
  Description of Artificial Sequence: Synthetic oligonucleotide
  Target: LAMA2; (+) strand; PAM type: YTN; PAM sequence: TTA
ttttataaataaaaatgttt

SEQ ID NO: 344094 - DNA, 20 bp, Artificial Sequence
  Description of Artificial Sequence: Synthetic oligonucleotide
  Target: LAMA2; (+) strand; PAM type: YTN; PAM sequence: TTT
tataaataaaaatgttttgg

SEQ ID NO: 344095 - DNA, 20 bp, Artificial Sequence
  Description of Artificial Sequence: Synthetic oligonucleotide
  Target: LAMA2; (+) strand; PAM type: YTN; PAM sequence: TTT
ataaataaaaatgttttggg

SEQ ID NO: 344096 - DNA, 20 bp, Artificial Sequence
  Description of Artificial Sequence: Synthetic oligonucleotide
  Target: LAMA2; (+) strand; PAM type: YTN; PAM sequence: TTA
taaataaaaatgttttgggg

SEQ ID NO: 344097 - DNA, 20 bp, Artificial Sequence
  Description of Artificial Sequence: Synthetic oligonucleotide
  Target: LAMA2; (+) strand; PAM type: YTN; PAM sequence: TTT
tggggtttcagatttaaaaa

SEQ ID NO: 344098 - DNA, 20 bp, Artificial Sequence
  Description of Artificial Sequence: Synthetic oligonucleotide
  Target: LAMA2; (+) strand; PAM type: YTN; PAM sequence: TTT
ggggtttcagatttaaaaat

SEQ ID NO: 344099 - DNA, 20 bp, Artificial Sequence
  Description of Artificial Sequence: Synthetic oligonucleotide
  Target: LAMA2; (+) strand; PAM type: YTN; PAM sequence: TTG
gggtttcagatttaaaaatc

SEQ ID NO: 344100 - DNA, 20 bp, Artificial Sequence
  Description of Artificial Sequence: Synthetic oligonucleotide
  Target: LAMA2; (+) strand; PAM type: YTN; PAM sequence: TTT
cagatttaaaaatcaagagt

SEQ ID NO: 344101 - DNA, 20 bp, Artificial Sequence
  Description of Artificial Sequence: Synthetic oligonucleotide
  Target: LAMA2; (+) strand; PAM type: YTN; PAM sequence: TTC
agatttaaaaatcaagagta

SEQ ID NO: 344102 - DNA, 20 bp, Artificial Sequence
  Description of Artificial Sequence: Synthetic oligonucleotide
  Target: LAMA2; (+) strand; PAM type: YTN; PAM sequence: TTT
aaaaatcaagagtaagaagt

SEQ ID NO: 344103 - DNA, 20 bp, Artificial Sequence
  Description of Artificial Sequence: Synthetic oligonucleotide
  Target: LAMA2; (+) strand; PAM type: YTN; PAM sequence: TTA
aaaatcaagagtaagaagtt

SEQ ID NO: 344104 - DNA, 20 bp, Artificial Sequence
  Description of Artificial Sequence: Synthetic oligonucleotide
  Target: LAMA2; (+) strand; PAM type: YTN; PAM sequence: TTT
tacaatatttactaaagatt

SEQ ID NO: 344105 - DNA, 20 bp, Artificial Sequence
  Description of Artificial Sequence: Synthetic oligonucleotide
  Target: LAMA2; (+) strand; PAM type: YTN; PAM sequence: TTT
acaatatttactaaagatta

SEQ ID NO: 344106 - DNA, 20 bp, Artificial Sequence
  Description of Artificial Sequence: Synthetic oligonucleotide
  Target: LAMA2; (+) strand; PAM type: YTN; PAM sequence: TTA
caatatttactaaagattac

SEQ ID NO: 344107 - DNA, 20 bp, Artificial Sequence
  Description of Artificial Sequence: Synthetic oligonucleotide
  Target: LAMA2; (+) strand; PAM type: YTN; PAM sequence: TTT
actaaagattacgattagta

SEQ ID NO: 344108 - DNA, 20 bp, Artificial Sequence
  Description of Artificial Sequence: Synthetic oligonucleotide
  Target: LAMA2; (+) strand; PAM type: YTN; PAM sequence: TTA
ctaaagattacgattagtat

SEQ ID NO: 344109 - DNA, 20 bp, Artificial Sequence
  Description of Artificial Sequence: Synthetic oligonucleotide
  Target: LAMA2; (+) strand; PAM type: YTN; PAM sequence: CTA
aagattacgattagtatacc

SEQ ID NO: 344110 - DNA, 20 bp, Artificial Sequence
  Description of Artificial Sequence: Synthetic oligonucleotide
  Target: LAMA2; (+) strand; PAM type: YTN; PAM sequence: TTA
cgattagtataccacaaaac

SEQ ID NO: 344111 - DNA, 20 bp, Artificial Sequence
  Description of Artificial Sequence: Synthetic oligonucleotide
  Target: LAMA2; (+) strand; PAM type: YTN; PAM sequence: TTA
gtataccacaaaacatctga

SEQ ID NO: 344112 - DNA, 20 bp, Artificial Sequence
  Description of Artificial Sequence: Synthetic oligonucleotide
  Target: LAMA2; (+) strand; PAM type: YTN; PAM sequence: CTG
aactttagatattatttata

SEQ ID NO: 344113 - DNA, 20 bp, Artificial Sequence
  Description of Artificial Sequence: Synthetic oligonucleotide
  Target: LAMA2; (+) strand; PAM type: YTN; PAM sequence: CTT
tagatattatttatatgacc

SEQ ID NO: 344114 - DNA, 20 bp, Artificial Sequence
  Description of Artificial Sequence: Synthetic oligonucleotide
  Target: LAMA2; (+) strand; PAM type: YTN; PAM sequence: TTT
agatattatttatatgacct

SEQ ID NO: 344115 - DNA, 20 bp, Artificial Sequence
  Description of Artificial Sequence: Synthetic oligonucleotide
  Target: LAMA2; (+) strand; PAM type: YTN; PAM sequence: TTA
gatattatttatatgacctt

SEQ ID NO: 344116 - DNA, 20 bp, Artificial Sequence
  Description of Artificial Sequence: Synthetic oligonucleotide
  Target: LAMA2; (+) strand; PAM type: YTN; PAM sequence: TTA
tttatatgaccttaaaagtc

SEQ ID NO: 344117 - DNA, 20 bp, Artificial Sequence
  Description of Artificial Sequence: Synthetic oligonucleotide
  Target: LAMA2; (+) strand; PAM type: YTN; PAM sequence: TTT
atatgaccttaaaagtcaga

SEQ ID NO: 344118 - DNA, 20 bp, Artificial Sequence
  Description of Artificial Sequence: Synthetic oligonucleotide
  Target: LAMA2; (+) strand; PAM type: YTN; PAM sequence: TTA
tatgaccttaaaagtcagac

SEQ ID NO: 344119 - DNA, 20 bp, Artificial Sequence
  Description of Artificial Sequence: Synthetic oligonucleotide
  Target: LAMA2; (+) strand; PAM type: YTN; PAM sequence: CTT
aaaagtcagacctttccctg

SEQ ID NO: 344120 - DNA, 20 bp, Artificial Sequence
  Description of Artificial Sequence: Synthetic oligonucleotide
  Target: LAMA2; (+) strand; PAM type: YTN; PAM sequence: TTA
aaagtcagacctttccctgc

SEQ ID NO: 344121 - DNA, 20 bp, Artificial Sequence
  Description of Artificial Sequence: Synthetic oligonucleotide
  Target: LAMA2; (+) strand; PAM type: YTN; PAM sequence: CTT
tccctgccaatgacttaact

SEQ ID NO: 344122 - DNA, 20 bp, Artificial Sequence
  Description of Artificial Sequence: Synthetic oligonucleotide
  Target: LAMA2; (+) strand; PAM type: YTN; PAM sequence: TTT
ccctgccaatgacttaactt

SEQ ID NO: 344123 - DNA, 20 bp, Artificial Sequence
  Description of Artificial Sequence: Synthetic oligonucleotide
  Target: LAMA2; (+) strand; PAM type: YTN; PAM sequence: TTC
cctgccaatgacttaacttc

SEQ ID NO: 344124 - DNA, 20 bp, Artificial Sequence
  Description of Artificial Sequence: Synthetic oligonucleotide
  Target: LAMA2; (+) strand; PAM type: YTN; PAM sequence: CTG
ccaatgacttaacttctgtc

SEQ ID NO: 344125 - DNA, 20 bp, Artificial Sequence
  Description of Artificial Sequence: Synthetic oligonucleotide
  Target: LAMA2; (+) strand; PAM type: YTN; PAM sequence: CTT
aacttctgtctttagtgcta

SEQ ID NO: 344126 - DNA, 20 bp, Artificial Sequence
  Description of Artificial Sequence: Synthetic oligonucleotide
  Target: LAMA2; (+) strand; PAM type: YTN; PAM sequence: TTA
acttctgtctttagtgctat

SEQ ID NO: 344127 - DNA, 20 bp, Artificial Sequence
  Description of Artificial Sequence: Synthetic oligonucleotide
  Target: LAMA2; (+) strand; PAM type: YTN; PAM sequence: CTT
ctgtctttagtgctattttg

SEQ ID NO: 344128 - DNA, 20 bp, Artificial Sequence
  Description of Artificial Sequence: Synthetic oligonucleotide
  Target: LAMA2; (+) strand; PAM type: YTN; PAM sequence: TTC
tgtctttagtgctattttgt

SEQ ID NO: 344129 - DNA, 20 bp, Artificial Sequence
  Description of Artificial Sequence: Synthetic oligonucleotide
  Target: LAMA2; (+) strand; PAM type: YTN; PAM sequence: CTG
tctttagtgctattttgttt

SEQ ID NO: 344130 - DNA, 20 bp, Artificial Sequence
  Description of Artificial Sequence: Synthetic oligonucleotide
  Target: LAMA2; (+) strand; PAM type: YTN; PAM sequence: CTT
tagtgctattttgtttgaag

SEQ ID NO: 344131 - DNA, 20 bp, Artificial Sequence
  Description of Artificial Sequence: Synthetic oligonucleotide
  Target: LAMA2; (+) strand; PAM type: YTN; PAM sequence: TTT
agtgctattttgtttgaagg

SEQ ID NO: 344132 - DNA, 20 bp, Artificial Sequence
  Description of Artificial Sequence: Synthetic oligonucleotide
  Target: LAMA2; (+) strand; PAM type: YTN; PAM sequence: TTA
gtgctattttgtttgaaggc

SEQ ID NO: 344133 - DNA, 20 bp, Artificial Sequence
  Description of Artificial Sequence: Synthetic oligonucleotide
  Target: LAMA2; (+) strand; PAM type: YTN; PAM sequence: CTA
ttttgtttgaaggcttattt

SEQ ID NO: 344134 - DNA, 20 bp, Artificial Sequence
  Description of Artificial Sequence: Synthetic oligonucleotide
  Target: LAMA2; (+) strand; PAM type: YTN; PAM sequence: TTT
tgtttgaaggcttatttatc

SEQ ID NO: 344135 - DNA, 20 bp, Artificial Sequence
  Description of Artificial Sequence: Synthetic oligonucleotide
  Target: LAMA2; (+) strand; PAM type: YTN; PAM sequence: TTT
gtttgaaggcttatttatct

SEQ ID NO: 344136 - DNA, 20 bp, Artificial Sequence
  Description of Artificial Sequence: Synthetic oligonucleotide
  Target: LAMA2; (+) strand; PAM type: YTN; PAM sequence: TTG
tttgaaggcttatttatctg

SEQ ID NO: 344137 - DNA, 20 bp, Artificial Sequence
  Description of Artificial Sequence: Synthetic oligonucleotide
  Target: LAMA2; (+) strand; PAM type: YTN; PAM sequence: TTT
gaaggcttatttatctgcta

SEQ ID NO: 344138 - DNA, 20 bp, Artificial Sequence
  Description of Artificial Sequence: Synthetic oligonucleotide
  Target: LAMA2; (+) strand; PAM type: YTN; PAM sequence: TTG
aaggcttatttatctgctat

SEQ ID NO: 344139 - DNA, 20 bp, Artificial Sequence
  Description of Artificial Sequence: Synthetic oligonucleotide
  Target: LAMA2; (+) strand; PAM type: YTN; PAM sequence: CTT
atttatctgctatgaagtga

SEQ ID NO: 344140 - DNA, 20 bp, Artificial Sequence
  Description of Artificial Sequence: Synthetic oligonucleotide
  Target: LAMA2; (+) strand; PAM type: YTN; PAM sequence: TTA
tttatctgctatgaagtgat

SEQ ID NO: 344141 - DNA, 20 bp, Artificial Sequence
  Description of Artificial Sequence: Synthetic oligonucleotide
  Target: LAMA2; (+) strand; PAM type: YTN; PAM sequence: TTT
atctgctatgaagtgatttt

SEQ ID NO: 344142 - DNA, 20 bp, Artificial Sequence
  Description of Artificial Sequence: Synthetic oligonucleotide
  Target: LAMA2; (+) strand; PAM type: YTN; PAM sequence: TTA
tctgctatgaagtgattttt

SEQ ID NO: 344143 - DNA, 20 bp, Artificial Sequence
  Description of Artificial Sequence: Synthetic oligonucleotide
  Target: LAMA2; (+) strand; PAM type: YTN; PAM sequence: CTG
ctatgaagtgatttttctac

SEQ ID NO: 344144 - DNA, 20 bp, Artificial Sequence
  Description of Artificial Sequence: Synthetic oligonucleotide
  Target: LAMA2; (+) strand; PAM type: YTN; PAM sequence: CTA
tgaagtgatttttctacgac

SEQ ID NO: 344145 - DNA, 20 bp, Artificial Sequence
  Description of Artificial Sequence: Synthetic oligonucleotide
  Target: LAMA2; (+) strand; PAM type: YTN; PAM sequence: TTT
ttctacgactttctacatgt

SEQ ID NO: 344146 - DNA, 20 bp, Artificial Sequence
  Description of Artificial Sequence: Synthetic oligonucleotide
  Target: LAMA2; (+) strand; PAM type: YTN; PAM sequence: TTT
tctacgactttctacatgtc

SEQ ID NO: 344147 - DNA, 20 bp, Artificial Sequence
  Description of Artificial Sequence: Synthetic oligonucleotide
  Target: LAMA2; (+) strand; PAM type: YTN; PAM sequence: TTT
ctacgactttctacatgtct

SEQ ID NO: 344148 - DNA, 20 bp, Artificial Sequence
  Description of Artificial Sequence: Synthetic oligonucleotide
  Target: LAMA2; (+) strand; PAM type: YTN; PAM sequence: TTC
tacgactttctacatgtctc

SEQ ID NO: 344149 - DNA, 20 bp, Artificial Sequence
  Description of Artificial Sequence: Synthetic oligonucleotide
  Target: LAMA2; (+) strand; PAM type: YTN; PAM sequence: CTA
cgactttctacatgtctctt

SEQ ID NO: 344150 - DNA, 20 bp, Artificial Sequence
  Description of Artificial Sequence: Synthetic oligonucleotide
  Target: LAMA2; (+) strand; PAM type: YTN; PAM sequence: CTT
tctacatgtctcttcacatt

SEQ ID NO: 344151 - DNA, 20 bp, Artificial Sequence
  Description of Artificial Sequence: Synthetic oligonucleotide
  Target: LAMA2; (+) strand; PAM type: YTN; PAM sequence: TTT
ctacatgtctcttcacattg

SEQ ID NO: 344152 - DNA, 20 bp, Artificial Sequence
  Description of Artificial Sequence: Synthetic oligonucleotide
  Target: LAMA2; (+) strand; PAM type: YTN; PAM sequence: TTC
tacatgtctcttcacattgg

SEQ ID NO: 344153 - DNA, 20 bp, Artificial Sequence
  Description of Artificial Sequence: Synthetic oligonucleotide
  Target: LAMA2; (+) strand; PAM type: YTN; PAM sequence: CTA
catgtctcttcacattgggt

SEQ ID NO: 344154 - DNA, 20 bp, Artificial Sequence
  Description of Artificial Sequence: Synthetic oligonucleotide
  Target: LAMA2; (+) strand; PAM type: YTN; PAM sequence: CTC
ttcacattgggttaggaaat

SEQ ID NO: 344155 - DNA, 20 bp, Artificial Sequence
  Description of Artificial Sequence: Synthetic oligonucleotide
  Target: LAMA2; (+) strand; PAM type: YTN; PAM sequence: CTT
cacattgggttaggaaatct

SEQ ID NO: 344156 - DNA, 20 bp, Artificial Sequence
  Description of Artificial Sequence: Synthetic oligonucleotide
  Target: LAMA2; (+) strand; PAM type: YTN; PAM sequence: TTC
acattgggttaggaaatctt

SEQ ID NO: 344157 - DNA, 20 bp, Artificial Sequence
  Description of Artificial Sequence: Synthetic oligonucleotide
  Target: LAMA2; (+) strand; PAM type: YTN; PAM sequence: TTG
ggttaggaaatcttcaagga

SEQ ID NO: 344158 - DNA, 20 bp, Artificial Sequence
  Description of Artificial Sequence: Synthetic oligonucleotide
  Target: LAMA2; (+) strand; PAM type: YTN; PAM sequence: TTA
ggaaatcttcaaggaaatta

SEQ ID NO: 344159 - DNA, 20 bp, Artificial Sequence
  Description of Artificial Sequence: Synthetic oligonucleotide
  Target: LAMA2; (+) strand; PAM type: YTN; PAM sequence: CTT
caaggaaattaatatcctcg

SEQ ID NO: 344160 - DNA, 20 bp, Artificial Sequence
  Description of Artificial Sequence: Synthetic oligonucleotide
  Target: LAMA2; (+) strand; PAM type: YTN; PAM sequence: TTC
aaggaaattaatatcctcgg

SEQ ID NO: 344161 - DNA, 20 bp, Artificial Sequence
  Description of Artificial Sequence: Synthetic oligonucleotide
  Target: LAMA2; (+) strand; PAM type: YTN; PAM sequence: TTA
atatcctcgggtatacacaa

SEQ ID NO: 344162 - DNA, 20 bp, Artificial Sequence
  Description of Artificial Sequence: Synthetic oligonucleotide
  Target: LAMA2; (+) strand; PAM type: YTN; PAM sequence: CTC
gggtatacacaaccttttgc

SEQ ID NO: 344163 - DNA, 20 bp, Artificial Sequence
  Description of Artificial Sequence: Synthetic oligonucleotide
  Target: LAMA2; (+) strand; PAM type: YTN; PAM sequence: CTT
ttgctgtggtatttgctctg

SEQ ID NO: 344164 - DNA, 20 bp, Artificial Sequence
  Description of Artificial Sequence: Synthetic oligonucleotide
  Target: LAMA2; (+) strand; PAM type: YTN; PAM sequence: TTT
tgctgtggtatttgctctga

SEQ ID NO: 344165 - DNA, 20 bp, Artificial Sequence
  Description of Artificial Sequence: Synthetic oligonucleotide
  Target: LAMA2; (+) strand; PAM type: YTN; PAM sequence: TTT
gctgtggtatttgctctgac

SEQ ID NO: 344166 - DNA, 20 bp, Artificial Sequence
  Description of Artificial Sequence: Synthetic oligonucleotide
  Target: LAMA2; (+) strand; PAM type: YTN; PAM sequence: TTG
ctgtggtatttgctctgaca

SEQ ID NO: 344167 - DNA, 20 bp, Artificial Sequence
  Description of Artificial Sequence: Synthetic oligonucleotide
  Target: LAMA2; (+) strand; PAM type: YTN; PAM sequence: CTG
tggtatttgctctgacatgg

SEQ ID NO: 344168 - DNA, 20 bp, Artificial Sequence
  Description of Artificial Sequence: Synthetic oligonucleotide
  Target: LAMA2; (+) strand; PAM type: YTN; PAM sequence: TTT
gctctgacatggaacaaagg

SEQ ID NO: 344169 - DNA, 20 bp, Artificial Sequence
  Description of Artificial Sequence: Synthetic oligonucleotide
  Target: LAMA2; (+) strand; PAM type: YTN; PAM sequence: TTG
ctctgacatggaacaaaggc

SEQ ID NO: 344170 - DNA, 20 bp, Artificial Sequence
  Description of Artificial Sequence: Synthetic oligonucleotide
  Target: LAMA2; (+) strand; PAM type: YTN; PAM sequence: CTC
tgacatggaacaaaggcaaa

SEQ ID NO: 344171 - DNA, 20 bp, Artificial Sequence
  Description of Artificial Sequence: Synthetic oligonucleotide
  Target: LAMA2; (+) strand; PAM type: YTN; PAM sequence: CTG
acatggaacaaaggcaaaag

SEQ ID NO: 344172 - DNA, 20 bp, Artificial Sequence
  Description of Artificial Sequence: Synthetic oligonucleotide
  Target: LAMA2; (+) strand; PAM type: YTN; PAM sequence: TTA
tagaagaatccaaatgtgtc

SEQ ID NO: 344173 - DNA, 20 bp, Artificial Sequence
  Description of Artificial Sequence: Synthetic oligonucleotide
  Target: LAMA2; (+) strand; PAM type: YTN; PAM sequence: CTA
atgtcttcttcatactaatt

SEQ ID NO: 344174 - DNA, 20 bp, Artificial Sequence
  Description of Artificial Sequence: Synthetic oligonucleotide
  Target: LAMA2; (+) strand; PAM type: YTN; PAM sequence: CTT
cttcatactaattccttcta

SEQ ID NO: 344175 - DNA, 20 bp, Artificial Sequence
  Description of Artificial Sequence: Synthetic oligonucleotide
  Target: LAMA2; (+) strand; PAM type: YTN; PAM sequence: TTC
ttcatactaattccttctag

SEQ ID NO: 344176 - DNA, 20 bp, Artificial Sequence
  Description of Artificial Sequence: Synthetic oligonucleotide
  Target: LAMA2; (+) strand; PAM type: YTN; PAM sequence: CTT
catactaattccttctagcc

SEQ ID NO: 344177 - DNA, 20 bp, Artificial Sequence
  Description of Artificial Sequence: Synthetic oligonucleotide
  Target: LAMA2; (+) strand; PAM type: YTN; PAM sequence: TTC
atactaattccttctagcct

SEQ ID NO: 344178 - DNA, 20 bp, Artificial Sequence
  Description of Artificial Sequence: Synthetic oligonucleotide
  Target: LAMA2; (+) strand; PAM type: YTN; PAM sequence: CTA
attccttctagcctttattt

SEQ ID NO: 344179 - DNA, 20 bp, Artificial Sequence
  Description of Artificial Sequence: Synthetic oligonucleotide
  Target: LAMA2; (+) strand; PAM type: YTN; PAM sequence: TTC
cttctagcctttatttaaaa

SEQ ID NO: 344180 - DNA, 20 bp, Artificial Sequence
  Description of Artificial Sequence: Synthetic oligonucleotide
  Target: LAMA2; (+) strand; PAM type: YTN; PAM sequence: CTT
ctagcctttatttaaaaaat

SEQ ID NO: 344181 - DNA, 20 bp, Artificial Sequence
  Description of Artificial Sequence: Synthetic oligonucleotide
  Target: LAMA2; (+) strand; PAM type: YTN; PAM sequence: TTC
tagcctttatttaaaaaata

SEQ ID NO: 344182 - DNA, 20 bp, Artificial Sequence
  Description of Artificial Sequence: Synthetic oligonucleotide
  Target: LAMA2; (+) strand; PAM type: YTN; PAM sequence: CTA
gcctttatttaaaaaatagc

SEQ ID NO: 344183 - DNA, 20 bp, Artificial Sequence
  Description of Artificial Sequence: Synthetic oligonucleotide
  Target: LAMA2; (+) strand; PAM type: YTN; PAM sequence: CTT
tatttaaaaaatagcttctg

SEQ ID NO: 344184 - DNA, 20 bp, Artificial Sequence
  Description of Artificial Sequence: Synthetic oligonucleotide
  Target: LAMA2; (+) strand; PAM type: YTN; PAM sequence: TTT
atttaaaaaatagcttctga

SEQ ID NO: 344185 - DNA, 20 bp, Artificial Sequence
  Description of Artificial Sequence: Synthetic oligonucleotide
  Target: LAMA2; (+) strand; PAM type: YTN; PAM sequence: TTA
tttaaaaaatagcttctgaa

SEQ ID NO: 344186 - DNA, 20 bp, Artificial Sequence
  Description of Artificial Sequence: Synthetic oligonucleotide
  Target: LAMA2; (+) strand; PAM type: YTN; PAM sequence: TTT
aaaaaatagcttctgaattg

SEQ ID NO: 344187 - DNA, 20 bp, Artificial Sequence
  Description of Artificial Sequence: Synthetic oligonucleotide
  Target: LAMA2; (+) strand; PAM type: YTN; PAM sequence: TTA
aaaaatagcttctgaattgc

SEQ ID NO: 344188 - DNA, 20 bp, Artificial Sequence
  Description of Artificial Sequence: Synthetic oligonucleotide
  Target: LAMA2; (+) strand; PAM type: YTN; PAM sequence: CTT
ctgaattgcaaggatatttt

SEQ ID NO: 344189 - DNA, 20 bp, Artificial Sequence
  Description of Artificial Sequence: Synthetic oligonucleotide
  Target: LAMA2; (+) strand; PAM type: YTN; PAM sequence: TTC
tgaattgcaaggatattttt

SEQ ID NO: 344190 - DNA, 20 bp, Artificial Sequence
  Description of Artificial Sequence: Synthetic oligonucleotide
  Target: LAMA2; (+) strand; PAM type: YTN; PAM sequence: CTG
aattgcaaggatatttttaa

SEQ ID NO: 344191 - DNA, 20 bp, Artificial Sequence
  Description of Artificial Sequence: Synthetic oligonucleotide
  Target: LAMA2; (+) strand; PAM type: YTN; PAM sequence: TTG
caaggatatttttaagccac

SEQ ID NO: 344192 - DNA, 20 bp, Artificial Sequence
  Description of Artificial Sequence: Synthetic oligonucleotide
  Target: LAMA2; (+) strand; PAM type: YTN; PAM sequence: TTT
ttaagccacatgaatcagta

SEQ ID NO: 344193 - DNA, 20 bp, Artificial Sequence
  Description of Artificial Sequence: Synthetic oligonucleotide
  Target: LAMA2; (+) strand; PAM type: YTN; PAM sequence: TTT
taagccacatgaatcagtat

SEQ ID NO: 344194 - DNA, 20 bp, Artificial Sequence
  Description of Artificial Sequence: Synthetic oligonucleotide
  Target: LAMA2; (+) strand; PAM type: YTN; PAM sequence: TTT
aagccacatgaatcagtatg

SEQ ID NO: 344195 - DNA, 20 bp, Artificial Sequence
  Description of Artificial Sequence: Synthetic oligonucleotide
  Target: LAMA2; (+) strand; PAM type: YTN; PAM sequence: TTA
agccacatgaatcagtatgc

SEQ ID NO: 344196 - DNA, 20 bp, Artificial Sequence
  Description of Artificial Sequence: Synthetic oligonucleotide
  Target: LAMA2; (+) strand; PAM type: YTN; PAM sequence: CTT
cagctggacttttcaaggag

SEQ ID NO: 344197 - DNA, 20 bp, Artificial Sequence
  Description of Artificial Sequence: Synthetic oligonucleotide
  Target: LAMA2; (+) strand; PAM type: YTN; PAM sequence: TTC
agctggacttttcaaggagc

SEQ ID NO: 344198 - DNA, 20 bp, Artificial Sequence
  Description of Artificial Sequence: Synthetic oligonucleotide
  Target: LAMA2; (+) strand; PAM type: YTN; PAM sequence: CTG
gacttttcaaggagcctgtg

SEQ ID NO: 344199 - DNA, 20 bp, Artificial Sequence
  Description of Artificial Sequence: Synthetic oligonucleotide
  Target: LAMA2; (+) strand; PAM type: YTN; PAM sequence: CTT
ttcaaggagcctgtgaatgc

SEQ ID NO: 344200 - DNA, 20 bp, Artificial Sequence
  Description of Artificial Sequence: Synthetic oligonucleotide
  Target: LAMA2; (+) strand; PAM type: YTN; PAM sequence: TTT
tcaaggagcctgtgaatgct

SEQ ID NO: 344201 - DNA, 20 bp, Artificial Sequence
  Description of Artificial Sequence: Synthetic oligonucleotide
  Target: LAMA2; (+) strand; PAM type: YTN; PAM sequence: TTT
caaggagcctgtgaatgctg

SEQ ID NO: 344202 - DNA, 20 bp, Artificial Sequence
  Description of Artificial Sequence: Synthetic oligonucleotide
  Target: LAMA2; (+) strand; PAM type: YTN; PAM sequence: TTC
aaggagcctgtgaatgctga

SEQ ID NO: 344203 - DNA, 20 bp, Artificial Sequence
  Description of Artificial Sequence: Synthetic oligonucleotide
  Target: LAMA2; (+) strand; PAM type: YTN; PAM sequence: CTG
tgaatgctgaaatgattaac

SEQ ID NO: 344204 - DNA, 20 bp, Artificial Sequence
  Description of Artificial Sequence: Synthetic oligonucleotide
  Target: LAMA2; (+) strand; PAM type: YTN; PAM sequence: CTG
aaatgattaacattatgtga

SEQ ID NO: 344205 - DNA, 20 bp, Artificial Sequence
  Description of Artificial Sequence: Synthetic oligonucleotide
  Target: LAMA2; (+) strand; PAM type: YTN; PAM sequence: TTA
acattatgtgaagctaaatt

SEQ ID NO: 344206 - DNA, 20 bp, Artificial Sequence
  Description of Artificial Sequence: Synthetic oligonucleotide
  Target: LAMA2; (+) strand; PAM type: YTN; PAM sequence: TTA
tgtgaagctaaattgcactg

SEQ ID NO: 344207 - DNA, 20 bp, Artificial Sequence
  Description of Artificial Sequence: Synthetic oligonucleotide
  Target: LAMA2; (+) strand; PAM type: YTN; PAM sequence: CTA
aattgcactgaaccgtggaa

SEQ ID NO: 344208 - DNA, 20 bp, Artificial Sequence
  Description of Artificial Sequence: Synthetic oligonucleotide
  Target: LAMA2; (+) strand; PAM type: YTN; PAM sequence: TTG
cactgaaccgtggaaccatg

SEQ ID NO: 344209 - DNA, 20 bp, Artificial Sequence
  Description of Artificial Sequence: Synthetic oligonucleotide
  Target: LAMA2; (+) strand; PAM type: YTN; PAM sequence: CTG
aaccgtggaaccatgtggtg

SEQ ID NO: 344210 - DNA, 20 bp, Artificial Sequence
  Description of Artificial Sequence: Synthetic oligonucleotide
  Target: LAMA2; (+) strand; PAM type: YTN; PAM sequence: TTA
gtctagaggtccctgctgag

SEQ ID NO: 344211 - DNA, 20 bp, Artificial Sequence
  Description of Artificial Sequence: Synthetic oligonucleotide
  Target: LAMA2; (+) strand; PAM type: YTN; PAM sequence: CTA
gaggtccctgctgagcaaaa

SEQ ID NO: 344212 - DNA, 20 bp, Artificial Sequence
  Description of Artificial Sequence: Synthetic oligonucleotide
  Target: LAMA2; (+) strand; PAM type: YTN; PAM sequence: CTG
ctgagcaaaagacaaagacc

SEQ ID NO: 344213 - DNA, 20 bp, Artificial Sequence
  Description of Artificial Sequence: Synthetic oligonucleotide
  Target: LAMA2; (+) strand; PAM type: YTN; PAM sequence: CTG
agcaaaagacaaagacctcc

SEQ ID NO: 344214 - DNA, 20 bp, Artificial Sequence
  Description of Artificial Sequence: Synthetic oligonucleotide
  Target: LAMA2; (+) strand; PAM type: YTN; PAM sequence: CTC
cttctccattgtcccgcact

SEQ ID NO: 344215 - DNA, 20 bp, Artificial Sequence
  Description of Artificial Sequence: Synthetic oligonucleotide
  Target: LAMA2; (+) strand; PAM type: YTN; PAM sequence: CTT
ctccattgtcccgcactgat

SEQ ID NO: 344216 - DNA, 20 bp, Artificial Sequence
  Description of Artificial Sequence: Synthetic oligonucleotide
  Target: LAMA2; (+) strand; PAM type: YTN; PAM sequence: TTC
tccattgtcccgcactgatg

SEQ ID NO: 344217 - DNA, 20 bp, Artificial Sequence
  Description of Artificial Sequence: Synthetic oligonucleotide
  Target: LAMA2; (+) strand; PAM type: YTN; PAM sequence: CTC
cattgtcccgcactgatggt

SEQ ID NO: 344218 - DNA, 20 bp, Artificial Sequence
  Description of Artificial Sequence: Synthetic oligonucleotide
  Target: LAMA2; (+) strand; PAM type: YTN; PAM sequence: TTG
tcccgcactgatggtgggct

SEQ ID NO: 344219 - DNA, 20 bp, Artificial Sequence
  Description of Artificial Sequence: Synthetic oligonucleotide
  Target: LAMA2; (+) strand; PAM type: YTN; PAM sequence: CTG
atggtgggcttgggatgtat

SEQ ID NO: 344220 - DNA, 20 bp, Artificial Sequence
  Description of Artificial Sequence: Synthetic oligonucleotide
  Target: LAMA2; (+) strand; PAM type: YTN; PAM sequence: CTT
gggatgtattttcagaaata

SEQ ID NO: 344221 - DNA, 20 bp, Artificial Sequence
  Description of Artificial Sequence: Synthetic oligonucleotide
  Target: LAMA2; (+) strand; PAM type: YTN; PAM sequence: TTG
ggatgtattttcagaaataa

SEQ ID NO: 344222 - DNA, 20 bp, Artificial Sequence
  Description of Artificial Sequence: Synthetic oligonucleotide
  Target: LAMA2; (+) strand; PAM type: YTN; PAM sequence: TTT
tcagaaataattatttgcag

SEQ ID NO: 344223 - DNA, 20 bp, Artificial Sequence
  Description of Artificial Sequence: Synthetic oligonucleotide
  Target: LAMA2; (+) strand; PAM type: YTN; PAM sequence: TTT
cagaaataattatttgcagg

SEQ ID NO: 344224 - DNA, 20 bp, Artificial Sequence
  Description of Artificial Sequence: Synthetic oligonucleotide
  Target: LAMA2; (+) strand; PAM type: YTN; PAM sequence: TTC
agaaataattatttgcaggg

SEQ ID NO: 344225 - DNA, 20 bp, Artificial Sequence
  Description of Artificial Sequence: Synthetic oligonucleotide
  Target: LAMA2; (+) strand; PAM type: YTN; PAM sequence: TTA
tttgcagggaacttataaaa

SEQ ID NO: 344226 - DNA, 20 bp, Artificial Sequence
  Description of Artificial Sequence: Synthetic oligonucleotide
  Target: LAMA2; (+) strand; PAM type: YTN; PAM sequence: TTT
gcagggaacttataaaaaca

SEQ ID NO: 344227 - DNA, 20 bp, Artificial Sequence
  Description of Artificial Sequence: Synthetic oligonucleotide
  Target: LAMA2; (+) strand; PAM type: YTN; PAM sequence: TTG
cagggaacttataaaaacaa

SEQ ID NO: 344228 - DNA, 20 bp, Artificial Sequence
  Description of Artificial Sequence: Synthetic oligonucleotide
  Target: LAMA2; (+) strand; PAM type: YTN; PAM sequence: CTT
ataaaaacaaatgaatcacc

SEQ ID NO: 344229 - DNA, 20 bp, Artificial Sequence
  Description of Artificial Sequence: Synthetic oligonucleotide
  Target: LAMA2; (+) strand; PAM type: YTN; PAM sequence: TTA
taaaaacaaatgaatcaccc

SEQ ID NO: 344230 - DNA, 20 bp, Artificial Sequence
  Description of Artificial Sequence: Synthetic oligonucleotide
  Target: LAMA2; (+) strand; PAM type: YTN; PAM sequence: CTC
atcactgtgcttgttccgtt

SEQ ID NO: 344231 - DNA, 20 bp, Artificial Sequence
  Description of Artificial Sequence: Synthetic oligonucleotide
  Target: LAMA2; (+) strand; PAM type: YTN; PAM sequence: CTG
tgcttgttccgttttgggat

SEQ ID NO: 344232 - DNA, 20 bp, Artificial Sequence
  Description of Artificial Sequence: Synthetic oligonucleotide
  Target: LAMA2; (+) strand; PAM type: YTN; PAM sequence: CTT
gttccgttttgggatgtttg

SEQ ID NO: 344233 - DNA, 20 bp, Artificial Sequence
  Description of Artificial Sequence: Synthetic oligonucleotide
  Target: LAMA2; (+) strand; PAM type: YTN; PAM sequence: TTG
ttccgttttgggatgtttgt

SEQ ID NO: 344234 - DNA, 20 bp, Artificial Sequence
  Description of Artificial Sequence: Synthetic oligonucleotide
  Target: LAMA2; (+) strand; PAM type: YTN; PAM sequence: TTC
cgttttgggatgtttgtcta

SEQ ID NO: 344235 - DNA, 20 bp, Artificial Sequence
  Description of Artificial Sequence: Synthetic oligonucleotide
  Target: LAMA2; (+) strand; PAM type: YTN; PAM sequence: TTT
tgggatgtttgtctactaga

SEQ ID NO: 344236 - DNA, 20 bp, Artificial Sequence
  Description of Artificial Sequence: Synthetic oligonucleotide
  Target: LAMA2; (+) strand; PAM type: YTN; PAM sequence: TTT
gggatgtttgtctactagac

SEQ ID NO: 344237 - DNA, 20 bp, Artificial Sequence
  Description of Artificial Sequence: Synthetic oligonucleotide
  Target: LAMA2; (+) strand; PAM type: YTN; PAM sequence: TTG
ggatgtttgtctactagact

SEQ ID NO: 344238 - DNA, 20 bp, Artificial Sequence
  Description of Artificial Sequence: Synthetic oligonucleotide
  Target: LAMA2; (+) strand; PAM type: YTN; PAM sequence: TTT
gtctactagactttctaaat

SEQ ID NO: 344239 - DNA, 20 bp, Artificial Sequence
  Description of Artificial Sequence: Synthetic oligonucleotide
  Target: LAMA2; (+) strand; PAM type: YTN; PAM sequence: TTG
tctactagactttctaaatt

SEQ ID NO: 344240 - DNA, 20 bp, Artificial Sequence
  Description of Artificial Sequence: Synthetic oligonucleotide
  Target: LAMA2; (+) strand; PAM type: YTN; PAM sequence: CTA
ctagactttctaaattggga

SEQ ID NO: 344241 - DNA, 20 bp, Artificial Sequence
  Description of Artificial Sequence: Synthetic oligonucleotide
  Target: LAMA2; (+) strand; PAM type: YTN; PAM sequence: CTA
gactttctaaattgggagat

SEQ ID NO: 344242 - DNA, 20 bp, Artificial Sequence
  Description of Artificial Sequence: Synthetic oligonucleotide
  Target: LAMA2; (+) strand; PAM type: YTN; PAM sequence: CTT
tctaaattgggagatttaga

SEQ ID NO: 344243 - DNA, 20 bp, Artificial Sequence
  Description of Artificial Sequence: Synthetic oligonucleotide
  Target: LAMA2; (+) strand; PAM type: YTN; PAM sequence: TTT
ctaaattgggagatttagaa

SEQ ID NO: 344244 - DNA, 20 bp, Artificial Sequence
  Description of Artificial Sequence: Synthetic oligonucleotide
  Target: LAMA2; (+) strand; PAM type: YTN; PAM sequence: TTC
taaattgggagatttagaaa

SEQ ID NO: 344245 - DNA, 20 bp, Artificial Sequence
  Description of Artificial Sequence: Synthetic oligonucleotide
  Target: LAMA2; (+) strand; PAM type: YTN; PAM sequence: CTA
aattgggagatttagaaatt

SEQ ID NO: 344246 - DNA, 20 bp, Artificial Sequence
  Description of Artificial Sequence: Synthetic oligonucleotide
  Target: LAMA2; (+) strand; PAM type: YTN; PAM sequence: TTG
ggagatttagaaattcagta

SEQ ID NO: 344247 - DNA, 20 bp, Artificial Sequence
  Description of Artificial Sequence: Synthetic oligonucleotide
  Target: LAMA2; (+) strand; PAM type: YTN; PAM sequence: TTT
agaaattcagtaagaaagat

SEQ ID NO: 344248 - DNA, 20 bp, Artificial Sequence
  Description of Artificial Sequence: Synthetic oligonucleotide
  Target: LAMA2; (+) strand; PAM type: YTN; PAM sequence: TTA
gaaattcagtaagaaagata

SEQ ID NO: 344249 - DNA, 20 bp, Artificial Sequence
  Description of Artificial Sequence: Synthetic oligonucleotide
  Target: LAMA2; (+) strand; PAM type: YTN; PAM sequence: TTC
agtaagaaagatatttaaaa

SEQ ID NO: 344250 - DNA, 20 bp, Artificial Sequence
  Description of Artificial Sequence: Synthetic oligonucleotide
  Target: LAMA2; (+) strand; PAM type: YTN; PAM sequence: TTT
aaaaaaattttttgaggtcc

SEQ ID NO: 344251 - DNA, 20 bp, Artificial Sequence
  Description of Artificial Sequence: Synthetic oligonucleotide
  Target: LAMA2; (+) strand; PAM type: YTN; PAM sequence: TTA
aaaaaattttttgaggtcct

SEQ ID NO: 344252 - DNA, 20 bp, Artificial Sequence
  Description of Artificial Sequence: Synthetic oligonucleotide
  Target: LAMA2; (+) strand; PAM type: YTN; PAM sequence: TTT
tttgaggtcctcagtgtctt

SEQ ID NO: 344253 - DNA, 20 bp, Artificial Sequence
  Description of Artificial Sequence: Synthetic oligonucleotide
  Target: LAMA2; (+) strand; PAM type: YTN; PAM sequence: TTT
ttgaggtcctcagtgtcttc

SEQ ID NO: 344254 - DNA, 20 bp, Artificial Sequence
  Description of Artificial Sequence: Synthetic oligonucleotide
  Target: LAMA2; (+) strand; PAM type: YTN; PAM sequence: TTT
tgaggtcctcagtgtcttct

SEQ ID NO: 344255 - DNA, 20 bp, Artificial Sequence
  Description of Artificial Sequence: Synthetic oligonucleotide
  Target: LAMA2; (+) strand; PAM type: YTN; PAM sequence: TTT
gaggtcctcagtgtcttctg

SEQ ID NO: 344256 - DNA, 20 bp, Artificial Sequence
  Description of Artificial Sequence: Synthetic oligonucleotide
  Target: LAMA2; (+) strand; PAM type: YTN; PAM sequence: TTG
aggtcctcagtgtcttctgc

SEQ ID NO: 344257 - DNA, 20 bp, Artificial Sequence
  Description of Artificial Sequence: Synthetic oligonucleotide
  Target: LAMA2; (+) strand; PAM type: YTN; PAM sequence: CTC
agtgtcttctgcaagtacac

SEQ ID NO: 344258 - DNA, 20 bp, Artificial Sequence
  Description of Artificial Sequence: Synthetic oligonucleotide
  Target: LAMA2; (+) strand; PAM type: YTN; PAM sequence: CTT
ctgcaagtacactttcaatt

SEQ ID NO: 344259 - DNA, 20 bp, Artificial Sequence
  Description of Artificial Sequence: Synthetic oligonucleotide
  Target: LAMA2; (+) strand; PAM type: YTN; PAM sequence: TTC
tgcaagtacactttcaattt

SEQ ID NO: 344260 - DNA, 20 bp, Artificial Sequence
  Description of Artificial Sequence: Synthetic oligonucleotide
  Target: LAMA2; (+) strand; PAM type: YTN; PAM sequence: CTG
caagtacactttcaattttt

SEQ ID NO: 344261 - DNA, 20 bp, Artificial Sequence
  Description of Artificial Sequence: Synthetic oligonucleotide
  Target: LAMA2; (+) strand; PAM type: YTN; PAM sequence: CTT
tcaatttttattacagacag

SEQ ID NO: 344262 - DNA, 20 bp, Artificial Sequence
  Description of Artificial Sequence: Synthetic oligonucleotide
  Target: LAMA2; (+) strand; PAM type: YTN; PAM sequence: TTT
caatttttattacagacaga

SEQ ID NO: 344263 - DNA, 20 bp, Artificial Sequence
  Description of Artificial Sequence: Synthetic oligonucleotide
  Target: LAMA2; (+) strand; PAM type: YTN; PAM sequence: TTC
aatttttattacagacagac

SEQ ID NO: 344264 - DNA, 20 bp, Artificial Sequence
  Description of Artificial Sequence: Synthetic oligonucleotide
  Target: LAMA2; (+) strand; PAM type: YTN; PAM sequence: TTT
ttattacagacagactctct

SEQ ID NO: 344265 - DNA, 20 bp, Artificial Sequence
  Description of Artificial Sequence: Synthetic oligonucleotide
  Target: LAMA2; (+) strand; PAM type: YTN; PAM sequence: TTT
tattacagacagactctctt

SEQ ID NO: 344266 - DNA, 20 bp, Artificial Sequence
  Description of Artificial Sequence: Synthetic oligonucleotide
  Target: LAMA2; (+) strand; PAM type: YTN; PAM sequence: TTT
attacagacagactctcttg

SEQ ID NO: 344267 - DNA, 20 bp, Artificial Sequence
  Description of Artificial Sequence: Synthetic oligonucleotide
  Target: LAMA2; (+) strand; PAM type: YTN; PAM sequence: TTA
ttacagacagactctcttga

SEQ ID NO: 344268 - DNA, 20 bp, Artificial Sequence
  Description of Artificial Sequence: Synthetic oligonucleotide
  Target: LAMA2; (+) strand; PAM type: YTN; PAM sequence: TTA
cagacagactctcttgatgc

SEQ ID NO: 344269 - DNA, 20 bp, Artificial Sequence
  Description of Artificial Sequence: Synthetic oligonucleotide
  Target: LAMA2; (+) strand; PAM type: YTN; PAM sequence: CTC
tcttgatgctgttgtttacc

SEQ ID NO: 344270 - DNA, 20 bp, Artificial Sequence
  Description of Artificial Sequence: Synthetic oligonucleotide
  Target: LAMA2; (+) strand; PAM type: YTN; PAM sequence: CTC
ttgatgctgttgtttaccat

SEQ ID NO: 344271 - DNA, 20 bp, Artificial Sequence
  Description of Artificial Sequence: Synthetic oligonucleotide
  Target: LAMA2; (+) strand; PAM type: YTN; PAM sequence: CTT
gatgctgttgtttaccattg

SEQ ID NO: 344272 - DNA, 20 bp, Artificial Sequence
  Description of Artificial Sequence: Synthetic oligonucleotide
  Target: LAMA2; (+) strand; PAM type: YTN; PAM sequence: TTG
atgctgttgtttaccattgc

SEQ ID NO: 344273 - DNA, 20 bp, Artificial Sequence
  Description of Artificial Sequence: Synthetic oligonucleotide
  Target: LAMA2; (+) strand; PAM type: YTN; PAM sequence: CTG
ttgtttaccattgcattttt

SEQ ID NO: 344274 - DNA, 20 bp, Artificial Sequence
  Description of Artificial Sequence: Synthetic oligonucleotide
  Target: LAMA2; (+) strand; PAM type: YTN; PAM sequence: TTG
tttaccattgcatttttatt

SEQ ID NO: 344275 - DNA, 20 bp, Artificial Sequence
  Description of Artificial Sequence: Synthetic oligonucleotide
  Target: LAMA2; (+) strand; PAM type: YTN; PAM sequence: TTT
accattgcatttttatttaa

SEQ ID NO: 344276 - DNA, 20 bp, Artificial Sequence
  Description of Artificial Sequence: Synthetic oligonucleotide
  Target: LAMA2; (+) strand; PAM type: YTN; PAM sequence: TTA
ccattgcatttttatttaac

SEQ ID NO: 344277 - DNA, 20 bp, Artificial Sequence
  Description of Artificial Sequence: Synthetic oligonucleotide
  Target: LAMA2; (+) strand; PAM type: YTN; PAM sequence: TTG
catttttatttaacttgaat

SEQ ID NO: 344278 - DNA, 20 bp, Artificial Sequence
  Description of Artificial Sequence: Synthetic oligonucleotide
  Target: LAMA2; (+) strand; PAM type: YTN; PAM sequence: TTT
ttatttaacttgaatatttt

SEQ ID NO: 344279 - DNA, 20 bp, Artificial Sequence
  Description of Artificial Sequence: Synthetic oligonucleotide
  Target: LAMA2; (+) strand; PAM type: YTN; PAM sequence: TTT
tatttaacttgaatatttta

SEQ ID NO: 344280 - DNA, 20 bp, Artificial Sequence
  Description of Artificial Sequence: Synthetic oligonucleotide
  Target: LAMA2; (+) strand; PAM type: YTN; PAM sequence: TTT
atttaacttgaatattttaa

SEQ ID NO: 344281 - DNA, 20 bp, Artificial Sequence
  Description of Artificial Sequence: Synthetic oligonucleotide
  Target: LAMA2; (+) strand; PAM type: YTN; PAM sequence: TTA
tttaacttgaatattttaat

SEQ ID NO: 344282 - DNA, 20 bp, Artificial Sequence
  Description of Artificial Sequence: Synthetic oligonucleotide
  Target: LAMA2; (+) strand; PAM type: YTN; PAM sequence: TTT
aacttgaatattttaattta

SEQ ID NO: 344283 - DNA, 20 bp, Artificial Sequence
  Description of Artificial Sequence: Synthetic oligonucleotide
  Target: LAMA2; (+) strand; PAM type: YTN; PAM sequence: TTA
acttgaatattttaatttag

SEQ ID NO: 344284 - DNA, 20 bp, Artificial Sequence
  Description of Artificial Sequence: Synthetic oligonucleotide
  Target: LAMA2; (+) strand; PAM type: YTN; PAM sequence: CTT
gaatattttaatttagcatg

SEQ ID NO: 344285 - DNA, 20 bp, Artificial Sequence
  Description of Artificial Sequence: Synthetic oligonucleotide
  Target: LAMA2; (+) strand; PAM type: YTN; PAM sequence: TTG
aatattttaatttagcatga

SEQ ID NO: 344286 - DNA, 20 bp, Artificial Sequence
  Description of Artificial Sequence: Synthetic oligonucleotide
  Target: LAMA2; (+) strand; PAM type: YTN; PAM sequence: TTT
taatttagcatgagtcattc

SEQ ID NO: 344287 - DNA, 20 bp, Artificial Sequence
  Description of Artificial Sequence: Synthetic oligonucleotide
  Target: LAMA2; (+) strand; PAM type: YTN; PAM sequence: TTT
aatttagcatgagtcattcc

SEQ ID NO: 344288 - DNA, 20 bp, Artificial Sequence
  Description of Artificial Sequence: Synthetic oligonucleotide
  Target: LAMA2; (+) strand; PAM type: YTN; PAM sequence: TTA
atttagcatgagtcattccc

SEQ ID NO: 344289 - DNA, 20 bp, Artificial Sequence
  Description of Artificial Sequence: Synthetic oligonucleotide
  Target: LAMA2; (+) strand; PAM type: YTN; PAM sequence: TTT
agcatgagtcattcccatgg

SEQ ID NO: 344290 - DNA, 20 bp, Artificial Sequence
  Description of Artificial Sequence: Synthetic oligonucleotide
  Target: LAMA2; (+) strand; PAM type: YTN; PAM sequence: TTA
gcatgagtcattcccatgga

SEQ ID NO: 344291 - DNA, 20 bp, Artificial Sequence
  Description of Artificial Sequence: Synthetic oligonucleotide
  Target: LAMA2; (+) strand; PAM type: YTN; PAM sequence: TTC
ccatggattagcaactttgt

SEQ ID NO: 344292 - DNA, 20 bp, Artificial Sequence
  Description of Artificial Sequence: Synthetic oligonucleotide
  Target: LAMA2; (+) strand; PAM type: YTN; PAM sequence: TTA
gcaactttgtatgctagcat

SEQ ID NO: 344293 - DNA, 20 bp, Artificial Sequence
  Description of Artificial Sequence: Synthetic oligonucleotide
  Target: LAMA2; (+) strand; PAM type: YTN; PAM sequence: CTT
tgtatgctagcatatctagt

SEQ ID NO: 344294 - DNA, 20 bp, Artificial Sequence
  Description of Artificial Sequence: Synthetic oligonucleotide
  Target: LAMA2; (+) strand; PAM type: YTN; PAM sequence: TTT
gtatgctagcatatctagtt

SEQ ID NO: 344295 - DNA, 20 bp, Artificial Sequence
  Description of Artificial Sequence: Synthetic oligonucleotide
  Target: LAMA2; (+) strand; PAM type: YTN; PAM sequence: TTG
tatgctagcatatctagttg

SEQ ID NO: 344296 - DNA, 20 bp, Artificial Sequence
  Description of Artificial Sequence: Synthetic oligonucleotide
  Target: LAMA2; (+) strand; PAM type: YTN; PAM sequence: CTA
gcatatctagttgtatcttc

SEQ ID NO: 344297 - DNA, 20 bp, Artificial Sequence
  Description of Artificial Sequence: Synthetic oligonucleotide
  Target: LAMA2; (+) strand; PAM type: YTN; PAM sequence: CTA
gttgtatcttctgtgtgttt

SEQ ID NO: 344298 - DNA, 20 bp, Artificial Sequence
  Description of Artificial Sequence: Synthetic oligonucleotide
  Target: LAMA2; (+) strand; PAM type: YTN; PAM sequence: TTG
tatcttctgtgtgttttcaa

SEQ ID NO: 344299 - DNA, 20 bp, Artificial Sequence
  Description of Artificial Sequence: Synthetic oligonucleotide
  Target: LAMA2; (+) strand; PAM type: YTN; PAM sequence: CTT
ctgtgtgttttcaatggtgt

SEQ ID NO: 344300 - DNA, 20 bp, Artificial Sequence
  Description of Artificial Sequence: Synthetic oligonucleotide
  Target: LAMA2; (+) strand; PAM type: YTN; PAM sequence: TTC
tgtgtgttttcaatggtgtg

SEQ ID NO: 344301 - DNA, 20 bp, Artificial Sequence
  Description of Artificial Sequence: Synthetic oligonucleotide
  Target: LAMA2; (+) strand; PAM type: YTN; PAM sequence: CTG
tgtgttttcaatggtgtgtc

SEQ ID NO: 344302 - DNA, 20 bp, Artificial Sequence
  Description of Artificial Sequence: Synthetic oligonucleotide
  Target: LAMA2; (+) strand; PAM type: YTN; PAM sequence: TTT
tcaatggtgtgtctgctact

SEQ ID NO: 344303 - DNA, 20 bp, Artificial Sequence
  Description of Artificial Sequence: Synthetic oligonucleotide
  Target: LAMA2; (+) strand; PAM type: YTN; PAM sequence: TTT
caatggtgtgtctgctactc

SEQ ID NO: 344304 - DNA, 20 bp, Artificial Sequence
  Description of Artificial Sequence: Synthetic oligonucleotide
  Target: LAMA2; (+) strand; PAM type: YTN; PAM sequence: TTC
aatggtgtgtctgctactcc

SEQ ID NO: 344305 - DNA, 20 bp, Artificial Sequence
  Description of Artificial Sequence: Synthetic oligonucleotide
  Target: LAMA2; (+) strand; PAM type: YTN; PAM sequence: CTG
ctactccaaagatcttcctg

SEQ ID NO: 344306 - DNA, 20 bp, Artificial Sequence
  Description of Artificial Sequence: Synthetic oligonucleotide
  Target: LAMA2; (+) strand; PAM type: YTN; PAM sequence: CTA
ctccaaagatcttcctgaat

SEQ ID NO: 344307 - DNA, 20 bp, Artificial Sequence
  Description of Artificial Sequence: Synthetic oligonucleotide
  Target: LAMA2; (+) strand; PAM type: YTN; PAM sequence: CTC
caaagatcttcctgaatttt

SEQ ID NO: 344308 - DNA, 20 bp, Artificial Sequence
  Description of Artificial Sequence: Synthetic oligonucleotide
  Target: LAMA2; (+) strand; PAM type: YTN; PAM sequence: CTT
cctgaattttacatattaga

SEQ ID NO: 344309 - DNA, 20 bp, Artificial Sequence
  Description of Artificial Sequence: Synthetic oligonucleotide
  Target: LAMA2; (+) strand; PAM type: YTN; PAM sequence: TTC
ctgaattttacatattagaa

SEQ ID NO: 344310 - DNA, 20 bp, Artificial Sequence
  Description of Artificial Sequence: Synthetic oligonucleotide
  Target: LAMA2; (+) strand; PAM type: YTN; PAM sequence: CTG
aattttacatattagaagtg

SEQ ID NO: 344311 - DNA, 20 bp, Artificial Sequence
  Description of Artificial Sequence: Synthetic oligonucleotide
  Target: LAMA2; (+) strand; PAM type: YTN; PAM sequence: TTT
tacatattagaagtggcata

SEQ ID NO: 344312 - DNA, 20 bp, Artificial Sequence
  Description of Artificial Sequence: Synthetic oligonucleotide
  Target: LAMA2; (+) strand; PAM type: YTN; PAM sequence: TTT
acatattagaagtggcatag

SEQ ID NO: 344313 - DNA, 20 bp, Artificial Sequence
  Description of Artificial Sequence: Synthetic oligonucleotide
  Target: LAMA2; (+) strand; PAM type: YTN; PAM sequence: TTA
catattagaagtggcatagc

SEQ ID NO: 344314 - DNA, 20 bp, Artificial Sequence
  Description of Artificial Sequence: Synthetic oligonucleotide
  Target: LAMA2; (+) strand; PAM type: YTN; PAM sequence: TTA
gaagtggcatagcctcatga

SEQ ID NO: 344315 - DNA, 20 bp, Artificial Sequence
  Description of Artificial Sequence: Synthetic oligonucleotide
  Target: LAMA2; (+) strand; PAM type: YTN; PAM sequence: CTC
atgacactttatatcaagca

SEQ ID NO: 344316 - DNA, 20 bp, Artificial Sequence
  Description of Artificial Sequence: Synthetic oligonucleotide
  Target: LAMA2; (+) strand; PAM type: YTN; PAM sequence: CTT
tatatcaagcaggaagttct

SEQ ID NO: 344317 - DNA, 20 bp, Artificial Sequence
  Description of Artificial Sequence: Synthetic oligonucleotide
  Target: LAMA2; (+) strand; PAM type: YTN; PAM sequence: TTT
atatcaagcaggaagttctg

SEQ ID NO: 344318 - DNA, 20 bp, Artificial Sequence
  Description of Artificial Sequence: Synthetic oligonucleotide
  Target: LAMA2; (+) strand; PAM type: YTN; PAM sequence: TTA
tatcaagcaggaagttctgg

SEQ ID NO: 344319 - DNA, 20 bp, Artificial Sequence
  Description of Artificial Sequence: Synthetic oligonucleotide
  Target: LAMA2; (+) strand; PAM type: YTN; PAM sequence: TTC
tggaagatgatgctaacaaa

SEQ ID NO: 344320 - DNA, 20 bp, Artificial Sequence
  Description of Artificial Sequence: Synthetic oligonucleotide
  Target: LAMA2; (+) strand; PAM type: YTN; PAM sequence: CTG
gaagatgatgctaacaaata

SEQ ID NO: 344321 - DNA, 20 bp, Artificial Sequence
  Description of Artificial Sequence: Synthetic oligonucleotide
  Target: LAMA2; (+) strand; PAM type: YTN; PAM sequence: CTA
acaaatacctcaaatctgga

SEQ ID NO: 344322 - DNA, 20 bp, Artificial Sequence
  Description of Artificial Sequence: Synthetic oligonucleotide
  Target: LAMA2; (+) strand; PAM type: YTN; PAM sequence: CTC
aaatctggaaattgtaggct

SEQ ID NO: 344323 - DNA, 20 bp, Artificial Sequence
  Description of Artificial Sequence: Synthetic oligonucleotide
  Target: LAMA2; (+) strand; PAM type: YTN; PAM sequence: CTG
gaaattgtaggctttagaaa

SEQ ID NO: 344324 - DNA, 20 bp, Artificial Sequence
  Description of Artificial Sequence: Synthetic oligonucleotide
  Target: LAMA2; (+) strand; PAM type: YTN; PAM sequence: TTG
taggctttagaaaaataaag

SEQ ID NO: 344325 - DNA, 20 bp, Artificial Sequence
  Description of Artificial Sequence: Synthetic oligonucleotide
  Target: LAMA2; (+) strand; PAM type: YTN; PAM sequence: CTT
tagaaaaataaagtcatctt

SEQ ID NO: 344326 - DNA, 20 bp, Artificial Sequence
  Description of Artificial Sequence: Synthetic oligonucleotide
  Target: LAMA2; (+) strand; PAM type: YTN; PAM sequence: TTT
agaaaaataaagtcatcttg

SEQ ID NO: 344327 - DNA, 20 bp, Artificial Sequence
  Description of Artificial Sequence: Synthetic oligonucleotide
  Target: LAMA2; (+) strand; PAM type: YTN; PAM sequence: TTA
gaaaaataaagtcatcttgt

SEQ ID NO: 344328 - DNA, 20 bp, Artificial Sequence
  Description of Artificial Sequence: Synthetic oligonucleotide
  Target: LAMA2; (+) strand; PAM type: YTN; PAM sequence: CTT
gttagtgaatctctatatta

SEQ ID NO: 344329 - DNA, 20 bp, Artificial Sequence
  Description of Artificial Sequence: Synthetic oligonucleotide
  Target: LAMA2; (+) strand; PAM type: YTN; PAM sequence: TTG
ttagtgaatctctatattag

SEQ ID NO: 344330 - DNA, 20 bp, Artificial Sequence
  Description of Artificial Sequence: Synthetic oligonucleotide
  Target: LAMA2; (+) strand; PAM type: YTN; PAM sequence: TTA
gtgaatctctatattagact

SEQ ID NO: 344331 - DNA, 20 bp, Artificial Sequence
  Description of Artificial Sequence: Synthetic oligonucleotide
  Target: LAMA2; (+) strand; PAM type: YTN; PAM sequence: CTC
tatattagactttctaatac

SEQ ID NO: 344332 - DNA, 20 bp, Artificial Sequence
  Description of Artificial Sequence: Synthetic oligonucleotide
  Target: LAMA2; (+) strand; PAM type: YTN; PAM sequence: CTA
tattagactttctaatacct

SEQ ID NO: 344333 - DNA, 20 bp, Artificial Sequence
  Description of Artificial Sequence: Synthetic oligonucleotide
  Target: LAMA2; (+) strand; PAM type: YTN; PAM sequence: TTA
gactttctaataccttataa

SEQ ID NO: 344334 - DNA, 20 bp, Artificial Sequence
  Description of Artificial Sequence: Synthetic oligonucleotide
  Target: LAMA2; (+) strand; PAM type: YTN; PAM sequence: CTT
tctaataccttataaacagg

SEQ ID NO: 344335 - DNA, 20 bp, Artificial Sequence
  Description of Artificial Sequence: Synthetic oligonucleotide
  Target: LAMA2; (+) strand; PAM type: YTN; PAM sequence: TTT
ctaataccttataaacaggt

SEQ ID NO: 344336 - DNA, 20 bp, Artificial Sequence
  Description of Artificial Sequence: Synthetic oligonucleotide
  Target: LAMA2; (+) strand; PAM type: YTN; PAM sequence: TTC
taataccttataaacaggtt

SEQ ID NO: 344337 - DNA, 20 bp, Artificial Sequence
  Description of Artificial Sequence: Synthetic oligonucleotide
  Target: LAMA2; (+) strand; PAM type: YTN; PAM sequence: CTA
ataccttataaacaggtttt

SEQ ID NO: 344338 - DNA, 20 bp, Artificial Sequence
  Description of Artificial Sequence: Synthetic oligonucleotide
  Target: LAMA2; (+) strand; PAM type: YTN; PAM sequence: CTT
ataaacaggttttcagaaat

SEQ ID NO: 344339 - DNA, 20 bp, Artificial Sequence
  Description of Artificial Sequence: Synthetic oligonucleotide
  Target: LAMA2; (+) strand; PAM type: YTN; PAM sequence: TTA
taaacaggttttcagaaatt

SEQ ID NO: 344340 - DNA, 20 bp, Artificial Sequence
  Description of Artificial Sequence: Synthetic oligonucleotide
  Target: LAMA2; (+) strand; PAM type: YTN; PAM sequence: TTT
tcagaaattaattatattta

SEQ ID NO: 344341 - DNA, 20 bp, Artificial Sequence
  Description of Artificial Sequence: Synthetic oligonucleotide
  Target: LAMA2; (+) strand; PAM type: YTN; PAM sequence: TTT
cagaaattaattatatttat

SEQ ID NO: 344342 - DNA, 20 bp, Artificial Sequence
  Description of Artificial Sequence: Synthetic oligonucleotide
  Target: LAMA2; (+) strand; PAM type: YTN; PAM sequence: TTC
agaaattaattatatttata

SEQ ID NO: 344343 - DNA, 20 bp, Artificial Sequence
  Description of Artificial Sequence: Synthetic oligonucleotide
  Target: LAMA2; (+) strand; PAM type: YTN; PAM sequence: TTA
attatatttatagcctcgag

SEQ ID NO: 344344 - DNA, 20 bp, Artificial Sequence
  Description of Artificial Sequence: Synthetic oligonucleotide
  Target: LAMA2; (+) strand; PAM type: YTN; PAM sequence: TTA
tatttatagcctcgagaaac

SEQ ID NO: 344345 - DNA, 20 bp, Artificial Sequence
  Description of Artificial Sequence: Synthetic oligonucleotide
  Target: LAMA2; (+) strand; PAM type: YTN; PAM sequence: TTT
atagcctcgagaaactaggg

SEQ ID NO: 344346 - DNA, 20 bp, Artificial Sequence
  Description of Artificial Sequence: Synthetic oligonucleotide
  Target: LAMA2; (+) strand; PAM type: YTN; PAM sequence: TTA
tagcctcgagaaactaggga

SEQ ID NO: 344347 - DNA, 20 bp, Artificial Sequence
  Description of Artificial Sequence: Synthetic oligonucleotide
  Target: LAMA2; (+) strand; PAM type: YTN; PAM sequence: CTC
gagaaactagggaaaaagct

SEQ ID NO: 344348 - DNA, 20 bp, Artificial Sequence
  Description of Artificial Sequence: Synthetic oligonucleotide
  Target: LAMA2; (+) strand; PAM type: YTN; PAM sequence: CTA
gggaaaaagctggatctcaa

SEQ ID NO: 344349 - DNA, 20 bp, Artificial Sequence
  Description of Artificial Sequence: Synthetic oligonucleotide
  Target: LAMA2; (+) strand; PAM type: YTN; PAM sequence: CTG
gatctcaaagacattattac

SEQ ID NO: 344350 - DNA, 20 bp, Artificial Sequence
  Description of Artificial Sequence: Synthetic oligonucleotide
  Target: LAMA2; (+) strand; PAM type: YTN; PAM sequence: CTC
aaagacattattacaaagca

SEQ ID NO: 344351 - DNA, 20 bp, Artificial Sequence
  Description of Artificial Sequence: Synthetic oligonucleotide
  Target: LAMA2; (+) strand; PAM type: YTN; PAM sequence: TTA
ttacaaagcagtagtaaatt

SEQ ID NO: 344352 - DNA, 20 bp, Artificial Sequence
  Description of Artificial Sequence: Synthetic oligonucleotide
  Target: LAMA2; (+) strand; PAM type: YTN; PAM sequence: TTA
caaagcagtagtaaattata

SEQ ID NO: 344353 - DNA, 20 bp, Artificial Sequence
  Description of Artificial Sequence: Synthetic oligonucleotide
  Target: LAMA2; (+) strand; PAM type: YTN; PAM sequence: TTA
taaacaatatattttgaatt

SEQ ID NO: 344354 - DNA, 20 bp, Artificial Sequence
  Description of Artificial Sequence: Synthetic oligonucleotide
  Target: LAMA2; (+) strand; PAM type: YTN; PAM sequence: TTT
tgaattcataattaaaatta

SEQ ID NO: 344355 - DNA, 20 bp, Artificial Sequence
  Description of Artificial Sequence: Synthetic oligonucleotide
  Target: LAMA2; (+) strand; PAM type: YTN; PAM sequence: TTT
gaattcataattaaaattaa

SEQ ID NO: 344356 - DNA, 20 bp, Artificial Sequence
  Description of Artificial Sequence: Synthetic oligonucleotide
  Target: LAMA2; (+) strand; PAM type: YTN; PAM sequence: TTG
aattcataattaaaattaac

SEQ ID NO: 344357 - DNA, 20 bp, Artificial Sequence
  Description of Artificial Sequence: Synthetic oligonucleotide
  Target: LAMA2; (+) strand; PAM type: YTN; PAM sequence: TTC
ataattaaaattaacgagtc

SEQ ID NO: 344358 - DNA, 20 bp, Artificial Sequence
  Description of Artificial Sequence: Synthetic oligonucleotide
  Target: LAMA2; (+) strand; PAM type: YTN; PAM sequence: TTA
aaattaacgagtcaattttc

SEQ ID NO: 344359 - DNA, 20 bp, Artificial Sequence
  Description of Artificial Sequence: Synthetic oligonucleotide
  Target: LAMA2; (+) strand; PAM type: YTN; PAM sequence: TTA
acgagtcaattttctgaggc

SEQ ID NO: 344360 - DNA, 20 bp, Artificial Sequence
  Description of Artificial Sequence: Synthetic oligonucleotide
  Target: LAMA2; (+) strand; PAM type: YTN; PAM sequence: TTT
tctgaggcattgacctatta

SEQ ID NO: 344361 - DNA, 20 bp, Artificial Sequence
  Description of Artificial Sequence: Synthetic oligonucleotide
  Target: LAMA2; (+) strand; PAM type: YTN; PAM sequence: TTT
ctgaggcattgacctattaa

SEQ ID NO: 344362 - DNA, 20 bp, Artificial Sequence
  Description of Artificial Sequence: Synthetic oligonucleotide
  Target: LAMA2; (+) strand; PAM type: YTN; PAM sequence: TTC
tgaggcattgacctattaaa

SEQ ID NO: 344363 - DNA, 20 bp, Artificial Sequence
  Description of Artificial Sequence: Synthetic oligonucleotide
  Target: LAMA2; (+) strand; PAM type: YTN; PAM sequence: CTG
aggcattgacctattaaaga

SEQ ID NO: 344364 - DNA, 20 bp, Artificial Sequence
  Description of Artificial Sequence: Synthetic oligonucleotide
  Target: LAMA2; (+) strand; PAM type: YTN; PAM sequence: TTG
acctattaaagatttatgag

SEQ ID NO: 344365 - DNA, 20 bp, Artificial Sequence
  Description of Artificial Sequence: Synthetic oligonucleotide
  Target: LAMA2; (+) strand; PAM type: YTN; PAM sequence: CTA
ttaaagatttatgagttacc

SEQ ID NO: 344366 - DNA, 20 bp, Artificial Sequence
  Description of Artificial Sequence: Synthetic oligonucleotide
  Target: LAMA2; (+) strand; PAM type: YTN; PAM sequence: TTA
aagatttatgagttacctaa

SEQ ID NO: 344367 - DNA, 20 bp, Artificial Sequence
  Description of Artificial Sequence: Synthetic oligonucleotide
  Target: LAMA2; (+) strand; PAM type: YTN; PAM sequence: TTT
atgagttacctaaaatccca

SEQ ID NO: 344368 - DNA, 20 bp, Artificial Sequence
  Description of Artificial Sequence: Synthetic oligonucleotide
  Target: LAMA2; (+) strand; PAM type: YTN; PAM sequence: TTA
tgagttacctaaaatcccaa

SEQ ID NO: 344369 - DNA, 20 bp, Artificial Sequence
  Description of Artificial Sequence: Synthetic oligonucleotide
  Target: LAMA2; (+) strand; PAM type: YTN; PAM sequence: TTA
cctaaaatcccaaatcttcc

SEQ ID NO: 344370 - DNA, 20 bp, Artificial Sequence
  Description of Artificial Sequence: Synthetic oligonucleotide
  Target: LAMA2; (+) strand; PAM type: YTN; PAM sequence: CTA
aaatcccaaatcttccctga

SEQ ID NO: 344371 - DNA, 20 bp, Artificial Sequence
  Description of Artificial Sequence: Synthetic oligonucleotide
  Target: LAMA2; (+) strand; PAM type: YTN; PAM sequence: CTT
ccctgaggtaatagcttcag

SEQ ID NO: 344372 - DNA, 20 bp, Artificial Sequence
  Description of Artificial Sequence: Synthetic oligonucleotide
  Target: LAMA2; (+) strand; PAM type: YTN; PAM sequence: TTC
cctgaggtaatagcttcagt

SEQ ID NO: 344373 - DNA, 20 bp, Artificial Sequence
  Description of Artificial Sequence: Synthetic oligonucleotide
  Target: LAMA2; (+) strand; PAM type: YTN; PAM sequence: CTG
aggtaatagcttcagttgag

SEQ ID NO: 344374 - DNA, 20 bp, Artificial Sequence
  Description of Artificial Sequence: Synthetic oligonucleotide
  Target: LAMA2; (+) strand; PAM type: YTN; PAM sequence: CTT
cagttgagataaagggaagg

SEQ ID NO: 344375 - DNA, 20 bp, Artificial Sequence
  Description of Artificial Sequence: Synthetic oligonucleotide
  Target: LAMA2; (+) strand; PAM type: YTN; PAM sequence: TTC
agttgagataaagggaaggt

SEQ ID NO: 344376 - DNA, 20 bp, Artificial Sequence
  Description of Artificial Sequence: Synthetic oligonucleotide
  Target: LAMA2; (+) strand; PAM type: YTN; PAM sequence: TTG
agataaagggaaggtatctt

SEQ ID NO: 344377 - DNA, 20 bp, Artificial Sequence
  Description of Artificial Sequence: Synthetic oligonucleotide
  Target: LAMA2; (+) strand; PAM type: YTN; PAM sequence: CTT
atttgtcgcttcactgcagg

SEQ ID NO: 344378 - DNA, 20 bp, Artificial Sequence
  Description of Artificial Sequence: Synthetic oligonucleotide
  Target: LAMA2; (+) strand; PAM type: YTN; PAM sequence: TTA
tttgtcgcttcactgcagga

SEQ ID NO: 344379 - DNA, 20 bp, Artificial Sequence
  Description of Artificial Sequence: Synthetic oligonucleotide
  Target: LAMA2; (+) strand; PAM type: YTN; PAM sequence: TTT
gtcgcttcactgcaggaaaa

SEQ ID NO: 344380 - DNA, 20 bp, Artificial Sequence
  Description of Artificial Sequence: Synthetic oligonucleotide
  Target: LAMA2; (+) strand; PAM type: YTN; PAM sequence: TTG
tcgcttcactgcaggaaaaa

SEQ ID NO: 344381 - DNA, 20 bp, Artificial Sequence
  Description of Artificial Sequence: Synthetic oligonucleotide
  Target: LAMA2; (+) strand; PAM type: YTN; PAM sequence: CTT
cactgcaggaaaaaataaaa

SEQ ID NO: 344382 - DNA, 20 bp, Artificial Sequence
  Description of Artificial Sequence: Synthetic oligonucleotide
  Target: LAMA2; (+) strand; PAM type: YTN; PAM sequence: TTC
actgcaggaaaaaataaaat

SEQ ID NO: 344383 - DNA, 20 bp, Artificial Sequence
  Description of Artificial Sequence: Synthetic oligonucleotide
  Target: LAMA2; (+) strand; PAM type: YTN; PAM sequence: CTG
caggaaaaaataaaatttgt

SEQ ID NO: 344384 - DNA, 20 bp, Artificial Sequence
  Description of Artificial Sequence: Synthetic oligonucleotide
  Target: LAMA2; (+) strand; PAM type: YTN; PAM sequence: TTT
gtgattatgactcattatca

SEQ ID NO: 344385 - DNA, 20 bp, Artificial Sequence
  Description of Artificial Sequence: Synthetic oligonucleotide
  Target: LAMA2; (+) strand; PAM type: YTN; PAM sequence: TTG
tgattatgactcattatcat

SEQ ID NO: 344386 - DNA, 20 bp, Artificial Sequence
  Description of Artificial Sequence: Synthetic oligonucleotide
  Target: LAMA2; (+) strand; PAM type: YTN; PAM sequence: TTA
tgactcattatcatgatgcc

SEQ ID NO: 344387 - DNA, 20 bp, Artificial Sequence
  Description of Artificial Sequence: Synthetic oligonucleotide
  Target: LAMA2; (+) strand; PAM type: YTN; PAM sequence: CTC
attatcatgatgcctattgc

SEQ ID NO: 344388 - DNA, 20 bp, Artificial Sequence
  Description of Artificial Sequence: Synthetic oligonucleotide
  Target: LAMA2; (+) strand; PAM type: YTN; PAM sequence: TTA
tcatgatgcctattgcaaaa

SEQ ID NO: 344389 - DNA, 20 bp, Artificial Sequence
  Description of Artificial Sequence: Synthetic oligonucleotide
  Target: LAMA2; (+) strand; PAM type: YTN; PAM sequence: CTA
ttgcaaaattacagctcact

SEQ ID NO: 344390 - DNA, 20 bp, Artificial Sequence
  Description of Artificial Sequence: Synthetic oligonucleotide
  Target: LAMA2; (+) strand; PAM type: YTN; PAM sequence: TTG
caaaattacagctcactctt

SEQ ID NO: 344391 - DNA, 20 bp, Artificial Sequence
  Description of Artificial Sequence: Synthetic oligonucleotide
  Target: LAMA2; (+) strand; PAM type: YTN; PAM sequence: TTA
cagctcactcttaaaattat

SEQ ID NO: 344392 - DNA, 20 bp, Artificial Sequence
  Description of Artificial Sequence: Synthetic oligonucleotide
  Target: LAMA2; (+) strand; PAM type: YTN; PAM sequence: CTC
actcttaaaattatgtgaaa

SEQ ID NO: 344393 - DNA, 20 bp, Artificial Sequence
  Description of Artificial Sequence: Synthetic oligonucleotide
  Target: LAMA2; (+) strand; PAM type: YTN; PAM sequence: CTC
ttaaaattatgtgaaaaaag

SEQ ID NO: 344394 - DNA, 20 bp, Artificial Sequence
  Description of Artificial Sequence: Synthetic oligonucleotide
  Target: LAMA2; (+) strand; PAM type: YTN; PAM sequence: CTT
aaaattatgtgaaaaaagat

SEQ ID NO: 344395 - DNA, 20 bp, Artificial Sequence
  Description of Artificial Sequence: Synthetic oligonucleotide
  Target: LAMA2; (+) strand; PAM type: YTN; PAM sequence: TTA
aaattatgtgaaaaaagatc

SEQ ID NO: 344396 - DNA, 20 bp, Artificial Sequence
  Description of Artificial Sequence: Synthetic oligonucleotide
  Target: LAMA2; (+) strand; PAM type: YTN; PAM sequence: TTA
tgtgaaaaaagatcattaaa

SEQ ID NO: 344397 - DNA, 20 bp, Artificial Sequence
  Description of Artificial Sequence: Synthetic oligonucleotide
  Target: LAMA2; (+) strand; PAM type: YTN; PAM sequence: TTA
aatgttttagacatttctta

SEQ ID NO: 344398 - DNA, 20 bp, Artificial Sequence
  Description of Artificial Sequence: Synthetic oligonucleotide
  Target: LAMA2; (+) strand; PAM type: YTN; PAM sequence: TTT
tagacatttcttaaaactta

SEQ ID NO: 344399 - DNA, 20 bp, Artificial Sequence
  Description of Artificial Sequence: Synthetic oligonucleotide
  Target: LAMA2; (+) strand; PAM type: YTN; PAM sequence: TTT
agacatttcttaaaacttat

SEQ ID NO: 344400 - DNA, 20 bp, Artificial Sequence
  Description of Artificial Sequence: Synthetic oligonucleotide
  Target: LAMA2; (+) strand; PAM type: YTN; PAM sequence: TTA
gacatttcttaaaacttata

SEQ ID NO: 344401 - DNA, 20 bp, Artificial Sequence
  Description of Artificial Sequence: Synthetic oligonucleotide
  Target: LAMA2; (+) strand; PAM type: YTN; PAM sequence: TTT
cttaaaacttataagcaaaa

SEQ ID NO: 344402 - DNA, 20 bp, Artificial Sequence
  Description of Artificial Sequence: Synthetic oligonucleotide
  Target: LAMA2; (+) strand; PAM type: YTN; PAM sequence: TTC
ttaaaacttataagcaaaac

SEQ ID NO: 344403 - DNA, 20 bp, Artificial Sequence
  Description of Artificial Sequence: Synthetic oligonucleotide
  Target: LAMA2; (+) strand; PAM type: YTN; PAM sequence: CTT
aaaacttataagcaaaactt

SEQ ID NO: 344404 - DNA, 20 bp, Artificial Sequence
  Description of Artificial Sequence: Synthetic oligonucleotide
  Target: LAMA2; (+) strand; PAM type: YTN; PAM sequence: TTA
aaacttataagcaaaacttt

SEQ ID NO: 344405 - DNA, 20 bp, Artificial Sequence
  Description of Artificial Sequence: Synthetic oligonucleotide
  Target: LAMA2; (+) strand; PAM type: YTN; PAM sequence: CTT
ataagcaaaactttcaagtt

SEQ ID NO: 344406 - DNA, 20 bp, Artificial Sequence
  Description of Artificial Sequence: Synthetic oligonucleotide
  Target: LAMA2; (+) strand; PAM type: YTN; PAM sequence: TTA
taagcaaaactttcaagttt

SEQ ID NO: 344407 - DNA, 20 bp, Artificial Sequence
  Description of Artificial Sequence: Synthetic oligonucleotide
  Target: LAMA2; (+) strand; PAM type: YTN; PAM sequence: CTT
tcaagttttttaaactgatt

SEQ ID NO: 344408 - DNA, 20 bp, Artificial Sequence
  Description of Artificial Sequence: Synthetic oligonucleotide
  Target: LAMA2; (+) strand; PAM type: YTN; PAM sequence: TTT
caagttttttaaactgattt

SEQ ID NO: 344409 - DNA, 20 bp, Artificial Sequence
  Description of Artificial Sequence: Synthetic oligonucleotide
  Target: LAMA2; (+) strand; PAM type: YTN; PAM sequence: TTC
aagttttttaaactgattta

SEQ ID NO: 344410 - DNA, 20 bp, Artificial Sequence
  Description of Artificial Sequence: Synthetic oligonucleotide
  Target: LAMA2; (+) strand; PAM type: YTN; PAM sequence: TTT
tttaaactgatttactggtt

SEQ ID NO: 344411 - DNA, 20 bp, Artificial Sequence
  Description of Artificial Sequence: Synthetic oligonucleotide
  Target: LAMA2; (+) strand; PAM type: YTN; PAM sequence: TTT
ttaaactgatttactggttg

SEQ ID NO: 344412 - DNA, 20 bp, Artificial Sequence
  Description of Artificial Sequence: Synthetic oligonucleotide
  Target: LAMA2; (+) strand; PAM type: YTN; PAM sequence: TTT
taaactgatttactggttgt

SEQ ID NO: 344413 - DNA, 20 bp, Artificial Sequence
  Description of Artificial Sequence: Synthetic oligonucleotide
  Target: LAMA2; (+) strand; PAM type: YTN; PAM sequence: TTT
aaactgatttactggttgta

SEQ ID NO: 344414 - DNA, 20 bp, Artificial Sequence
  Description of Artificial Sequence: Synthetic oligonucleotide
  Target: LAMA2; (+) strand; PAM type: YTN; PAM sequence: TTA
aactgatttactggttgtat

SEQ ID NO: 344415 - DNA, 20 bp, Artificial Sequence
  Description of Artificial Sequence: Synthetic oligonucleotide
  Target: LAMA2; (+) strand; PAM type: YTN; PAM sequence: CTG
atttactggttgtatatgta

SEQ ID NO: 344416 - DNA, 20 bp, Artificial Sequence
  Description of Artificial Sequence: Synthetic oligonucleotide
  Target: LAMA2; (+) strand; PAM type: YTN; PAM sequence: TTT
actggttgtatatgtagcta

SEQ ID NO: 344417 - DNA, 20 bp, Artificial Sequence
  Description of Artificial Sequence: Synthetic oligonucleotide
  Target: LAMA2; (+) strand; PAM type: YTN; PAM sequence: TTA
ctggttgtatatgtagctaa

SEQ ID NO: 344418 - DNA, 20 bp, Artificial Sequence
  Description of Artificial Sequence: Synthetic oligonucleotide
  Target: LAMA2; (+) strand; PAM type: YTN; PAM sequence: CTG
gttgtatatgtagctaattg

SEQ ID NO: 344419 - DNA, 20 bp, Artificial Sequence
  Description of Artificial Sequence: Synthetic oligonucleotide
  Target: LAMA2; (+) strand; PAM type: YTN; PAM sequence: TTG
tatatgtagctaattgacta

SEQ ID NO: 344420 - DNA, 20 bp, Artificial Sequence
  Description of Artificial Sequence: Synthetic oligonucleotide
  Target: LAMA2; (+) strand; PAM type: YTN; PAM sequence: CTA
attgactatgaaaacttgaa

SEQ ID NO: 344421 - DNA, 20 bp, Artificial Sequence
  Description of Artificial Sequence: Synthetic oligonucleotide
  Target: LAMA2; (+) strand; PAM type: YTN; PAM sequence: TTG
actatgaaaacttgaagctt

SEQ ID NO: 344422 - DNA, 20 bp, Artificial Sequence
  Description of Artificial Sequence: Synthetic oligonucleotide
  Target: LAMA2; (+) strand; PAM type: YTN; PAM sequence: CTA
tgaaaacttgaagcttaact

SEQ ID NO: 344423 - DNA, 20 bp, Artificial Sequence
  Description of Artificial Sequence: Synthetic oligonucleotide
  Target: LAMA2; (+) strand; PAM type: YTN; PAM sequence: CTT
gaagcttaactctttgtaga

SEQ ID NO: 344424 - DNA, 20 bp, Artificial Sequence
  Description of Artificial Sequence: Synthetic oligonucleotide
  Target: LAMA2; (+) strand; PAM type: YTN; PAM sequence: TTG
aagcttaactctttgtagac

SEQ ID NO: 344425 - DNA, 20 bp, Artificial Sequence
  Description of Artificial Sequence: Synthetic oligonucleotide
  Target: LAMA2; (+) strand; PAM type: YTN; PAM sequence: CTT
aactctttgtagaccttcca

SEQ ID NO: 344426 - DNA, 20 bp, Artificial Sequence
  Description of Artificial Sequence: Synthetic oligonucleotide
  Target: LAMA2; (+) strand; PAM type: YTN; PAM sequence: TTA
actctttgtagaccttccat

SEQ ID NO: 344427 - DNA, 20 bp, Artificial Sequence
  Description of Artificial Sequence: Synthetic oligonucleotide
  Target: LAMA2; (+) strand; PAM type: YTN; PAM sequence: CTC
tttgtagaccttccatcata

SEQ ID NO: 344428 - DNA, 20 bp, Artificial Sequence
  Description of Artificial Sequence: Synthetic oligonucleotide
  Target: LAMA2; (+) strand; PAM type: YTN; PAM sequence: CTT
tgtagaccttccatcatacc

SEQ ID NO: 344429 - DNA, 20 bp, Artificial Sequence
  Description of Artificial Sequence: Synthetic oligonucleotide
  Target: LAMA2; (+) strand; PAM type: YTN; PAM sequence: TTT
gtagaccttccatcatacca

SEQ ID NO: 344430 - DNA, 20 bp, Artificial Sequence
  Description of Artificial Sequence: Synthetic oligonucleotide
  Target: LAMA2; (+) strand; PAM type: YTN; PAM sequence: TTG
tagaccttccatcataccat

SEQ ID NO: 344431 - DNA, 20 bp, Artificial Sequence
  Description of Artificial Sequence: Synthetic oligonucleotide
  Target: LAMA2; (+) strand; PAM type: YTN; PAM sequence: CTT
ccatcataccattgctttat

SEQ ID NO: 344432 - DNA, 20 bp, Artificial Sequence
  Description of Artificial Sequence: Synthetic oligonucleotide
  Target: LAMA2; (+) strand; PAM type: YTN; PAM sequence: TTC
catcataccattgctttata

SEQ ID NO: 344433 - DNA, 20 bp, Artificial Sequence
  Description of Artificial Sequence: Synthetic oligonucleotide
  Target: LAMA2; (+) strand; PAM type: YTN; PAM sequence: TTG
ctttataaattattaccaga

SEQ ID NO: 344434 - DNA, 20 bp, Artificial Sequence
  Description of Artificial Sequence: Synthetic oligonucleotide
  Target: LAMA2; (+) strand; PAM type: YTN; PAM sequence: CTT
tataaattattaccagaata

SEQ ID NO: 344435 - DNA, 20 bp, Artificial Sequence
  Description of Artificial Sequence: Synthetic oligonucleotide
  Target: LAMA2; (+) strand; PAM type: YTN; PAM sequence: TTT
ataaattattaccagaatat

SEQ ID NO: 344436 - DNA, 20 bp, Artificial Sequence
  Description of Artificial Sequence: Synthetic oligonucleotide
  Target: LAMA2; (+) strand; PAM type: YTN; PAM sequence: TTA
taaattattaccagaatatt

SEQ ID NO: 344437 - DNA, 20 bp, Artificial Sequence
  Description of Artificial Sequence: Synthetic oligonucleotide
  Target: LAMA2; (+) strand; PAM type: YTN; PAM sequence: TTA
ttaccagaatattgaaggaa

SEQ ID NO: 344438 - DNA, 20 bp, Artificial Sequence
  Description of Artificial Sequence: Synthetic oligonucleotide
  Target: LAMA2; (+) strand; PAM type: YTN; PAM sequence: TTA
ccagaatattgaaggaaata

SEQ ID NO: 344439 - DNA, 20 bp, Artificial Sequence
  Description of Artificial Sequence: Synthetic oligonucleotide
  Target: LAMA2; (+) strand; PAM type: YTN; PAM sequence: TTG
aaggaaataaacttttttct

SEQ ID NO: 344440 - DNA, 20 bp, Artificial Sequence
  Description of Artificial Sequence: Synthetic oligonucleotide
  Target: LAMA2; (+) strand; PAM type: YTN; PAM sequence: CTT
ttttctaaccatatttatgc

SEQ ID NO: 344441 - DNA, 20 bp, Artificial Sequence
  Description of Artificial Sequence: Synthetic oligonucleotide
  Target: LAMA2; (+) strand; PAM type: YTN; PAM sequence: TTT
tttctaaccatatttatgca

SEQ ID NO: 344442 - DNA, 20 bp, Artificial Sequence
  Description of Artificial Sequence: Synthetic oligonucleotide
  Target: LAMA2; (+) strand; PAM type: YTN; PAM sequence: TTT
ttctaaccatatttatgcaa

SEQ ID NO: 344443 - DNA, 20 bp, Artificial Sequence
  Description of Artificial Sequence: Synthetic oligonucleotide
  Target: LAMA2; (+) strand; PAM type: YTN; PAM sequence: TTT
tctaaccatatttatgcaat

SEQ ID NO: 344444 - DNA, 20 bp, Artificial Sequence
  Description of Artificial Sequence: Synthetic oligonucleotide
  Target: LAMA2; (+) strand; PAM type: YTN; PAM sequence: TTT
ctaaccatatttatgcaatc

SEQ ID NO: 344445 - DNA, 20 bp, Artificial Sequence
  Description of Artificial Sequence: Synthetic oligonucleotide
  Target: LAMA2; (+) strand; PAM type: YTN; PAM sequence: TTC
taaccatatttatgcaatca

SEQ ID NO: 344446 - DNA, 20 bp, Artificial Sequence
  Description of Artificial Sequence: Synthetic oligonucleotide
  Target: LAMA2; (+) strand; PAM type: YTN; PAM sequence: CTA
accatatttatgcaatcaat

SEQ ID NO: 344447 - DNA, 20 bp, Artificial Sequence
  Description of Artificial Sequence: Synthetic oligonucleotide
  Target: LAMA2; (+) strand; PAM type: YTN; PAM sequence: TTT
atgcaatcaatatttattag

SEQ ID NO: 344448 - DNA, 20 bp, Artificial Sequence
  Description of Artificial Sequence: Synthetic oligonucleotide
  Target: LAMA2; (+) strand; PAM type: YTN; PAM sequence: TTA
tgcaatcaatatttattagg

SEQ ID NO: 344449 - DNA, 20 bp, Artificial Sequence
  Description of Artificial Sequence: Synthetic oligonucleotide
  Target: LAMA2; (+) strand; PAM type: YTN; PAM sequence: TTT
attaggtagtttttgagaaa

SEQ ID NO: 344450 - DNA, 20 bp, Artificial Sequence
  Description of Artificial Sequence: Synthetic oligonucleotide
  Target: LAMA2; (+) strand; PAM type: YTN; PAM sequence: TTA
ttaggtagtttttgagaaaa

SEQ ID NO: 344451 - DNA, 20 bp, Artificial Sequence
  Description of Artificial Sequence: Synthetic oligonucleotide
  Target: LAMA2; (+) strand; PAM type: YTN; PAM sequence: TTA
ggtagtttttgagaaaatct

SEQ ID NO: 344452 - DNA, 20 bp, Artificial Sequence
  Description of Artificial Sequence: Synthetic oligonucleotide
  Target: LAMA2; (+) strand; PAM type: YTN; PAM sequence: TTT
ttgagaaaatcttatatgag

SEQ ID NO: 344453 - DNA, 20 bp, Artificial Sequence
  Description of Artificial Sequence: Synthetic oligonucleotide
  Target: LAMA2; (+) strand; PAM type: YTN; PAM sequence: TTT
tgagaaaatcttatatgaga

SEQ ID NO: 344454 - DNA, 20 bp, Artificial Sequence
  Description of Artificial Sequence: Synthetic oligonucleotide
  Target: LAMA2; (+) strand; PAM type: YTN; PAM sequence: TTT
gagaaaatcttatatgagaa

SEQ ID NO: 344455 - DNA, 20 bp, Artificial Sequence
  Description of Artificial Sequence: Synthetic oligonucleotide
  Target: LAMA2; (+) strand; PAM type: YTN; PAM sequence: TTG
agaaaatcttatatgagaac

SEQ ID NO: 344456 - DNA, 20 bp, Artificial Sequence
  Description of Artificial Sequence: Synthetic oligonucleotide
  Target: LAMA2; (+) strand; PAM type: YTN; PAM sequence: CTT
atatgagaacttattccttg

SEQ ID NO: 344457 - DNA, 20 bp, Artificial Sequence
  Description of Artificial Sequence: Synthetic oligonucleotide
  Target: LAMA2; (+) strand; PAM type: YTN; PAM sequence: TTA
tatgagaacttattccttgt

SEQ ID NO: 344458 - DNA, 20 bp, Artificial Sequence
  Description of Artificial Sequence: Synthetic oligonucleotide
  Target: LAMA2; (+) strand; PAM type: YTN; PAM sequence: CTT
attccttgtataccaaatgt

SEQ ID NO: 344459 - DNA, 20 bp, Artificial Sequence
  Description of Artificial Sequence: Synthetic oligonucleotide
  Target: LAMA2; (+) strand; PAM type: YTN; PAM sequence: TTA
ttccttgtataccaaatgtt

SEQ ID NO: 344460 - DNA, 20 bp, Artificial Sequence
  Description of Artificial Sequence: Synthetic oligonucleotide
  Target: LAMA2; (+) strand; PAM type: YTN; PAM sequence: TTC
cttgtataccaaatgtttca

SEQ ID NO: 344461 - DNA, 20 bp, Artificial Sequence
  Description of Artificial Sequence: Synthetic oligonucleotide
  Target: LAMA2; (+) strand; PAM type: YTN; PAM sequence: CTT
gtataccaaatgtttcatgg

SEQ ID NO: 344462 - DNA, 20 bp, Artificial Sequence
  Description of Artificial Sequence: Synthetic oligonucleotide
  Target: LAMA2; (+) strand; PAM type: YTN; PAM sequence: TTG
tataccaaatgtttcatgga

SEQ ID NO: 344463 - DNA, 20 bp, Artificial Sequence
  Description of Artificial Sequence: Synthetic oligonucleotide
  Target: LAMA2; (+) strand; PAM type: YTN; PAM sequence: TTT
catggaacaccaccagcata

SEQ ID NO: 344464 - DNA, 20 bp, Artificial Sequence
  Description of Artificial Sequence: Synthetic oligonucleotide
  Target: LAMA2; (+) strand; PAM type: YTN; PAM sequence: TTC
atggaacaccaccagcatag

SEQ ID NO: 344465 - DNA, 20 bp, Artificial Sequence
  Description of Artificial Sequence: Synthetic oligonucleotide
  Target: LAMA2; (+) strand; PAM type: YTN; PAM sequence: TTT
ttgtttactctgtgcaactg

SEQ ID NO: 344466 - DNA, 20 bp, Artificial Sequence
  Description of Artificial Sequence: Synthetic oligonucleotide
  Target: LAMA2; (+) strand; PAM type: YTN; PAM sequence: TTT
tgtttactctgtgcaactgg

SEQ ID NO: 344467 - DNA, 20 bp, Artificial Sequence
  Description of Artificial Sequence: Synthetic oligonucleotide
  Target: LAMA2; (+) strand; PAM type: YTN; PAM sequence: TTT
gtttactctgtgcaactgga

SEQ ID NO: 344468 - DNA, 20 bp, Artificial Sequence
  Description of Artificial Sequence: Synthetic oligonucleotide
  Target: LAMA2; (+) strand; PAM type: YTN; PAM sequence: TTG
tttactctgtgcaactggat

SEQ ID NO: 344469 - DNA, 20 bp, Artificial Sequence
  Description of Artificial Sequence: Synthetic oligonucleotide
  Target: LAMA2; (+) strand; PAM type: YTN; PAM sequence: TTT
actctgtgcaactggatttc

SEQ ID NO: 344470 - DNA, 20 bp, Artificial Sequence
  Description of Artificial Sequence: Synthetic oligonucleotide
  Target: LAMA2; (+) strand; PAM type: YTN; PAM sequence: TTA
ctctgtgcaactggatttcg

SEQ ID NO: 344471 - DNA, 20 bp, Artificial Sequence
  Description of Artificial Sequence: Synthetic oligonucleotide
  Target: LAMA2; (+) strand; PAM type: YTN; PAM sequence: CTC
tgtgcaactggatttcgttc

SEQ ID NO: 344472 - DNA, 20 bp, Artificial Sequence
  Description of Artificial Sequence: Synthetic oligonucleotide
  Target: LAMA2; (+) strand; PAM type: YTN; PAM sequence: CTG
tgcaactggatttcgttctg

SEQ ID NO: 344473 - DNA, 20 bp, Artificial Sequence
  Description of Artificial Sequence: Synthetic oligonucleotide
  Target: LAMA2; (+) strand; PAM type: YTN; PAM sequence: CTG
gatttcgttctggggagctt

SEQ ID NO: 344474 - DNA, 20 bp, Artificial Sequence
  Description of Artificial Sequence: Synthetic oligonucleotide
  Target: LAMA2; (+) strand; PAM type: YTN; PAM sequence: TTT
cgttctggggagcttcaatt

SEQ ID NO: 344475 - DNA, 20 bp, Artificial Sequence
  Description of Artificial Sequence: Synthetic oligonucleotide
  Target: LAMA2; (+) strand; PAM type: YTN; PAM sequence: TTC
gttctggggagcttcaattt

SEQ ID NO: 344476 - DNA, 20 bp, Artificial Sequence
  Description of Artificial Sequence: Synthetic oligonucleotide
  Target: LAMA2; (+) strand; PAM type: YTN; PAM sequence: TTC
tggggagcttcaatttgtac

SEQ ID NO: 344477 - DNA, 20 bp, Artificial Sequence
  Description of Artificial Sequence: Synthetic oligonucleotide
  Target: LAMA2; (+) strand; PAM type: YTN; PAM sequence: CTG
gggagcttcaatttgtacat

SEQ ID NO: 344478 - DNA, 20 bp, Artificial Sequence
  Description of Artificial Sequence: Synthetic oligonucleotide
  Target: LAMA2; (+) strand; PAM type: YTN; PAM sequence: CTT
caatttgtacatgagctcat

SEQ ID NO: 344479 - DNA, 20 bp, Artificial Sequence
  Description of Artificial Sequence: Synthetic oligonucleotide
  Target: LAMA2; (+) strand; PAM type: YTN; PAM sequence: TTC
aatttgtacatgagctcatt

SEQ ID NO: 344480 - DNA, 20 bp, Artificial Sequence
  Description of Artificial Sequence: Synthetic oligonucleotide
  Target: LAMA2; (+) strand; PAM type: YTN; PAM sequence: TTT
gtacatgagctcattttcac

SEQ ID NO: 344481 - DNA, 20 bp, Artificial Sequence
  Description of Artificial Sequence: Synthetic oligonucleotide
  Target: LAMA2; (+) strand; PAM type: YTN; PAM sequence: TTG
tacatgagctcattttcaca

SEQ ID NO: 344482 - DNA, 20 bp, Artificial Sequence
  Description of Artificial Sequence: Synthetic oligonucleotide
  Target: LAMA2; (+) strand; PAM type: YTN; PAM sequence: CTC
attttcacaaaccatcttac

SEQ ID NO: 344483 - DNA, 20 bp, Artificial Sequence
  Description of Artificial Sequence: Synthetic oligonucleotide
  Target: LAMA2; (+) strand; PAM type: YTN; PAM sequence: TTT
tcacaaaccatcttaccgat

SEQ ID NO: 344484 - DNA, 20 bp, Artificial Sequence
  Description of Artificial Sequence: Synthetic oligonucleotide
  Target: LAMA2; (+) strand; PAM type: YTN; PAM sequence: TTT
cacaaaccatcttaccgata

SEQ ID NO: 344485 - DNA, 20 bp, Artificial Sequence
  Description of Artificial Sequence: Synthetic oligonucleotide
  Target: LAMA2; (+) strand; PAM type: YTN; PAM sequence: TTC
acaaaccatcttaccgatac

SEQ ID NO: 344486 - DNA, 20 bp, Artificial Sequence
  Description of Artificial Sequence: Synthetic oligonucleotide
  Target: LAMA2; (+) strand; PAM type: YTN; PAM sequence: CTT
accgatacttagagtccaaa

SEQ ID NO: 344487 - DNA, 20 bp, Artificial Sequence
  Description of Artificial Sequence: Synthetic oligonucleotide
  Target: LAMA2; (+) strand; PAM type: YTN; PAM sequence: TTA
ccgatacttagagtccaaag

SEQ ID NO: 344488 - DNA, 20 bp, Artificial Sequence
  Description of Artificial Sequence: Synthetic oligonucleotide
  Target: LAMA2; (+) strand; PAM type: YTN; PAM sequence: CTT
agagtccaaagtgaaattca

SEQ ID NO: 344489 - DNA, 20 bp, Artificial Sequence
  Description of Artificial Sequence: Synthetic oligonucleotide
  Target: LAMA2; (+) strand; PAM type: YTN; PAM sequence: TTA
gagtccaaagtgaaattcag

SEQ ID NO: 344490 - DNA, 20 bp, Artificial Sequence
  Description of Artificial Sequence: Synthetic oligonucleotide
  Target: LAMA2; (+) strand; PAM type: YTN; PAM sequence: TTC
aggaactatggcccagcaag

SEQ ID NO: 344491 - DNA, 20 bp, Artificial Sequence
  Description of Artificial Sequence: Synthetic oligonucleotide
  Target: LAMA2; (+) strand; PAM type: YTN; PAM sequence: CTA
tggcccagcaagctttcatg

SEQ ID NO: 344492 - DNA, 20 bp, Artificial Sequence
  Description of Artificial Sequence: Synthetic oligonucleotide
  Target: LAMA2; (+) strand; PAM type: YTN; PAM sequence: CTT
tcatgtgctattctttgctt

SEQ ID NO: 344493 - DNA, 20 bp, Artificial Sequence
  Description of Artificial Sequence: Synthetic oligonucleotide
  Target: LAMA2; (+) strand; PAM type: YTN; PAM sequence: TTT
catgtgctattctttgcttc

SEQ ID NO: 344494 - DNA, 20 bp, Artificial Sequence
  Description of Artificial Sequence: Synthetic oligonucleotide
  Target: LAMA2; (+) strand; PAM type: YTN; PAM sequence: TTC
atgtgctattctttgcttca

SEQ ID NO: 344495 - DNA, 20 bp, Artificial Sequence
  Description of Artificial Sequence: Synthetic oligonucleotide
  Target: LAMA2; (+) strand; PAM type: YTN; PAM sequence: CTA
ttctttgcttcatgactttg

SEQ ID NO: 344496 - DNA, 20 bp, Artificial Sequence
  Description of Artificial Sequence: Synthetic oligonucleotide
  Target: LAMA2; (+) strand; PAM type: YTN; PAM sequence: TTC
tttgcttcatgactttggaa

SEQ ID NO: 344497 - DNA, 20 bp, Artificial Sequence
  Description of Artificial Sequence: Synthetic oligonucleotide
  Target: LAMA2; (+) strand; PAM type: YTN; PAM sequence: CTT
tgcttcatgactttggaaat

SEQ ID NO: 344498 - DNA, 20 bp, Artificial Sequence
  Description of Artificial Sequence: Synthetic oligonucleotide
  Target: LAMA2; (+) strand; PAM type: YTN; PAM sequence: TTT
gcttcatgactttggaaatc

SEQ ID NO: 344499 - DNA, 20 bp, Artificial Sequence
  Description of Artificial Sequence: Synthetic oligonucleotide
  Target: LAMA2; (+) strand; PAM type: YTN; PAM sequence: TTG
cttcatgactttggaaatct

SEQ ID NO: 344500 - DNA, 20 bp, Artificial Sequence
  Description of Artificial Sequence: Synthetic oligonucleotide
  Target: LAMA2; (+) strand; PAM type: YTN; PAM sequence: CTT
catgactttggaaatctatg

SEQ ID NO: 344501 - DNA, 20 bp, Artificial Sequence
  Description of Artificial Sequence: Synthetic oligonucleotide
  Target: LAMA2; (+) strand; PAM type: YTN; PAM sequence: TTC
atgactttggaaatctatgg

SEQ ID NO: 344502 - DNA, 20 bp, Artificial Sequence
  Description of Artificial Sequence: Synthetic oligonucleotide
  Target: LAMA2; (+) strand; PAM type: YTN; PAM sequence: CTT
tggaaatctatgggagaccc

SEQ ID NO: 344503 - DNA, 20 bp, Artificial Sequence
  Description of Artificial Sequence: Synthetic oligonucleotide
  Target: LAMA2; (+) strand; PAM type: YTN; PAM sequence: TTT
ggaaatctatgggagaccct

SEQ ID NO: 344504 - DNA, 20 bp, Artificial Sequence
  Description of Artificial Sequence: Synthetic oligonucleotide
  Target: LAMA2; (+) strand; PAM type: YTN; PAM sequence: TTG
gaaatctatgggagaccctg

SEQ ID NO: 344505 - DNA, 20 bp, Artificial Sequence
  Description of Artificial Sequence: Synthetic oligonucleotide
  Target: LAMA2; (+) strand; PAM type: YTN; PAM sequence: CTA
tgggagaccctgtatcacta

SEQ ID NO: 344506 - DNA, 20 bp, Artificial Sequence
  Description of Artificial Sequence: Synthetic oligonucleotide
  Target: LAMA2; (+) strand; PAM type: YTN; PAM sequence: CTG
tatcactagacagaatactg

SEQ ID NO: 344507 - DNA, 20 bp, Artificial Sequence
  Description of Artificial Sequence: Synthetic oligonucleotide
  Target: LAMA2; (+) strand; PAM type: YTN; PAM sequence: CTA
gacagaatactgaaaagcag

SEQ ID NO: 344508 - DNA, 20 bp, Artificial Sequence
  Description of Artificial Sequence: Synthetic oligonucleotide
  Target: LAMA2; (+) strand; PAM type: YTN; PAM sequence: CTG
aaaagcaggattacatatga

SEQ ID NO: 344509 - DNA, 20 bp, Artificial Sequence
  Description of Artificial Sequence: Synthetic oligonucleotide
  Target: LAMA2; (+) strand; PAM type: YTN; PAM sequence: TTA
catatgaagtttaccatctg

SEQ ID NO: 344510 - DNA, 20 bp, Artificial Sequence
  Description of Artificial Sequence: Synthetic oligonucleotide
  Target: LAMA2; (+) strand; PAM type: YTN; PAM sequence: TTT
accatctgatttttttccta

SEQ ID NO: 344511 - DNA, 20 bp, Artificial Sequence
  Description of Artificial Sequence: Synthetic oligonucleotide
  Target: LAMA2; (+) strand; PAM type: YTN; PAM sequence: TTA
ccatctgatttttttcctaa

SEQ ID NO: 344512 - DNA, 20 bp, Artificial Sequence
  Description of Artificial Sequence: Synthetic oligonucleotide
  Target: LAMA2; (+) strand; PAM type: YTN; PAM sequence: CTG
atttttttcctaagggtttt

SEQ ID NO: 344513 - DNA, 20 bp, Artificial Sequence
  Description of Artificial Sequence: Synthetic oligonucleotide
  Target: LAMA2; (+) strand; PAM type: YTN; PAM sequence: TTT
ttttcctaagggtttttaca

SEQ ID NO: 344514 - DNA, 20 bp, Artificial Sequence
  Description of Artificial Sequence: Synthetic oligonucleotide
  Target: LAMA2; (+) strand; PAM type: YTN; PAM sequence: TTT
tttcctaagggtttttacat

SEQ ID NO: 344515 - DNA, 20 bp, Artificial Sequence
  Description of Artificial Sequence: Synthetic oligonucleotide
  Target: LAMA2; (+) strand; PAM type: YTN; PAM sequence: TTT
ttcctaagggtttttacatg

SEQ ID NO: 344516 - DNA, 20 bp, Artificial Sequence
  Description of Artificial Sequence: Synthetic oligonucleotide
  Target: LAMA2; (+) strand; PAM type: YTN; PAM sequence: TTT
tcctaagggtttttacatga

SEQ ID NO: 344517 - DNA, 20 bp, Artificial Sequence
  Description of Artificial Sequence: Synthetic oligonucleotide
  Target: LAMA2; (+) strand; PAM type: YTN; PAM sequence: TTT
cctaagggtttttacatgaa

SEQ ID NO: 344518 - DNA, 20 bp, Artificial Sequence
  Description of Artificial Sequence: Synthetic oligonucleotide
  Target: LAMA2; (+) strand; PAM type: YTN; PAM sequence: TTC
ctaagggtttttacatgaac

SEQ ID NO: 344519 - DNA, 20 bp, Artificial Sequence
  Description of Artificial Sequence: Synthetic oligonucleotide
  Target: LAMA2; (+) strand; PAM type: YTN; PAM sequence: CTA
agggtttttacatgaacgtt

SEQ ID NO: 344520 - DNA, 20 bp, Artificial Sequence
  Description of Artificial Sequence: Synthetic oligonucleotide
  Target: LAMA2; (+) strand; PAM type: YTN; PAM sequence: TTT
ttacatgaacgtttattcct

SEQ ID NO: 344521 - DNA, 20 bp, Artificial Sequence
  Description of Artificial Sequence: Synthetic oligonucleotide
  Target: LAMA2; (+) strand; PAM type: YTN; PAM sequence: TTT
tacatgaacgtttattcctt

SEQ ID NO: 344522 - DNA, 20 bp, Artificial Sequence
  Description of Artificial Sequence: Synthetic oligonucleotide
  Target: LAMA2; (+) strand; PAM type: YTN; PAM sequence: TTT
acatgaacgtttattccttg

SEQ ID NO: 344523 - DNA, 20 bp, Artificial Sequence
  Description of Artificial Sequence: Synthetic oligonucleotide
  Target: LAMA2; (+) strand; PAM type: YTN; PAM sequence: TTA
catgaacgtttattccttgt

SEQ ID NO: 344524 - DNA, 20 bp, Artificial Sequence
  Description of Artificial Sequence: Synthetic oligonucleotide
  Target: LAMA2; (+) strand; PAM type: YTN; PAM sequence: TTT
attccttgtctttttgtgtg

SEQ ID NO: 344525 - DNA, 20 bp, Artificial Sequence
  Description of Artificial Sequence: Synthetic oligonucleotide
  Target: LAMA2; (+) strand; PAM type: YTN; PAM sequence: TTA
ttccttgtctttttgtgtgg

SEQ ID NO: 344526 - DNA, 20 bp, Artificial Sequence
  Description of Artificial Sequence: Synthetic oligonucleotide
  Target: LAMA2; (+) strand; PAM type: YTN; PAM sequence: TTC
cttgtctttttgtgtggatt

SEQ ID NO: 344527 - DNA, 20 bp, Artificial Sequence
  Description of Artificial Sequence: Synthetic oligonucleotide
  Target: LAMA2; (+) strand; PAM type: YTN; PAM sequence: CTT
gtctttttgtgtggattcag

SEQ ID NO: 344528 - DNA, 20 bp, Artificial Sequence
  Description of Artificial Sequence: Synthetic oligonucleotide
  Target: LAMA2; (+) strand; PAM type: YTN; PAM sequence: TTG
tctttttgtgtggattcagc

SEQ ID NO: 344529 - DNA, 20 bp, Artificial Sequence
  Description of Artificial Sequence: Synthetic oligonucleotide
  Target: LAMA2; (+) strand; PAM type: YTN; PAM sequence: CTT
tttgtgtggattcagcaatc

SEQ ID NO: 344530 - DNA, 20 bp, Artificial Sequence
  Description of Artificial Sequence: Synthetic oligonucleotide
  Target: LAMA2; (+) strand; PAM type: YTN; PAM sequence: TTT
ttgtgtggattcagcaatct

SEQ ID NO: 344531 - DNA, 20 bp, Artificial Sequence
  Description of Artificial Sequence: Synthetic oligonucleotide
  Target: LAMA2; (+) strand; PAM type: YTN; PAM sequence: TTT
tgtgtggattcagcaatctc

SEQ ID NO: 344532 - DNA, 20 bp, Artificial Sequence
  Description of Artificial Sequence: Synthetic oligonucleotide
  Target: LAMA2; (+) strand; PAM type: YTN; PAM sequence: TTT
gtgtggattcagcaatctcc

SEQ ID NO: 344533 - DNA, 20 bp, Artificial Sequence
  Description of Artificial Sequence: Synthetic oligonucleotide
  Target: LAMA2; (+) strand; PAM type: YTN; PAM sequence: TTG
tgtggattcagcaatctcca

SEQ ID NO: 344534 - DNA, 20 bp, Artificial Sequence
  Description of Artificial Sequence: Synthetic oligonucleotide
  Target: LAMA2; (+) strand; PAM type: YTN; PAM sequence: TTC
agcaatctccaggtttactg

SEQ ID NO: 344535 - DNA, 20 bp, Artificial Sequence
  Description of Artificial Sequence: Synthetic oligonucleotide
  Target: LAMA2; (+) strand; PAM type: YTN; PAM sequence: CTC
caggtttactgaacaggggt

SEQ ID NO: 344536 - DNA, 20 bp, Artificial Sequence
  Description of Artificial Sequence: Synthetic oligonucleotide
  Target: LAMA2; (+) strand; PAM type: YTN; PAM sequence: TTT
actgaacaggggttgtgaag

SEQ ID NO: 344537 - DNA, 20 bp, Artificial Sequence
  Description of Artificial Sequence: Synthetic oligonucleotide
  Target: LAMA2; (+) strand; PAM type: YTN; PAM sequence: TTA
ctgaacaggggttgtgaagg

SEQ ID NO: 344538 - DNA, 20 bp, Artificial Sequence
  Description of Artificial Sequence: Synthetic oligonucleotide
  Target: LAMA2; (+) strand; PAM type: YTN; PAM sequence: CTG
aacaggggttgtgaagggca

SEQ ID NO: 344539 - DNA, 20 bp, Artificial Sequence
  Description of Artificial Sequence: Synthetic oligonucleotide
  Target: LAMA2; (+) strand; PAM type: YTN; PAM sequence: TTG
tgaagggcagttgttcacaa

SEQ ID NO: 344540 - DNA, 20 bp, Artificial Sequence
  Description of Artificial Sequence: Synthetic oligonucleotide
  Target: LAMA2; (+) strand; PAM type: YTN; PAM sequence: TTG
ttcacaactgagctcattcc

SEQ ID NO: 344541 - DNA, 20 bp, Artificial Sequence
  Description of Artificial Sequence: Synthetic oligonucleotide
  Target: LAMA2; (+) strand; PAM type: YTN; PAM sequence: TTC
acaactgagctcattcccac

SEQ ID NO: 344542 - DNA, 20 bp, Artificial Sequence
  Description of Artificial Sequence: Synthetic oligonucleotide
  Target: LAMA2; (+) strand; PAM type: YTN; PAM sequence: CTG
agctcattcccactgtgttg

SEQ ID NO: 344543 - DNA, 20 bp, Artificial Sequence
  Description of Artificial Sequence: Synthetic oligonucleotide
  Target: LAMA2; (+) strand; PAM type: YTN; PAM sequence: CTC
attcccactgtgttgatata

SEQ ID NO: 344544 - DNA, 20 bp, Artificial Sequence
  Description of Artificial Sequence: Synthetic oligonucleotide
  Target: LAMA2; (+) strand; PAM type: YTN; PAM sequence: TTC
ccactgtgttgatatactcc

SEQ ID NO: 344545 - DNA, 20 bp, Artificial Sequence
  Description of Artificial Sequence: Synthetic oligonucleotide
  Target: LAMA2; (+) strand; PAM type: YTN; PAM sequence: CTG
tgttgatatactccggttcc

SEQ ID NO: 344546 - DNA, 20 bp, Artificial Sequence
  Description of Artificial Sequence: Synthetic oligonucleotide
  Target: LAMA2; (+) strand; PAM type: YTN; PAM sequence: TTG
atatactccggttcccccac

SEQ ID NO: 344547 - DNA, 20 bp, Artificial Sequence
  Description of Artificial Sequence: Synthetic oligonucleotide
  Target: LAMA2; (+) strand; PAM type: YTN; PAM sequence: CTC
cggttcccccacatagctcc

SEQ ID NO: 344548 - DNA, 20 bp, Artificial Sequence
  Description of Artificial Sequence: Synthetic oligonucleotide
  Target: LAMA2; (+) strand; PAM type: YTN; PAM sequence: TTC
ccccacatagctccaccccg

SEQ ID NO: 344549 - DNA, 20 bp, Artificial Sequence
  Description of Artificial Sequence: Synthetic oligonucleotide
  Target: LAMA2; (+) strand; PAM type: YTN; PAM sequence: CTC
caccccgctaactcccaacc

SEQ ID NO: 344550 - DNA, 20 bp, Artificial Sequence
  Description of Artificial Sequence: Synthetic oligonucleotide
  Target: LAMA2; (+) strand; PAM type: YTN; PAM sequence: CTA
actcccaacctcatgcatag

SEQ ID NO: 344551 - DNA, 20 bp, Artificial Sequence
  Description of Artificial Sequence: Synthetic oligonucleotide
  Target: LAMA2; (+) strand; PAM type: YTN; PAM sequence: CTC
ccaacctcatgcatagctcc

SEQ ID NO: 344552 - DNA, 20 bp, Artificial Sequence
  Description of Artificial Sequence: Synthetic oligonucleotide
  Target: LAMA2; (+) strand; PAM type: YTN; PAM sequence: CTC
atgcatagctccaccacact

SEQ ID NO: 344553 - DNA, 20 bp, Artificial Sequence
  Description of Artificial Sequence: Synthetic oligonucleotide
  Target: LAMA2; (+) strand; PAM type: YTN; PAM sequence: CTC
caccacactattgggcttga

SEQ ID NO: 344554 - DNA, 20 bp, Artificial Sequence
  Description of Artificial Sequence: Synthetic oligonucleotide
  Target: LAMA2; (+) strand; PAM type: YTN; PAM sequence: CTA
ttgggcttgaatctaggctc

SEQ ID NO: 344555 - DNA, 20 bp, Artificial Sequence
  Description of Artificial Sequence: Synthetic oligonucleotide
  Target: LAMA2; (+) strand; PAM type: YTN; PAM sequence: TTG
ggcttgaatctaggctctgc

SEQ ID NO: 344556 - DNA, 20 bp, Artificial Sequence
  Description of Artificial Sequence: Synthetic oligonucleotide
  Target: LAMA2; (+) strand; PAM type: YTN; PAM sequence: CTT
gaatctaggctctgccactt

SEQ ID NO: 344557 - DNA, 20 bp, Artificial Sequence
  Description of Artificial Sequence: Synthetic oligonucleotide
  Target: LAMA2; (+) strand; PAM type: YTN; PAM sequence: TTG
aatctaggctctgccacttt

SEQ ID NO: 344558 - DNA, 20 bp, Artificial Sequence
  Description of Artificial Sequence: Synthetic oligonucleotide
  Target: LAMA2; (+) strand; PAM type: YTN; PAM sequence: CTA
ggctctgccactttctagct

SEQ ID NO: 344559 - DNA, 20 bp, Artificial Sequence
  Description of Artificial Sequence: Synthetic oligonucleotide
  Target: LAMA2; (+) strand; PAM type: YTN; PAM sequence: CTC
tgccactttctagctggttc

SEQ ID NO: 344560 - DNA, 20 bp, Artificial Sequence
  Description of Artificial Sequence: Synthetic oligonucleotide
  Target: LAMA2; (+) strand; PAM type: YTN; PAM sequence: CTG
ccactttctagctggttcct

SEQ ID NO: 344561 - DNA, 20 bp, Artificial Sequence
  Description of Artificial Sequence: Synthetic oligonucleotide
  Target: LAMA2; (+) strand; PAM type: YTN; PAM sequence: CTT
tctagctggttcctgagcaa

SEQ ID NO: 344562 - DNA, 20 bp, Artificial Sequence
  Description of Artificial Sequence: Synthetic oligonucleotide
  Target: LAMA2; (+) strand; PAM type: YTN; PAM sequence: TTT
ctagctggttcctgagcaag

SEQ ID NO: 344563 - DNA, 20 bp, Artificial Sequence
  Description of Artificial Sequence: Synthetic oligonucleotide
  Target: LAMA2; (+) strand; PAM type: YTN; PAM sequence: TTC
tagctggttcctgagcaagt

SEQ ID NO: 344564 - DNA, 20 bp, Artificial Sequence
  Description of Artificial Sequence: Synthetic oligonucleotide
  Target: LAMA2; (+) strand; PAM type: YTN; PAM sequence: CTA
gctggttcctgagcaagttc

SEQ ID NO: 344565 - DNA, 20 bp, Artificial Sequence
  Description of Artificial Sequence: Synthetic oligonucleotide
  Target: LAMA2; (+) strand; PAM type: YTN; PAM sequence: CTG
gttcctgagcaagttcttta

SEQ ID NO: 344566 - DNA, 20 bp, Artificial Sequence
  Description of Artificial Sequence: Synthetic oligonucleotide
  Target: LAMA2; (+) strand; PAM type: YTN; PAM sequence: TTC
ctgagcaagttctttaacct

SEQ ID NO: 344567 - DNA, 20 bp, Artificial Sequence
  Description of Artificial Sequence: Synthetic oligonucleotide
  Target: LAMA2; (+) strand; PAM type: YTN; PAM sequence: CTG
agcaagttctttaacctctc

SEQ ID NO: 344568 - DNA, 20 bp, Artificial Sequence
  Description of Artificial Sequence: Synthetic oligonucleotide
  Target: LAMA2; (+) strand; PAM type: YTN; PAM sequence: TTC
tttaacctctctgagcctgt

SEQ ID NO: 344569 - DNA, 20 bp, Artificial Sequence
  Description of Artificial Sequence: Synthetic oligonucleotide
  Target: LAMA2; (+) strand; PAM type: YTN; PAM sequence: CTT
taacctctctgagcctgttt

SEQ ID NO: 344570 - DNA, 20 bp, Artificial Sequence
  Description of Artificial Sequence: Synthetic oligonucleotide
  Target: LAMA2; (+) strand; PAM type: YTN; PAM sequence: TTT
aacctctctgagcctgtttc

SEQ ID NO: 344571 - DNA, 20 bp, Artificial Sequence
  Description of Artificial Sequence: Synthetic oligonucleotide
  Target: LAMA2; (+) strand; PAM type: YTN; PAM sequence: TTA
acctctctgagcctgtttcc

SEQ ID NO: 344572 - DNA, 20 bp, Artificial Sequence
  Description of Artificial Sequence: Synthetic oligonucleotide
  Target: LAMA2; (+) strand; PAM type: YTN; PAM sequence: CTC
tctgagcctgtttcctcatc

SEQ ID NO: 344573 - DNA, 20 bp, Artificial Sequence
  Description of Artificial Sequence: Synthetic oligonucleotide
  Target: LAMA2; (+) strand; PAM type: YTN; PAM sequence: CTC
tgagcctgtttcctcatcca

SEQ ID NO: 344574 - DNA, 20 bp, Artificial Sequence
  Description of Artificial Sequence: Synthetic oligonucleotide
  Target: LAMA2; (+) strand; PAM type: YTN; PAM sequence: CTG
agcctgtttcctcatccaca

SEQ ID NO: 344575 - DNA, 20 bp, Artificial Sequence
  Description of Artificial Sequence: Synthetic oligonucleotide
  Target: LAMA2; (+) strand; PAM type: YTN; PAM sequence: CTG
tttcctcatccacaaaaagg

SEQ ID NO: 344576 - DNA, 20 bp, Artificial Sequence
  Description of Artificial Sequence: Synthetic oligonucleotide
  Target: LAMA2; (+) strand; PAM type: YTN; PAM sequence: TTT
cctcatccacaaaaaggatg

SEQ ID NO: 344577 - DNA, 20 bp, Artificial Sequence
  Description of Artificial Sequence: Synthetic oligonucleotide
  Target: LAMA2; (+) strand; PAM type: YTN; PAM sequence: TTC
ctcatccacaaaaaggatga

SEQ ID NO: 344578 - DNA, 20 bp, Artificial Sequence
  Description of Artificial Sequence: Synthetic oligonucleotide
  Target: LAMA2; (+) strand; PAM type: YTN; PAM sequence: CTC
atccacaaaaaggatgaaga

SEQ ID NO: 344579 - DNA, 20 bp, Artificial Sequence
  Description of Artificial Sequence: Synthetic oligonucleotide
  Target: LAMA2; (+) strand; PAM type: YTN; PAM sequence: CTT
cttaacactgataattaaat

SEQ ID NO: 344580 - DNA, 20 bp, Artificial Sequence
  Description of Artificial Sequence: Synthetic oligonucleotide
  Target: LAMA2; (+) strand; PAM type: YTN; PAM sequence: TTC
ttaacactgataattaaata

SEQ ID NO: 344581 - DNA, 20 bp, Artificial Sequence
  Description of Artificial Sequence: Synthetic oligonucleotide
  Target: LAMA2; (+) strand; PAM type: YTN; PAM sequence: CTT
aacactgataattaaataag

SEQ ID NO: 344582 - DNA, 20 bp, Artificial Sequence
  Description of Artificial Sequence: Synthetic oligonucleotide
  Target: LAMA2; (+) strand; PAM type: YTN; PAM sequence: TTA
acactgataattaaataaga

SEQ ID NO: 344583 - DNA, 20 bp, Artificial Sequence
  Description of Artificial Sequence: Synthetic oligonucleotide
  Target: LAMA2; (+) strand; PAM type: YTN; PAM sequence: CTG
ataattaaataagataagct

SEQ ID NO: 344584 - DNA, 20 bp, Artificial Sequence
  Description of Artificial Sequence: Synthetic oligonucleotide
  Target: LAMA2; (+) strand; PAM type: YTN; PAM sequence: TTA
aataagataagcttaaatta

SEQ ID NO: 344585 - DNA, 20 bp, Artificial Sequence
  Description of Artificial Sequence: Synthetic oligonucleotide
  Target: LAMA2; (+) strand; PAM type: YTN; PAM sequence: CTT
aaattataaaatcagcacag

SEQ ID NO: 344586 - DNA, 20 bp, Artificial Sequence
  Description of Artificial Sequence: Synthetic oligonucleotide
  Target: LAMA2; (+) strand; PAM type: YTN; PAM sequence: TTA
aattataaaatcagcacaga

SEQ ID NO: 344587 - DNA, 20 bp, Artificial Sequence
  Description of Artificial Sequence: Synthetic oligonucleotide
  Target: LAMA2; (+) strand; PAM type: YTN; PAM sequence: TTA
taaaatcagcacagagggaa

SEQ ID NO: 344588 - DNA, 20 bp, Artificial Sequence
  Description of Artificial Sequence: Synthetic oligonucleotide
  Target: LAMA2; (+) strand; PAM type: YTN; PAM sequence: TTG
gttcaaccattatggaagga

SEQ ID NO: 344589 - DNA, 20 bp, Artificial Sequence
  Description of Artificial Sequence: Synthetic oligonucleotide
  Target: LAMA2; (+) strand; PAM type: YTN; PAM sequence: TTC
aaccattatggaaggaaaaa

SEQ ID NO: 344590 - DNA, 20 bp, Artificial Sequence
  Description of Artificial Sequence: Synthetic oligonucleotide
  Target: LAMA2; (+) strand; PAM type: YTN; PAM sequence: TTA
tggaaggaaaaaagtaggaa

SEQ ID NO: 344591 - DNA, 20 bp, Artificial Sequence
  Description of Artificial Sequence: Synthetic oligonucleotide
  Target: LAMA2; (+) strand; PAM type: YTN; PAM sequence: TTC
ctcaaaaaattcaaaatggg

SEQ ID NO: 344592 - DNA, 20 bp, Artificial Sequence
  Description of Artificial Sequence: Synthetic oligonucleotide
  Target: LAMA2; (+) strand; PAM type: YTN; PAM sequence: CTC
aaaaaattcaaaatgggact

SEQ ID NO: 344593 - DNA, 20 bp, Artificial Sequence
  Description of Artificial Sequence: Synthetic oligonucleotide
  Target: LAMA2; (+) strand; PAM type: YTN; PAM sequence: TTC
aaaatgggactgcgaggccg

SEQ ID NO: 344594 - DNA, 20 bp, Artificial Sequence
  Description of Artificial Sequence: Synthetic oligonucleotide
  Target: LAMA2; (+) strand; PAM type: YTN; PAM sequence: CTG
cgaggccgggtgtggtggct

SEQ ID NO: 344595 - DNA, 20 bp, Artificial Sequence
  Description of Artificial Sequence: Synthetic oligonucleotide
  Target: LAMA2; (+) strand; PAM type: YTN; PAM sequence: CTC
aagcctgtaatctcagcact

SEQ ID NO: 344596 - DNA, 20 bp, Artificial Sequence
  Description of Artificial Sequence: Synthetic oligonucleotide
  Target: LAMA2; (+) strand; PAM type: YTN; PAM sequence: CTG
taatctcagcactttgggag

SEQ ID NO: 344597 - DNA, 20 bp, Artificial Sequence
  Description of Artificial Sequence: Synthetic oligonucleotide
  Target: LAMA2; (+) strand; PAM type: YTN; PAM sequence: CTC
agcactttgggaggctgagg

SEQ ID NO: 344598 - DNA, 20 bp, Artificial Sequence
  Description of Artificial Sequence: Synthetic oligonucleotide
  Target: LAMA2; (+) strand; PAM type: YTN; PAM sequence: CTT
tgggaggctgaggcaggcag

SEQ ID NO: 344599 - DNA, 20 bp, Artificial Sequence
  Description of Artificial Sequence: Synthetic oligonucleotide
  Target: LAMA2; (+) strand; PAM type: YTN; PAM sequence: TTT
gggaggctgaggcaggcaga

SEQ ID NO: 344600 - DNA, 20 bp, Artificial Sequence
  Description of Artificial Sequence: Synthetic oligonucleotide
  Target: LAMA2; (+) strand; PAM type: YTN; PAM sequence: TTG
ggaggctgaggcaggcagag

SEQ ID NO: 344601 - DNA, 20 bp, Artificial Sequence
  Description of Artificial Sequence: Synthetic oligonucleotide
  Target: LAMA2; (+) strand; PAM type: YTN; PAM sequence: CTG
aggcaggcagagcattttga

SEQ ID NO: 344602 - DNA, 20 bp, Artificial Sequence
  Description of Artificial Sequence: Synthetic oligonucleotide
  Target: LAMA2; (+) strand; PAM type: YTN; PAM sequence: TTT
tgaggtcaggagttcgagag

SEQ ID NO: 344603 - DNA, 20 bp, Artificial Sequence
  Description of Artificial Sequence: Synthetic oligonucleotide
  Target: LAMA2; (+) strand; PAM type: YTN; PAM sequence: TTT
gaggtcaggagttcgagagc

SEQ ID NO: 344604 - DNA, 20 bp, Artificial Sequence
  Description of Artificial Sequence: Synthetic oligonucleotide
  Target: LAMA2; (+) strand; PAM type: YTN; PAM sequence: TTG
aggtcaggagttcgagagca

SEQ ID NO: 344605 - DNA, 20 bp, Artificial Sequence
  Description of Artificial Sequence: Synthetic oligonucleotide
  Target: LAMA2; (+) strand; PAM type: YTN; PAM sequence: TTC
gagagcagcctggccaacat

SEQ ID NO: 344606 - DNA, 20 bp, Artificial Sequence
  Description of Artificial Sequence: Synthetic oligonucleotide
  Target: LAMA2; (+) strand; PAM type: YTN; PAM sequence: CTG
gccaacatggtgaaaccctg

SEQ ID NO: 344607 - DNA, 20 bp, Artificial Sequence
  Description of Artificial Sequence: Synthetic oligonucleotide
  Target: LAMA2; (+) strand; PAM type: YTN; PAM sequence: CTG
tctctactaaaaaacatcca

SEQ ID NO: 344608 - DNA, 20 bp, Artificial Sequence
  Description of Artificial Sequence: Synthetic oligonucleotide
  Target: LAMA2; (+) strand; PAM type: YTN; PAM sequence: CTC
tactaaaaaacatccaaaaa

SEQ ID NO: 344609 - DNA, 20 bp, Artificial Sequence
  Description of Artificial Sequence: Synthetic oligonucleotide
  Target: LAMA2; (+) strand; PAM type: YTN; PAM sequence: CTA
ctaaaaaacatccaaaaatt

SEQ ID NO: 344610 - DNA, 20 bp, Artificial Sequence
  Description of Artificial Sequence: Synthetic oligonucleotide
  Target: LAMA2; (+) strand; PAM type: YTN; PAM sequence: CTA
aaaaacatccaaaaattagc

SEQ ID NO: 344611 - DNA, 20 bp, Artificial Sequence
  Description of Artificial Sequence: Synthetic oligonucleotide
  Target: LAMA2; (+) strand; PAM type: YTN; PAM sequence: TTA
gccaggcatagtggtgcacg

SEQ ID NO: 344612 - DNA, 20 bp, Artificial Sequence
  Description of Artificial Sequence: Synthetic oligonucleotide
  Target: LAMA2; (+) strand; PAM type: YTN; PAM sequence: CTG
taatcccagctacttgggag

SEQ ID NO: 344613 - DNA, 20 bp, Artificial Sequence
  Description of Artificial Sequence: Synthetic oligonucleotide
  Target: LAMA2; (+) strand; PAM type: YTN; PAM sequence: CTA
cttgggaggctgaggcagaa

SEQ ID NO: 344614 - DNA, 20 bp, Artificial Sequence
  Description of Artificial Sequence: Synthetic oligonucleotide
  Target: LAMA2; (+) strand; PAM type: YTN; PAM sequence: CTT
gggaggctgaggcagaagaa

SEQ ID NO: 344615 - DNA, 20 bp, Artificial Sequence
  Description of Artificial Sequence: Synthetic oligonucleotide
  Target: LAMA2; (+) strand; PAM type: YTN; PAM sequence: TTG
ggaggctgaggcagaagaat

SEQ ID NO: 344616 - DNA, 20 bp, Artificial Sequence
  Description of Artificial Sequence: Synthetic oligonucleotide
  Target: LAMA2; (+) strand; PAM type: YTN; PAM sequence: CTG
aggcagaagaattgtgtgaa

SEQ ID NO: 344617 - DNA, 20 bp, Artificial Sequence
  Description of Artificial Sequence: Synthetic oligonucleotide
  Target: LAMA2; (+) strand; PAM type: YTN; PAM sequence: TTG
tgtgaaccgggcaggcagag

SEQ ID NO: 344618 - DNA, 20 bp, Artificial Sequence
  Description of Artificial Sequence: Synthetic oligonucleotide
  Target: LAMA2; (+) strand; PAM type: YTN; PAM sequence: TTG
cagtgaactgagatggtgcc

SEQ ID NO: 344619 - DNA, 20 bp, Artificial Sequence
  Description of Artificial Sequence: Synthetic oligonucleotide
  Target: LAMA2; (+) strand; PAM type: YTN; PAM sequence: CTG
agatggtgccactgcacttc

SEQ ID NO: 344620 - DNA, 20 bp, Artificial Sequence
  Description of Artificial Sequence: Synthetic oligonucleotide
  Target: LAMA2; (+) strand; PAM type: YTN; PAM sequence: CTG
cacttcagcctgagcgatag

SEQ ID NO: 344621 - DNA, 20 bp, Artificial Sequence
  Description of Artificial Sequence: Synthetic oligonucleotide
  Target: LAMA2; (+) strand; PAM type: YTN; PAM sequence: CTT
cagcctgagcgatagagtaa

SEQ ID NO: 344622 - DNA, 20 bp, Artificial Sequence
  Description of Artificial Sequence: Synthetic oligonucleotide
  Target: LAMA2; (+) strand; PAM type: YTN; PAM sequence: TTC
agcctgagcgatagagtaag

SEQ ID NO: 344623 - DNA, 20 bp, Artificial Sequence
  Description of Artificial Sequence: Synthetic oligonucleotide
  Target: LAMA2; (+) strand; PAM type: YTN; PAM sequence: CTG
agcgatagagtaagactctg

SEQ ID NO: 344624 - DNA, 20 bp, Artificial Sequence
  Description of Artificial Sequence: Synthetic oligonucleotide
  Target: LAMA2; (+) strand; PAM type: YTN; PAM sequence: CTC
tgtctcaaaaaaaaaaaaaa

SEQ ID NO: 344625 - DNA, 20 bp, Artificial Sequence
  Description of Artificial Sequence: Synthetic oligonucleotide
  Target: LAMA2; (+) strand; PAM type: YTN; PAM sequence: CTG
tctcaaaaaaaaaaaaaaag

SEQ ID NO: 344626 - DNA, 20 bp, Artificial Sequence
  Description of Artificial Sequence: Synthetic oligonucleotide
  Target: LAMA2; (+) strand; PAM type: YTN; PAM sequence: CTC
aaaaaaaaaaaaaaaggaac

SEQ ID NO: 344627 - DNA, 20 bp, Artificial Sequence
  Description of Artificial Sequence: Synthetic oligonucleotide
  Target: LAMA2; (+) strand; PAM type: YTN; PAM sequence: CTA
ccatatgatccagccttctc

SEQ ID NO: 344628 - DNA, 20 bp, Artificial Sequence
  Description of Artificial Sequence: Synthetic oligonucleotide
  Target: LAMA2; (+) strand; PAM type: YTN; PAM sequence: CTT
ctcacacatatatatatgtg

SEQ ID NO: 344629 - DNA, 20 bp, Artificial Sequence
  Description of Artificial Sequence: Synthetic oligonucleotide
  Target: LAMA2; (+) strand; PAM type: YTN; PAM sequence: TTC
tcacacatatatatatgtgt

SEQ ID NO: 344630 - DNA, 20 bp, Artificial Sequence
  Description of Artificial Sequence: Synthetic oligonucleotide
  Target: LAMA2; (+) strand; PAM type: YTN; PAM sequence: CTC
acacatatatatatgtgtgt

SEQ ID NO: 344631 - DNA, 20 bp, Artificial Sequence
  Description of Artificial Sequence: Synthetic oligonucleotide
  Target: LAMA2; (+) strand; PAM type: YTN; PAM sequence: TTC
aaagcaattgaaatcaggat

SEQ ID NO: 344632 - DNA, 20 bp, Artificial Sequence
  Description of Artificial Sequence: Synthetic oligonucleotide
  Target: LAMA2; (+) strand; PAM type: YTN; PAM sequence: TTG
aaatcaggatctcaaagaga

SEQ ID NO: 344633 - DNA, 20 bp, Artificial Sequence
  Description of Artificial Sequence: Synthetic oligonucleotide
  Target: LAMA2; (+) strand; PAM type: YTN; PAM sequence: CTC
aaagagatatctgcatttcc

SEQ ID NO: 344634 - DNA, 20 bp, Artificial Sequence
  Description of Artificial Sequence: Synthetic oligonucleotide
  Target: LAMA2; (+) strand; PAM type: YTN; PAM sequence: CTG
catttccgtattcattttag

SEQ ID NO: 344635 - DNA, 20 bp, Artificial Sequence
  Description of Artificial Sequence: Synthetic oligonucleotide
  Target: LAMA2; (+) strand; PAM type: YTN; PAM sequence: TTT
ccgtattcattttagcatta

SEQ ID NO: 344636 - DNA, 20 bp, Artificial Sequence
  Description of Artificial Sequence: Synthetic oligonucleotide
  Target: LAMA2; (+) strand; PAM type: YTN; PAM sequence: TTC
cgtattcattttagcattat

SEQ ID NO: 344637 - DNA, 20 bp, Artificial Sequence
  Description of Artificial Sequence: Synthetic oligonucleotide
  Target: LAMA2; (+) strand; PAM type: YTN; PAM sequence: TTC
attttagcattattcacaat

SEQ ID NO: 344638 - DNA, 20 bp, Artificial Sequence
  Description of Artificial Sequence: Synthetic oligonucleotide
  Target: LAMA2; (+) strand; PAM type: YTN; PAM sequence: TTT
tagcattattcacaatagtc

SEQ ID NO: 344639 - DNA, 20 bp, Artificial Sequence
  Description of Artificial Sequence: Synthetic oligonucleotide
  Target: LAMA2; (+) strand; PAM type: YTN; PAM sequence: TTT
agcattattcacaatagtca

SEQ ID NO: 344640 - DNA, 20 bp, Artificial Sequence
  Description of Artificial Sequence: Synthetic oligonucleotide
  Target: LAMA2; (+) strand; PAM type: YTN; PAM sequence: TTA
gcattattcacaatagtcaa

SEQ ID NO: 344641 - DNA, 20 bp, Artificial Sequence
  Description of Artificial Sequence: Synthetic oligonucleotide
  Target: LAMA2; (+) strand; PAM type: YTN; PAM sequence: TTA
ttcacaatagtcaagatatg

SEQ ID NO: 344642 - DNA, 20 bp, Artificial Sequence
  Description of Artificial Sequence: Synthetic oligonucleotide
  Target: LAMA2; (+) strand; PAM type: YTN; PAM sequence: TTC
acaatagtcaagatatggaa

SEQ ID NO: 344643 - DNA, 20 bp, Artificial Sequence
  Description of Artificial Sequence: Synthetic oligonucleotide
  Target: LAMA2; (+) strand; PAM type: YTN; PAM sequence: CTA
aatatctgttgacagatgaa

SEQ ID NO: 344644 - DNA, 20 bp, Artificial Sequence
  Description of Artificial Sequence: Synthetic oligonucleotide
  Target: LAMA2; (+) strand; PAM type: YTN; PAM sequence: CTG
ttgacagatgaataaataag

SEQ ID NO: 344645 - DNA, 20 bp, Artificial Sequence
  Description of Artificial Sequence: Synthetic oligonucleotide
  Target: LAMA2; (+) strand; PAM type: YTN; PAM sequence: TTG
acagatgaataaataaggaa

SEQ ID NO: 344646 - DNA, 20 bp, Artificial Sequence
  Description of Artificial Sequence: Synthetic oligonucleotide
  Target: LAMA2; (+) strand; PAM type: YTN; PAM sequence: TTA
cttagccttagaaaaagaag

SEQ ID NO: 344647 - DNA, 20 bp, Artificial Sequence
  Description of Artificial Sequence: Synthetic oligonucleotide
  Target: LAMA2; (+) strand; PAM type: YTN; PAM sequence: CTT
agccttagaaaaagaaggaa

SEQ ID NO: 344648 - DNA, 20 bp, Artificial Sequence
  Description of Artificial Sequence: Synthetic oligonucleotide
  Target: LAMA2; (+) strand; PAM type: YTN; PAM sequence: TTA
gccttagaaaaagaaggaaa

SEQ ID NO: 344649 - DNA, 20 bp, Artificial Sequence
  Description of Artificial Sequence: Synthetic oligonucleotide
  Target: LAMA2; (+) strand; PAM type: YTN; PAM sequence: CTT
agaaaaagaaggaaatcctg

SEQ ID NO: 344650 - DNA, 20 bp, Artificial Sequence
  Description of Artificial Sequence: Synthetic oligonucleotide
  Target: LAMA2; (+) strand; PAM type: YTN; PAM sequence: TTA
gaaaaagaaggaaatcctgc

SEQ ID NO: 344651 - DNA, 20 bp, Artificial Sequence
  Description of Artificial Sequence: Synthetic oligonucleotide
  Target: LAMA2; (+) strand; PAM type: YTN; PAM sequence: CTG
ccatttcaggcaatgtggac

SEQ ID NO: 344652 - DNA, 20 bp, Artificial Sequence
  Description of Artificial Sequence: Synthetic oligonucleotide
  Target: LAMA2; (+) strand; PAM type: YTN; PAM sequence: TTT
caggcaatgtggacaacatg

SEQ ID NO: 344653 - DNA, 20 bp, Artificial Sequence
  Description of Artificial Sequence: Synthetic oligonucleotide
  Target: LAMA2; (+) strand; PAM type: YTN; PAM sequence: TTC
aggcaatgtggacaacatga

SEQ ID NO: 344654 - DNA, 20 bp, Artificial Sequence
  Description of Artificial Sequence: Synthetic oligonucleotide
  Target: LAMA2; (+) strand; PAM type: YTN; PAM sequence: TTA
tgttaagtgaagtaagccag

SEQ ID NO: 344655 - DNA, 20 bp, Artificial Sequence
  Description of Artificial Sequence: Synthetic oligonucleotide
  Target: LAMA2; (+) strand; PAM type: YTN; PAM sequence: TTA
agtgaagtaagccaggagtg

SEQ ID NO: 344656 - DNA, 20 bp, Artificial Sequence
  Description of Artificial Sequence: Synthetic oligonucleotide
  Target: LAMA2; (+) strand; PAM type: YTN; PAM sequence: TTA
catgatatcatttatataag

SEQ ID NO: 344657 - DNA, 20 bp, Artificial Sequence
  Description of Artificial Sequence: Synthetic oligonucleotide
  Target: LAMA2; (+) strand; PAM type: YTN; PAM sequence: TTT
atataaggaaactaaaatag

SEQ ID NO: 344658 - DNA, 20 bp, Artificial Sequence
  Description of Artificial Sequence: Synthetic oligonucleotide
  Target: LAMA2; (+) strand; PAM type: YTN; PAM sequence: TTA
tataaggaaactaaaatagt

SEQ ID NO: 344659 - DNA, 20 bp, Artificial Sequence
  Description of Artificial Sequence: Synthetic oligonucleotide
  Target: LAMA2; (+) strand; PAM type: YTN; PAM sequence: CTA
aaatagtcaaaactcagaaa

SEQ ID NO: 344660 - DNA, 20 bp, Artificial Sequence
  Description of Artificial Sequence: Synthetic oligonucleotide
  Target: LAMA2; (+) strand; PAM type: YTN; PAM sequence: CTC
agaaacatgagagtagaatg

SEQ ID NO: 344661 - DNA, 20 bp, Artificial Sequence
  Description of Artificial Sequence: Synthetic oligonucleotide
  Target: LAMA2; (+) strand; PAM type: YTN; PAM sequence: TTA
ccagggtctgggttggaggg

SEQ ID NO: 344662 - DNA, 20 bp, Artificial Sequence
  Description of Artificial Sequence: Synthetic oligonucleotide
  Target: LAMA2; (+) strand; PAM type: YTN; PAM sequence: CTG
ggttggagggggaaacagga

SEQ ID NO: 344663 - DNA, 20 bp, Artificial Sequence
  Description of Artificial Sequence: Synthetic oligonucleotide
  Target: LAMA2; (+) strand; PAM type: YTN; PAM sequence: TTG
gagggggaaacaggaaagta

SEQ ID NO: 344664 - DNA, 20 bp, Artificial Sequence
  Description of Artificial Sequence: Synthetic oligonucleotide
  Target: LAMA2; (+) strand; PAM type: YTN; PAM sequence: TTA
gtgaaaggataaaaagtttt

SEQ ID NO: 344665 - DNA, 20 bp, Artificial Sequence
  Description of Artificial Sequence: Synthetic oligonucleotide
  Target: LAMA2; (+) strand; PAM type: YTN; PAM sequence: TTT
tatttatacaagatgaatta

SEQ ID NO: 344666 - DNA, 20 bp, Artificial Sequence
  Description of Artificial Sequence: Synthetic oligonucleotide
  Target: LAMA2; (+) strand; PAM type: YTN; PAM sequence: TTT
atttatacaagatgaattaa

SEQ ID NO: 344667 - DNA, 20 bp, Artificial Sequence
  Description of Artificial Sequence: Synthetic oligonucleotide
  Target: LAMA2; (+) strand; PAM type: YTN; PAM sequence: TTA
tttatacaagatgaattaag

SEQ ID NO: 344668 - DNA, 20 bp, Artificial Sequence
  Description of Artificial Sequence: Synthetic oligonucleotide
  Target: LAMA2; (+) strand; PAM type: YTN; PAM sequence: TTT
atacaagatgaattaagtcc

SEQ ID NO: 344669 - DNA, 20 bp, Artificial Sequence
  Description of Artificial Sequence: Synthetic oligonucleotide
  Target: LAMA2; (+) strand; PAM type: YTN; PAM sequence: TTA
tacaagatgaattaagtcct

SEQ ID NO: 344670 - DNA, 20 bp, Artificial Sequence
  Description of Artificial Sequence: Synthetic oligonucleotide
  Target: LAMA2; (+) strand; PAM type: YTN; PAM sequence: TTA
agtcctcgagatctactgta

SEQ ID NO: 344671 - DNA, 20 bp, Artificial Sequence
  Description of Artificial Sequence: Synthetic oligonucleotide
  Target: LAMA2; (+) strand; PAM type: YTN; PAM sequence: CTC
gagatctactgtaccgcata

SEQ ID NO: 344672 - DNA, 20 bp, Artificial Sequence
  Description of Artificial Sequence: Synthetic oligonucleotide
  Target: LAMA2; (+) strand; PAM type: YTN; PAM sequence: CTA
ctgtaccgcatagtgcctag

SEQ ID NO: 344673 - DNA, 20 bp, Artificial Sequence
  Description of Artificial Sequence: Synthetic oligonucleotide
  Target: LAMA2; (+) strand; PAM type: YTN; PAM sequence: CTG
taccgcatagtgcctagact

SEQ ID NO: 344674 - DNA, 20 bp, Artificial Sequence
  Description of Artificial Sequence: Synthetic oligonucleotide
  Target: LAMA2; (+) strand; PAM type: YTN; PAM sequence: CTA
gacttaacattactgtatcg

SEQ ID NO: 344675 - DNA, 20 bp, Artificial Sequence
  Description of Artificial Sequence: Synthetic oligonucleotide
  Target: LAMA2; (+) strand; PAM type: YTN; PAM sequence: CTT
aacattactgtatcgtatgc

SEQ ID NO: 344676 - DNA, 20 bp, Artificial Sequence
  Description of Artificial Sequence: Synthetic oligonucleotide
  Target: LAMA2; (+) strand; PAM type: YTN; PAM sequence: TTA
acattactgtatcgtatgct

SEQ ID NO: 344677 - DNA, 20 bp, Artificial Sequence
  Description of Artificial Sequence: Synthetic oligonucleotide
  Target: LAMA2; (+) strand; PAM type: YTN; PAM sequence: TTA
ctgtatcgtatgcttgaaat

SEQ ID NO: 344678 - DNA, 20 bp, Artificial Sequence
  Description of Artificial Sequence: Synthetic oligonucleotide
  Target: LAMA2; (+) strand; PAM type: YTN; PAM sequence: CTG
tatcgtatgcttgaaatttt

SEQ ID NO: 344679 - DNA, 20 bp, Artificial Sequence
  Description of Artificial Sequence: Synthetic oligonucleotide
  Target: LAMA2; (+) strand; PAM type: YTN; PAM sequence: CTT
gaaattttcctaacaaagtc

SEQ ID NO: 344680 - DNA, 20 bp, Artificial Sequence
  Description of Artificial Sequence: Synthetic oligonucleotide
  Target: LAMA2; (+) strand; PAM type: YTN; PAM sequence: TTG
aaattttcctaacaaagtca

SEQ ID NO: 344681 - DNA, 20 bp, Artificial Sequence
  Description of Artificial Sequence: Synthetic oligonucleotide
  Target: LAMA2; (+) strand; PAM type: YTN; PAM sequence: TTT
tcctaacaaagtcaatctta

SEQ ID NO: 344682 - DNA, 20 bp, Artificial Sequence
  Description of Artificial Sequence: Synthetic oligonucleotide
  Target: LAMA2; (+) strand; PAM type: YTN; PAM sequence: TTT
cctaacaaagtcaatcttac

SEQ ID NO: 344683 - DNA, 20 bp, Artificial Sequence
  Description of Artificial Sequence: Synthetic oligonucleotide
  Target: LAMA2; (+) strand; PAM type: YTN; PAM sequence: TTC
ctaacaaagtcaatcttaca

SEQ ID NO: 344684 - DNA, 20 bp, Artificial Sequence
  Description of Artificial Sequence: Synthetic oligonucleotide
  Target: LAMA2; (+) strand; PAM type: YTN; PAM sequence: CTA
acaaagtcaatcttacaaat

SEQ ID NO: 344685 - DNA, 20 bp, Artificial Sequence
  Description of Artificial Sequence: Synthetic oligonucleotide
  Target: LAMA2; (+) strand; PAM type: YTN; PAM sequence: CTT
acaaatgttcttatcacaaa

SEQ ID NO: 344686 - DNA, 20 bp, Artificial Sequence
  Description of Artificial Sequence: Synthetic oligonucleotide
  Target: LAMA2; (+) strand; PAM type: YTN; PAM sequence: TTA
caaatgttcttatcacaaaa

SEQ ID NO: 344687 - DNA, 20 bp, Artificial Sequence
  Description of Artificial Sequence: Synthetic oligonucleotide
  Target: LAMA2; (+) strand; PAM type: YTN; PAM sequence: TTC
ttatcacaaaataataataa

SEQ ID NO: 344688 - DNA, 20 bp, Artificial Sequence
  Description of Artificial Sequence: Synthetic oligonucleotide
  Target: LAMA2; (+) strand; PAM type: YTN; PAM sequence: CTT
atcacaaaataataataata

SEQ ID NO: 344689 - DNA, 20 bp, Artificial Sequence
  Description of Artificial Sequence: Synthetic oligonucleotide
  Target: LAMA2; (+) strand; PAM type: YTN; PAM sequence: TTA
tcacaaaataataataataa

SEQ ID NO: 344690 - DNA, 20 bp, Artificial Sequence
  Description of Artificial Sequence: Synthetic oligonucleotide
  Target: LAMA2; (+) strand; PAM type: YTN; PAM sequence: CTT
ttggaggttattgatatata

SEQ ID NO: 344691 - DNA, 20 bp, Artificial Sequence
  Description of Artificial Sequence: Synthetic oligonucleotide
  Target: LAMA2; (+) strand; PAM type: YTN; PAM sequence: TTT
tggaggttattgatatatat

SEQ ID NO: 344692 - DNA, 20 bp, Artificial Sequence
  Description of Artificial Sequence: Synthetic oligonucleotide
  Target: LAMA2; (+) strand; PAM type: YTN; PAM sequence: TTT
ggaggttattgatatatatg

SEQ ID NO: 344693 - DNA, 20 bp, Artificial Sequence
  Description of Artificial Sequence: Synthetic oligonucleotide
  Target: LAMA2; (+) strand; PAM type: YTN; PAM sequence: TTG
gaggttattgatatatatgt

SEQ ID NO: 344694 - DNA, 20 bp, Artificial Sequence
  Description of Artificial Sequence: Synthetic oligonucleotide
  Target: LAMA2; (+) strand; PAM type: YTN; PAM sequence: TTA
ttgatatatatgtggcagag

SEQ ID NO: 344695 - DNA, 20 bp, Artificial Sequence
  Description of Artificial Sequence: Synthetic oligonucleotide
  Target: LAMA2; (+) strand; PAM type: YTN; PAM sequence: TTG
atatatatgtggcagagacg

SEQ ID NO: 344696 - DNA, 20 bp, Artificial Sequence
  Description of Artificial Sequence: Synthetic oligonucleotide
  Target: LAMA2; (+) strand; PAM type: YTN; PAM sequence: TTT
cgctggtgcatacttatctc

SEQ ID NO: 344697 - DNA, 20 bp, Artificial Sequence
  Description of Artificial Sequence: Synthetic oligonucleotide
  Target: LAMA2; (+) strand; PAM type: YTN; PAM sequence: TTC
gctggtgcatacttatctcc

SEQ ID NO: 344698 - DNA, 20 bp, Artificial Sequence
  Description of Artificial Sequence: Synthetic oligonucleotide
  Target: LAMA2; (+) strand; PAM type: YTN; PAM sequence: CTG
gtgcatacttatctccaaac

SEQ ID NO: 344699 - DNA, 20 bp, Artificial Sequence
  Description of Artificial Sequence: Synthetic oligonucleotide
  Target: LAMA2; (+) strand; PAM type: YTN; PAM sequence: CTT
atctccaaactcattaggtt

SEQ ID NO: 344700 - DNA, 20 bp, Artificial Sequence
  Description of Artificial Sequence: Synthetic oligonucleotide
  Target: LAMA2; (+) strand; PAM type: YTN; PAM sequence: TTA
tctccaaactcattaggttg

SEQ ID NO: 344701 - DNA, 20 bp, Artificial Sequence
  Description of Artificial Sequence: Synthetic oligonucleotide
  Target: LAMA2; (+) strand; PAM type: YTN; PAM sequence: CTC
caaactcattaggttgtata

SEQ ID NO: 344702 - DNA, 20 bp, Artificial Sequence
  Description of Artificial Sequence: Synthetic oligonucleotide
  Target: LAMA2; (+) strand; PAM type: YTN; PAM sequence: CTC
attaggttgtatacatcaaa

SEQ ID NO: 344703 - DNA, 20 bp, Artificial Sequence
  Description of Artificial Sequence: Synthetic oligonucleotide
  Target: LAMA2; (+) strand; PAM type: YTN; PAM sequence: TTA
ggttgtatacatcaaatacg

SEQ ID NO: 344704 - DNA, 20 bp, Artificial Sequence
  Description of Artificial Sequence: Synthetic oligonucleotide
  Target: LAMA2; (+) strand; PAM type: YTN; PAM sequence: TTG
tatacatcaaatacgtaagg

SEQ ID NO: 344705 - DNA, 20 bp, Artificial Sequence
  Description of Artificial Sequence: Synthetic oligonucleotide
  Target: LAMA2; (+) strand; PAM type: YTN; PAM sequence: CTT
tttgtatgtcaatcaacctc

SEQ ID NO: 344706 - DNA, 20 bp, Artificial Sequence
  Description of Artificial Sequence: Synthetic oligonucleotide
  Target: LAMA2; (+) strand; PAM type: YTN; PAM sequence: TTT
ttgtatgtcaatcaacctca

SEQ ID NO: 344707 - DNA, 20 bp, Artificial Sequence
  Description of Artificial Sequence: Synthetic oligonucleotide
  Target: LAMA2; (+) strand; PAM type: YTN; PAM sequence: TTT
tgtatgtcaatcaacctcaa

SEQ ID NO: 344708 - DNA, 20 bp, Artificial Sequence
  Description of Artificial Sequence: Synthetic oligonucleotide
  Target: LAMA2; (+) strand; PAM type: YTN; PAM sequence: TTT
gtatgtcaatcaacctcaac

SEQ ID NO: 344709 - DNA, 20 bp, Artificial Sequence
  Description of Artificial Sequence: Synthetic oligonucleotide
  Target: LAMA2; (+) strand; PAM type: YTN; PAM sequence: TTG
tatgtcaatcaacctcaaca

SEQ ID NO: 344710 - DNA, 20 bp, Artificial Sequence
  Description of Artificial Sequence: Synthetic oligonucleotide
  Target: LAMA2; (+) strand; PAM type: YTN; PAM sequence: CTC
aacatgttttttttaaagca

SEQ ID NO: 344711 - DNA, 20 bp, Artificial Sequence
  Description of Artificial Sequence: Synthetic oligonucleotide
  Target: LAMA2; (+) strand; PAM type: YTN; PAM sequence: TTT
tttttaaagcagtatagaaa

SEQ ID NO: 344712 - DNA, 20 bp, Artificial Sequence
  Description of Artificial Sequence: Synthetic oligonucleotide
  Target: LAMA2; (+) strand; PAM type: YTN; PAM sequence: TTT
ttttaaagcagtatagaaat

SEQ ID NO: 344713 - DNA, 20 bp, Artificial Sequence
  Description of Artificial Sequence: Synthetic oligonucleotide
  Target: LAMA2; (+) strand; PAM type: YTN; PAM sequence: TTT
tttaaagcagtatagaaata

SEQ ID NO: 344714 - DNA, 20 bp, Artificial Sequence
  Description of Artificial Sequence: Synthetic oligonucleotide
  Target: LAMA2; (+) strand; PAM type: YTN; PAM sequence: TTT
ttaaagcagtatagaaatac

SEQ ID NO: 344715 - DNA, 20 bp, Artificial Sequence
  Description of Artificial Sequence: Synthetic oligonucleotide
  Target: LAMA2; (+) strand; PAM type: YTN; PAM sequence: TTT
taaagcagtatagaaatacc

SEQ ID NO: 344716 - DNA, 20 bp, Artificial Sequence
  Description of Artificial Sequence: Synthetic oligonucleotide
  Target: LAMA2; (+) strand; PAM type: YTN; PAM sequence: TTT
aaagcagtatagaaatacct

SEQ ID NO: 344717 - DNA, 20 bp, Artificial Sequence
  Description of Artificial Sequence: Synthetic oligonucleotide
  Target: LAMA2; (+) strand; PAM type: YTN; PAM sequence: TTA
aagcagtatagaaataccta

SEQ ID NO: 344718 - DNA, 20 bp, Artificial Sequence
  Description of Artificial Sequence: Synthetic oligonucleotide
  Target: LAMA2; (+) strand; PAM type: YTN; PAM sequence: CTA
ttttttaaaattattacaac

SEQ ID NO: 344719 - DNA, 20 bp, Artificial Sequence
  Description of Artificial Sequence: Synthetic oligonucleotide
  Target: LAMA2; (+) strand; PAM type: YTN; PAM sequence: TTT
tttaaaattattacaactga

SEQ ID NO: 344720 - DNA, 20 bp, Artificial Sequence
  Description of Artificial Sequence: Synthetic oligonucleotide
  Target: LAMA2; (+) strand; PAM type: YTN; PAM sequence: TTT
ttaaaattattacaactgaa

SEQ ID NO: 344721 - DNA, 20 bp, Artificial Sequence
  Description of Artificial Sequence: Synthetic oligonucleotide
  Target: LAMA2; (+) strand; PAM type: YTN; PAM sequence: TTT
taaaattattacaactgaaa

SEQ ID NO: 344722 - DNA, 20 bp, Artificial Sequence
  Description of Artificial Sequence: Synthetic oligonucleotide
  Target: LAMA2; (+) strand; PAM type: YTN; PAM sequence: TTT
aaaattattacaactgaaag

SEQ ID NO: 344723 - DNA, 20 bp, Artificial Sequence
  Description of Artificial Sequence: Synthetic oligonucleotide
  Target: LAMA2; (+) strand; PAM type: YTN; PAM sequence: TTA
aaattattacaactgaaagc

SEQ ID NO: 344724 - DNA, 20 bp, Artificial Sequence
  Description of Artificial Sequence: Synthetic oligonucleotide
  Target: LAMA2; (+) strand; PAM type: YTN; PAM sequence: TTA
ttacaactgaaagccttcta

SEQ ID NO: 344725 - DNA, 20 bp, Artificial Sequence
  Description of Artificial Sequence: Synthetic oligonucleotide
  Target: LAMA2; (+) strand; PAM type: YTN; PAM sequence: TTA
caactgaaagccttctaact

SEQ ID NO: 344726 - DNA, 20 bp, Artificial Sequence
  Description of Artificial Sequence: Synthetic oligonucleotide
  Target: LAMA2; (+) strand; PAM type: YTN; PAM sequence: CTG
aaagccttctaacttgtggt

SEQ ID NO: 344727 - DNA, 20 bp, Artificial Sequence
  Description of Artificial Sequence: Synthetic oligonucleotide
  Target: LAMA2; (+) strand; PAM type: YTN; PAM sequence: CTT
ctaacttgtggtgttttctt

SEQ ID NO: 344728 - DNA, 20 bp, Artificial Sequence
  Description of Artificial Sequence: Synthetic oligonucleotide
  Target: LAMA2; (+) strand; PAM type: YTN; PAM sequence: TTC
taacttgtggtgttttcttg

SEQ ID NO: 344729 - DNA, 20 bp, Artificial Sequence
  Description of Artificial Sequence: Synthetic oligonucleotide
  Target: LAMA2; (+) strand; PAM type: YTN; PAM sequence: CTA
acttgtggtgttttcttgaa

SEQ ID NO: 344730 - DNA, 20 bp, Artificial Sequence
  Description of Artificial Sequence: Synthetic oligonucleotide
  Target: LAMA2; (+) strand; PAM type: YTN; PAM sequence: CTT
gtggtgttttcttgaaataa

SEQ ID NO: 344731 - DNA, 20 bp, Artificial Sequence
  Description of Artificial Sequence: Synthetic oligonucleotide
  Target: LAMA2; (+) strand; PAM type: YTN; PAM sequence: TTG
tggtgttttcttgaaataat

SEQ ID NO: 344732 - DNA, 20 bp, Artificial Sequence
  Description of Artificial Sequence: Synthetic oligonucleotide
  Target: LAMA2; (+) strand; PAM type: YTN; PAM sequence: TTT
tcttgaaataataatcgtat

SEQ ID NO: 344733 - DNA, 20 bp, Artificial Sequence
  Description of Artificial Sequence: Synthetic oligonucleotide
  Target: LAMA2; (+) strand; PAM type: YTN; PAM sequence: TTT
cttgaaataataatcgtatc

SEQ ID NO: 344734 - DNA, 20 bp, Artificial Sequence
  Description of Artificial Sequence: Synthetic oligonucleotide
  Target: LAMA2; (+) strand; PAM type: YTN; PAM sequence: TTC
ttgaaataataatcgtatct

SEQ ID NO: 344735 - DNA, 20 bp, Artificial Sequence
  Description of Artificial Sequence: Synthetic oligonucleotide
  Target: LAMA2; (+) strand; PAM type: YTN; PAM sequence: CTT
gaaataataatcgtatcttg

SEQ ID NO: 344736 - DNA, 20 bp, Artificial Sequence
  Description of Artificial Sequence: Synthetic oligonucleotide
  Target: LAMA2; (+) strand; PAM type: YTN; PAM sequence: TTG
aaataataatcgtatcttgg

SEQ ID NO: 344737 - DNA, 20 bp, Artificial Sequence
  Description of Artificial Sequence: Synthetic oligonucleotide
  Target: LAMA2; (+) strand; PAM type: YTN; PAM sequence: CTT
ggttaatagttgagatctaa

SEQ ID NO: 344738 - DNA, 20 bp, Artificial Sequence
  Description of Artificial Sequence: Synthetic oligonucleotide
  Target: LAMA2; (+) strand; PAM type: YTN; PAM sequence: TTG
gttaatagttgagatctaaa

SEQ ID NO: 344739 - DNA, 20 bp, Artificial Sequence
  Description of Artificial Sequence: Synthetic oligonucleotide
  Target: LAMA2; (+) strand; PAM type: YTN; PAM sequence: TTA
atagttgagatctaaaagct

SEQ ID NO: 344740 - DNA, 20 bp, Artificial Sequence
  Description of Artificial Sequence: Synthetic oligonucleotide
  Target: LAMA2; (+) strand; PAM type: YTN; PAM sequence: TTG
agatctaaaagcttaggcct

SEQ ID NO: 344741 - DNA, 20 bp, Artificial Sequence
  Description of Artificial Sequence: Synthetic oligonucleotide
  Target: LAMA2; (+) strand; PAM type: YTN; PAM sequence: CTA
aaagcttaggcctaaattca

SEQ ID NO: 344742 - DNA, 20 bp, Artificial Sequence
  Description of Artificial Sequence: Synthetic oligonucleotide
  Target: LAMA2; (+) strand; PAM type: YTN; PAM sequence: CTT
aggcctaaattcagatagaa

SEQ ID NO: 344743 - DNA, 20 bp, Artificial Sequence
  Description of Artificial Sequence: Synthetic oligonucleotide
  Target: LAMA2; (+) strand; PAM type: YTN; PAM sequence: TTA
ggcctaaattcagatagaaa

SEQ ID NO: 344744 - DNA, 20 bp, Artificial Sequence
  Description of Artificial Sequence: Synthetic oligonucleotide
  Target: LAMA2; (+) strand; PAM type: YTN; PAM sequence: CTA
aattcagatagaaagcttgg

SEQ ID NO: 344745 - DNA, 20 bp, Artificial Sequence
  Description of Artificial Sequence: Synthetic oligonucleotide
  Target: LAMA2; (+) strand; PAM type: YTN; PAM sequence: TTC
agatagaaagcttggcacat

SEQ ID NO: 344746 - DNA, 20 bp, Artificial Sequence
  Description of Artificial Sequence: Synthetic oligonucleotide
  Target: LAMA2; (+) strand; PAM type: YTN; PAM sequence: CTT
ggcacatctgttgtaagttt

SEQ ID NO: 344747 - DNA, 20 bp, Artificial Sequence
  Description of Artificial Sequence: Synthetic oligonucleotide
  Target: LAMA2; (+) strand; PAM type: YTN; PAM sequence: TTG
gcacatctgttgtaagtttt

SEQ ID NO: 344748 - DNA, 20 bp, Artificial Sequence
  Description of Artificial Sequence: Synthetic oligonucleotide
  Target: LAMA2; (+) strand; PAM type: YTN; PAM sequence: CTG
ttgtaagttttgaaaccagg

SEQ ID NO: 344749 - DNA, 20 bp, Artificial Sequence
  Description of Artificial Sequence: Synthetic oligonucleotide
  Target: LAMA2; (+) strand; PAM type: YTN; PAM sequence: TTG
taagttttgaaaccaggtgc

SEQ ID NO: 344750 - DNA, 20 bp, Artificial Sequence
  Description of Artificial Sequence: Synthetic oligonucleotide
  Target: LAMA2; (+) strand; PAM type: YTN; PAM sequence: TTT
tgaaaccaggtgcacagacc

SEQ ID NO: 344751 - DNA, 20 bp, Artificial Sequence
  Description of Artificial Sequence: Synthetic oligonucleotide
  Target: LAMA2; (+) strand; PAM type: YTN; PAM sequence: TTT
gaaaccaggtgcacagacca

SEQ ID NO: 344752 - DNA, 20 bp, Artificial Sequence
  Description of Artificial Sequence: Synthetic oligonucleotide
  Target: LAMA2; (+) strand; PAM type: YTN; PAM sequence: TTG
aaaccaggtgcacagaccat

SEQ ID NO: 344753 - DNA, 20 bp, Artificial Sequence
  Description of Artificial Sequence: Synthetic oligonucleotide
  Target: LAMA2; (+) strand; PAM type: YTN; PAM sequence: CTT
tgttccagacgatcttctca

SEQ ID NO: 344754 - DNA, 20 bp, Artificial Sequence
  Description of Artificial Sequence: Synthetic oligonucleotide
  Target: LAMA2; (+) strand; PAM type: YTN; PAM sequence: TTT
gttccagacgatcttctcag

SEQ ID NO: 344755 - DNA, 20 bp, Artificial Sequence
  Description of Artificial Sequence: Synthetic oligonucleotide
  Target: LAMA2; (+) strand; PAM type: YTN; PAM sequence: TTG
ttccagacgatcttctcagg

SEQ ID NO: 344756 - DNA, 20 bp, Artificial Sequence
  Description of Artificial Sequence: Synthetic oligonucleotide
  Target: LAMA2; (+) strand; PAM type: YTN; PAM sequence: TTC
cagacgatcttctcagggat

SEQ ID NO: 344757 - DNA, 20 bp, Artificial Sequence
  Description of Artificial Sequence: Synthetic oligonucleotide
  Target: LAMA2; (+) strand; PAM type: YTN; PAM sequence: CTT
ctcagggatgtttgtaaagt

SEQ ID NO: 344758 - DNA, 20 bp, Artificial Sequence
  Description of Artificial Sequence: Synthetic oligonucleotide
  Target: LAMA2; (+) strand; PAM type: YTN; PAM sequence: TTC
tcagggatgtttgtaaagtg

SEQ ID NO: 344759 - DNA, 20 bp, Artificial Sequence
  Description of Artificial Sequence: Synthetic oligonucleotide
  Target: LAMA2; (+) strand; PAM type: YTN; PAM sequence: CTC
agggatgtttgtaaagtgaa

SEQ ID NO: 344760 - DNA, 20 bp, Artificial Sequence
  Description of Artificial Sequence: Synthetic oligonucleotide
  Target: LAMA2; (+) strand; PAM type: YTN; PAM sequence: TTT
gtaaagtgaacagccttgga

SEQ ID NO: 344761 - DNA, 20 bp, Artificial Sequence
  Description of Artificial Sequence: Synthetic oligonucleotide
  Target: LAMA2; (+) strand; PAM type: YTN; PAM sequence: TTG
taaagtgaacagccttggaa

SEQ ID NO: 344762 - DNA, 20 bp, Artificial Sequence
  Description of Artificial Sequence: Synthetic oligonucleotide
  Target: LAMA2; (+) strand; PAM type: YTN; PAM sequence: CTT
ggaaggtagagatgatgtcc

SEQ ID NO: 344763 - DNA, 20 bp, Artificial Sequence
  Description of Artificial Sequence: Synthetic oligonucleotide
  Target: LAMA2; (+) strand; PAM type: YTN; PAM sequence: TTG
gaaggtagagatgatgtccc

SEQ ID NO: 344764 - DNA, 20 bp, Artificial Sequence
  Description of Artificial Sequence: Synthetic oligonucleotide
  Target: LAMA2; (+) strand; PAM type: YTN; PAM sequence: CTG
ggaagcaaagggtaggttta

SEQ ID NO: 344765 - DNA, 20 bp, Artificial Sequence
  Description of Artificial Sequence: Synthetic oligonucleotide
  Target: LAMA2; (+) strand; PAM type: YTN; PAM sequence: TTT
actcatagcttgggaagaga

SEQ ID NO: 344766 - DNA, 20 bp, Artificial Sequence
  Description of Artificial Sequence: Synthetic oligonucleotide
  Target: LAMA2; (+) strand; PAM type: YTN; PAM sequence: TTA
ctcatagcttgggaagagag

SEQ ID NO: 344767 - DNA, 20 bp, Artificial Sequence
  Description of Artificial Sequence: Synthetic oligonucleotide
  Target: LAMA2; (+) strand; PAM type: YTN; PAM sequence: CTC
atagcttgggaagagagaga

SEQ ID NO: 344768 - DNA, 20 bp, Artificial Sequence
  Description of Artificial Sequence: Synthetic oligonucleotide
  Target: LAMA2; (+) strand; PAM type: YTN; PAM sequence: CTT
gggaagagagagatggtgtc

SEQ ID NO: 344769 - DNA, 20 bp, Artificial Sequence
  Description of Artificial Sequence: Synthetic oligonucleotide
  Target: LAMA2; (+) strand; PAM type: YTN; PAM sequence: TTG
ggaagagagagatggtgtct

SEQ ID NO: 344770 - DNA, 20 bp, Artificial Sequence
  Description of Artificial Sequence: Synthetic oligonucleotide
  Target: LAMA2; (+) strand; PAM type: YTN; PAM sequence: CTC
cctccagatgaggggaatat

SEQ ID NO: 344771 - DNA, 20 bp, Artificial Sequence
  Description of Artificial Sequence: Synthetic oligonucleotide
  Target: LAMA2; (+) strand; PAM type: YTN; PAM sequence: CTC
cagatgaggggaatatattt

SEQ ID NO: 344772 - DNA, 20 bp, Artificial Sequence
  Description of Artificial Sequence: Synthetic oligonucleotide
  Target: LAMA2; (+) strand; PAM type: YTN; PAM sequence: TTT
accacccataagaaaagatt

SEQ ID NO: 344773 - DNA, 20 bp, Artificial Sequence
  Description of Artificial Sequence: Synthetic oligonucleotide
  Target: LAMA2; (+) strand; PAM type: YTN; PAM sequence: TTA
ccacccataagaaaagattt

SEQ ID NO: 344774 - DNA, 20 bp, Artificial Sequence
  Description of Artificial Sequence: Synthetic oligonucleotide
  Target: LAMA2; (+) strand; PAM type: YTN; PAM sequence: TTT
gaacccattaagctgagggt

SEQ ID NO: 344775 - DNA, 20 bp, Artificial Sequence
  Description of Artificial Sequence: Synthetic oligonucleotide
  Target: LAMA2; (+) strand; PAM type: YTN; PAM sequence: TTG
aacccattaagctgagggtt

SEQ ID NO: 344776 - DNA, 20 bp, Artificial Sequence
  Description of Artificial Sequence: Synthetic oligonucleotide
  Target: LAMA2; (+) strand; PAM type: YTN; PAM sequence: TTA
agctgagggttcctcttctg

SEQ ID NO: 344777 - DNA, 20 bp, Artificial Sequence
  Description of Artificial Sequence: Synthetic oligonucleotide
  Target: LAMA2; (+) strand; PAM type: YTN; PAM sequence: CTG
agggttcctcttctgtaaca

SEQ ID NO: 344778 - DNA, 20 bp, Artificial Sequence
  Description of Artificial Sequence: Synthetic oligonucleotide
  Target: LAMA2; (+) strand; PAM type: YTN; PAM sequence: TTC
ctcttctgtaacaccaccca

SEQ ID NO: 344779 - DNA, 20 bp, Artificial Sequence
  Description of Artificial Sequence: Synthetic oligonucleotide
  Target: LAMA2; (+) strand; PAM type: YTN; PAM sequence: CTC
ttctgtaacaccacccactg

SEQ ID NO: 344780 - DNA, 20 bp, Artificial Sequence
  Description of Artificial Sequence: Synthetic oligonucleotide
  Target: LAMA2; (+) strand; PAM type: YTN; PAM sequence: CTT
ctgtaacaccacccactgtg

SEQ ID NO: 344781 - DNA, 20 bp, Artificial Sequence
  Description of Artificial Sequence: Synthetic oligonucleotide
  Target: LAMA2; (+) strand; PAM type: YTN; PAM sequence: TTC
tgtaacaccacccactgtga

SEQ ID NO: 344782 - DNA, 20 bp, Artificial Sequence
  Description of Artificial Sequence: Synthetic oligonucleotide
  Target: LAMA2; (+) strand; PAM type: YTN; PAM sequence: CTG
taacaccacccactgtgagt

SEQ ID NO: 344783 - DNA, 20 bp, Artificial Sequence
  Description of Artificial Sequence: Synthetic oligonucleotide
  Target: LAMA2; (+) strand; PAM type: YTN; PAM sequence: CTG
tgagtggaggcatcagctgg

SEQ ID NO: 344784 - DNA, 20 bp, Artificial Sequence
  Description of Artificial Sequence: Synthetic oligonucleotide
  Target: LAMA2; (+) strand; PAM type: YTN; PAM sequence: CTG
gcctgctttctatctctctg

SEQ ID NO: 344785 - DNA, 20 bp, Artificial Sequence
  Description of Artificial Sequence: Synthetic oligonucleotide
  Target: LAMA2; (+) strand; PAM type: YTN; PAM sequence: CTG
ctttctatctctctgcagga

SEQ ID NO: 344786 - DNA, 20 bp, Artificial Sequence
  Description of Artificial Sequence: Synthetic oligonucleotide
  Target: LAMA2; (+) strand; PAM type: YTN; PAM sequence: CTT
tctatctctctgcaggaagt

SEQ ID NO: 344787 - DNA, 20 bp, Artificial Sequence
  Description of Artificial Sequence: Synthetic oligonucleotide
  Target: LAMA2; (+) strand; PAM type: YTN; PAM sequence: TTT
ctatctctctgcaggaagta

SEQ ID NO: 344788 - DNA, 20 bp, Artificial Sequence
  Description of Artificial Sequence: Synthetic oligonucleotide
  Target: LAMA2; (+) strand; PAM type: YTN; PAM sequence: TTC
tatctctctgcaggaagtag

SEQ ID NO: 344789 - DNA, 20 bp, Artificial Sequence
  Description of Artificial Sequence: Synthetic oligonucleotide
  Target: LAMA2; (+) strand; PAM type: YTN; PAM sequence: CTA
tctctctgcaggaagtagag

SEQ ID NO: 344790 - DNA, 20 bp, Artificial Sequence
  Description of Artificial Sequence: Synthetic oligonucleotide
  Target: LAMA2; (+) strand; PAM type: YTN; PAM sequence: CTC
tctgcaggaagtagagccca

SEQ ID NO: 344791 - DNA, 20 bp, Artificial Sequence
  Description of Artificial Sequence: Synthetic oligonucleotide
  Target: LAMA2; (+) strand; PAM type: YTN; PAM sequence: CTC
tgcaggaagtagagcccagg

SEQ ID NO: 344792 - DNA, 20 bp, Artificial Sequence
  Description of Artificial Sequence: Synthetic oligonucleotide
  Target: LAMA2; (+) strand; PAM type: YTN; PAM sequence: CTG
caggaagtagagcccaggca

SEQ ID NO: 344793 - DNA, 20 bp, Artificial Sequence
  Description of Artificial Sequence: Synthetic oligonucleotide
  Target: LAMA2; (+) strand; PAM type: YTN; PAM sequence: CTG
gcaccaaatatgccaaagct

SEQ ID NO: 344794 - DNA, 20 bp, Artificial Sequence
  Description of Artificial Sequence: Synthetic oligonucleotide
  Target: LAMA2; (+) strand; PAM type: YTN; PAM sequence: CTT
atgctgcttcctgggctgtg

SEQ ID NO: 344795 - DNA, 20 bp, Artificial Sequence
  Description of Artificial Sequence: Synthetic oligonucleotide
  Target: LAMA2; (+) strand; PAM type: YTN; PAM sequence: TTA
tgctgcttcctgggctgtga

SEQ ID NO: 344796 - DNA, 20 bp, Artificial Sequence
  Description of Artificial Sequence: Synthetic oligonucleotide
  Target: LAMA2; (+) strand; PAM type: YTN; PAM sequence: CTG
cttcctgggctgtgagtaat

SEQ ID NO: 344797 - DNA, 20 bp, Artificial Sequence
  Description of Artificial Sequence: Synthetic oligonucleotide
  Target: LAMA2; (+) strand; PAM type: YTN; PAM sequence: CTT
cctgggctgtgagtaataaa

SEQ ID NO: 344798 - DNA, 20 bp, Artificial Sequence
  Description of Artificial Sequence: Synthetic oligonucleotide
  Target: LAMA2; (+) strand; PAM type: YTN; PAM sequence: TTC
ctgggctgtgagtaataaag

SEQ ID NO: 344799 - DNA, 20 bp, Artificial Sequence
  Description of Artificial Sequence: Synthetic oligonucleotide
  Target: LAMA2; (+) strand; PAM type: YTN; PAM sequence: CTG
ggctgtgagtaataaagtcc

SEQ ID NO: 344800 - DNA, 20 bp, Artificial Sequence
  Description of Artificial Sequence: Synthetic oligonucleotide
  Target: LAMA2; (+) strand; PAM type: YTN; PAM sequence: CTG
tgagtaataaagtccctttt

SEQ ID NO: 344801 - DNA, 20 bp, Artificial Sequence
  Description of Artificial Sequence: Synthetic oligonucleotide
  Target: LAMA2; (+) strand; PAM type: YTN; PAM sequence: CTT
ttccctcttttagaagtctc

SEQ ID NO: 344802 - DNA, 20 bp, Artificial Sequence
  Description of Artificial Sequence: Synthetic oligonucleotide
  Target: LAMA2; (+) strand; PAM type: YTN; PAM sequence: TTT
tccctcttttagaagtctca

SEQ ID NO: 344803 - DNA, 20 bp, Artificial Sequence
  Description of Artificial Sequence: Synthetic oligonucleotide
  Target: LAMA2; (+) strand; PAM type: YTN; PAM sequence: TTT
ccctcttttagaagtctcat

SEQ ID NO: 344804 - DNA, 20 bp, Artificial Sequence
  Description of Artificial Sequence: Synthetic oligonucleotide
  Target: LAMA2; (+) strand; PAM type: YTN; PAM sequence: TTC
cctcttttagaagtctcata

SEQ ID NO: 344805 - DNA, 20 bp, Artificial Sequence
  Description of Artificial Sequence: Synthetic oligonucleotide
  Target: LAMA2; (+) strand; PAM type: YTN; PAM sequence: CTC
ttttagaagtctcatatgtt

SEQ ID NO: 344806 - DNA, 20 bp, Artificial Sequence
  Description of Artificial Sequence: Synthetic oligonucleotide
  Target: LAMA2; (+) strand; PAM type: YTN; PAM sequence: CTT
ttagaagtctcatatgttct

SEQ ID NO: 344807 - DNA, 20 bp, Artificial Sequence
  Description of Artificial Sequence: Synthetic oligonucleotide
  Target: LAMA2; (+) strand; PAM type: YTN; PAM sequence: TTT
tagaagtctcatatgttctg

SEQ ID NO: 344808 - DNA, 20 bp, Artificial Sequence
  Description of Artificial Sequence: Synthetic oligonucleotide
  Target: LAMA2; (+) strand; PAM type: YTN; PAM sequence: TTT
agaagtctcatatgttctgt

SEQ ID NO: 344809 - DNA, 20 bp, Artificial Sequence
  Description of Artificial Sequence: Synthetic oligonucleotide
  Target: LAMA2; (+) strand; PAM type: YTN; PAM sequence: TTA
gaagtctcatatgttctgtc

SEQ ID NO: 344810 - DNA, 20 bp, Artificial Sequence
  Description of Artificial Sequence: Synthetic oligonucleotide
  Target: LAMA2; (+) strand; PAM type: YTN; PAM sequence: CTC
atatgttctgtcagcagcca

SEQ ID NO: 344811 - DNA, 20 bp, Artificial Sequence
  Description of Artificial Sequence: Synthetic oligonucleotide
  Target: LAMA2; (+) strand; PAM type: YTN; PAM sequence: TTC
tgtcagcagccaccaagctg

SEQ ID NO: 344812 - DNA, 20 bp, Artificial Sequence
  Description of Artificial Sequence: Synthetic oligonucleotide
  Target: LAMA2; (+) strand; PAM type: YTN; PAM sequence: CTG
tcagcagccaccaagctgtg

SEQ ID NO: 344813 - DNA, 20 bp, Artificial Sequence
  Description of Artificial Sequence: Synthetic oligonucleotide
  Target: LAMA2; (+) strand; PAM type: YTN; PAM sequence: CTG
tgtcaggctaaattgctgtc

SEQ ID NO: 344814 - DNA, 20 bp, Artificial Sequence
  Description of Artificial Sequence: Synthetic oligonucleotide
  Target: LAMA2; (+) strand; PAM type: YTN; PAM sequence: CTA
aattgctgtcttgcaagtag

SEQ ID NO: 344815 - DNA, 20 bp, Artificial Sequence
  Description of Artificial Sequence: Synthetic oligonucleotide
  Target: LAMA2; (+) strand; PAM type: YTN; PAM sequence: TTG
ctgtcttgcaagtagaataa

SEQ ID NO: 344816 - DNA, 20 bp, Artificial Sequence
  Description of Artificial Sequence: Synthetic oligonucleotide
  Target: LAMA2; (+) strand; PAM type: YTN; PAM sequence: CTG
tcttgcaagtagaataaaat

SEQ ID NO: 344817 - DNA, 20 bp, Artificial Sequence
  Description of Artificial Sequence: Synthetic oligonucleotide
  Target: LAMA2; (+) strand; PAM type: YTN; PAM sequence: CTT
gcaagtagaataaaatccca

SEQ ID NO: 344818 - DNA, 20 bp, Artificial Sequence
  Description of Artificial Sequence: Synthetic oligonucleotide
  Target: LAMA2; (+) strand; PAM type: YTN; PAM sequence: TTG
caagtagaataaaatcccag

SEQ ID NO: 344819 - DNA, 20 bp, Artificial Sequence
  Description of Artificial Sequence: Synthetic oligonucleotide
  Target: LAMA2; (+) strand; PAM type: YTN; PAM sequence: CTT
tgcaatctttttcataaaaa

SEQ ID NO: 344820 - DNA, 20 bp, Artificial Sequence
  Description of Artificial Sequence: Synthetic oligonucleotide
  Target: LAMA2; (+) strand; PAM type: YTN; PAM sequence: TTT
gcaatctttttcataaaaaa

SEQ ID NO: 344821 - DNA, 20 bp, Artificial Sequence
  Description of Artificial Sequence: Synthetic oligonucleotide
  Target: LAMA2; (+) strand; PAM type: YTN; PAM sequence: TTG
caatctttttcataaaaaaa

SEQ ID NO: 344822 - DNA, 20 bp, Artificial Sequence
  Description of Artificial Sequence: Synthetic oligonucleotide
  Target: LAMA2; (+) strand; PAM type: YTN; PAM sequence: CTT
tttcataaaaaaaattttaa

SEQ ID NO: 344823 - DNA, 20 bp, Artificial Sequence
  Description of Artificial Sequence: Synthetic oligonucleotide
  Target: LAMA2; (+) strand; PAM type: YTN; PAM sequence: TTT
ttcataaaaaaaattttaaa

SEQ ID NO: 344824 - DNA, 20 bp, Artificial Sequence
  Description of Artificial Sequence: Synthetic oligonucleotide
  Target: LAMA2; (+) strand; PAM type: YTN; PAM sequence: TTT
tcataaaaaaaattttaaat

SEQ ID NO: 344825 - DNA, 20 bp, Artificial Sequence
  Description of Artificial Sequence: Synthetic oligonucleotide
  Target: LAMA2; (+) strand; PAM type: YTN; PAM sequence: TTT
cataaaaaaaattttaaata

SEQ ID NO: 344826 - DNA, 20 bp, Artificial Sequence
  Description of Artificial Sequence: Synthetic oligonucleotide
  Target: LAMA2; (+) strand; PAM type: YTN; PAM sequence: TTC
ataaaaaaaattttaaatac

SEQ ID NO: 344827 - DNA, 20 bp, Artificial Sequence
  Description of Artificial Sequence: Synthetic oligonucleotide
  Target: LAMA2; (+) strand; PAM type: YTN; PAM sequence: TTT
taaataccatatatttaccg

SEQ ID NO: 344828 - DNA, 20 bp, Artificial Sequence
  Description of Artificial Sequence: Synthetic oligonucleotide
  Target: LAMA2; (+) strand; PAM type: YTN; PAM sequence: TTT
aaataccatatatttaccgc

SEQ ID NO: 344829 - DNA, 20 bp, Artificial Sequence
  Description of Artificial Sequence: Synthetic oligonucleotide
  Target: LAMA2; (+) strand; PAM type: YTN; PAM sequence: TTA
aataccatatatttaccgca

SEQ ID NO: 344830 - DNA, 20 bp, Artificial Sequence
  Description of Artificial Sequence: Synthetic oligonucleotide
  Target: LAMA2; (+) strand; PAM type: YTN; PAM sequence: TTT
accgcatacagttcagaatt

SEQ ID NO: 344831 - DNA, 20 bp, Artificial Sequence
  Description of Artificial Sequence: Synthetic oligonucleotide
  Target: LAMA2; (+) strand; PAM type: YTN; PAM sequence: TTA
ccgcatacagttcagaatta

SEQ ID NO: 344832 - DNA, 20 bp, Artificial Sequence
  Description of Artificial Sequence: Synthetic oligonucleotide
  Target: LAMA2; (+) strand; PAM type: YTN; PAM sequence: TTC
agaattatttattaatagta

SEQ ID NO: 344833 - DNA, 20 bp, Artificial Sequence
  Description of Artificial Sequence: Synthetic oligonucleotide
  Target: LAMA2; (+) strand; PAM type: YTN; PAM sequence: TTA
tttattaatagtatattcac

SEQ ID NO: 344834 - DNA, 20 bp, Artificial Sequence
  Description of Artificial Sequence: Synthetic oligonucleotide
  Target: LAMA2; (+) strand; PAM type: YTN; PAM sequence: TTT
attaatagtatattcacaga

SEQ ID NO: 344835 - DNA, 20 bp, Artificial Sequence
  Description of Artificial Sequence: Synthetic oligonucleotide
  Target: LAMA2; (+) strand; PAM type: YTN; PAM sequence: TTA
ttaatagtatattcacagag

SEQ ID NO: 344836 - DNA, 20 bp, Artificial Sequence
  Description of Artificial Sequence: Synthetic oligonucleotide
  Target: LAMA2; (+) strand; PAM type: YTN; PAM sequence: TTA
atagtatattcacagagttg

SEQ ID NO: 344837 - DNA, 20 bp, Artificial Sequence
  Description of Artificial Sequence: Synthetic oligonucleotide
  Target: LAMA2; (+) strand; PAM type: YTN; PAM sequence: TTC
acagagttgtgcaaccacca

SEQ ID NO: 344838 - DNA, 20 bp, Artificial Sequence
  Description of Artificial Sequence: Synthetic oligonucleotide
  Target: LAMA2; (+) strand; PAM type: YTN; PAM sequence: TTG
tgcaaccaccaccacaatcc

SEQ ID NO: 344839 - DNA, 20 bp, Artificial Sequence
  Description of Artificial Sequence: Synthetic oligonucleotide
  Target: LAMA2; (+) strand; PAM type: YTN; PAM sequence: TTT
tagatcatttcaacaactca

SEQ ID NO: 344840 - DNA, 20 bp, Artificial Sequence
  Description of Artificial Sequence: Synthetic oligonucleotide
  Target: LAMA2; (+) strand; PAM type: YTN; PAM sequence: TTT
agatcatttcaacaactcaa

SEQ ID NO: 344841 - DNA, 20 bp, Artificial Sequence
  Description of Artificial Sequence: Synthetic oligonucleotide
  Target: LAMA2; (+) strand; PAM type: YTN; PAM sequence: TTA
gatcatttcaacaactcaaa

SEQ ID NO: 344842 - DNA, 20 bp, Artificial Sequence
  Description of Artificial Sequence: Synthetic oligonucleotide
  Target: LAMA2; (+) strand; PAM type: YTN; PAM sequence: TTT
caacaactcaaaaagaaacc

SEQ ID NO: 344843 - DNA, 20 bp, Artificial Sequence
  Description of Artificial Sequence: Synthetic oligonucleotide
  Target: LAMA2; (+) strand; PAM type: YTN; PAM sequence: TTC
aacaactcaaaaagaaacct

SEQ ID NO: 344844 - DNA, 20 bp, Artificial Sequence
  Description of Artificial Sequence: Synthetic oligonucleotide
  Target: LAMA2; (+) strand; PAM type: YTN; PAM sequence: CTC
aaaaagaaaccttgtacacg

SEQ ID NO: 344845 - DNA, 20 bp, Artificial Sequence
  Description of Artificial Sequence: Synthetic oligonucleotide
  Target: LAMA2; (+) strand; PAM type: YTN; PAM sequence: CTT
gtacacgttaagtgtcattc

SEQ ID NO: 344846 - DNA, 20 bp, Artificial Sequence
  Description of Artificial Sequence: Synthetic oligonucleotide
  Target: LAMA2; (+) strand; PAM type: YTN; PAM sequence: TTG
tacacgttaagtgtcattcc

SEQ ID NO: 344847 - DNA, 20 bp, Artificial Sequence
  Description of Artificial Sequence: Synthetic oligonucleotide
  Target: LAMA2; (+) strand; PAM type: YTN; PAM sequence: TTA
agtgtcattcctgtacccac

SEQ ID NO: 344848 - DNA, 20 bp, Artificial Sequence
  Description of Artificial Sequence: Synthetic oligonucleotide
  Target: LAMA2; (+) strand; PAM type: YTN; PAM sequence: TTC
ctgtacccactccctgaaaa

SEQ ID NO: 344849 - DNA, 20 bp, Artificial Sequence
  Description of Artificial Sequence: Synthetic oligonucleotide
  Target: LAMA2; (+) strand; PAM type: YTN; PAM sequence: CTG
tacccactccctgaaaatct

SEQ ID NO: 344850 - DNA, 20 bp, Artificial Sequence
  Description of Artificial Sequence: Synthetic oligonucleotide
  Target: LAMA2; (+) strand; PAM type: YTN; PAM sequence: CTC
cctgaaaatctgcttgctct

SEQ ID NO: 344851 - DNA, 20 bp, Artificial Sequence
  Description of Artificial Sequence: Synthetic oligonucleotide
  Target: LAMA2; (+) strand; PAM type: YTN; PAM sequence: CTG
aaaatctgcttgctctagct

SEQ ID NO: 344852 - DNA, 20 bp, Artificial Sequence
  Description of Artificial Sequence: Synthetic oligonucleotide
  Target: LAMA2; (+) strand; PAM type: YTN; PAM sequence: CTG
cttgctctagctgtgttgga

SEQ ID NO: 344853 - DNA, 20 bp, Artificial Sequence
  Description of Artificial Sequence: Synthetic oligonucleotide
  Target: LAMA2; (+) strand; PAM type: YTN; PAM sequence: CTT
gctctagctgtgttggattg

SEQ ID NO: 344854 - DNA, 20 bp, Artificial Sequence
  Description of Artificial Sequence: Synthetic oligonucleotide
  Target: LAMA2; (+) strand; PAM type: YTN; PAM sequence: TTG
ctctagctgtgttggattga

SEQ ID NO: 344855 - DNA, 20 bp, Artificial Sequence
  Description of Artificial Sequence: Synthetic oligonucleotide
  Target: LAMA2; (+) strand; PAM type: YTN; PAM sequence: CTC
tagctgtgttggattgatgt

SEQ ID NO: 344856 - DNA, 20 bp, Artificial Sequence
  Description of Artificial Sequence: Synthetic oligonucleotide
  Target: LAMA2; (+) strand; PAM type: YTN; PAM sequence: CTA
gctgtgttggattgatgtca

SEQ ID NO: 344857 - DNA, 20 bp, Artificial Sequence
  Description of Artificial Sequence: Synthetic oligonucleotide
  Target: LAMA2; (+) strand; PAM type: YTN; PAM sequence: CTG
tgttggattgatgtcagaac

SEQ ID NO: 344858 - DNA, 20 bp, Artificial Sequence
  Description of Artificial Sequence: Synthetic oligonucleotide
  Target: LAMA2; (+) strand; PAM type: YTN; PAM sequence: TTG
gattgatgtcagaacacagg

SEQ ID NO: 344859 - DNA, 20 bp, Artificial Sequence
  Description of Artificial Sequence: Synthetic oligonucleotide
  Target: LAMA2; (+) strand; PAM type: YTN; PAM sequence: TTG
atgtcagaacacaggaggga

SEQ ID NO: 344860 - DNA, 20 bp, Artificial Sequence
  Description of Artificial Sequence: Synthetic oligonucleotide
  Target: LAMA2; (+) strand; PAM type: YTN; PAM sequence: CTT
tcacagcaactcgggacaaa

SEQ ID NO: 344861 - DNA, 20 bp, Artificial Sequence
  Description of Artificial Sequence: Synthetic oligonucleotide
  Target: LAMA2; (+) strand; PAM type: YTN; PAM sequence: TTT
cacagcaactcgggacaaat

SEQ ID NO: 344862 - DNA, 20 bp, Artificial Sequence
  Description of Artificial Sequence: Synthetic oligonucleotide
  Target: LAMA2; (+) strand; PAM type: YTN; PAM sequence: TTC
acagcaactcgggacaaatg

SEQ ID NO: 344863 - DNA, 20 bp, Artificial Sequence
  Description of Artificial Sequence: Synthetic oligonucleotide
  Target: LAMA2; (+) strand; PAM type: YTN; PAM sequence: CTC
gggacaaatgatagtggctt

SEQ ID NO: 344864 - DNA, 20 bp, Artificial Sequence
  Description of Artificial Sequence: Synthetic oligonucleotide
  Target: LAMA2; (+) strand; PAM type: YTN; PAM sequence: CTT
ggagcagggtagcagcatga

SEQ ID NO: 344865 - DNA, 20 bp, Artificial Sequence
  Description of Artificial Sequence: Synthetic oligonucleotide
  Target: LAMA2; (+) strand; PAM type: YTN; PAM sequence: TTG
gagcagggtagcagcatgaa

SEQ ID NO: 344866 - DNA, 20 bp, Artificial Sequence
  Description of Artificial Sequence: Synthetic oligonucleotide
  Target: LAMA2; (+) strand; PAM type: YTN; PAM sequence: TTT
tcaaagtggaaccaatagta

SEQ ID NO: 344867 - DNA, 20 bp, Artificial Sequence
  Description of Artificial Sequence: Synthetic oligonucleotide
  Target: LAMA2; (+) strand; PAM type: YTN; PAM sequence: TTT
caaagtggaaccaatagtat

SEQ ID NO: 344868 - DNA, 20 bp, Artificial Sequence
  Description of Artificial Sequence: Synthetic oligonucleotide
  Target: LAMA2; (+) strand; PAM type: YTN; PAM sequence: TTC
aaagtggaaccaatagtatt

SEQ ID NO: 344869 - DNA, 20 bp, Artificial Sequence
  Description of Artificial Sequence: Synthetic oligonucleotide
  Target: LAMA2; (+) strand; PAM type: YTN; PAM sequence: TTT
cctgaccaattggctctgcc

SEQ ID NO: 344870 - DNA, 20 bp, Artificial Sequence
  Description of Artificial Sequence: Synthetic oligonucleotide
  Target: LAMA2; (+) strand; PAM type: YTN; PAM sequence: TTC
ctgaccaattggctctgcca

SEQ ID NO: 344871 - DNA, 20 bp, Artificial Sequence
  Description of Artificial Sequence: Synthetic oligonucleotide
  Target: LAMA2; (+) strand; PAM type: YTN; PAM sequence: CTG
accaattggctctgccaaga

SEQ ID NO: 344872 - DNA, 20 bp, Artificial Sequence
  Description of Artificial Sequence: Synthetic oligonucleotide
  Target: LAMA2; (+) strand; PAM type: YTN; PAM sequence: TTG
gctctgccaagaggatgtgc

SEQ ID NO: 344873 - DNA, 20 bp, Artificial Sequence
  Description of Artificial Sequence: Synthetic oligonucleotide
  Target: LAMA2; (+) strand; PAM type: YTN; PAM sequence: CTC
tgccaagaggatgtgctgat

SEQ ID NO: 344874 - DNA, 20 bp, Artificial Sequence
  Description of Artificial Sequence: Synthetic oligonucleotide
  Target: LAMA2; (+) strand; PAM type: YTN; PAM sequence: CTG
ccaagaggatgtgctgatca

SEQ ID NO: 344875 - DNA, 20 bp, Artificial Sequence
  Description of Artificial Sequence: Synthetic oligonucleotide
  Target: LAMA2; (+) strand; PAM type: YTN; PAM sequence: CTG
atcaattttccgtgaggtgt

SEQ ID NO: 344876 - DNA, 20 bp, Artificial Sequence
  Description of Artificial Sequence: Synthetic oligonucleotide
  Target: LAMA2; (+) strand; PAM type: YTN; PAM sequence: TTT
tccgtgaggtgtgagaatga

SEQ ID NO: 344877 - DNA, 20 bp, Artificial Sequence
  Description of Artificial Sequence: Synthetic oligonucleotide
  Target: LAMA2; (+) strand; PAM type: YTN; PAM sequence: TTT
ccgtgaggtgtgagaatgag

SEQ ID NO: 344878 - DNA, 20 bp, Artificial Sequence
  Description of Artificial Sequence: Synthetic oligonucleotide
  Target: LAMA2; (+) strand; PAM type: YTN; PAM sequence: TTC
cgtgaggtgtgagaatgaga

SEQ ID NO: 344879 - DNA, 20 bp, Artificial Sequence
  Description of Artificial Sequence: Synthetic oligonucleotide
  Target: LAMA2; (+) strand; PAM type: YTN; PAM sequence: CTG
agggatgagtccatggtttt

SEQ ID NO: 344880 - DNA, 20 bp, Artificial Sequence
  Description of Artificial Sequence: Synthetic oligonucleotide
  Target: LAMA2; (+) strand; PAM type: YTN; PAM sequence: TTT
tggcatgagcaaagggaagg

SEQ ID NO: 344881 - DNA, 20 bp, Artificial Sequence
  Description of Artificial Sequence: Synthetic oligonucleotide
  Target: LAMA2; (+) strand; PAM type: YTN; PAM sequence: TTT
ggcatgagcaaagggaagga

SEQ ID NO: 344882 - DNA, 20 bp, Artificial Sequence
  Description of Artificial Sequence: Synthetic oligonucleotide
  Target: LAMA2; (+) strand; PAM type: YTN; PAM sequence: TTG
gcatgagcaaagggaaggat

SEQ ID NO: 344883 - DNA, 20 bp, Artificial Sequence
  Description of Artificial Sequence: Synthetic oligonucleotide
  Target: LAMA2; (+) strand; PAM type: YTN; PAM sequence: TTG
agttgctttgaaatgagttg

SEQ ID NO: 344884 - DNA, 20 bp, Artificial Sequence
  Description of Artificial Sequence: Synthetic oligonucleotide
  Target: LAMA2; (+) strand; PAM type: YTN; PAM sequence: TTG
ctttgaaatgagttggggaa

SEQ ID NO: 344885 - DNA, 20 bp, Artificial Sequence
  Description of Artificial Sequence: Synthetic oligonucleotide
  Target: LAMA2; (+) strand; PAM type: YTN; PAM sequence: CTT
tgaaatgagttggggaagac

SEQ ID NO: 344886 - DNA, 20 bp, Artificial Sequence
  Description of Artificial Sequence: Synthetic oligonucleotide
  Target: LAMA2; (+) strand; PAM type: YTN; PAM sequence: TTT
gaaatgagttggggaagact

SEQ ID NO: 344887 - DNA, 20 bp, Artificial Sequence
  Description of Artificial Sequence: Synthetic oligonucleotide
  Target: LAMA2; (+) strand; PAM type: YTN; PAM sequence: TTG
aaatgagttggggaagactg

SEQ ID NO: 344888 - DNA, 20 bp, Artificial Sequence
  Description of Artificial Sequence: Synthetic oligonucleotide
  Target: LAMA2; (+) strand; PAM type: YTN; PAM sequence: TTG
gggaagactgtgggcatagc

SEQ ID NO: 344889 - DNA, 20 bp, Artificial Sequence
  Description of Artificial Sequence: Synthetic oligonucleotide
  Target: LAMA2; (+) strand; PAM type: YTN; PAM sequence: CTG
tgggcatagcaggttttgac

SEQ ID NO: 344890 - DNA, 20 bp, Artificial Sequence
  Description of Artificial Sequence: Synthetic oligonucleotide
  Target: LAMA2; (+) strand; PAM type: YTN; PAM sequence: TTT
tgacagagaagaataggagt

SEQ ID NO: 344891 - DNA, 20 bp, Artificial Sequence
  Description of Artificial Sequence: Synthetic oligonucleotide
  Target: LAMA2; (+) strand; PAM type: YTN; PAM sequence: TTT
gacagagaagaataggagtt

SEQ ID NO: 344892 - DNA, 20 bp, Artificial Sequence
  Description of Artificial Sequence: Synthetic oligonucleotide
  Target: LAMA2; (+) strand; PAM type: YTN; PAM sequence: TTG
acagagaagaataggagttc

SEQ ID NO: 344893 - DNA, 20 bp, Artificial Sequence
  Description of Artificial Sequence: Synthetic oligonucleotide
  Target: LAMA2; (+) strand; PAM type: YTN; PAM sequence: TTC
agcattgcatatgttaactg

SEQ ID NO: 344894 - DNA, 20 bp, Artificial Sequence
  Description of Artificial Sequence: Synthetic oligonucleotide
  Target: LAMA2; (+) strand; PAM type: YTN; PAM sequence: TTG
catatgttaactgaaaatgt

SEQ ID NO: 344895 - DNA, 20 bp, Artificial Sequence
  Description of Artificial Sequence: Synthetic oligonucleotide
  Target: LAMA2; (+) strand; PAM type: YTN; PAM sequence: TTA
actgaaaatgtctattagac

SEQ ID NO: 344896 - DNA, 20 bp, Artificial Sequence
  Description of Artificial Sequence: Synthetic oligonucleotide
  Target: LAMA2; (+) strand; PAM type: YTN; PAM sequence: CTG
aaaatgtctattagacattt

SEQ ID NO: 344897 - DNA, 20 bp, Artificial Sequence
  Description of Artificial Sequence: Synthetic oligonucleotide
  Target: LAMA2; (+) strand; PAM type: YTN; PAM sequence: CTA
ttagacattttggtgaagct

SEQ ID NO: 344898 - DNA, 20 bp, Artificial Sequence
  Description of Artificial Sequence: Synthetic oligonucleotide
  Target: LAMA2; (+) strand; PAM type: YTN; PAM sequence: TTA
gacattttggtgaagctgaa

SEQ ID NO: 344899 - DNA, 20 bp, Artificial Sequence
  Description of Artificial Sequence: Synthetic oligonucleotide
  Target: LAMA2; (+) strand; PAM type: YTN; PAM sequence: TTT
tggtgaagctgaatagatag

SEQ ID NO: 344900 - DNA, 20 bp, Artificial Sequence
  Description of Artificial Sequence: Synthetic oligonucleotide
  Target: LAMA2; (+) strand; PAM type: YTN; PAM sequence: TTT
ggtgaagctgaatagatagt

SEQ ID NO: 344901 - DNA, 20 bp, Artificial Sequence
  Description of Artificial Sequence: Synthetic oligonucleotide
  Target: LAMA2; (+) strand; PAM type: YTN; PAM sequence: TTG
gtgaagctgaatagatagtg

SEQ ID NO: 344902 - DNA, 20 bp, Artificial Sequence
  Description of Artificial Sequence: Synthetic oligonucleotide
  Target: LAMA2; (+) strand; PAM type: YTN; PAM sequence: CTG
aatagatagtgtatagtatt

SEQ ID NO: 344903 - DNA, 20 bp, Artificial Sequence
  Description of Artificial Sequence: Synthetic oligonucleotide
  Target: LAMA2; (+) strand; PAM type: YTN; PAM sequence: TTC
tggaattcagatgagaaatg

SEQ ID NO: 344904 - DNA, 20 bp, Artificial Sequence
  Description of Artificial Sequence: Synthetic oligonucleotide
  Target: LAMA2; (+) strand; PAM type: YTN; PAM sequence: CTG
gaattcagatgagaaatgct

SEQ ID NO: 344905 - DNA, 20 bp, Artificial Sequence
  Description of Artificial Sequence: Synthetic oligonucleotide
  Target: LAMA2; (+) strand; PAM type: YTN; PAM sequence: TTC
agatgagaaatgctgcttaa

SEQ ID NO: 344906 - DNA, 20 bp, Artificial Sequence
  Description of Artificial Sequence: Synthetic oligonucleotide
  Target: LAMA2; (+) strand; PAM type: YTN; PAM sequence: CTG
cttaaagatacgaattagag

SEQ ID NO: 344907 - DNA, 20 bp, Artificial Sequence
  Description of Artificial Sequence: Synthetic oligonucleotide
  Target: LAMA2; (+) strand; PAM type: YTN; PAM sequence: CTT
aaagatacgaattagagaat

SEQ ID NO: 344908 - DNA, 20 bp, Artificial Sequence
  Description of Artificial Sequence: Synthetic oligonucleotide
  Target: LAMA2; (+) strand; PAM type: YTN; PAM sequence: TTA
aagatacgaattagagaatt

SEQ ID NO: 344909 - DNA, 20 bp, Artificial Sequence
  Description of Artificial Sequence: Synthetic oligonucleotide
  Target: LAMA2; (+) strand; PAM type: YTN; PAM sequence: TTA
gagaatttaaaatcatgaga

SEQ ID NO: 344910 - DNA, 20 bp, Artificial Sequence
  Description of Artificial Sequence: Synthetic oligonucleotide
  Target: LAMA2; (+) strand; PAM type: YTN; PAM sequence: TTT
aaaatcatgagactgcataa

SEQ ID NO: 344911 - DNA, 20 bp, Artificial Sequence
  Description of Artificial Sequence: Synthetic oligonucleotide
  Target: LAMA2; (+) strand; PAM type: YTN; PAM sequence: TTA
aaatcatgagactgcataat

SEQ ID NO: 344912 - DNA, 20 bp, Artificial Sequence
  Description of Artificial Sequence: Synthetic oligonucleotide
  Target: LAMA2; (+) strand; PAM type: YTN; PAM sequence: CTG
cataatatcacccaggaagt

SEQ ID NO: 344913 - DNA, 20 bp, Artificial Sequence
  Description of Artificial Sequence: Synthetic oligonucleotide
  Target: LAMA2; (+) strand; PAM type: YTN; PAM sequence: CTA
gaaaagtaacagtctgagaa

SEQ ID NO: 344914 - DNA, 20 bp, Artificial Sequence
  Description of Artificial Sequence: Synthetic oligonucleotide
  Target: LAMA2; (+) strand; PAM type: YTN; PAM sequence: CTG
agaactgagctctaaggaac

SEQ ID NO: 344915 - DNA, 20 bp, Artificial Sequence
  Description of Artificial Sequence: Synthetic oligonucleotide
  Target: LAMA2; (+) strand; PAM type: YTN; PAM sequence: CTG
agctctaaggaacatctacc

SEQ ID NO: 344916 - DNA, 20 bp, Artificial Sequence
  Description of Artificial Sequence: Synthetic oligonucleotide
  Target: LAMA2; (+) strand; PAM type: YTN; PAM sequence: CTC
taaggaacatctacctttag

SEQ ID NO: 344917 - DNA, 20 bp, Artificial Sequence
  Description of Artificial Sequence: Synthetic oligonucleotide
  Target: LAMA2; (+) strand; PAM type: YTN; PAM sequence: CTA
aggaacatctacctttagag

SEQ ID NO: 344918 - DNA, 20 bp, Artificial Sequence
  Description of Artificial Sequence: Synthetic oligonucleotide
  Target: LAMA2; (+) strand; PAM type: YTN; PAM sequence: CTA
cctttagaggtcagagagat

SEQ ID NO: 344919 - DNA, 20 bp, Artificial Sequence
  Description of Artificial Sequence: Synthetic oligonucleotide
  Target: LAMA2; (+) strand; PAM type: YTN; PAM sequence: CTT
tagaggtcagagagatgaag

SEQ ID NO: 344920 - DNA, 20 bp, Artificial Sequence
  Description of Artificial Sequence: Synthetic oligonucleotide
  Target: LAMA2; (+) strand; PAM type: YTN; PAM sequence: TTT
agaggtcagagagatgaagt

SEQ ID NO: 344921 - DNA, 20 bp, Artificial Sequence
  Description of Artificial Sequence: Synthetic oligonucleotide
  Target: LAMA2; (+) strand; PAM type: YTN; PAM sequence: TTA
gaggtcagagagatgaagta

SEQ ID NO: 344922 - DNA, 20 bp, Artificial Sequence
  Description of Artificial Sequence: Synthetic oligonucleotide
  Target: LAMA2; (+) strand; PAM type: YTN; PAM sequence: CTT
gtaaaaccaaggagcaagca

SEQ ID NO: 344923 - DNA, 20 bp, Artificial Sequence
  Description of Artificial Sequence: Synthetic oligonucleotide
  Target: LAMA2; (+) strand; PAM type: YTN; PAM sequence: TTG
taaaaccaaggagcaagcac

SEQ ID NO: 344924 - DNA, 20 bp, Artificial Sequence
  Description of Artificial Sequence: Synthetic oligonucleotide
  Target: LAMA2; (+) strand; PAM type: YTN; PAM sequence: TTT
tggacacagagatttcccat

SEQ ID NO: 344925 - DNA, 20 bp, Artificial Sequence
  Description of Artificial Sequence: Synthetic oligonucleotide
  Target: LAMA2; (+) strand; PAM type: YTN; PAM sequence: TTT
ggacacagagatttcccata

SEQ ID NO: 344926 - DNA, 20 bp, Artificial Sequence
  Description of Artificial Sequence: Synthetic oligonucleotide
  Target: LAMA2; (+) strand; PAM type: YTN; PAM sequence: TTG
gacacagagatttcccataa

SEQ ID NO: 344927 - DNA, 20 bp, Artificial Sequence
  Description of Artificial Sequence: Synthetic oligonucleotide
  Target: LAMA2; (+) strand; PAM type: YTN; PAM sequence: TTT
cccataagagcattgcaaac

SEQ ID NO: 344928 - DNA, 20 bp, Artificial Sequence
  Description of Artificial Sequence: Synthetic oligonucleotide
  Target: LAMA2; (+) strand; PAM type: YTN; PAM sequence: TTC
ccataagagcattgcaaacg

SEQ ID NO: 344929 - DNA, 20 bp, Artificial Sequence
  Description of Artificial Sequence: Synthetic oligonucleotide
  Target: LAMA2; (+) strand; PAM type: YTN; PAM sequence: TTG
caaacgttacatattctctt

SEQ ID NO: 344930 - DNA, 20 bp, Artificial Sequence
  Description of Artificial Sequence: Synthetic oligonucleotide
  Target: LAMA2; (+) strand; PAM type: YTN; PAM sequence: TTA
catattctctttgttggatg

SEQ ID NO: 344931 - DNA, 20 bp, Artificial Sequence
  Description of Artificial Sequence: Synthetic oligonucleotide
  Target: LAMA2; (+) strand; PAM type: YTN; PAM sequence: TTC
tctttgttggatgtgaaaat

SEQ ID NO: 344932 - DNA, 20 bp, Artificial Sequence
  Description of Artificial Sequence: Synthetic oligonucleotide
  Target: LAMA2; (+) strand; PAM type: YTN; PAM sequence: CTC
tttgttggatgtgaaaataa

SEQ ID NO: 344933 - DNA, 20 bp, Artificial Sequence
  Description of Artificial Sequence: Synthetic oligonucleotide
  Target: LAMA2; (+) strand; PAM type: YTN; PAM sequence: CTT
tgttggatgtgaaaataatc

SEQ ID NO: 344934 - DNA, 20 bp, Artificial Sequence
  Description of Artificial Sequence: Synthetic oligonucleotide
  Target: LAMA2; (+) strand; PAM type: YTN; PAM sequence: TTT
gttggatgtgaaaataatct

SEQ ID NO: 344935 - DNA, 20 bp, Artificial Sequence
  Description of Artificial Sequence: Synthetic oligonucleotide
  Target: LAMA2; (+) strand; PAM type: YTN; PAM sequence: TTG
ttggatgtgaaaataatctt

SEQ ID NO: 344936 - DNA, 20 bp, Artificial Sequence
  Description of Artificial Sequence: Synthetic oligonucleotide
  Target: LAMA2; (+) strand; PAM type: YTN; PAM sequence: TTG
gatgtgaaaataatcttttg

SEQ ID NO: 344937 - DNA, 20 bp, Artificial Sequence
  Description of Artificial Sequence: Synthetic oligonucleotide
  Target: LAMA2; (+) strand; PAM type: YTN; PAM sequence: CTT
ttgggaaatgtgtgcttaga

SEQ ID NO: 344938 - DNA, 20 bp, Artificial Sequence
  Description of Artificial Sequence: Synthetic oligonucleotide
  Target: LAMA2; (+) strand; PAM type: YTN; PAM sequence: TTT
tgggaaatgtgtgcttagac

SEQ ID NO: 344939 - DNA, 20 bp, Artificial Sequence
  Description of Artificial Sequence: Synthetic oligonucleotide
  Target: LAMA2; (+) strand; PAM type: YTN; PAM sequence: TTT
gggaaatgtgtgcttagacc

SEQ ID NO: 344940 - DNA, 20 bp, Artificial Sequence
  Description of Artificial Sequence: Synthetic oligonucleotide
  Target: LAMA2; (+) strand; PAM type: YTN; PAM sequence: TTG
ggaaatgtgtgcttagacct

SEQ ID NO: 344941 - DNA, 20 bp, Artificial Sequence
  Description of Artificial Sequence: Synthetic oligonucleotide
  Target: LAMA2; (+) strand; PAM type: YTN; PAM sequence: CTT
agaccttgatgtgatgcata

SEQ ID NO: 344942 - DNA, 20 bp, Artificial Sequence
  Description of Artificial Sequence: Synthetic oligonucleotide
  Target: LAMA2; (+) strand; PAM type: YTN; PAM sequence: TTA
gaccttgatgtgatgcatag

SEQ ID NO: 344943 - DNA, 20 bp, Artificial Sequence
  Description of Artificial Sequence: Synthetic oligonucleotide
  Target: LAMA2; (+) strand; PAM type: YTN; PAM sequence: CTT
gatgtgatgcatagggacaa

SEQ ID NO: 344944 - DNA, 20 bp, Artificial Sequence
  Description of Artificial Sequence: Synthetic oligonucleotide
  Target: LAMA2; (+) strand; PAM type: YTN; PAM sequence: TTG
atgtgatgcatagggacaaa

SEQ ID NO: 344945 - DNA, 20 bp, Artificial Sequence
  Description of Artificial Sequence: Synthetic oligonucleotide
  Target: LAMA2; (+) strand; PAM type: YTN; PAM sequence: TTT
ctaattctatttgcttccta

SEQ ID NO: 344946 - DNA, 20 bp, Artificial Sequence
  Description of Artificial Sequence: Synthetic oligonucleotide
  Target: LAMA2; (+) strand; PAM type: YTN; PAM sequence: TTC
taattctatttgcttcctaa

SEQ ID NO: 344947 - DNA, 20 bp, Artificial Sequence
  Description of Artificial Sequence: Synthetic oligonucleotide
  Target: LAMA2; (+) strand; PAM type: YTN; PAM sequence: CTA
attctatttgcttcctaaga

SEQ ID NO: 344948 - DNA, 20 bp, Artificial Sequence
  Description of Artificial Sequence: Synthetic oligonucleotide
  Target: LAMA2; (+) strand; PAM type: YTN; PAM sequence: TTC
tatttgcttcctaagaaaat

SEQ ID NO: 344949 - DNA, 20 bp, Artificial Sequence
  Description of Artificial Sequence: Synthetic oligonucleotide
  Target: LAMA2; (+) strand; PAM type: YTN; PAM sequence: CTA
tttgcttcctaagaaaatga

SEQ ID NO: 344950 - DNA, 20 bp, Artificial Sequence
  Description of Artificial Sequence: Synthetic oligonucleotide
  Target: LAMA2; (+) strand; PAM type: YTN; PAM sequence: TTT
gcttcctaagaaaatgaaat

SEQ ID NO: 344951 - DNA, 20 bp, Artificial Sequence
  Description of Artificial Sequence: Synthetic oligonucleotide
  Target: LAMA2; (+) strand; PAM type: YTN; PAM sequence: TTG
cttcctaagaaaatgaaatg

SEQ ID NO: 344952 - DNA, 20 bp, Artificial Sequence
  Description of Artificial Sequence: Synthetic oligonucleotide
  Target: LAMA2; (+) strand; PAM type: YTN; PAM sequence: CTT
cctaagaaaatgaaatgtta

SEQ ID NO: 344953 - DNA, 20 bp, Artificial Sequence
  Description of Artificial Sequence: Synthetic oligonucleotide
  Target: LAMA2; (+) strand; PAM type: YTN; PAM sequence: TTC
ctaagaaaatgaaatgttac

SEQ ID NO: 344954 - DNA, 20 bp, Artificial Sequence
  Description of Artificial Sequence: Synthetic oligonucleotide
  Target: LAMA2; (+) strand; PAM type: YTN; PAM sequence: CTA
agaaaatgaaatgttactaa

SEQ ID NO: 344955 - DNA, 20 bp, Artificial Sequence
  Description of Artificial Sequence: Synthetic oligonucleotide
  Target: LAMA2; (+) strand; PAM type: YTN; PAM sequence: TTA
ctaaataaacagcgtcaggg

SEQ ID NO: 344956 - DNA, 20 bp, Artificial Sequence
  Description of Artificial Sequence: Synthetic oligonucleotide
  Target: LAMA2; (+) strand; PAM type: YTN; PAM sequence: CTA
aataaacagcgtcagggcaa

SEQ ID NO: 344957 - DNA, 20 bp, Artificial Sequence
  Description of Artificial Sequence: Synthetic oligonucleotide
  Target: LAMA2; (+) strand; PAM type: YTN; PAM sequence: CTT
gcacagcatggtgaataaaa

SEQ ID NO: 344958 - DNA, 20 bp, Artificial Sequence
  Description of Artificial Sequence: Synthetic oligonucleotide
  Target: LAMA2; (+) strand; PAM type: YTN; PAM sequence: TTG
cacagcatggtgaataaaat

SEQ ID NO: 344959 - DNA, 20 bp, Artificial Sequence
  Description of Artificial Sequence: Synthetic oligonucleotide
  Target: LAMA2; (+) strand; PAM type: YTN; PAM sequence: TTA
ataatggtgtattgcagatt

SEQ ID NO: 344960 - DNA, 20 bp, Artificial Sequence
  Description of Artificial Sequence: Synthetic oligonucleotide
  Target: LAMA2; (+) strand; PAM type: YTN; PAM sequence: TTG
cagattttaaaattgctaaa

SEQ ID NO: 344961 - DNA, 20 bp, Artificial Sequence
  Description of Artificial Sequence: Synthetic oligonucleotide
  Target: LAMA2; (+) strand; PAM type: YTN; PAM sequence: TTT
taaaattgctaaaagagtaa

SEQ ID NO: 344962 - DNA, 20 bp, Artificial Sequence
  Description of Artificial Sequence: Synthetic oligonucleotide
  Target: LAMA2; (+) strand; PAM type: YTN; PAM sequence: TTT
aaaattgctaaaagagtaaa

SEQ ID NO: 344963 - DNA, 20 bp, Artificial Sequence
  Description of Artificial Sequence: Synthetic oligonucleotide
  Target: LAMA2; (+) strand; PAM type: YTN; PAM sequence: TTA
aaattgctaaaagagtaaat

SEQ ID NO: 344964 - DNA, 20 bp, Artificial Sequence
  Description of Artificial Sequence: Synthetic oligonucleotide
  Target: LAMA2; (+) strand; PAM type: YTN; PAM sequence: TTG
ctaaaagagtaaatttcaaa

SEQ ID NO: 344965 - DNA, 20 bp, Artificial Sequence
  Description of Artificial Sequence: Synthetic oligonucleotide
  Target: LAMA2; (+) strand; PAM type: YTN; PAM sequence: CTA
aaagagtaaatttcaaatgc

SEQ ID NO: 344966 - DNA, 20 bp, Artificial Sequence
  Description of Artificial Sequence: Synthetic oligonucleotide
  Target: LAMA2; (+) strand; PAM type: YTN; PAM sequence: TTT
caaatgctctcatcataaaa

SEQ ID NO: 344967 - DNA, 20 bp, Artificial Sequence
  Description of Artificial Sequence: Synthetic oligonucleotide
  Target: LAMA2; (+) strand; PAM type: YTN; PAM sequence: TTC
aaatgctctcatcataaaaa

SEQ ID NO: 344968 - DNA, 20 bp, Artificial Sequence
  Description of Artificial Sequence: Synthetic oligonucleotide
  Target: LAMA2; (+) strand; PAM type: YTN; PAM sequence: CTC
tcatcataaaaaatattagt

SEQ ID NO: 344969 - DNA, 20 bp, Artificial Sequence
  Description of Artificial Sequence: Synthetic oligonucleotide
  Target: LAMA2; (+) strand; PAM type: YTN; PAM sequence: CTC
atcataaaaaatattagtat

SEQ ID NO: 344970 - DNA, 20 bp, Artificial Sequence
  Description of Artificial Sequence: Synthetic oligonucleotide
  Target: LAMA2; (+) strand; PAM type: YTN; PAM sequence: TTA
gtatttgagggaatgggtat

SEQ ID NO: 344971 - DNA, 20 bp, Artificial Sequence
  Description of Artificial Sequence: Synthetic oligonucleotide
  Target: LAMA2; (+) strand; PAM type: YTN; PAM sequence: TTT
gagggaatgggtatgttact

SEQ ID NO: 344972 - DNA, 20 bp, Artificial Sequence
  Description of Artificial Sequence: Synthetic oligonucleotide
  Target: LAMA2; (+) strand; PAM type: YTN; PAM sequence: TTG
agggaatgggtatgttacta

SEQ ID NO: 344973 - DNA, 20 bp, Artificial Sequence
  Description of Artificial Sequence: Synthetic oligonucleotide
  Target: LAMA2; (+) strand; PAM type: YTN; PAM sequence: TTA
ctagcttaattgaattattc

SEQ ID NO: 344974 - DNA, 20 bp, Artificial Sequence
  Description of Artificial Sequence: Synthetic oligonucleotide
  Target: LAMA2; (+) strand; PAM type: YTN; PAM sequence: CTA
gcttaattgaattattccac

SEQ ID NO: 344975 - DNA, 20 bp, Artificial Sequence
  Description of Artificial Sequence: Synthetic oligonucleotide
  Target: LAMA2; (+) strand; PAM type: YTN; PAM sequence: CTT
aattgaattattccacattg

SEQ ID NO: 344976 - DNA, 20 bp, Artificial Sequence
  Description of Artificial Sequence: Synthetic oligonucleotide
  Target: LAMA2; (+) strand; PAM type: YTN; PAM sequence: TTA
attgaattattccacattgc

SEQ ID NO: 344977 - DNA, 20 bp, Artificial Sequence
  Description of Artificial Sequence: Synthetic oligonucleotide
  Target: LAMA2; (+) strand; PAM type: YTN; PAM sequence: TTG
aattattccacattgcattc

SEQ ID NO: 344978 - DNA, 20 bp, Artificial Sequence
  Description of Artificial Sequence: Synthetic oligonucleotide
  Target: LAMA2; (+) strand; PAM type: YTN; PAM sequence: TTA
ttccacattgcattcatata

SEQ ID NO: 344979 - DNA, 20 bp, Artificial Sequence
  Description of Artificial Sequence: Synthetic oligonucleotide
  Target: LAMA2; (+) strand; PAM type: YTN; PAM sequence: TTC
cacattgcattcatatatta

SEQ ID NO: 344980 - DNA, 20 bp, Artificial Sequence
  Description of Artificial Sequence: Synthetic oligonucleotide
  Target: LAMA2; (+) strand; PAM type: YTN; PAM sequence: TTG
cattcatatattataacatc

SEQ ID NO: 344981 - DNA, 20 bp, Artificial Sequence
  Description of Artificial Sequence: Synthetic oligonucleotide
  Target: LAMA2; (+) strand; PAM type: YTN; PAM sequence: TTC
atatattataacatcacttt

SEQ ID NO: 344982 - DNA, 20 bp, Artificial Sequence
  Description of Artificial Sequence: Synthetic oligonucleotide
  Target: LAMA2; (+) strand; PAM type: YTN; PAM sequence: TTA
taacatcactttgtacccca

SEQ ID NO: 344983 - DNA, 20 bp, Artificial Sequence
  Description of Artificial Sequence: Synthetic oligonucleotide
  Target: LAMA2; (+) strand; PAM type: YTN; PAM sequence: CTT
tgtaccccataaatttacat

SEQ ID NO: 344984 - DNA, 20 bp, Artificial Sequence
  Description of Artificial Sequence: Synthetic oligonucleotide
  Target: LAMA2; (+) strand; PAM type: YTN; PAM sequence: TTT
gtaccccataaatttacata

SEQ ID NO: 344985 - DNA, 20 bp, Artificial Sequence
  Description of Artificial Sequence: Synthetic oligonucleotide
  Target: LAMA2; (+) strand; PAM type: YTN; PAM sequence: TTG
taccccataaatttacataa

SEQ ID NO: 344986 - DNA, 20 bp, Artificial Sequence
  Description of Artificial Sequence: Synthetic oligonucleotide
  Target: LAMA2; (+) strand; PAM type: YTN; PAM sequence: TTT
acataattagaaattgtcaa

SEQ ID NO: 344987 - DNA, 20 bp, Artificial Sequence
  Description of Artificial Sequence: Synthetic oligonucleotide
  Target: LAMA2; (+) strand; PAM type: YTN; PAM sequence: TTA
cataattagaaattgtcaat

SEQ ID NO: 344988 - DNA, 20 bp, Artificial Sequence
  Description of Artificial Sequence: Synthetic oligonucleotide
  Target: LAMA2; (+) strand; PAM type: YTN; PAM sequence: TTA
gaaattgtcaatttacaata

SEQ ID NO: 344989 - DNA, 20 bp, Artificial Sequence
  Description of Artificial Sequence: Synthetic oligonucleotide
  Target: LAMA2; (+) strand; PAM type: YTN; PAM sequence: TTG
tcaatttacaataaaaaata

SEQ ID NO: 344990 - DNA, 20 bp, Artificial Sequence
  Description of Artificial Sequence: Synthetic oligonucleotide
  Target: LAMA2; (+) strand; PAM type: YTN; PAM sequence: TTT
acaataaaaaataaaaagcc

SEQ ID NO: 344991 - DNA, 20 bp, Artificial Sequence
  Description of Artificial Sequence: Synthetic oligonucleotide
  Target: LAMA2; (+) strand; PAM type: YTN; PAM sequence: TTA
caataaaaaataaaaagcca

SEQ ID NO: 344992 - DNA, 20 bp, Artificial Sequence
  Description of Artificial Sequence: Synthetic oligonucleotide
  Target: LAMA2; (+) strand; PAM type: YTN; PAM sequence: CTT
atacccatatttaaacctac

SEQ ID NO: 344993 - DNA, 20 bp, Artificial Sequence
  Description of Artificial Sequence: Synthetic oligonucleotide
  Target: LAMA2; (+) strand; PAM type: YTN; PAM sequence: TTA
tacccatatttaaacctaca

SEQ ID NO: 344994 - DNA, 20 bp, Artificial Sequence
  Description of Artificial Sequence: Synthetic oligonucleotide
  Target: LAMA2; (+) strand; PAM type: YTN; PAM sequence: TTT
aaacctacaccataaattat

SEQ ID NO: 344995 - DNA, 20 bp, Artificial Sequence
  Description of Artificial Sequence: Synthetic oligonucleotide
  Target: LAMA2; (+) strand; PAM type: YTN; PAM sequence: TTA
aacctacaccataaattata

SEQ ID NO: 344996 - DNA, 20 bp, Artificial Sequence
  Description of Artificial Sequence: Synthetic oligonucleotide
  Target: LAMA2; (+) strand; PAM type: YTN; PAM sequence: CTA
caccataaattatatttaaa

SEQ ID NO: 344997 - DNA, 20 bp, Artificial Sequence
  Description of Artificial Sequence: Synthetic oligonucleotide
  Target: LAMA2; (+) strand; PAM type: YTN; PAM sequence: TTA
tatttaaatttataattctg

SEQ ID NO: 344998 - DNA, 20 bp, Artificial Sequence
  Description of Artificial Sequence: Synthetic oligonucleotide
  Target: LAMA2; (+) strand; PAM type: YTN; PAM sequence: TTT
aaatttataattctgcctgc

SEQ ID NO: 344999 - DNA, 20 bp, Artificial Sequence
  Description of Artificial Sequence: Synthetic oligonucleotide
  Target: LAMA2; (+) strand; PAM type: YTN; PAM sequence: TTA
aatttataattctgcctgct

SEQ ID NO: 345000 - DNA, 20 bp, Artificial Sequence
  Description of Artificial Sequence: Synthetic oligonucleotide
  Target: LAMA2; (+) strand; PAM type: YTN; PAM sequence: TTT
ataattctgcctgctgctgt

SEQ ID NO: 345001 - DNA, 20 bp, Artificial Sequence
  Description of Artificial Sequence: Synthetic oligonucleotide
  Target: LAMA2; (+) strand; PAM type: YTN; PAM sequence: TTA
taattctgcctgctgctgtt

SEQ ID NO: 345002 - DNA, 20 bp, Artificial Sequence
  Description of Artificial Sequence: Synthetic oligonucleotide
  Target: LAMA2; (+) strand; PAM type: YTN; PAM sequence: TTC
tgcctgctgctgttttcagt

SEQ ID NO: 345003 - DNA, 20 bp, Artificial Sequence
  Description of Artificial Sequence: Synthetic oligonucleotide
  Target: LAMA2; (+) strand; PAM type: YTN; PAM sequence: CTG
cctgctgctgttttcagtaa

SEQ ID NO: 345004 - DNA, 20 bp, Artificial Sequence
  Description of Artificial Sequence: Synthetic oligonucleotide
  Target: LAMA2; (+) strand; PAM type: YTN; PAM sequence: CTG
ctgctgttttcagtaattaa

SEQ ID NO: 345005 - DNA, 20 bp, Artificial Sequence
  Description of Artificial Sequence: Synthetic oligonucleotide
  Target: LAMA2; (+) strand; PAM type: YTN; PAM sequence: CTG
ctgttttcagtaattaatat

SEQ ID NO: 345006 - DNA, 20 bp, Artificial Sequence
  Description of Artificial Sequence: Synthetic oligonucleotide
  Target: LAMA2; (+) strand; PAM type: YTN; PAM sequence: CTG
ttttcagtaattaatatcat

SEQ ID NO: 345007 - DNA, 20 bp, Artificial Sequence
  Description of Artificial Sequence: Synthetic oligonucleotide
  Target: LAMA2; (+) strand; PAM type: YTN; PAM sequence: TTT
tcagtaattaatatcattaa

SEQ ID NO: 345008 - DNA, 20 bp, Artificial Sequence
  Description of Artificial Sequence: Synthetic oligonucleotide
  Target: LAMA2; (+) strand; PAM type: YTN; PAM sequence: TTT
cagtaattaatatcattaag

SEQ ID NO: 345009 - DNA, 20 bp, Artificial Sequence
  Description of Artificial Sequence: Synthetic oligonucleotide
  Target: LAMA2; (+) strand; PAM type: YTN; PAM sequence: TTC
agtaattaatatcattaaga

SEQ ID NO: 345010 - DNA, 20 bp, Artificial Sequence
  Description of Artificial Sequence: Synthetic oligonucleotide
  Target: LAMA2; (+) strand; PAM type: YTN; PAM sequence: TTA
atatcattaagaaagcacag

SEQ ID NO: 345011 - DNA, 20 bp, Artificial Sequence
  Description of Artificial Sequence: Synthetic oligonucleotide
  Target: LAMA2; (+) strand; PAM type: YTN; PAM sequence: TTA
agaaagcacaggttaaatca

SEQ ID NO: 345012 - DNA, 20 bp, Artificial Sequence
  Description of Artificial Sequence: Synthetic oligonucleotide
  Target: LAMA2; (+) strand; PAM type: YTN; PAM sequence: TTA
aatcaaatttcaacacagta

SEQ ID NO: 345013 - DNA, 20 bp, Artificial Sequence
  Description of Artificial Sequence: Synthetic oligonucleotide
  Target: LAMA2; (+) strand; PAM type: YTN; PAM sequence: TTT
caacacagtatcatttcagt

SEQ ID NO: 345014 - DNA, 20 bp, Artificial Sequence
  Description of Artificial Sequence: Synthetic oligonucleotide
  Target: LAMA2; (+) strand; PAM type: YTN; PAM sequence: TTC
aacacagtatcatttcagta

SEQ ID NO: 345015 - DNA, 20 bp, Artificial Sequence
  Description of Artificial Sequence: Synthetic oligonucleotide
  Target: LAMA2; (+) strand; PAM type: YTN; PAM sequence: TTT
cagtataaaatctcatattt

SEQ ID NO: 345016 - DNA, 20 bp, Artificial Sequence
  Description of Artificial Sequence: Synthetic oligonucleotide
  Target: LAMA2; (+) strand; PAM type: YTN; PAM sequence: TTC
agtataaaatctcatatttt

SEQ ID NO: 345017 - DNA, 20 bp, Artificial Sequence
  Description of Artificial Sequence: Synthetic oligonucleotide
  Target: LAMA2; (+) strand; PAM type: YTN; PAM sequence: CTC
atattttgaataaaacaaac

SEQ ID NO: 345018 - DNA, 20 bp, Artificial Sequence
  Description of Artificial Sequence: Synthetic oligonucleotide
  Target: LAMA2; (+) strand; PAM type: YTN; PAM sequence: TTT
tgaataaaacaaacatatct

SEQ ID NO: 345019 - DNA, 20 bp, Artificial Sequence
  Description of Artificial Sequence: Synthetic oligonucleotide
  Target: LAMA2; (+) strand; PAM type: YTN; PAM sequence: TTT
gaataaaacaaacatatctt

SEQ ID NO: 345020 - DNA, 20 bp, Artificial Sequence
  Description of Artificial Sequence: Synthetic oligonucleotide
  Target: LAMA2; (+) strand; PAM type: YTN; PAM sequence: TTG
aataaaacaaacatatcttt

SEQ ID NO: 345021 - DNA, 20 bp, Artificial Sequence
  Description of Artificial Sequence: Synthetic oligonucleotide
  Target: LAMA2; (+) strand; PAM type: YTN; PAM sequence: CTT
tacacattattaaatgaact

SEQ ID NO: 345022 - DNA, 20 bp, Artificial Sequence
  Description of Artificial Sequence: Synthetic oligonucleotide
  Target: LAMA2; (+) strand; PAM type: YTN; PAM sequence: TTT
acacattattaaatgaacta

SEQ ID NO: 345023 - DNA, 20 bp, Artificial Sequence
  Description of Artificial Sequence: Synthetic oligonucleotide
  Target: LAMA2; (+) strand; PAM type: YTN; PAM sequence: TTA
cacattattaaatgaactac

SEQ ID NO: 345024 - DNA, 20 bp, Artificial Sequence
  Description of Artificial Sequence: Synthetic oligonucleotide
  Target: LAMA2; (+) strand; PAM type: YTN; PAM sequence: TTA
ttaaatgaactacgctgaca

SEQ ID NO: 345025 - DNA, 20 bp, Artificial Sequence
  Description of Artificial Sequence: Synthetic oligonucleotide
  Target: LAMA2; (+) strand; PAM type: YTN; PAM sequence: TTA
aatgaactacgctgacaaat

SEQ ID NO: 345026 - DNA, 20 bp, Artificial Sequence
  Description of Artificial Sequence: Synthetic oligonucleotide
  Target: LAMA2; (+) strand; PAM type: YTN; PAM sequence: CTA
cgctgacaaattttgtttct

SEQ ID NO: 345027 - DNA, 20 bp, Artificial Sequence
  Description of Artificial Sequence: Synthetic oligonucleotide
  Target: LAMA2; (+) strand; PAM type: YTN; PAM sequence: CTG
acaaattttgtttctttttt

SEQ ID NO: 345028 - DNA, 20 bp, Artificial Sequence
  Description of Artificial Sequence: Synthetic oligonucleotide
  Target: LAMA2; (+) strand; PAM type: YTN; PAM sequence: TTT
tgtttctttttttgagaacc

SEQ ID NO: 345029 - DNA, 20 bp, Artificial Sequence
  Description of Artificial Sequence: Synthetic oligonucleotide
  Target: LAMA2; (+) strand; PAM type: YTN; PAM sequence: TTT
gtttctttttttgagaacca

SEQ ID NO: 345030 - DNA, 20 bp, Artificial Sequence
  Description of Artificial Sequence: Synthetic oligonucleotide
  Target: LAMA2; (+) strand; PAM type: YTN; PAM sequence: TTG
tttctttttttgagaaccag

SEQ ID NO: 345031 - DNA, 20 bp, Artificial Sequence
  Description of Artificial Sequence: Synthetic oligonucleotide
  Target: LAMA2; (+) strand; PAM type: YTN; PAM sequence: TTT
ctttttttgagaaccagaaa

SEQ ID NO: 345032 - DNA, 20 bp, Artificial Sequence
  Description of Artificial Sequence: Synthetic oligonucleotide
  Target: LAMA2; (+) strand; PAM type: YTN; PAM sequence: TTC
tttttttgagaaccagaaaa

SEQ ID NO: 345033 - DNA, 20 bp, Artificial Sequence
  Description of Artificial Sequence: Synthetic oligonucleotide
  Target: LAMA2; (+) strand; PAM type: YTN; PAM sequence: CTT
tttttgagaaccagaaaaac

SEQ ID NO: 345034 - DNA, 20 bp, Artificial Sequence
  Description of Artificial Sequence: Synthetic oligonucleotide
  Target: LAMA2; (+) strand; PAM type: YTN; PAM sequence: TTT
ttttgagaaccagaaaaaca

SEQ ID NO: 345035 - DNA, 20 bp, Artificial Sequence
  Description of Artificial Sequence: Synthetic oligonucleotide
  Target: LAMA2; (+) strand; PAM type: YTN; PAM sequence: TTT
tttgagaaccagaaaaacaa

SEQ ID NO: 345036 - DNA, 20 bp, Artificial Sequence
  Description of Artificial Sequence: Synthetic oligonucleotide
  Target: LAMA2; (+) strand; PAM type: YTN; PAM sequence: TTT
ttgagaaccagaaaaacaat

SEQ ID NO: 345037 - DNA, 20 bp, Artificial Sequence
  Description of Artificial Sequence: Synthetic oligonucleotide
  Target: LAMA2; (+) strand; PAM type: YTN; PAM sequence: TTT
tgagaaccagaaaaacaatt

SEQ ID NO: 345038 - DNA, 20 bp, Artificial Sequence
  Description of Artificial Sequence: Synthetic oligonucleotide
  Target: LAMA2; (+) strand; PAM type: YTN; PAM sequence: TTT
gagaaccagaaaaacaatta

SEQ ID NO: 345039 - DNA, 20 bp, Artificial Sequence
  Description of Artificial Sequence: Synthetic oligonucleotide
  Target: LAMA2; (+) strand; PAM type: YTN; PAM sequence: TTG
agaaccagaaaaacaattat

SEQ ID NO: 345040 - DNA, 20 bp, Artificial Sequence
  Description of Artificial Sequence: Synthetic oligonucleotide
  Target: LAMA2; (+) strand; PAM type: YTN; PAM sequence: TTA
tacttagatgggccatctaa

SEQ ID NO: 345041 - DNA, 20 bp, Artificial Sequence
  Description of Artificial Sequence: Synthetic oligonucleotide
  Target: LAMA2; (+) strand; PAM type: YTN; PAM sequence: CTT
agatgggccatctaaaatgt

SEQ ID NO: 345042 - DNA, 20 bp, Artificial Sequence
  Description of Artificial Sequence: Synthetic oligonucleotide
  Target: LAMA2; (+) strand; PAM type: YTN; PAM sequence: TTA
gatgggccatctaaaatgtc

SEQ ID NO: 345043 - DNA, 20 bp, Artificial Sequence
  Description of Artificial Sequence: Synthetic oligonucleotide
  Target: LAMA2; (+) strand; PAM type: YTN; PAM sequence: CTA
aaatgtccttccagcttgtg

SEQ ID NO: 345044 - DNA, 20 bp, Artificial Sequence
  Description of Artificial Sequence: Synthetic oligonucleotide
  Target: LAMA2; (+) strand; PAM type: YTN; PAM sequence: CTT
ccagcttgtggagtaggttg

SEQ ID NO: 345045 - DNA, 20 bp, Artificial Sequence
  Description of Artificial Sequence: Synthetic oligonucleotide
  Target: LAMA2; (+) strand; PAM type: YTN; PAM sequence: TTC
cagcttgtggagtaggttgt

SEQ ID NO: 345046 - DNA, 20 bp, Artificial Sequence
  Description of Artificial Sequence: Synthetic oligonucleotide
  Target: LAMA2; (+) strand; PAM type: YTN; PAM sequence: CTT
gtggagtaggttgtgtttgt

SEQ ID NO: 345047 - DNA, 20 bp, Artificial Sequence
  Description of Artificial Sequence: Synthetic oligonucleotide
  Target: LAMA2; (+) strand; PAM type: YTN; PAM sequence: TTG
tggagtaggttgtgtttgtt

SEQ ID NO: 345048 - DNA, 20 bp, Artificial Sequence
  Description of Artificial Sequence: Synthetic oligonucleotide
  Target: LAMA2; (+) strand; PAM type: YTN; PAM sequence: TTG
tgtttgtttttcaatgaaca

SEQ ID NO: 345049 - DNA, 20 bp, Artificial Sequence
  Description of Artificial Sequence: Synthetic oligonucleotide
  Target: LAMA2; (+) strand; PAM type: YTN; PAM sequence: TTT
gtttttcaatgaacatctgt

SEQ ID NO: 345050 - DNA, 20 bp, Artificial Sequence
  Description of Artificial Sequence: Synthetic oligonucleotide
  Target: LAMA2; (+) strand; PAM type: YTN; PAM sequence: TTG
tttttcaatgaacatctgtt

SEQ ID NO: 345051 - DNA, 20 bp, Artificial Sequence
  Description of Artificial Sequence: Synthetic oligonucleotide
  Target: LAMA2; (+) strand; PAM type: YTN; PAM sequence: TTT
ttcaatgaacatctgtttga

SEQ ID NO: 345052 - DNA, 20 bp, Artificial Sequence
  Description of Artificial Sequence: Synthetic oligonucleotide
  Target: LAMA2; (+) strand; PAM type: YTN; PAM sequence: TTT
tcaatgaacatctgtttgac

SEQ ID NO: 345053 - DNA, 20 bp, Artificial Sequence
  Description of Artificial Sequence: Synthetic oligonucleotide
  Target: LAMA2; (+) strand; PAM type: YTN; PAM sequence: TTT
caatgaacatctgtttgaca

SEQ ID NO: 345054 - DNA, 20 bp, Artificial Sequence
  Description of Artificial Sequence: Synthetic oligonucleotide
  Target: LAMA2; (+) strand; PAM type: YTN; PAM sequence: TTC
aatgaacatctgtttgacaa

SEQ ID NO: 345055 - DNA, 20 bp, Artificial Sequence
  Description of Artificial Sequence: Synthetic oligonucleotide
  Target: LAMA2; (+) strand; PAM type: YTN; PAM sequence: CTG
tttgacaaattgaaatgcta

SEQ ID NO: 345056 - DNA, 20 bp, Artificial Sequence
  Description of Artificial Sequence: Synthetic oligonucleotide
  Target: LAMA2; (+) strand; PAM type: YTN; PAM sequence: TTT
gacaaattgaaatgctaatt

SEQ ID NO: 345057 - DNA, 20 bp, Artificial Sequence
  Description of Artificial Sequence: Synthetic oligonucleotide
  Target: LAMA2; (+) strand; PAM type: YTN; PAM sequence: TTG
acaaattgaaatgctaatta

SEQ ID NO: 345058 - DNA, 20 bp, Artificial Sequence
  Description of Artificial Sequence: Synthetic oligonucleotide
  Target: LAMA2; (+) strand; PAM type: YTN; PAM sequence: TTG
aaatgctaattatgatttat

SEQ ID NO: 345059 - DNA, 20 bp, Artificial Sequence
  Description of Artificial Sequence: Synthetic oligonucleotide
  Target: LAMA2; (+) strand; PAM type: YTN; PAM sequence: CTA
attatgatttatcatttcca

SEQ ID NO: 345060 - DNA, 20 bp, Artificial Sequence
  Description of Artificial Sequence: Synthetic oligonucleotide
  Target: LAMA2; (+) strand; PAM type: YTN; PAM sequence: TTA
tgatttatcatttccatgac

SEQ ID NO: 345061 - DNA, 20 bp, Artificial Sequence
  Description of Artificial Sequence: Synthetic oligonucleotide
  Target: LAMA2; (+) strand; PAM type: YTN; PAM sequence: TTT
atcatttccatgacatcaaa

SEQ ID NO: 345062 - DNA, 20 bp, Artificial Sequence
  Description of Artificial Sequence: Synthetic oligonucleotide
  Target: LAMA2; (+) strand; PAM type: YTN; PAM sequence: TTA
tcatttccatgacatcaaat

SEQ ID NO: 345063 - DNA, 20 bp, Artificial Sequence
  Description of Artificial Sequence: Synthetic oligonucleotide
  Target: LAMA2; (+) strand; PAM type: YTN; PAM sequence: TTT
ccatgacatcaaatatccag

SEQ ID NO: 345064 - DNA, 20 bp, Artificial Sequence
  Description of Artificial Sequence: Synthetic oligonucleotide
  Target: LAMA2; (+) strand; PAM type: YTN; PAM sequence: TTC
catgacatcaaatatccaga

SEQ ID NO: 345065 - DNA, 20 bp, Artificial Sequence
  Description of Artificial Sequence: Synthetic oligonucleotide
  Target: LAMA2; (+) strand; PAM type: YTN; PAM sequence: TTG
atgactaactatatttttca

SEQ ID NO: 345066 - DNA, 20 bp, Artificial Sequence
  Description of Artificial Sequence: Synthetic oligonucleotide
  Target: LAMA2; (+) strand; PAM type: YTN; PAM sequence: CTA
actatatttttcagtttcag

SEQ ID NO: 345067 - DNA, 20 bp, Artificial Sequence
  Description of Artificial Sequence: Synthetic oligonucleotide
  Target: LAMA2; (+) strand; PAM type: YTN; PAM sequence: CTA
tatttttcagtttcagccag

SEQ ID NO: 345068 - DNA, 20 bp, Artificial Sequence
  Description of Artificial Sequence: Synthetic oligonucleotide
  Target: LAMA2; (+) strand; PAM type: YTN; PAM sequence: TTT
ttcagtttcagccagatgtt

SEQ ID NO: 345069 - DNA, 20 bp, Artificial Sequence
  Description of Artificial Sequence: Synthetic oligonucleotide
  Target: LAMA2; (+) strand; PAM type: YTN; PAM sequence: TTT
tcagtttcagccagatgttt

SEQ ID NO: 345070 - DNA, 20 bp, Artificial Sequence
  Description of Artificial Sequence: Synthetic oligonucleotide
  Target: LAMA2; (+) strand; PAM type: YTN; PAM sequence: TTT
cagtttcagccagatgtttg

SEQ ID NO: 345071 - DNA, 20 bp, Artificial Sequence
  Description of Artificial Sequence: Synthetic oligonucleotide
  Target: LAMA2; (+) strand; PAM type: YTN; PAM sequence: TTC
agtttcagccagatgtttgg

SEQ ID NO: 345072 - DNA, 20 bp, Artificial Sequence
  Description of Artificial Sequence: Synthetic oligonucleotide
  Target: LAMA2; (+) strand; PAM type: YTN; PAM sequence: TTT
cagccagatgtttggcatca

SEQ ID NO: 345073 - DNA, 20 bp, Artificial Sequence
  Description of Artificial Sequence: Synthetic oligonucleotide
  Target: LAMA2; (+) strand; PAM type: YTN; PAM sequence: TTC
agccagatgtttggcatcac

SEQ ID NO: 345074 - DNA, 20 bp, Artificial Sequence
  Description of Artificial Sequence: Synthetic oligonucleotide
  Target: LAMA2; (+) strand; PAM type: YTN; PAM sequence: TTT
ggcatcacgtaagataccac

SEQ ID NO: 345075 - DNA, 20 bp, Artificial Sequence
  Description of Artificial Sequence: Synthetic oligonucleotide
  Target: LAMA2; (+) strand; PAM type: YTN; PAM sequence: TTG
gcatcacgtaagataccacc

SEQ ID NO: 345076 - DNA, 20 bp, Artificial Sequence
  Description of Artificial Sequence: Synthetic oligonucleotide
  Target: LAMA2; (+) strand; PAM type: YTN; PAM sequence: CTT
agttttacataaaaataaaa

SEQ ID NO: 345077 - DNA, 20 bp, Artificial Sequence
  Description of Artificial Sequence: Synthetic oligonucleotide
  Target: LAMA2; (+) strand; PAM type: YTN; PAM sequence: TTA
gttttacataaaaataaaat

SEQ ID NO: 345078 - DNA, 20 bp, Artificial Sequence
  Description of Artificial Sequence: Synthetic oligonucleotide
  Target: LAMA2; (+) strand; PAM type: YTN; PAM sequence: TTT
tacataaaaataaaatgttt

SEQ ID NO: 345079 - DNA, 20 bp, Artificial Sequence
  Description of Artificial Sequence: Synthetic oligonucleotide
  Target: LAMA2; (+) strand; PAM type: YTN; PAM sequence: TTT
acataaaaataaaatgtttc

SEQ ID NO: 345080 - DNA, 20 bp, Artificial Sequence
  Description of Artificial Sequence: Synthetic oligonucleotide
  Target: LAMA2; (+) strand; PAM type: YTN; PAM sequence: TTA
cataaaaataaaatgtttct

SEQ ID NO: 345081 - DNA, 20 bp, Artificial Sequence
  Description of Artificial Sequence: Synthetic oligonucleotide
  Target: LAMA2; (+) strand; PAM type: YTN; PAM sequence: TTT
cttgagtctggcttatcata

SEQ ID NO: 345082 - DNA, 20 bp, Artificial Sequence
  Description of Artificial Sequence: Synthetic oligonucleotide
  Target: LAMA2; (+) strand; PAM type: YTN; PAM sequence: TTC
ttgagtctggcttatcataa

SEQ ID NO: 345083 - DNA, 20 bp, Artificial Sequence
  Description of Artificial Sequence: Synthetic oligonucleotide
  Target: LAMA2; (+) strand; PAM type: YTN; PAM sequence: CTT
gagtctggcttatcataatg

SEQ ID NO: 345084 - DNA, 20 bp, Artificial Sequence
  Description of Artificial Sequence: Synthetic oligonucleotide
  Target: LAMA2; (+) strand; PAM type: YTN; PAM sequence: TTG
agtctggcttatcataatgg

SEQ ID NO: 345085 - DNA, 20 bp, Artificial Sequence
  Description of Artificial Sequence: Synthetic oligonucleotide
  Target: LAMA2; (+) strand; PAM type: YTN; PAM sequence: CTG
gcttatcataatggggagga

SEQ ID NO: 345086 - DNA, 20 bp, Artificial Sequence
  Description of Artificial Sequence: Synthetic oligonucleotide
  Target: LAMA2; (+) strand; PAM type: YTN; PAM sequence: CTT
atcataatggggaggaaact

SEQ ID NO: 345087 - DNA, 20 bp, Artificial Sequence
  Description of Artificial Sequence: Synthetic oligonucleotide
  Target: LAMA2; (+) strand; PAM type: YTN; PAM sequence: TTA
tcataatggggaggaaacta

SEQ ID NO: 345088 - DNA, 20 bp, Artificial Sequence
  Description of Artificial Sequence: Synthetic oligonucleotide
  Target: LAMA2; (+) strand; PAM type: YTN; PAM sequence: CTA
atatgaatgaagcagaatgg

SEQ ID NO: 345089 - DNA, 20 bp, Artificial Sequence
  Description of Artificial Sequence: Synthetic oligonucleotide
  Target: LAMA2; (+) strand; PAM type: YTN; PAM sequence: TTC
attttttttctcaatgtgta

SEQ ID NO: 345090 - DNA, 20 bp, Artificial Sequence
  Description of Artificial Sequence: Synthetic oligonucleotide
  Target: LAMA2; (+) strand; PAM type: YTN; PAM sequence: TTT
tttttctcaatgtgtacaat

SEQ ID NO: 345091 - DNA, 20 bp, Artificial Sequence
  Description of Artificial Sequence: Synthetic oligonucleotide
  Target: LAMA2; (+) strand; PAM type: YTN; PAM sequence: TTT
ttttctcaatgtgtacaatt

SEQ ID NO: 345092 - DNA, 20 bp, Artificial Sequence
  Description of Artificial Sequence: Synthetic oligonucleotide
  Target: LAMA2; (+) strand; PAM type: YTN; PAM sequence: TTT
tttctcaatgtgtacaattc

SEQ ID NO: 345093 - DNA, 20 bp, Artificial Sequence
  Description of Artificial Sequence: Synthetic oligonucleotide
  Target: LAMA2; (+) strand; PAM type: YTN; PAM sequence: TTT
ttctcaatgtgtacaattct

SEQ ID NO: 345094 - DNA, 20 bp, Artificial Sequence
  Description of Artificial Sequence: Synthetic oligonucleotide
  Target: LAMA2; (+) strand; PAM type: YTN; PAM sequence: TTT
tctcaatgtgtacaattcta

SEQ ID NO: 345095 - DNA, 20 bp, Artificial Sequence
  Description of Artificial Sequence: Synthetic oligonucleotide
  Target: LAMA2; (+) strand; PAM type: YTN; PAM sequence: TTT
ctcaatgtgtacaattctac

SEQ ID NO: 345096 - DNA, 20 bp, Artificial Sequence
  Description of Artificial Sequence: Synthetic oligonucleotide
  Target: LAMA2; (+) strand; PAM type: YTN; PAM sequence: TTC
tcaatgtgtacaattctact

SEQ ID NO: 345097 - DNA, 20 bp, Artificial Sequence
  Description of Artificial Sequence: Synthetic oligonucleotide
  Target: LAMA2; (+) strand; PAM type: YTN; PAM sequence: CTC
aatgtgtacaattctactgg

SEQ ID NO: 345098 - DNA, 20 bp, Artificial Sequence
  Description of Artificial Sequence: Synthetic oligonucleotide
  Target: LAMA2; (+) strand; PAM type: YTN; PAM sequence: TTC
tactggtaagacttttacaa

SEQ ID NO: 345099 - DNA, 20 bp, Artificial Sequence
  Description of Artificial Sequence: Synthetic oligonucleotide
  Target: LAMA2; (+) strand; PAM type: YTN; PAM sequence: CTA
ctggtaagacttttacaata

SEQ ID NO: 345100 - DNA, 20 bp, Artificial Sequence
  Description of Artificial Sequence: Synthetic oligonucleotide
  Target: LAMA2; (+) strand; PAM type: YTN; PAM sequence: CTG
gtaagacttttacaatatca

SEQ ID NO: 345101 - DNA, 20 bp, Artificial Sequence
  Description of Artificial Sequence: Synthetic oligonucleotide
  Target: LAMA2; (+) strand; PAM type: YTN; PAM sequence: CTT
ttacaatatcataaataaaa

SEQ ID NO: 345102 - DNA, 20 bp, Artificial Sequence
  Description of Artificial Sequence: Synthetic oligonucleotide
  Target: LAMA2; (+) strand; PAM type: YTN; PAM sequence: TTT
tacaatatcataaataaaat

SEQ ID NO: 345103 - DNA, 20 bp, Artificial Sequence
  Description of Artificial Sequence: Synthetic oligonucleotide
  Target: LAMA2; (+) strand; PAM type: YTN; PAM sequence: TTT
acaatatcataaataaaatt

SEQ ID NO: 345104 - DNA, 20 bp, Artificial Sequence
  Description of Artificial Sequence: Synthetic oligonucleotide
  Target: LAMA2; (+) strand; PAM type: YTN; PAM sequence: TTA
caatatcataaataaaattg

SEQ ID NO: 345105 - DNA, 20 bp, Artificial Sequence
  Description of Artificial Sequence: Synthetic oligonucleotide
  Target: LAMA2; (+) strand; PAM type: YTN; PAM sequence: TTG
tactttaaaataagtgtctt

SEQ ID NO: 345106 - DNA, 20 bp, Artificial Sequence
  Description of Artificial Sequence: Synthetic oligonucleotide
  Target: LAMA2; (+) strand; PAM type: YTN; PAM sequence: CTT
taaaataagtgtctttcaaa

SEQ ID NO: 345107 - DNA, 20 bp, Artificial Sequence
  Description of Artificial Sequence: Synthetic oligonucleotide
  Target: LAMA2; (+) strand; PAM type: YTN; PAM sequence: TTT
aaaataagtgtctttcaaac

SEQ ID NO: 345108 - DNA, 20 bp, Artificial Sequence
  Description of Artificial Sequence: Synthetic oligonucleotide
  Target: LAMA2; (+) strand; PAM type: YTN; PAM sequence: TTA
aaataagtgtctttcaaact

SEQ ID NO: 345109 - DNA, 20 bp, Artificial Sequence
  Description of Artificial Sequence: Synthetic oligonucleotide
  Target: LAMA2; (+) strand; PAM type: YTN; PAM sequence: CTT
tcaaacttttacaaatacaa

SEQ ID NO: 345110 - DNA, 20 bp, Artificial Sequence
  Description of Artificial Sequence: Synthetic oligonucleotide
  Target: LAMA2; (+) strand; PAM type: YTN; PAM sequence: TTT
caaacttttacaaatacaaa

SEQ ID NO: 345111 - DNA, 20 bp, Artificial Sequence
  Description of Artificial Sequence: Synthetic oligonucleotide
  Target: LAMA2; (+) strand; PAM type: YTN; PAM sequence: TTC
aaacttttacaaatacaaag

SEQ ID NO: 345112 - DNA, 20 bp, Artificial Sequence
  Description of Artificial Sequence: Synthetic oligonucleotide
  Target: LAMA2; (+) strand; PAM type: YTN; PAM sequence: CTT
ttacaaatacaaagaaagcc

SEQ ID NO: 345113 - DNA, 20 bp, Artificial Sequence
  Description of Artificial Sequence: Synthetic oligonucleotide
  Target: LAMA2; (+) strand; PAM type: YTN; PAM sequence: TTT
tacaaatacaaagaaagcca

SEQ ID NO: 345114 - DNA, 20 bp, Artificial Sequence
  Description of Artificial Sequence: Synthetic oligonucleotide
  Target: LAMA2; (+) strand; PAM type: YTN; PAM sequence: TTT
acaaatacaaagaaagccag

SEQ ID NO: 345115 - DNA, 20 bp, Artificial Sequence
  Description of Artificial Sequence: Synthetic oligonucleotide
  Target: LAMA2; (+) strand; PAM type: YTN; PAM sequence: TTA
caaatacaaagaaagccaga

SEQ ID NO: 345116 - DNA, 20 bp, Artificial Sequence
  Description of Artificial Sequence: Synthetic oligonucleotide
  Target: LAMA2; (+) strand; PAM type: YTN; PAM sequence: TTT
tgaatatcaagtgttaaata

SEQ ID NO: 345117 - DNA, 20 bp, Artificial Sequence
  Description of Artificial Sequence: Synthetic oligonucleotide
  Target: LAMA2; (+) strand; PAM type: YTN; PAM sequence: TTT
gaatatcaagtgttaaatat

SEQ ID NO: 345118 - DNA, 20 bp, Artificial Sequence
  Description of Artificial Sequence: Synthetic oligonucleotide
  Target: LAMA2; (+) strand; PAM type: YTN; PAM sequence: TTG
aatatcaagtgttaaatatg

SEQ ID NO: 345119 - DNA, 20 bp, Artificial Sequence
  Description of Artificial Sequence: Synthetic oligonucleotide
  Target: LAMA2; (+) strand; PAM type: YTN; PAM sequence: TTA
aatatgaatatcagaaactg

SEQ ID NO: 345120 - DNA, 20 bp, Artificial Sequence
  Description of Artificial Sequence: Synthetic oligonucleotide
  Target: LAMA2; (+) strand; PAM type: YTN; PAM sequence: CTG
aatatatcatcaatacaaat

SEQ ID NO: 345121 - DNA, 20 bp, Artificial Sequence
  Description of Artificial Sequence: Synthetic oligonucleotide
  Target: LAMA2; (+) strand; PAM type: YTN; PAM sequence: TTT
taaaaaaaataagtttgtaa

SEQ ID NO: 345122 - DNA, 20 bp, Artificial Sequence
  Description of Artificial Sequence: Synthetic oligonucleotide
  Target: LAMA2; (+) strand; PAM type: YTN; PAM sequence: TTT
aaaaaaaataagtttgtaaa

SEQ ID NO: 345123 - DNA, 20 bp, Artificial Sequence
  Description of Artificial Sequence: Synthetic oligonucleotide
  Target: LAMA2; (+) strand; PAM type: YTN; PAM sequence: TTA
aaaaaaataagtttgtaaat

SEQ ID NO: 345124 - DNA, 20 bp, Artificial Sequence
  Description of Artificial Sequence: Synthetic oligonucleotide
  Target: LAMA2; (+) strand; PAM type: YTN; PAM sequence: TTT
gtaaattcagagtttatccc

SEQ ID NO: 345125 - DNA, 20 bp, Artificial Sequence
  Description of Artificial Sequence: Synthetic oligonucleotide
  Target: LAMA2; (+) strand; PAM type: YTN; PAM sequence: TTG
taaattcagagtttatccct

SEQ ID NO: 345126 - DNA, 20 bp, Artificial Sequence
  Description of Artificial Sequence: Synthetic oligonucleotide
  Target: LAMA2; (+) strand; PAM type: YTN; PAM sequence: TTC
agagtttatccctcagatgt

SEQ ID NO: 345127 - DNA, 20 bp, Artificial Sequence
  Description of Artificial Sequence: Synthetic oligonucleotide
  Target: LAMA2; (+) strand; PAM type: YTN; PAM sequence: TTT
atccctcagatgttatttca

SEQ ID NO: 345128 - DNA, 20 bp, Artificial Sequence
  Description of Artificial Sequence: Synthetic oligonucleotide
  Target: LAMA2; (+) strand; PAM type: YTN; PAM sequence: TTA
tccctcagatgttatttcaa

SEQ ID NO: 345129 - DNA, 20 bp, Artificial Sequence
  Description of Artificial Sequence: Synthetic oligonucleotide
  Target: LAMA2; (+) strand; PAM type: YTN; PAM sequence: CTC
agatgttatttcaagcatat

SEQ ID NO: 345130 - DNA, 20 bp, Artificial Sequence
  Description of Artificial Sequence: Synthetic oligonucleotide
  Target: LAMA2; (+) strand; PAM type: YTN; PAM sequence: TTA
tttcaagcatatatcatagt

SEQ ID NO: 345131 - DNA, 20 bp, Artificial Sequence
  Description of Artificial Sequence: Synthetic oligonucleotide
  Target: LAMA2; (+) strand; PAM type: YTN; PAM sequence: TTT
caagcatatatcatagtgac

SEQ ID NO: 345132 - DNA, 20 bp, Artificial Sequence
  Description of Artificial Sequence: Synthetic oligonucleotide
  Target: LAMA2; (+) strand; PAM type: YTN; PAM sequence: TTC
aagcatatatcatagtgaca

SEQ ID NO: 345133 - DNA, 20 bp, Artificial Sequence
  Description of Artificial Sequence: Synthetic oligonucleotide
  Target: LAMA2; (+) strand; PAM type: YTN; PAM sequence: CTT
gaatatatatttaagatccg

SEQ ID NO: 345134 - DNA, 20 bp, Artificial Sequence
  Description of Artificial Sequence: Synthetic oligonucleotide
  Target: LAMA2; (+) strand; PAM type: YTN; PAM sequence: TTG
aatatatatttaagatccga

SEQ ID NO: 345135 - DNA, 20 bp, Artificial Sequence
  Description of Artificial Sequence: Synthetic oligonucleotide
  Target: LAMA2; (+) strand; PAM type: YTN; PAM sequence: TTT
aagatccgatagggactggg

SEQ ID NO: 345136 - DNA, 20 bp, Artificial Sequence
  Description of Artificial Sequence: Synthetic oligonucleotide
  Target: LAMA2; (+) strand; PAM type: YTN; PAM sequence: TTA
agatccgatagggactgggc

SEQ ID NO: 345137 - DNA, 20 bp, Artificial Sequence
  Description of Artificial Sequence: Synthetic oligonucleotide
  Target: LAMA2; (+) strand; PAM type: YTN; PAM sequence: CTG
ggcacagttgctcacaccag

SEQ ID NO: 345138 - DNA, 20 bp, Artificial Sequence
  Description of Artificial Sequence: Synthetic oligonucleotide
  Target: LAMA2; (+) strand; PAM type: YTN; PAM sequence: TTG
ctcacaccagcattttggga

SEQ ID NO: 345139 - DNA, 20 bp, Artificial Sequence
  Description of Artificial Sequence: Synthetic oligonucleotide
  Target: LAMA2; (+) strand; PAM type: YTN; PAM sequence: CTC
acaccagcattttgggaggc

SEQ ID NO: 345140 - DNA, 20 bp, Artificial Sequence
  Description of Artificial Sequence: Synthetic oligonucleotide
  Target: LAMA2; (+) strand; PAM type: YTN; PAM sequence: TTT
tgggaggctgaggcagatgg

SEQ ID NO: 345141 - DNA, 20 bp, Artificial Sequence
  Description of Artificial Sequence: Synthetic oligonucleotide
  Target: LAMA2; (+) strand; PAM type: YTN; PAM sequence: TTT
gggaggctgaggcagatgga

SEQ ID NO: 345142 - DNA, 20 bp, Artificial Sequence
  Description of Artificial Sequence: Synthetic oligonucleotide
  Target: LAMA2; (+) strand; PAM type: YTN; PAM sequence: TTG
ggaggctgaggcagatggat

SEQ ID NO: 345143 - DNA, 20 bp, Artificial Sequence
  Description of Artificial Sequence: Synthetic oligonucleotide
  Target: LAMA2; (+) strand; PAM type: YTN; PAM sequence: CTG
aggcagatggattgcttgag

SEQ ID NO: 345144 - DNA, 20 bp, Artificial Sequence
  Description of Artificial Sequence: Synthetic oligonucleotide
  Target: LAMA2; (+) strand; PAM type: YTN; PAM sequence: TTG
cttgagctcaggagtttgag

SEQ ID NO: 345145 - DNA, 20 bp, Artificial Sequence
  Description of Artificial Sequence: Synthetic oligonucleotide
  Target: LAMA2; (+) strand; PAM type: YTN; PAM sequence: CTT
gagctcaggagtttgagacc

SEQ ID NO: 345146 - DNA, 20 bp, Artificial Sequence
  Description of Artificial Sequence: Synthetic oligonucleotide
  Target: LAMA2; (+) strand; PAM type: YTN; PAM sequence: TTG
agctcaggagtttgagacca

SEQ ID NO: 345147 - DNA, 20 bp, Artificial Sequence
  Description of Artificial Sequence: Synthetic oligonucleotide
  Target: LAMA2; (+) strand; PAM type: YTN; PAM sequence: CTC
aggagtttgagaccagaatg

SEQ ID NO: 345148 - DNA, 20 bp, Artificial Sequence
  Description of Artificial Sequence: Synthetic oligonucleotide
  Target: LAMA2; (+) strand; PAM type: YTN; PAM sequence: TTT
gagaccagaatgggcaacat

SEQ ID NO: 345149 - DNA, 20 bp, Artificial Sequence
  Description of Artificial Sequence: Synthetic oligonucleotide
  Target: LAMA2; (+) strand; PAM type: YTN; PAM sequence: TTG
agaccagaatgggcaacatg

SEQ ID NO: 345150 - DNA, 20 bp, Artificial Sequence
  Description of Artificial Sequence: Synthetic oligonucleotide
  Target: LAMA2; (+) strand; PAM type: YTN; PAM sequence: TTA
gcaaagtgcggtggtgtgca

SEQ ID NO: 345151 - DNA, 20 bp, Artificial Sequence
  Description of Artificial Sequence: Synthetic oligonucleotide
  Target: LAMA2; (+) strand; PAM type: YTN; PAM sequence: CTG
tagtcccagcgacttcggag

SEQ ID NO: 345152 - DNA, 20 bp, Artificial Sequence
  Description of Artificial Sequence: Synthetic oligonucleotide
  Target: LAMA2; (+) strand; PAM type: YTN; PAM sequence: CTT
cggaggttgagctgggagga

SEQ ID NO: 345153 - DNA, 20 bp, Artificial Sequence
  Description of Artificial Sequence: Synthetic oligonucleotide
  Target: LAMA2; (+) strand; PAM type: YTN; PAM sequence: TTC
ggaggttgagctgggaggat

SEQ ID NO: 345154 - DNA, 20 bp, Artificial Sequence
  Description of Artificial Sequence: Synthetic oligonucleotide
  Target: LAMA2; (+) strand; PAM type: YTN; PAM sequence: TTG
agctgggaggattgcttgag

SEQ ID NO: 345155 - DNA, 20 bp, Artificial Sequence
  Description of Artificial Sequence: Synthetic oligonucleotide
  Target: LAMA2; (+) strand; PAM type: YTN; PAM sequence: CTG
ggaggattgcttgagcctgg

SEQ ID NO: 345156 - DNA, 20 bp, Artificial Sequence
  Description of Artificial Sequence: Synthetic oligonucleotide
  Target: LAMA2; (+) strand; PAM type: YTN; PAM sequence: TTG
cttgagcctggtaggcagag

SEQ ID NO: 345157 - DNA, 20 bp, Artificial Sequence
  Description of Artificial Sequence: Synthetic oligonucleotide
  Target: LAMA2; (+) strand; PAM type: YTN; PAM sequence: CTT
gagcctggtaggcagaggtt

SEQ ID NO: 345158 - DNA, 20 bp, Artificial Sequence
  Description of Artificial Sequence: Synthetic oligonucleotide
  Target: LAMA2; (+) strand; PAM type: YTN; PAM sequence: TTG
agcctggtaggcagaggttg

SEQ ID NO: 345159 - DNA, 20 bp, Artificial Sequence
  Description of Artificial Sequence: Synthetic oligonucleotide
  Target: LAMA2; (+) strand; PAM type: YTN; PAM sequence: CTG
gtaggcagaggttgcagtaa

SEQ ID NO: 345160 - DNA, 20 bp, Artificial Sequence
  Description of Artificial Sequence: Synthetic oligonucleotide
  Target: LAMA2; (+) strand; PAM type: YTN; PAM sequence: TTG
cagtaagctgagactgtgct

SEQ ID NO: 345161 - DNA, 20 bp, Artificial Sequence
  Description of Artificial Sequence: Synthetic oligonucleotide
  Target: LAMA2; (+) strand; PAM type: YTN; PAM sequence: CTG
agactgtgctactgcacttc

SEQ ID NO: 345162 - DNA, 20 bp, Artificial Sequence
  Description of Artificial Sequence: Synthetic oligonucleotide
  Target: LAMA2; (+) strand; PAM type: YTN; PAM sequence: CTG
tgctactgcacttcagcctg

SEQ ID NO: 345163 - DNA, 20 bp, Artificial Sequence
  Description of Artificial Sequence: Synthetic oligonucleotide
  Target: LAMA2; (+) strand; PAM type: YTN; PAM sequence: CTA
ctgcacttcagcctggatga

SEQ ID NO: 345164 - DNA, 20 bp, Artificial Sequence
  Description of Artificial Sequence: Synthetic oligonucleotide
  Target: LAMA2; (+) strand; PAM type: YTN; PAM sequence: CTG
cacttcagcctggatgacac

SEQ ID NO: 345165 - DNA, 20 bp, Artificial Sequence
  Description of Artificial Sequence: Synthetic oligonucleotide
  Target: LAMA2; (+) strand; PAM type: YTN; PAM sequence: CTT
cagcctggatgacacaggca

SEQ ID NO: 345166 - DNA, 20 bp, Artificial Sequence
  Description of Artificial Sequence: Synthetic oligonucleotide
  Target: LAMA2; (+) strand; PAM type: YTN; PAM sequence: TTC
agcctggatgacacaggcag

SEQ ID NO: 345167 - DNA, 20 bp, Artificial Sequence
  Description of Artificial Sequence: Synthetic oligonucleotide
  Target: LAMA2; (+) strand; PAM type: YTN; PAM sequence: CTG
gatgacacaggcagaccctg

SEQ ID NO: 345168 - DNA, 20 bp, Artificial Sequence
  Description of Artificial Sequence: Synthetic oligonucleotide
  Target: LAMA2; (+) strand; PAM type: YTN; PAM sequence: CTG
tctcaaaagaaaaaaagaaa

SEQ ID NO: 345169 - DNA, 20 bp, Artificial Sequence
  Description of Artificial Sequence: Synthetic oligonucleotide
  Target: LAMA2; (+) strand; PAM type: YTN; PAM sequence: CTC
aaaagaaaaaaagaaaaatc

SEQ ID NO: 345170 - DNA, 20 bp, Artificial Sequence
  Description of Artificial Sequence: Synthetic oligonucleotide
  Target: LAMA2; (+) strand; PAM type: YTN; PAM sequence: CTG
atatgataatttagaatatg

SEQ ID NO: 345171 - DNA, 20 bp, Artificial Sequence
  Description of Artificial Sequence: Synthetic oligonucleotide
  Target: LAMA2; (+) strand; PAM type: YTN; PAM sequence: TTT
agaatatgggtcctcagggc

SEQ ID NO: 345172 - DNA, 20 bp, Artificial Sequence
  Description of Artificial Sequence: Synthetic oligonucleotide
  Target: LAMA2; (+) strand; PAM type: YTN; PAM sequence: TTA
gaatatgggtcctcagggcc

SEQ ID NO: 345173 - DNA, 20 bp, Artificial Sequence
  Description of Artificial Sequence: Synthetic oligonucleotide
  Target: LAMA2; (+) strand; PAM type: YTN; PAM sequence: CTC
agggccataaaacagcatat

SEQ ID NO: 345174 - DNA, 20 bp, Artificial Sequence
  Description of Artificial Sequence: Synthetic oligonucleotide
  Target: LAMA2; (+) strand; PAM type: YTN; PAM sequence: CTA
gtttgttggcttttactcac

SEQ ID NO: 345175 - DNA, 20 bp, Artificial Sequence
  Description of Artificial Sequence: Synthetic oligonucleotide
  Target: LAMA2; (+) strand; PAM type: YTN; PAM sequence: TTT
gttggcttttactcaccatg

SEQ ID NO: 345176 - DNA, 20 bp, Artificial Sequence
  Description of Artificial Sequence: Synthetic oligonucleotide
  Target: LAMA2; (+) strand; PAM type: YTN; PAM sequence: TTG
ttggcttttactcaccatgc

SEQ ID NO: 345177 - DNA, 20 bp, Artificial Sequence
  Description of Artificial Sequence: Synthetic oligonucleotide
  Target: LAMA2; (+) strand; PAM type: YTN; PAM sequence: TTG
gcttttactcaccatgctgt

SEQ ID NO: 345178 - DNA, 20 bp, Artificial Sequence
  Description of Artificial Sequence: Synthetic oligonucleotide
  Target: LAMA2; (+) strand; PAM type: YTN; PAM sequence: CTT
ttactcaccatgctgtgcac

SEQ ID NO: 345179 - DNA, 20 bp, Artificial Sequence
  Description of Artificial Sequence: Synthetic oligonucleotide
  Target: LAMA2; (+) strand; PAM type: YTN; PAM sequence: TTT
tactcaccatgctgtgcact

SEQ ID NO: 345180 - DNA, 20 bp, Artificial Sequence
  Description of Artificial Sequence: Synthetic oligonucleotide
  Target: LAMA2; (+) strand; PAM type: YTN; PAM sequence: TTT
actcaccatgctgtgcacta

SEQ ID NO: 345181 - DNA, 20 bp, Artificial Sequence
  Description of Artificial Sequence: Synthetic oligonucleotide
  Target: LAMA2; (+) strand; PAM type: YTN; PAM sequence: TTA
ctcaccatgctgtgcactaa

SEQ ID NO: 345182 - DNA, 20 bp, Artificial Sequence
  Description of Artificial Sequence: Synthetic oligonucleotide
  Target: LAMA2; (+) strand; PAM type: YTN; PAM sequence: CTC
accatgctgtgcactaaaag

SEQ ID NO: 345183 - DNA, 20 bp, Artificial Sequence
  Description of Artificial Sequence: Synthetic oligonucleotide
  Target: LAMA2; (+) strand; PAM type: YTN; PAM sequence: CTG
tgcactaaaagtaaaaaaat

SEQ ID NO: 345184 - DNA, 20 bp, Artificial Sequence
  Description of Artificial Sequence: Synthetic oligonucleotide
  Target: LAMA2; (+) strand; PAM type: YTN; PAM sequence: CTA
aaagtaaaaaaatataaagt

SEQ ID NO: 345185 - DNA, 20 bp, Artificial Sequence
  Description of Artificial Sequence: Synthetic oligonucleotide
  Target: LAMA2; (+) strand; PAM type: YTN; PAM sequence: TTC
ttttaactgagattttgtgc

SEQ ID NO: 345186 - DNA, 20 bp, Artificial Sequence
  Description of Artificial Sequence: Synthetic oligonucleotide
  Target: LAMA2; (+) strand; PAM type: YTN; PAM sequence: CTT
ttaactgagattttgtgccc

SEQ ID NO: 345187 - DNA, 20 bp, Artificial Sequence
  Description of Artificial Sequence: Synthetic oligonucleotide
  Target: LAMA2; (+) strand; PAM type: YTN; PAM sequence: TTT
taactgagattttgtgccct

SEQ ID NO: 345188 - DNA, 20 bp, Artificial Sequence
  Description of Artificial Sequence: Synthetic oligonucleotide
  Target: LAMA2; (+) strand; PAM type: YTN; PAM sequence: TTT
aactgagattttgtgccctt

SEQ ID NO: 345189 - DNA, 20 bp, Artificial Sequence
  Description of Artificial Sequence: Synthetic oligonucleotide
  Target: LAMA2; (+) strand; PAM type: YTN; PAM sequence: TTA
actgagattttgtgcccttt

SEQ ID NO: 345190 - DNA, 20 bp, Artificial Sequence
  Description of Artificial Sequence: Synthetic oligonucleotide
  Target: LAMA2; (+) strand; PAM type: YTN; PAM sequence: CTG
agattttgtgccctttgaca

SEQ ID NO: 345191 - DNA, 20 bp, Artificial Sequence
  Description of Artificial Sequence: Synthetic oligonucleotide
  Target: LAMA2; (+) strand; PAM type: YTN; PAM sequence: TTT
tgtgccctttgacataatct

SEQ ID NO: 345192 - DNA, 20 bp, Artificial Sequence
  Description of Artificial Sequence: Synthetic oligonucleotide
  Target: LAMA2; (+) strand; PAM type: YTN; PAM sequence: TTT
gtgccctttgacataatctc

SEQ ID NO: 345193 - DNA, 20 bp, Artificial Sequence
  Description of Artificial Sequence: Synthetic oligonucleotide
  Target: LAMA2; (+) strand; PAM type: YTN; PAM sequence: TTG
tgccctttgacataatctct

SEQ ID NO: 345194 - DNA, 20 bp, Artificial Sequence
  Description of Artificial Sequence: Synthetic oligonucleotide
  Target: LAMA2; (+) strand; PAM type: YTN; PAM sequence: CTT
tgacataatctctccattcc

SEQ ID NO: 345195 - DNA, 20 bp, Artificial Sequence
  Description of Artificial Sequence: Synthetic oligonucleotide
  Target: LAMA2; (+) strand; PAM type: YTN; PAM sequence: TTT
gacataatctctccattccc

SEQ ID NO: 345196 - DNA, 20 bp, Artificial Sequence
  Description of Artificial Sequence: Synthetic oligonucleotide
  Target: LAMA2; (+) strand; PAM type: YTN; PAM sequence: TTG
acataatctctccattccca

SEQ ID NO: 345197 - DNA, 20 bp, Artificial Sequence
  Description of Artificial Sequence: Synthetic oligonucleotide
  Target: LAMA2; (+) strand; PAM type: YTN; PAM sequence: CTC
tccattcccacagccctcag

SEQ ID NO: 345198 - DNA, 20 bp, Artificial Sequence
  Description of Artificial Sequence: Synthetic oligonucleotide
  Target: LAMA2; (+) strand; PAM type: YTN; PAM sequence: CTC
cattcccacagccctcagcc

SEQ ID NO: 345199 - DNA, 20 bp, Artificial Sequence
  Description of Artificial Sequence: Synthetic oligonucleotide
  Target: LAMA2; (+) strand; PAM type: YTN; PAM sequence: TTC
ccacagccctcagcctctgt

SEQ ID NO: 345200 - DNA, 20 bp, Artificial Sequence
  Description of Artificial Sequence: Synthetic oligonucleotide
  Target: LAMA2; (+) strand; PAM type: YTN; PAM sequence: CTC
agcctctgtaacttctattt

SEQ ID NO: 345201 - DNA, 20 bp, Artificial Sequence
  Description of Artificial Sequence: Synthetic oligonucleotide
  Target: LAMA2; (+) strand; PAM type: YTN; PAM sequence: CTC
tgtaacttctatttcactca

SEQ ID NO: 345202 - DNA, 20 bp, Artificial Sequence
  Description of Artificial Sequence: Synthetic oligonucleotide
  Target: LAMA2; (+) strand; PAM type: YTN; PAM sequence: CTG
taacttctatttcactcact

SEQ ID NO: 345203 - DNA, 20 bp, Artificial Sequence
  Description of Artificial Sequence: Synthetic oligonucleotide
  Target: LAMA2; (+) strand; PAM type: YTN; PAM sequence: CTT
ctatttcactcactccttct

SEQ ID NO: 345204 - DNA, 20 bp, Artificial Sequence
  Description of Artificial Sequence: Synthetic oligonucleotide
  Target: LAMA2; (+) strand; PAM type: YTN; PAM sequence: TTC
tatttcactcactccttcta

SEQ ID NO: 345205 - DNA, 20 bp, Artificial Sequence
  Description of Artificial Sequence: Synthetic oligonucleotide
  Target: LAMA2; (+) strand; PAM type: YTN; PAM sequence: CTA
tttcactcactccttctaag

SEQ ID NO: 345206 - DNA, 20 bp, Artificial Sequence
  Description of Artificial Sequence: Synthetic oligonucleotide
  Target: LAMA2; (+) strand; PAM type: YTN; PAM sequence: TTT
cactcactccttctaagaat

SEQ ID NO: 345207 - DNA, 20 bp, Artificial Sequence
  Description of Artificial Sequence: Synthetic oligonucleotide
  Target: LAMA2; (+) strand; PAM type: YTN; PAM sequence: TTC
actcactccttctaagaatt

SEQ ID NO: 345208 - DNA, 20 bp, Artificial Sequence
  Description of Artificial Sequence: Synthetic oligonucleotide
  Target: LAMA2; (+) strand; PAM type: YTN; PAM sequence: CTC
actccttctaagaatttgat

SEQ ID NO: 345209 - DNA, 20 bp, Artificial Sequence
  Description of Artificial Sequence: Synthetic oligonucleotide
  Target: LAMA2; (+) strand; PAM type: YTN; PAM sequence: CTC
cttctaagaatttgattgtt

SEQ ID NO: 345210 - DNA, 20 bp, Artificial Sequence
  Description of Artificial Sequence: Synthetic oligonucleotide
  Target: LAMA2; (+) strand; PAM type: YTN; PAM sequence: CTT
ctaagaatttgattgtttta

SEQ ID NO: 345211 - DNA, 20 bp, Artificial Sequence
  Description of Artificial Sequence: Synthetic oligonucleotide
  Target: LAMA2; (+) strand; PAM type: YTN; PAM sequence: TTC
taagaatttgattgttttac

SEQ ID NO: 345212 - DNA, 20 bp, Artificial Sequence
  Description of Artificial Sequence: Synthetic oligonucleotide
  Target: LAMA2; (+) strand; PAM type: YTN; PAM sequence: CTA
agaatttgattgttttacat

SEQ ID NO: 345213 - DNA, 20 bp, Artificial Sequence
  Description of Artificial Sequence: Synthetic oligonucleotide
  Target: LAMA2; (+) strand; PAM type: YTN; PAM sequence: TTT
gattgttttacatttcacat

SEQ ID NO: 345214 - DNA, 20 bp, Artificial Sequence
  Description of Artificial Sequence: Synthetic oligonucleotide
  Target: LAMA2; (+) strand; PAM type: YTN; PAM sequence: TTG
attgttttacatttcacatg

SEQ ID NO: 345215 - DNA, 20 bp, Artificial Sequence
  Description of Artificial Sequence: Synthetic oligonucleotide
  Target: LAMA2; (+) strand; PAM type: YTN; PAM sequence: TTG
ttttacatttcacatgcaag

SEQ ID NO: 345216 - DNA, 20 bp, Artificial Sequence
  Description of Artificial Sequence: Synthetic oligonucleotide
  Target: LAMA2; (+) strand; PAM type: YTN; PAM sequence: TTT
tacatttcacatgcaaggga

SEQ ID NO: 345217 - DNA, 20 bp, Artificial Sequence
  Description of Artificial Sequence: Synthetic oligonucleotide
  Target: LAMA2; (+) strand; PAM type: YTN; PAM sequence: TTT
acatttcacatgcaagggag

SEQ ID NO: 345218 - DNA, 20 bp, Artificial Sequence
  Description of Artificial Sequence: Synthetic oligonucleotide
  Target: LAMA2; (+) strand; PAM type: YTN; PAM sequence: TTA
catttcacatgcaagggaga

SEQ ID NO: 345219 - DNA, 20 bp, Artificial Sequence
  Description of Artificial Sequence: Synthetic oligonucleotide
  Target: LAMA2; (+) strand; PAM type: YTN; PAM sequence: TTT
cacatgcaagggagaacatg

SEQ ID NO: 345220 - DNA, 20 bp, Artificial Sequence
  Description of Artificial Sequence: Synthetic oligonucleotide
  Target: LAMA2; (+) strand; PAM type: YTN; PAM sequence: TTC
acatgcaagggagaacatgt

SEQ ID NO: 345221 - DNA, 20 bp, Artificial Sequence
  Description of Artificial Sequence: Synthetic oligonucleotide
  Target: LAMA2; (+) strand; PAM type: YTN; PAM sequence: CTT
tccaaatgacagaattttct

SEQ ID NO: 345222 - DNA, 20 bp, Artificial Sequence
  Description of Artificial Sequence: Synthetic oligonucleotide
  Target: LAMA2; (+) strand; PAM type: YTN; PAM sequence: TTT
ccaaatgacagaattttctt

SEQ ID NO: 345223 - DNA, 20 bp, Artificial Sequence
  Description of Artificial Sequence: Synthetic oligonucleotide
  Target: LAMA2; (+) strand; PAM type: YTN; PAM sequence: TTC
caaatgacagaattttcttt

SEQ ID NO: 345224 - DNA, 20 bp, Artificial Sequence
  Description of Artificial Sequence: Synthetic oligonucleotide
  Target: LAMA2; (+) strand; PAM type: YTN; PAM sequence: TTT
tcttttttaaagctaaatag

SEQ ID NO: 345225 - DNA, 20 bp, Artificial Sequence
  Description of Artificial Sequence: Synthetic oligonucleotide
  Target: LAMA2; (+) strand; PAM type: YTN; PAM sequence: TTT
cttttttaaagctaaatagt

SEQ ID NO: 345226 - DNA, 20 bp, Artificial Sequence
  Description of Artificial Sequence: Synthetic oligonucleotide
  Target: LAMA2; (+) strand; PAM type: YTN; PAM sequence: TTC
ttttttaaagctaaatagta

SEQ ID NO: 345227 - DNA, 20 bp, Artificial Sequence
  Description of Artificial Sequence: Synthetic oligonucleotide
  Target: LAMA2; (+) strand; PAM type: YTN; PAM sequence: CTT
ttttaaagctaaatagtatt

SEQ ID NO: 345228 - DNA, 20 bp, Artificial Sequence
  Description of Artificial Sequence: Synthetic oligonucleotide
  Target: LAMA2; (+) strand; PAM type: YTN; PAM sequence: TTT
tttaaagctaaatagtattt

SEQ ID NO: 345229 - DNA, 20 bp, Artificial Sequence
  Description of Artificial Sequence: Synthetic oligonucleotide
  Target: LAMA2; (+) strand; PAM type: YTN; PAM sequence: TTT
ttaaagctaaatagtatttc

SEQ ID NO: 345230 - DNA, 20 bp, Artificial Sequence
  Description of Artificial Sequence: Synthetic oligonucleotide
  Target: LAMA2; (+) strand; PAM type: YTN; PAM sequence: TTT
taaagctaaatagtatttca

SEQ ID NO: 345231 - DNA, 20 bp, Artificial Sequence
  Description of Artificial Sequence: Synthetic oligonucleotide
  Target: LAMA2; (+) strand; PAM type: YTN; PAM sequence: TTT
aaagctaaatagtatttcat

SEQ ID NO: 345232 - DNA, 20 bp, Artificial Sequence
  Description of Artificial Sequence: Synthetic oligonucleotide
  Target: LAMA2; (+) strand; PAM type: YTN; PAM sequence: TTA
aagctaaatagtatttcatc

SEQ ID NO: 345233 - DNA, 20 bp, Artificial Sequence
  Description of Artificial Sequence: Synthetic oligonucleotide
  Target: LAMA2; (+) strand; PAM type: YTN; PAM sequence: CTA
aatagtatttcatcgtgtat

SEQ ID NO: 345234 - DNA, 20 bp, Artificial Sequence
  Description of Artificial Sequence: Synthetic oligonucleotide
  Target: LAMA2; (+) strand; PAM type: YTN; PAM sequence: TTT
catcgtgtatgtgtacgacg

SEQ ID NO: 345235 - DNA, 20 bp, Artificial Sequence
  Description of Artificial Sequence: Synthetic oligonucleotide
  Target: LAMA2; (+) strand; PAM type: YTN; PAM sequence: TTC
atcgtgtatgtgtacgacgt

SEQ ID NO: 345236 - DNA, 20 bp, Artificial Sequence
  Description of Artificial Sequence: Synthetic oligonucleotide
  Target: LAMA2; (+) strand; PAM type: YTN; PAM sequence: TTT
tctttatccattcatctgtt

SEQ ID NO: 345237 - DNA, 20 bp, Artificial Sequence
  Description of Artificial Sequence: Synthetic oligonucleotide
  Target: LAMA2; (+) strand; PAM type: YTN; PAM sequence: TTT
ctttatccattcatctgttg

SEQ ID NO: 345238 - DNA, 20 bp, Artificial Sequence
  Description of Artificial Sequence: Synthetic oligonucleotide
  Target: LAMA2; (+) strand; PAM type: YTN; PAM sequence: TTC
tttatccattcatctgttga

SEQ ID NO: 345239 - DNA, 20 bp, Artificial Sequence
  Description of Artificial Sequence: Synthetic oligonucleotide
  Target: LAMA2; (+) strand; PAM type: YTN; PAM sequence: CTT
tatccattcatctgttgatg

SEQ ID NO: 345240 - DNA, 20 bp, Artificial Sequence
  Description of Artificial Sequence: Synthetic oligonucleotide
  Target: LAMA2; (+) strand; PAM type: YTN; PAM sequence: TTT
atccattcatctgttgatgg

SEQ ID NO: 345241 - DNA, 20 bp, Artificial Sequence
  Description of Artificial Sequence: Synthetic oligonucleotide
  Target: LAMA2; (+) strand; PAM type: YTN; PAM sequence: TTA
tccattcatctgttgatgga

SEQ ID NO: 345242 - DNA, 20 bp, Artificial Sequence
  Description of Artificial Sequence: Synthetic oligonucleotide
  Target: LAMA2; (+) strand; PAM type: YTN; PAM sequence: TTC
atctgttgatggacaggttg

SEQ ID NO: 345243 - DNA, 20 bp, Artificial Sequence
  Description of Artificial Sequence: Synthetic oligonucleotide
  Target: LAMA2; (+) strand; PAM type: YTN; PAM sequence: CTG
ttgatggacaggttgatttc

SEQ ID NO: 345244 - DNA, 20 bp, Artificial Sequence
  Description of Artificial Sequence: Synthetic oligonucleotide
  Target: LAMA2; (+) strand; PAM type: YTN; PAM sequence: TTG
atggacaggttgatttcaaa

SEQ ID NO: 345245 - DNA, 20 bp, Artificial Sequence
  Description of Artificial Sequence: Synthetic oligonucleotide
  Target: LAMA2; (+) strand; PAM type: YTN; PAM sequence: TTG
atttcaaaatgtggctaatg

SEQ ID NO: 345246 - DNA, 20 bp, Artificial Sequence
  Description of Artificial Sequence: Synthetic oligonucleotide
  Target: LAMA2; (+) strand; PAM type: YTN; PAM sequence: TTT
caaaatgtggctaatgtgaa

SEQ ID NO: 345247 - DNA, 20 bp, Artificial Sequence
  Description of Artificial Sequence: Synthetic oligonucleotide
  Target: LAMA2; (+) strand; PAM type: YTN; PAM sequence: TTC
aaaatgtggctaatgtgaag

SEQ ID NO: 345248 - DNA, 20 bp, Artificial Sequence
  Description of Artificial Sequence: Synthetic oligonucleotide
  Target: LAMA2; (+) strand; PAM type: YTN; PAM sequence: CTA
atgtgaagtgctgcagtgaa

SEQ ID NO: 345249 - DNA, 20 bp, Artificial Sequence
  Description of Artificial Sequence: Synthetic oligonucleotide
  Target: LAMA2; (+) strand; PAM type: YTN; PAM sequence: CTG
cagtgaacatgggagtgcag

SEQ ID NO: 345250 - DNA, 20 bp, Artificial Sequence
  Description of Artificial Sequence: Synthetic oligonucleotide
  Target: LAMA2; (+) strand; PAM type: YTN; PAM sequence: CTT
ttcggcaaaactgatttcac

SEQ ID NO: 345251 - DNA, 20 bp, Artificial Sequence
  Description of Artificial Sequence: Synthetic oligonucleotide
  Target: LAMA2; (+) strand; PAM type: YTN; PAM sequence: TTT
tcggcaaaactgatttcaca

SEQ ID NO: 345252 - DNA, 20 bp, Artificial Sequence
  Description of Artificial Sequence: Synthetic oligonucleotide
  Target: LAMA2; (+) strand; PAM type: YTN; PAM sequence: TTT
cggcaaaactgatttcacat

SEQ ID NO: 345253 - DNA, 20 bp, Artificial Sequence
  Description of Artificial Sequence: Synthetic oligonucleotide
  Target: LAMA2; (+) strand; PAM type: YTN; PAM sequence: TTC
ggcaaaactgatttcacatc

SEQ ID NO: 345254 - DNA, 20 bp, Artificial Sequence
  Description of Artificial Sequence: Synthetic oligonucleotide
  Target: LAMA2; (+) strand; PAM type: YTN; PAM sequence: CTG
atttcacatcttttgggtaa

SEQ ID NO: 345255 - DNA, 20 bp, Artificial Sequence
  Description of Artificial Sequence: Synthetic oligonucleotide
  Target: LAMA2; (+) strand; PAM type: YTN; PAM sequence: TTT
cacatcttttgggtaaatac

SEQ ID NO: 345256 - DNA, 20 bp, Artificial Sequence
  Description of Artificial Sequence: Synthetic oligonucleotide
  Target: LAMA2; (+) strand; PAM type: YTN; PAM sequence: TTC
acatcttttgggtaaatacc

SEQ ID NO: 345257 - DNA, 20 bp, Artificial Sequence
  Description of Artificial Sequence: Synthetic oligonucleotide
  Target: LAMA2; (+) strand; PAM type: YTN; PAM sequence: CTT
ttgggtaaatacctggaagt

SEQ ID NO: 345258 - DNA, 20 bp, Artificial Sequence
  Description of Artificial Sequence: Synthetic oligonucleotide
  Target: LAMA2; (+) strand; PAM type: YTN; PAM sequence: TTT
tgggtaaatacctggaagtg

SEQ ID NO: 345259 - DNA, 20 bp, Artificial Sequence
  Description of Artificial Sequence: Synthetic oligonucleotide
  Target: LAMA2; (+) strand; PAM type: YTN; PAM sequence: TTT
gggtaaatacctggaagtga

SEQ ID NO: 345260 - DNA, 20 bp, Artificial Sequence
  Description of Artificial Sequence: Synthetic oligonucleotide
  Target: LAMA2; (+) strand; PAM type: YTN; PAM sequence: TTG
ggtaaatacctggaagtgag

SEQ ID NO: 345261 - DNA, 20 bp, Artificial Sequence
  Description of Artificial Sequence: Synthetic oligonucleotide
  Target: LAMA2; (+) strand; PAM type: YTN; PAM sequence: CTG
gaagtgagattgctagatcg

SEQ ID NO: 345262 - DNA, 20 bp, Artificial Sequence
  Description of Artificial Sequence: Synthetic oligonucleotide
  Target: LAMA2; (+) strand; PAM type: YTN; PAM sequence: TTG
ctagatcgcatcgtgattct

SEQ ID NO: 345263 - DNA, 20 bp, Artificial Sequence
  Description of Artificial Sequence: Synthetic oligonucleotide
  Target: LAMA2; (+) strand; PAM type: YTN; PAM sequence: CTA
gatcgcatcgtgattctact

SEQ ID NO: 345264 - DNA, 20 bp, Artificial Sequence
  Description of Artificial Sequence: Synthetic oligonucleotide
  Target: LAMA2; (+) strand; PAM type: YTN; PAM sequence: TTC
tacttttagttgttttggaa

SEQ ID NO: 345265 - DNA, 20 bp, Artificial Sequence
  Description of Artificial Sequence: Synthetic oligonucleotide
  Target: LAMA2; (+) strand; PAM type: YTN; PAM sequence: CTA
cttttagttgttttggaaaa

SEQ ID NO: 345266 - DNA, 20 bp, Artificial Sequence
  Description of Artificial Sequence: Synthetic oligonucleotide
  Target: LAMA2; (+) strand; PAM type: YTN; PAM sequence: CTT
ttagttgttttggaaaactc

SEQ ID NO: 345267 - DNA, 20 bp, Artificial Sequence
  Description of Artificial Sequence: Synthetic oligonucleotide
  Target: LAMA2; (+) strand; PAM type: YTN; PAM sequence: TTT
tagttgttttggaaaactcc

SEQ ID NO: 345268 - DNA, 20 bp, Artificial Sequence
  Description of Artificial Sequence: Synthetic oligonucleotide
  Target: LAMA2; (+) strand; PAM type: YTN; PAM sequence: TTT
agttgttttggaaaactcca

SEQ ID NO: 345269 - DNA, 20 bp, Artificial Sequence
  Description of Artificial Sequence: Synthetic oligonucleotide
  Target: LAMA2; (+) strand; PAM type: YTN; PAM sequence: TTA
gttgttttggaaaactccat

SEQ ID NO: 345270 - DNA, 20 bp, Artificial Sequence
  Description of Artificial Sequence: Synthetic oligonucleotide
  Target: LAMA2; (+) strand; PAM type: YTN; PAM sequence: TTG
ttttggaaaactccatgtag

SEQ ID NO: 345271 - DNA, 20 bp, Artificial Sequence
  Description of Artificial Sequence: Synthetic oligonucleotide
  Target: LAMA2; (+) strand; PAM type: YTN; PAM sequence: TTT
tggaaaactccatgtagttt

SEQ ID NO: 345272 - DNA, 20 bp, Artificial Sequence
  Description of Artificial Sequence: Synthetic oligonucleotide
  Target: LAMA2; (+) strand; PAM type: YTN; PAM sequence: TTT
ggaaaactccatgtagtttt

SEQ ID NO: 345273 - DNA, 20 bp, Artificial Sequence
  Description of Artificial Sequence: Synthetic oligonucleotide
  Target: LAMA2; (+) strand; PAM type: YTN; PAM sequence: TTG
gaaaactccatgtagttttc

SEQ ID NO: 345274 - DNA, 20 bp, Artificial Sequence
  Description of Artificial Sequence: Synthetic oligonucleotide
  Target: LAMA2; (+) strand; PAM type: YTN; PAM sequence: CTC
catgtagttttccataatgg

SEQ ID NO: 345275 - DNA, 20 bp, Artificial Sequence
  Description of Artificial Sequence: Synthetic oligonucleotide
  Target: LAMA2; (+) strand; PAM type: YTN; PAM sequence: TTT
tccataatggctgtactaat

SEQ ID NO: 345276 - DNA, 20 bp, Artificial Sequence
  Description of Artificial Sequence: Synthetic oligonucleotide
  Target: LAMA2; (+) strand; PAM type: YTN; PAM sequence: TTT
ccataatggctgtactaatt

SEQ ID NO: 345277 - DNA, 20 bp, Artificial Sequence
  Description of Artificial Sequence: Synthetic oligonucleotide
  Target: LAMA2; (+) strand; PAM type: YTN; PAM sequence: TTC
cataatggctgtactaattt

SEQ ID NO: 345278 - DNA, 20 bp, Artificial Sequence
  Description of Artificial Sequence: Synthetic oligonucleotide
  Target: LAMA2; (+) strand; PAM type: YTN; PAM sequence: CTG
tactaatttacattcccacc

SEQ ID NO: 345279 - DNA, 20 bp, Artificial Sequence
  Description of Artificial Sequence: Synthetic oligonucleotide
  Target: LAMA2; (+) strand; PAM type: YTN; PAM sequence: CTA
atttacattcccaccaacag

SEQ ID NO: 345280 - DNA, 20 bp, Artificial Sequence
  Description of Artificial Sequence: Synthetic oligonucleotide
  Target: LAMA2; (+) strand; PAM type: YTN; PAM sequence: TTT
acattcccaccaacagtgta

SEQ ID NO: 345281 - DNA, 20 bp, Artificial Sequence
  Description of Artificial Sequence: Synthetic oligonucleotide
  Target: LAMA2; (+) strand; PAM type: YTN; PAM sequence: TTA
cattcccaccaacagtgtac

SEQ ID NO: 345282 - DNA, 20 bp, Artificial Sequence
  Description of Artificial Sequence: Synthetic oligonucleotide
  Target: LAMA2; (+) strand; PAM type: YTN; PAM sequence: TTC
ccaccaacagtgtacaagga

SEQ ID NO: 345283 - DNA, 20 bp, Artificial Sequence
  Description of Artificial Sequence: Synthetic oligonucleotide
  Target: LAMA2; (+) strand; PAM type: YTN; PAM sequence: TTC
tgttttttccatattctcgc

SEQ ID NO: 345284 - DNA, 20 bp, Artificial Sequence
  Description of Artificial Sequence: Synthetic oligonucleotide
  Target: LAMA2; (+) strand; PAM type: YTN; PAM sequence: CTG
ttttttccatattctcgcca

SEQ ID NO: 345285 - DNA, 20 bp, Artificial Sequence
  Description of Artificial Sequence: Synthetic oligonucleotide
  Target: LAMA2; (+) strand; PAM type: YTN; PAM sequence: TTT
tttccatattctcgccaaca

SEQ ID NO: 345286 - DNA, 20 bp, Artificial Sequence
  Description of Artificial Sequence: Synthetic oligonucleotide
  Target: LAMA2; (+) strand; PAM type: YTN; PAM sequence: TTT
ttccatattctcgccaacat

SEQ ID NO: 345287 - DNA, 20 bp, Artificial Sequence
  Description of Artificial Sequence: Synthetic oligonucleotide
  Target: LAMA2; (+) strand; PAM type: YTN; PAM sequence: TTT
tccatattctcgccaacatt

SEQ ID NO: 345288 - DNA, 20 bp, Artificial Sequence
  Description of Artificial Sequence: Synthetic oligonucleotide
  Target: LAMA2; (+) strand; PAM type: YTN; PAM sequence: TTT
ccatattctcgccaacattt

SEQ ID NO: 345289 - DNA, 20 bp, Artificial Sequence
  Description of Artificial Sequence: Synthetic oligonucleotide
  Target: LAMA2; (+) strand; PAM type: YTN; PAM sequence: TTC
catattctcgccaacatttg

SEQ ID NO: 345290 - DNA, 20 bp, Artificial Sequence
  Description of Artificial Sequence: Synthetic oligonucleotide
  Target: LAMA2; (+) strand; PAM type: YTN; PAM sequence: TTC
tcgccaacatttgttatctt

SEQ ID NO: 345291 - DNA, 20 bp, Artificial Sequence
  Description of Artificial Sequence: Synthetic oligonucleotide
  Target: LAMA2; (+) strand; PAM type: YTN; PAM sequence: CTC
gccaacatttgttatcttct

SEQ ID NO: 345292 - DNA, 20 bp, Artificial Sequence
  Description of Artificial Sequence: Synthetic oligonucleotide
  Target: LAMA2; (+) strand; PAM type: YTN; PAM sequence: TTT
gttatcttctttttgatatt

SEQ ID NO: 345293 - DNA, 20 bp, Artificial Sequence
  Description of Artificial Sequence: Synthetic oligonucleotide
  Target: LAMA2; (+) strand; PAM type: YTN; PAM sequence: TTG
ttatcttctttttgatatta

SEQ ID NO: 345294 - DNA, 20 bp, Artificial Sequence
  Description of Artificial Sequence: Synthetic oligonucleotide
  Target: LAMA2; (+) strand; PAM type: YTN; PAM sequence: TTA
tcttctttttgatattacct

SEQ ID NO: 345295 - DNA, 20 bp, Artificial Sequence
  Description of Artificial Sequence: Synthetic oligonucleotide
  Target: LAMA2; (+) strand; PAM type: YTN; PAM sequence: CTT
ctttttgatattacctattc

SEQ ID NO: 345296 - DNA, 20 bp, Artificial Sequence
  Description of Artificial Sequence: Synthetic oligonucleotide
  Target: LAMA2; (+) strand; PAM type: YTN; PAM sequence: TTC
tttttgatattacctattct

SEQ ID NO: 345297 - DNA, 20 bp, Artificial Sequence
  Description of Artificial Sequence: Synthetic oligonucleotide
  Target: LAMA2; (+) strand; PAM type: YTN; PAM sequence: CTT
tttgatattacctattctga

SEQ ID NO: 345298 - DNA, 20 bp, Artificial Sequence
  Description of Artificial Sequence: Synthetic oligonucleotide
  Target: LAMA2; (+) strand; PAM type: YTN; PAM sequence: TTT
ttgatattacctattctgac

SEQ ID NO: 345299 - DNA, 20 bp, Artificial Sequence
  Description of Artificial Sequence: Synthetic oligonucleotide
  Target: LAMA2; (+) strand; PAM type: YTN; PAM sequence: TTT
tgatattacctattctgaca

SEQ ID NO: 345300 - DNA, 20 bp, Artificial Sequence
  Description of Artificial Sequence: Synthetic oligonucleotide
  Target: LAMA2; (+) strand; PAM type: YTN; PAM sequence: TTT
gatattacctattctgacag

SEQ ID NO: 345301 - DNA, 20 bp, Artificial Sequence
  Description of Artificial Sequence: Synthetic oligonucleotide
  Target: LAMA2; (+) strand; PAM type: YTN; PAM sequence: TTG
atattacctattctgacagg

SEQ ID NO: 345302 - DNA, 20 bp, Artificial Sequence
  Description of Artificial Sequence: Synthetic oligonucleotide
  Target: LAMA2; (+) strand; PAM type: YTN; PAM sequence: TTA
cctattctgacaggtgtgag

SEQ ID NO: 345303 - DNA, 20 bp, Artificial Sequence
  Description of Artificial Sequence: Synthetic oligonucleotide
  Target: LAMA2; (+) strand; PAM type: YTN; PAM sequence: CTA
ttctgacaggtgtgagatga

SEQ ID NO: 345304 - DNA, 20 bp, Artificial Sequence
  Description of Artificial Sequence: Synthetic oligonucleotide
  Target: LAMA2; (+) strand; PAM type: YTN; PAM sequence: TTC
tgacaggtgtgagatgatat

SEQ ID NO: 345305 - DNA, 20 bp, Artificial Sequence
  Description of Artificial Sequence: Synthetic oligonucleotide
  Target: LAMA2; (+) strand; PAM type: YTN; PAM sequence: CTG
acaggtgtgagatgatatct

SEQ ID NO: 345306 - DNA, 20 bp, Artificial Sequence
  Description of Artificial Sequence: Synthetic oligonucleotide
  Target: LAMA2; (+) strand; PAM type: YTN; PAM sequence: CTC
attgtaattttaatttgcat

SEQ ID NO: 345307 - DNA, 20 bp, Artificial Sequence
  Description of Artificial Sequence: Synthetic oligonucleotide
  Target: LAMA2; (+) strand; PAM type: YTN; PAM sequence: TTG
taattttaatttgcatttcc

SEQ ID NO: 345308 - DNA, 20 bp, Artificial Sequence
  Description of Artificial Sequence: Synthetic oligonucleotide
  Target: LAMA2; (+) strand; PAM type: YTN; PAM sequence: TTT
taatttgcatttccctaatg

SEQ ID NO: 345309 - DNA, 20 bp, Artificial Sequence
  Description of Artificial Sequence: Synthetic oligonucleotide
  Target: LAMA2; (+) strand; PAM type: YTN; PAM sequence: TTT
aatttgcatttccctaatga

SEQ ID NO: 345310 - DNA, 20 bp, Artificial Sequence
  Description of Artificial Sequence: Synthetic oligonucleotide
  Target: LAMA2; (+) strand; PAM type: YTN; PAM sequence: TTA
atttgcatttccctaatgat

SEQ ID NO: 345311 - DNA, 20 bp, Artificial Sequence
  Description of Artificial Sequence: Synthetic oligonucleotide
  Target: LAMA2; (+) strand; PAM type: YTN; PAM sequence: TTT
gcatttccctaatgattagt

SEQ ID NO: 345312 - DNA, 20 bp, Artificial Sequence
  Description of Artificial Sequence: Synthetic oligonucleotide
  Target: LAMA2; (+) strand; PAM type: YTN; PAM sequence: TTG
catttccctaatgattagtg

SEQ ID NO: 345313 - DNA, 20 bp, Artificial Sequence
  Description of Artificial Sequence: Synthetic oligonucleotide
  Target: LAMA2; (+) strand; PAM type: YTN; PAM sequence: TTT
ccctaatgattagtgatttt

SEQ ID NO: 345314 - DNA, 20 bp, Artificial Sequence
  Description of Artificial Sequence: Synthetic oligonucleotide
  Target: LAMA2; (+) strand; PAM type: YTN; PAM sequence: TTC
cctaatgattagtgattttt

SEQ ID NO: 345315 - DNA, 20 bp, Artificial Sequence
  Description of Artificial Sequence: Synthetic oligonucleotide
  Target: LAMA2; (+) strand; PAM type: YTN; PAM sequence: CTA
atgattagtgattttttcat

SEQ ID NO: 345316 - DNA, 20 bp, Artificial Sequence
  Description of Artificial Sequence: Synthetic oligonucleotide
  Target: LAMA2; (+) strand; PAM type: YTN; PAM sequence: TTA
gtgattttttcatttatctc

SEQ ID NO: 345317 - DNA, 20 bp, Artificial Sequence
  Description of Artificial Sequence: Synthetic oligonucleotide
  Target: LAMA2; (+) strand; PAM type: YTN; PAM sequence: TTT
tttcatttatctcttggcca

SEQ ID NO: 345318 - DNA, 20 bp, Artificial Sequence
  Description of Artificial Sequence: Synthetic oligonucleotide
  Target: LAMA2; (+) strand; PAM type: YTN; PAM sequence: TTT
ttcatttatctcttggccat

SEQ ID NO: 345319 - DNA, 20 bp, Artificial Sequence
  Description of Artificial Sequence: Synthetic oligonucleotide
  Target: LAMA2; (+) strand; PAM type: YTN; PAM sequence: TTT
tcatttatctcttggccatt

SEQ ID NO: 345320 - DNA, 20 bp, Artificial Sequence
  Description of Artificial Sequence: Synthetic oligonucleotide
  Target: LAMA2; (+) strand; PAM type: YTN; PAM sequence: TTT
catttatctcttggccattt

SEQ ID NO: 345321 - DNA, 20 bp, Artificial Sequence
  Description of Artificial Sequence: Synthetic oligonucleotide
  Target: LAMA2; (+) strand; PAM type: YTN; PAM sequence: TTC
atttatctcttggccatttg

SEQ ID NO: 345322 - DNA, 20 bp, Artificial Sequence
  Description of Artificial Sequence: Synthetic oligonucleotide
  Target: LAMA2; (+) strand; PAM type: YTN; PAM sequence: TTT
atctcttggccatttgttag

SEQ ID NO: 345323 - DNA, 20 bp, Artificial Sequence
  Description of Artificial Sequence: Synthetic oligonucleotide
  Target: LAMA2; (+) strand; PAM type: YTN; PAM sequence: TTA
tctcttggccatttgttagt

SEQ ID NO: 345324 - DNA, 20 bp, Artificial Sequence
  Description of Artificial Sequence: Synthetic oligonucleotide
  Target: LAMA2; (+) strand; PAM type: YTN; PAM sequence: CTC
ttggccatttgttagtcttc

SEQ ID NO: 345325 - DNA, 20 bp, Artificial Sequence
  Description of Artificial Sequence: Synthetic oligonucleotide
  Target: LAMA2; (+) strand; PAM type: YTN; PAM sequence: CTT
ggccatttgttagtcttctt

SEQ ID NO: 345326 - DNA, 20 bp, Artificial Sequence
  Description of Artificial Sequence: Synthetic oligonucleotide
  Target: LAMA2; (+) strand; PAM type: YTN; PAM sequence: TTG
gccatttgttagtcttcttt

SEQ ID NO: 345327 - DNA, 20 bp, Artificial Sequence
  Description of Artificial Sequence: Synthetic oligonucleotide
  Target: LAMA2; (+) strand; PAM type: YTN; PAM sequence: TTT
gttagtcttcttttgagcaa

SEQ ID NO: 345328 - DNA, 20 bp, Artificial Sequence
  Description of Artificial Sequence: Synthetic oligonucleotide
  Target: LAMA2; (+) strand; PAM type: YTN; PAM sequence: TTG
ttagtcttcttttgagcaat

SEQ ID NO: 345329 - DNA, 20 bp, Artificial Sequence
  Description of Artificial Sequence: Synthetic oligonucleotide
  Target: LAMA2; (+) strand; PAM type: YTN; PAM sequence: TTA
gtcttcttttgagcaatgtc

SEQ ID NO: 345330 - DNA, 20 bp, Artificial Sequence
  Description of Artificial Sequence: Synthetic oligonucleotide
  Target: LAMA2; (+) strand; PAM type: YTN; PAM sequence: CTT
cttttgagcaatgtctattc

SEQ ID NO: 345331 - DNA, 20 bp, Artificial Sequence
  Description of Artificial Sequence: Synthetic oligonucleotide
  Target: LAMA2; (+) strand; PAM type: YTN; PAM sequence: TTC
ttttgagcaatgtctattca

SEQ ID NO: 345332 - DNA, 20 bp, Artificial Sequence
  Description of Artificial Sequence: Synthetic oligonucleotide
  Target: LAMA2; (+) strand; PAM type: YTN; PAM sequence: CTT
ttgagcaatgtctattcagc

SEQ ID NO: 345333 - DNA, 20 bp, Artificial Sequence
  Description of Artificial Sequence: Synthetic oligonucleotide
  Target: LAMA2; (+) strand; PAM type: YTN; PAM sequence: TTT
tgagcaatgtctattcagct

SEQ ID NO: 345334 - DNA, 20 bp, Artificial Sequence
  Description of Artificial Sequence: Synthetic oligonucleotide
  Target: LAMA2; (+) strand; PAM type: YTN; PAM sequence: TTT
gagcaatgtctattcagctt

SEQ ID NO: 345335 - DNA, 20 bp, Artificial Sequence
  Description of Artificial Sequence: Synthetic oligonucleotide
  Target: LAMA2; (+) strand; PAM type: YTN; PAM sequence: TTG
agcaatgtctattcagcttc

SEQ ID NO: 345336 - DNA, 20 bp, Artificial Sequence
  Description of Artificial Sequence: Synthetic oligonucleotide
  Target: LAMA2; (+) strand; PAM type: YTN; PAM sequence: CTA
ttcagcttccttgctcattt

SEQ ID NO: 345337 - DNA, 20 bp, Artificial Sequence
  Description of Artificial Sequence: Synthetic oligonucleotide
  Target: LAMA2; (+) strand; PAM type: YTN; PAM sequence: TTC
agcttccttgctcattttta

SEQ ID NO: 345338 - DNA, 20 bp, Artificial Sequence
  Description of Artificial Sequence: Synthetic oligonucleotide
  Target: LAMA2; (+) strand; PAM type: YTN; PAM sequence: CTT
ccttgctcatttttaatttt

SEQ ID NO: 345339 - DNA, 20 bp, Artificial Sequence
  Description of Artificial Sequence: Synthetic oligonucleotide
  Target: LAMA2; (+) strand; PAM type: YTN; PAM sequence: TTC
cttgctcatttttaattttt

SEQ ID NO: 345340 - DNA, 20 bp, Artificial Sequence
  Description of Artificial Sequence: Synthetic oligonucleotide
  Target: LAMA2; (+) strand; PAM type: YTN; PAM sequence: CTT
gctcatttttaatttttttt

SEQ ID NO: 345341 - DNA, 20 bp, Artificial Sequence
  Description of Artificial Sequence: Synthetic oligonucleotide
  Target: LAMA2; (+) strand; PAM type: YTN; PAM sequence: TTG
ctcatttttaattttttttt

SEQ ID NO: 345342 - DNA, 20 bp, Artificial Sequence
  Description of Artificial Sequence: Synthetic oligonucleotide
  Target: LAMA2; (+) strand; PAM type: YTN; PAM sequence: CTC
atttttaatttttttttctt

SEQ ID NO: 345343 - DNA, 20 bp, Artificial Sequence
  Description of Artificial Sequence: Synthetic oligonucleotide
  Target: LAMA2; (+) strand; PAM type: YTN; PAM sequence: TTT
ttaatttttttttcttcctc

SEQ ID NO: 345344 - DNA, 20 bp, Artificial Sequence
  Description of Artificial Sequence: Synthetic oligonucleotide
  Target: LAMA2; (+) strand; PAM type: YTN; PAM sequence: TTT
taatttttttttcttcctct

SEQ ID NO: 345345 - DNA, 20 bp, Artificial Sequence
  Description of Artificial Sequence: Synthetic oligonucleotide
  Target: LAMA2; (+) strand; PAM type: YTN; PAM sequence: TTT
aatttttttttcttcctctt

SEQ ID NO: 345346 - DNA, 20 bp, Artificial Sequence
  Description of Artificial Sequence: Synthetic oligonucleotide
  Target: LAMA2; (+) strand; PAM type: YTN; PAM sequence: TTA
atttttttttcttcctctta

SEQ ID NO: 345347 - DNA, 20 bp, Artificial Sequence
  Description of Artificial Sequence: Synthetic oligonucleotide
  Target: LAMA2; (+) strand; PAM type: YTN; PAM sequence: TTT
ttttttcttcctcttaagtt

SEQ ID NO: 345348 - DNA, 20 bp, Artificial Sequence
  Description of Artificial Sequence: Synthetic oligonucleotide
  Target: LAMA2; (+) strand; PAM type: YTN; PAM sequence: TTT
tttttcttcctcttaagttg

SEQ ID NO: 345349 - DNA, 20 bp, Artificial Sequence
  Description of Artificial Sequence: Synthetic oligonucleotide
  Target: LAMA2; (+) strand; PAM type: YTN; PAM sequence: TTT
ttttcttcctcttaagttga

SEQ ID NO: 345350 - DNA, 20 bp, Artificial Sequence
  Description of Artificial Sequence: Synthetic oligonucleotide
  Target: LAMA2; (+) strand; PAM type: YTN; PAM sequence: TTT
tttcttcctcttaagttgat

SEQ ID NO: 345351 - DNA, 20 bp, Artificial Sequence
  Description of Artificial Sequence: Synthetic oligonucleotide
  Target: LAMA2; (+) strand; PAM type: YTN; PAM sequence: TTT
ttcttcctcttaagttgatg

SEQ ID NO: 345352 - DNA, 20 bp, Artificial Sequence
  Description of Artificial Sequence: Synthetic oligonucleotide
  Target: LAMA2; (+) strand; PAM type: YTN; PAM sequence: TTT
tcttcctcttaagttgatgg

SEQ ID NO: 345353 - DNA, 20 bp, Artificial Sequence
  Description of Artificial Sequence: Synthetic oligonucleotide
  Target: LAMA2; (+) strand; PAM type: YTN; PAM sequence: TTT
cttcctcttaagttgatgga

SEQ ID NO: 345354 - DNA, 20 bp, Artificial Sequence
  Description of Artificial Sequence: Synthetic oligonucleotide
  Target: LAMA2; (+) strand; PAM type: YTN; PAM sequence: TTC
ttcctcttaagttgatggaa

SEQ ID NO: 345355 - DNA, 20 bp, Artificial Sequence
  Description of Artificial Sequence: Synthetic oligonucleotide
  Target: LAMA2; (+) strand; PAM type: YTN; PAM sequence: CTT
cctcttaagttgatggaact

SEQ ID NO: 345356 - DNA, 20 bp, Artificial Sequence
  Description of Artificial Sequence: Synthetic oligonucleotide
  Target: LAMA2; (+) strand; PAM type: YTN; PAM sequence: TTC
ctcttaagttgatggaactc

SEQ ID NO: 345357 - DNA, 20 bp, Artificial Sequence
  Description of Artificial Sequence: Synthetic oligonucleotide
  Target: LAMA2; (+) strand; PAM type: YTN; PAM sequence: CTC
ttaagttgatggaactcttt

SEQ ID NO: 345358 - DNA, 20 bp, Artificial Sequence
  Description of Artificial Sequence: Synthetic oligonucleotide
  Target: LAMA2; (+) strand; PAM type: YTN; PAM sequence: CTT
aagttgatggaactctttat

SEQ ID NO: 345359 - DNA, 20 bp, Artificial Sequence
  Description of Artificial Sequence: Synthetic oligonucleotide
  Target: LAMA2; (+) strand; PAM type: YTN; PAM sequence: TTA
agttgatggaactctttata

SEQ ID NO: 345360 - DNA, 20 bp, Artificial Sequence
  Description of Artificial Sequence: Synthetic oligonucleotide
  Target: LAMA2; (+) strand; PAM type: YTN; PAM sequence: TTG
atggaactctttatatattt

SEQ ID NO: 345361 - DNA, 20 bp, Artificial Sequence
  Description of Artificial Sequence: Synthetic oligonucleotide
  Target: LAMA2; (+) strand; PAM type: YTN; PAM sequence: CTC
tttatatatttgtggatatt

SEQ ID NO: 345362 - DNA, 20 bp, Artificial Sequence
  Description of Artificial Sequence: Synthetic oligonucleotide
  Target: LAMA2; (+) strand; PAM type: YTN; PAM sequence: CTT
tatatatttgtggatattaa

SEQ ID NO: 345363 - DNA, 20 bp, Artificial Sequence
  Description of Artificial Sequence: Synthetic oligonucleotide
  Target: LAMA2; (+) strand; PAM type: YTN; PAM sequence: TTT
atatatttgtggatattaac

SEQ ID NO: 345364 - DNA, 20 bp, Artificial Sequence
  Description of Artificial Sequence: Synthetic oligonucleotide
  Target: LAMA2; (+) strand; PAM type: YTN; PAM sequence: TTA
tatatttgtggatattaact

SEQ ID NO: 345365 - DNA, 20 bp, Artificial Sequence
  Description of Artificial Sequence: Synthetic oligonucleotide
  Target: LAMA2; (+) strand; PAM type: YTN; PAM sequence: TTT
gtggatattaactttttatt

SEQ ID NO: 345366 - DNA, 20 bp, Artificial Sequence
  Description of Artificial Sequence: Synthetic oligonucleotide
  Target: LAMA2; (+) strand; PAM type: YTN; PAM sequence: TTG
tggatattaactttttattg

SEQ ID NO: 345367 - DNA, 20 bp, Artificial Sequence
  Description of Artificial Sequence: Synthetic oligonucleotide
  Target: LAMA2; (+) strand; PAM type: YTN; PAM sequence: TTA
actttttattgaatatatgg

SEQ ID NO: 345368 - DNA, 20 bp, Artificial Sequence
  Description of Artificial Sequence: Synthetic oligonucleotide
  Target: LAMA2; (+) strand; PAM type: YTN; PAM sequence: CTT
tttattgaatatatggctta

SEQ ID NO: 345369 - DNA, 20 bp, Artificial Sequence
  Description of Artificial Sequence: Synthetic oligonucleotide
  Target: LAMA2; (+) strand; PAM type: YTN; PAM sequence: TTT
ttattgaatatatggcttac

SEQ ID NO: 345370 - DNA, 20 bp, Artificial Sequence
  Description of Artificial Sequence: Synthetic oligonucleotide
  Target: LAMA2; (+) strand; PAM type: YTN; PAM sequence: TTT
tattgaatatatggcttaca

SEQ ID NO: 345371 - DNA, 20 bp, Artificial Sequence
  Description of Artificial Sequence: Synthetic oligonucleotide
  Target: LAMA2; (+) strand; PAM type: YTN; PAM sequence: TTT
attgaatatatggcttacaa

SEQ ID NO: 345372 - DNA, 20 bp, Artificial Sequence
  Description of Artificial Sequence: Synthetic oligonucleotide
  Target: LAMA2; (+) strand; PAM type: YTN; PAM sequence: TTA
ttgaatatatggcttacaaa

SEQ ID NO: 345373 - DNA, 20 bp, Artificial Sequence
  Description of Artificial Sequence: Synthetic oligonucleotide
  Target: LAMA2; (+) strand; PAM type: YTN; PAM sequence: TTG
aatatatggcttacaaatat

SEQ ID NO: 345374 - DNA, 20 bp, Artificial Sequence
  Description of Artificial Sequence: Synthetic oligonucleotide
  Target: LAMA2; (+) strand; PAM type: YTN; PAM sequence: CTT
acaaatattttctccacatt

SEQ ID NO: 345375 - DNA, 20 bp, Artificial Sequence
  Description of Artificial Sequence: Synthetic oligonucleotide
  Target: LAMA2; (+) strand; PAM type: YTN; PAM sequence: TTA
caaatattttctccacattc

SEQ ID NO: 345376 - DNA, 20 bp, Artificial Sequence
  Description of Artificial Sequence: Synthetic oligonucleotide
  Target: LAMA2; (+) strand; PAM type: YTN; PAM sequence: TTT
tctccacattcatagtttgt

SEQ ID NO: 345377 - DNA, 20 bp, Artificial Sequence
  Description of Artificial Sequence: Synthetic oligonucleotide
  Target: LAMA2; (+) strand; PAM type: YTN; PAM sequence: TTT
ctccacattcatagtttgtc

SEQ ID NO: 345378 - DNA, 20 bp, Artificial Sequence
  Description of Artificial Sequence: Synthetic oligonucleotide
  Target: LAMA2; (+) strand; PAM type: YTN; PAM sequence: TTC
tccacattcatagtttgtct

SEQ ID NO: 345379 - DNA, 20 bp, Artificial Sequence
  Description of Artificial Sequence: Synthetic oligonucleotide
  Target: LAMA2; (+) strand; PAM type: YTN; PAM sequence: CTC
cacattcatagtttgtctct

SEQ ID NO: 345380 - DNA, 20 bp, Artificial Sequence
  Description of Artificial Sequence: Synthetic oligonucleotide
  Target: LAMA2; (+) strand; PAM type: YTN; PAM sequence: TTC
atagtttgtctcttcacatt

SEQ ID NO: 345381 - DNA, 20 bp, Artificial Sequence
  Description of Artificial Sequence: Synthetic oligonucleotide
  Target: LAMA2; (+) strand; PAM type: YTN; PAM sequence: TTT
gtctcttcacattgttgctt

SEQ ID NO: 345382 - DNA, 20 bp, Artificial Sequence
  Description of Artificial Sequence: Synthetic oligonucleotide
  Target: LAMA2; (+) strand; PAM type: YTN; PAM sequence: TTG
tctcttcacattgttgcttc

SEQ ID NO: 345383 - DNA, 20 bp, Artificial Sequence
  Description of Artificial Sequence: Synthetic oligonucleotide
  Target: LAMA2; (+) strand; PAM type: YTN; PAM sequence: CTC
ttcacattgttgcttccttt

SEQ ID NO: 345384 - DNA, 20 bp, Artificial Sequence
  Description of Artificial Sequence: Synthetic oligonucleotide
  Target: LAMA2; (+) strand; PAM type: YTN; PAM sequence: CTT
cacattgttgcttcctttgt

SEQ ID NO: 345385 - DNA, 20 bp, Artificial Sequence
  Description of Artificial Sequence: Synthetic oligonucleotide
  Target: LAMA2; (+) strand; PAM type: YTN; PAM sequence: TTC
acattgttgcttcctttgtt

SEQ ID NO: 345386 - DNA, 20 bp, Artificial Sequence
  Description of Artificial Sequence: Synthetic oligonucleotide
  Target: LAMA2; (+) strand; PAM type: YTN; PAM sequence: TTG
ttgcttcctttgttgtgcag

SEQ ID NO: 345387 - DNA, 20 bp, Artificial Sequence
  Description of Artificial Sequence: Synthetic oligonucleotide
  Target: LAMA2; (+) strand; PAM type: YTN; PAM sequence: TTG
cttcctttgttgtgcagaag

SEQ ID NO: 345388 - DNA, 20 bp, Artificial Sequence
  Description of Artificial Sequence: Synthetic oligonucleotide
  Target: LAMA2; (+) strand; PAM type: YTN; PAM sequence: CTT
cctttgttgtgcagaagctt

SEQ ID NO: 345389 - DNA, 20 bp, Artificial Sequence
  Description of Artificial Sequence: Synthetic oligonucleotide
  Target: LAMA2; (+) strand; PAM type: YTN; PAM sequence: TTC
ctttgttgtgcagaagcttt

SEQ ID NO: 345390 - DNA, 20 bp, Artificial Sequence
  Description of Artificial Sequence: Synthetic oligonucleotide
  Target: LAMA2; (+) strand; PAM type: YTN; PAM sequence: CTT
tgttgtgcagaagcttttta

SEQ ID NO: 345391 - DNA, 20 bp, Artificial Sequence
  Description of Artificial Sequence: Synthetic oligonucleotide
  Target: LAMA2; (+) strand; PAM type: YTN; PAM sequence: TTT
gttgtgcagaagctttttag

SEQ ID NO: 345392 - DNA, 20 bp, Artificial Sequence
  Description of Artificial Sequence: Synthetic oligonucleotide
  Target: LAMA2; (+) strand; PAM type: YTN; PAM sequence: TTG
ttgtgcagaagctttttagt

SEQ ID NO: 345393 - DNA, 20 bp, Artificial Sequence
  Description of Artificial Sequence: Synthetic oligonucleotide
  Target: LAMA2; (+) strand; PAM type: YTN; PAM sequence: TTG
tgcagaagctttttagtttg

SEQ ID NO: 345394 - DNA, 20 bp, Artificial Sequence
  Description of Artificial Sequence: Synthetic oligonucleotide
  Target: LAMA2; (+) strand; PAM type: YTN; PAM sequence: CTT
tttagtttgatatgacccaa

SEQ ID NO: 345395 - DNA, 20 bp, Artificial Sequence
  Description of Artificial Sequence: Synthetic oligonucleotide
  Target: LAMA2; (+) strand; PAM type: YTN; PAM sequence: TTT
ttagtttgatatgacccaat

SEQ ID NO: 345396 - DNA, 20 bp, Artificial Sequence
  Description of Artificial Sequence: Synthetic oligonucleotide
  Target: LAMA2; (+) strand; PAM type: YTN; PAM sequence: TTT
tagtttgatatgacccaatt

SEQ ID NO: 345397 - DNA, 20 bp, Artificial Sequence
  Description of Artificial Sequence: Synthetic oligonucleotide
  Target: LAMA2; (+) strand; PAM type: YTN; PAM sequence: TTT
agtttgatatgacccaattt

SEQ ID NO: 345398 - DNA, 20 bp, Artificial Sequence
  Description of Artificial Sequence: Synthetic oligonucleotide
  Target: LAMA2; (+) strand; PAM type: YTN; PAM sequence: TTA
gtttgatatgacccaatttg

SEQ ID NO: 345399 - DNA, 20 bp, Artificial Sequence
  Description of Artificial Sequence: Synthetic oligonucleotide
  Target: LAMA2; (+) strand; PAM type: YTN; PAM sequence: TTT
gatatgacccaatttgtttg

SEQ ID NO: 345400 - DNA, 20 bp, Artificial Sequence
  Description of Artificial Sequence: Synthetic oligonucleotide
  Target: LAMA2; (+) strand; PAM type: YTN; PAM sequence: TTG
atatgacccaatttgtttgt

SEQ ID NO: 345401 - DNA, 20 bp, Artificial Sequence
  Description of Artificial Sequence: Synthetic oligonucleotide
  Target: LAMA2; (+) strand; PAM type: YTN; PAM sequence: TTT
gtttgtttttacttttgtgg

SEQ ID NO: 345402 - DNA, 20 bp, Artificial Sequence
  Description of Artificial Sequence: Synthetic oligonucleotide
  Target: LAMA2; (+) strand; PAM type: YTN; PAM sequence: TTG
tttgtttttacttttgtggc

SEQ ID NO: 345403 - DNA, 20 bp, Artificial Sequence
  Description of Artificial Sequence: Synthetic oligonucleotide
  Target: LAMA2; (+) strand; PAM type: YTN; PAM sequence: TTT
gtttttacttttgtggccta

SEQ ID NO: 345404 - DNA, 20 bp, Artificial Sequence
  Description of Artificial Sequence: Synthetic oligonucleotide
  Target: LAMA2; (+) strand; PAM type: YTN; PAM sequence: TTG
tttttacttttgtggcctat

SEQ ID NO: 345405 - DNA, 20 bp, Artificial Sequence
  Description of Artificial Sequence: Synthetic oligonucleotide
  Target: LAMA2; (+) strand; PAM type: YTN; PAM sequence: TTT
ttacttttgtggcctatact

SEQ ID NO: 345406 - DNA, 20 bp, Artificial Sequence
  Description of Artificial Sequence: Synthetic oligonucleotide
  Target: LAMA2; (+) strand; PAM type: YTN; PAM sequence: TTT
tacttttgtggcctatactt

SEQ ID NO: 345407 - DNA, 20 bp, Artificial Sequence
  Description of Artificial Sequence: Synthetic oligonucleotide
  Target: LAMA2; (+) strand; PAM type: YTN; PAM sequence: TTT
acttttgtggcctatacttt

SEQ ID NO: 345408 - DNA, 20 bp, Artificial Sequence
  Description of Artificial Sequence: Synthetic oligonucleotide
  Target: LAMA2; (+) strand; PAM type: YTN; PAM sequence: TTA
cttttgtggcctatactttg

SEQ ID NO: 345409 - DNA, 20 bp, Artificial Sequence
  Description of Artificial Sequence: Synthetic oligonucleotide
  Target: LAMA2; (+) strand; PAM type: YTN; PAM sequence: CTT
ttgtggcctatactttgggg

SEQ ID NO: 345410 - DNA, 20 bp, Artificial Sequence
  Description of Artificial Sequence: Synthetic oligonucleotide
  Target: LAMA2; (+) strand; PAM type: YTN; PAM sequence: TTT
tgtggcctatactttggggg

SEQ ID NO: 345411 - DNA, 20 bp, Artificial Sequence
  Description of Artificial Sequence: Synthetic oligonucleotide
  Target: LAMA2; (+) strand; PAM type: YTN; PAM sequence: TTT
gtggcctatactttgggggt

SEQ ID NO: 345412 - DNA, 20 bp, Artificial Sequence
  Description of Artificial Sequence: Synthetic oligonucleotide
  Target: LAMA2; (+) strand; PAM type: YTN; PAM sequence: TTG
tggcctatactttgggggtc

SEQ ID NO: 345413 - DNA, 20 bp, Artificial Sequence
  Description of Artificial Sequence: Synthetic oligonucleotide
  Target: LAMA2; (+) strand; PAM type: YTN; PAM sequence: CTA
tactttgggggtcaaattca

SEQ ID NO: 345414 - DNA, 20 bp, Artificial Sequence
  Description of Artificial Sequence: Synthetic oligonucleotide
  Target: LAMA2; (+) strand; PAM type: YTN; PAM sequence: CTT
tgggggtcaaattcaaaaca

SEQ ID NO: 345415 - DNA, 20 bp, Artificial Sequence
  Description of Artificial Sequence: Synthetic oligonucleotide
  Target: LAMA2; (+) strand; PAM type: YTN; PAM sequence: TTT
gggggtcaaattcaaaacat

SEQ ID NO: 345416 - DNA, 20 bp, Artificial Sequence
  Description of Artificial Sequence: Synthetic oligonucleotide
  Target: LAMA2; (+) strand; PAM type: YTN; PAM sequence: TTG
ggggtcaaattcaaaacatt

SEQ ID NO: 345417 - DNA, 20 bp, Artificial Sequence
  Description of Artificial Sequence: Synthetic oligonucleotide
  Target: LAMA2; (+) strand; PAM type: YTN; PAM sequence: TTC
aaaacattattacccagatc

SEQ ID NO: 345418 - DNA, 20 bp, Artificial Sequence
  Description of Artificial Sequence: Synthetic oligonucleotide
  Target: LAMA2; (+) strand; PAM type: YTN; PAM sequence: TTA
ttacccagatcaatgtcata

SEQ ID NO: 345419 - DNA, 20 bp, Artificial Sequence
  Description of Artificial Sequence: Synthetic oligonucleotide
  Target: LAMA2; (+) strand; PAM type: YTN; PAM sequence: TTA
cccagatcaatgtcatatac

SEQ ID NO: 345420 - DNA, 20 bp, Artificial Sequence
  Description of Artificial Sequence: Synthetic oligonucleotide
  Target: LAMA2; (+) strand; PAM type: YTN; PAM sequence: CTT
tctcccctgtgttttcttct

SEQ ID NO: 345421 - DNA, 20 bp, Artificial Sequence
  Description of Artificial Sequence: Synthetic oligonucleotide
  Target: LAMA2; (+) strand; PAM type: YTN; PAM sequence: TTT
ctcccctgtgttttcttcta

SEQ ID NO: 345422 - DNA, 20 bp, Artificial Sequence
  Description of Artificial Sequence: Synthetic oligonucleotide
  Target: LAMA2; (+) strand; PAM type: YTN; PAM sequence: TTC
tcccctgtgttttcttctag

SEQ ID NO: 345423 - DNA, 20 bp, Artificial Sequence
  Description of Artificial Sequence: Synthetic oligonucleotide
  Target: LAMA2; (+) strand; PAM type: YTN; PAM sequence: CTC
ccctgtgttttcttctagca

SEQ ID NO: 345424 - DNA, 20 bp, Artificial Sequence
  Description of Artificial Sequence: Synthetic oligonucleotide
  Target: LAMA2; (+) strand; PAM type: YTN; PAM sequence: CTG
tgttttcttctagcaatttg

SEQ ID NO: 345425 - DNA, 20 bp, Artificial Sequence
  Description of Artificial Sequence: Synthetic oligonucleotide
  Target: LAMA2; (+) strand; PAM type: YTN; PAM sequence: TTT
tcttctagcaatttggagtt

SEQ ID NO: 345426 - DNA, 20 bp, Artificial Sequence
  Description of Artificial Sequence: Synthetic oligonucleotide
  Target: LAMA2; (+) strand; PAM type: YTN; PAM sequence: TTT
cttctagcaatttggagttg

SEQ ID NO: 345427 - DNA, 20 bp, Artificial Sequence
  Description of Artificial Sequence: Synthetic oligonucleotide
  Target: LAMA2; (+) strand; PAM type: YTN; PAM sequence: TTC
ttctagcaatttggagttgc

SEQ ID NO: 345428 - DNA, 20 bp, Artificial Sequence
  Description of Artificial Sequence: Synthetic oligonucleotide
  Target: LAMA2; (+) strand; PAM type: YTN; PAM sequence: CTT
ctagcaatttggagttgctg

SEQ ID NO: 345429 - DNA, 20 bp, Artificial Sequence
  Description of Artificial Sequence: Synthetic oligonucleotide
  Target: LAMA2; (+) strand; PAM type: YTN; PAM sequence: TTC
tagcaatttggagttgctgg

SEQ ID NO: 345430 - DNA, 20 bp, Artificial Sequence
  Description of Artificial Sequence: Synthetic oligonucleotide
  Target: LAMA2; (+) strand; PAM type: YTN; PAM sequence: CTA
gcaatttggagttgctggcc

SEQ ID NO: 345431 - DNA, 20 bp, Artificial Sequence
  Description of Artificial Sequence: Synthetic oligonucleotide
  Target: LAMA2; (+) strand; PAM type: YTN; PAM sequence: TTT
ggagttgctggccttatact

SEQ ID NO: 345432 - DNA, 20 bp, Artificial Sequence
  Description of Artificial Sequence: Synthetic oligonucleotide
  Target: LAMA2; (+) strand; PAM type: YTN; PAM sequence: TTG
gagttgctggccttatactt

SEQ ID NO: 345433 - DNA, 20 bp, Artificial Sequence
  Description of Artificial Sequence: Synthetic oligonucleotide
  Target: LAMA2; (+) strand; PAM type: YTN; PAM sequence: TTG
ctggccttatacttaaggct

SEQ ID NO: 345434 - DNA, 20 bp, Artificial Sequence
  Description of Artificial Sequence: Synthetic oligonucleotide
  Target: LAMA2; (+) strand; PAM type: YTN; PAM sequence: CTG
gccttatacttaaggcttta

SEQ ID NO: 345435 - DNA, 20 bp, Artificial Sequence
  Description of Artificial Sequence: Synthetic oligonucleotide
  Target: LAMA2; (+) strand; PAM type: YTN; PAM sequence: CTT
atacttaaggctttaattca

SEQ ID NO: 345436 - DNA, 20 bp, Artificial Sequence
  Description of Artificial Sequence: Synthetic oligonucleotide
  Target: LAMA2; (+) strand; PAM type: YTN; PAM sequence: TTA
tacttaaggctttaattcat

SEQ ID NO: 345437 - DNA, 20 bp, Artificial Sequence
  Description of Artificial Sequence: Synthetic oligonucleotide
  Target: LAMA2; (+) strand; PAM type: YTN; PAM sequence: CTT
aaggctttaattcatttcga

SEQ ID NO: 345438 - DNA, 20 bp, Artificial Sequence
  Description of Artificial Sequence: Synthetic oligonucleotide
  Target: LAMA2; (+) strand; PAM type: YTN; PAM sequence: TTA
aggctttaattcatttcgaa

SEQ ID NO: 345439 - DNA, 20 bp, Artificial Sequence
  Description of Artificial Sequence: Synthetic oligonucleotide
  Target: LAMA2; (+) strand; PAM type: YTN; PAM sequence: CTT
taattcatttcgaattgagt

SEQ ID NO: 345440 - DNA, 20 bp, Artificial Sequence
  Description of Artificial Sequence: Synthetic oligonucleotide
  Target: LAMA2; (+) strand; PAM type: YTN; PAM sequence: TTT
aattcatttcgaattgagtt

SEQ ID NO: 345441 - DNA, 20 bp, Artificial Sequence
  Description of Artificial Sequence: Synthetic oligonucleotide
  Target: LAMA2; (+) strand; PAM type: YTN; PAM sequence: TTA
attcatttcgaattgagttt

SEQ ID NO: 345442 - DNA, 20 bp, Artificial Sequence
  Description of Artificial Sequence: Synthetic oligonucleotide
  Target: LAMA2; (+) strand; PAM type: YTN; PAM sequence: TTC
atttcgaattgagttttgta

SEQ ID NO: 345443 - DNA, 20 bp, Artificial Sequence
  Description of Artificial Sequence: Synthetic oligonucleotide
  Target: LAMA2; (+) strand; PAM type: YTN; PAM sequence: TTT
cgaattgagttttgtatatg

SEQ ID NO: 345444 - DNA, 20 bp, Artificial Sequence
  Description of Artificial Sequence: Synthetic oligonucleotide
  Target: LAMA2; (+) strand; PAM type: YTN; PAM sequence: TTC
gaattgagttttgtatatga

SEQ ID NO: 345445 - DNA, 20 bp, Artificial Sequence
  Description of Artificial Sequence: Synthetic oligonucleotide
  Target: LAMA2; (+) strand; PAM type: YTN; PAM sequence: TTG
agttttgtatatgatgtgaa

SEQ ID NO: 345446 - DNA, 20 bp, Artificial Sequence
  Description of Artificial Sequence: Synthetic oligonucleotide
  Target: LAMA2; (+) strand; PAM type: YTN; PAM sequence: TTT
tgtatatgatgtgaaataag

SEQ ID NO: 345447 - DNA, 20 bp, Artificial Sequence
  Description of Artificial Sequence: Synthetic oligonucleotide
  Target: LAMA2; (+) strand; PAM type: YTN; PAM sequence: TTT
gtatatgatgtgaaataagg

SEQ ID NO: 345448 - DNA, 20 bp, Artificial Sequence
  Description of Artificial Sequence: Synthetic oligonucleotide
  Target: LAMA2; (+) strand; PAM type: YTN; PAM sequence: TTG
tatatgatgtgaaataaggg

SEQ ID NO: 345449 - DNA, 20 bp, Artificial Sequence
  Description of Artificial Sequence: Synthetic oligonucleotide
  Target: LAMA2; (+) strand; PAM type: YTN; PAM sequence: TTT
tattcttctgcatgtggata

SEQ ID NO: 345450 - DNA, 20 bp, Artificial Sequence
  Description of Artificial Sequence: Synthetic oligonucleotide
  Target: LAMA2; (+) strand; PAM type: YTN; PAM sequence: TTT
attcttctgcatgtggatac

SEQ ID NO: 345451 - DNA, 20 bp, Artificial Sequence
  Description of Artificial Sequence: Synthetic oligonucleotide
  Target: LAMA2; (+) strand; PAM type: YTN; PAM sequence: TTA
ttcttctgcatgtggatacc

SEQ ID NO: 345452 - DNA, 20 bp, Artificial Sequence
  Description of Artificial Sequence: Synthetic oligonucleotide
  Target: LAMA2; (+) strand; PAM type: YTN; PAM sequence: TTC
ttctgcatgtggatacctag

SEQ ID NO: 345453 - DNA, 20 bp, Artificial Sequence
  Description of Artificial Sequence: Synthetic oligonucleotide
  Target: LAMA2; (+) strand; PAM type: YTN; PAM sequence: CTT
ctgcatgtggatacctagtt

SEQ ID NO: 345454 - DNA, 20 bp, Artificial Sequence
  Description of Artificial Sequence: Synthetic oligonucleotide
  Target: LAMA2; (+) strand; PAM type: YTN; PAM sequence: TTC
tgcatgtggatacctagttt

SEQ ID NO: 345455 - DNA, 20 bp, Artificial Sequence
  Description of Artificial Sequence: Synthetic oligonucleotide
  Target: LAMA2; (+) strand; PAM type: YTN; PAM sequence: CTG
catgtggatacctagtttcc

SEQ ID NO: 345456 - DNA, 20 bp, Artificial Sequence
  Description of Artificial Sequence: Synthetic oligonucleotide
  Target: LAMA2; (+) strand; PAM type: YTN; PAM sequence: CTA
gtttccccaacaccattcat

SEQ ID NO: 345457 - DNA, 20 bp, Artificial Sequence
  Description of Artificial Sequence: Synthetic oligonucleotide
  Target: LAMA2; (+) strand; PAM type: YTN; PAM sequence: TTT
ccccaacaccattcattgaa

SEQ ID NO: 345458 - DNA, 20 bp, Artificial Sequence
  Description of Artificial Sequence: Synthetic oligonucleotide
  Target: LAMA2; (+) strand; PAM type: YTN; PAM sequence: TTC
cccaacaccattcattgaac

SEQ ID NO: 345459 - DNA, 20 bp, Artificial Sequence
  Description of Artificial Sequence: Synthetic oligonucleotide
  Target: LAMA2; (+) strand; PAM type: YTN; PAM sequence: TTC
attgaacagactatcctttt

SEQ ID NO: 345460 - DNA, 20 bp, Artificial Sequence
  Description of Artificial Sequence: Synthetic oligonucleotide
  Target: LAMA2; (+) strand; PAM type: YTN; PAM sequence: TTG
aacagactatccttttctca

SEQ ID NO: 345461 - DNA, 20 bp, Artificial Sequence
  Description of Artificial Sequence: Synthetic oligonucleotide
  Target: LAMA2; (+) strand; PAM type: YTN; PAM sequence: CTA
tccttttctcattgtgtatt

SEQ ID NO: 345462 - DNA, 20 bp, Artificial Sequence
  Description of Artificial Sequence: Synthetic oligonucleotide
  Target: LAMA2; (+) strand; PAM type: YTN; PAM sequence: CTT
ttctcattgtgtattcttag

SEQ ID NO: 345463 - DNA, 20 bp, Artificial Sequence
  Description of Artificial Sequence: Synthetic oligonucleotide
  Target: LAMA2; (+) strand; PAM type: YTN; PAM sequence: TTT
tctcattgtgtattcttagc

SEQ ID NO: 345464 - DNA, 20 bp, Artificial Sequence
  Description of Artificial Sequence: Synthetic oligonucleotide
  Target: LAMA2; (+) strand; PAM type: YTN; PAM sequence: TTT
ctcattgtgtattcttagca

SEQ ID NO: 345465 - DNA, 20 bp, Artificial Sequence
  Description of Artificial Sequence: Synthetic oligonucleotide
  Target: LAMA2; (+) strand; PAM type: YTN; PAM sequence: TTC
tcattgtgtattcttagcat

SEQ ID NO: 345466 - DNA, 20 bp, Artificial Sequence
  Description of Artificial Sequence: Synthetic oligonucleotide
  Target: LAMA2; (+) strand; PAM type: YTN; PAM sequence: CTC
attgtgtattcttagcatct

SEQ ID NO: 345467 - DNA, 20 bp, Artificial Sequence
  Description of Artificial Sequence: Synthetic oligonucleotide
  Target: LAMA2; (+) strand; PAM type: YTN; PAM sequence: TTG
tgtattcttagcatctttgt

SEQ ID NO: 345468 - DNA, 20 bp, Artificial Sequence
  Description of Artificial Sequence: Synthetic oligonucleotide
  Target: LAMA2; (+) strand; PAM type: YTN; PAM sequence: TTC
ttagcatctttgtcaaaaat

SEQ ID NO: 345469 - DNA, 20 bp, Artificial Sequence
  Description of Artificial Sequence: Synthetic oligonucleotide
  Target: LAMA2; (+) strand; PAM type: YTN; PAM sequence: CTT
agcatctttgtcaaaaataa

SEQ ID NO: 345470 - DNA, 20 bp, Artificial Sequence
  Description of Artificial Sequence: Synthetic oligonucleotide
  Target: LAMA2; (+) strand; PAM type: YTN; PAM sequence: TTA
gcatctttgtcaaaaataaa

SEQ ID NO: 345471 - DNA, 20 bp, Artificial Sequence
  Description of Artificial Sequence: Synthetic oligonucleotide
  Target: LAMA2; (+) strand; PAM type: YTN; PAM sequence: CTT
tgtcaaaaataaattggttg

SEQ ID NO: 345472 - DNA, 20 bp, Artificial Sequence
  Description of Artificial Sequence: Synthetic oligonucleotide
  Target: LAMA2; (+) strand; PAM type: YTN; PAM sequence: TTT
gtcaaaaataaattggttgt

SEQ ID NO: 345473 - DNA, 20 bp, Artificial Sequence
  Description of Artificial Sequence: Synthetic oligonucleotide
  Target: LAMA2; (+) strand; PAM type: YTN; PAM sequence: TTG
tcaaaaataaattggttgta

SEQ ID NO: 345474 - DNA, 20 bp, Artificial Sequence
  Description of Artificial Sequence: Synthetic oligonucleotide
  Target: LAMA2; (+) strand; PAM type: YTN; PAM sequence: TTG
gttgtacatgcataagttga

SEQ ID NO: 345475 - DNA, 20 bp, Artificial Sequence
  Description of Artificial Sequence: Synthetic oligonucleotide
  Target: LAMA2; (+) strand; PAM type: YTN; PAM sequence: TTG
tacatgcataagttgatttc

SEQ ID NO: 345476 - DNA, 20 bp, Artificial Sequence
  Description of Artificial Sequence: Synthetic oligonucleotide
  Target: LAMA2; (+) strand; PAM type: YTN; PAM sequence: TTG
atttctgggctattatgctg

SEQ ID NO: 345477 - DNA, 20 bp, Artificial Sequence
  Description of Artificial Sequence: Synthetic oligonucleotide
  Target: LAMA2; (+) strand; PAM type: YTN; PAM sequence: TTT
ctgggctattatgctgcatt

SEQ ID NO: 345478 - DNA, 20 bp, Artificial Sequence
  Description of Artificial Sequence: Synthetic oligonucleotide
  Target: LAMA2; (+) strand; PAM type: YTN; PAM sequence: TTC
tgggctattatgctgcattg

SEQ ID NO: 345479 - DNA, 20 bp, Artificial Sequence
  Description of Artificial Sequence: Synthetic oligonucleotide
  Target: LAMA2; (+) strand; PAM type: YTN; PAM sequence: CTG
ggctattatgctgcattgac

SEQ ID NO: 345480 - DNA, 20 bp, Artificial Sequence
  Description of Artificial Sequence: Synthetic oligonucleotide
  Target: LAMA2; (+) strand; PAM type: YTN; PAM sequence: CTA
ttatgctgcattgacctata

SEQ ID NO: 345481 - DNA, 20 bp, Artificial Sequence
  Description of Artificial Sequence: Synthetic oligonucleotide
  Target: LAMA2; (+) strand; PAM type: YTN; PAM sequence: TTA
tgctgcattgacctatattt

SEQ ID NO: 345482 - DNA, 20 bp, Artificial Sequence
  Description of Artificial Sequence: Synthetic oligonucleotide
  Target: LAMA2; (+) strand; PAM type: YTN; PAM sequence: CTG
cattgacctatatttctttt

SEQ ID NO: 345483 - DNA, 20 bp, Artificial Sequence
  Description of Artificial Sequence: Synthetic oligonucleotide
  Target: LAMA2; (+) strand; PAM type: YTN; PAM sequence: TTG
acctatatttcttttttgcc

SEQ ID NO: 345484 - DNA, 20 bp, Artificial Sequence
  Description of Artificial Sequence: Synthetic oligonucleotide
  Target: LAMA2; (+) strand; PAM type: YTN; PAM sequence: CTA
tatttcttttttgccagtac

SEQ ID NO: 345485 - DNA, 20 bp, Artificial Sequence
  Description of Artificial Sequence: Synthetic oligonucleotide
  Target: LAMA2; (+) strand; PAM type: YTN; PAM sequence: TTT
cttttttgccagtaccatgc

SEQ ID NO: 345486 - DNA, 20 bp, Artificial Sequence
  Description of Artificial Sequence: Synthetic oligonucleotide
  Target: LAMA2; (+) strand; PAM type: YTN; PAM sequence: TTC
ttttttgccagtaccatgct

SEQ ID NO: 345487 - DNA, 20 bp, Artificial Sequence
  Description of Artificial Sequence: Synthetic oligonucleotide
  Target: LAMA2; (+) strand; PAM type: YTN; PAM sequence: CTT
ttttgccagtaccatgctat

SEQ ID NO: 345488 - DNA, 20 bp, Artificial Sequence
  Description of Artificial Sequence: Synthetic oligonucleotide
  Target: LAMA2; (+) strand; PAM type: YTN; PAM sequence: TTT
tttgccagtaccatgctatt

SEQ ID NO: 345489 - DNA, 20 bp, Artificial Sequence
  Description of Artificial Sequence: Synthetic oligonucleotide
  Target: LAMA2; (+) strand; PAM type: YTN; PAM sequence: TTT
ttgccagtaccatgctattt

SEQ ID NO: 345490 - DNA, 20 bp, Artificial Sequence
  Description of Artificial Sequence: Synthetic oligonucleotide
  Target: LAMA2; (+) strand; PAM type: YTN; PAM sequence: TTT
tgccagtaccatgctatttt

SEQ ID NO: 345491 - DNA, 20 bp, Artificial Sequence
  Description of Artificial Sequence: Synthetic oligonucleotide
  Target: LAMA2; (+) strand; PAM type: YTN; PAM sequence: TTT
gccagtaccatgctatttta

SEQ ID NO: 345492 - DNA, 20 bp, Artificial Sequence
  Description of Artificial Sequence: Synthetic oligonucleotide
  Target: LAMA2; (+) strand; PAM type: YTN; PAM sequence: TTG
ccagtaccatgctattttaa

SEQ ID NO: 345493 - DNA, 20 bp, Artificial Sequence
  Description of Artificial Sequence: Synthetic oligonucleotide
  Target: LAMA2; (+) strand; PAM type: YTN; PAM sequence: CTA
ttttaattaatactacaata

SEQ ID NO: 345494 - DNA, 20 bp, Artificial Sequence
  Description of Artificial Sequence: Synthetic oligonucleotide
  Target: LAMA2; (+) strand; PAM type: YTN; PAM sequence: TTT
taattaatactacaatagct

SEQ ID NO: 345495 - DNA, 20 bp, Artificial Sequence
  Description of Artificial Sequence: Synthetic oligonucleotide
  Target: LAMA2; (+) strand; PAM type: YTN; PAM sequence: TTT
aattaatactacaatagctt

SEQ ID NO: 345496 - DNA, 20 bp, Artificial Sequence
  Description of Artificial Sequence: Synthetic oligonucleotide
  Target: LAMA2; (+) strand; PAM type: YTN; PAM sequence: TTA
attaatactacaatagcttt

SEQ ID NO: 345497 - DNA, 20 bp, Artificial Sequence
  Description of Artificial Sequence: Synthetic oligonucleotide
  Target: LAMA2; (+) strand; PAM type: YTN; PAM sequence: TTA
atactacaatagctttgtag

SEQ ID NO: 345498 - DNA, 20 bp, Artificial Sequence
  Description of Artificial Sequence: Synthetic oligonucleotide
  Target: LAMA2; (+) strand; PAM type: YTN; PAM sequence: CTA
caatagctttgtagtattgt

SEQ ID NO: 345499 - DNA, 20 bp, Artificial Sequence
  Description of Artificial Sequence: Synthetic oligonucleotide
  Target: LAMA2; (+) strand; PAM type: YTN; PAM sequence: CTT
tgtagtattgtttgaagtca

SEQ ID NO: 345500 - DNA, 20 bp, Artificial Sequence
  Description of Artificial Sequence: Synthetic oligonucleotide
  Target: LAMA2; (+) strand; PAM type: YTN; PAM sequence: TTT
gtagtattgtttgaagtcaa

SEQ ID NO: 345501 - DNA, 20 bp, Artificial Sequence
  Description of Artificial Sequence: Synthetic oligonucleotide
  Target: LAMA2; (+) strand; PAM type: YTN; PAM sequence: TTG
tagtattgtttgaagtcaag

SEQ ID NO: 345502 - DNA, 20 bp, Artificial Sequence
  Description of Artificial Sequence: Synthetic oligonucleotide
  Target: LAMA2; (+) strand; PAM type: YTN; PAM sequence: TTG
tttgaagtcaagtagtgtga

SEQ ID NO: 345503 - DNA, 20 bp, Artificial Sequence
  Description of Artificial Sequence: Synthetic oligonucleotide
  Target: LAMA2; (+) strand; PAM type: YTN; PAM sequence: TTT
gaagtcaagtagtgtgatat

SEQ ID NO: 345504 - DNA, 20 bp, Artificial Sequence
  Description of Artificial Sequence: Synthetic oligonucleotide
  Target: LAMA2; (+) strand; PAM type: YTN; PAM sequence: TTG
aagtcaagtagtgtgatatc

SEQ ID NO: 345505 - DNA, 20 bp, Artificial Sequence
  Description of Artificial Sequence: Synthetic oligonucleotide
  Target: LAMA2; (+) strand; PAM type: YTN; PAM sequence: CTT
tatttttgttttgtttgctc

SEQ ID NO: 345506 - DNA, 20 bp, Artificial Sequence
  Description of Artificial Sequence: Synthetic oligonucleotide
  Target: LAMA2; (+) strand; PAM type: YTN; PAM sequence: TTT
atttttgttttgtttgctca

SEQ ID NO: 345507 - DNA, 20 bp, Artificial Sequence
  Description of Artificial Sequence: Synthetic oligonucleotide
  Target: LAMA2; (+) strand; PAM type: YTN; PAM sequence: TTA
tttttgttttgtttgctcat

SEQ ID NO: 345508 - DNA, 20 bp, Artificial Sequence
  Description of Artificial Sequence: Synthetic oligonucleotide
  Target: LAMA2; (+) strand; PAM type: YTN; PAM sequence: TTT
ttgttttgtttgctcatgat

SEQ ID NO: 345509 - DNA, 20 bp, Artificial Sequence
  Description of Artificial Sequence: Synthetic oligonucleotide
  Target: LAMA2; (+) strand; PAM type: YTN; PAM sequence: TTT
tgttttgtttgctcatgatg

SEQ ID NO: 345510 - DNA, 20 bp, Artificial Sequence
  Description of Artificial Sequence: Synthetic oligonucleotide
  Target: LAMA2; (+) strand; PAM type: YTN; PAM sequence: TTT
gttttgtttgctcatgatga

SEQ ID NO: 345511 - DNA, 20 bp, Artificial Sequence
  Description of Artificial Sequence: Synthetic oligonucleotide
  Target: LAMA2; (+) strand; PAM type: YTN; PAM sequence: TTG
ttttgtttgctcatgatgat

SEQ ID NO: 345512 - DNA, 20 bp, Artificial Sequence
  Description of Artificial Sequence: Synthetic oligonucleotide
  Target: LAMA2; (+) strand; PAM type: YTN; PAM sequence: TTT
tgtttgctcatgatgatttt

SEQ ID NO: 345513 - DNA, 20 bp, Artificial Sequence
  Description of Artificial Sequence: Synthetic oligonucleotide
  Target: LAMA2; (+) strand; PAM type: YTN; PAM sequence: TTT
gtttgctcatgatgattttg

SEQ ID NO: 345514 - DNA, 20 bp, Artificial Sequence
  Description of Artificial Sequence: Synthetic oligonucleotide
  Target: LAMA2; (+) strand; PAM type: YTN; PAM sequence: TTG
tttgctcatgatgattttga

SEQ ID NO: 345515 - DNA, 20 bp, Artificial Sequence
  Description of Artificial Sequence: Synthetic oligonucleotide
  Target: LAMA2; (+) strand; PAM type: YTN; PAM sequence: TTT
gctcatgatgattttgactg

SEQ ID NO: 345516 - DNA, 20 bp, Artificial Sequence
  Description of Artificial Sequence: Synthetic oligonucleotide
  Target: LAMA2; (+) strand; PAM type: YTN; PAM sequence: TTG
ctcatgatgattttgactgt

SEQ ID NO: 345517 - DNA, 20 bp, Artificial Sequence
  Description of Artificial Sequence: Synthetic oligonucleotide
  Target: LAMA2; (+) strand; PAM type: YTN; PAM sequence: CTC
atgatgattttgactgttct

SEQ ID NO: 345518 - DNA, 20 bp, Artificial Sequence
  Description of Artificial Sequence: Synthetic oligonucleotide
  Target: LAMA2; (+) strand; PAM type: YTN; PAM sequence: TTT
tgactgttcttggtttgttg

SEQ ID NO: 345519 - DNA, 20 bp, Artificial Sequence
  Description of Artificial Sequence: Synthetic oligonucleotide
  Target: LAMA2; (+) strand; PAM type: YTN; PAM sequence: TTT
gactgttcttggtttgttgt

SEQ ID NO: 345520 - DNA, 20 bp, Artificial Sequence
  Description of Artificial Sequence: Synthetic oligonucleotide
  Target: LAMA2; (+) strand; PAM type: YTN; PAM sequence: TTG
actgttcttggtttgttgtg

SEQ ID NO: 345521 - DNA, 20 bp, Artificial Sequence
  Description of Artificial Sequence: Synthetic oligonucleotide
  Target: LAMA2; (+) strand; PAM type: YTN; PAM sequence: CTG
ttcttggtttgttgtggttc

SEQ ID NO: 345522 - DNA, 20 bp, Artificial Sequence
  Description of Artificial Sequence: Synthetic oligonucleotide
  Target: LAMA2; (+) strand; PAM type: YTN; PAM sequence: TTC
ttggtttgttgtggttccgt

SEQ ID NO: 345523 - DNA, 20 bp, Artificial Sequence
  Description of Artificial Sequence: Synthetic oligonucleotide
  Target: LAMA2; (+) strand; PAM type: YTN; PAM sequence: CTT
ggtttgttgtggttccgtgc

SEQ ID NO: 345524 - DNA, 20 bp, Artificial Sequence
  Description of Artificial Sequence: Synthetic oligonucleotide
  Target: LAMA2; (+) strand; PAM type: YTN; PAM sequence: TTG
gtttgttgtggttccgtgcg

SEQ ID NO: 345525 - DNA, 20 bp, Artificial Sequence
  Description of Artificial Sequence: Synthetic oligonucleotide
  Target: LAMA2; (+) strand; PAM type: YTN; PAM sequence: TTT
gttgtggttccgtgcgattt

SEQ ID NO: 345526 - DNA, 20 bp, Artificial Sequence
  Description of Artificial Sequence: Synthetic oligonucleotide
  Target: LAMA2; (+) strand; PAM type: YTN; PAM sequence: TTG
ttgtggttccgtgcgatttt

SEQ ID NO: 345527 - DNA, 20 bp, Artificial Sequence
  Description of Artificial Sequence: Synthetic oligonucleotide
  Target: LAMA2; (+) strand; PAM type: YTN; PAM sequence: TTG
tggttccgtgcgattttaaa

SEQ ID NO: 345528 - DNA, 20 bp, Artificial Sequence
  Description of Artificial Sequence: Synthetic oligonucleotide
  Target: LAMA2; (+) strand; PAM type: YTN; PAM sequence: TTC
cgtgcgattttaaaattgtt

SEQ ID NO: 345529 - DNA, 20 bp, Artificial Sequence
  Description of Artificial Sequence: Synthetic oligonucleotide
  Target: LAMA2; (+) strand; PAM type: YTN; PAM sequence: TTT
taaaattgttttttctatat

SEQ ID NO: 345530 - DNA, 20 bp, Artificial Sequence
  Description of Artificial Sequence: Synthetic oligonucleotide
  Target: LAMA2; (+) strand; PAM type: YTN; PAM sequence: TTT
aaaattgttttttctatatc

SEQ ID NO: 345531 - DNA, 20 bp, Artificial Sequence
  Description of Artificial Sequence: Synthetic oligonucleotide
  Target: LAMA2; (+) strand; PAM type: YTN; PAM sequence: TTA
aaattgttttttctatatct

SEQ ID NO: 345532 - DNA, 20 bp, Artificial Sequence
  Description of Artificial Sequence: Synthetic oligonucleotide
  Target: LAMA2; (+) strand; PAM type: YTN; PAM sequence: TTG
ttttttctatatctgaaaaa

SEQ ID NO: 345533 - DNA, 20 bp, Artificial Sequence
  Description of Artificial Sequence: Synthetic oligonucleotide
  Target: LAMA2; (+) strand; PAM type: YTN; PAM sequence: TTT
tttctatatctgaaaaatga

SEQ ID NO: 345534 - DNA, 20 bp, Artificial Sequence
  Description of Artificial Sequence: Synthetic oligonucleotide
  Target: LAMA2; (+) strand; PAM type: YTN; PAM sequence: TTT
ttctatatctgaaaaatgac

SEQ ID NO: 345535 - DNA, 20 bp, Artificial Sequence
  Description of Artificial Sequence: Synthetic oligonucleotide
  Target: LAMA2; (+) strand; PAM type: YTN; PAM sequence: TTT
tctatatctgaaaaatgaca

SEQ ID NO: 345536 - DNA, 20 bp, Artificial Sequence
  Description of Artificial Sequence: Synthetic oligonucleotide
  Target: LAMA2; (+) strand; PAM type: YTN; PAM sequence: TTT
ctatatctgaaaaatgacat

SEQ ID NO: 345537 - DNA, 20 bp, Artificial Sequence
  Description of Artificial Sequence: Synthetic oligonucleotide
  Target: LAMA2; (+) strand; PAM type: YTN; PAM sequence: TTC
tatatctgaaaaatgacatc

SEQ ID NO: 345538 - DNA, 20 bp, Artificial Sequence
  Description of Artificial Sequence: Synthetic oligonucleotide
  Target: LAMA2; (+) strand; PAM type: YTN; PAM sequence: CTA
tatctgaaaaatgacatcaa

SEQ ID NO: 345539 - DNA, 20 bp, Artificial Sequence
  Description of Artificial Sequence: Synthetic oligonucleotide
  Target: LAMA2; (+) strand; PAM type: YTN; PAM sequence: CTG
aaaaatgacatcaaaatctt

SEQ ID NO: 345540 - DNA, 20 bp, Artificial Sequence
  Description of Artificial Sequence: Synthetic oligonucleotide
  Target: LAMA2; (+) strand; PAM type: YTN; PAM sequence: CTT
gatagtggttgcactgaaat

SEQ ID NO: 345541 - DNA, 20 bp, Artificial Sequence
  Description of Artificial Sequence: Synthetic oligonucleotide
  Target: LAMA2; (+) strand; PAM type: YTN; PAM sequence: TTG
atagtggttgcactgaaatc

SEQ ID NO: 345542 - DNA, 20 bp, Artificial Sequence
  Description of Artificial Sequence: Synthetic oligonucleotide
  Target: LAMA2; (+) strand; PAM type: YTN; PAM sequence: TTG
cactgaaatctgtagattgc

SEQ ID NO: 345543 - DNA, 20 bp, Artificial Sequence
  Description of Artificial Sequence: Synthetic oligonucleotide
  Target: LAMA2; (+) strand; PAM type: YTN; PAM sequence: CTG
aaatctgtagattgctttgg

SEQ ID NO: 345544 - DNA, 20 bp, Artificial Sequence
  Description of Artificial Sequence: Synthetic oligonucleotide
  Target: LAMA2; (+) strand; PAM type: YTN; PAM sequence: CTG
tagattgctttgggtattat

SEQ ID NO: 345545 - DNA, 20 bp, Artificial Sequence
  Description of Artificial Sequence: Synthetic oligonucleotide
  Target: LAMA2; (+) strand; PAM type: YTN; PAM sequence: TTG
ctttgggtattatgaacatt

SEQ ID NO: 345546 - DNA, 20 bp, Artificial Sequence
  Description of Artificial Sequence: Synthetic oligonucleotide
  Target: LAMA2; (+) strand; PAM type: YTN; PAM sequence: CTT
tgggtattatgaacatttta

SEQ ID NO: 345547 - DNA, 20 bp, Artificial Sequence
  Description of Artificial Sequence: Synthetic oligonucleotide
  Target: LAMA2; (+) strand; PAM type: YTN; PAM sequence: TTT
gggtattatgaacattttaa

SEQ ID NO: 345548 - DNA, 20 bp, Artificial Sequence
  Description of Artificial Sequence: Synthetic oligonucleotide
  Target: LAMA2; (+) strand; PAM type: YTN; PAM sequence: TTG
ggtattatgaacattttaac

SEQ ID NO: 345549 - DNA, 20 bp, Artificial Sequence
  Description of Artificial Sequence: Synthetic oligonucleotide
  Target: LAMA2; (+) strand; PAM type: YTN; PAM sequence: TTA
tgaacattttaacaatatta

SEQ ID NO: 345550 - DNA, 20 bp, Artificial Sequence
  Description of Artificial Sequence: Synthetic oligonucleotide
  Target: LAMA2; (+) strand; PAM type: YTN; PAM sequence: TTT
taacaatattaaattcttcc

SEQ ID NO: 345551 - DNA, 20 bp, Artificial Sequence
  Description of Artificial Sequence: Synthetic oligonucleotide
  Target: LAMA2; (+) strand; PAM type: YTN; PAM sequence: TTT
aacaatattaaattcttcca

SEQ ID NO: 345552 - DNA, 20 bp, Artificial Sequence
  Description of Artificial Sequence: Synthetic oligonucleotide
  Target: LAMA2; (+) strand; PAM type: YTN; PAM sequence: TTA
acaatattaaattcttccaa

SEQ ID NO: 345553 - DNA, 20 bp, Artificial Sequence
  Description of Artificial Sequence: Synthetic oligonucleotide
  Target: LAMA2; (+) strand; PAM type: YTN; PAM sequence: TTA
aattcttccaatccatgaac

SEQ ID NO: 345554 - DNA, 20 bp, Artificial Sequence
  Description of Artificial Sequence: Synthetic oligonucleotide
  Target: LAMA2; (+) strand; PAM type: YTN; PAM sequence: TTC
ttccaatccatgaacacagg

SEQ ID NO: 345555 - DNA, 20 bp, Artificial Sequence
  Description of Artificial Sequence: Synthetic oligonucleotide
  Target: LAMA2; (+) strand; PAM type: YTN; PAM sequence: CTT
ccaatccatgaacacaggat

SEQ ID NO: 345556 - DNA, 20 bp, Artificial Sequence
  Description of Artificial Sequence: Synthetic oligonucleotide
  Target: LAMA2; (+) strand; PAM type: YTN; PAM sequence: TTC
caatccatgaacacaggata

SEQ ID NO: 345557 - DNA, 20 bp, Artificial Sequence
  Description of Artificial Sequence: Synthetic oligonucleotide
  Target: LAMA2; (+) strand; PAM type: YTN; PAM sequence: CTT
tccatttattcatgccttct

SEQ ID NO: 345558 - DNA, 20 bp, Artificial Sequence
  Description of Artificial Sequence: Synthetic oligonucleotide
  Target: LAMA2; (+) strand; PAM type: YTN; PAM sequence: TTT
ccatttattcatgccttctt

SEQ ID NO: 345559 - DNA, 20 bp, Artificial Sequence
  Description of Artificial Sequence: Synthetic oligonucleotide
  Target: LAMA2; (+) strand; PAM type: YTN; PAM sequence: TTC
catttattcatgccttcttc

SEQ ID NO: 345560 - DNA, 20 bp, Artificial Sequence
  Description of Artificial Sequence: Synthetic oligonucleotide
  Target: LAMA2; (+) strand; PAM type: YTN; PAM sequence: TTT
attcatgccttcttcaattt

SEQ ID NO: 345561 - DNA, 20 bp, Artificial Sequence
  Description of Artificial Sequence: Synthetic oligonucleotide
  Target: LAMA2; (+) strand; PAM type: YTN; PAM sequence: TTA
ttcatgccttcttcaatttc

SEQ ID NO: 345562 - DNA, 20 bp, Artificial Sequence
  Description of Artificial Sequence: Synthetic oligonucleotide
  Target: LAMA2; (+) strand; PAM type: YTN; PAM sequence: TTC
atgccttcttcaatttcttt

SEQ ID NO: 345563 - DNA, 20 bp, Artificial Sequence
  Description of Artificial Sequence: Synthetic oligonucleotide
  Target: LAMA2; (+) strand; PAM type: YTN; PAM sequence: CTT
cttcaatttctttcatcaac

SEQ ID NO: 345564 - DNA, 20 bp, Artificial Sequence
  Description of Artificial Sequence: Synthetic oligonucleotide
  Target: LAMA2; (+) strand; PAM type: YTN; PAM sequence: TTC
ttcaatttctttcatcaaca

SEQ ID NO: 345565 - DNA, 20 bp, Artificial Sequence
  Description of Artificial Sequence: Synthetic oligonucleotide
  Target: LAMA2; (+) strand; PAM type: YTN; PAM sequence: CTT
caatttctttcatcaacatt

SEQ ID NO: 345566 - DNA, 20 bp, Artificial Sequence
  Description of Artificial Sequence: Synthetic oligonucleotide
  Target: LAMA2; (+) strand; PAM type: YTN; PAM sequence: TTC
aatttctttcatcaacattt

SEQ ID NO: 345567 - DNA, 20 bp, Artificial Sequence
  Description of Artificial Sequence: Synthetic oligonucleotide
  Target: LAMA2; (+) strand; PAM type: YTN; PAM sequence: TTT
ctttcatcaacattttacag

SEQ ID NO: 345568 - DNA, 20 bp, Artificial Sequence
  Description of Artificial Sequence: Synthetic oligonucleotide
  Target: LAMA2; (+) strand; PAM type: YTN; PAM sequence: TTC
tttcatcaacattttacagt

SEQ ID NO: 345569 - DNA, 20 bp, Artificial Sequence
  Description of Artificial Sequence: Synthetic oligonucleotide
  Target: LAMA2; (+) strand; PAM type: YTN; PAM sequence: CTT
tcatcaacattttacagttt

SEQ ID NO: 345570 - DNA, 20 bp, Artificial Sequence
  Description of Artificial Sequence: Synthetic oligonucleotide
  Target: LAMA2; (+) strand; PAM type: YTN; PAM sequence: TTT
catcaacattttacagtttg

SEQ ID NO: 345571 - DNA, 20 bp, Artificial Sequence
  Description of Artificial Sequence: Synthetic oligonucleotide
  Target: LAMA2; (+) strand; PAM type: YTN; PAM sequence: TTC
atcaacattttacagtttgc

SEQ ID NO: 345572 - DNA, 20 bp, Artificial Sequence
  Description of Artificial Sequence: Synthetic oligonucleotide
  Target: LAMA2; (+) strand; PAM type: YTN; PAM sequence: TTT
tacagtttgcagtgtatgca

SEQ ID NO: 345573 - DNA, 20 bp, Artificial Sequence
  Description of Artificial Sequence: Synthetic oligonucleotide
  Target: LAMA2; (+) strand; PAM type: YTN; PAM sequence: TTT
acagtttgcagtgtatgcag

SEQ ID NO: 345574 - DNA, 20 bp, Artificial Sequence
  Description of Artificial Sequence: Synthetic oligonucleotide
  Target: LAMA2; (+) strand; PAM type: YTN; PAM sequence: TTA
cagtttgcagtgtatgcaga

SEQ ID NO: 345575 - DNA, 20 bp, Artificial Sequence
  Description of Artificial Sequence: Synthetic oligonucleotide
  Target: LAMA2; (+) strand; PAM type: YTN; PAM sequence: TTT
gcagtgtatgcagatctttt

SEQ ID NO: 345576 - DNA, 20 bp, Artificial Sequence
  Description of Artificial Sequence: Synthetic oligonucleotide
  Target: LAMA2; (+) strand; PAM type: YTN; PAM sequence: TTG
cagtgtatgcagatcttttc

SEQ ID NO: 345577 - DNA, 20 bp, Artificial Sequence
  Description of Artificial Sequence: Synthetic oligonucleotide
  Target: LAMA2; (+) strand; PAM type: YTN; PAM sequence: CTT
ttcaactccttggttaaatt

SEQ ID NO: 345578 - DNA, 20 bp, Artificial Sequence
  Description of Artificial Sequence: Synthetic oligonucleotide
  Target: LAMA2; (+) strand; PAM type: YTN; PAM sequence: TTT
tcaactccttggttaaattt

SEQ ID NO: 345579 - DNA, 20 bp, Artificial Sequence
  Description of Artificial Sequence: Synthetic oligonucleotide
  Target: LAMA2; (+) strand; PAM type: YTN; PAM sequence: TTT
caactccttggttaaattta

SEQ ID NO: 345580 - DNA, 20 bp, Artificial Sequence
  Description of Artificial Sequence: Synthetic oligonucleotide
  Target: LAMA2; (+) strand; PAM type: YTN; PAM sequence: TTC
aactccttggttaaatttat

SEQ ID NO: 345581 - DNA, 20 bp, Artificial Sequence
  Description of Artificial Sequence: Synthetic oligonucleotide
  Target: LAMA2; (+) strand; PAM type: YTN; PAM sequence: CTC
cttggttaaatttattccta

SEQ ID NO: 345582 - DNA, 20 bp, Artificial Sequence
  Description of Artificial Sequence: Synthetic oligonucleotide
  Target: LAMA2; (+) strand; PAM type: YTN; PAM sequence: CTT
ggttaaatttattcctaagc

SEQ ID NO: 345583 - DNA, 20 bp, Artificial Sequence
  Description of Artificial Sequence: Synthetic oligonucleotide
  Target: LAMA2; (+) strand; PAM type: YTN; PAM sequence: TTG
gttaaatttattcctaagca

SEQ ID NO: 345584 - DNA, 20 bp, Artificial Sequence
  Description of Artificial Sequence: Synthetic oligonucleotide
  Target: LAMA2; (+) strand; PAM type: YTN; PAM sequence: TTA
aatttattcctaagcattta

SEQ ID NO: 345585 - DNA, 20 bp, Artificial Sequence
  Description of Artificial Sequence: Synthetic oligonucleotide
  Target: LAMA2; (+) strand; PAM type: YTN; PAM sequence: TTT
attcctaagcatttaatctt

SEQ ID NO: 345586 - DNA, 20 bp, Artificial Sequence
  Description of Artificial Sequence: Synthetic oligonucleotide
  Target: LAMA2; (+) strand; PAM type: YTN; PAM sequence: TTA
ttcctaagcatttaatcttt

SEQ ID NO: 345587 - DNA, 20 bp, Artificial Sequence
  Description of Artificial Sequence: Synthetic oligonucleotide
  Target: LAMA2; (+) strand; PAM type: YTN; PAM sequence: TTC
ctaagcatttaatctttttt

SEQ ID NO: 345588 - DNA, 20 bp, Artificial Sequence
  Description of Artificial Sequence: Synthetic oligonucleotide
  Target: LAMA2; (+) strand; PAM type: YTN; PAM sequence: CTA
agcatttaatcttttttata

SEQ ID NO: 345589 - DNA, 20 bp, Artificial Sequence
  Description of Artificial Sequence: Synthetic oligonucleotide
  Target: LAMA2; (+) strand; PAM type: YTN; PAM sequence: TTT
aatcttttttatagctattg

SEQ ID NO: 345590 - DNA, 20 bp, Artificial Sequence
  Description of Artificial Sequence: Synthetic oligonucleotide
  Target: LAMA2; (+) strand; PAM type: YTN; PAM sequence: TTA
atcttttttatagctattgt

SEQ ID NO: 345591 - DNA, 20 bp, Artificial Sequence
  Description of Artificial Sequence: Synthetic oligonucleotide
  Target: LAMA2; (+) strand; PAM type: YTN; PAM sequence: CTT
ttttatagctattgtaaatg

SEQ ID NO: 345592 - DNA, 20 bp, Artificial Sequence
  Description of Artificial Sequence: Synthetic oligonucleotide
  Target: LAMA2; (+) strand; PAM type: YTN; PAM sequence: TTT
tttatagctattgtaaatgg

SEQ ID NO: 345593 - DNA, 20 bp, Artificial Sequence
  Description of Artificial Sequence: Synthetic oligonucleotide
  Target: LAMA2; (+) strand; PAM type: YTN; PAM sequence: TTT
ttatagctattgtaaatggg

SEQ ID NO: 345594 - DNA, 20 bp, Artificial Sequence
  Description of Artificial Sequence: Synthetic oligonucleotide
  Target: LAMA2; (+) strand; PAM type: YTN; PAM sequence: TTT
tatagctattgtaaatggga

SEQ ID NO: 345595 - DNA, 20 bp, Artificial Sequence
  Description of Artificial Sequence: Synthetic oligonucleotide
  Target: LAMA2; (+) strand; PAM type: YTN; PAM sequence: TTT
atagctattgtaaatgggat

SEQ ID NO: 345596 - DNA, 20 bp, Artificial Sequence
  Description of Artificial Sequence: Synthetic oligonucleotide
  Target: LAMA2; (+) strand; PAM type: YTN; PAM sequence: TTA
tagctattgtaaatgggatt

SEQ ID NO: 345597 - DNA, 20 bp, Artificial Sequence
  Description of Artificial Sequence: Synthetic oligonucleotide
  Target: LAMA2; (+) strand; PAM type: YTN; PAM sequence: CTA
ttgtaaatgggattttttaa

SEQ ID NO: 345598 - DNA, 20 bp, Artificial Sequence
  Description of Artificial Sequence: Synthetic oligonucleotide
  Target: LAMA2; (+) strand; PAM type: YTN; PAM sequence: TTG
taaatgggattttttaactc

SEQ ID NO: 345599 - DNA, 20 bp, Artificial Sequence
  Description of Artificial Sequence: Synthetic oligonucleotide
  Target: LAMA2; (+) strand; PAM type: YTN; PAM sequence: TTT
tttaactccaagtatatttc

SEQ ID NO: 345600 - DNA, 20 bp, Artificial Sequence
  Description of Artificial Sequence: Synthetic oligonucleotide
  Target: LAMA2; (+) strand; PAM type: YTN; PAM sequence: TTT
ttaactccaagtatatttca

SEQ ID NO: 345601 - DNA, 20 bp, Artificial Sequence
  Description of Artificial Sequence: Synthetic oligonucleotide
  Target: LAMA2; (+) strand; PAM type: YTN; PAM sequence: TTT
taactccaagtatatttcat

SEQ ID NO: 345602 - DNA, 20 bp, Artificial Sequence
  Description of Artificial Sequence: Synthetic oligonucleotide
  Target: LAMA2; (+) strand; PAM type: YTN; PAM sequence: TTT
aactccaagtatatttcata

SEQ ID NO: 345603 - DNA, 20 bp, Artificial Sequence
  Description of Artificial Sequence: Synthetic oligonucleotide
  Target: LAMA2; (+) strand; PAM type: YTN; PAM sequence: TTA
actccaagtatatttcatag

SEQ ID NO: 345604 - DNA, 20 bp, Artificial Sequence
  Description of Artificial Sequence: Synthetic oligonucleotide
  Target: LAMA2; (+) strand; PAM type: YTN; PAM sequence: CTC
caagtatatttcatagatgg

SEQ ID NO: 345605 - DNA, 20 bp, Artificial Sequence
  Description of Artificial Sequence: Synthetic oligonucleotide
  Target: LAMA2; (+) strand; PAM type: YTN; PAM sequence: TTT
catagatggcattgatacag

SEQ ID NO: 345606 - DNA, 20 bp, Artificial Sequence
  Description of Artificial Sequence: Synthetic oligonucleotide
  Target: LAMA2; (+) strand; PAM type: YTN; PAM sequence: TTC
atagatggcattgatacagt

SEQ ID NO: 345607 - DNA, 20 bp, Artificial Sequence
  Description of Artificial Sequence: Synthetic oligonucleotide
  Target: LAMA2; (+) strand; PAM type: YTN; PAM sequence: TTG
atacagtaaaatcctttatt

SEQ ID NO: 345608 - DNA, 20 bp, Artificial Sequence
  Description of Artificial Sequence: Synthetic oligonucleotide
  Target: LAMA2; (+) strand; PAM type: YTN; PAM sequence: CTT
tattctgtaaatggcattta

SEQ ID NO: 345609 - DNA, 20 bp, Artificial Sequence
  Description of Artificial Sequence: Synthetic oligonucleotide
  Target: LAMA2; (+) strand; PAM type: YTN; PAM sequence: TTT
attctgtaaatggcatttat

SEQ ID NO: 345610 - DNA, 20 bp, Artificial Sequence
  Description of Artificial Sequence: Synthetic oligonucleotide
  Target: LAMA2; (+) strand; PAM type: YTN; PAM sequence: TTA
ttctgtaaatggcatttata

SEQ ID NO: 345611 - DNA, 20 bp, Artificial Sequence
  Description of Artificial Sequence: Synthetic oligonucleotide
  Target: LAMA2; (+) strand; PAM type: YTN; PAM sequence: TTC
tgtaaatggcatttatatag

SEQ ID NO: 345612 - DNA, 20 bp, Artificial Sequence
  Description of Artificial Sequence: Synthetic oligonucleotide
  Target: LAMA2; (+) strand; PAM type: YTN; PAM sequence: CTG
taaatggcatttatatagta

SEQ ID NO: 345613 - DNA, 20 bp, Artificial Sequence
  Description of Artificial Sequence: Synthetic oligonucleotide
  Target: LAMA2; (+) strand; PAM type: YTN; PAM sequence: TTT
atatagtaaaatcttttcca

SEQ ID NO: 345614 - DNA, 20 bp, Artificial Sequence
  Description of Artificial Sequence: Synthetic oligonucleotide
  Target: LAMA2; (+) strand; PAM type: YTN; PAM sequence: TTA
tatagtaaaatcttttccat

SEQ ID NO: 345615 - DNA, 20 bp, Artificial Sequence
  Description of Artificial Sequence: Synthetic oligonucleotide
  Target: LAMA2; (+) strand; PAM type: YTN; PAM sequence: CTT
ttccatggtgaatgattatt

SEQ ID NO: 345616 - DNA, 20 bp, Artificial Sequence
  Description of Artificial Sequence: Synthetic oligonucleotide
  Target: LAMA2; (+) strand; PAM type: YTN; PAM sequence: TTT
tccatggtgaatgattatta

SEQ ID NO: 345617 - DNA, 20 bp, Artificial Sequence
  Description of Artificial Sequence: Synthetic oligonucleotide
  Target: LAMA2; (+) strand; PAM type: YTN; PAM sequence: TTT
ccatggtgaatgattattag

SEQ ID NO: 345618 - DNA, 20 bp, Artificial Sequence
  Description of Artificial Sequence: Synthetic oligonucleotide
  Target: LAMA2; (+) strand; PAM type: YTN; PAM sequence: TTC
catggtgaatgattattagt

SEQ ID NO: 345619 - DNA, 20 bp, Artificial Sequence
  Description of Artificial Sequence: Synthetic oligonucleotide
  Target: LAMA2; (+) strand; PAM type: YTN; PAM sequence: TTA
ttagtcttaagtgaaataca

SEQ ID NO: 345620 - DNA, 20 bp, Artificial Sequence
  Description of Artificial Sequence: Synthetic oligonucleotide
  Target: LAMA2; (+) strand; PAM type: YTN; PAM sequence: TTA
gtcttaagtgaaatacaaag

SEQ ID NO: 345621 - DNA, 20 bp, Artificial Sequence
  Description of Artificial Sequence: Synthetic oligonucleotide
  Target: LAMA2; (+) strand; PAM type: YTN; PAM sequence: CTT
aagtgaaatacaaagatttg

SEQ ID NO: 345622 - DNA, 20 bp, Artificial Sequence
  Description of Artificial Sequence: Synthetic oligonucleotide
  Target: LAMA2; (+) strand; PAM type: YTN; PAM sequence: TTA
agtgaaatacaaagatttga

SEQ ID NO: 345623 - DNA, 20 bp, Artificial Sequence
  Description of Artificial Sequence: Synthetic oligonucleotide
  Target: LAMA2; (+) strand; PAM type: YTN; PAM sequence: TTT
gattttataagtgaaatatt

SEQ ID NO: 345624 - DNA, 20 bp, Artificial Sequence
  Description of Artificial Sequence: Synthetic oligonucleotide
  Target: LAMA2; (+) strand; PAM type: YTN; PAM sequence: TTG
attttataagtgaaatattt

SEQ ID NO: 345625 - DNA, 20 bp, Artificial Sequence
  Description of Artificial Sequence: Synthetic oligonucleotide
  Target: LAMA2; (+) strand; PAM type: YTN; PAM sequence: TTT
tataagtgaaatatttctta

SEQ ID NO: 345626 - DNA, 20 bp, Artificial Sequence
  Description of Artificial Sequence: Synthetic oligonucleotide
  Target: LAMA2; (+) strand; PAM type: YTN; PAM sequence: TTT
ataagtgaaatatttcttaa

SEQ ID NO: 345627 - DNA, 20 bp, Artificial Sequence
  Description of Artificial Sequence: Synthetic oligonucleotide
  Target: LAMA2; (+) strand; PAM type: YTN; PAM sequence: TTA
taagtgaaatatttcttaag

SEQ ID NO: 345628 - DNA, 20 bp, Artificial Sequence
  Description of Artificial Sequence: Synthetic oligonucleotide
  Target: LAMA2; (+) strand; PAM type: YTN; PAM sequence: TTT
cttaagtaaactatccttgg

SEQ ID NO: 345629 - DNA, 20 bp, Artificial Sequence
  Description of Artificial Sequence: Synthetic oligonucleotide
  Target: LAMA2; (+) strand; PAM type: YTN; PAM sequence: TTC
ttaagtaaactatccttggc

SEQ ID NO: 345630 - DNA, 20 bp, Artificial Sequence
  Description of Artificial Sequence: Synthetic oligonucleotide
  Target: LAMA2; (+) strand; PAM type: YTN; PAM sequence: CTT
aagtaaactatccttggctg

SEQ ID NO: 345631 - DNA, 20 bp, Artificial Sequence
  Description of Artificial Sequence: Synthetic oligonucleotide
  Target: LAMA2; (+) strand; PAM type: YTN; PAM sequence: TTA
agtaaactatccttggctgc

SEQ ID NO: 345632 - DNA, 20 bp, Artificial Sequence
  Description of Artificial Sequence: Synthetic oligonucleotide
  Target: LAMA2; (+) strand; PAM type: YTN; PAM sequence: CTA
tccttggctgccagtttctt

SEQ ID NO: 345633 - DNA, 20 bp, Artificial Sequence
  Description of Artificial Sequence: Synthetic oligonucleotide
  Target: LAMA2; (+) strand; PAM type: YTN; PAM sequence: CTT
ggctgccagtttctttctta

SEQ ID NO: 345634 - DNA, 20 bp, Artificial Sequence
  Description of Artificial Sequence: Synthetic oligonucleotide
  Target: LAMA2; (+) strand; PAM type: YTN; PAM sequence: TTG
gctgccagtttctttcttaa

SEQ ID NO: 345635 - DNA, 20 bp, Artificial Sequence
  Description of Artificial Sequence: Synthetic oligonucleotide
  Target: LAMA2; (+) strand; PAM type: YTN; PAM sequence: CTG
ccagtttctttcttaaaagt

SEQ ID NO: 345636 - DNA, 20 bp, Artificial Sequence
  Description of Artificial Sequence: Synthetic oligonucleotide
  Target: LAMA2; (+) strand; PAM type: YTN; PAM sequence: TTT
ctttcttaaaagtttaatat

SEQ ID NO: 345637 - DNA, 20 bp, Artificial Sequence
  Description of Artificial Sequence: Synthetic oligonucleotide
  Target: LAMA2; (+) strand; PAM type: YTN; PAM sequence: TTC
tttcttaaaagtttaatatt

SEQ ID NO: 345638 - DNA, 20 bp, Artificial Sequence
  Description of Artificial Sequence: Synthetic oligonucleotide
  Target: LAMA2; (+) strand; PAM type: YTN; PAM sequence: CTT
tcttaaaagtttaatatttc

SEQ ID NO: 345639 - DNA, 20 bp, Artificial Sequence
  Description of Artificial Sequence: Synthetic oligonucleotide
  Target: LAMA2; (+) strand; PAM type: YTN; PAM sequence: TTT
cttaaaagtttaatatttcc

SEQ ID NO: 345640 - DNA, 20 bp, Artificial Sequence
  Description of Artificial Sequence: Synthetic oligonucleotide
  Target: LAMA2; (+) strand; PAM type: YTN; PAM sequence: TTC
ttaaaagtttaatatttccc

SEQ ID NO: 345641 - DNA, 20 bp, Artificial Sequence
  Description of Artificial Sequence: Synthetic oligonucleotide
  Target: LAMA2; (+) strand; PAM type: YTN; PAM sequence: CTT
aaaagtttaatatttcccag

SEQ ID NO: 345642 - DNA, 20 bp, Artificial Sequence
  Description of Artificial Sequence: Synthetic oligonucleotide
  Target: LAMA2; (+) strand; PAM type: YTN; PAM sequence: TTA
aaagtttaatatttcccagc

SEQ ID NO: 345643 - DNA, 20 bp, Artificial Sequence
  Description of Artificial Sequence: Synthetic oligonucleotide
  Target: LAMA2; (+) strand; PAM type: YTN; PAM sequence: TTT
aatatttcccagcaacttcc

SEQ ID NO: 345644 - DNA, 20 bp, Artificial Sequence
  Description of Artificial Sequence: Synthetic oligonucleotide
  Target: LAMA2; (+) strand; PAM type: YTN; PAM sequence: TTA
atatttcccagcaacttcct

SEQ ID NO: 345645 - DNA, 20 bp, Artificial Sequence
  Description of Artificial Sequence: Synthetic oligonucleotide
  Target: LAMA2; (+) strand; PAM type: YTN; PAM sequence: TTT
cccagcaacttcctgtggtt

SEQ ID NO: 345646 - DNA, 20 bp, Artificial Sequence
  Description of Artificial Sequence: Synthetic oligonucleotide
  Target: LAMA2; (+) strand; PAM type: YTN; PAM sequence: TTC
ccagcaacttcctgtggttg

SEQ ID NO: 345647 - DNA, 20 bp, Artificial Sequence
  Description of Artificial Sequence: Synthetic oligonucleotide
  Target: LAMA2; (+) strand; PAM type: YTN; PAM sequence: CTT
cctgtggttgactcttaagg

SEQ ID NO: 345648 - DNA, 20 bp, Artificial Sequence
  Description of Artificial Sequence: Synthetic oligonucleotide
  Target: LAMA2; (+) strand; PAM type: YTN; PAM sequence: TTC
ctgtggttgactcttaagga

SEQ ID NO: 345649 - DNA, 20 bp, Artificial Sequence
  Description of Artificial Sequence: Synthetic oligonucleotide
  Target: LAMA2; (+) strand; PAM type: YTN; PAM sequence: CTG
tggttgactcttaaggatac

SEQ ID NO: 345650 - DNA, 20 bp, Artificial Sequence
  Description of Artificial Sequence: Synthetic oligonucleotide
  Target: LAMA2; (+) strand; PAM type: YTN; PAM sequence: TTG
actcttaaggatactgaagc

SEQ ID NO: 345651 - DNA, 20 bp, Artificial Sequence
  Description of Artificial Sequence: Synthetic oligonucleotide
  Target: LAMA2; (+) strand; PAM type: YTN; PAM sequence: CTC
ttaaggatactgaagctgaa

SEQ ID NO: 345652 - DNA, 20 bp, Artificial Sequence
  Description of Artificial Sequence: Synthetic oligonucleotide
  Target: LAMA2; (+) strand; PAM type: YTN; PAM sequence: CTT
aaggatactgaagctgaaag

SEQ ID NO: 345653 - DNA, 20 bp, Artificial Sequence
  Description of Artificial Sequence: Synthetic oligonucleotide
  Target: LAMA2; (+) strand; PAM type: YTN; PAM sequence: TTA
aggatactgaagctgaaagg

SEQ ID NO: 345654 - DNA, 20 bp, Artificial Sequence
  Description of Artificial Sequence: Synthetic oligonucleotide
  Target: LAMA2; (+) strand; PAM type: YTN; PAM sequence: CTG
aagctgaaaggagcccagca

SEQ ID NO: 345655 - DNA, 20 bp, Artificial Sequence
  Description of Artificial Sequence: Synthetic oligonucleotide
  Target: LAMA2; (+) strand; PAM type: YTN; PAM sequence: CTG
aaaggagcccagcaattctg

SEQ ID NO: 345656 - DNA, 20 bp, Artificial Sequence
  Description of Artificial Sequence: Synthetic oligonucleotide
  Target: LAMA2; (+) strand; PAM type: YTN; PAM sequence: TTC
tgggtgatggaggaaatacg

SEQ ID NO: 345657 - DNA, 20 bp, Artificial Sequence
  Description of Artificial Sequence: Synthetic oligonucleotide
  Target: LAMA2; (+) strand; PAM type: YTN; PAM sequence: CTG
ggtgatggaggaaatacgtg

SEQ ID NO: 345658 - DNA, 20 bp, Artificial Sequence
  Description of Artificial Sequence: Synthetic oligonucleotide
  Target: LAMA2; (+) strand; PAM type: YTN; PAM sequence: CTC
tgctgtccgtatcttcctca

SEQ ID NO: 345659 - DNA, 20 bp, Artificial Sequence
  Description of Artificial Sequence: Synthetic oligonucleotide
  Target: LAMA2; (+) strand; PAM type: YTN; PAM sequence: CTG
ctgtccgtatcttcctcaat

SEQ ID NO: 345660 - DNA, 20 bp, Artificial Sequence
  Description of Artificial Sequence: Synthetic oligonucleotide
  Target: LAMA2; (+) strand; PAM type: YTN; PAM sequence: CTG
tccgtatcttcctcaatttt

SEQ ID NO: 345661 - DNA, 20 bp, Artificial Sequence
  Description of Artificial Sequence: Synthetic oligonucleotide
  Target: LAMA2; (+) strand; PAM type: YTN; PAM sequence: CTT
cctcaattttcaacttgaat

SEQ ID NO: 345662 - DNA, 20 bp, Artificial Sequence
  Description of Artificial Sequence: Synthetic oligonucleotide
  Target: LAMA2; (+) strand; PAM type: YTN; PAM sequence: TTC
ctcaattttcaacttgaatt

SEQ ID NO: 345663 - DNA, 20 bp, Artificial Sequence
  Description of Artificial Sequence: Synthetic oligonucleotide
  Target: LAMA2; (+) strand; PAM type: YTN; PAM sequence: CTC
aattttcaacttgaatttta

SEQ ID NO: 345664 - DNA, 20 bp, Artificial Sequence
  Description of Artificial Sequence: Synthetic oligonucleotide
  Target: LAMA2; (+) strand; PAM type: YTN; PAM sequence: TTT
tcaacttgaattttatactt

SEQ ID NO: 345665 - DNA, 20 bp, Artificial Sequence
  Description of Artificial Sequence: Synthetic oligonucleotide
  Target: LAMA2; (+) strand; PAM type: YTN; PAM sequence: TTT
caacttgaattttatacttc

SEQ ID NO: 345666 - DNA, 20 bp, Artificial Sequence
  Description of Artificial Sequence: Synthetic oligonucleotide
  Target: LAMA2; (+) strand; PAM type: YTN; PAM sequence: TTC
aacttgaattttatacttct

SEQ ID NO: 345667 - DNA, 20 bp, Artificial Sequence
  Description of Artificial Sequence: Synthetic oligonucleotide
  Target: LAMA2; (+) strand; PAM type: YTN; PAM sequence: CTT
gaattttatacttctactct

SEQ ID NO: 345668 - DNA, 20 bp, Artificial Sequence
  Description of Artificial Sequence: Synthetic oligonucleotide
  Target: LAMA2; (+) strand; PAM type: YTN; PAM sequence: TTG
aattttatacttctactctg

SEQ ID NO: 345669 - DNA, 20 bp, Artificial Sequence
  Description of Artificial Sequence: Synthetic oligonucleotide
  Target: LAMA2; (+) strand; PAM type: YTN; PAM sequence: TTT
tatacttctactctgacctt

SEQ ID NO: 345670 - DNA, 20 bp, Artificial Sequence
  Description of Artificial Sequence: Synthetic oligonucleotide
  Target: LAMA2; (+) strand; PAM type: YTN; PAM sequence: TTT
atacttctactctgaccttt

SEQ ID NO: 345671 - DNA, 20 bp, Artificial Sequence
  Description of Artificial Sequence: Synthetic oligonucleotide
  Target: LAMA2; (+) strand; PAM type: YTN; PAM sequence: TTA
tacttctactctgaccttta

SEQ ID NO: 345672 - DNA, 20 bp, Artificial Sequence
  Description of Artificial Sequence: Synthetic oligonucleotide
  Target: LAMA2; (+) strand; PAM type: YTN; PAM sequence: CTT
ctactctgacctttaatttt

SEQ ID NO: 345673 - DNA, 20 bp, Artificial Sequence
  Description of Artificial Sequence: Synthetic oligonucleotide
  Target: LAMA2; (+) strand; PAM type: YTN; PAM sequence: TTC
tactctgacctttaattttt

SEQ ID NO: 345674 - DNA, 20 bp, Artificial Sequence
  Description of Artificial Sequence: Synthetic oligonucleotide
  Target: LAMA2; (+) strand; PAM type: YTN; PAM sequence: CTA
ctctgacctttaatttttgt

SEQ ID NO: 345675 - DNA, 20 bp, Artificial Sequence
  Description of Artificial Sequence: Synthetic oligonucleotide
  Target: LAMA2; (+) strand; PAM type: YTN; PAM sequence: CTC
tgacctttaatttttgtgat

SEQ ID NO: 345676 - DNA, 20 bp, Artificial Sequence
  Description of Artificial Sequence: Synthetic oligonucleotide
  Target: LAMA2; (+) strand; PAM type: YTN; PAM sequence: CTG
acctttaatttttgtgatct

SEQ ID NO: 345677 - DNA, 20 bp, Artificial Sequence
  Description of Artificial Sequence: Synthetic oligonucleotide
  Target: LAMA2; (+) strand; PAM type: YTN; PAM sequence: CTT
taatttttgtgatctaattt

SEQ ID NO: 345678 - DNA, 20 bp, Artificial Sequence
  Description of Artificial Sequence: Synthetic oligonucleotide
  Target: LAMA2; (+) strand; PAM type: YTN; PAM sequence: TTT
aatttttgtgatctaatttc

SEQ ID NO: 345679 - DNA, 20 bp, Artificial Sequence
  Description of Artificial Sequence: Synthetic oligonucleotide
  Target: LAMA2; (+) strand; PAM type: YTN; PAM sequence: TTA
atttttgtgatctaatttcc

SEQ ID NO: 345680 - DNA, 20 bp, Artificial Sequence
  Description of Artificial Sequence: Synthetic oligonucleotide
  Target: LAMA2; (+) strand; PAM type: YTN; PAM sequence: TTT
ttgtgatctaatttcctttt

SEQ ID NO: 345681 - DNA, 20 bp, Artificial Sequence
  Description of Artificial Sequence: Synthetic oligonucleotide
  Target: LAMA2; (+) strand; PAM type: YTN; PAM sequence: TTT
tgtgatctaatttccttttc

SEQ ID NO: 345682 - DNA, 20 bp, Artificial Sequence
  Description of Artificial Sequence: Synthetic oligonucleotide
  Target: LAMA2; (+) strand; PAM type: YTN; PAM sequence: TTT
gtgatctaatttccttttcc

SEQ ID NO: 345683 - DNA, 20 bp, Artificial Sequence
  Description of Artificial Sequence: Synthetic oligonucleotide
  Target: LAMA2; (+) strand; PAM type: YTN; PAM sequence: TTG
tgatctaatttccttttccc

SEQ ID NO: 345684 - DNA, 20 bp, Artificial Sequence
  Description of Artificial Sequence: Synthetic oligonucleotide
  Target: LAMA2; (+) strand; PAM type: YTN; PAM sequence: CTA
atttccttttccccaataat

SEQ ID NO: 345685 - DNA, 20 bp, Artificial Sequence
  Description of Artificial Sequence: Synthetic oligonucleotide
  Target: LAMA2; (+) strand; PAM type: YTN; PAM sequence: TTT
ccttttccccaataatattt

SEQ ID NO: 345686 - DNA, 20 bp, Artificial Sequence
  Description of Artificial Sequence: Synthetic oligonucleotide
  Target: LAMA2; (+) strand; PAM type: YTN; PAM sequence: TTC
cttttccccaataatatttg

SEQ ID NO: 345687 - DNA, 20 bp, Artificial Sequence
  Description of Artificial Sequence: Synthetic oligonucleotide
  Target: LAMA2; (+) strand; PAM type: YTN; PAM sequence: CTT
ttccccaataatatttgttt

SEQ ID NO: 345688 - DNA, 20 bp, Artificial Sequence
  Description of Artificial Sequence: Synthetic oligonucleotide
  Target: LAMA2; (+) strand; PAM type: YTN; PAM sequence: TTT
tccccaataatatttgtttt

SEQ ID NO: 345689 - DNA, 20 bp, Artificial Sequence
  Description of Artificial Sequence: Synthetic oligonucleotide
  Target: LAMA2; (+) strand; PAM type: YTN; PAM sequence: TTT
ccccaataatatttgttttt

SEQ ID NO: 345690 - DNA, 20 bp, Artificial Sequence
  Description of Artificial Sequence: Synthetic oligonucleotide
  Target: LAMA2; (+) strand; PAM type: YTN; PAM sequence: TTC
cccaataatatttgtttttg

SEQ ID NO: 345691 - DNA, 20 bp, Artificial Sequence
  Description of Artificial Sequence: Synthetic oligonucleotide
  Target: LAMA2; (+) strand; PAM type: YTN; PAM sequence: TTT
gtttttgaactagtcttcct

SEQ ID NO: 345692 - DNA, 20 bp, Artificial Sequence
  Description of Artificial Sequence: Synthetic oligonucleotide
  Target: LAMA2; (+) strand; PAM type: YTN; PAM sequence: TTG
tttttgaactagtcttcctc

SEQ ID NO: 345693 - DNA, 20 bp, Artificial Sequence
  Description of Artificial Sequence: Synthetic oligonucleotide
  Target: LAMA2; (+) strand; PAM type: YTN; PAM sequence: TTT
ttgaactagtcttcctcatg

SEQ ID NO: 345694 - DNA, 20 bp, Artificial Sequence
  Description of Artificial Sequence: Synthetic oligonucleotide
  Target: LAMA2; (+) strand; PAM type: YTN; PAM sequence: TTT
tgaactagtcttcctcatgc

SEQ ID NO: 345695 - DNA, 20 bp, Artificial Sequence
  Description of Artificial Sequence: Synthetic oligonucleotide
  Target: LAMA2; (+) strand; PAM type: YTN; PAM sequence: TTT
gaactagtcttcctcatgcc

SEQ ID NO: 345696 - DNA, 20 bp, Artificial Sequence
  Description of Artificial Sequence: Synthetic oligonucleotide
  Target: LAMA2; (+) strand; PAM type: YTN; PAM sequence: TTG
aactagtcttcctcatgcca

SEQ ID NO: 345697 - DNA, 20 bp, Artificial Sequence
  Description of Artificial Sequence: Synthetic oligonucleotide
  Target: LAMA2; (+) strand; PAM type: YTN; PAM sequence: CTA
gtcttcctcatgccatttaa

SEQ ID NO: 345698 - DNA, 20 bp, Artificial Sequence
  Description of Artificial Sequence: Synthetic oligonucleotide
  Target: LAMA2; (+) strand; PAM type: YTN; PAM sequence: CTT
cctcatgccatttaaagaaa

SEQ ID NO: 345699 - DNA, 20 bp, Artificial Sequence
  Description of Artificial Sequence: Synthetic oligonucleotide
  Target: LAMA2; (+) strand; PAM type: YTN; PAM sequence: TTC
ctcatgccatttaaagaaaa

SEQ ID NO: 345700 - DNA, 20 bp, Artificial Sequence
  Description of Artificial Sequence: Synthetic oligonucleotide
  Target: LAMA2; (+) strand; PAM type: YTN; PAM sequence: CTC
atgccatttaaagaaaaatt

SEQ ID NO: 345701 - DNA, 20 bp, Artificial Sequence
  Description of Artificial Sequence: Synthetic oligonucleotide
  Target: LAMA2; (+) strand; PAM type: YTN; PAM sequence: TTT
aaagaaaaatttcaggaata

SEQ ID NO: 345702 - DNA, 20 bp, Artificial Sequence
  Description of Artificial Sequence: Synthetic oligonucleotide
  Target: LAMA2; (+) strand; PAM type: YTN; PAM sequence: TTA
aagaaaaatttcaggaataa

SEQ ID NO: 345703 - DNA, 20 bp, Artificial Sequence
  Description of Artificial Sequence: Synthetic oligonucleotide
  Target: LAMA2; (+) strand; PAM type: YTN; PAM sequence: TTT
caggaataaggaaaaacaca

SEQ ID NO: 345704 - DNA, 20 bp, Artificial Sequence
  Description of Artificial Sequence: Synthetic oligonucleotide
  Target: LAMA2; (+) strand; PAM type: YTN; PAM sequence: TTC
aggaataaggaaaaacacag

SEQ ID NO: 345705 - DNA, 20 bp, Artificial Sequence
  Description of Artificial Sequence: Synthetic oligonucleotide
  Target: LAMA2; (+) strand; PAM type: YTN; PAM sequence: TTA
aaatggagaaacatcaatat

SEQ ID NO: 345706 - DNA, 20 bp, Artificial Sequence
  Description of Artificial Sequence: Synthetic oligonucleotide
  Target: LAMA2; (+) strand; PAM type: YTN; PAM sequence: TTG
ttataaacagagcaccccaa

SEQ ID NO: 345707 - DNA, 20 bp, Artificial Sequence
  Description of Artificial Sequence: Synthetic oligonucleotide
  Target: LAMA2; (+) strand; PAM type: YTN; PAM sequence: TTA
taaacagagcaccccaaaat

SEQ ID NO: 345708 - DNA, 20 bp, Artificial Sequence
  Description of Artificial Sequence: Synthetic oligonucleotide
  Target: LAMA2; (+) strand; PAM type: YTN; PAM sequence: TTA
ttttgaaagagatgcactca

SEQ ID NO: 345709 - DNA, 20 bp, Artificial Sequence
  Description of Artificial Sequence: Synthetic oligonucleotide
  Target: LAMA2; (+) strand; PAM type: YTN; PAM sequence: TTT
tgaaagagatgcactcattt

SEQ ID NO: 345710 - DNA, 20 bp, Artificial Sequence
  Description of Artificial Sequence: Synthetic oligonucleotide
  Target: LAMA2; (+) strand; PAM type: YTN; PAM sequence: TTT
gaaagagatgcactcatttg

SEQ ID NO: 345711 - DNA, 20 bp, Artificial Sequence
  Description of Artificial Sequence: Synthetic oligonucleotide
  Target: LAMA2; (+) strand; PAM type: YTN; PAM sequence: TTG
aaagagatgcactcatttga

SEQ ID NO: 345712 - DNA, 20 bp, Artificial Sequence
  Description of Artificial Sequence: Synthetic oligonucleotide
  Target: LAMA2; (+) strand; PAM type: YTN; PAM sequence: CTC
atttgaatttataaactctg

SEQ ID NO: 345713 - DNA, 20 bp, Artificial Sequence
  Description of Artificial Sequence: Synthetic oligonucleotide
  Target: LAMA2; (+) strand; PAM type: YTN; PAM sequence: TTT
gaatttataaactctggaat

SEQ ID NO: 345714 - DNA, 20 bp, Artificial Sequence
  Description of Artificial Sequence: Synthetic oligonucleotide
  Target: LAMA2; (+) strand; PAM type: YTN; PAM sequence: TTG
aatttataaactctggaatg

SEQ ID NO: 345715 - DNA, 20 bp, Artificial Sequence
  Description of Artificial Sequence: Synthetic oligonucleotide
  Target: LAMA2; (+) strand; PAM type: YTN; PAM sequence: TTT
ataaactctggaatgcttat

SEQ ID NO: 345716 - DNA, 20 bp, Artificial Sequence
  Description of Artificial Sequence: Synthetic oligonucleotide
  Target: LAMA2; (+) strand; PAM type: YTN; PAM sequence: TTA
taaactctggaatgcttatt

SEQ ID NO: 345717 - DNA, 20 bp, Artificial Sequence
  Description of Artificial Sequence: Synthetic oligonucleotide
  Target: LAMA2; (+) strand; PAM type: YTN; PAM sequence: CTC
tggaatgcttattttaaaat

SEQ ID NO: 345718 - DNA, 20 bp, Artificial Sequence
  Description of Artificial Sequence: Synthetic oligonucleotide
  Target: LAMA2; (+) strand; PAM type: YTN; PAM sequence: CTG
gaatgcttattttaaaatta

SEQ ID NO: 345719 - DNA, 20 bp, Artificial Sequence
  Description of Artificial Sequence: Synthetic oligonucleotide
  Target: LAMA2; (+) strand; PAM type: YTN; PAM sequence: CTT
attttaaaattaactaatgt

SEQ ID NO: 345720 - DNA, 20 bp, Artificial Sequence
  Description of Artificial Sequence: Synthetic oligonucleotide
  Target: LAMA2; (+) strand; PAM type: YTN; PAM sequence: TTA
ttttaaaattaactaatgtg

SEQ ID NO: 345721 - DNA, 20 bp, Artificial Sequence
  Description of Artificial Sequence: Synthetic oligonucleotide
  Target: LAMA2; (+) strand; PAM type: YTN; PAM sequence: TTT
taaaattaactaatgtgtta

SEQ ID NO: 345722 - DNA, 20 bp, Artificial Sequence
  Description of Artificial Sequence: Synthetic oligonucleotide
  Target: LAMA2; (+) strand; PAM type: YTN; PAM sequence: TTT
aaaattaactaatgtgttaa

SEQ ID NO: 345723 - DNA, 20 bp, Artificial Sequence
  Description of Artificial Sequence: Synthetic oligonucleotide
  Target: LAMA2; (+) strand; PAM type: YTN; PAM sequence: TTA
aaattaactaatgtgttaac

SEQ ID NO: 345724 - DNA, 20 bp, Artificial Sequence
  Description of Artificial Sequence: Synthetic oligonucleotide
  Target: LAMA2; (+) strand; PAM type: YTN; PAM sequence: TTA
actaatgtgttaacctacat

SEQ ID NO: 345725 - DNA, 20 bp, Artificial Sequence
  Description of Artificial Sequence: Synthetic oligonucleotide
  Target: LAMA2; (+) strand; PAM type: YTN; PAM sequence: CTA
atgtgttaacctacatacaa

SEQ ID NO: 345726 - DNA, 20 bp, Artificial Sequence
  Description of Artificial Sequence: Synthetic oligonucleotide
  Target: LAMA2; (+) strand; PAM type: YTN; PAM sequence: TTA
acctacatacaaatttgtat

SEQ ID NO: 345727 - DNA, 20 bp, Artificial Sequence
  Description of Artificial Sequence: Synthetic oligonucleotide
  Target: LAMA2; (+) strand; PAM type: YTN; PAM sequence: CTA
catacaaatttgtattttta

SEQ ID NO: 345728 - DNA, 20 bp, Artificial Sequence
  Description of Artificial Sequence: Synthetic oligonucleotide
  Target: LAMA2; (+) strand; PAM type: YTN; PAM sequence: TTT
gtatttttacttgaaggaaa

SEQ ID NO: 345729 - DNA, 20 bp, Artificial Sequence
  Description of Artificial Sequence: Synthetic oligonucleotide
  Target: LAMA2; (+) strand; PAM type: YTN; PAM sequence: TTG
tatttttacttgaaggaaaa

SEQ ID NO: 345730 - DNA, 20 bp, Artificial Sequence
  Description of Artificial Sequence: Synthetic oligonucleotide
  Target: LAMA2; (+) strand; PAM type: YTN; PAM sequence: TTT
ttacttgaaggaaaagcagc

SEQ ID NO: 345731 - DNA, 20 bp, Artificial Sequence
  Description of Artificial Sequence: Synthetic oligonucleotide
  Target: LAMA2; (+) strand; PAM type: YTN; PAM sequence: TTT
tacttgaaggaaaagcagca

SEQ ID NO: 345732 - DNA, 20 bp, Artificial Sequence
  Description of Artificial Sequence: Synthetic oligonucleotide
  Target: LAMA2; (+) strand; PAM type: YTN; PAM sequence: TTT
acttgaaggaaaagcagcat

SEQ ID NO: 345733 - DNA, 20 bp, Artificial Sequence
  Description of Artificial Sequence: Synthetic oligonucleotide
  Target: LAMA2; (+) strand; PAM type: YTN; PAM sequence: TTA
cttgaaggaaaagcagcatt

SEQ ID NO: 345734 - DNA, 20 bp, Artificial Sequence
  Description of Artificial Sequence: Synthetic oligonucleotide
  Target: LAMA2; (+) strand; PAM type: YTN; PAM sequence: CTT
gaaggaaaagcagcattgct

SEQ ID NO: 345735 - DNA, 20 bp, Artificial Sequence
  Description of Artificial Sequence: Synthetic oligonucleotide
  Target: LAMA2; (+) strand; PAM type: YTN; PAM sequence: TTG
aaggaaaagcagcattgctg

SEQ ID NO: 345736 - DNA, 20 bp, Artificial Sequence
  Description of Artificial Sequence: Synthetic oligonucleotide
  Target: LAMA2; (+) strand; PAM type: YTN; PAM sequence: TTG
ctggtagtgcacatgtgctt

SEQ ID NO: 345737 - DNA, 20 bp, Artificial Sequence
  Description of Artificial Sequence: Synthetic oligonucleotide
  Target: LAMA2; (+) strand; PAM type: YTN; PAM sequence: CTG
gtagtgcacatgtgcttctg

SEQ ID NO: 345738 - DNA, 20 bp, Artificial Sequence
  Description of Artificial Sequence: Synthetic oligonucleotide
  Target: LAMA2; (+) strand; PAM type: YTN; PAM sequence: CTT
ctgtacatacagattgtaca

SEQ ID NO: 345739 - DNA, 20 bp, Artificial Sequence
  Description of Artificial Sequence: Synthetic oligonucleotide
  Target: LAMA2; (+) strand; PAM type: YTN; PAM sequence: TTC
tgtacatacagattgtacac

SEQ ID NO: 345740 - DNA, 20 bp, Artificial Sequence
  Description of Artificial Sequence: Synthetic oligonucleotide
  Target: LAMA2; (+) strand; PAM type: YTN; PAM sequence: CTG
tacatacagattgtacacat

SEQ ID NO: 345741 - DNA, 20 bp, Artificial Sequence
  Description of Artificial Sequence: Synthetic oligonucleotide
  Target: LAMA2; (+) strand; PAM type: YTN; PAM sequence: TTG
tacacattgaggatgatgtt

SEQ ID NO: 345742 - DNA, 20 bp, Artificial Sequence
  Description of Artificial Sequence: Synthetic oligonucleotide
  Target: LAMA2; (+) strand; PAM type: YTN; PAM sequence: TTG
aggatgatgtttatgccata

SEQ ID NO: 345743 - DNA, 20 bp, Artificial Sequence
  Description of Artificial Sequence: Synthetic oligonucleotide
  Target: LAMA2; (+) strand; PAM type: YTN; PAM sequence: TTT
atgccataagagaatcattt

SEQ ID NO: 345744 - DNA, 20 bp, Artificial Sequence
  Description of Artificial Sequence: Synthetic oligonucleotide
  Target: LAMA2; (+) strand; PAM type: YTN; PAM sequence: TTA
tgccataagagaatcatttc

SEQ ID NO: 345745 - DNA, 20 bp, Artificial Sequence
  Description of Artificial Sequence: Synthetic oligonucleotide
  Target: LAMA2; (+) strand; PAM type: YTN; PAM sequence: TTT
cctctctttttatcagggcc

SEQ ID NO: 345746 - DNA, 20 bp, Artificial Sequence
  Description of Artificial Sequence: Synthetic oligonucleotide
  Target: LAMA2; (+) strand; PAM type: YTN; PAM sequence: TTC
ctctctttttatcagggcca

SEQ ID NO: 345747 - DNA, 20 bp, Artificial Sequence
  Description of Artificial Sequence: Synthetic oligonucleotide
  Target: LAMA2; (+) strand; PAM type: YTN; PAM sequence: CTC
tctttttatcagggccatta

SEQ ID NO: 345748 - DNA, 20 bp, Artificial Sequence
  Description of Artificial Sequence: Synthetic oligonucleotide
  Target: LAMA2; (+) strand; PAM type: YTN; PAM sequence: CTC
tttttatcagggccattaca

SEQ ID NO: 345749 - DNA, 20 bp, Artificial Sequence
  Description of Artificial Sequence: Synthetic oligonucleotide
  Target: LAMA2; (+) strand; PAM type: YTN; PAM sequence: CTT
tttatcagggccattacatc

SEQ ID NO: 345750 - DNA, 20 bp, Artificial Sequence
  Description of Artificial Sequence: Synthetic oligonucleotide
  Target: LAMA2; (+) strand; PAM type: YTN; PAM sequence: TTT
ttatcagggccattacatca

SEQ ID NO: 345751 - DNA, 20 bp, Artificial Sequence
  Description of Artificial Sequence: Synthetic oligonucleotide
  Target: LAMA2; (+) strand; PAM type: YTN; PAM sequence: TTT
tatcagggccattacatcat

SEQ ID NO: 345752 - DNA, 20 bp, Artificial Sequence
  Description of Artificial Sequence: Synthetic oligonucleotide
  Target: LAMA2; (+) strand; PAM type: YTN; PAM sequence: TTT
atcagggccattacatcatt

SEQ ID NO: 345753 - DNA, 20 bp, Artificial Sequence
  Description of Artificial Sequence: Synthetic oligonucleotide
  Target: LAMA2; (+) strand; PAM type: YTN; PAM sequence: TTA
tcagggccattacatcattt

SEQ ID NO: 345754 - DNA, 20 bp, Artificial Sequence
  Description of Artificial Sequence: Synthetic oligonucleotide
  Target: LAMA2; (+) strand; PAM type: YTN; PAM sequence: TTA
catcatttctcaaatagacc

SEQ ID NO: 345755 - DNA, 20 bp, Artificial Sequence
  Description of Artificial Sequence: Synthetic oligonucleotide
  Target: LAMA2; (+) strand; PAM type: YTN; PAM sequence: TTT
ctcaaatagaccactgttag

SEQ ID NO: 345756 - DNA, 20 bp, Artificial Sequence
  Description of Artificial Sequence: Synthetic oligonucleotide
  Target: LAMA2; (+) strand; PAM type: YTN; PAM sequence: TTC
tcaaatagaccactgttagg

SEQ ID NO: 345757 - DNA, 20 bp, Artificial Sequence
  Description of Artificial Sequence: Synthetic oligonucleotide
  Target: LAMA2; (+) strand; PAM type: YTN; PAM sequence: CTC
aaatagaccactgttaggaa

SEQ ID NO: 345758 - DNA, 20 bp, Artificial Sequence
  Description of Artificial Sequence: Synthetic oligonucleotide
  Target: LAMA2; (+) strand; PAM type: YTN; PAM sequence: CTG
ttaggaagtagggatatata

SEQ ID NO: 345759 - DNA, 20 bp, Artificial Sequence
  Description of Artificial Sequence: Synthetic oligonucleotide
  Target: LAMA2; (+) strand; PAM type: YTN; PAM sequence: TTA
ggaagtagggatatataagt

SEQ ID NO: 345760 - DNA, 20 bp, Artificial Sequence
  Description of Artificial Sequence: Synthetic oligonucleotide
  Target: LAMA2; (+) strand; PAM type: YTN; PAM sequence: CTC
aagtaaaaccagagtggtgc

SEQ ID NO: 345761 - DNA, 20 bp, Artificial Sequence
  Description of Artificial Sequence: Synthetic oligonucleotide
  Target: LAMA2; (+) strand; PAM type: YTN; PAM sequence: CTA
caaattgagaataaggcata

SEQ ID NO: 345762 - DNA, 20 bp, Artificial Sequence
  Description of Artificial Sequence: Synthetic oligonucleotide
  Target: LAMA2; (+) strand; PAM type: YTN; PAM sequence: TTG
agaataaggcatattttatc

SEQ ID NO: 345763 - DNA, 20 bp, Artificial Sequence
  Description of Artificial Sequence: Synthetic oligonucleotide
  Target: LAMA2; (+) strand; PAM type: YTN; PAM sequence: TTT
tatcttttaaaataacatat

SEQ ID NO: 345764 - DNA, 20 bp, Artificial Sequence
  Description of Artificial Sequence: Synthetic oligonucleotide
  Target: LAMA2; (+) strand; PAM type: YTN; PAM sequence: TTT
atcttttaaaataacatatt

SEQ ID NO: 345765 - DNA, 20 bp, Artificial Sequence
  Description of Artificial Sequence: Synthetic oligonucleotide
  Target: LAMA2; (+) strand; PAM type: YTN; PAM sequence: TTA
tcttttaaaataacatattt

SEQ ID NO: 345766 - DNA, 20 bp, Artificial Sequence
  Description of Artificial Sequence: Synthetic oligonucleotide
  Target: LAMA2; (+) strand; PAM type: YTN; PAM sequence: CTT
ttaaaataacatattttggc

SEQ ID NO: 345767 - DNA, 20 bp, Artificial Sequence
  Description of Artificial Sequence: Synthetic oligonucleotide
  Target: LAMA2; (+) strand; PAM type: YTN; PAM sequence: TTT
taaaataacatattttggcc

SEQ ID NO: 345768 - DNA, 20 bp, Artificial Sequence
  Description of Artificial Sequence: Synthetic oligonucleotide
  Target: LAMA2; (+) strand; PAM type: YTN; PAM sequence: TTT
aaaataacatattttggccg

SEQ ID NO: 345769 - DNA, 20 bp, Artificial Sequence
  Description of Artificial Sequence: Synthetic oligonucleotide
  Target: LAMA2; (+) strand; PAM type: YTN; PAM sequence: TTA
aaataacatattttggccgg

SEQ ID NO: 345770 - DNA, 20 bp, Artificial Sequence
  Description of Artificial Sequence: Synthetic oligonucleotide
  Target: LAMA2; (+) strand; PAM type: YTN; PAM sequence: TTT
tggccgggcgcggtggctca

SEQ ID NO: 345771 - DNA, 20 bp, Artificial Sequence
  Description of Artificial Sequence: Synthetic oligonucleotide
  Target: LAMA2; (+) strand; PAM type: YTN; PAM sequence: TTT
ggccgggcgcggtggctcac

SEQ ID NO: 345772 - DNA, 20 bp, Artificial Sequence
  Description of Artificial Sequence: Synthetic oligonucleotide
  Target: LAMA2; (+) strand; PAM type: YTN; PAM sequence: TTG
gccgggcgcggtggctcacg

SEQ ID NO: 345773 - DNA, 20 bp, Artificial Sequence
  Description of Artificial Sequence: Synthetic oligonucleotide
  Target: LAMA2; (+) strand; PAM type: YTN; PAM sequence: CTC
acgcctgtaatcccagcact

SEQ ID NO: 345774 - DNA, 20 bp, Artificial Sequence
  Description of Artificial Sequence: Synthetic oligonucleotide
  Target: LAMA2; (+) strand; PAM type: YTN; PAM sequence: CTG
taatcccagcactttgggag

SEQ ID NO: 345775 - DNA, 20 bp, Artificial Sequence
  Description of Artificial Sequence: Synthetic oligonucleotide
  Target: LAMA2; (+) strand; PAM type: YTN; PAM sequence: CTT
tgggaggccgaggcgggcgg

SEQ ID NO: 345776 - DNA, 20 bp, Artificial Sequence
  Description of Artificial Sequence: Synthetic oligonucleotide
  Target: LAMA2; (+) strand; PAM type: YTN; PAM sequence: TTT
gggaggccgaggcgggcgga

SEQ ID NO: 345777 - DNA, 20 bp, Artificial Sequence
  Description of Artificial Sequence: Synthetic oligonucleotide
  Target: LAMA2; (+) strand; PAM type: YTN; PAM sequence: TTG
ggaggccgaggcgggcggat

SEQ ID NO: 345778 - DNA, 20 bp, Artificial Sequence
  Description of Artificial Sequence: Synthetic oligonucleotide
  Target: LAMA2; (+) strand; PAM type: YTN; PAM sequence: CTA
aaacggtgaaaccccgtctc

SEQ ID NO: 345779 - DNA, 20 bp, Artificial Sequence
  Description of Artificial Sequence: Synthetic oligonucleotide
  Target: LAMA2; (+) strand; PAM type: YTN; PAM sequence: CTC
tactaaaaatacaaaaaatt

SEQ ID NO: 345780 - DNA, 20 bp, Artificial Sequence
  Description of Artificial Sequence: Synthetic oligonucleotide
  Target: LAMA2; (+) strand; PAM type: YTN; PAM sequence: CTA
ctaaaaatacaaaaaattag

SEQ ID NO: 345781 - DNA, 20 bp, Artificial Sequence
  Description of Artificial Sequence: Synthetic oligonucleotide
  Target: LAMA2; (+) strand; PAM type: YTN; PAM sequence: CTA
aaaatacaaaaaattagcca

SEQ ID NO: 345782 - DNA, 20 bp, Artificial Sequence
  Description of Artificial Sequence: Synthetic oligonucleotide
  Target: LAMA2; (+) strand; PAM type: YTN; PAM sequence: TTA
gccaggcgtagtggcgggcg

SEQ ID NO: 345783 - DNA, 20 bp, Artificial Sequence
  Description of Artificial Sequence: Synthetic oligonucleotide
  Target: LAMA2; (+) strand; PAM type: YTN; PAM sequence: CTG
tagtcccagctacttgggag

SEQ ID NO: 345784 - DNA, 20 bp, Artificial Sequence
  Description of Artificial Sequence: Synthetic oligonucleotide
  Target: LAMA2; (+) strand; PAM type: YTN; PAM sequence: CTA
cttgggaggctgaggcagga

SEQ ID NO: 345785 - DNA, 20 bp, Artificial Sequence
  Description of Artificial Sequence: Synthetic oligonucleotide
  Target: LAMA2; (+) strand; PAM type: YTN; PAM sequence: CTT
gggaggctgaggcaggagaa

SEQ ID NO: 345786 - DNA, 20 bp, Artificial Sequence
  Description of Artificial Sequence: Synthetic oligonucleotide
  Target: LAMA2; (+) strand; PAM type: YTN; PAM sequence: TTG
ggaggctgaggcaggagaat

SEQ ID NO: 345787 - DNA, 20 bp, Artificial Sequence
  Description of Artificial Sequence: Synthetic oligonucleotide
  Target: LAMA2; (+) strand; PAM type: YTN; PAM sequence: CTG
aggcaggagaatggcgtgaa

SEQ ID NO: 345788 - DNA, 20 bp, Artificial Sequence
  Description of Artificial Sequence: Synthetic oligonucleotide
  Target: LAMA2; (+) strand; PAM type: YTN; PAM sequence: CTT
gcagtgagccgagatcccgc

SEQ ID NO: 345789 - DNA, 20 bp, Artificial Sequence
  Description of Artificial Sequence: Synthetic oligonucleotide
  Target: LAMA2; (+) strand; PAM type: YTN; PAM sequence: TTG
cagtgagccgagatcccgcc

SEQ ID NO: 345790 - DNA, 20 bp, Artificial Sequence
  Description of Artificial Sequence: Synthetic oligonucleotide
  Target: LAMA2; (+) strand; PAM type: YTN; PAM sequence: CTG
cactccagcctgggcgacag

SEQ ID NO: 345791 - DNA, 20 bp, Artificial Sequence
  Description of Artificial Sequence: Synthetic oligonucleotide
  Target: LAMA2; (+) strand; PAM type: YTN; PAM sequence: CTC
cagcctgggcgacagagcga

SEQ ID NO: 345792 - DNA, 20 bp, Artificial Sequence
  Description of Artificial Sequence: Synthetic oligonucleotide
  Target: LAMA2; (+) strand; PAM type: YTN; PAM sequence: CTG
ggcgacagagcgagattccg

SEQ ID NO: 345793 - DNA, 20 bp, Artificial Sequence
  Description of Artificial Sequence: Synthetic oligonucleotide
  Target: LAMA2; (+) strand; PAM type: YTN; PAM sequence: TTC
cgtctcaaaaaaaaaaaaaa

SEQ ID NO: 345794 - DNA, 20 bp, Artificial Sequence
  Description of Artificial Sequence: Synthetic oligonucleotide
  Target: LAMA2; (+) strand; PAM type: YTN; PAM sequence: CTC
aaaaaaaaaaaaaaaaaaaa

SEQ ID NO: 345795 - DNA, 20 bp, Artificial Sequence
  Description of Artificial Sequence: Synthetic oligonucleotide
  Target: LAMA2; (+) strand; PAM type: YTN; PAM sequence: TTT
tagagactcagtaaaataat

SEQ ID NO: 345796 - DNA, 20 bp, Artificial Sequence
  Description of Artificial Sequence: Synthetic oligonucleotide
  Target: LAMA2; (+) strand; PAM type: YTN; PAM sequence: TTT
agagactcagtaaaataatt

SEQ ID NO: 345797 - DNA, 20 bp, Artificial Sequence
  Description of Artificial Sequence: Synthetic oligonucleotide
  Target: LAMA2; (+) strand; PAM type: YTN; PAM sequence: TTA
gagactcagtaaaataattt

SEQ ID NO: 345798 - DNA, 20 bp, Artificial Sequence
  Description of Artificial Sequence: Synthetic oligonucleotide
  Target: LAMA2; (+) strand; PAM type: YTN; PAM sequence: CTC
agtaaaataattttaaaggg

SEQ ID NO: 345799 - DNA, 20 bp, Artificial Sequence
  Description of Artificial Sequence: Synthetic oligonucleotide
  Target: LAMA2; (+) strand; PAM type: YTN; PAM sequence: TTT
taaaggggcagaagtacaga

SEQ ID NO: 345800 - DNA, 20 bp, Artificial Sequence
  Description of Artificial Sequence: Synthetic oligonucleotide
  Target: LAMA2; (+) strand; PAM type: YTN; PAM sequence: TTT
aaaggggcagaagtacagat

SEQ ID NO: 345801 - DNA, 20 bp, Artificial Sequence
  Description of Artificial Sequence: Synthetic oligonucleotide
  Target: LAMA2; (+) strand; PAM type: YTN; PAM sequence: TTA
aaggggcagaagtacagatg

SEQ ID NO: 345802 - DNA, 20 bp, Artificial Sequence
  Description of Artificial Sequence: Synthetic oligonucleotide
  Target: LAMA2; (+) strand; PAM type: YTN; PAM sequence: CTG
ttaggaggaagcattatttc

SEQ ID NO: 345803 - DNA, 20 bp, Artificial Sequence
  Description of Artificial Sequence: Synthetic oligonucleotide
  Target: LAMA2; (+) strand; PAM type: YTN; PAM sequence: TTA
ggaggaagcattatttcagc

SEQ ID NO: 345804 - DNA, 20 bp, Artificial Sequence
  Description of Artificial Sequence: Synthetic oligonucleotide
  Target: LAMA2; (+) strand; PAM type: YTN; PAM sequence: TTA
tttcagctacagcacattat

SEQ ID NO: 345805 - DNA, 20 bp, Artificial Sequence
  Description of Artificial Sequence: Synthetic oligonucleotide
  Target: LAMA2; (+) strand; PAM type: YTN; PAM sequence: TTT
cagctacagcacattattgg

SEQ ID NO: 345806 - DNA, 20 bp, Artificial Sequence
  Description of Artificial Sequence: Synthetic oligonucleotide
  Target: LAMA2; (+) strand; PAM type: YTN; PAM sequence: TTC
agctacagcacattattgga

SEQ ID NO: 345807 - DNA, 20 bp, Artificial Sequence
  Description of Artificial Sequence: Synthetic oligonucleotide
  Target: LAMA2; (+) strand; PAM type: YTN; PAM sequence: CTA
cagcacattattggaggata

SEQ ID NO: 345808 - DNA, 20 bp, Artificial Sequence
  Description of Artificial Sequence: Synthetic oligonucleotide
  Target: LAMA2; (+) strand; PAM type: YTN; PAM sequence: TTA
ttggaggataggaagagcat

SEQ ID NO: 345809 - DNA, 20 bp, Artificial Sequence
  Description of Artificial Sequence: Synthetic oligonucleotide
  Target: LAMA2; (+) strand; PAM type: YTN; PAM sequence: TTG
gaggataggaagagcatatg

SEQ ID NO: 345810 - DNA, 20 bp, Artificial Sequence
  Description of Artificial Sequence: Synthetic oligonucleotide
  Target: LAMA2; (+) strand; PAM type: YTN; PAM sequence: TTC
cagtgaaagagcttaattat

SEQ ID NO: 345811 - DNA, 20 bp, Artificial Sequence
  Description of Artificial Sequence: Synthetic oligonucleotide
  Target: LAMA2; (+) strand; PAM type: YTN; PAM sequence: CTT
aattataatagagcagaaag

SEQ ID NO: 345812 - DNA, 20 bp, Artificial Sequence
  Description of Artificial Sequence: Synthetic oligonucleotide
  Target: LAMA2; (+) strand; PAM type: YTN; PAM sequence: TTA
attataatagagcagaaagg

SEQ ID NO: 345813 - DNA, 20 bp, Artificial Sequence
  Description of Artificial Sequence: Synthetic oligonucleotide
  Target: LAMA2; (+) strand; PAM type: YTN; PAM sequence: TTA
taatagagcagaaaggatta

SEQ ID NO: 345814 - DNA, 20 bp, Artificial Sequence
  Description of Artificial Sequence: Synthetic oligonucleotide
  Target: LAMA2; (+) strand; PAM type: YTN; PAM sequence: TTA
gaaacagaaaagaaggtgga

SEQ ID NO: 345815 - DNA, 20 bp, Artificial Sequence
  Description of Artificial Sequence: Synthetic oligonucleotide
  Target: LAMA2; (+) strand; PAM type: YTN; PAM sequence: TTA
tcaggaataaagtcaaagaa

SEQ ID NO: 345816 - DNA, 20 bp, Artificial Sequence
  Description of Artificial Sequence: Synthetic oligonucleotide
  Target: LAMA2; (+) strand; PAM type: YTN; PAM sequence: CTG
aatattgatcagattttcag

SEQ ID NO: 345817 - DNA, 20 bp, Artificial Sequence
  Description of Artificial Sequence: Synthetic oligonucleotide
  Target: LAMA2; (+) strand; PAM type: YTN; PAM sequence: TTG
atcagattttcagaaaaacc

SEQ ID NO: 345818 - DNA, 20 bp, Artificial Sequence
  Description of Artificial Sequence: Synthetic oligonucleotide
  Target: LAMA2; (+) strand; PAM type: YTN; PAM sequence: TTT
tcagaaaaacctgcaaacaa

SEQ ID NO: 345819 - DNA, 20 bp, Artificial Sequence
  Description of Artificial Sequence: Synthetic oligonucleotide
  Target: LAMA2; (+) strand; PAM type: YTN; PAM sequence: TTT
cagaaaaacctgcaaacaaa

SEQ ID NO: 345820 - DNA, 20 bp, Artificial Sequence
  Description of Artificial Sequence: Synthetic oligonucleotide
  Target: LAMA2; (+) strand; PAM type: YTN; PAM sequence: TTC
agaaaaacctgcaaacaaac

SEQ ID NO: 345821 - DNA, 20 bp, Artificial Sequence
  Description of Artificial Sequence: Synthetic oligonucleotide
  Target: LAMA2; (+) strand; PAM type: YTN; PAM sequence: CTG
caaacaaaccccaccacata

SEQ ID NO: 345822 - DNA, 20 bp, Artificial Sequence
  Description of Artificial Sequence: Synthetic oligonucleotide
  Target: LAMA2; (+) strand; PAM type: YTN; PAM sequence: CTA
gcactagtcataggactgag

SEQ ID NO: 345823 - DNA, 20 bp, Artificial Sequence
  Description of Artificial Sequence: Synthetic oligonucleotide
  Target: LAMA2; (+) strand; PAM type: YTN; PAM sequence: CTA
gtcataggactgagatttgt

SEQ ID NO: 345824 - DNA, 20 bp, Artificial Sequence
  Description of Artificial Sequence: Synthetic oligonucleotide
  Target: LAMA2; (+) strand; PAM type: YTN; PAM sequence: CTG
agatttgtcaaagctagctc

SEQ ID NO: 345825 - DNA, 20 bp, Artificial Sequence
  Description of Artificial Sequence: Synthetic oligonucleotide
  Target: LAMA2; (+) strand; PAM type: YTN; PAM sequence: TTT
gtcaaagctagctctcttct

SEQ ID NO: 345826 - DNA, 20 bp, Artificial Sequence
  Description of Artificial Sequence: Synthetic oligonucleotide
  Target: LAMA2; (+) strand; PAM type: YTN; PAM sequence: TTG
tcaaagctagctctcttctg

SEQ ID NO: 345827 - DNA, 20 bp, Artificial Sequence
  Description of Artificial Sequence: Synthetic oligonucleotide
  Target: LAMA2; (+) strand; PAM type: YTN; PAM sequence: CTA
gctctcttctggtgcactct

SEQ ID NO: 345828 - DNA, 20 bp, Artificial Sequence
  Description of Artificial Sequence: Synthetic oligonucleotide
  Target: LAMA2; (+) strand; PAM type: YTN; PAM sequence: CTC
tcttctggtgcactctggtt

SEQ ID NO: 345829 - DNA, 20 bp, Artificial Sequence
  Description of Artificial Sequence: Synthetic oligonucleotide
  Target: LAMA2; (+) strand; PAM type: YTN; PAM sequence: CTC
ttctggtgcactctggttca

SEQ ID NO: 345830 - DNA, 20 bp, Artificial Sequence
  Description of Artificial Sequence: Synthetic oligonucleotide
  Target: LAMA2; (+) strand; PAM type: YTN; PAM sequence: CTT
ctggtgcactctggttcact

SEQ ID NO: 345831 - DNA, 20 bp, Artificial Sequence
  Description of Artificial Sequence: Synthetic oligonucleotide
  Target: LAMA2; (+) strand; PAM type: YTN; PAM sequence: TTC
tggtgcactctggttcactg

SEQ ID NO: 345832 - DNA, 20 bp, Artificial Sequence
  Description of Artificial Sequence: Synthetic oligonucleotide
  Target: LAMA2; (+) strand; PAM type: YTN; PAM sequence: CTG
gtgcactctggttcactgtg

SEQ ID NO: 345833 - DNA, 20 bp, Artificial Sequence
  Description of Artificial Sequence: Synthetic oligonucleotide
  Target: LAMA2; (+) strand; PAM type: YTN; PAM sequence: CTC
tggttcactgtgaatataag

SEQ ID NO: 345834 - DNA, 20 bp, Artificial Sequence
  Description of Artificial Sequence: Synthetic oligonucleotide
  Target: LAMA2; (+) strand; PAM type: YTN; PAM sequence: CTG
gttcactgtgaatataagtg

SEQ ID NO: 345835 - DNA, 20 bp, Artificial Sequence
  Description of Artificial Sequence: Synthetic oligonucleotide
  Target: LAMA2; (+) strand; PAM type: YTN; PAM sequence: TTC
actgtgaatataagtgggcc

SEQ ID NO: 345836 - DNA, 20 bp, Artificial Sequence
  Description of Artificial Sequence: Synthetic oligonucleotide
  Target: LAMA2; (+) strand; PAM type: YTN; PAM sequence: CTG
tgaatataagtgggccatag

SEQ ID NO: 345837 - DNA, 20 bp, Artificial Sequence
  Description of Artificial Sequence: Synthetic oligonucleotide
  Target: LAMA2; (+) strand; PAM type: YTN; PAM sequence: TTG
tggtctctggccctaggcca

SEQ ID NO: 345838 - DNA, 20 bp, Artificial Sequence
  Description of Artificial Sequence: Synthetic oligonucleotide
  Target: LAMA2; (+) strand; PAM type: YTN; PAM sequence: CTC
tggccctaggccatggagtg

SEQ ID NO: 345839 - DNA, 20 bp, Artificial Sequence
  Description of Artificial Sequence: Synthetic oligonucleotide
  Target: LAMA2; (+) strand; PAM type: YTN; PAM sequence: CTG
gccctaggccatggagtgag

SEQ ID NO: 345840 - DNA, 20 bp, Artificial Sequence
  Description of Artificial Sequence: Synthetic oligonucleotide
  Target: LAMA2; (+) strand; PAM type: YTN; PAM sequence: CTA
ggccatggagtgagataatt

SEQ ID NO: 345841 - DNA, 20 bp, Artificial Sequence
  Description of Artificial Sequence: Synthetic oligonucleotide
  Target: LAMA2; (+) strand; PAM type: YTN; PAM sequence: TTG
agacaagagaagtctgtata

SEQ ID NO: 345842 - DNA, 20 bp, Artificial Sequence
  Description of Artificial Sequence: Synthetic oligonucleotide
  Target: LAMA2; (+) strand; PAM type: YTN; PAM sequence: CTG
tatatcatctctccacataa

SEQ ID NO: 345843 - DNA, 20 bp, Artificial Sequence
  Description of Artificial Sequence: Synthetic oligonucleotide
  Target: LAMA2; (+) strand; PAM type: YTN; PAM sequence: CTC
tccacataagcaatagagct

SEQ ID NO: 345844 - DNA, 20 bp, Artificial Sequence
  Description of Artificial Sequence: Synthetic oligonucleotide
  Target: LAMA2; (+) strand; PAM type: YTN; PAM sequence: CTC
cacataagcaatagagctga

SEQ ID NO: 345845 - DNA, 20 bp, Artificial Sequence
  Description of Artificial Sequence: Synthetic oligonucleotide
  Target: LAMA2; (+) strand; PAM type: YTN; PAM sequence: CTG
attgggctgcctgtaaacaa

SEQ ID NO: 345846 - DNA, 20 bp, Artificial Sequence
  Description of Artificial Sequence: Synthetic oligonucleotide
  Target: LAMA2; (+) strand; PAM type: YTN; PAM sequence: TTG
ggctgcctgtaaacaagatt

SEQ ID NO: 345847 - DNA, 20 bp, Artificial Sequence
  Description of Artificial Sequence: Synthetic oligonucleotide
  Target: LAMA2; (+) strand; PAM type: YTN; PAM sequence: CTG
cctgtaaacaagattttaga

SEQ ID NO: 345848 - DNA, 20 bp, Artificial Sequence
  Description of Artificial Sequence: Synthetic oligonucleotide
  Target: LAMA2; (+) strand; PAM type: YTN; PAM sequence: CTG
taaacaagattttagagact

SEQ ID NO: 345849 - DNA, 20 bp, Artificial Sequence
  Description of Artificial Sequence: Synthetic oligonucleotide
  Target: LAMA2; (+) strand; PAM type: YTN; PAM sequence: TTT
tagagactcacttttctttt

SEQ ID NO: 345850 - DNA, 20 bp, Artificial Sequence
  Description of Artificial Sequence: Synthetic oligonucleotide
  Target: LAMA2; (+) strand; PAM type: YTN; PAM sequence: TTT
agagactcacttttcttttt

SEQ ID NO: 345851 - DNA, 20 bp, Artificial Sequence
  Description of Artificial Sequence: Synthetic oligonucleotide
  Target: LAMA2; (+) strand; PAM type: YTN; PAM sequence: TTA
gagactcacttttctttttc

SEQ ID NO: 345852 - DNA, 20 bp, Artificial Sequence
  Description of Artificial Sequence: Synthetic oligonucleotide
  Target: LAMA2; (+) strand; PAM type: YTN; PAM sequence: CTC
acttttctttttcttaaaag

SEQ ID NO: 345853 - DNA, 20 bp, Artificial Sequence
  Description of Artificial Sequence: Synthetic oligonucleotide
  Target: LAMA2; (+) strand; PAM type: YTN; PAM sequence: CTT
ttctttttcttaaaagactg

SEQ ID NO: 345854 - DNA, 20 bp, Artificial Sequence
  Description of Artificial Sequence: Synthetic oligonucleotide
  Target: LAMA2; (+) strand; PAM type: YTN; PAM sequence: TTT
tctttttcttaaaagactgc

SEQ ID NO: 345855 - DNA, 20 bp, Artificial Sequence
  Description of Artificial Sequence: Synthetic oligonucleotide
  Target: LAMA2; (+) strand; PAM type: YTN; PAM sequence: TTT
ctttttcttaaaagactgcc

SEQ ID NO: 345856 - DNA, 20 bp, Artificial Sequence
  Description of Artificial Sequence: Synthetic oligonucleotide
  Target: LAMA2; (+) strand; PAM type: YTN; PAM sequence: TTC
tttttcttaaaagactgcca

SEQ ID NO: 345857 - DNA, 20 bp, Artificial Sequence
  Description of Artificial Sequence: Synthetic oligonucleotide
  Target: LAMA2; (+) strand; PAM type: YTN; PAM sequence: CTT
tttcttaaaagactgccaca

SEQ ID NO: 345858 - DNA, 20 bp, Artificial Sequence
  Description of Artificial Sequence: Synthetic oligonucleotide
  Target: LAMA2; (+) strand; PAM type: YTN; PAM sequence: TTT
ttcttaaaagactgccacac

SEQ ID NO: 345859 - DNA, 20 bp, Artificial Sequence
  Description of Artificial Sequence: Synthetic oligonucleotide
  Target: LAMA2; (+) strand; PAM type: YTN; PAM sequence: TTT
tcttaaaagactgccacact

SEQ ID NO: 345860 - DNA, 20 bp, Artificial Sequence
  Description of Artificial Sequence: Synthetic oligonucleotide
  Target: LAMA2; (+) strand; PAM type: YTN; PAM sequence: TTT
cttaaaagactgccacactt

SEQ ID NO: 345861 - DNA, 20 bp, Artificial Sequence
  Description of Artificial Sequence: Synthetic oligonucleotide
  Target: LAMA2; (+) strand; PAM type: YTN; PAM sequence: TTC
ttaaaagactgccacactta

SEQ ID NO: 345862 - DNA, 20 bp, Artificial Sequence
  Description of Artificial Sequence: Synthetic oligonucleotide
  Target: LAMA2; (+) strand; PAM type: YTN; PAM sequence: CTT
aaaagactgccacacttagc

SEQ ID NO: 345863 - DNA, 20 bp, Artificial Sequence
  Description of Artificial Sequence: Synthetic oligonucleotide
  Target: LAMA2; (+) strand; PAM type: YTN; PAM sequence: TTA
aaagactgccacacttagcc

SEQ ID NO: 345864 - DNA, 20 bp, Artificial Sequence
  Description of Artificial Sequence: Synthetic oligonucleotide
  Target: LAMA2; (+) strand; PAM type: YTN; PAM sequence: CTG
ccacacttagccatctgata

SEQ ID NO: 345865 - DNA, 20 bp, Artificial Sequence
  Description of Artificial Sequence: Synthetic oligonucleotide
  Target: LAMA2; (+) strand; PAM type: YTN; PAM sequence: CTT
agccatctgatatggaatgg

SEQ ID NO: 345866 - DNA, 20 bp, Artificial Sequence
  Description of Artificial Sequence: Synthetic oligonucleotide
  Target: LAMA2; (+) strand; PAM type: YTN; PAM sequence: TTA
gccatctgatatggaatggc

SEQ ID NO: 345867 - DNA, 20 bp, Artificial Sequence
  Description of Artificial Sequence: Synthetic oligonucleotide
  Target: LAMA2; (+) strand; PAM type: YTN; PAM sequence: CTG
atatggaatggcatctcctc

SEQ ID NO: 345868 - DNA, 20 bp, Artificial Sequence
  Description of Artificial Sequence: Synthetic oligonucleotide
  Target: LAMA2; (+) strand; PAM type: YTN; PAM sequence: CTC
ctcttaatgagcctgtgtct

SEQ ID NO: 345869 - DNA, 20 bp, Artificial Sequence
  Description of Artificial Sequence: Synthetic oligonucleotide
  Target: LAMA2; (+) strand; PAM type: YTN; PAM sequence: CTC
ttaatgagcctgtgtcttta

SEQ ID NO: 345870 - DNA, 20 bp, Artificial Sequence
  Description of Artificial Sequence: Synthetic oligonucleotide
  Target: LAMA2; (+) strand; PAM type: YTN; PAM sequence: CTT
aatgagcctgtgtctttatt

SEQ ID NO: 345871 - DNA, 20 bp, Artificial Sequence
  Description of Artificial Sequence: Synthetic oligonucleotide
  Target: LAMA2; (+) strand; PAM type: YTN; PAM sequence: TTA
atgagcctgtgtctttattt

SEQ ID NO: 345872 - DNA, 20 bp, Artificial Sequence
  Description of Artificial Sequence: Synthetic oligonucleotide
  Target: LAMA2; (+) strand; PAM type: YTN; PAM sequence: CTG
tgtctttatttgcaccttat

SEQ ID NO: 345873 - DNA, 20 bp, Artificial Sequence
  Description of Artificial Sequence: Synthetic oligonucleotide
  Target: LAMA2; (+) strand; PAM type: YTN; PAM sequence: CTT
tatttgcaccttatcaaact

SEQ ID NO: 345874 - DNA, 20 bp, Artificial Sequence
  Description of Artificial Sequence: Synthetic oligonucleotide
  Target: LAMA2; (+) strand; PAM type: YTN; PAM sequence: TTT
atttgcaccttatcaaactg

SEQ ID NO: 345875 - DNA, 20 bp, Artificial Sequence
  Description of Artificial Sequence: Synthetic oligonucleotide
  Target: LAMA2; (+) strand; PAM type: YTN; PAM sequence: TTA
tttgcaccttatcaaactgg

SEQ ID NO: 345876 - DNA, 20 bp, Artificial Sequence
  Description of Artificial Sequence: Synthetic oligonucleotide
  Target: LAMA2; (+) strand; PAM type: YTN; PAM sequence: TTT
gcaccttatcaaactgggag

SEQ ID NO: 345877 - DNA, 20 bp, Artificial Sequence
  Description of Artificial Sequence: Synthetic oligonucleotide
  Target: LAMA2; (+) strand; PAM type: YTN; PAM sequence: TTG
caccttatcaaactgggaga

SEQ ID NO: 345878 - DNA, 20 bp, Artificial Sequence
  Description of Artificial Sequence: Synthetic oligonucleotide
  Target: LAMA2; (+) strand; PAM type: YTN; PAM sequence: CTT
atcaaactgggagatactga

SEQ ID NO: 345879 - DNA, 20 bp, Artificial Sequence
  Description of Artificial Sequence: Synthetic oligonucleotide
  Target: LAMA2; (+) strand; PAM type: YTN; PAM sequence: TTA
tcaaactgggagatactgaa

SEQ ID NO: 345880 - DNA, 20 bp, Artificial Sequence
  Description of Artificial Sequence: Synthetic oligonucleotide
  Target: LAMA2; (+) strand; PAM type: YTN; PAM sequence: CTG
ggagatactgaagatggcag

SEQ ID NO: 345881 - DNA, 20 bp, Artificial Sequence
  Description of Artificial Sequence: Synthetic oligonucleotide
  Target: LAMA2; (+) strand; PAM type: YTN; PAM sequence: CTG
aagatggcagtgatgctgat

SEQ ID NO: 345882 - DNA, 20 bp, Artificial Sequence
  Description of Artificial Sequence: Synthetic oligonucleotide
  Target: LAMA2; (+) strand; PAM type: YTN; PAM sequence: CTG
atagtggtgagacatggaag

SEQ ID NO: 345883 - DNA, 20 bp, Artificial Sequence
  Description of Artificial Sequence: Synthetic oligonucleotide
  Target: LAMA2; (+) strand; PAM type: YTN; PAM sequence: CTA
caaagaagcctgagatagga

SEQ ID NO: 345884 - DNA, 20 bp, Artificial Sequence
  Description of Artificial Sequence: Synthetic oligonucleotide
  Target: LAMA2; (+) strand; PAM type: YTN; PAM sequence: CTG
agataggagagaaagggtaa

SEQ ID NO: 345885 - DNA, 20 bp, Artificial Sequence
  Description of Artificial Sequence: Synthetic oligonucleotide
  Target: LAMA2; (+) strand; PAM type: YTN; PAM sequence: TTT
ttagaagtagattgggagaa

SEQ ID NO: 345886 - DNA, 20 bp, Artificial Sequence
  Description of Artificial Sequence: Synthetic oligonucleotide
  Target: LAMA2; (+) strand; PAM type: YTN; PAM sequence: TTT
tagaagtagattgggagaac

SEQ ID NO: 345887 - DNA, 20 bp, Artificial Sequence
  Description of Artificial Sequence: Synthetic oligonucleotide
  Target: LAMA2; (+) strand; PAM type: YTN; PAM sequence: TTT
agaagtagattgggagaact

SEQ ID NO: 345888 - DNA, 20 bp, Artificial Sequence
  Description of Artificial Sequence: Synthetic oligonucleotide
  Target: LAMA2; (+) strand; PAM type: YTN; PAM sequence: TTA
gaagtagattgggagaactg

SEQ ID NO: 345889 - DNA, 20 bp, Artificial Sequence
  Description of Artificial Sequence: Synthetic oligonucleotide
  Target: LAMA2; (+) strand; PAM type: YTN; PAM sequence: TTG
ggagaactgcattctgggca

SEQ ID NO: 345890 - DNA, 20 bp, Artificial Sequence
  Description of Artificial Sequence: Synthetic oligonucleotide
  Target: LAMA2; (+) strand; PAM type: YTN; PAM sequence: CTG
cattctgggcaataaatatt

SEQ ID NO: 345891 - DNA, 20 bp, Artificial Sequence
  Description of Artificial Sequence: Synthetic oligonucleotide
  Target: LAMA2; (+) strand; PAM type: YTN; PAM sequence: TTC
tgggcaataaatattcactg

SEQ ID NO: 345892 - DNA, 20 bp, Artificial Sequence
  Description of Artificial Sequence: Synthetic oligonucleotide
  Target: LAMA2; (+) strand; PAM type: YTN; PAM sequence: CTG
ggcaataaatattcactgga

SEQ ID NO: 345893 - DNA, 20 bp, Artificial Sequence
  Description of Artificial Sequence: Synthetic oligonucleotide
  Target: LAMA2; (+) strand; PAM type: YTN; PAM sequence: TTC
actggacttacagcgtattc

SEQ ID NO: 345894 - DNA, 20 bp, Artificial Sequence
  Description of Artificial Sequence: Synthetic oligonucleotide
  Target: LAMA2; (+) strand; PAM type: YTN; PAM sequence: CTG
gacttacagcgtattccttt

SEQ ID NO: 345895 - DNA, 20 bp, Artificial Sequence
  Description of Artificial Sequence: Synthetic oligonucleotide
  Target: LAMA2; (+) strand; PAM type: YTN; PAM sequence: CTT
acagcgtattccttttttta

SEQ ID NO: 345896 - DNA, 20 bp, Artificial Sequence
  Description of Artificial Sequence: Synthetic oligonucleotide
  Target: LAMA2; (+) strand; PAM type: YTN; PAM sequence: TTA
cagcgtattcctttttttaa

SEQ ID NO: 345897 - DNA, 20 bp, Artificial Sequence
  Description of Artificial Sequence: Synthetic oligonucleotide
  Target: LAMA2; (+) strand; PAM type: YTN; PAM sequence: TTC
ctttttttaaggaaccaagt

SEQ ID NO: 345898 - DNA, 20 bp, Artificial Sequence
  Description of Artificial Sequence: Synthetic oligonucleotide
  Target: LAMA2; (+) strand; PAM type: YTN; PAM sequence: CTT
tttttaaggaaccaagttca

SEQ ID NO: 345899 - DNA, 20 bp, Artificial Sequence
  Description of Artificial Sequence: Synthetic oligonucleotide
  Target: LAMA2; (+) strand; PAM type: YTN; PAM sequence: TTT
ttttaaggaaccaagttcac

SEQ ID NO: 345900 - DNA, 20 bp, Artificial Sequence
  Description of Artificial Sequence: Synthetic oligonucleotide
  Target: LAMA2; (+) strand; PAM type: YTN; PAM sequence: TTT
tttaaggaaccaagttcaca

SEQ ID NO: 345901 - DNA, 20 bp, Artificial Sequence
  Description of Artificial Sequence: Synthetic oligonucleotide
  Target: LAMA2; (+) strand; PAM type: YTN; PAM sequence: TTT
ttaaggaaccaagttcacag

SEQ ID NO: 345902 - DNA, 20 bp, Artificial Sequence
  Description of Artificial Sequence: Synthetic oligonucleotide
  Target: LAMA2; (+) strand; PAM type: YTN; PAM sequence: TTT
taaggaaccaagttcacagt

SEQ ID NO: 345903 - DNA, 20 bp, Artificial Sequence
  Description of Artificial Sequence: Synthetic oligonucleotide
  Target: LAMA2; (+) strand; PAM type: YTN; PAM sequence: TTT
aaggaaccaagttcacagtt

SEQ ID NO: 345904 - DNA, 20 bp, Artificial Sequence
  Description of Artificial Sequence: Synthetic oligonucleotide
  Target: LAMA2; (+) strand; PAM type: YTN; PAM sequence: TTA
aggaaccaagttcacagttg

SEQ ID NO: 345905 - DNA, 20 bp, Artificial Sequence
  Description of Artificial Sequence: Synthetic oligonucleotide
  Target: LAMA2; (+) strand; PAM type: YTN; PAM sequence: TTC
acagttgttagaactacaag

SEQ ID NO: 345906 - DNA, 20 bp, Artificial Sequence
  Description of Artificial Sequence: Synthetic oligonucleotide
  Target: LAMA2; (+) strand; PAM type: YTN; PAM sequence: TTG
ttagaactacaagagcacaa

SEQ ID NO: 345907 - DNA, 20 bp, Artificial Sequence
  Description of Artificial Sequence: Synthetic oligonucleotide
  Target: LAMA2; (+) strand; PAM type: YTN; PAM sequence: TTA
gaactacaagagcacaacat

SEQ ID NO: 345908 - DNA, 20 bp, Artificial Sequence
  Description of Artificial Sequence: Synthetic oligonucleotide
  Target: LAMA2; (+) strand; PAM type: YTN; PAM sequence: CTA
caagagcacaacattacata

SEQ ID NO: 345909 - DNA, 20 bp, Artificial Sequence
  Description of Artificial Sequence: Synthetic oligonucleotide
  Target: LAMA2; (+) strand; PAM type: YTN; PAM sequence: TTA
cataatcatgacatcaaata

SEQ ID NO: 345910 - DNA, 20 bp, Artificial Sequence
  Description of Artificial Sequence: Synthetic oligonucleotide
  Target: LAMA2; (+) strand; PAM type: YTN; PAM sequence: CTT
atttttaatttttacaggtg

SEQ ID NO: 345911 - DNA, 20 bp, Artificial Sequence
  Description of Artificial Sequence: Synthetic oligonucleotide
  Target: LAMA2; (+) strand; PAM type: YTN; PAM sequence: TTA
tttttaatttttacaggtgc

SEQ ID NO: 345912 - DNA, 20 bp, Artificial Sequence
  Description of Artificial Sequence: Synthetic oligonucleotide
  Target: LAMA2; (+) strand; PAM type: YTN; PAM sequence: TTT
ttaatttttacaggtgccat

SEQ ID NO: 345913 - DNA, 20 bp, Artificial Sequence
  Description of Artificial Sequence: Synthetic oligonucleotide
  Target: LAMA2; (+) strand; PAM type: YTN; PAM sequence: TTT
taatttttacaggtgccatt

SEQ ID NO: 345914 - DNA, 20 bp, Artificial Sequence
  Description of Artificial Sequence: Synthetic oligonucleotide
  Target: LAMA2; (+) strand; PAM type: YTN; PAM sequence: TTT
aatttttacaggtgccattt

SEQ ID NO: 345915 - DNA, 20 bp, Artificial Sequence
  Description of Artificial Sequence: Synthetic oligonucleotide
  Target: LAMA2; (+) strand; PAM type: YTN; PAM sequence: TTA
atttttacaggtgccatttt

SEQ ID NO: 345916 - DNA, 20 bp, Artificial Sequence
  Description of Artificial Sequence: Synthetic oligonucleotide
  Target: LAMA2; (+) strand; PAM type: YTN; PAM sequence: TTT
ttacaggtgccattttataa

SEQ ID NO: 345917 - DNA, 20 bp, Artificial Sequence
  Description of Artificial Sequence: Synthetic oligonucleotide
  Target: LAMA2; (+) strand; PAM type: YTN; PAM sequence: TTT
tacaggtgccattttataaa

SEQ ID NO: 345918 - DNA, 20 bp, Artificial Sequence
  Description of Artificial Sequence: Synthetic oligonucleotide
  Target: LAMA2; (+) strand; PAM type: YTN; PAM sequence: TTT
acaggtgccattttataaac

SEQ ID NO: 345919 - DNA, 20 bp, Artificial Sequence
  Description of Artificial Sequence: Synthetic oligonucleotide
  Target: LAMA2; (+) strand; PAM type: YTN; PAM sequence: TTA
caggtgccattttataaact

SEQ ID NO: 345920 - DNA, 20 bp, Artificial Sequence
  Description of Artificial Sequence: Synthetic oligonucleotide
  Target: LAMA2; (+) strand; PAM type: YTN; PAM sequence: TTT
tataaactatctctataaag

SEQ ID NO: 345921 - DNA, 20 bp, Artificial Sequence
  Description of Artificial Sequence: Synthetic oligonucleotide
  Target: LAMA2; (+) strand; PAM type: YTN; PAM sequence: TTT
ataaactatctctataaaga

SEQ ID NO: 345922 - DNA, 20 bp, Artificial Sequence
  Description of Artificial Sequence: Synthetic oligonucleotide
  Target: LAMA2; (+) strand; PAM type: YTN; PAM sequence: TTA
taaactatctctataaagag

SEQ ID NO: 345923 - DNA, 20 bp, Artificial Sequence
  Description of Artificial Sequence: Synthetic oligonucleotide
  Target: LAMA2; (+) strand; PAM type: YTN; PAM sequence: CTA
tctctataaagagattaatg

SEQ ID NO: 345924 - DNA, 20 bp, Artificial Sequence
  Description of Artificial Sequence: Synthetic oligonucleotide
  Target: LAMA2; (+) strand; PAM type: YTN; PAM sequence: CTC
tataaagagattaatgttag

SEQ ID NO: 345925 - DNA, 20 bp, Artificial Sequence
  Description of Artificial Sequence: Synthetic oligonucleotide
  Target: LAMA2; (+) strand; PAM type: YTN; PAM sequence: CTA
taaagagattaatgttagct

SEQ ID NO: 345926 - DNA, 20 bp, Artificial Sequence
  Description of Artificial Sequence: Synthetic oligonucleotide
  Target: LAMA2; (+) strand; PAM type: YTN; PAM sequence: TTA
atgttagcttcttgttttgg

SEQ ID NO: 345927 - DNA, 20 bp, Artificial Sequence
  Description of Artificial Sequence: Synthetic oligonucleotide
  Target: LAMA2; (+) strand; PAM type: YTN; PAM sequence: TTA
gcttcttgttttggaaataa

SEQ ID NO: 345928 - DNA, 20 bp, Artificial Sequence
  Description of Artificial Sequence: Synthetic oligonucleotide
  Target: LAMA2; (+) strand; PAM type: YTN; PAM sequence: CTT
cttgttttggaaataagata

SEQ ID NO: 345929 - DNA, 20 bp, Artificial Sequence
  Description of Artificial Sequence: Synthetic oligonucleotide
  Target: LAMA2; (+) strand; PAM type: YTN; PAM sequence: TTC
ttgttttggaaataagataa

SEQ ID NO: 345930 - DNA, 20 bp, Artificial Sequence
  Description of Artificial Sequence: Synthetic oligonucleotide
  Target: LAMA2; (+) strand; PAM type: YTN; PAM sequence: CTT
gttttggaaataagataatg

SEQ ID NO: 345931 - DNA, 20 bp, Artificial Sequence
  Description of Artificial Sequence: Synthetic oligonucleotide
  Target: LAMA2; (+) strand; PAM type: YTN; PAM sequence: TTG
ttttggaaataagataatgg

SEQ ID NO: 345932 - DNA, 20 bp, Artificial Sequence
  Description of Artificial Sequence: Synthetic oligonucleotide
  Target: LAMA2; (+) strand; PAM type: YTN; PAM sequence: TTT
tggaaataagataatgggag

SEQ ID NO: 345933 - DNA, 20 bp, Artificial Sequence
  Description of Artificial Sequence: Synthetic oligonucleotide
  Target: LAMA2; (+) strand; PAM type: YTN; PAM sequence: TTT
ggaaataagataatgggagg

SEQ ID NO: 345934 - DNA, 20 bp, Artificial Sequence
  Description of Artificial Sequence: Synthetic oligonucleotide
  Target: LAMA2; (+) strand; PAM type: YTN; PAM sequence: TTG
gaaataagataatgggaggg

SEQ ID NO: 345935 - DNA, 20 bp, Artificial Sequence
  Description of Artificial Sequence: Synthetic oligonucleotide
  Target: LAMA2; (+) strand; PAM type: YTN; PAM sequence: TTT
tgttgccatctctcattgtg

SEQ ID NO: 345936 - DNA, 20 bp, Artificial Sequence
  Description of Artificial Sequence: Synthetic oligonucleotide
  Target: LAMA2; (+) strand; PAM type: YTN; PAM sequence: TTT
gttgccatctctcattgtga

SEQ ID NO: 345937 - DNA, 20 bp, Artificial Sequence
  Description of Artificial Sequence: Synthetic oligonucleotide
  Target: LAMA2; (+) strand; PAM type: YTN; PAM sequence: TTG
ttgccatctctcattgtgag

SEQ ID NO: 345938 - DNA, 20 bp, Artificial Sequence
  Description of Artificial Sequence: Synthetic oligonucleotide
  Target: LAMA2; (+) strand; PAM type: YTN; PAM sequence: TTG
ccatctctcattgtgagcca

SEQ ID NO: 345939 - DNA, 20 bp, Artificial Sequence
  Description of Artificial Sequence: Synthetic oligonucleotide
  Target: LAMA2; (+) strand; PAM type: YTN; PAM sequence: CTC
tcattgtgagccagtttaga

SEQ ID NO: 345940 - DNA, 20 bp, Artificial Sequence
  Description of Artificial Sequence: Synthetic oligonucleotide
  Target: LAMA2; (+) strand; PAM type: YTN; PAM sequence: CTC
attgtgagccagtttagaaa

SEQ ID NO: 345941 - DNA, 20 bp, Artificial Sequence
  Description of Artificial Sequence: Synthetic oligonucleotide
  Target: LAMA2; (+) strand; PAM type: YTN; PAM sequence: TTG
tgagccagtttagaaatgaa

SEQ ID NO: 345942 - DNA, 20 bp, Artificial Sequence
  Description of Artificial Sequence: Synthetic oligonucleotide
  Target: LAMA2; (+) strand; PAM type: YTN; PAM sequence: TTT
agaaatgaaaacaaacaaac

SEQ ID NO: 345943 - DNA, 20 bp, Artificial Sequence
  Description of Artificial Sequence: Synthetic oligonucleotide
  Target: LAMA2; (+) strand; PAM type: YTN; PAM sequence: TTA
gaaatgaaaacaaacaaaca

SEQ ID NO: 345944 - DNA, 20 bp, Artificial Sequence
  Description of Artificial Sequence: Synthetic oligonucleotide
  Target: LAMA2; (+) strand; PAM type: YTN; PAM sequence: CTC
ttaagcccaacagcaacatt

SEQ ID NO: 345945 - DNA, 20 bp, Artificial Sequence
  Description of Artificial Sequence: Synthetic oligonucleotide
  Target: LAMA2; (+) strand; PAM type: YTN; PAM sequence: CTT
aagcccaacagcaacattca

SEQ ID NO: 345946 - DNA, 20 bp, Artificial Sequence
  Description of Artificial Sequence: Synthetic oligonucleotide
  Target: LAMA2; (+) strand; PAM type: YTN; PAM sequence: TTA
agcccaacagcaacattcat

SEQ ID NO: 345947 - DNA, 20 bp, Artificial Sequence
  Description of Artificial Sequence: Synthetic oligonucleotide
  Target: LAMA2; (+) strand; PAM type: YTN; PAM sequence: TTC
attataattttcctaattac

SEQ ID NO: 345948 - DNA, 20 bp, Artificial Sequence
  Description of Artificial Sequence: Synthetic oligonucleotide
  Target: LAMA2; (+) strand; PAM type: YTN; PAM sequence: TTA
taattttcctaattacactc

SEQ ID NO: 345949 - DNA, 20 bp, Artificial Sequence
  Description of Artificial Sequence: Synthetic oligonucleotide
  Target: LAMA2; (+) strand; PAM type: YTN; PAM sequence: TTT
tcctaattacactccctttt

SEQ ID NO: 345950 - DNA, 20 bp, Artificial Sequence
  Description of Artificial Sequence: Synthetic oligonucleotide
  Target: LAMA2; (+) strand; PAM type: YTN; PAM sequence: TTT
cctaattacactcccttttc

SEQ ID NO: 345951 - DNA, 20 bp, Artificial Sequence
  Description of Artificial Sequence: Synthetic oligonucleotide
  Target: LAMA2; (+) strand; PAM type: YTN; PAM sequence: TTC
ctaattacactcccttttct

SEQ ID NO: 345952 - DNA, 20 bp, Artificial Sequence
  Description of Artificial Sequence: Synthetic oligonucleotide
  Target: LAMA2; (+) strand; PAM type: YTN; PAM sequence: CTA
attacactcccttttctttt

SEQ ID NO: 345953 - DNA, 20 bp, Artificial Sequence
  Description of Artificial Sequence: Synthetic oligonucleotide
  Target: LAMA2; (+) strand; PAM type: YTN; PAM sequence: TTA
cactcccttttctttttgct

SEQ ID NO: 345954 - DNA, 20 bp, Artificial Sequence
  Description of Artificial Sequence: Synthetic oligonucleotide
  Target: LAMA2; (+) strand; PAM type: YTN; PAM sequence: CTC
ccttttctttttgctaagaa

SEQ ID NO: 345955 - DNA, 20 bp, Artificial Sequence
  Description of Artificial Sequence: Synthetic oligonucleotide
  Target: LAMA2; (+) strand; PAM type: YTN; PAM sequence: CTT
ttctttttgctaagaaagaa

SEQ ID NO: 345956 - DNA, 20 bp, Artificial Sequence
  Description of Artificial Sequence: Synthetic oligonucleotide
  Target: LAMA2; (+) strand; PAM type: YTN; PAM sequence: TTT
tctttttgctaagaaagaac

SEQ ID NO: 345957 - DNA, 20 bp, Artificial Sequence
  Description of Artificial Sequence: Synthetic oligonucleotide
  Target: LAMA2; (+) strand; PAM type: YTN; PAM sequence: TTT
ctttttgctaagaaagaacg

SEQ ID NO: 345958 - DNA, 20 bp, Artificial Sequence
  Description of Artificial Sequence: Synthetic oligonucleotide
  Target: LAMA2; (+) strand; PAM type: YTN; PAM sequence: TTC
tttttgctaagaaagaacgg

SEQ ID NO: 345959 - DNA, 20 bp, Artificial Sequence
  Description of Artificial Sequence: Synthetic oligonucleotide
  Target: LAMA2; (+) strand; PAM type: YTN; PAM sequence: CTT
tttgctaagaaagaacggtt

SEQ ID NO: 345960 - DNA, 20 bp, Artificial Sequence
  Description of Artificial Sequence: Synthetic oligonucleotide
  Target: LAMA2; (+) strand; PAM type: YTN; PAM sequence: TTT
ttgctaagaaagaacggttg

SEQ ID NO: 345961 - DNA, 20 bp, Artificial Sequence
  Description of Artificial Sequence: Synthetic oligonucleotide
  Target: LAMA2; (+) strand; PAM type: YTN; PAM sequence: TTT
tgctaagaaagaacggttgt

SEQ ID NO: 345962 - DNA, 20 bp, Artificial Sequence
  Description of Artificial Sequence: Synthetic oligonucleotide
  Target: LAMA2; (+) strand; PAM type: YTN; PAM sequence: TTT
gctaagaaagaacggttgta

SEQ ID NO: 345963 - DNA, 20 bp, Artificial Sequence
  Description of Artificial Sequence: Synthetic oligonucleotide
  Target: LAMA2; (+) strand; PAM type: YTN; PAM sequence: TTG
ctaagaaagaacggttgtat

SEQ ID NO: 345964 - DNA, 20 bp, Artificial Sequence
  Description of Artificial Sequence: Synthetic oligonucleotide
  Target: LAMA2; (+) strand; PAM type: YTN; PAM sequence: CTA
agaaagaacggttgtatttt

SEQ ID NO: 345965 - DNA, 20 bp, Artificial Sequence
  Description of Artificial Sequence: Synthetic oligonucleotide
  Target: LAMA2; (+) strand; PAM type: YTN; PAM sequence: TTG
tatttttgtccttaatagaa

SEQ ID NO: 345966 - DNA, 20 bp, Artificial Sequence
  Description of Artificial Sequence: Synthetic oligonucleotide
  Target: LAMA2; (+) strand; PAM type: YTN; PAM sequence: TTT
ttgtccttaatagaaaaggg

SEQ ID NO: 345967 - DNA, 20 bp, Artificial Sequence
  Description of Artificial Sequence: Synthetic oligonucleotide
  Target: LAMA2; (+) strand; PAM type: YTN; PAM sequence: TTT
tgtccttaatagaaaaggga

SEQ ID NO: 345968 - DNA, 20 bp, Artificial Sequence
  Description of Artificial Sequence: Synthetic oligonucleotide
  Target: LAMA2; (+) strand; PAM type: YTN; PAM sequence: TTT
gtccttaatagaaaagggaa

SEQ ID NO: 345969 - DNA, 20 bp, Artificial Sequence
  Description of Artificial Sequence: Synthetic oligonucleotide
  Target: LAMA2; (+) strand; PAM type: YTN; PAM sequence: TTG
tccttaatagaaaagggaac

SEQ ID NO: 345970 - DNA, 20 bp, Artificial Sequence
  Description of Artificial Sequence: Synthetic oligonucleotide
  Target: LAMA2; (+) strand; PAM type: YTN; PAM sequence: CTT
aatagaaaagggaacagtgc

SEQ ID NO: 345971 - DNA, 20 bp, Artificial Sequence
  Description of Artificial Sequence: Synthetic oligonucleotide
  Target: LAMA2; (+) strand; PAM type: YTN; PAM sequence: TTA
atagaaaagggaacagtgcc

SEQ ID NO: 345972 - DNA, 20 bp, Artificial Sequence
  Description of Artificial Sequence: Synthetic oligonucleotide
  Target: LAMA2; (+) strand; PAM type: YTN; PAM sequence: CTA
aacaacctattataaattct

SEQ ID NO: 345973 - DNA, 20 bp, Artificial Sequence
  Description of Artificial Sequence: Synthetic oligonucleotide
  Target: LAMA2; (+) strand; PAM type: YTN; PAM sequence: CTA
ttataaattcttctgggaaa

SEQ ID NO: 345974 - DNA, 20 bp, Artificial Sequence
  Description of Artificial Sequence: Synthetic oligonucleotide
  Target: LAMA2; (+) strand; PAM type: YTN; PAM sequence: TTA
taaattcttctgggaaagca

SEQ ID NO: 345975 - DNA, 20 bp, Artificial Sequence
  Description of Artificial Sequence: Synthetic oligonucleotide
  Target: LAMA2; (+) strand; PAM type: YTN; PAM sequence: TTC
ttctgggaaagcatattaca

SEQ ID NO: 345976 - DNA, 20 bp, Artificial Sequence
  Description of Artificial Sequence: Synthetic oligonucleotide
  Target: LAMA2; (+) strand; PAM type: YTN; PAM sequence: CTT
ctgggaaagcatattacaaa

SEQ ID NO: 345977 - DNA, 20 bp, Artificial Sequence
  Description of Artificial Sequence: Synthetic oligonucleotide
  Target: LAMA2; (+) strand; PAM type: YTN; PAM sequence: TTC
tgggaaagcatattacaaat

SEQ ID NO: 345978 - DNA, 20 bp, Artificial Sequence
  Description of Artificial Sequence: Synthetic oligonucleotide
  Target: LAMA2; (+) strand; PAM type: YTN; PAM sequence: CTG
ggaaagcatattacaaataa

SEQ ID NO: 345979 - DNA, 20 bp, Artificial Sequence
  Description of Artificial Sequence: Synthetic oligonucleotide
  Target: LAMA2; (+) strand; PAM type: YTN; PAM sequence: TTA
caaataattgaaaacaaccc

SEQ ID NO: 345980 - DNA, 20 bp, Artificial Sequence
  Description of Artificial Sequence: Synthetic oligonucleotide
  Target: LAMA2; (+) strand; PAM type: YTN; PAM sequence: TTG
aaaacaaccctgattctgtg

SEQ ID NO: 345981 - DNA, 20 bp, Artificial Sequence
  Description of Artificial Sequence: Synthetic oligonucleotide
  Target: LAMA2; (+) strand; PAM type: YTN; PAM sequence: CTG
attctgtgaacttggcagca

SEQ ID NO: 345982 - DNA, 20 bp, Artificial Sequence
  Description of Artificial Sequence: Synthetic oligonucleotide
  Target: LAMA2; (+) strand; PAM type: YTN; PAM sequence: TTC
tgtgaacttggcagcaaatg

SEQ ID NO: 345983 - DNA, 20 bp, Artificial Sequence
  Description of Artificial Sequence: Synthetic oligonucleotide
  Target: LAMA2; (+) strand; PAM type: YTN; PAM sequence: CTG
tgaacttggcagcaaatgta

SEQ ID NO: 345984 - DNA, 20 bp, Artificial Sequence
  Description of Artificial Sequence: Synthetic oligonucleotide
  Target: LAMA2; (+) strand; PAM type: YTN; PAM sequence: CTT
ggcagcaaatgtataaaaga

SEQ ID NO: 345985 - DNA, 20 bp, Artificial Sequence
  Description of Artificial Sequence: Synthetic oligonucleotide
  Target: LAMA2; (+) strand; PAM type: YTN; PAM sequence: TTG
gcagcaaatgtataaaagaa

SEQ ID NO: 345986 - DNA, 20 bp, Artificial Sequence
  Description of Artificial Sequence: Synthetic oligonucleotide
  Target: LAMA2; (+) strand; PAM type: YTN; PAM sequence: TTC
agccctggcccctggatgat

SEQ ID NO: 345987 - DNA, 20 bp, Artificial Sequence
  Description of Artificial Sequence: Synthetic oligonucleotide
  Target: LAMA2; (+) strand; PAM type: YTN; PAM sequence: CTG
gcccctggatgattgattaa

SEQ ID NO: 345988 - DNA, 20 bp, Artificial Sequence
  Description of Artificial Sequence: Synthetic oligonucleotide
  Target: LAMA2; (+) strand; PAM type: YTN; PAM sequence: CTG
gatgattgattaaatgtttt

SEQ ID NO: 345989 - DNA, 20 bp, Artificial Sequence
  Description of Artificial Sequence: Synthetic oligonucleotide
  Target: LAMA2; (+) strand; PAM type: YTN; PAM sequence: TTG
attaaatgttttattctttt

SEQ ID NO: 345990 - DNA, 20 bp, Artificial Sequence
  Description of Artificial Sequence: Synthetic oligonucleotide
  Target: LAMA2; (+) strand; PAM type: YTN; PAM sequence: TTA
aatgttttattctttttacc

SEQ ID NO: 345991 - DNA, 20 bp, Artificial Sequence
  Description of Artificial Sequence: Synthetic oligonucleotide
  Target: LAMA2; (+) strand; PAM type: YTN; PAM sequence: TTT
tattctttttacctttcatt

SEQ ID NO: 345992 - DNA, 20 bp, Artificial Sequence
  Description of Artificial Sequence: Synthetic oligonucleotide
  Target: LAMA2; (+) strand; PAM type: YTN; PAM sequence: TTT
attctttttacctttcattc

SEQ ID NO: 345993 - DNA, 20 bp, Artificial Sequence
  Description of Artificial Sequence: Synthetic oligonucleotide
  Target: LAMA2; (+) strand; PAM type: YTN; PAM sequence: TTA
ttctttttacctttcattca

SEQ ID NO: 345994 - DNA, 20 bp, Artificial Sequence
  Description of Artificial Sequence: Synthetic oligonucleotide
  Target: LAMA2; (+) strand; PAM type: YTN; PAM sequence: TTC
tttttacctttcattcatgc

SEQ ID NO: 345995 - DNA, 20 bp, Artificial Sequence
  Description of Artificial Sequence: Synthetic oligonucleotide
  Target: LAMA2; (+) strand; PAM type: YTN; PAM sequence: CTT
tttacctttcattcatgctg

SEQ ID NO: 345996 - DNA, 20 bp, Artificial Sequence
  Description of Artificial Sequence: Synthetic oligonucleotide
  Target: LAMA2; (+) strand; PAM type: YTN; PAM sequence: TTT
ttacctttcattcatgctgt

SEQ ID NO: 345997 - DNA, 20 bp, Artificial Sequence
  Description of Artificial Sequence: Synthetic oligonucleotide
  Target: LAMA2; (+) strand; PAM type: YTN; PAM sequence: TTT
tacctttcattcatgctgtg

SEQ ID NO: 345998 - DNA, 20 bp, Artificial Sequence
  Description of Artificial Sequence: Synthetic oligonucleotide
  Target: LAMA2; (+) strand; PAM type: YTN; PAM sequence: TTT
acctttcattcatgctgtgt

SEQ ID NO: 345999 - DNA, 20 bp, Artificial Sequence
  Description of Artificial Sequence: Synthetic oligonucleotide
  Target: LAMA2; (+) strand; PAM type: YTN; PAM sequence: TTA
cctttcattcatgctgtgtt

SEQ ID NO: 346000 - DNA, 20 bp, Artificial Sequence
  Description of Artificial Sequence: Synthetic oligonucleotide
  Target: LAMA2; (+) strand; PAM type: YTN; PAM sequence: CTT
tcattcatgctgtgtttgtc

SEQ ID NO: 346001 - DNA, 20 bp, Artificial Sequence
  Description of Artificial Sequence: Synthetic oligonucleotide
  Target: LAMA2; (+) strand; PAM type: YTN; PAM sequence: TTT
cattcatgctgtgtttgtca

SEQ ID NO: 346002 - DNA, 20 bp, Artificial Sequence
  Description of Artificial Sequence: Synthetic oligonucleotide
  Target: LAMA2; (+) strand; PAM type: YTN; PAM sequence: TTC
attcatgctgtgtttgtcaa

SEQ ID NO: 346003 - DNA, 20 bp, Artificial Sequence
  Description of Artificial Sequence: Synthetic oligonucleotide
  Target: LAMA2; (+) strand; PAM type: YTN; PAM sequence: TTC
atgctgtgtttgtcaagagg

SEQ ID NO: 346004 - DNA, 20 bp, Artificial Sequence
  Description of Artificial Sequence: Synthetic oligonucleotide
  Target: LAMA2; (+) strand; PAM type: YTN; PAM sequence: CTG
tgtttgtcaagaggaaagag

SEQ ID NO: 346005 - DNA, 20 bp, Artificial Sequence
  Description of Artificial Sequence: Synthetic oligonucleotide
  Target: LAMA2; (+) strand; PAM type: YTN; PAM sequence: TTT
gtcaagaggaaagagaaaag

SEQ ID NO: 346006 - DNA, 20 bp, Artificial Sequence
  Description of Artificial Sequence: Synthetic oligonucleotide
  Target: LAMA2; (+) strand; PAM type: YTN; PAM sequence: TTG
tcaagaggaaagagaaaagg

SEQ ID NO: 346007 - DNA, 20 bp, Artificial Sequence
  Description of Artificial Sequence: Synthetic oligonucleotide
  Target: LAMA2; (+) strand; PAM type: YTN; PAM sequence: TTG
tgaaatgaagtccactttag

SEQ ID NO: 346008 - DNA, 20 bp, Artificial Sequence
  Description of Artificial Sequence: Synthetic oligonucleotide
  Target: LAMA2; (+) strand; PAM type: YTN; PAM sequence: CTT
tagacaaataacttacaata

SEQ ID NO: 346009 - DNA, 20 bp, Artificial Sequence
  Description of Artificial Sequence: Synthetic oligonucleotide
  Target: LAMA2; (+) strand; PAM type: YTN; PAM sequence: TTT
agacaaataacttacaataa

SEQ ID NO: 346010 - DNA, 20 bp, Artificial Sequence
  Description of Artificial Sequence: Synthetic oligonucleotide
  Target: LAMA2; (+) strand; PAM type: YTN; PAM sequence: TTA
gacaaataacttacaataat

SEQ ID NO: 346011 - DNA, 20 bp, Artificial Sequence
  Description of Artificial Sequence: Synthetic oligonucleotide
  Target: LAMA2; (+) strand; PAM type: YTN; PAM sequence: CTT
acaataatgatcagtgactt

SEQ ID NO: 346012 - DNA, 20 bp, Artificial Sequence
  Description of Artificial Sequence: Synthetic oligonucleotide
  Target: LAMA2; (+) strand; PAM type: YTN; PAM sequence: TTA
caataatgatcagtgacttc

SEQ ID NO: 346013 - DNA, 20 bp, Artificial Sequence
  Description of Artificial Sequence: Synthetic oligonucleotide
  Target: LAMA2; (+) strand; PAM type: YTN; PAM sequence: CTT
ctcatcagctgtttattcat

SEQ ID NO: 346014 - DNA, 20 bp, Artificial Sequence
  Description of Artificial Sequence: Synthetic oligonucleotide
  Target: LAMA2; (+) strand; PAM type: YTN; PAM sequence: TTC
tcatcagctgtttattcatt

SEQ ID NO: 346015 - DNA, 20 bp, Artificial Sequence
  Description of Artificial Sequence: Synthetic oligonucleotide
  Target: LAMA2; (+) strand; PAM type: YTN; PAM sequence: CTC
atcagctgtttattcatttt

SEQ ID NO: 346016 - DNA, 20 bp, Artificial Sequence
  Description of Artificial Sequence: Synthetic oligonucleotide
  Target: LAMA2; (+) strand; PAM type: YTN; PAM sequence: CTG
tttattcatttttcttgagt

SEQ ID NO: 346017 - DNA, 20 bp, Artificial Sequence
  Description of Artificial Sequence: Synthetic oligonucleotide
  Target: LAMA2; (+) strand; PAM type: YTN; PAM sequence: TTT
attcatttttcttgagttgt

SEQ ID NO: 346018 - DNA, 20 bp, Artificial Sequence
  Description of Artificial Sequence: Synthetic oligonucleotide
  Target: LAMA2; (+) strand; PAM type: YTN; PAM sequence: TTA
ttcatttttcttgagttgta

SEQ ID NO: 346019 - DNA, 20 bp, Artificial Sequence
  Description of Artificial Sequence: Synthetic oligonucleotide
  Target: LAMA2; (+) strand; PAM type: YTN; PAM sequence: TTC
atttttcttgagttgtaata

SEQ ID NO: 346020 - DNA, 20 bp, Artificial Sequence
  Description of Artificial Sequence: Synthetic oligonucleotide
  Target: LAMA2; (+) strand; PAM type: YTN; PAM sequence: TTT
ttcttgagttgtaatatttc

SEQ ID NO: 346021 - DNA, 20 bp, Artificial Sequence
  Description of Artificial Sequence: Synthetic oligonucleotide
  Target: LAMA2; (+) strand; PAM type: YTN; PAM sequence: TTT
tcttgagttgtaatatttct

SEQ ID NO: 346022 - DNA, 20 bp, Artificial Sequence
  Description of Artificial Sequence: Synthetic oligonucleotide
  Target: LAMA2; (+) strand; PAM type: YTN; PAM sequence: TTT
cttgagttgtaatatttctt

SEQ ID NO: 346023 - DNA, 20 bp, Artificial Sequence
  Description of Artificial Sequence: Synthetic oligonucleotide
  Target: LAMA2; (+) strand; PAM type: YTN; PAM sequence: TTC
ttgagttgtaatatttctta

SEQ ID NO: 346024 - DNA, 20 bp, Artificial Sequence
  Description of Artificial Sequence: Synthetic oligonucleotide
  Target: LAMA2; (+) strand; PAM type: YTN; PAM sequence: CTT
gagttgtaatatttcttaat

SEQ ID NO: 346025 - DNA, 20 bp, Artificial Sequence
  Description of Artificial Sequence: Synthetic oligonucleotide
  Target: LAMA2; (+) strand; PAM type: YTN; PAM sequence: TTG
agttgtaatatttcttaata

SEQ ID NO: 346026 - DNA, 20 bp, Artificial Sequence
  Description of Artificial Sequence: Synthetic oligonucleotide
  Target: LAMA2; (+) strand; PAM type: YTN; PAM sequence: TTG
taatatttcttaatattagc

SEQ ID NO: 346027 - DNA, 20 bp, Artificial Sequence
  Description of Artificial Sequence: Synthetic oligonucleotide
  Target: LAMA2; (+) strand; PAM type: YTN; PAM sequence: TTT
cttaatattagctatcctgc

SEQ ID NO: 346028 - DNA, 20 bp, Artificial Sequence
  Description of Artificial Sequence: Synthetic oligonucleotide
  Target: LAMA2; (+) strand; PAM type: YTN; PAM sequence: TTC
ttaatattagctatcctgca

SEQ ID NO: 346029 - DNA, 20 bp, Artificial Sequence
  Description of Artificial Sequence: Synthetic oligonucleotide
  Target: LAMA2; (+) strand; PAM type: YTN; PAM sequence: CTT
aatattagctatcctgcatg

SEQ ID NO: 346030 - DNA, 20 bp, Artificial Sequence
  Description of Artificial Sequence: Synthetic oligonucleotide
  Target: LAMA2; (+) strand; PAM type: YTN; PAM sequence: TTA
atattagctatcctgcatgg

SEQ ID NO: 346031 - DNA, 20 bp, Artificial Sequence
  Description of Artificial Sequence: Synthetic oligonucleotide
  Target: LAMA2; (+) strand; PAM type: YTN; PAM sequence: TTA
gctatcctgcatggacccga

SEQ ID NO: 346032 - DNA, 20 bp, Artificial Sequence
  Description of Artificial Sequence: Synthetic oligonucleotide
  Target: LAMA2; (+) strand; PAM type: YTN; PAM sequence: CTA
tcctgcatggacccgacaga

SEQ ID NO: 346033 - DNA, 20 bp, Artificial Sequence
  Description of Artificial Sequence: Synthetic oligonucleotide
  Target: LAMA2; (+) strand; PAM type: YTN; PAM sequence: CTG
catggacccgacagaaaata

SEQ ID NO: 346034 - DNA, 20 bp, Artificial Sequence
  Description of Artificial Sequence: Synthetic oligonucleotide
  Target: LAMA2; (+) strand; PAM type: YTN; PAM sequence: CTG
agttttagcttgtccccaac

SEQ ID NO: 346035 - DNA, 20 bp, Artificial Sequence
  Description of Artificial Sequence: Synthetic oligonucleotide
  Target: LAMA2; (+) strand; PAM type: YTN; PAM sequence: TTT
tagcttgtccccaactccct

SEQ ID NO: 346036 - DNA, 20 bp, Artificial Sequence
  Description of Artificial Sequence: Synthetic oligonucleotide
  Target: LAMA2; (+) strand; PAM type: YTN; PAM sequence: TTT
agcttgtccccaactccctg

SEQ ID NO: 346037 - DNA, 20 bp, Artificial Sequence
  Description of Artificial Sequence: Synthetic oligonucleotide
  Target: LAMA2; (+) strand; PAM type: YTN; PAM sequence: TTA
gcttgtccccaactccctgc

SEQ ID NO: 346038 - DNA, 20 bp, Artificial Sequence
  Description of Artificial Sequence: Synthetic oligonucleotide
  Target: LAMA2; (+) strand; PAM type: YTN; PAM sequence: CTT
gtccccaactccctgccagc

SEQ ID NO: 346039 - DNA, 20 bp, Artificial Sequence
  Description of Artificial Sequence: Synthetic oligonucleotide
  Target: LAMA2; (+) strand; PAM type: YTN; PAM sequence: TTG
tccccaactccctgccagct

SEQ ID NO: 346040 - DNA, 20 bp, Artificial Sequence
  Description of Artificial Sequence: Synthetic oligonucleotide
  Target: LAMA2; (+) strand; PAM type: YTN; PAM sequence: CTC
cctgccagctaaccatcaac

SEQ ID NO: 346041 - DNA, 20 bp, Artificial Sequence
  Description of Artificial Sequence: Synthetic oligonucleotide
  Target: LAMA2; (+) strand; PAM type: YTN; PAM sequence: CTG
ccagctaaccatcaacacaa

SEQ ID NO: 346042 - DNA, 20 bp, Artificial Sequence
  Description of Artificial Sequence: Synthetic oligonucleotide
  Target: LAMA2; (+) strand; PAM type: YTN; PAM sequence: CTA
accatcaacacaagctgtat

SEQ ID NO: 346043 - DNA, 20 bp, Artificial Sequence
  Description of Artificial Sequence: Synthetic oligonucleotide
  Target: LAMA2; (+) strand; PAM type: YTN; PAM sequence: CTG
tatctgagcttctttgaggg

SEQ ID NO: 346044 - DNA, 20 bp, Artificial Sequence
  Description of Artificial Sequence: Synthetic oligonucleotide
  Target: LAMA2; (+) strand; PAM type: YTN; PAM sequence: CTG
agcttctttgagggcatggc

SEQ ID NO: 346045 - DNA, 20 bp, Artificial Sequence
  Description of Artificial Sequence: Synthetic oligonucleotide
  Target: LAMA2; (+) strand; PAM type: YTN; PAM sequence: CTT
ctttgagggcatggccctgc

SEQ ID NO: 346046 - DNA, 20 bp, Artificial Sequence
  Description of Artificial Sequence: Synthetic oligonucleotide
  Target: LAMA2; (+) strand; PAM type: YTN; PAM sequence: TTC
tttgagggcatggccctgca

SEQ ID NO: 346047 - DNA, 20 bp, Artificial Sequence
  Description of Artificial Sequence: Synthetic oligonucleotide
  Target: LAMA2; (+) strand; PAM type: YTN; PAM sequence: CTT
tgagggcatggccctgcagc

SEQ ID NO: 346048 - DNA, 20 bp, Artificial Sequence
  Description of Artificial Sequence: Synthetic oligonucleotide
  Target: LAMA2; (+) strand; PAM type: YTN; PAM sequence: TTT
gagggcatggccctgcagct

SEQ ID NO: 346049 - DNA, 20 bp, Artificial Sequence
  Description of Artificial Sequence: Synthetic oligonucleotide
  Target: LAMA2; (+) strand; PAM type: YTN; PAM sequence: TTG
agggcatggccctgcagctc

SEQ ID NO: 346050 - DNA, 20 bp, Artificial Sequence
  Description of Artificial Sequence: Synthetic oligonucleotide
  Target: LAMA2; (+) strand; PAM type: YTN; PAM sequence: CTG
cagctccctgtggtcagtta

SEQ ID NO: 346051 - DNA, 20 bp, Artificial Sequence
  Description of Artificial Sequence: Synthetic oligonucleotide
  Target: LAMA2; (+) strand; PAM type: YTN; PAM sequence: CTC
cctgtggtcagttattagtc

SEQ ID NO: 346052 - DNA, 20 bp, Artificial Sequence
  Description of Artificial Sequence: Synthetic oligonucleotide
  Target: LAMA2; (+) strand; PAM type: YTN; PAM sequence: CTG
tggtcagttattagtctgag

SEQ ID NO: 346053 - DNA, 20 bp, Artificial Sequence
  Description of Artificial Sequence: Synthetic oligonucleotide
  Target: LAMA2; (+) strand; PAM type: YTN; PAM sequence: TTA
ttagtctgagtccagcaaag

SEQ ID NO: 346054 - DNA, 20 bp, Artificial Sequence
  Description of Artificial Sequence: Synthetic oligonucleotide
  Target: LAMA2; (+) strand; PAM type: YTN; PAM sequence: TTA
gtctgagtccagcaaaggaa

SEQ ID NO: 346055 - DNA, 20 bp, Artificial Sequence
  Description of Artificial Sequence: Synthetic oligonucleotide
  Target: LAMA2; (+) strand; PAM type: YTN; PAM sequence: CTG
agtccagcaaaggaacaaga

SEQ ID NO: 346056 - DNA, 20 bp, Artificial Sequence
  Description of Artificial Sequence: Synthetic oligonucleotide
  Target: LAMA2; (+) strand; PAM type: YTN; PAM sequence: CTG
tgtgcttgctaaatctacag

SEQ ID NO: 346057 - DNA, 20 bp, Artificial Sequence
  Description of Artificial Sequence: Synthetic oligonucleotide
  Target: LAMA2; (+) strand; PAM type: YTN; PAM sequence: CTT
gctaaatctacagaaaactt

SEQ ID NO: 346058 - DNA, 20 bp, Artificial Sequence
  Description of Artificial Sequence: Synthetic oligonucleotide
  Target: LAMA2; (+) strand; PAM type: YTN; PAM sequence: TTG
ctaaatctacagaaaacttc

SEQ ID NO: 346059 - DNA, 20 bp, Artificial Sequence
  Description of Artificial Sequence: Synthetic oligonucleotide
  Target: LAMA2; (+) strand; PAM type: YTN; PAM sequence: CTA
aatctacagaaaacttcatc

SEQ ID NO: 346060 - DNA, 20 bp, Artificial Sequence
  Description of Artificial Sequence: Synthetic oligonucleotide
  Target: LAMA2; (+) strand; PAM type: YTN; PAM sequence: CTA
cagaaaacttcatcttctgg

SEQ ID NO: 346061 - DNA, 20 bp, Artificial Sequence
  Description of Artificial Sequence: Synthetic oligonucleotide
  Target: LAMA2; (+) strand; PAM type: YTN; PAM sequence: CTT
catcttctggttgtgtggga

SEQ ID NO: 346062 - DNA, 20 bp, Artificial Sequence
  Description of Artificial Sequence: Synthetic oligonucleotide
  Target: LAMA2; (+) strand; PAM type: YTN; PAM sequence: TTC
atcttctggttgtgtgggag

SEQ ID NO: 346063 - DNA, 20 bp, Artificial Sequence
  Description of Artificial Sequence: Synthetic oligonucleotide
  Target: LAMA2; (+) strand; PAM type: YTN; PAM sequence: CTT
ctggttgtgtgggaggagag

SEQ ID NO: 346064 - DNA, 20 bp, Artificial Sequence
  Description of Artificial Sequence: Synthetic oligonucleotide
  Target: LAMA2; (+) strand; PAM type: YTN; PAM sequence: TTC
tggttgtgtgggaggagagg

SEQ ID NO: 346065 - DNA, 20 bp, Artificial Sequence
  Description of Artificial Sequence: Synthetic oligonucleotide
  Target: LAMA2; (+) strand; PAM type: YTN; PAM sequence: CTG
gttgtgtgggaggagaggtc

SEQ ID NO: 346066 - DNA, 20 bp, Artificial Sequence
  Description of Artificial Sequence: Synthetic oligonucleotide
  Target: LAMA2; (+) strand; PAM type: YTN; PAM sequence: TTG
tgtgggaggagaggtccctt

SEQ ID NO: 346067 - DNA, 20 bp, Artificial Sequence
  Description of Artificial Sequence: Synthetic oligonucleotide
  Target: LAMA2; (+) strand; PAM type: YTN; PAM sequence: CTT
tgtgtactctgtttctttga

SEQ ID NO: 346068 - DNA, 20 bp, Artificial Sequence
  Description of Artificial Sequence: Synthetic oligonucleotide
  Target: LAMA2; (+) strand; PAM type: YTN; PAM sequence: TTT
gtgtactctgtttctttgaa

SEQ ID NO: 346069 - DNA, 20 bp, Artificial Sequence
  Description of Artificial Sequence: Synthetic oligonucleotide
  Target: LAMA2; (+) strand; PAM type: YTN; PAM sequence: TTG
tgtactctgtttctttgaag

SEQ ID NO: 346070 - DNA, 20 bp, Artificial Sequence
  Description of Artificial Sequence: Synthetic oligonucleotide
  Target: LAMA2; (+) strand; PAM type: YTN; PAM sequence: CTC
tgtttctttgaaggaactag

SEQ ID NO: 346071 - DNA, 20 bp, Artificial Sequence
  Description of Artificial Sequence: Synthetic oligonucleotide
  Target: LAMA2; (+) strand; PAM type: YTN; PAM sequence: CTG
tttctttgaaggaactaggg

SEQ ID NO: 346072 - DNA, 20 bp, Artificial Sequence
  Description of Artificial Sequence: Synthetic oligonucleotide
  Target: LAMA2; (+) strand; PAM type: YTN; PAM sequence: TTT
ctttgaaggaactagggatc

SEQ ID NO: 346073 - DNA, 20 bp, Artificial Sequence
  Description of Artificial Sequence: Synthetic oligonucleotide
  Target: LAMA2; (+) strand; PAM type: YTN; PAM sequence: TTC
tttgaaggaactagggatct

SEQ ID NO: 346074 - DNA, 20 bp, Artificial Sequence
  Description of Artificial Sequence: Synthetic oligonucleotide
  Target: LAMA2; (+) strand; PAM type: YTN; PAM sequence: CTT
tgaaggaactagggatctgt

SEQ ID NO: 346075 - DNA, 20 bp, Artificial Sequence
  Description of Artificial Sequence: Synthetic oligonucleotide
  Target: LAMA2; (+) strand; PAM type: YTN; PAM sequence: TTT
gaaggaactagggatctgtt

SEQ ID NO: 346076 - DNA, 20 bp, Artificial Sequence
  Description of Artificial Sequence: Synthetic oligonucleotide
  Target: LAMA2; (+) strand; PAM type: YTN; PAM sequence: TTG
aaggaactagggatctgttg

SEQ ID NO: 346077 - DNA, 20 bp, Artificial Sequence
  Description of Artificial Sequence: Synthetic oligonucleotide
  Target: LAMA2; (+) strand; PAM type: YTN; PAM sequence: CTA
gggatctgttggtgctgtac

SEQ ID NO: 346078 - DNA, 20 bp, Artificial Sequence
  Description of Artificial Sequence: Synthetic oligonucleotide
  Target: LAMA2; (+) strand; PAM type: YTN; PAM sequence: CTG
ttggtgctgtacagatgtcg

SEQ ID NO: 346079 - DNA, 20 bp, Artificial Sequence
  Description of Artificial Sequence: Synthetic oligonucleotide
  Target: LAMA2; (+) strand; PAM type: YTN; PAM sequence: TTG
gtgctgtacagatgtcgagg

SEQ ID NO: 346080 - DNA, 20 bp, Artificial Sequence
  Description of Artificial Sequence: Synthetic oligonucleotide
  Target: LAMA2; (+) strand; PAM type: YTN; PAM sequence: CTG
tacagatgtcgaggtgcaca

SEQ ID NO: 346081 - DNA, 20 bp, Artificial Sequence
  Description of Artificial Sequence: Synthetic oligonucleotide
  Target: LAMA2; (+) strand; PAM type: YTN; PAM sequence: CTA
caaaactagtaaatagatga

SEQ ID NO: 346082 - DNA, 20 bp, Artificial Sequence
  Description of Artificial Sequence: Synthetic oligonucleotide
  Target: LAMA2; (+) strand; PAM type: YTN; PAM sequence: CTA
gtaaatagatgattaggatc

SEQ ID NO: 346083 - DNA, 20 bp, Artificial Sequence
  Description of Artificial Sequence: Synthetic oligonucleotide
  Target: LAMA2; (+) strand; PAM type: YTN; PAM sequence: TTA
ggatccaactctgtacagaa

SEQ ID NO: 346084 - DNA, 20 bp, Artificial Sequence
  Description of Artificial Sequence: Synthetic oligonucleotide
  Target: LAMA2; (+) strand; PAM type: YTN; PAM sequence: CTC
tgtacagaataatggtagga

SEQ ID NO: 346085 - DNA, 20 bp, Artificial Sequence
  Description of Artificial Sequence: Synthetic oligonucleotide
  Target: LAMA2; (+) strand; PAM type: YTN; PAM sequence: CTG
tacagaataatggtaggaac

SEQ ID NO: 346086 - DNA, 20 bp, Artificial Sequence
  Description of Artificial Sequence: Synthetic oligonucleotide
  Target: LAMA2; (+) strand; PAM type: YTN; PAM sequence: CTA
aaccttggggtactgtttac

SEQ ID NO: 346087 - DNA, 20 bp, Artificial Sequence
  Description of Artificial Sequence: Synthetic oligonucleotide
  Target: LAMA2; (+) strand; PAM type: YTN; PAM sequence: CTT
ggggtactgtttacttgtat

SEQ ID NO: 346088 - DNA, 20 bp, Artificial Sequence
  Description of Artificial Sequence: Synthetic oligonucleotide
  Target: LAMA2; (+) strand; PAM type: YTN; PAM sequence: TTG
gggtactgtttacttgtatc

SEQ ID NO: 346089 - DNA, 20 bp, Artificial Sequence
  Description of Artificial Sequence: Synthetic oligonucleotide
  Target: LAMA2; (+) strand; PAM type: YTN; PAM sequence: CTG
tttacttgtatcaaaattgt

SEQ ID NO: 346090 - DNA, 20 bp, Artificial Sequence
  Description of Artificial Sequence: Synthetic oligonucleotide
  Target: LAMA2; (+) strand; PAM type: YTN; PAM sequence: TTT
acttgtatcaaaattgttgt

SEQ ID NO: 346091 - DNA, 20 bp, Artificial Sequence
  Description of Artificial Sequence: Synthetic oligonucleotide
  Target: LAMA2; (+) strand; PAM type: YTN; PAM sequence: TTA
cttgtatcaaaattgttgtt

SEQ ID NO: 346092 - DNA, 20 bp, Artificial Sequence
  Description of Artificial Sequence: Synthetic oligonucleotide
  Target: LAMA2; (+) strand; PAM type: YTN; PAM sequence: CTT
gtatcaaaattgttgttgtc

SEQ ID NO: 346093 - DNA, 20 bp, Artificial Sequence
  Description of Artificial Sequence: Synthetic oligonucleotide
  Target: LAMA2; (+) strand; PAM type: YTN; PAM sequence: TTG
tatcaaaattgttgttgtcc

SEQ ID NO: 346094 - DNA, 20 bp, Artificial Sequence
  Description of Artificial Sequence: Synthetic oligonucleotide
  Target: LAMA2; (+) strand; PAM type: YTN; PAM sequence: TTG
ttgttgtcctataagccatg

SEQ ID NO: 346095 - DNA, 20 bp, Artificial Sequence
  Description of Artificial Sequence: Synthetic oligonucleotide
  Target: LAMA2; (+) strand; PAM type: YTN; PAM sequence: TTG
ttgtcctataagccatgtaa

SEQ ID NO: 346096 - DNA, 20 bp, Artificial Sequence
  Description of Artificial Sequence: Synthetic oligonucleotide
  Target: LAMA2; (+) strand; PAM type: YTN; PAM sequence: TTG
tcctataagccatgtaaaat

SEQ ID NO: 346097 - DNA, 20 bp, Artificial Sequence
  Description of Artificial Sequence: Synthetic oligonucleotide
  Target: LAMA2; (+) strand; PAM type: YTN; PAM sequence: CTA
taagccatgtaaaattaact

SEQ ID NO: 346098 - DNA, 20 bp, Artificial Sequence
  Description of Artificial Sequence: Synthetic oligonucleotide
  Target: LAMA2; (+) strand; PAM type: YTN; PAM sequence: TTA
actacaaatctcctcaatga

SEQ ID NO: 346099 - DNA, 20 bp, Artificial Sequence
  Description of Artificial Sequence: Synthetic oligonucleotide
  Target: LAMA2; (+) strand; PAM type: YTN; PAM sequence: CTA
caaatctcctcaatgaaaca

SEQ ID NO: 346100 - DNA, 20 bp, Artificial Sequence
  Description of Artificial Sequence: Synthetic oligonucleotide
  Target: LAMA2; (+) strand; PAM type: YTN; PAM sequence: CTC
ctcaatgaaacactttctta

SEQ ID NO: 346101 - DNA, 20 bp, Artificial Sequence
  Description of Artificial Sequence: Synthetic oligonucleotide
  Target: LAMA2; (+) strand; PAM type: YTN; PAM sequence: CTC
aatgaaacactttcttagaa

SEQ ID NO: 346102 - DNA, 20 bp, Artificial Sequence
  Description of Artificial Sequence: Synthetic oligonucleotide
  Target: LAMA2; (+) strand; PAM type: YTN; PAM sequence: CTT
tcttagaactttgatatttt

SEQ ID NO: 346103 - DNA, 20 bp, Artificial Sequence
  Description of Artificial Sequence: Synthetic oligonucleotide
  Target: LAMA2; (+) strand; PAM type: YTN; PAM sequence: TTT
cttagaactttgatattttt

SEQ ID NO: 346104 - DNA, 20 bp, Artificial Sequence
  Description of Artificial Sequence: Synthetic oligonucleotide
  Target: LAMA2; (+) strand; PAM type: YTN; PAM sequence: TTC
ttagaactttgatattttta

SEQ ID NO: 346105 - DNA, 20 bp, Artificial Sequence
  Description of Artificial Sequence: Synthetic oligonucleotide
  Target: LAMA2; (+) strand; PAM type: YTN; PAM sequence: CTT
agaactttgatatttttaaa

SEQ ID NO: 346106 - DNA, 20 bp, Artificial Sequence
  Description of Artificial Sequence: Synthetic oligonucleotide
  Target: LAMA2; (+) strand; PAM type: YTN; PAM sequence: TTA
gaactttgatatttttaaat

SEQ ID NO: 346107 - DNA, 20 bp, Artificial Sequence
  Description of Artificial Sequence: Synthetic oligonucleotide
  Target: LAMA2; (+) strand; PAM type: YTN; PAM sequence: CTT
tgatatttttaaatgatatc

SEQ ID NO: 346108 - DNA, 20 bp, Artificial Sequence
  Description of Artificial Sequence: Synthetic oligonucleotide
  Target: LAMA2; (+) strand; PAM type: YTN; PAM sequence: TTT
gatatttttaaatgatatct

SEQ ID NO: 346109 - DNA, 20 bp, Artificial Sequence
  Description of Artificial Sequence: Synthetic oligonucleotide
  Target: LAMA2; (+) strand; PAM type: YTN; PAM sequence: TTG
atatttttaaatgatatctc

SEQ ID NO: 346110 - DNA, 20 bp, Artificial Sequence
  Description of Artificial Sequence: Synthetic oligonucleotide
  Target: LAMA2; (+) strand; PAM type: YTN; PAM sequence: TTT
ttaaatgatatctcaccatc

SEQ ID NO: 346111 - DNA, 20 bp, Artificial Sequence
  Description of Artificial Sequence: Synthetic oligonucleotide
  Target: LAMA2; (+) strand; PAM type: YTN; PAM sequence: TTT
taaatgatatctcaccatct

SEQ ID NO: 346112 - DNA, 20 bp, Artificial Sequence
  Description of Artificial Sequence: Synthetic oligonucleotide
  Target: LAMA2; (+) strand; PAM type: YTN; PAM sequence: TTT
aaatgatatctcaccatctg

SEQ ID NO: 346113 - DNA, 20 bp, Artificial Sequence
  Description of Artificial Sequence: Synthetic oligonucleotide
  Target: LAMA2; (+) strand; PAM type: YTN; PAM sequence: TTA
aatgatatctcaccatctgt

SEQ ID NO: 346114 - DNA, 20 bp, Artificial Sequence
  Description of Artificial Sequence: Synthetic oligonucleotide
  Target: LAMA2; (+) strand; PAM type: YTN; PAM sequence: CTC
accatctgtgtacatcacaa

SEQ ID NO: 346115 - DNA, 20 bp, Artificial Sequence
  Description of Artificial Sequence: Synthetic oligonucleotide
  Target: LAMA2; (+) strand; PAM type: YTN; PAM sequence: CTG
tgtacatcacaatgttgagc

SEQ ID NO: 346116 - DNA, 20 bp, Artificial Sequence
  Description of Artificial Sequence: Synthetic oligonucleotide
  Target: LAMA2; (+) strand; PAM type: YTN; PAM sequence: TTG
agctacaaatgtggtggctc

SEQ ID NO: 346117 - DNA, 20 bp, Artificial Sequence
  Description of Artificial Sequence: Synthetic oligonucleotide
  Target: LAMA2; (+) strand; PAM type: YTN; PAM sequence: CTA
caaatgtggtggctctaaca

SEQ ID NO: 346118 - DNA, 20 bp, Artificial Sequence
  Description of Artificial Sequence: Synthetic oligonucleotide
  Target: LAMA2; (+) strand; PAM type: YTN; PAM sequence: CTC
taacaaaattttaagtatga

SEQ ID NO: 346119 - DNA, 20 bp, Artificial Sequence
  Description of Artificial Sequence: Synthetic oligonucleotide
  Target: LAMA2; (+) strand; PAM type: YTN; PAM sequence: CTA
acaaaattttaagtatgaag

SEQ ID NO: 346120 - DNA, 20 bp, Artificial Sequence
  Description of Artificial Sequence: Synthetic oligonucleotide
  Target: LAMA2; (+) strand; PAM type: YTN; PAM sequence: TTT
taagtatgaagtcagatgta

SEQ ID NO: 346121 - DNA, 20 bp, Artificial Sequence
  Description of Artificial Sequence: Synthetic oligonucleotide
  Target: LAMA2; (+) strand; PAM type: YTN; PAM sequence: TTT
aagtatgaagtcagatgtat

SEQ ID NO: 346122 - DNA, 20 bp, Artificial Sequence
  Description of Artificial Sequence: Synthetic oligonucleotide
  Target: LAMA2; (+) strand; PAM type: YTN; PAM sequence: TTA
agtatgaagtcagatgtata

SEQ ID NO: 346123 - DNA, 20 bp, Artificial Sequence
  Description of Artificial Sequence: Synthetic oligonucleotide
  Target: LAMA2; (+) strand; PAM type: YTN; PAM sequence: CTT
ctccatcacgttcttctgtt

SEQ ID NO: 346124 - DNA, 20 bp, Artificial Sequence
  Description of Artificial Sequence: Synthetic oligonucleotide
  Target: LAMA2; (+) strand; PAM type: YTN; PAM sequence: TTC
tccatcacgttcttctgttt

SEQ ID NO: 346125 - DNA, 20 bp, Artificial Sequence
  Description of Artificial Sequence: Synthetic oligonucleotide
  Target: LAMA2; (+) strand; PAM type: YTN; PAM sequence: CTC
catcacgttcttctgttttt

SEQ ID NO: 346126 - DNA, 20 bp, Artificial Sequence
  Description of Artificial Sequence: Synthetic oligonucleotide
  Target: LAMA2; (+) strand; PAM type: YTN; PAM sequence: TTC
ttctgtttttcatttcccgc

SEQ ID NO: 346127 - DNA, 20 bp, Artificial Sequence
  Description of Artificial Sequence: Synthetic oligonucleotide
  Target: LAMA2; (+) strand; PAM type: YTN; PAM sequence: CTT
ctgtttttcatttcccgctt

SEQ ID NO: 346128 - DNA, 20 bp, Artificial Sequence
  Description of Artificial Sequence: Synthetic oligonucleotide
  Target: LAMA2; (+) strand; PAM type: YTN; PAM sequence: TTC
tgtttttcatttcccgcttc

SEQ ID NO: 346129 - DNA, 20 bp, Artificial Sequence
  Description of Artificial Sequence: Synthetic oligonucleotide
  Target: LAMA2; (+) strand; PAM type: YTN; PAM sequence: CTG
tttttcatttcccgcttctc

SEQ ID NO: 346130 - DNA, 20 bp, Artificial Sequence
  Description of Artificial Sequence: Synthetic oligonucleotide
  Target: LAMA2; (+) strand; PAM type: YTN; PAM sequence: TTT
ttcatttcccgcttctcaca

SEQ ID NO: 346131 - DNA, 20 bp, Artificial Sequence
  Description of Artificial Sequence: Synthetic oligonucleotide
  Target: LAMA2; (+) strand; PAM type: YTN; PAM sequence: TTT
tcatttcccgcttctcacaa

SEQ ID NO: 346132 - DNA, 20 bp, Artificial Sequence
  Description of Artificial Sequence: Synthetic oligonucleotide
  Target: LAMA2; (+) strand; PAM type: YTN; PAM sequence: TTT
catttcccgcttctcacaaa

SEQ ID NO: 346133 - DNA, 20 bp, Artificial Sequence
  Description of Artificial Sequence: Synthetic oligonucleotide
  Target: LAMA2; (+) strand; PAM type: YTN; PAM sequence: TTC
atttcccgcttctcacaaac

SEQ ID NO: 346134 - DNA, 20 bp, Artificial Sequence
  Description of Artificial Sequence: Synthetic oligonucleotide
  Target: LAMA2; (+) strand; PAM type: YTN; PAM sequence: TTT
cccgcttctcacaaactact

SEQ ID NO: 346135 - DNA, 20 bp, Artificial Sequence
  Description of Artificial Sequence: Synthetic oligonucleotide
  Target: LAMA2; (+) strand; PAM type: YTN; PAM sequence: TTC
ccgcttctcacaaactactc

SEQ ID NO: 346136 - DNA, 20 bp, Artificial Sequence
  Description of Artificial Sequence: Synthetic oligonucleotide
  Target: LAMA2; (+) strand; PAM type: YTN; PAM sequence: CTT
ctcacaaactactccccaga

SEQ ID NO: 346137 - DNA, 20 bp, Artificial Sequence
  Description of Artificial Sequence: Synthetic oligonucleotide
  Target: LAMA2; (+) strand; PAM type: YTN; PAM sequence: TTC
tcacaaactactccccagat

SEQ ID NO: 346138 - DNA, 20 bp, Artificial Sequence
  Description of Artificial Sequence: Synthetic oligonucleotide
  Target: LAMA2; (+) strand; PAM type: YTN; PAM sequence: CTC
acaaactactccccagatgt

SEQ ID NO: 346139 - DNA, 20 bp, Artificial Sequence
  Description of Artificial Sequence: Synthetic oligonucleotide
  Target: LAMA2; (+) strand; PAM type: YTN; PAM sequence: CTA
ctccccagatgtcaataatt

SEQ ID NO: 346140 - DNA, 20 bp, Artificial Sequence
  Description of Artificial Sequence: Synthetic oligonucleotide
  Target: LAMA2; (+) strand; PAM type: YTN; PAM sequence: CTC
cccagatgtcaataattcta

SEQ ID NO: 346141 - DNA, 20 bp, Artificial Sequence
  Description of Artificial Sequence: Synthetic oligonucleotide
  Target: LAMA2; (+) strand; PAM type: YTN; PAM sequence: TTC
tacaatctcctcttcctaca

SEQ ID NO: 346142 - DNA, 20 bp, Artificial Sequence
  Description of Artificial Sequence: Synthetic oligonucleotide
  Target: LAMA2; (+) strand; PAM type: YTN; PAM sequence: CTA
caatctcctcttcctacaac

SEQ ID NO: 346143 - DNA, 20 bp, Artificial Sequence
  Description of Artificial Sequence: Synthetic oligonucleotide
  Target: LAMA2; (+) strand; PAM type: YTN; PAM sequence: CTC
ctcttcctacaaccttcgtg

SEQ ID NO: 346144 - DNA, 20 bp, Artificial Sequence
  Description of Artificial Sequence: Synthetic oligonucleotide
  Target: LAMA2; (+) strand; PAM type: YTN; PAM sequence: CTC
ttcctacaaccttcgtgttg

SEQ ID NO: 346145 - DNA, 20 bp, Artificial Sequence
  Description of Artificial Sequence: Synthetic oligonucleotide
  Target: LAMA2; (+) strand; PAM type: YTN; PAM sequence: CTT
cctacaaccttcgtgttggt

SEQ ID NO: 346146 - DNA, 20 bp, Artificial Sequence
  Description of Artificial Sequence: Synthetic oligonucleotide
  Target: LAMA2; (+) strand; PAM type: YTN; PAM sequence: TTC
ctacaaccttcgtgttggtc

SEQ ID NO: 346147 - DNA, 20 bp, Artificial Sequence
  Description of Artificial Sequence: Synthetic oligonucleotide
  Target: LAMA2; (+) strand; PAM type: YTN; PAM sequence: CTA
caaccttcgtgttggtcctt

SEQ ID NO: 346148 - DNA, 20 bp, Artificial Sequence
  Description of Artificial Sequence: Synthetic oligonucleotide
  Target: LAMA2; (+) strand; PAM type: YTN; PAM sequence: CTT
cgtgttggtccttagtcgtc

SEQ ID NO: 346149 - DNA, 20 bp, Artificial Sequence
  Description of Artificial Sequence: Synthetic oligonucleotide
  Target: LAMA2; (+) strand; PAM type: YTN; PAM sequence: TTC
gtgttggtccttagtcgtct

SEQ ID NO: 346150 - DNA, 20 bp, Artificial Sequence
  Description of Artificial Sequence: Synthetic oligonucleotide
  Target: LAMA2; (+) strand; PAM type: YTN; PAM sequence: TTG
gtccttagtcgtctactctg

SEQ ID NO: 346151 - DNA, 20 bp, Artificial Sequence
  Description of Artificial Sequence: Synthetic oligonucleotide
  Target: LAMA2; (+) strand; PAM type: YTN; PAM sequence: CTT
agtcgtctactctgatctca

SEQ ID NO: 346152 - DNA, 20 bp, Artificial Sequence
  Description of Artificial Sequence: Synthetic oligonucleotide
  Target: LAMA2; (+) strand; PAM type: YTN; PAM sequence: TTA
gtcgtctactctgatctcaa

SEQ ID NO: 346153 - DNA, 20 bp, Artificial Sequence
  Description of Artificial Sequence: Synthetic oligonucleotide
  Target: LAMA2; (+) strand; PAM type: YTN; PAM sequence: CTA
ctctgatctcaaccgcaaaa

SEQ ID NO: 346154 - DNA, 20 bp, Artificial Sequence
  Description of Artificial Sequence: Synthetic oligonucleotide
  Target: LAMA2; (+) strand; PAM type: YTN; PAM sequence: CTC
tgatctcaaccgcaaaagtc

SEQ ID NO: 346155 - DNA, 20 bp, Artificial Sequence
  Description of Artificial Sequence: Synthetic oligonucleotide
  Target: LAMA2; (+) strand; PAM type: YTN; PAM sequence: CTG
atctcaaccgcaaaagtcag

SEQ ID NO: 346156 - DNA, 20 bp, Artificial Sequence
  Description of Artificial Sequence: Synthetic oligonucleotide
  Target: LAMA2; (+) strand; PAM type: YTN; PAM sequence: CTC
aaccgcaaaagtcaggggat

SEQ ID NO: 346157 - DNA, 20 bp, Artificial Sequence
  Description of Artificial Sequence: Synthetic oligonucleotide
  Target: LAMA2; (+) strand; PAM type: YTN; PAM sequence: CTA
taggccatccccagagcaac

SEQ ID NO: 346158 - DNA, 20 bp, Artificial Sequence
  Description of Artificial Sequence: Synthetic oligonucleotide
  Target: LAMA2; (+) strand; PAM type: YTN; PAM sequence: CTC
agcacctcagcacagatctg

SEQ ID NO: 346159 - DNA, 20 bp, Artificial Sequence
  Description of Artificial Sequence: Synthetic oligonucleotide
  Target: LAMA2; (+) strand; PAM type: YTN; PAM sequence: CTC
agcacagatctggaggggat

SEQ ID NO: 346160 - DNA, 20 bp, Artificial Sequence
  Description of Artificial Sequence: Synthetic oligonucleotide
  Target: LAMA2; (+) strand; PAM type: YTN; PAM sequence: CTG
gaggggatttgagctagaaa

SEQ ID NO: 346161 - DNA, 20 bp, Artificial Sequence
  Description of Artificial Sequence: Synthetic oligonucleotide
  Target: LAMA2; (+) strand; PAM type: YTN; PAM sequence: TTT
gagctagaaagaactctgac

SEQ ID NO: 346162 - DNA, 20 bp, Artificial Sequence
  Description of Artificial Sequence: Synthetic oligonucleotide
  Target: LAMA2; (+) strand; PAM type: YTN; PAM sequence: TTG
agctagaaagaactctgacc

SEQ ID NO: 346163 - DNA, 20 bp, Artificial Sequence
  Description of Artificial Sequence: Synthetic oligonucleotide
  Target: LAMA2; (+) strand; PAM type: YTN; PAM sequence: CTA
gaaagaactctgaccttact

SEQ ID NO: 346164 - DNA, 20 bp, Artificial Sequence
  Description of Artificial Sequence: Synthetic oligonucleotide
  Target: LAMA2; (+) strand; PAM type: YTN; PAM sequence: CTC
tgaccttactcttttttttt

SEQ ID NO: 346165 - DNA, 20 bp, Artificial Sequence
  Description of Artificial Sequence: Synthetic oligonucleotide
  Target: LAMA2; (+) strand; PAM type: YTN; PAM sequence: CTG
accttactcttttttttttt

SEQ ID NO: 346166 - DNA, 20 bp, Artificial Sequence
  Description of Artificial Sequence: Synthetic oligonucleotide
  Target: LAMA2; (+) strand; PAM type: YTN; PAM sequence: CTT
actctttttttttttttttt

SEQ ID NO: 346167 - DNA, 20 bp, Artificial Sequence
  Description of Artificial Sequence: Synthetic oligonucleotide
  Target: LAMA2; (+) strand; PAM type: YTN; PAM sequence: TTA
ctcttttttttttttttttg

SEQ ID NO: 346168 - DNA, 20 bp, Artificial Sequence
  Description of Artificial Sequence: Synthetic oligonucleotide
  Target: LAMA2; (+) strand; PAM type: YTN; PAM sequence: CTC
ttttttttttttttttgaga

SEQ ID NO: 346169 - DNA, 20 bp, Artificial Sequence
  Description of Artificial Sequence: Synthetic oligonucleotide
  Target: LAMA2; (+) strand; PAM type: YTN; PAM sequence: CTT
ttttttttttttttgagaca

SEQ ID NO: 346170 - DNA, 20 bp, Artificial Sequence
  Description of Artificial Sequence: Synthetic oligonucleotide
  Target: LAMA2; (+) strand; PAM type: YTN; PAM sequence: TTT
tttttttttttttgagacag

SEQ ID NO: 346171 - DNA, 20 bp, Artificial Sequence
  Description of Artificial Sequence: Synthetic oligonucleotide
  Target: LAMA2; (+) strand; PAM type: YTN; PAM sequence: TTT
ttttttttttttgagacaga

SEQ ID NO: 346172 - DNA, 20 bp, Artificial Sequence
  Description of Artificial Sequence: Synthetic oligonucleotide
  Target: LAMA2; (+) strand; PAM type: YTN; PAM sequence: TTT
tttttttttttgagacagag

SEQ ID NO: 346173 - DNA, 20 bp, Artificial Sequence
  Description of Artificial Sequence: Synthetic oligonucleotide
  Target: LAMA2; (+) strand; PAM type: YTN; PAM sequence: TTT
ttttttttttgagacagagt

SEQ ID NO: 346174 - DNA, 20 bp, Artificial Sequence
  Description of Artificial Sequence: Synthetic oligonucleotide
  Target: LAMA2; (+) strand; PAM type: YTN; PAM sequence: TTT
tttttttttgagacagagtc

SEQ ID NO: 346175 - DNA, 20 bp, Artificial Sequence
  Description of Artificial Sequence: Synthetic oligonucleotide
  Target: LAMA2; (+) strand; PAM type: YTN; PAM sequence: TTT
ttttttttgagacagagtct

SEQ ID NO: 346176 - DNA, 20 bp, Artificial Sequence
  Description of Artificial Sequence: Synthetic oligonucleotide
  Target: LAMA2; (+) strand; PAM type: YTN; PAM sequence: TTT
tttttttgagacagagtctc

SEQ ID NO: 346177 - DNA, 20 bp, Artificial Sequence
  Description of Artificial Sequence: Synthetic oligonucleotide
  Target: LAMA2; (+) strand; PAM type: YTN; PAM sequence: TTT
ttttttgagacagagtctcg

SEQ ID NO: 346178 - DNA, 20 bp, Artificial Sequence
  Description of Artificial Sequence: Synthetic oligonucleotide
  Target: LAMA2; (+) strand; PAM type: YTN; PAM sequence: TTT
tttttgagacagagtctcgc

SEQ ID NO: 346179 - DNA, 20 bp, Artificial Sequence
  Description of Artificial Sequence: Synthetic oligonucleotide
  Target: LAMA2; (+) strand; PAM type: YTN; PAM sequence: TTT
ttttgagacagagtctcgct

SEQ ID NO: 346180 - DNA, 20 bp, Artificial Sequence
  Description of Artificial Sequence: Synthetic oligonucleotide
  Target: LAMA2; (+) strand; PAM type: YTN; PAM sequence: TTT
tttgagacagagtctcgctc

SEQ ID NO: 346181 - DNA, 20 bp, Artificial Sequence
  Description of Artificial Sequence: Synthetic oligonucleotide
  Target: LAMA2; (+) strand; PAM type: YTN; PAM sequence: TTT
ttgagacagagtctcgctct

SEQ ID NO: 346182 - DNA, 20 bp, Artificial Sequence
  Description of Artificial Sequence: Synthetic oligonucleotide
  Target: LAMA2; (+) strand; PAM type: YTN; PAM sequence: TTT
tgagacagagtctcgctctg

SEQ ID NO: 346183 - DNA, 20 bp, Artificial Sequence
  Description of Artificial Sequence: Synthetic oligonucleotide
  Target: LAMA2; (+) strand; PAM type: YTN; PAM sequence: TTT
gagacagagtctcgctctgt

SEQ ID NO: 346184 - DNA, 20 bp, Artificial Sequence
  Description of Artificial Sequence: Synthetic oligonucleotide
  Target: LAMA2; (+) strand; PAM type: YTN; PAM sequence: TTG
agacagagtctcgctctgtc

SEQ ID NO: 346185 - DNA, 20 bp, Artificial Sequence
  Description of Artificial Sequence: Synthetic oligonucleotide
  Target: LAMA2; (+) strand; PAM type: YTN; PAM sequence: CTC
gctctgtcacccaggctgga

SEQ ID NO: 346186 - DNA, 20 bp, Artificial Sequence
  Description of Artificial Sequence: Synthetic oligonucleotide
  Target: LAMA2; (+) strand; PAM type: YTN; PAM sequence: CTC
tgtcacccaggctggagtgc

SEQ ID NO: 346187 - DNA, 20 bp, Artificial Sequence
  Description of Artificial Sequence: Synthetic oligonucleotide
  Target: LAMA2; (+) strand; PAM type: YTN; PAM sequence: CTG
tcacccaggctggagtgcag

SEQ ID NO: 346188 - DNA, 20 bp, Artificial Sequence
  Description of Artificial Sequence: Synthetic oligonucleotide
  Target: LAMA2; (+) strand; PAM type: YTN; PAM sequence: CTG
gagtgcagtggcacaatctc

SEQ ID NO: 346189 - DNA, 20 bp, Artificial Sequence
  Description of Artificial Sequence: Synthetic oligonucleotide
  Target: LAMA2; (+) strand; PAM type: YTN; PAM sequence: CTC
ggctcactgcaagctccacc

SEQ ID NO: 346190 - DNA, 20 bp, Artificial Sequence
  Description of Artificial Sequence: Synthetic oligonucleotide
  Target: LAMA2; (+) strand; PAM type: YTN; PAM sequence: CTC
actgcaagctccacctcccg

SEQ ID NO: 346191 - DNA, 20 bp, Artificial Sequence
  Description of Artificial Sequence: Synthetic oligonucleotide
  Target: LAMA2; (+) strand; PAM type: YTN; PAM sequence: CTG
caagctccacctcccgggtt

SEQ ID NO: 346192 - DNA, 20 bp, Artificial Sequence
  Description of Artificial Sequence: Synthetic oligonucleotide
  Target: LAMA2; (+) strand; PAM type: YTN; PAM sequence: CTC
cacctcccgggttcatgcca

SEQ ID NO: 346193 - DNA, 20 bp, Artificial Sequence
  Description of Artificial Sequence: Synthetic oligonucleotide
  Target: LAMA2; (+) strand; PAM type: YTN; PAM sequence: CTC
ccgggttcatgccattctcc

SEQ ID NO: 346194 - DNA, 20 bp, Artificial Sequence
  Description of Artificial Sequence: Synthetic oligonucleotide
  Target: LAMA2; (+) strand; PAM type: YTN; PAM sequence: TTC
atgccattctcccacctcag

SEQ ID NO: 346195 - DNA, 20 bp, Artificial Sequence
  Description of Artificial Sequence: Synthetic oligonucleotide
  Target: LAMA2; (+) strand; PAM type: YTN; PAM sequence: TTC
tcccacctcagcctcctgag

SEQ ID NO: 346196 - DNA, 20 bp, Artificial Sequence
  Description of Artificial Sequence: Synthetic oligonucleotide
  Target: LAMA2; (+) strand; PAM type: YTN; PAM sequence: CTC
ccacctcagcctcctgagta

SEQ ID NO: 346197 - DNA, 20 bp, Artificial Sequence
  Description of Artificial Sequence: Synthetic oligonucleotide
  Target: LAMA2; (+) strand; PAM type: YTN; PAM sequence: CTC
agcctcctgagtagctagga

SEQ ID NO: 346198 - DNA, 20 bp, Artificial Sequence
  Description of Artificial Sequence: Synthetic oligonucleotide
  Target: LAMA2; (+) strand; PAM type: YTN; PAM sequence: CTC
ctgagtagctaggactacag

SEQ ID NO: 346199 - DNA, 20 bp, Artificial Sequence
  Description of Artificial Sequence: Synthetic oligonucleotide
  Target: LAMA2; (+) strand; PAM type: YTN; PAM sequence: CTG
agtagctaggactacaggcg

SEQ ID NO: 346200 - DNA, 20 bp, Artificial Sequence
  Description of Artificial Sequence: Synthetic oligonucleotide
  Target: LAMA2; (+) strand; PAM type: YTN; PAM sequence: CTA
ggactacaggcgcccgccac

SEQ ID NO: 346201 - DNA, 20 bp, Artificial Sequence
  Description of Artificial Sequence: Synthetic oligonucleotide
  Target: LAMA2; (+) strand; PAM type: YTN; PAM sequence: CTA
caggcgcccgccaccacgcc

SEQ ID NO: 346202 - DNA, 20 bp, Artificial Sequence
  Description of Artificial Sequence: Synthetic oligonucleotide
  Target: LAMA2; (+) strand; PAM type: YTN; PAM sequence: CTG
gctaattttttgtattttta

SEQ ID NO: 346203 - DNA, 20 bp, Artificial Sequence
  Description of Artificial Sequence: Synthetic oligonucleotide
  Target: LAMA2; (+) strand; PAM type: YTN; PAM sequence: CTA
attttttgtatttttagtag

SEQ ID NO: 346204 - DNA, 20 bp, Artificial Sequence
  Description of Artificial Sequence: Synthetic oligonucleotide
  Target: LAMA2; (+) strand; PAM type: YTN; PAM sequence: TTT
tttgtatttttagtagagac

SEQ ID NO: 346205 - DNA, 20 bp, Artificial Sequence
  Description of Artificial Sequence: Synthetic oligonucleotide
  Target: LAMA2; (+) strand; PAM type: YTN; PAM sequence: TTT
ttgtatttttagtagagacg

SEQ ID NO: 346206 - DNA, 20 bp, Artificial Sequence
  Description of Artificial Sequence: Synthetic oligonucleotide
  Target: LAMA2; (+) strand; PAM type: YTN; PAM sequence: TTT
tgtatttttagtagagacgg

SEQ ID NO: 346207 - DNA, 20 bp, Artificial Sequence
  Description of Artificial Sequence: Synthetic oligonucleotide
  Target: LAMA2; (+) strand; PAM type: YTN; PAM sequence: TTT
gtatttttagtagagacggg

SEQ ID NO: 346208 - DNA, 20 bp, Artificial Sequence
  Description of Artificial Sequence: Synthetic oligonucleotide
  Target: LAMA2; (+) strand; PAM type: YTN; PAM sequence: TTG
tatttttagtagagacgggg

SEQ ID NO: 346209 - DNA, 20 bp, Artificial Sequence
  Description of Artificial Sequence: Synthetic oligonucleotide
  Target: LAMA2; (+) strand; PAM type: YTN; PAM sequence: TTT
ttagtagagacggggtttca

SEQ ID NO: 346210 - DNA, 20 bp, Artificial Sequence
  Description of Artificial Sequence: Synthetic oligonucleotide
  Target: LAMA2; (+) strand; PAM type: YTN; PAM sequence: TTT
tagtagagacggggtttcac

SEQ ID NO: 346211 - DNA, 20 bp, Artificial Sequence
  Description of Artificial Sequence: Synthetic oligonucleotide
  Target: LAMA2; (+) strand; PAM type: YTN; PAM sequence: TTT
agtagagacggggtttcact

SEQ ID NO: 346212 - DNA, 20 bp, Artificial Sequence
  Description of Artificial Sequence: Synthetic oligonucleotide
  Target: LAMA2; (+) strand; PAM type: YTN; PAM sequence: TTA
gtagagacggggtttcactg

SEQ ID NO: 346213 - DNA, 20 bp, Artificial Sequence
  Description of Artificial Sequence: Synthetic oligonucleotide
  Target: LAMA2; (+) strand; PAM type: YTN; PAM sequence: TTT
cactgtgttagccaggatgg

SEQ ID NO: 346214 - DNA, 20 bp, Artificial Sequence
  Description of Artificial Sequence: Synthetic oligonucleotide
  Target: LAMA2; (+) strand; PAM type: YTN; PAM sequence: TTC
actgtgttagccaggatggt

SEQ ID NO: 346215 - DNA, 20 bp, Artificial Sequence
  Description of Artificial Sequence: Synthetic oligonucleotide
  Target: LAMA2; (+) strand; PAM type: YTN; PAM sequence: CTG
tgttagccaggatggtctcg

SEQ ID NO: 346216 - DNA, 20 bp, Artificial Sequence
  Description of Artificial Sequence: Synthetic oligonucleotide
  Target: LAMA2; (+) strand; PAM type: YTN; PAM sequence: TTA
gccaggatggtctcgatctc

SEQ ID NO: 346217 - DNA, 20 bp, Artificial Sequence
  Description of Artificial Sequence: Synthetic oligonucleotide
  Target: LAMA2; (+) strand; PAM type: YTN; PAM sequence: CTC
gatctcctgacctcgtgatc

SEQ ID NO: 346218 - DNA, 20 bp, Artificial Sequence
  Description of Artificial Sequence: Synthetic oligonucleotide
  Target: LAMA2; (+) strand; PAM type: YTN; PAM sequence: CTC
ctgacctcgtgatcggcccg

SEQ ID NO: 346219 - DNA, 20 bp, Artificial Sequence
  Description of Artificial Sequence: Synthetic oligonucleotide
  Target: LAMA2; (+) strand; PAM type: YTN; PAM sequence: CTG
acctcgtgatcggcccgcct

SEQ ID NO: 346220 - DNA, 20 bp, Artificial Sequence
  Description of Artificial Sequence: Synthetic oligonucleotide
  Target: LAMA2; (+) strand; PAM type: YTN; PAM sequence: CTC
gtgatcggcccgcctcggcc

SEQ ID NO: 346221 - DNA, 20 bp, Artificial Sequence
  Description of Artificial Sequence: Synthetic oligonucleotide
  Target: LAMA2; (+) strand; PAM type: YTN; PAM sequence: CTC
ggcctcccaaagtgctggga

SEQ ID NO: 346222 - DNA, 20 bp, Artificial Sequence
  Description of Artificial Sequence: Synthetic oligonucleotide
  Target: LAMA2; (+) strand; PAM type: YTN; PAM sequence: CTC
ccaaagtgctgggattacag

SEQ ID NO: 346223 - DNA, 20 bp, Artificial Sequence
  Description of Artificial Sequence: Synthetic oligonucleotide
  Target: LAMA2; (+) strand; PAM type: YTN; PAM sequence: CTG
ggattacaggcgtgagccac

SEQ ID NO: 346224 - DNA, 20 bp, Artificial Sequence
  Description of Artificial Sequence: Synthetic oligonucleotide
  Target: LAMA2; (+) strand; PAM type: YTN; PAM sequence: TTA
caggcgtgagccaccgcacc

SEQ ID NO: 346225 - DNA, 20 bp, Artificial Sequence
  Description of Artificial Sequence: Synthetic oligonucleotide
  Target: LAMA2; (+) strand; PAM type: YTN; PAM sequence: CTC
tgaccttactcttaattgct

SEQ ID NO: 346226 - DNA, 20 bp, Artificial Sequence
  Description of Artificial Sequence: Synthetic oligonucleotide
  Target: LAMA2; (+) strand; PAM type: YTN; PAM sequence: CTG
accttactcttaattgcttg

SEQ ID NO: 346227 - DNA, 20 bp, Artificial Sequence
  Description of Artificial Sequence: Synthetic oligonucleotide
  Target: LAMA2; (+) strand; PAM type: YTN; PAM sequence: CTT
actcttaattgcttgcatga

SEQ ID NO: 346228 - DNA, 20 bp, Artificial Sequence
  Description of Artificial Sequence: Synthetic oligonucleotide
  Target: LAMA2; (+) strand; PAM type: YTN; PAM sequence: TTA
ctcttaattgcttgcatgaa

SEQ ID NO: 346229 - DNA, 20 bp, Artificial Sequence
  Description of Artificial Sequence: Synthetic oligonucleotide
  Target: LAMA2; (+) strand; PAM type: YTN; PAM sequence: CTC
ttaattgcttgcatgaaaat

SEQ ID NO: 346230 - DNA, 20 bp, Artificial Sequence
  Description of Artificial Sequence: Synthetic oligonucleotide
  Target: LAMA2; (+) strand; PAM type: YTN; PAM sequence: CTT
aattgcttgcatgaaaattg

SEQ ID NO: 346231 - DNA, 20 bp, Artificial Sequence
  Description of Artificial Sequence: Synthetic oligonucleotide
  Target: LAMA2; (+) strand; PAM type: YTN; PAM sequence: TTA
attgcttgcatgaaaattgg

SEQ ID NO: 346232 - DNA, 20 bp, Artificial Sequence
  Description of Artificial Sequence: Synthetic oligonucleotide
  Target: LAMA2; (+) strand; PAM type: YTN; PAM sequence: TTG
cttgcatgaaaattggatat

SEQ ID NO: 346233 - DNA, 20 bp, Artificial Sequence
  Description of Artificial Sequence: Synthetic oligonucleotide
  Target: LAMA2; (+) strand; PAM type: YTN; PAM sequence: CTT
gcatgaaaattggatatgga

SEQ ID NO: 346234 - DNA, 20 bp, Artificial Sequence
  Description of Artificial Sequence: Synthetic oligonucleotide
  Target: LAMA2; (+) strand; PAM type: YTN; PAM sequence: TTG
catgaaaattggatatggat

SEQ ID NO: 346235 - DNA, 20 bp, Artificial Sequence
  Description of Artificial Sequence: Synthetic oligonucleotide
  Target: LAMA2; (+) strand; PAM type: YTN; PAM sequence: TTG
gatatggataagaatgcaaa

SEQ ID NO: 346236 - DNA, 20 bp, Artificial Sequence
  Description of Artificial Sequence: Synthetic oligonucleotide
  Target: LAMA2; (+) strand; PAM type: YTN; PAM sequence: CTG
ctttccttgatgcacattct

SEQ ID NO: 346237 - DNA, 20 bp, Artificial Sequence
  Description of Artificial Sequence: Synthetic oligonucleotide
  Target: LAMA2; (+) strand; PAM type: YTN; PAM sequence: CTT
tccttgatgcacattctcct

SEQ ID NO: 346238 - DNA, 20 bp, Artificial Sequence
  Description of Artificial Sequence: Synthetic oligonucleotide
  Target: LAMA2; (+) strand; PAM type: YTN; PAM sequence: TTT
ccttgatgcacattctccta

SEQ ID NO: 346239 - DNA, 20 bp, Artificial Sequence
  Description of Artificial Sequence: Synthetic oligonucleotide
  Target: LAMA2; (+) strand; PAM type: YTN; PAM sequence: TTC
cttgatgcacattctcctat

SEQ ID NO: 346240 - DNA, 20 bp, Artificial Sequence
  Description of Artificial Sequence: Synthetic oligonucleotide
  Target: LAMA2; (+) strand; PAM type: YTN; PAM sequence: CTT
gatgcacattctcctattga

SEQ ID NO: 346241 - DNA, 20 bp, Artificial Sequence
  Description of Artificial Sequence: Synthetic oligonucleotide
  Target: LAMA2; (+) strand; PAM type: YTN; PAM sequence: TTG
atgcacattctcctattgat

SEQ ID NO: 346242 - DNA, 20 bp, Artificial Sequence
  Description of Artificial Sequence: Synthetic oligonucleotide
  Target: LAMA2; (+) strand; PAM type: YTN; PAM sequence: TTC
tcctattgatgttcagtgac

SEQ ID NO: 346243 - DNA, 20 bp, Artificial Sequence
  Description of Artificial Sequence: Synthetic oligonucleotide
  Target: LAMA2; (+) strand; PAM type: YTN; PAM sequence: CTC
ctattgatgttcagtgacct

SEQ ID NO: 346244 - DNA, 20 bp, Artificial Sequence
  Description of Artificial Sequence: Synthetic oligonucleotide
  Target: LAMA2; (+) strand; PAM type: YTN; PAM sequence: CTA
ttgatgttcagtgaccttag

SEQ ID NO: 346245 - DNA, 20 bp, Artificial Sequence
  Description of Artificial Sequence: Synthetic oligonucleotide
  Target: LAMA2; (+) strand; PAM type: YTN; PAM sequence: TTG
atgttcagtgaccttagcat

SEQ ID NO: 346246 - DNA, 20 bp, Artificial Sequence
  Description of Artificial Sequence: Synthetic oligonucleotide
  Target: LAMA2; (+) strand; PAM type: YTN; PAM sequence: TTC
agtgaccttagcatttccag

SEQ ID NO: 346247 - DNA, 20 bp, Artificial Sequence
  Description of Artificial Sequence: Synthetic oligonucleotide
  Target: LAMA2; (+) strand; PAM type: YTN; PAM sequence: CTT
agcatttccagaagcacctc

SEQ ID NO: 346248 - DNA, 20 bp, Artificial Sequence
  Description of Artificial Sequence: Synthetic oligonucleotide
  Target: LAMA2; (+) strand; PAM type: YTN; PAM sequence: TTA
gcatttccagaagcacctct

SEQ ID NO: 346249 - DNA, 20 bp, Artificial Sequence
  Description of Artificial Sequence: Synthetic oligonucleotide
  Target: LAMA2; (+) strand; PAM type: YTN; PAM sequence: TTT
ccagaagcacctctttattg

SEQ ID NO: 346250 - DNA, 20 bp, Artificial Sequence
  Description of Artificial Sequence: Synthetic oligonucleotide
  Target: LAMA2; (+) strand; PAM type: YTN; PAM sequence: TTC
cagaagcacctctttattgt

SEQ ID NO: 346251 - DNA, 20 bp, Artificial Sequence
  Description of Artificial Sequence: Synthetic oligonucleotide
  Target: LAMA2; (+) strand; PAM type: YTN; PAM sequence: CTC
tttattgtggatggaaactt

SEQ ID NO: 346252 - DNA, 20 bp, Artificial Sequence
  Description of Artificial Sequence: Synthetic oligonucleotide
  Target: LAMA2; (+) strand; PAM type: YTN; PAM sequence: CTT
tattgtggatggaaacttac

SEQ ID NO: 346253 - DNA, 20 bp, Artificial Sequence
  Description of Artificial Sequence: Synthetic oligonucleotide
  Target: LAMA2; (+) strand; PAM type: YTN; PAM sequence: TTT
attgtggatggaaacttact

SEQ ID NO: 346254 - DNA, 20 bp, Artificial Sequence
  Description of Artificial Sequence: Synthetic oligonucleotide
  Target: LAMA2; (+) strand; PAM type: YTN; PAM sequence: TTA
ttgtggatggaaacttactt

SEQ ID NO: 346255 - DNA, 20 bp, Artificial Sequence
  Description of Artificial Sequence: Synthetic oligonucleotide
  Target: LAMA2; (+) strand; PAM type: YTN; PAM sequence: TTG
tggatggaaacttacttatt

SEQ ID NO: 346256 - DNA, 20 bp, Artificial Sequence
  Description of Artificial Sequence: Synthetic oligonucleotide
  Target: LAMA2; (+) strand; PAM type: YTN; PAM sequence: CTT
acttattcatgttgtctcag

SEQ ID NO: 346257 - DNA, 20 bp, Artificial Sequence
  Description of Artificial Sequence: Synthetic oligonucleotide
  Target: LAMA2; (+) strand; PAM type: YTN; PAM sequence: TTA
cttattcatgttgtctcagg

SEQ ID NO: 346258 - DNA, 20 bp, Artificial Sequence
  Description of Artificial Sequence: Synthetic oligonucleotide
  Target: LAMA2; (+) strand; PAM type: YTN; PAM sequence: CTT
attcatgttgtctcaggctg

SEQ ID NO: 346259 - DNA, 20 bp, Artificial Sequence
  Description of Artificial Sequence: Synthetic oligonucleotide
  Target: LAMA2; (+) strand; PAM type: YTN; PAM sequence: TTA
ttcatgttgtctcaggctgt

SEQ ID NO: 346260 - DNA, 20 bp, Artificial Sequence
  Description of Artificial Sequence: Synthetic oligonucleotide
  Target: LAMA2; (+) strand; PAM type: YTN; PAM sequence: TTC
atgttgtctcaggctgtcca

SEQ ID NO: 346261 - DNA, 20 bp, Artificial Sequence
  Description of Artificial Sequence: Synthetic oligonucleotide
  Target: LAMA2; (+) strand; PAM type: YTN; PAM sequence: TTG
tctcaggctgtccaggttgg

SEQ ID NO: 346262 - DNA, 20 bp, Artificial Sequence
  Description of Artificial Sequence: Synthetic oligonucleotide
  Target: LAMA2; (+) strand; PAM type: YTN; PAM sequence: CTC
aggctgtccaggttggtaac

SEQ ID NO: 346263 - DNA, 20 bp, Artificial Sequence
  Description of Artificial Sequence: Synthetic oligonucleotide
  Target: LAMA2; (+) strand; PAM type: YTN; PAM sequence: CTG
tccaggttggtaacaggtaa

SEQ ID NO: 346264 - DNA, 20 bp, Artificial Sequence
  Description of Artificial Sequence: Synthetic oligonucleotide
  Target: LAMA2; (+) strand; PAM type: YTN; PAM sequence: TTG
gtaacaggtaactgctataa

SEQ ID NO: 346265 - DNA, 20 bp, Artificial Sequence
  Description of Artificial Sequence: Synthetic oligonucleotide
  Target: LAMA2; (+) strand; PAM type: YTN; PAM sequence: CTG
ctataaagggtggagcacat

SEQ ID NO: 346266 - DNA, 20 bp, Artificial Sequence
  Description of Artificial Sequence: Synthetic oligonucleotide
  Target: LAMA2; (+) strand; PAM type: YTN; PAM sequence: CTA
taaagggtggagcacatcct

SEQ ID NO: 346267 - DNA, 20 bp, Artificial Sequence
  Description of Artificial Sequence: Synthetic oligonucleotide
  Target: LAMA2; (+) strand; PAM type: YTN; PAM sequence: CTG
ctaaatggagagatccagtg

SEQ ID NO: 346268 - DNA, 20 bp, Artificial Sequence
  Description of Artificial Sequence: Synthetic oligonucleotide
  Target: LAMA2; (+) strand; PAM type: YTN; PAM sequence: CTA
aatggagagatccagtgtca

SEQ ID NO: 346269 - DNA, 20 bp, Artificial Sequence
  Description of Artificial Sequence: Synthetic oligonucleotide
  Target: LAMA2; (+) strand; PAM type: YTN; PAM sequence: TTT
acattttttttaactctttc

SEQ ID NO: 346270 - DNA, 20 bp, Artificial Sequence
  Description of Artificial Sequence: Synthetic oligonucleotide
  Target: LAMA2; (+) strand; PAM type: YTN; PAM sequence: TTA
cattttttttaactctttca

SEQ ID NO: 346271 - DNA, 20 bp, Artificial Sequence
  Description of Artificial Sequence: Synthetic oligonucleotide
  Target: LAMA2; (+) strand; PAM type: YTN; PAM sequence: TTT
tttttaactctttcaagggt

SEQ ID NO: 346272 - DNA, 20 bp, Artificial Sequence
  Description of Artificial Sequence: Synthetic oligonucleotide
  Target: LAMA2; (+) strand; PAM type: YTN; PAM sequence: TTT
ttttaactctttcaagggta

SEQ ID NO: 346273 - DNA, 20 bp, Artificial Sequence
  Description of Artificial Sequence: Synthetic oligonucleotide
  Target: LAMA2; (+) strand; PAM type: YTN; PAM sequence: TTT
tttaactctttcaagggtaa

SEQ ID NO: 346274 - DNA, 20 bp, Artificial Sequence
  Description of Artificial Sequence: Synthetic oligonucleotide
  Target: LAMA2; (+) strand; PAM type: YTN; PAM sequence: TTT
ttaactctttcaagggtaat

SEQ ID NO: 346275 - DNA, 20 bp, Artificial Sequence
  Description of Artificial Sequence: Synthetic oligonucleotide
  Target: LAMA2; (+) strand; PAM type: YTN; PAM sequence: TTT
taactctttcaagggtaatg

SEQ ID NO: 346276 - DNA, 20 bp, Artificial Sequence
  Description of Artificial Sequence: Synthetic oligonucleotide
  Target: LAMA2; (+) strand; PAM type: YTN; PAM sequence: TTT
aactctttcaagggtaatgg

SEQ ID NO: 346277 - DNA, 20 bp, Artificial Sequence
  Description of Artificial Sequence: Synthetic oligonucleotide
  Target: LAMA2; (+) strand; PAM type: YTN; PAM sequence: TTA
actctttcaagggtaatggc

SEQ ID NO: 346278 - DNA, 20 bp, Artificial Sequence
  Description of Artificial Sequence: Synthetic oligonucleotide
  Target: LAMA2; (+) strand; PAM type: YTN; PAM sequence: CTC
tttcaagggtaatggcaact

SEQ ID NO: 346279 - DNA, 20 bp, Artificial Sequence
  Description of Artificial Sequence: Synthetic oligonucleotide
  Target: LAMA2; (+) strand; PAM type: YTN; PAM sequence: CTT
tcaagggtaatggcaactaa

SEQ ID NO: 346280 - DNA, 20 bp, Artificial Sequence
  Description of Artificial Sequence: Synthetic oligonucleotide
  Target: LAMA2; (+) strand; PAM type: YTN; PAM sequence: TTT
caagggtaatggcaactaac

SEQ ID NO: 346281 - DNA, 20 bp, Artificial Sequence
  Description of Artificial Sequence: Synthetic oligonucleotide
  Target: LAMA2; (+) strand; PAM type: YTN; PAM sequence: TTC
aagggtaatggcaactaaca

SEQ ID NO: 346282 - DNA, 20 bp, Artificial Sequence
  Description of Artificial Sequence: Synthetic oligonucleotide
  Target: LAMA2; (+) strand; PAM type: YTN; PAM sequence: CTA
acaatagtttctcctgtgtg

SEQ ID NO: 346283 - DNA, 20 bp, Artificial Sequence
  Description of Artificial Sequence: Synthetic oligonucleotide
  Target: LAMA2; (+) strand; PAM type: YTN; PAM sequence: TTT
ctcctgtgtgctagatattg

SEQ ID NO: 346284 - DNA, 20 bp, Artificial Sequence
  Description of Artificial Sequence: Synthetic oligonucleotide
  Target: LAMA2; (+) strand; PAM type: YTN; PAM sequence: TTC
tcctgtgtgctagatattgt

SEQ ID NO: 346285 - DNA, 20 bp, Artificial Sequence
  Description of Artificial Sequence: Synthetic oligonucleotide
  Target: LAMA2; (+) strand; PAM type: YTN; PAM sequence: CTC
ctgtgtgctagatattgttc

SEQ ID NO: 346286 - DNA, 20 bp, Artificial Sequence
  Description of Artificial Sequence: Synthetic oligonucleotide
  Target: LAMA2; (+) strand; PAM type: YTN; PAM sequence: CTG
tgtgctagatattgttctaa

SEQ ID NO: 346287 - DNA, 20 bp, Artificial Sequence
  Description of Artificial Sequence: Synthetic oligonucleotide
  Target: LAMA2; (+) strand; PAM type: YTN; PAM sequence: CTA
gatattgttctaatcatttt

SEQ ID NO: 346288 - DNA, 20 bp, Artificial Sequence
  Description of Artificial Sequence: Synthetic oligonucleotide
  Target: LAMA2; (+) strand; PAM type: YTN; PAM sequence: TTG
ttctaatcattttacataaa

SEQ ID NO: 346289 - DNA, 20 bp, Artificial Sequence
  Description of Artificial Sequence: Synthetic oligonucleotide
  Target: LAMA2; (+) strand; PAM type: YTN; PAM sequence: TTC
taatcattttacataaatta

SEQ ID NO: 346290 - DNA, 20 bp, Artificial Sequence
  Description of Artificial Sequence: Synthetic oligonucleotide
  Target: LAMA2; (+) strand; PAM type: YTN; PAM sequence: CTA
atcattttacataaattatt

SEQ ID NO: 346291 - DNA, 20 bp, Artificial Sequence
  Description of Artificial Sequence: Synthetic oligonucleotide
  Target: LAMA2; (+) strand; PAM type: YTN; PAM sequence: TTT
tacataaattatttctttta

SEQ ID NO: 346292 - DNA, 20 bp, Artificial Sequence
  Description of Artificial Sequence: Synthetic oligonucleotide
  Target: LAMA2; (+) strand; PAM type: YTN; PAM sequence: TTT
acataaattatttcttttaa

SEQ ID NO: 346293 - DNA, 20 bp, Artificial Sequence
  Description of Artificial Sequence: Synthetic oligonucleotide
  Target: LAMA2; (+) strand; PAM type: YTN; PAM sequence: TTA
cataaattatttcttttaat

SEQ ID NO: 346294 - DNA, 20 bp, Artificial Sequence
  Description of Artificial Sequence: Synthetic oligonucleotide
  Target: LAMA2; (+) strand; PAM type: YTN; PAM sequence: TTA
tttcttttaatccaccaaac

SEQ ID NO: 346295 - DNA, 20 bp, Artificial Sequence
  Description of Artificial Sequence: Synthetic oligonucleotide
  Target: LAMA2; (+) strand; PAM type: YTN; PAM sequence: TTT
cttttaatccaccaaacagc

SEQ ID NO: 346296 - DNA, 20 bp, Artificial Sequence
  Description of Artificial Sequence: Synthetic oligonucleotide
  Target: LAMA2; (+) strand; PAM type: YTN; PAM sequence: TTC
ttttaatccaccaaacagca

SEQ ID NO: 346297 - DNA, 20 bp, Artificial Sequence
  Description of Artificial Sequence: Synthetic oligonucleotide
  Target: LAMA2; (+) strand; PAM type: YTN; PAM sequence: CTT
ttaatccaccaaacagcact

SEQ ID NO: 346298 - DNA, 20 bp, Artificial Sequence
  Description of Artificial Sequence: Synthetic oligonucleotide
  Target: LAMA2; (+) strand; PAM type: YTN; PAM sequence: TTT
taatccaccaaacagcacta

SEQ ID NO: 346299 - DNA, 20 bp, Artificial Sequence
  Description of Artificial Sequence: Synthetic oligonucleotide
  Target: LAMA2; (+) strand; PAM type: YTN; PAM sequence: TTT
aatccaccaaacagcactat

SEQ ID NO: 346300 - DNA, 20 bp, Artificial Sequence
  Description of Artificial Sequence: Synthetic oligonucleotide
  Target: LAMA2; (+) strand; PAM type: YTN; PAM sequence: TTA
atccaccaaacagcactata

SEQ ID NO: 346301 - DNA, 20 bp, Artificial Sequence
  Description of Artificial Sequence: Synthetic oligonucleotide
  Target: LAMA2; (+) strand; PAM type: YTN; PAM sequence: CTA
taagatagatattattttta

SEQ ID NO: 346302 - DNA, 20 bp, Artificial Sequence
  Description of Artificial Sequence: Synthetic oligonucleotide
  Target: LAMA2; (+) strand; PAM type: YTN; PAM sequence: TTA
tttttatttacctttgttag

SEQ ID NO: 346303 - DNA, 20 bp, Artificial Sequence
  Description of Artificial Sequence: Synthetic oligonucleotide
  Target: LAMA2; (+) strand; PAM type: YTN; PAM sequence: TTT
ttatttacctttgttagaga

SEQ ID NO: 346304 - DNA, 20 bp, Artificial Sequence
  Description of Artificial Sequence: Synthetic oligonucleotide
  Target: LAMA2; (+) strand; PAM type: YTN; PAM sequence: TTT
tatttacctttgttagagaa

SEQ ID NO: 346305 - DNA, 20 bp, Artificial Sequence
  Description of Artificial Sequence: Synthetic oligonucleotide
  Target: LAMA2; (+) strand; PAM type: YTN; PAM sequence: TTT
atttacctttgttagagaaa

SEQ ID NO: 346306 - DNA, 20 bp, Artificial Sequence
  Description of Artificial Sequence: Synthetic oligonucleotide
  Target: LAMA2; (+) strand; PAM type: YTN; PAM sequence: TTA
tttacctttgttagagaaaa

SEQ ID NO: 346307 - DNA, 20 bp, Artificial Sequence
  Description of Artificial Sequence: Synthetic oligonucleotide
  Target: LAMA2; (+) strand; PAM type: YTN; PAM sequence: TTT
acctttgttagagaaaactg

SEQ ID NO: 346308 - DNA, 20 bp, Artificial Sequence
  Description of Artificial Sequence: Synthetic oligonucleotide
  Target: LAMA2; (+) strand; PAM type: YTN; PAM sequence: TTA
cctttgttagagaaaactga

SEQ ID NO: 346309 - DNA, 20 bp, Artificial Sequence
  Description of Artificial Sequence: Synthetic oligonucleotide
  Target: LAMA2; (+) strand; PAM type: YTN; PAM sequence: CTT
tgttagagaaaactgaggta

SEQ ID NO: 346310 - DNA, 20 bp, Artificial Sequence
  Description of Artificial Sequence: Synthetic oligonucleotide
  Target: LAMA2; (+) strand; PAM type: YTN; PAM sequence: TTT
gttagagaaaactgaggtat

SEQ ID NO: 346311 - DNA, 20 bp, Artificial Sequence
  Description of Artificial Sequence: Synthetic oligonucleotide
  Target: LAMA2; (+) strand; PAM type: YTN; PAM sequence: TTG
ttagagaaaactgaggtata

SEQ ID NO: 346312 - DNA, 20 bp, Artificial Sequence
  Description of Artificial Sequence: Synthetic oligonucleotide
  Target: LAMA2; (+) strand; PAM type: YTN; PAM sequence: TTA
gagaaaactgaggtatagag

SEQ ID NO: 346313 - DNA, 20 bp, Artificial Sequence
  Description of Artificial Sequence: Synthetic oligonucleotide
  Target: LAMA2; (+) strand; PAM type: YTN; PAM sequence: CTG
aggtatagagagattaagta

SEQ ID NO: 346314 - DNA, 20 bp, Artificial Sequence
  Description of Artificial Sequence: Synthetic oligonucleotide
  Target: LAMA2; (+) strand; PAM type: YTN; PAM sequence: TTA
agtaaattgtctaaattcac

SEQ ID NO: 346315 - DNA, 20 bp, Artificial Sequence
  Description of Artificial Sequence: Synthetic oligonucleotide
  Target: LAMA2; (+) strand; PAM type: YTN; PAM sequence: TTG
tctaaattcacacagatagt

SEQ ID NO: 346316 - DNA, 20 bp, Artificial Sequence
  Description of Artificial Sequence: Synthetic oligonucleotide
  Target: LAMA2; (+) strand; PAM type: YTN; PAM sequence: CTA
aattcacacagatagtaagt

SEQ ID NO: 346317 - DNA, 20 bp, Artificial Sequence
  Description of Artificial Sequence: Synthetic oligonucleotide
  Target: LAMA2; (+) strand; PAM type: YTN; PAM sequence: TTC
acacagatagtaagtggagg

SEQ ID NO: 346318 - DNA, 20 bp, Artificial Sequence
  Description of Artificial Sequence: Synthetic oligonucleotide
  Target: LAMA2; (+) strand; PAM type: YTN; PAM sequence: TTT
gaacacaagcaatttgtctc

SEQ ID NO: 346319 - DNA, 20 bp, Artificial Sequence
  Description of Artificial Sequence: Synthetic oligonucleotide
  Target: LAMA2; (+) strand; PAM type: YTN; PAM sequence: TTG
aacacaagcaatttgtctcc

SEQ ID NO: 346320 - DNA, 20 bp, Artificial Sequence
  Description of Artificial Sequence: Synthetic oligonucleotide
  Target: LAMA2; (+) strand; PAM type: YTN; PAM sequence: TTT
gtctccaacaaatttgatct

SEQ ID NO: 346321 - DNA, 20 bp, Artificial Sequence
  Description of Artificial Sequence: Synthetic oligonucleotide
  Target: LAMA2; (+) strand; PAM type: YTN; PAM sequence: TTG
tctccaacaaatttgatctt

SEQ ID NO: 346322 - DNA, 20 bp, Artificial Sequence
  Description of Artificial Sequence: Synthetic oligonucleotide
  Target: LAMA2; (+) strand; PAM type: YTN; PAM sequence: CTC
caacaaatttgatcttaaac

SEQ ID NO: 346323 - DNA, 20 bp, Artificial Sequence
  Description of Artificial Sequence: Synthetic oligonucleotide
  Target: LAMA2; (+) strand; PAM type: YTN; PAM sequence: TTT
gatcttaaactatggttaac

SEQ ID NO: 346324 - DNA, 20 bp, Artificial Sequence
  Description of Artificial Sequence: Synthetic oligonucleotide
  Target: LAMA2; (+) strand; PAM type: YTN; PAM sequence: TTG
atcttaaactatggttaact

SEQ ID NO: 346325 - DNA, 20 bp, Artificial Sequence
  Description of Artificial Sequence: Synthetic oligonucleotide
  Target: LAMA2; (+) strand; PAM type: YTN; PAM sequence: CTT
aaactatggttaactctctg

SEQ ID NO: 346326 - DNA, 20 bp, Artificial Sequence
  Description of Artificial Sequence: Synthetic oligonucleotide
  Target: LAMA2; (+) strand; PAM type: YTN; PAM sequence: TTA
aactatggttaactctctga

SEQ ID NO: 346327 - DNA, 20 bp, Artificial Sequence
  Description of Artificial Sequence: Synthetic oligonucleotide
  Target: LAMA2; (+) strand; PAM type: YTN; PAM sequence: CTA
tggttaactctctgaacaca

SEQ ID NO: 346328 - DNA, 20 bp, Artificial Sequence
  Description of Artificial Sequence: Synthetic oligonucleotide
  Target: LAMA2; (+) strand; PAM type: YTN; PAM sequence: TTA
actctctgaacacacacaca

SEQ ID NO: 346329 - DNA, 20 bp, Artificial Sequence
  Description of Artificial Sequence: Synthetic oligonucleotide
  Target: LAMA2; (+) strand; PAM type: YTN; PAM sequence: CTC
tctgaacacacacacaaaca

SEQ ID NO: 346330 - DNA, 20 bp, Artificial Sequence
  Description of Artificial Sequence: Synthetic oligonucleotide
  Target: LAMA2; (+) strand; PAM type: YTN; PAM sequence: CTC
tgaacacacacacaaacaca

SEQ ID NO: 346331 - DNA, 20 bp, Artificial Sequence
  Description of Artificial Sequence: Synthetic oligonucleotide
  Target: LAMA2; (+) strand; PAM type: YTN; PAM sequence: CTG
aacacacacacaaacacaca

SEQ ID NO: 346332 - DNA, 20 bp, Artificial Sequence
  Description of Artificial Sequence: Synthetic oligonucleotide
  Target: LAMA2; (+) strand; PAM type: YTN; PAM sequence: TTA
gaaaagcatatacatacaaa

SEQ ID NO: 346333 - DNA, 20 bp, Artificial Sequence
  Description of Artificial Sequence: Synthetic oligonucleotide
  Target: LAMA2; (+) strand; PAM type: YTN; PAM sequence: CTT
acagttgtacacatagactc

SEQ ID NO: 346334 - DNA, 20 bp, Artificial Sequence
  Description of Artificial Sequence: Synthetic oligonucleotide
  Target: LAMA2; (+) strand; PAM type: YTN; PAM sequence: TTA
cagttgtacacatagactca

SEQ ID NO: 346335 - DNA, 20 bp, Artificial Sequence
  Description of Artificial Sequence: Synthetic oligonucleotide
  Target: LAMA2; (+) strand; PAM type: YTN; PAM sequence: TTG
tacacatagactcaggttta

SEQ ID NO: 346336 - DNA, 20 bp, Artificial Sequence
  Description of Artificial Sequence: Synthetic oligonucleotide
  Target: LAMA2; (+) strand; PAM type: YTN; PAM sequence: CTC
aggtttataaacccactgaa

SEQ ID NO: 346337 - DNA, 20 bp, Artificial Sequence
  Description of Artificial Sequence: Synthetic oligonucleotide
  Target: LAMA2; (+) strand; PAM type: YTN; PAM sequence: TTT
ataaacccactgaagtgaag

SEQ ID NO: 346338 - DNA, 20 bp, Artificial Sequence
  Description of Artificial Sequence: Synthetic oligonucleotide
  Target: LAMA2; (+) strand; PAM type: YTN; PAM sequence: TTA
taaacccactgaagtgaaga

SEQ ID NO: 346339 - DNA, 20 bp, Artificial Sequence
  Description of Artificial Sequence: Synthetic oligonucleotide
  Target: LAMA2; (+) strand; PAM type: YTN; PAM sequence: CTG
aagtgaagactcatcattta

SEQ ID NO: 346340 - DNA, 20 bp, Artificial Sequence
  Description of Artificial Sequence: Synthetic oligonucleotide
  Target: LAMA2; (+) strand; PAM type: YTN; PAM sequence: CTC
atcatttatgaaaatataca

SEQ ID NO: 346341 - DNA, 20 bp, Artificial Sequence
  Description of Artificial Sequence: Synthetic oligonucleotide
  Target: LAMA2; (+) strand; PAM type: YTN; PAM sequence: TTT
atgaaaatatacaattttgt

SEQ ID NO: 346342 - DNA, 20 bp, Artificial Sequence
  Description of Artificial Sequence: Synthetic oligonucleotide
  Target: LAMA2; (+) strand; PAM type: YTN; PAM sequence: TTA
tgaaaatatacaattttgtt

SEQ ID NO: 346343 - DNA, 20 bp, Artificial Sequence
  Description of Artificial Sequence: Synthetic oligonucleotide
  Target: LAMA2; (+) strand; PAM type: YTN; PAM sequence: TTT
tgttctgcaaaataatttaa

SEQ ID NO: 346344 - DNA, 20 bp, Artificial Sequence
  Description of Artificial Sequence: Synthetic oligonucleotide
  Target: LAMA2; (+) strand; PAM type: YTN; PAM sequence: TTT
gttctgcaaaataatttaat

SEQ ID NO: 346345 - DNA, 20 bp, Artificial Sequence
  Description of Artificial Sequence: Synthetic oligonucleotide
  Target: LAMA2; (+) strand; PAM type: YTN; PAM sequence: TTG
ttctgcaaaataatttaatt

SEQ ID NO: 346346 - DNA, 20 bp, Artificial Sequence
  Description of Artificial Sequence: Synthetic oligonucleotide
  Target: LAMA2; (+) strand; PAM type: YTN; PAM sequence: TTC
tgcaaaataatttaattttt

SEQ ID NO: 346347 - DNA, 20 bp, Artificial Sequence
  Description of Artificial Sequence: Synthetic oligonucleotide
  Target: LAMA2; (+) strand; PAM type: YTN; PAM sequence: CTG
caaaataatttaatttttta

SEQ ID NO: 346348 - DNA, 20 bp, Artificial Sequence
  Description of Artificial Sequence: Synthetic oligonucleotide
  Target: LAMA2; (+) strand; PAM type: YTN; PAM sequence: TTT
aattttttaaaattccttgt

SEQ ID NO: 346349 - DNA, 20 bp, Artificial Sequence
  Description of Artificial Sequence: Synthetic oligonucleotide
  Target: LAMA2; (+) strand; PAM type: YTN; PAM sequence: TTA
attttttaaaattccttgtg

SEQ ID NO: 346350 - DNA, 20 bp, Artificial Sequence
  Description of Artificial Sequence: Synthetic oligonucleotide
  Target: LAMA2; (+) strand; PAM type: YTN; PAM sequence: TTT
tttaaaattccttgtgcaat

SEQ ID NO: 346351 - DNA, 20 bp, Artificial Sequence
  Description of Artificial Sequence: Synthetic oligonucleotide
  Target: LAMA2; (+) strand; PAM type: YTN; PAM sequence: TTT
ttaaaattccttgtgcaatg

SEQ ID NO: 346352 - DNA, 20 bp, Artificial Sequence
  Description of Artificial Sequence: Synthetic oligonucleotide
  Target: LAMA2; (+) strand; PAM type: YTN; PAM sequence: TTT
taaaattccttgtgcaatga

SEQ ID NO: 346353 - DNA, 20 bp, Artificial Sequence
  Description of Artificial Sequence: Synthetic oligonucleotide
  Target: LAMA2; (+) strand; PAM type: YTN; PAM sequence: TTT
aaaattccttgtgcaatgag

SEQ ID NO: 346354 - DNA, 20 bp, Artificial Sequence
  Description of Artificial Sequence: Synthetic oligonucleotide
  Target: LAMA2; (+) strand; PAM type: YTN; PAM sequence: TTA
aaattccttgtgcaatgaga

SEQ ID NO: 346355 - DNA, 20 bp, Artificial Sequence
  Description of Artificial Sequence: Synthetic oligonucleotide
  Target: LAMA2; (+) strand; PAM type: YTN; PAM sequence: TTC
cttgtgcaatgagaaaagat

SEQ ID NO: 346356 - DNA, 20 bp, Artificial Sequence
  Description of Artificial Sequence: Synthetic oligonucleotide
  Target: LAMA2; (+) strand; PAM type: YTN; PAM sequence: CTT
gtgcaatgagaaaagatcag

SEQ ID NO: 346357 - DNA, 20 bp, Artificial Sequence
  Description of Artificial Sequence: Synthetic oligonucleotide
  Target: LAMA2; (+) strand; PAM type: YTN; PAM sequence: TTG
tgcaatgagaaaagatcaga

SEQ ID NO: 346358 - DNA, 20 bp, Artificial Sequence
  Description of Artificial Sequence: Synthetic oligonucleotide
  Target: LAMA2; (+) strand; PAM type: YTN; PAM sequence: CTA
cagtttccttttacagagct

SEQ ID NO: 346359 - DNA, 20 bp, Artificial Sequence
  Description of Artificial Sequence: Synthetic oligonucleotide
  Target: LAMA2; (+) strand; PAM type: YTN; PAM sequence: TTT
ccttttacagagctaggcca

SEQ ID NO: 346360 - DNA, 20 bp, Artificial Sequence
  Description of Artificial Sequence: Synthetic oligonucleotide
  Target: LAMA2; (+) strand; PAM type: YTN; PAM sequence: TTC
cttttacagagctaggccag

SEQ ID NO: 346361 - DNA, 20 bp, Artificial Sequence
  Description of Artificial Sequence: Synthetic oligonucleotide
  Target: LAMA2; (+) strand; PAM type: YTN; PAM sequence: CTT
ttacagagctaggccagggg

SEQ ID NO: 346362 - DNA, 20 bp, Artificial Sequence
  Description of Artificial Sequence: Synthetic oligonucleotide
  Target: LAMA2; (+) strand; PAM type: YTN; PAM sequence: TTT
tacagagctaggccaggggc

SEQ ID NO: 346363 - DNA, 20 bp, Artificial Sequence
  Description of Artificial Sequence: Synthetic oligonucleotide
  Target: LAMA2; (+) strand; PAM type: YTN; PAM sequence: TTT
acagagctaggccaggggct

SEQ ID NO: 346364 - DNA, 20 bp, Artificial Sequence
  Description of Artificial Sequence: Synthetic oligonucleotide
  Target: LAMA2; (+) strand; PAM type: YTN; PAM sequence: TTA
cagagctaggccaggggctg

SEQ ID NO: 346365 - DNA, 20 bp, Artificial Sequence
  Description of Artificial Sequence: Synthetic oligonucleotide
  Target: LAMA2; (+) strand; PAM type: YTN; PAM sequence: CTA
ggccaggggctgtatttaga

SEQ ID NO: 346366 - DNA, 20 bp, Artificial Sequence
  Description of Artificial Sequence: Synthetic oligonucleotide
  Target: LAMA2; (+) strand; PAM type: YTN; PAM sequence: CTG
tatttagagtaattgaacac

SEQ ID NO: 346367 - DNA, 20 bp, Artificial Sequence
  Description of Artificial Sequence: Synthetic oligonucleotide
  Target: LAMA2; (+) strand; PAM type: YTN; PAM sequence: TTT
agagtaattgaacacatgat

SEQ ID NO: 346368 - DNA, 20 bp, Artificial Sequence
  Description of Artificial Sequence: Synthetic oligonucleotide
  Target: LAMA2; (+) strand; PAM type: YTN; PAM sequence: TTA
gagtaattgaacacatgatt

SEQ ID NO: 346369 - DNA, 20 bp, Artificial Sequence
  Description of Artificial Sequence: Synthetic oligonucleotide
  Target: LAMA2; (+) strand; PAM type: YTN; PAM sequence: TTG
aacacatgattttacttgaa

SEQ ID NO: 346370 - DNA, 20 bp, Artificial Sequence
  Description of Artificial Sequence: Synthetic oligonucleotide
  Target: LAMA2; (+) strand; PAM type: YTN; PAM sequence: TTT
tacttgaatgcggagaaact

SEQ ID NO: 346371 - DNA, 20 bp, Artificial Sequence
  Description of Artificial Sequence: Synthetic oligonucleotide
  Target: LAMA2; (+) strand; PAM type: YTN; PAM sequence: TTT
acttgaatgcggagaaactt

SEQ ID NO: 346372 - DNA, 20 bp, Artificial Sequence
  Description of Artificial Sequence: Synthetic oligonucleotide
  Target: LAMA2; (+) strand; PAM type: YTN; PAM sequence: TTA
cttgaatgcggagaaacttg

SEQ ID NO: 346373 - DNA, 20 bp, Artificial Sequence
  Description of Artificial Sequence: Synthetic oligonucleotide
  Target: LAMA2; (+) strand; PAM type: YTN; PAM sequence: CTT
gaatgcggagaaacttgacc

SEQ ID NO: 346374 - DNA, 20 bp, Artificial Sequence
  Description of Artificial Sequence: Synthetic oligonucleotide
  Target: LAMA2; (+) strand; PAM type: YTN; PAM sequence: TTG
aatgcggagaaacttgacca

SEQ ID NO: 346375 - DNA, 20 bp, Artificial Sequence
  Description of Artificial Sequence: Synthetic oligonucleotide
  Target: LAMA2; (+) strand; PAM type: YTN; PAM sequence: CTT
gaccaactgtgaatatgcaa

SEQ ID NO: 346376 - DNA, 20 bp, Artificial Sequence
  Description of Artificial Sequence: Synthetic oligonucleotide
  Target: LAMA2; (+) strand; PAM type: YTN; PAM sequence: TTG
accaactgtgaatatgcaat

SEQ ID NO: 346377 - DNA, 20 bp, Artificial Sequence
  Description of Artificial Sequence: Synthetic oligonucleotide
  Target: LAMA2; (+) strand; PAM type: YTN; PAM sequence: CTG
tgaatatgcaatttcactct

SEQ ID NO: 346378 - DNA, 20 bp, Artificial Sequence
  Description of Artificial Sequence: Synthetic oligonucleotide
  Target: LAMA2; (+) strand; PAM type: YTN; PAM sequence: TTT
cactctacagatgaaataaa

SEQ ID NO: 346379 - DNA, 20 bp, Artificial Sequence
  Description of Artificial Sequence: Synthetic oligonucleotide
  Target: LAMA2; (+) strand; PAM type: YTN; PAM sequence: TTC
actctacagatgaaataaaa

SEQ ID NO: 346380 - DNA, 20 bp, Artificial Sequence
  Description of Artificial Sequence: Synthetic oligonucleotide
  Target: LAMA2; (+) strand; PAM type: YTN; PAM sequence: CTC
tacagatgaaataaaattaa

SEQ ID NO: 346381 - DNA, 20 bp, Artificial Sequence
  Description of Artificial Sequence: Synthetic oligonucleotide
  Target: LAMA2; (+) strand; PAM type: YTN; PAM sequence: CTA
cagatgaaataaaattaaac

SEQ ID NO: 346382 - DNA, 20 bp, Artificial Sequence
  Description of Artificial Sequence: Synthetic oligonucleotide
  Target: LAMA2; (+) strand; PAM type: YTN; PAM sequence: TTA
aacggggcaaaagtaaagaa

SEQ ID NO: 346383 - DNA, 20 bp, Artificial Sequence
  Description of Artificial Sequence: Synthetic oligonucleotide
  Target: LAMA2; (+) strand; PAM type: YTN; PAM sequence: CTA
ggtaaagtgatggaaagaga

SEQ ID NO: 346384 - DNA, 20 bp, Artificial Sequence
  Description of Artificial Sequence: Synthetic oligonucleotide
  Target: LAMA2; (+) strand; PAM type: YTN; PAM sequence: TTA
gtcatgtgaaagcaaaacta

SEQ ID NO: 346385 - DNA, 20 bp, Artificial Sequence
  Description of Artificial Sequence: Synthetic oligonucleotide
  Target: LAMA2; (+) strand; PAM type: YTN; PAM sequence: CTA
agaggagagggaaaggtggc

SEQ ID NO: 346386 - DNA, 20 bp, Artificial Sequence
  Description of Artificial Sequence: Synthetic oligonucleotide
  Target: LAMA2; (+) strand; PAM type: YTN; PAM sequence: TTC
agagaatgttgatatattga

SEQ ID NO: 346387 - DNA, 20 bp, Artificial Sequence
  Description of Artificial Sequence: Synthetic oligonucleotide
  Target: LAMA2; (+) strand; PAM type: YTN; PAM sequence: TTG
atatattgagaggtgagaat

SEQ ID NO: 346388 - DNA, 20 bp, Artificial Sequence
  Description of Artificial Sequence: Synthetic oligonucleotide
  Target: LAMA2; (+) strand; PAM type: YTN; PAM sequence: TTG
agaggtgagaatagggagtt

SEQ ID NO: 346389 - DNA, 20 bp, Artificial Sequence
  Description of Artificial Sequence: Synthetic oligonucleotide
  Target: LAMA2; (+) strand; PAM type: YTN; PAM sequence: TTG
gtaggcaagtgtcagagtgt

SEQ ID NO: 346390 - DNA, 20 bp, Artificial Sequence
  Description of Artificial Sequence: Synthetic oligonucleotide
  Target: LAMA2; (+) strand; PAM type: YTN; PAM sequence: CTA
ggaactccagtttgcataca

SEQ ID NO: 346391 - DNA, 20 bp, Artificial Sequence
  Description of Artificial Sequence: Synthetic oligonucleotide
  Target: LAMA2; (+) strand; PAM type: YTN; PAM sequence: CTC
cagtttgcatacacacaatg

SEQ ID NO: 346392 - DNA, 20 bp, Artificial Sequence
  Description of Artificial Sequence: Synthetic oligonucleotide
  Target: LAMA2; (+) strand; PAM type: YTN; PAM sequence: TTT
gcatacacacaatgttaaga

SEQ ID NO: 346393 - DNA, 20 bp, Artificial Sequence
  Description of Artificial Sequence: Synthetic oligonucleotide
  Target: LAMA2; (+) strand; PAM type: YTN; PAM sequence: TTG
catacacacaatgttaagaa

SEQ ID NO: 346394 - DNA, 20 bp, Artificial Sequence
  Description of Artificial Sequence: Synthetic oligonucleotide
  Target: LAMA2; (+) strand; PAM type: YTN; PAM sequence: TTA
agaacattagaaattagcta

SEQ ID NO: 346395 - DNA, 20 bp, Artificial Sequence
  Description of Artificial Sequence: Synthetic oligonucleotide
  Target: LAMA2; (+) strand; PAM type: YTN; PAM sequence: TTA
gaaattagctagccaatgga

SEQ ID NO: 346396 - DNA, 20 bp, Artificial Sequence
  Description of Artificial Sequence: Synthetic oligonucleotide
  Target: LAMA2; (+) strand; PAM type: YTN; PAM sequence: TTA
gctagccaatggaatgctca

SEQ ID NO: 346397 - DNA, 20 bp, Artificial Sequence
  Description of Artificial Sequence: Synthetic oligonucleotide
  Target: LAMA2; (+) strand; PAM type: YTN; PAM sequence: CTA
gccaatggaatgctcagtct

SEQ ID NO: 346398 - DNA, 20 bp, Artificial Sequence
  Description of Artificial Sequence: Synthetic oligonucleotide
  Target: LAMA2; (+) strand; PAM type: YTN; PAM sequence: CTC
agtcttgaagagcttgtgtc

SEQ ID NO: 346399 - DNA, 20 bp, Artificial Sequence
  Description of Artificial Sequence: Synthetic oligonucleotide
  Target: LAMA2; (+) strand; PAM type: YTN; PAM sequence: CTT
gaagagcttgtgtctctgct

SEQ ID NO: 346400 - DNA, 20 bp, Artificial Sequence
  Description of Artificial Sequence: Synthetic oligonucleotide
  Target: LAMA2; (+) strand; PAM type: YTN; PAM sequence: TTG
aagagcttgtgtctctgctt

SEQ ID NO: 346401 - DNA, 20 bp, Artificial Sequence
  Description of Artificial Sequence: Synthetic oligonucleotide
  Target: LAMA2; (+) strand; PAM type: YTN; PAM sequence: CTT
gtgtctctgcttaaactcct

SEQ ID NO: 346402 - DNA, 20 bp, Artificial Sequence
  Description of Artificial Sequence: Synthetic oligonucleotide
  Target: LAMA2; (+) strand; PAM type: YTN; PAM sequence: TTG
tgtctctgcttaaactcctg

SEQ ID NO: 346403 - DNA, 20 bp, Artificial Sequence
  Description of Artificial Sequence: Synthetic oligonucleotide
  Target: LAMA2; (+) strand; PAM type: YTN; PAM sequence: CTC
tgcttaaactcctgtatgca

SEQ ID NO: 346404 - DNA, 20 bp, Artificial Sequence
  Description of Artificial Sequence: Synthetic oligonucleotide
  Target: LAMA2; (+) strand; PAM type: YTN; PAM sequence: CTG
cttaaactcctgtatgcatt

SEQ ID NO: 346405 - DNA, 20 bp, Artificial Sequence
  Description of Artificial Sequence: Synthetic oligonucleotide
  Target: LAMA2; (+) strand; PAM type: YTN; PAM sequence: CTT
aaactcctgtatgcattagt

SEQ ID NO: 346406 - DNA, 20 bp, Artificial Sequence
  Description of Artificial Sequence: Synthetic oligonucleotide
  Target: LAMA2; (+) strand; PAM type: YTN; PAM sequence: TTA
aactcctgtatgcattagta

SEQ ID NO: 346407 - DNA, 20 bp, Artificial Sequence
  Description of Artificial Sequence: Synthetic oligonucleotide
  Target: LAMA2; (+) strand; PAM type: YTN; PAM sequence: CTC
ctgtatgcattagtatgatt

SEQ ID NO: 346408 - DNA, 20 bp, Artificial Sequence
  Description of Artificial Sequence: Synthetic oligonucleotide
  Target: LAMA2; (+) strand; PAM type: YTN; PAM sequence: CTG
tatgcattagtatgattcca

SEQ ID NO: 346409 - DNA, 20 bp, Artificial Sequence
  Description of Artificial Sequence: Synthetic oligonucleotide
  Target: LAMA2; (+) strand; PAM type: YTN; PAM sequence: TTA
gtatgattccataaatttaa

SEQ ID NO: 346410 - DNA, 20 bp, Artificial Sequence
  Description of Artificial Sequence: Synthetic oligonucleotide
  Target: LAMA2; (+) strand; PAM type: YTN; PAM sequence: TTC
cataaatttaaagtctctga

SEQ ID NO: 346411 - DNA, 20 bp, Artificial Sequence
  Description of Artificial Sequence: Synthetic oligonucleotide
  Target: LAMA2; (+) strand; PAM type: YTN; PAM sequence: TTT
aaagtctctgacatcttgag

SEQ ID NO: 346412 - DNA, 20 bp, Artificial Sequence
  Description of Artificial Sequence: Synthetic oligonucleotide
  Target: LAMA2; (+) strand; PAM type: YTN; PAM sequence: TTA
aagtctctgacatcttgagt

SEQ ID NO: 346413 - DNA, 20 bp, Artificial Sequence
  Description of Artificial Sequence: Synthetic oligonucleotide
  Target: LAMA2; (+) strand; PAM type: YTN; PAM sequence: CTC
tgacatcttgagttttaagc

SEQ ID NO: 346414 - DNA, 20 bp, Artificial Sequence
  Description of Artificial Sequence: Synthetic oligonucleotide
  Target: LAMA2; (+) strand; PAM type: YTN; PAM sequence: CTG
acatcttgagttttaagctt

SEQ ID NO: 346415 - DNA, 20 bp, Artificial Sequence
  Description of Artificial Sequence: Synthetic oligonucleotide
  Target: LAMA2; (+) strand; PAM type: YTN; PAM sequence: CTT
gagttttaagctttctgaac

SEQ ID NO: 346416 - DNA, 20 bp, Artificial Sequence
  Description of Artificial Sequence: Synthetic oligonucleotide
  Target: LAMA2; (+) strand; PAM type: YTN; PAM sequence: TTG
agttttaagctttctgaaca

SEQ ID NO: 346417 - DNA, 20 bp, Artificial Sequence
  Description of Artificial Sequence: Synthetic oligonucleotide
  Target: LAMA2; (+) strand; PAM type: YTN; PAM sequence: TTT
taagctttctgaacattaaa

SEQ ID NO: 346418 - DNA, 20 bp, Artificial Sequence
  Description of Artificial Sequence: Synthetic oligonucleotide
  Target: LAMA2; (+) strand; PAM type: YTN; PAM sequence: TTT
aagctttctgaacattaaat

SEQ ID NO: 346419 - DNA, 20 bp, Artificial Sequence
  Description of Artificial Sequence: Synthetic oligonucleotide
  Target: LAMA2; (+) strand; PAM type: YTN; PAM sequence: TTA
agctttctgaacattaaatc

SEQ ID NO: 346420 - DNA, 20 bp, Artificial Sequence
  Description of Artificial Sequence: Synthetic oligonucleotide
  Target: LAMA2; (+) strand; PAM type: YTN; PAM sequence: CTT
tctgaacattaaatcagtgg

SEQ ID NO: 346421 - DNA, 20 bp, Artificial Sequence
  Description of Artificial Sequence: Synthetic oligonucleotide
  Target: LAMA2; (+) strand; PAM type: YTN; PAM sequence: TTT
ctgaacattaaatcagtgga

SEQ ID NO: 346422 - DNA, 20 bp, Artificial Sequence
  Description of Artificial Sequence: Synthetic oligonucleotide
  Target: LAMA2; (+) strand; PAM type: YTN; PAM sequence: TTC
tgaacattaaatcagtggag

SEQ ID NO: 346423 - DNA, 20 bp, Artificial Sequence
  Description of Artificial Sequence: Synthetic oligonucleotide
  Target: LAMA2; (+) strand; PAM type: YTN; PAM sequence: CTG
aacattaaatcagtggaggc

SEQ ID NO: 346424 - DNA, 20 bp, Artificial Sequence
  Description of Artificial Sequence: Synthetic oligonucleotide
  Target: LAMA2; (+) strand; PAM type: YTN; PAM sequence: TTA
aatcagtggaggctgctagt

SEQ ID NO: 346425 - DNA, 20 bp, Artificial Sequence
  Description of Artificial Sequence: Synthetic oligonucleotide
  Target: LAMA2; (+) strand; PAM type: YTN; PAM sequence: CTG
ctagtagctatcctgaaatg

SEQ ID NO: 346426 - DNA, 20 bp, Artificial Sequence
  Description of Artificial Sequence: Synthetic oligonucleotide
  Target: LAMA2; (+) strand; PAM type: YTN; PAM sequence: CTA
gtagctatcctgaaatgctg

SEQ ID NO: 346427 - DNA, 20 bp, Artificial Sequence
  Description of Artificial Sequence: Synthetic oligonucleotide
  Target: LAMA2; (+) strand; PAM type: YTN; PAM sequence: CTA
tcctgaaatgctgcttctat

SEQ ID NO: 346428 - DNA, 20 bp, Artificial Sequence
  Description of Artificial Sequence: Synthetic oligonucleotide
  Target: LAMA2; (+) strand; PAM type: YTN; PAM sequence: CTG
aaatgctgcttctatacata

SEQ ID NO: 346429 - DNA, 20 bp, Artificial Sequence
  Description of Artificial Sequence: Synthetic oligonucleotide
  Target: LAMA2; (+) strand; PAM type: YTN; PAM sequence: CTG
cttctatacatatgagtaaa

SEQ ID NO: 346430 - DNA, 20 bp, Artificial Sequence
  Description of Artificial Sequence: Synthetic oligonucleotide
  Target: LAMA2; (+) strand; PAM type: YTN; PAM sequence: CTT
ctatacatatgagtaaaaat

SEQ ID NO: 346431 - DNA, 20 bp, Artificial Sequence
  Description of Artificial Sequence: Synthetic oligonucleotide
  Target: LAMA2; (+) strand; PAM type: YTN; PAM sequence: TTC
tatacatatgagtaaaaatc

SEQ ID NO: 346432 - DNA, 20 bp, Artificial Sequence
  Description of Artificial Sequence: Synthetic oligonucleotide
  Target: LAMA2; (+) strand; PAM type: YTN; PAM sequence: CTA
tacatatgagtaaaaatcca

SEQ ID NO: 346433 - DNA, 20 bp, Artificial Sequence
  Description of Artificial Sequence: Synthetic oligonucleotide
  Target: LAMA2; (+) strand; PAM type: YTN; PAM sequence: TTA
atgtatttatacagcttttc

SEQ ID NO: 346434 - DNA, 20 bp, Artificial Sequence
  Description of Artificial Sequence: Synthetic oligonucleotide
  Target: LAMA2; (+) strand; PAM type: YTN; PAM sequence: TTT
atacagcttttcatttgtgt

SEQ ID NO: 346435 - DNA, 20 bp, Artificial Sequence
  Description of Artificial Sequence: Synthetic oligonucleotide
  Target: LAMA2; (+) strand; PAM type: YTN; PAM sequence: TTA
tacagcttttcatttgtgta

SEQ ID NO: 346436 - DNA, 20 bp, Artificial Sequence
  Description of Artificial Sequence: Synthetic oligonucleotide
  Target: LAMA2; (+) strand; PAM type: YTN; PAM sequence: CTT
ttcatttgtgtactcgtaaa

SEQ ID NO: 346437 - DNA, 20 bp, Artificial Sequence
  Description of Artificial Sequence: Synthetic oligonucleotide
  Target: LAMA2; (+) strand; PAM type: YTN; PAM sequence: TTT
tcatttgtgtactcgtaaaa

SEQ ID NO: 346438 - DNA, 20 bp, Artificial Sequence
  Description of Artificial Sequence: Synthetic oligonucleotide
  Target: LAMA2; (+) strand; PAM type: YTN; PAM sequence: TTT
catttgtgtactcgtaaaat

SEQ ID NO: 346439 - DNA, 20 bp, Artificial Sequence
  Description of Artificial Sequence: Synthetic oligonucleotide
  Target: LAMA2; (+) strand; PAM type: YTN; PAM sequence: TTC
atttgtgtactcgtaaaata

SEQ ID NO: 346440 - DNA, 20 bp, Artificial Sequence
  Description of Artificial Sequence: Synthetic oligonucleotide
  Target: LAMA2; (+) strand; PAM type: YTN; PAM sequence: TTT
gtgtactcgtaaaatacaca

SEQ ID NO: 346441 - DNA, 20 bp, Artificial Sequence
  Description of Artificial Sequence: Synthetic oligonucleotide
  Target: LAMA2; (+) strand; PAM type: YTN; PAM sequence: TTG
tgtactcgtaaaatacacac

SEQ ID NO: 346442 - DNA, 20 bp, Artificial Sequence
  Description of Artificial Sequence: Synthetic oligonucleotide
  Target: LAMA2; (+) strand; PAM type: YTN; PAM sequence: CTC
gtaaaatacacacacacaca

SEQ ID NO: 346443 - DNA, 20 bp, Artificial Sequence
  Description of Artificial Sequence: Synthetic oligonucleotide
  Target: LAMA2; (+) strand; PAM type: YTN; PAM sequence: TTC
aacacacacacacacacgcg

SEQ ID NO: 346444 - DNA, 20 bp, Artificial Sequence
  Description of Artificial Sequence: Synthetic oligonucleotide
  Target: LAMA2; (+) strand; PAM type: YTN; PAM sequence: TTC
aacttttctctgaagaacct

SEQ ID NO: 346445 - DNA, 20 bp, Artificial Sequence
  Description of Artificial Sequence: Synthetic oligonucleotide
  Target: LAMA2; (+) strand; PAM type: YTN; PAM sequence: CTT
ttctctgaagaacctttgag

SEQ ID NO: 346446 - DNA, 20 bp, Artificial Sequence
  Description of Artificial Sequence: Synthetic oligonucleotide
  Target: LAMA2; (+) strand; PAM type: YTN; PAM sequence: TTT
tctctgaagaacctttgagt

SEQ ID NO: 346447 - DNA, 20 bp, Artificial Sequence
  Description of Artificial Sequence: Synthetic oligonucleotide
  Target: LAMA2; (+) strand; PAM type: YTN; PAM sequence: TTT
ctctgaagaacctttgagtc

SEQ ID NO: 346448 - DNA, 20 bp, Artificial Sequence
  Description of Artificial Sequence: Synthetic oligonucleotide
  Target: LAMA2; (+) strand; PAM type: YTN; PAM sequence: TTC
tctgaagaacctttgagtca

SEQ ID NO: 346449 - DNA, 20 bp, Artificial Sequence
  Description of Artificial Sequence: Synthetic oligonucleotide
  Target: LAMA2; (+) strand; PAM type: YTN; PAM sequence: CTC
tgaagaacctttgagtcaga

SEQ ID NO: 346450 - DNA, 20 bp, Artificial Sequence
  Description of Artificial Sequence: Synthetic oligonucleotide
  Target: LAMA2; (+) strand; PAM type: YTN; PAM sequence: CTG
aagaacctttgagtcagaga

SEQ ID NO: 346451 - DNA, 20 bp, Artificial Sequence
  Description of Artificial Sequence: Synthetic oligonucleotide
  Target: LAMA2; (+) strand; PAM type: YTN; PAM sequence: CTT
tgagtcagagaatgagaatg

SEQ ID NO: 346452 - DNA, 20 bp, Artificial Sequence
  Description of Artificial Sequence: Synthetic oligonucleotide
  Target: LAMA2; (+) strand; PAM type: YTN; PAM sequence: TTT
gagtcagagaatgagaatga

SEQ ID NO: 346453 - DNA, 20 bp, Artificial Sequence
  Description of Artificial Sequence: Synthetic oligonucleotide
  Target: LAMA2; (+) strand; PAM type: YTN; PAM sequence: TTG
agtcagagaatgagaatgaa

SEQ ID NO: 346454 - DNA, 20 bp, Artificial Sequence
  Description of Artificial Sequence: Synthetic oligonucleotide
  Target: LAMA2; (+) strand; PAM type: YTN; PAM sequence: CTG
aatttctcttttaagttcct

SEQ ID NO: 346455 - DNA, 20 bp, Artificial Sequence
  Description of Artificial Sequence: Synthetic oligonucleotide
  Target: LAMA2; (+) strand; PAM type: YTN; PAM sequence: TTT
ctcttttaagttcctgtcta

SEQ ID NO: 346456 - DNA, 20 bp, Artificial Sequence
  Description of Artificial Sequence: Synthetic oligonucleotide
  Target: LAMA2; (+) strand; PAM type: YTN; PAM sequence: TTC
tcttttaagttcctgtctag

SEQ ID NO: 346457 - DNA, 20 bp, Artificial Sequence
  Description of Artificial Sequence: Synthetic oligonucleotide
  Target: LAMA2; (+) strand; PAM type: YTN; PAM sequence: CTC
ttttaagttcctgtctaggt

SEQ ID NO: 346458 - DNA, 20 bp, Artificial Sequence
  Description of Artificial Sequence: Synthetic oligonucleotide
  Target: LAMA2; (+) strand; PAM type: YTN; PAM sequence: CTT
ttaagttcctgtctaggttt

SEQ ID NO: 346459 - DNA, 20 bp, Artificial Sequence
  Description of Artificial Sequence: Synthetic oligonucleotide
  Target: LAMA2; (+) strand; PAM type: YTN; PAM sequence: TTT
taagttcctgtctaggtttt

SEQ ID NO: 346460 - DNA, 20 bp, Artificial Sequence
  Description of Artificial Sequence: Synthetic oligonucleotide
  Target: LAMA2; (+) strand; PAM type: YTN; PAM sequence: TTT
aagttcctgtctaggttttg

SEQ ID NO: 346461 - DNA, 20 bp, Artificial Sequence
  Description of Artificial Sequence: Synthetic oligonucleotide
  Target: LAMA2; (+) strand; PAM type: YTN; PAM sequence: TTA
agttcctgtctaggttttgt

SEQ ID NO: 346462 - DNA, 20 bp, Artificial Sequence
  Description of Artificial Sequence: Synthetic oligonucleotide
  Target: LAMA2; (+) strand; PAM type: YTN; PAM sequence: TTC
ctgtctaggttttgttccaa

SEQ ID NO: 346463 - DNA, 20 bp, Artificial Sequence
  Description of Artificial Sequence: Synthetic oligonucleotide
  Target: LAMA2; (+) strand; PAM type: YTN; PAM sequence: CTG
tctaggttttgttccaatct

SEQ ID NO: 346464 - DNA, 20 bp, Artificial Sequence
  Description of Artificial Sequence: Synthetic oligonucleotide
  Target: LAMA2; (+) strand; PAM type: YTN; PAM sequence: CTA
ggttttgttccaatctaatg

SEQ ID NO: 346465 - DNA, 20 bp, Artificial Sequence
  Description of Artificial Sequence: Synthetic oligonucleotide
  Target: LAMA2; (+) strand; PAM type: YTN; PAM sequence: TTT
tgttccaatctaatgacaca

SEQ ID NO: 346466 - DNA, 20 bp, Artificial Sequence
  Description of Artificial Sequence: Synthetic oligonucleotide
  Target: LAMA2; (+) strand; PAM type: YTN; PAM sequence: TTT
gttccaatctaatgacacag

SEQ ID NO: 346467 - DNA, 20 bp, Artificial Sequence
  Description of Artificial Sequence: Synthetic oligonucleotide
  Target: LAMA2; (+) strand; PAM type: YTN; PAM sequence: TTG
ttccaatctaatgacacagg

SEQ ID NO: 346468 - DNA, 20 bp, Artificial Sequence
  Description of Artificial Sequence: Synthetic oligonucleotide
  Target: LAMA2; (+) strand; PAM type: YTN; PAM sequence: TTC
caatctaatgacacaggatc

SEQ ID NO: 346469 - DNA, 20 bp, Artificial Sequence
  Description of Artificial Sequence: Synthetic oligonucleotide
  Target: LAMA2; (+) strand; PAM type: YTN; PAM sequence: CTA
atgacacaggatctggcact

SEQ ID NO: 346470 - DNA, 20 bp, Artificial Sequence
  Description of Artificial Sequence: Synthetic oligonucleotide
  Target: LAMA2; (+) strand; PAM type: YTN; PAM sequence: CTG
gcactgtatttagacctcct

SEQ ID NO: 346471 - DNA, 20 bp, Artificial Sequence
  Description of Artificial Sequence: Synthetic oligonucleotide
  Target: LAMA2; (+) strand; PAM type: YTN; PAM sequence: CTG
tatttagacctcctgctcca

SEQ ID NO: 346472 - DNA, 20 bp, Artificial Sequence
  Description of Artificial Sequence: Synthetic oligonucleotide
  Target: LAMA2; (+) strand; PAM type: YTN; PAM sequence: TTT
agacctcctgctccaagatt

SEQ ID NO: 346473 - DNA, 20 bp, Artificial Sequence
  Description of Artificial Sequence: Synthetic oligonucleotide
  Target: LAMA2; (+) strand; PAM type: YTN; PAM sequence: TTA
gacctcctgctccaagattt

SEQ ID NO: 346474 - DNA, 20 bp, Artificial Sequence
  Description of Artificial Sequence: Synthetic oligonucleotide
  Target: LAMA2; (+) strand; PAM type: YTN; PAM sequence: CTC
ctgctccaagattttatttt

SEQ ID NO: 346475 - DNA, 20 bp, Artificial Sequence
  Description of Artificial Sequence: Synthetic oligonucleotide
  Target: LAMA2; (+) strand; PAM type: YTN; PAM sequence: CTG
ctccaagattttatttttat

SEQ ID NO: 346476 - DNA, 20 bp, Artificial Sequence
  Description of Artificial Sequence: Synthetic oligonucleotide
  Target: LAMA2; (+) strand; PAM type: YTN; PAM sequence: CTC
caagattttatttttatttt

SEQ ID NO: 346477 - DNA, 20 bp, Artificial Sequence
  Description of Artificial Sequence: Synthetic oligonucleotide
  Target: LAMA2; (+) strand; PAM type: YTN; PAM sequence: TTT
tatttttattttaaacaagt

SEQ ID NO: 346478 - DNA, 20 bp, Artificial Sequence
  Description of Artificial Sequence: Synthetic oligonucleotide
  Target: LAMA2; (+) strand; PAM type: YTN; PAM sequence: TTT
atttttattttaaacaagtg

SEQ ID NO: 346479 - DNA, 20 bp, Artificial Sequence
  Description of Artificial Sequence: Synthetic oligonucleotide
  Target: LAMA2; (+) strand; PAM type: YTN; PAM sequence: TTA
tttttattttaaacaagtgt

SEQ ID NO: 346480 - DNA, 20 bp, Artificial Sequence
  Description of Artificial Sequence: Synthetic oligonucleotide
  Target: LAMA2; (+) strand; PAM type: YTN; PAM sequence: TTT
ttattttaaacaagtgttcc

SEQ ID NO: 346481 - DNA, 20 bp, Artificial Sequence
  Description of Artificial Sequence: Synthetic oligonucleotide
  Target: LAMA2; (+) strand; PAM type: YTN; PAM sequence: TTT
tattttaaacaagtgttccc

SEQ ID NO: 346482 - DNA, 20 bp, Artificial Sequence
  Description of Artificial Sequence: Synthetic oligonucleotide
  Target: LAMA2; (+) strand; PAM type: YTN; PAM sequence: TTT
attttaaacaagtgttccca

SEQ ID NO: 346483 - DNA, 20 bp, Artificial Sequence
  Description of Artificial Sequence: Synthetic oligonucleotide
  Target: LAMA2; (+) strand; PAM type: YTN; PAM sequence: TTA
ttttaaacaagtgttcccac

SEQ ID NO: 346484 - DNA, 20 bp, Artificial Sequence
  Description of Artificial Sequence: Synthetic oligonucleotide
  Target: LAMA2; (+) strand; PAM type: YTN; PAM sequence: TTT
taaacaagtgttcccacacg

SEQ ID NO: 346485 - DNA, 20 bp, Artificial Sequence
  Description of Artificial Sequence: Synthetic oligonucleotide
  Target: LAMA2; (+) strand; PAM type: YTN; PAM sequence: TTT
aaacaagtgttcccacacgg

SEQ ID NO: 346486 - DNA, 20 bp, Artificial Sequence
  Description of Artificial Sequence: Synthetic oligonucleotide
  Target: LAMA2; (+) strand; PAM type: YTN; PAM sequence: TTA
aacaagtgttcccacacggg

SEQ ID NO: 346487 - DNA, 20 bp, Artificial Sequence
  Description of Artificial Sequence: Synthetic oligonucleotide
  Target: LAMA2; (+) strand; PAM type: YTN; PAM sequence: TTC
ccacacggggactgaaaaca

SEQ ID NO: 346488 - DNA, 20 bp, Artificial Sequence
  Description of Artificial Sequence: Synthetic oligonucleotide
  Target: LAMA2; (+) strand; PAM type: YTN; PAM sequence: CTG
aaaacaaaacaggaaaatgt

SEQ ID NO: 346489 - DNA, 20 bp, Artificial Sequence
  Description of Artificial Sequence: Synthetic oligonucleotide
  Target: LAMA2; (+) strand; PAM type: YTN; PAM sequence: TTG
cttaagttttcctttgagct

SEQ ID NO: 346490 - DNA, 20 bp, Artificial Sequence
  Description of Artificial Sequence: Synthetic oligonucleotide
  Target: LAMA2; (+) strand; PAM type: YTN; PAM sequence: CTT
aagttttcctttgagctgct

SEQ ID NO: 346491 - DNA, 20 bp, Artificial Sequence
  Description of Artificial Sequence: Synthetic oligonucleotide
  Target: LAMA2; (+) strand; PAM type: YTN; PAM sequence: TTA
agttttcctttgagctgctg

SEQ ID NO: 346492 - DNA, 20 bp, Artificial Sequence
  Description of Artificial Sequence: Synthetic oligonucleotide
  Target: LAMA2; (+) strand; PAM type: YTN; PAM sequence: TTT
tcctttgagctgctgttatc

SEQ ID NO: 346493 - DNA, 20 bp, Artificial Sequence
  Description of Artificial Sequence: Synthetic oligonucleotide
  Target: LAMA2; (+) strand; PAM type: YTN; PAM sequence: TTT
cctttgagctgctgttatct

SEQ ID NO: 346494 - DNA, 20 bp, Artificial Sequence
  Description of Artificial Sequence: Synthetic oligonucleotide
  Target: LAMA2; (+) strand; PAM type: YTN; PAM sequence: TTC
ctttgagctgctgttatctg

SEQ ID NO: 346495 - DNA, 20 bp, Artificial Sequence
  Description of Artificial Sequence: Synthetic oligonucleotide
  Target: LAMA2; (+) strand; PAM type: YTN; PAM sequence: CTT
tgagctgctgttatctgact

SEQ ID NO: 346496 - DNA, 20 bp, Artificial Sequence
  Description of Artificial Sequence: Synthetic oligonucleotide
  Target: LAMA2; (+) strand; PAM type: YTN; PAM sequence: TTT
gagctgctgttatctgactt

SEQ ID NO: 346497 - DNA, 20 bp, Artificial Sequence
  Description of Artificial Sequence: Synthetic oligonucleotide
  Target: LAMA2; (+) strand; PAM type: YTN; PAM sequence: TTG
agctgctgttatctgacttt

SEQ ID NO: 346498 - DNA, 20 bp, Artificial Sequence
  Description of Artificial Sequence: Synthetic oligonucleotide
  Target: LAMA2; (+) strand; PAM type: YTN; PAM sequence: CTG
ctgttatctgactttcaagt

SEQ ID NO: 346499 - DNA, 20 bp, Artificial Sequence
  Description of Artificial Sequence: Synthetic oligonucleotide
  Target: LAMA2; (+) strand; PAM type: YTN; PAM sequence: CTG
ttatctgactttcaagtgta

SEQ ID NO: 346500 - DNA, 20 bp, Artificial Sequence
  Description of Artificial Sequence: Synthetic oligonucleotide
  Target: LAMA2; (+) strand; PAM type: YTN; PAM sequence: TTA
tctgactttcaagtgtactg

SEQ ID NO: 346501 - DNA, 20 bp, Artificial Sequence
  Description of Artificial Sequence: Synthetic oligonucleotide
  Target: LAMA2; (+) strand; PAM type: YTN; PAM sequence: CTG
actttcaagtgtactgattg

SEQ ID NO: 346502 - DNA, 20 bp, Artificial Sequence
  Description of Artificial Sequence: Synthetic oligonucleotide
  Target: LAMA2; (+) strand; PAM type: YTN; PAM sequence: CTT
tcaagtgtactgattgttcc

SEQ ID NO: 346503 - DNA, 20 bp, Artificial Sequence
  Description of Artificial Sequence: Synthetic oligonucleotide
  Target: LAMA2; (+) strand; PAM type: YTN; PAM sequence: TTT
caagtgtactgattgttccg

SEQ ID NO: 346504 - DNA, 20 bp, Artificial Sequence
  Description of Artificial Sequence: Synthetic oligonucleotide
  Target: LAMA2; (+) strand; PAM type: YTN; PAM sequence: TTC
aagtgtactgattgttccgt

SEQ ID NO: 346505 - DNA, 20 bp, Artificial Sequence
  Description of Artificial Sequence: Synthetic oligonucleotide
  Target: LAMA2; (+) strand; PAM type: YTN; PAM sequence: CTG
attgttccgtctcaccaatg

SEQ ID NO: 346506 - DNA, 20 bp, Artificial Sequence
  Description of Artificial Sequence: Synthetic oligonucleotide
  Target: LAMA2; (+) strand; PAM type: YTN; PAM sequence: TTG
ttccgtctcaccaatgtagg

SEQ ID NO: 346507 - DNA, 20 bp, Artificial Sequence
  Description of Artificial Sequence: Synthetic oligonucleotide
  Target: LAMA2; (+) strand; PAM type: YTN; PAM sequence: TTC
cgtctcaccaatgtaggtca

SEQ ID NO: 346508 - DNA, 20 bp, Artificial Sequence
  Description of Artificial Sequence: Synthetic oligonucleotide
  Target: LAMA2; (+) strand; PAM type: YTN; PAM sequence: CTC
accaatgtaggtcattgtac

SEQ ID NO: 346509 - DNA, 20 bp, Artificial Sequence
  Description of Artificial Sequence: Synthetic oligonucleotide
  Target: LAMA2; (+) strand; PAM type: YTN; PAM sequence: TTG
tactctcagttactttgttt

SEQ ID NO: 346510 - DNA, 20 bp, Artificial Sequence
  Description of Artificial Sequence: Synthetic oligonucleotide
  Target: LAMA2; (+) strand; PAM type: YTN; PAM sequence: CTC
tcagttactttgttttctat

SEQ ID NO: 346511 - DNA, 20 bp, Artificial Sequence
  Description of Artificial Sequence: Synthetic oligonucleotide
  Target: LAMA2; (+) strand; PAM type: YTN; PAM sequence: CTC
agttactttgttttctatcg

SEQ ID NO: 346512 - DNA, 20 bp, Artificial Sequence
  Description of Artificial Sequence: Synthetic oligonucleotide
  Target: LAMA2; (+) strand; PAM type: YTN; PAM sequence: TTA
ctttgttttctatcggaact

SEQ ID NO: 346513 - DNA, 20 bp, Artificial Sequence
  Description of Artificial Sequence: Synthetic oligonucleotide
  Target: LAMA2; (+) strand; PAM type: YTN; PAM sequence: CTT
tgttttctatcggaactttc

SEQ ID NO: 346514 - DNA, 20 bp, Artificial Sequence
  Description of Artificial Sequence: Synthetic oligonucleotide
  Target: LAMA2; (+) strand; PAM type: YTN; PAM sequence: TTT
gttttctatcggaactttct

SEQ ID NO: 346515 - DNA, 20 bp, Artificial Sequence
  Description of Artificial Sequence: Synthetic oligonucleotide
  Target: LAMA2; (+) strand; PAM type: YTN; PAM sequence: TTG
ttttctatcggaactttctc

SEQ ID NO: 346516 - DNA, 20 bp, Artificial Sequence
  Description of Artificial Sequence: Synthetic oligonucleotide
  Target: LAMA2; (+) strand; PAM type: YTN; PAM sequence: TTT
tctatcggaactttctctag

SEQ ID NO: 346517 - DNA, 20 bp, Artificial Sequence
  Description of Artificial Sequence: Synthetic oligonucleotide
  Target: LAMA2; (+) strand; PAM type: YTN; PAM sequence: TTT
ctatcggaactttctctagc

SEQ ID NO: 346518 - DNA, 20 bp, Artificial Sequence
  Description of Artificial Sequence: Synthetic oligonucleotide
  Target: LAMA2; (+) strand; PAM type: YTN; PAM sequence: TTC
tatcggaactttctctagca

SEQ ID NO: 346519 - DNA, 20 bp, Artificial Sequence
  Description of Artificial Sequence: Synthetic oligonucleotide
  Target: LAMA2; (+) strand; PAM type: YTN; PAM sequence: CTA
tcggaactttctctagcagc

SEQ ID NO: 346520 - DNA, 20 bp, Artificial Sequence
  Description of Artificial Sequence: Synthetic oligonucleotide
  Target: LAMA2; (+) strand; PAM type: YTN; PAM sequence: CTT
tctctagcagctctccacat

SEQ ID NO: 346521 - DNA, 20 bp, Artificial Sequence
  Description of Artificial Sequence: Synthetic oligonucleotide
  Target: LAMA2; (+) strand; PAM type: YTN; PAM sequence: TTT
ctctagcagctctccacatt

SEQ ID NO: 346522 - DNA, 20 bp, Artificial Sequence
  Description of Artificial Sequence: Synthetic oligonucleotide
  Target: LAMA2; (+) strand; PAM type: YTN; PAM sequence: TTC
tctagcagctctccacatta

SEQ ID NO: 346523 - DNA, 20 bp, Artificial Sequence
  Description of Artificial Sequence: Synthetic oligonucleotide
  Target: LAMA2; (+) strand; PAM type: YTN; PAM sequence: CTC
tagcagctctccacattaag

SEQ ID NO: 346524 - DNA, 20 bp, Artificial Sequence
  Description of Artificial Sequence: Synthetic oligonucleotide
  Target: LAMA2; (+) strand; PAM type: YTN; PAM sequence: CTA
gcagctctccacattaaggg

SEQ ID NO: 346525 - DNA, 20 bp, Artificial Sequence
  Description of Artificial Sequence: Synthetic oligonucleotide
  Target: LAMA2; (+) strand; PAM type: YTN; PAM sequence: CTC
tccacattaagggagatcat

SEQ ID NO: 346526 - DNA, 20 bp, Artificial Sequence
  Description of Artificial Sequence: Synthetic oligonucleotide
  Target: LAMA2; (+) strand; PAM type: YTN; PAM sequence: CTC
cacattaagggagatcatgt

SEQ ID NO: 346527 - DNA, 20 bp, Artificial Sequence
  Description of Artificial Sequence: Synthetic oligonucleotide
  Target: LAMA2; (+) strand; PAM type: YTN; PAM sequence: TTA
agggagatcatgttatttca

SEQ ID NO: 346528 - DNA, 20 bp, Artificial Sequence
  Description of Artificial Sequence: Synthetic oligonucleotide
  Target: LAMA2; (+) strand; PAM type: YTN; PAM sequence: TTA
tttcacatatttatttttgt

SEQ ID NO: 346529 - DNA, 20 bp, Artificial Sequence
  Description of Artificial Sequence: Synthetic oligonucleotide
  Target: LAMA2; (+) strand; PAM type: YTN; PAM sequence: TTT
cacatatttatttttgttat

SEQ ID NO: 346530 - DNA, 20 bp, Artificial Sequence
  Description of Artificial Sequence: Synthetic oligonucleotide
  Target: LAMA2; (+) strand; PAM type: YTN; PAM sequence: TTC
acatatttatttttgttatt

SEQ ID NO: 346531 - DNA, 20 bp, Artificial Sequence
  Description of Artificial Sequence: Synthetic oligonucleotide
  Target: LAMA2; (+) strand; PAM type: YTN; PAM sequence: TTT
atttttgttattaacatatt

SEQ ID NO: 346532 - DNA, 20 bp, Artificial Sequence
  Description of Artificial Sequence: Synthetic oligonucleotide
  Target: LAMA2; (+) strand; PAM type: YTN; PAM sequence: TTA
tttttgttattaacatattt

SEQ ID NO: 346533 - DNA, 20 bp, Artificial Sequence
  Description of Artificial Sequence: Synthetic oligonucleotide
  Target: LAMA2; (+) strand; PAM type: YTN; PAM sequence: TTT
ttgttattaacatattttct

SEQ ID NO: 346534 - DNA, 20 bp, Artificial Sequence
  Description of Artificial Sequence: Synthetic oligonucleotide
  Target: LAMA2; (+) strand; PAM type: YTN; PAM sequence: TTT
tgttattaacatattttctt

SEQ ID NO: 346535 - DNA, 20 bp, Artificial Sequence
  Description of Artificial Sequence: Synthetic oligonucleotide
  Target: LAMA2; (+) strand; PAM type: YTN; PAM sequence: TTT
gttattaacatattttcttc

SEQ ID NO: 346536 - DNA, 20 bp, Artificial Sequence
  Description of Artificial Sequence: Synthetic oligonucleotide
  Target: LAMA2; (+) strand; PAM type: YTN; PAM sequence: TTG
ttattaacatattttcttca

SEQ ID NO: 346537 - DNA, 20 bp, Artificial Sequence
  Description of Artificial Sequence: Synthetic oligonucleotide
  Target: LAMA2; (+) strand; PAM type: YTN; PAM sequence: TTA
ttaacatattttcttcatct

SEQ ID NO: 346538 - DNA, 20 bp, Artificial Sequence
  Description of Artificial Sequence: Synthetic oligonucleotide
  Target: LAMA2; (+) strand; PAM type: YTN; PAM sequence: TTA
acatattttcttcatctccc

SEQ ID NO: 346539 - DNA, 20 bp, Artificial Sequence
  Description of Artificial Sequence: Synthetic oligonucleotide
  Target: LAMA2; (+) strand; PAM type: YTN; PAM sequence: TTT
tcttcatctccctataattt

SEQ ID NO: 346540 - DNA, 20 bp, Artificial Sequence
  Description of Artificial Sequence: Synthetic oligonucleotide
  Target: LAMA2; (+) strand; PAM type: YTN; PAM sequence: TTT
cttcatctccctataatttg

SEQ ID NO: 346541 - DNA, 20 bp, Artificial Sequence
  Description of Artificial Sequence: Synthetic oligonucleotide
  Target: LAMA2; (+) strand; PAM type: YTN; PAM sequence: TTC
ttcatctccctataatttga

SEQ ID NO: 346542 - DNA, 20 bp, Artificial Sequence
  Description of Artificial Sequence: Synthetic oligonucleotide
  Target: LAMA2; (+) strand; PAM type: YTN; PAM sequence: CTT
catctccctataatttgagg

SEQ ID NO: 346543 - DNA, 20 bp, Artificial Sequence
  Description of Artificial Sequence: Synthetic oligonucleotide
  Target: LAMA2; (+) strand; PAM type: YTN; PAM sequence: TTC
atctccctataatttgaggt

SEQ ID NO: 346544 - DNA, 20 bp, Artificial Sequence
  Description of Artificial Sequence: Synthetic oligonucleotide
  Target: LAMA2; (+) strand; PAM type: YTN; PAM sequence: CTC
cctataatttgaggttttag

SEQ ID NO: 346545 - DNA, 20 bp, Artificial Sequence
  Description of Artificial Sequence: Synthetic oligonucleotide
  Target: LAMA2; (+) strand; PAM type: YTN; PAM sequence: CTA
taatttgaggttttagcact

SEQ ID NO: 346546 - DNA, 20 bp, Artificial Sequence
  Description of Artificial Sequence: Synthetic oligonucleotide
  Target: LAMA2; (+) strand; PAM type: YTN; PAM sequence: TTT
gaggttttagcactttcttc

SEQ ID NO: 346547 - DNA, 20 bp, Artificial Sequence
  Description of Artificial Sequence: Synthetic oligonucleotide
  Target: LAMA2; (+) strand; PAM type: YTN; PAM sequence: TTG
aggttttagcactttcttct

SEQ ID NO: 346548 - DNA, 20 bp, Artificial Sequence
  Description of Artificial Sequence: Synthetic oligonucleotide
  Target: LAMA2; (+) strand; PAM type: YTN; PAM sequence: TTT
tagcactttcttctttgtag

SEQ ID NO: 346549 - DNA, 20 bp, Artificial Sequence
  Description of Artificial Sequence: Synthetic oligonucleotide
  Target: LAMA2; (+) strand; PAM type: YTN; PAM sequence: TTT
agcactttcttctttgtaga

SEQ ID NO: 346550 - DNA, 20 bp, Artificial Sequence
  Description of Artificial Sequence: Synthetic oligonucleotide
  Target: LAMA2; (+) strand; PAM type: YTN; PAM sequence: TTA
gcactttcttctttgtagaa

SEQ ID NO: 346551 - DNA, 20 bp, Artificial Sequence
  Description of Artificial Sequence: Synthetic oligonucleotide
  Target: LAMA2; (+) strand; PAM type: YTN; PAM sequence: CTT
tcttctttgtagaatttacc

SEQ ID NO: 346552 - DNA, 20 bp, Artificial Sequence
  Description of Artificial Sequence: Synthetic oligonucleotide
  Target: LAMA2; (+) strand; PAM type: YTN; PAM sequence: TTT
cttctttgtagaatttacca

SEQ ID NO: 346553 - DNA, 20 bp, Artificial Sequence
  Description of Artificial Sequence: Synthetic oligonucleotide
  Target: LAMA2; (+) strand; PAM type: YTN; PAM sequence: TTC
ttctttgtagaatttaccat

SEQ ID NO: 346554 - DNA, 20 bp, Artificial Sequence
  Description of Artificial Sequence: Synthetic oligonucleotide
  Target: LAMA2; (+) strand; PAM type: YTN; PAM sequence: CTT
ctttgtagaatttaccataa

SEQ ID NO: 346555 - DNA, 20 bp, Artificial Sequence
  Description of Artificial Sequence: Synthetic oligonucleotide
  Target: LAMA2; (+) strand; PAM type: YTN; PAM sequence: TTC
tttgtagaatttaccataaa

SEQ ID NO: 346556 - DNA, 20 bp, Artificial Sequence
  Description of Artificial Sequence: Synthetic oligonucleotide
  Target: LAMA2; (+) strand; PAM type: YTN; PAM sequence: CTT
tgtagaatttaccataaagc

SEQ ID NO: 346557 - DNA, 20 bp, Artificial Sequence
  Description of Artificial Sequence: Synthetic oligonucleotide
  Target: LAMA2; (+) strand; PAM type: YTN; PAM sequence: TTT
gtagaatttaccataaagca

SEQ ID NO: 346558 - DNA, 20 bp, Artificial Sequence
  Description of Artificial Sequence: Synthetic oligonucleotide
  Target: LAMA2; (+) strand; PAM type: YTN; PAM sequence: TTG
tagaatttaccataaagcat

SEQ ID NO: 346559 - DNA, 20 bp, Artificial Sequence
  Description of Artificial Sequence: Synthetic oligonucleotide
  Target: LAMA2; (+) strand; PAM type: YTN; PAM sequence: TTT
accataaagcatacgtattt

SEQ ID NO: 346560 - DNA, 20 bp, Artificial Sequence
  Description of Artificial Sequence: Synthetic oligonucleotide
  Target: LAMA2; (+) strand; PAM type: YTN; PAM sequence: TTA
ccataaagcatacgtatttt

SEQ ID NO: 346561 - DNA, 20 bp, Artificial Sequence
  Description of Artificial Sequence: Synthetic oligonucleotide
  Target: LAMA2; (+) strand; PAM type: YTN; PAM sequence: TTT
ttgaaaactagggaatagct

SEQ ID NO: 346562 - DNA, 20 bp, Artificial Sequence
  Description of Artificial Sequence: Synthetic oligonucleotide
  Target: LAMA2; (+) strand; PAM type: YTN; PAM sequence: TTT
tgaaaactagggaatagctt

SEQ ID NO: 346563 - DNA, 20 bp, Artificial Sequence
  Description of Artificial Sequence: Synthetic oligonucleotide
  Target: LAMA2; (+) strand; PAM type: YTN; PAM sequence: TTT
gaaaactagggaatagcttt

SEQ ID NO: 346564 - DNA, 20 bp, Artificial Sequence
  Description of Artificial Sequence: Synthetic oligonucleotide
  Target: LAMA2; (+) strand; PAM type: YTN; PAM sequence: TTG
aaaactagggaatagctttt

SEQ ID NO: 346565 - DNA, 20 bp, Artificial Sequence
  Description of Artificial Sequence: Synthetic oligonucleotide
  Target: LAMA2; (+) strand; PAM type: YTN; PAM sequence: CTA
gggaatagcttttacttact

SEQ ID NO: 346566 - DNA, 20 bp, Artificial Sequence
  Description of Artificial Sequence: Synthetic oligonucleotide
  Target: LAMA2; (+) strand; PAM type: YTN; PAM sequence: CTT
ttacttactaaagtacttaa

SEQ ID NO: 346567 - DNA, 20 bp, Artificial Sequence
  Description of Artificial Sequence: Synthetic oligonucleotide
  Target: LAMA2; (+) strand; PAM type: YTN; PAM sequence: TTT
tacttactaaagtacttaag

SEQ ID NO: 346568 - DNA, 20 bp, Artificial Sequence
  Description of Artificial Sequence: Synthetic oligonucleotide
  Target: LAMA2; (+) strand; PAM type: YTN; PAM sequence: TTT
acttactaaagtacttaagt

SEQ ID NO: 346569 - DNA, 20 bp, Artificial Sequence
  Description of Artificial Sequence: Synthetic oligonucleotide
  Target: LAMA2; (+) strand; PAM type: YTN; PAM sequence: TTA
cttactaaagtacttaagta

SEQ ID NO: 346570 - DNA, 20 bp, Artificial Sequence
  Description of Artificial Sequence: Synthetic oligonucleotide
  Target: LAMA2; (+) strand; PAM type: YTN; PAM sequence: CTT
actaaagtacttaagtacta

SEQ ID NO: 346571 - DNA, 20 bp, Artificial Sequence
  Description of Artificial Sequence: Synthetic oligonucleotide
  Target: LAMA2; (+) strand; PAM type: YTN; PAM sequence: TTA
ctaaagtacttaagtactaa

SEQ ID NO: 346572 - DNA, 20 bp, Artificial Sequence
  Description of Artificial Sequence: Synthetic oligonucleotide
  Target: LAMA2; (+) strand; PAM type: YTN; PAM sequence: CTA
aagtacttaagtactaaacc

SEQ ID NO: 346573 - DNA, 20 bp, Artificial Sequence
  Description of Artificial Sequence: Synthetic oligonucleotide
  Target: LAMA2; (+) strand; PAM type: YTN; PAM sequence: CTT
aagtactaaacctatcataa

SEQ ID NO: 346574 - DNA, 20 bp, Artificial Sequence
  Description of Artificial Sequence: Synthetic oligonucleotide
  Target: LAMA2; (+) strand; PAM type: YTN; PAM sequence: TTA
agtactaaacctatcataac

SEQ ID NO: 346575 - DNA, 20 bp, Artificial Sequence
  Description of Artificial Sequence: Synthetic oligonucleotide
  Target: LAMA2; (+) strand; PAM type: YTN; PAM sequence: CTA
aacctatcataaccaatttc

SEQ ID NO: 346576 - DNA, 20 bp, Artificial Sequence
  Description of Artificial Sequence: Synthetic oligonucleotide
  Target: LAMA2; (+) strand; PAM type: YTN; PAM sequence: CTA
tcataaccaatttcatttat

SEQ ID NO: 346577 - DNA, 20 bp, Artificial Sequence
  Description of Artificial Sequence: Synthetic oligonucleotide
  Target: LAMA2; (+) strand; PAM type: YTN; PAM sequence: TTT
catttattaagatgttagta

SEQ ID NO: 346578 - DNA, 20 bp, Artificial Sequence
  Description of Artificial Sequence: Synthetic oligonucleotide
  Target: LAMA2; (+) strand; PAM type: YTN; PAM sequence: TTC
atttattaagatgttagtaa

SEQ ID NO: 346579 - DNA, 20 bp, Artificial Sequence
  Description of Artificial Sequence: Synthetic oligonucleotide
  Target: LAMA2; (+) strand; PAM type: YTN; PAM sequence: TTT
attaagatgttagtaagact

SEQ ID NO: 346580 - DNA, 20 bp, Artificial Sequence
  Description of Artificial Sequence: Synthetic oligonucleotide
  Target: LAMA2; (+) strand; PAM type: YTN; PAM sequence: TTA
ttaagatgttagtaagactt

SEQ ID NO: 346581 - DNA, 20 bp, Artificial Sequence
  Description of Artificial Sequence: Synthetic oligonucleotide
  Target: LAMA2; (+) strand; PAM type: YTN; PAM sequence: TTA
agatgttagtaagactttag

SEQ ID NO: 346582 - DNA, 20 bp, Artificial Sequence
  Description of Artificial Sequence: Synthetic oligonucleotide
  Target: LAMA2; (+) strand; PAM type: YTN; PAM sequence: TTA
gtaagactttaggagttgtt

SEQ ID NO: 346583 - DNA, 20 bp, Artificial Sequence
  Description of Artificial Sequence: Synthetic oligonucleotide
  Target: LAMA2; (+) strand; PAM type: YTN; PAM sequence: CTT
taggagttgttggttctttt

SEQ ID NO: 346584 - DNA, 20 bp, Artificial Sequence
  Description of Artificial Sequence: Synthetic oligonucleotide
  Target: LAMA2; (+) strand; PAM type: YTN; PAM sequence: TTT
aggagttgttggttcttttc

SEQ ID NO: 346585 - DNA, 20 bp, Artificial Sequence
  Description of Artificial Sequence: Synthetic oligonucleotide
  Target: LAMA2; (+) strand; PAM type: YTN; PAM sequence: TTA
ggagttgttggttcttttcc

SEQ ID NO: 346586 - DNA, 20 bp, Artificial Sequence
  Description of Artificial Sequence: Synthetic oligonucleotide
  Target: LAMA2; (+) strand; PAM type: YTN; PAM sequence: TTG
ttggttcttttccggagaat

SEQ ID NO: 346587 - DNA, 20 bp, Artificial Sequence
  Description of Artificial Sequence: Synthetic oligonucleotide
  Target: LAMA2; (+) strand; PAM type: YTN; PAM sequence: TTG
gttcttttccggagaataat

SEQ ID NO: 346588 - DNA, 20 bp, Artificial Sequence
  Description of Artificial Sequence: Synthetic oligonucleotide
  Target: LAMA2; (+) strand; PAM type: YTN; PAM sequence: TTC
ttttccggagaataatgctt

SEQ ID NO: 346589 - DNA, 20 bp, Artificial Sequence
  Description of Artificial Sequence: Synthetic oligonucleotide
  Target: LAMA2; (+) strand; PAM type: YTN; PAM sequence: CTT
ttccggagaataatgcttta

SEQ ID NO: 346590 - DNA, 20 bp, Artificial Sequence
  Description of Artificial Sequence: Synthetic oligonucleotide
  Target: LAMA2; (+) strand; PAM type: YTN; PAM sequence: TTT
tccggagaataatgctttag

SEQ ID NO: 346591 - DNA, 20 bp, Artificial Sequence
  Description of Artificial Sequence: Synthetic oligonucleotide
  Target: LAMA2; (+) strand; PAM type: YTN; PAM sequence: TTT
ccggagaataatgctttagc

SEQ ID NO: 346592 - DNA, 20 bp, Artificial Sequence
  Description of Artificial Sequence: Synthetic oligonucleotide
  Target: LAMA2; (+) strand; PAM type: YTN; PAM sequence: TTC
cggagaataatgctttagcc

SEQ ID NO: 346593 - DNA, 20 bp, Artificial Sequence
  Description of Artificial Sequence: Synthetic oligonucleotide
  Target: LAMA2; (+) strand; PAM type: YTN; PAM sequence: CTT
tagcccagcagtccccaacc

SEQ ID NO: 346594 - DNA, 20 bp, Artificial Sequence
  Description of Artificial Sequence: Synthetic oligonucleotide
  Target: LAMA2; (+) strand; PAM type: YTN; PAM sequence: TTT
agcccagcagtccccaacct

SEQ ID NO: 346595 - DNA, 20 bp, Artificial Sequence
  Description of Artificial Sequence: Synthetic oligonucleotide
  Target: LAMA2; (+) strand; PAM type: YTN; PAM sequence: TTA
gcccagcagtccccaacctt

SEQ ID NO: 346596 - DNA, 20 bp, Artificial Sequence
  Description of Artificial Sequence: Synthetic oligonucleotide
  Target: LAMA2; (+) strand; PAM type: YTN; PAM sequence: CTT
tttggtaccagggattggtt

SEQ ID NO: 346597 - DNA, 20 bp, Artificial Sequence
  Description of Artificial Sequence: Synthetic oligonucleotide
  Target: LAMA2; (+) strand; PAM type: YTN; PAM sequence: TTT
ttggtaccagggattggttt

SEQ ID NO: 346598 - DNA, 20 bp, Artificial Sequence
  Description of Artificial Sequence: Synthetic oligonucleotide
  Target: LAMA2; (+) strand; PAM type: YTN; PAM sequence: TTT
tggtaccagggattggtttt

SEQ ID NO: 346599 - DNA, 20 bp, Artificial Sequence
  Description of Artificial Sequence: Synthetic oligonucleotide
  Target: LAMA2; (+) strand; PAM type: YTN; PAM sequence: TTT
ggtaccagggattggttttg

SEQ ID NO: 346600 - DNA, 20 bp, Artificial Sequence
  Description of Artificial Sequence: Synthetic oligonucleotide
  Target: LAMA2; (+) strand; PAM type: YTN; PAM sequence: TTG
gtaccagggattggttttgt

SEQ ID NO: 346601 - DNA, 20 bp, Artificial Sequence
  Description of Artificial Sequence: Synthetic oligonucleotide
  Target: LAMA2; (+) strand; PAM type: YTN; PAM sequence: TTG
gttttgtggaagacagtttt

SEQ ID NO: 346602 - DNA, 20 bp, Artificial Sequence
  Description of Artificial Sequence: Synthetic oligonucleotide
  Target: LAMA2; (+) strand; PAM type: YTN; PAM sequence: TTT
tgtggaagacagtttttcca

SEQ ID NO: 346603 - DNA, 20 bp, Artificial Sequence
  Description of Artificial Sequence: Synthetic oligonucleotide
  Target: LAMA2; (+) strand; PAM type: YTN; PAM sequence: TTT
gtggaagacagtttttccat

SEQ ID NO: 346604 - DNA, 20 bp, Artificial Sequence
  Description of Artificial Sequence: Synthetic oligonucleotide
  Target: LAMA2; (+) strand; PAM type: YTN; PAM sequence: TTG
tggaagacagtttttccatg

SEQ ID NO: 346605 - DNA, 20 bp, Artificial Sequence
  Description of Artificial Sequence: Synthetic oligonucleotide
  Target: LAMA2; (+) strand; PAM type: YTN; PAM sequence: TTT
ttccatggaattgacagggg

SEQ ID NO: 346606 - DNA, 20 bp, Artificial Sequence
  Description of Artificial Sequence: Synthetic oligonucleotide
  Target: LAMA2; (+) strand; PAM type: YTN; PAM sequence: TTT
tccatggaattgacaggggg

SEQ ID NO: 346607 - DNA, 20 bp, Artificial Sequence
  Description of Artificial Sequence: Synthetic oligonucleotide
  Target: LAMA2; (+) strand; PAM type: YTN; PAM sequence: TTT
ccatggaattgacagggggg

SEQ ID NO: 346608 - DNA, 20 bp, Artificial Sequence
  Description of Artificial Sequence: Synthetic oligonucleotide
  Target: LAMA2; (+) strand; PAM type: YTN; PAM sequence: TTC
catggaattgacagggggga

SEQ ID NO: 346609 - DNA, 20 bp, Artificial Sequence
  Description of Artificial Sequence: Synthetic oligonucleotide
  Target: LAMA2; (+) strand; PAM type: YTN; PAM sequence: TTG
acaggggggatggggagtgg

SEQ ID NO: 346610 - DNA, 20 bp, Artificial Sequence
  Description of Artificial Sequence: Synthetic oligonucleotide
  Target: LAMA2; (+) strand; PAM type: YTN; PAM sequence: TTT
ccagatgaaactgttttacc

SEQ ID NO: 346611 - DNA, 20 bp, Artificial Sequence
  Description of Artificial Sequence: Synthetic oligonucleotide
  Target: LAMA2; (+) strand; PAM type: YTN; PAM sequence: TTC
cagatgaaactgttttacct

SEQ ID NO: 346612 - DNA, 20 bp, Artificial Sequence
  Description of Artificial Sequence: Synthetic oligonucleotide
  Target: LAMA2; (+) strand; PAM type: YTN; PAM sequence: CTG
ttttacctcatatcatcaag

SEQ ID NO: 346613 - DNA, 20 bp, Artificial Sequence
  Description of Artificial Sequence: Synthetic oligonucleotide
  Target: LAMA2; (+) strand; PAM type: YTN; PAM sequence: TTT
tacctcatatcatcaagcat

SEQ ID NO: 346614 - DNA, 20 bp, Artificial Sequence
  Description of Artificial Sequence: Synthetic oligonucleotide
  Target: LAMA2; (+) strand; PAM type: YTN; PAM sequence: TTT
acctcatatcatcaagcatt

SEQ ID NO: 346615 - DNA, 20 bp, Artificial Sequence
  Description of Artificial Sequence: Synthetic oligonucleotide
  Target: LAMA2; (+) strand; PAM type: YTN; PAM sequence: TTA
cctcatatcatcaagcatta

SEQ ID NO: 346616 - DNA, 20 bp, Artificial Sequence
  Description of Artificial Sequence: Synthetic oligonucleotide
  Target: LAMA2; (+) strand; PAM type: YTN; PAM sequence: CTC
atatcatcaagcattagtta

SEQ ID NO: 346617 - DNA, 20 bp, Artificial Sequence
  Description of Artificial Sequence: Synthetic oligonucleotide
  Target: LAMA2; (+) strand; PAM type: YTN; PAM sequence: TTA
gttagagtctcataaggagc

SEQ ID NO: 346618 - DNA, 20 bp, Artificial Sequence
  Description of Artificial Sequence: Synthetic oligonucleotide
  Target: LAMA2; (+) strand; PAM type: YTN; PAM sequence: TTA
gagtctcataaggagcctgc

SEQ ID NO: 346619 - DNA, 20 bp, Artificial Sequence
  Description of Artificial Sequence: Synthetic oligonucleotide
  Target: LAMA2; (+) strand; PAM type: YTN; PAM sequence: CTC
ataaggagcctgcaagctag

SEQ ID NO: 346620 - DNA, 20 bp, Artificial Sequence
  Description of Artificial Sequence: Synthetic oligonucleotide
  Target: LAMA2; (+) strand; PAM type: YTN; PAM sequence: CTG
caagctaggtccctcacatg

SEQ ID NO: 346621 - DNA, 20 bp, Artificial Sequence
  Description of Artificial Sequence: Synthetic oligonucleotide
  Target: LAMA2; (+) strand; PAM type: YTN; PAM sequence: CTA
ggtccctcacatgcacagtt

SEQ ID NO: 346622 - DNA, 20 bp, Artificial Sequence
  Description of Artificial Sequence: Synthetic oligonucleotide
  Target: LAMA2; (+) strand; PAM type: YTN; PAM sequence: CTC
acatgcacagtttacaatag

SEQ ID NO: 346623 - DNA, 20 bp, Artificial Sequence
  Description of Artificial Sequence: Synthetic oligonucleotide
  Target: LAMA2; (+) strand; PAM type: YTN; PAM sequence: TTT
acaatagggcttgtgctcct

SEQ ID NO: 346624 - DNA, 20 bp, Artificial Sequence
  Description of Artificial Sequence: Synthetic oligonucleotide
  Target: LAMA2; (+) strand; PAM type: YTN; PAM sequence: TTA
caatagggcttgtgctcctt

SEQ ID NO: 346625 - DNA, 20 bp, Artificial Sequence
  Description of Artificial Sequence: Synthetic oligonucleotide
  Target: LAMA2; (+) strand; PAM type: YTN; PAM sequence: CTT
gtgctcctttgagaacctaa

SEQ ID NO: 346626 - DNA, 20 bp, Artificial Sequence
  Description of Artificial Sequence: Synthetic oligonucleotide
  Target: LAMA2; (+) strand; PAM type: YTN; PAM sequence: TTG
tgctcctttgagaacctaat

SEQ ID NO: 346627 - DNA, 20 bp, Artificial Sequence
  Description of Artificial Sequence: Synthetic oligonucleotide
  Target: LAMA2; (+) strand; PAM type: YTN; PAM sequence: CTC
ctttgagaacctaatgccac

SEQ ID NO: 346628 - DNA, 20 bp, Artificial Sequence
  Description of Artificial Sequence: Synthetic oligonucleotide
  Target: LAMA2; (+) strand; PAM type: YTN; PAM sequence: CTT
tgagaacctaatgccacagc

SEQ ID NO: 346629 - DNA, 20 bp, Artificial Sequence
  Description of Artificial Sequence: Synthetic oligonucleotide
  Target: LAMA2; (+) strand; PAM type: YTN; PAM sequence: TTT
gagaacctaatgccacagct

SEQ ID NO: 346630 - DNA, 20 bp, Artificial Sequence
  Description of Artificial Sequence: Synthetic oligonucleotide
  Target: LAMA2; (+) strand; PAM type: YTN; PAM sequence: TTG
agaacctaatgccacagctg

SEQ ID NO: 346631 - DNA, 20 bp, Artificial Sequence
  Description of Artificial Sequence: Synthetic oligonucleotide
  Target: LAMA2; (+) strand; PAM type: YTN; PAM sequence: CTA
atgccacagctgctgatctg

SEQ ID NO: 346632 - DNA, 20 bp, Artificial Sequence
  Description of Artificial Sequence: Synthetic oligonucleotide
  Target: LAMA2; (+) strand; PAM type: YTN; PAM sequence: CTG
ctgatctgacaggaggtgga

SEQ ID NO: 346633 - DNA, 20 bp, Artificial Sequence
  Description of Artificial Sequence: Synthetic oligonucleotide
  Target: LAMA2; (+) strand; PAM type: YTN; PAM sequence: CTG
atctgacaggaggtggagct

SEQ ID NO: 346634 - DNA, 20 bp, Artificial Sequence
  Description of Artificial Sequence: Synthetic oligonucleotide
  Target: LAMA2; (+) strand; PAM type: YTN; PAM sequence: CTG
acaggaggtggagctcagac

SEQ ID NO: 346635 - DNA, 20 bp, Artificial Sequence
  Description of Artificial Sequence: Synthetic oligonucleotide
  Target: LAMA2; (+) strand; PAM type: YTN; PAM sequence: CTC
agacacctccttctgtgcag

SEQ ID NO: 346636 - DNA, 20 bp, Artificial Sequence
  Description of Artificial Sequence: Synthetic oligonucleotide
  Target: LAMA2; (+) strand; PAM type: YTN; PAM sequence: CTC
cttctgtgcagcctggttcc

SEQ ID NO: 346637 - DNA, 20 bp, Artificial Sequence
  Description of Artificial Sequence: Synthetic oligonucleotide
  Target: LAMA2; (+) strand; PAM type: YTN; PAM sequence: CTT
ctgtgcagcctggttcctaa

SEQ ID NO: 346638 - DNA, 20 bp, Artificial Sequence
  Description of Artificial Sequence: Synthetic oligonucleotide
  Target: LAMA2; (+) strand; PAM type: YTN; PAM sequence: TTC
tgtgcagcctggttcctaac

SEQ ID NO: 346639 - DNA, 20 bp, Artificial Sequence
  Description of Artificial Sequence: Synthetic oligonucleotide
  Target: LAMA2; (+) strand; PAM type: YTN; PAM sequence: CTG
tgcagcctggttcctaacag

SEQ ID NO: 346640 - DNA, 20 bp, Artificial Sequence
  Description of Artificial Sequence: Synthetic oligonucleotide
  Target: LAMA2; (+) strand; PAM type: YTN; PAM sequence: CTG
gttcctaacaggccacagat

SEQ ID NO: 346641 - DNA, 20 bp, Artificial Sequence
  Description of Artificial Sequence: Synthetic oligonucleotide
  Target: LAMA2; (+) strand; PAM type: YTN; PAM sequence: TTC
ctaacaggccacagatagta

SEQ ID NO: 346642 - DNA, 20 bp, Artificial Sequence
  Description of Artificial Sequence: Synthetic oligonucleotide
  Target: LAMA2; (+) strand; PAM type: YTN; PAM sequence: CTA
acaggccacagatagtactg

SEQ ID NO: 346643 - DNA, 20 bp, Artificial Sequence
  Description of Artificial Sequence: Synthetic oligonucleotide
  Target: LAMA2; (+) strand; PAM type: YTN; PAM sequence: CTG
gtccatggcccagcagttgg

SEQ ID NO: 346644 - DNA, 20 bp, Artificial Sequence
  Description of Artificial Sequence: Synthetic oligonucleotide
  Target: LAMA2; (+) strand; PAM type: YTN; PAM sequence: TTG
gggacccctgctttagccct

SEQ ID NO: 346645 - DNA, 20 bp, Artificial Sequence
  Description of Artificial Sequence: Synthetic oligonucleotide
  Target: LAMA2; (+) strand; PAM type: YTN; PAM sequence: CTG
ctttagccctcaactcttag

SEQ ID NO: 346646 - DNA, 20 bp, Artificial Sequence
  Description of Artificial Sequence: Synthetic oligonucleotide
  Target: LAMA2; (+) strand; PAM type: YTN; PAM sequence: CTT
tagccctcaactcttaggca

SEQ ID NO: 346647 - DNA, 20 bp, Artificial Sequence
  Description of Artificial Sequence: Synthetic oligonucleotide
  Target: LAMA2; (+) strand; PAM type: YTN; PAM sequence: TTT
agccctcaactcttaggcat

SEQ ID NO: 346648 - DNA, 20 bp, Artificial Sequence
  Description of Artificial Sequence: Synthetic oligonucleotide
  Target: LAMA2; (+) strand; PAM type: YTN; PAM sequence: TTA
gccctcaactcttaggcatg

SEQ ID NO: 346649 - DNA, 20 bp, Artificial Sequence
  Description of Artificial Sequence: Synthetic oligonucleotide
  Target: LAMA2; (+) strand; PAM type: YTN; PAM sequence: CTC
aactcttaggcatgtttcag

SEQ ID NO: 346650 - DNA, 20 bp, Artificial Sequence
  Description of Artificial Sequence: Synthetic oligonucleotide
  Target: LAMA2; (+) strand; PAM type: YTN; PAM sequence: CTC
ttaggcatgtttcagttctg

SEQ ID NO: 346651 - DNA, 20 bp, Artificial Sequence
  Description of Artificial Sequence: Synthetic oligonucleotide
  Target: LAMA2; (+) strand; PAM type: YTN; PAM sequence: CTT
aggcatgtttcagttctgat

SEQ ID NO: 346652 - DNA, 20 bp, Artificial Sequence
  Description of Artificial Sequence: Synthetic oligonucleotide
  Target: LAMA2; (+) strand; PAM type: YTN; PAM sequence: TTA
ggcatgtttcagttctgatt

SEQ ID NO: 346653 - DNA, 20 bp, Artificial Sequence
  Description of Artificial Sequence: Synthetic oligonucleotide
  Target: LAMA2; (+) strand; PAM type: YTN; PAM sequence: TTT
cagttctgattttggtcagc

SEQ ID NO: 346654 - DNA, 20 bp, Artificial Sequence
  Description of Artificial Sequence: Synthetic oligonucleotide
  Target: LAMA2; (+) strand; PAM type: YTN; PAM sequence: TTC
agttctgattttggtcagca

SEQ ID NO: 346655 - DNA, 20 bp, Artificial Sequence
  Description of Artificial Sequence: Synthetic oligonucleotide
  Target: LAMA2; (+) strand; PAM type: YTN; PAM sequence: TTC
tgattttggtcagcatagag

SEQ ID NO: 346656 - DNA, 20 bp, Artificial Sequence
  Description of Artificial Sequence: Synthetic oligonucleotide
  Target: LAMA2; (+) strand; PAM type: YTN; PAM sequence: CTG
attttggtcagcatagagct

SEQ ID NO: 346657 - DNA, 20 bp, Artificial Sequence
  Description of Artificial Sequence: Synthetic oligonucleotide
  Target: LAMA2; (+) strand; PAM type: YTN; PAM sequence: TTT
tggtcagcatagagctttcc

SEQ ID NO: 346658 - DNA, 20 bp, Artificial Sequence
  Description of Artificial Sequence: Synthetic oligonucleotide
  Target: LAMA2; (+) strand; PAM type: YTN; PAM sequence: TTT
ggtcagcatagagctttcct

SEQ ID NO: 346659 - DNA, 20 bp, Artificial Sequence
  Description of Artificial Sequence: Synthetic oligonucleotide
  Target: LAMA2; (+) strand; PAM type: YTN; PAM sequence: TTG
gtcagcatagagctttcctt

SEQ ID NO: 346660 - DNA, 20 bp, Artificial Sequence
  Description of Artificial Sequence: Synthetic oligonucleotide
  Target: LAMA2; (+) strand; PAM type: YTN; PAM sequence: CTT
tccttctatttaccaggagg

SEQ ID NO: 346661 - DNA, 20 bp, Artificial Sequence
  Description of Artificial Sequence: Synthetic oligonucleotide
  Target: LAMA2; (+) strand; PAM type: YTN; PAM sequence: TTT
ccttctatttaccaggaggg

SEQ ID NO: 346662 - DNA, 20 bp, Artificial Sequence
  Description of Artificial Sequence: Synthetic oligonucleotide
  Target: LAMA2; (+) strand; PAM type: YTN; PAM sequence: TTC
cttctatttaccaggagggt

SEQ ID NO: 346663 - DNA, 20 bp, Artificial Sequence
  Description of Artificial Sequence: Synthetic oligonucleotide
  Target: LAMA2; (+) strand; PAM type: YTN; PAM sequence: CTT
ctatttaccaggagggtctc

SEQ ID NO: 346664 - DNA, 20 bp, Artificial Sequence
  Description of Artificial Sequence: Synthetic oligonucleotide
  Target: LAMA2; (+) strand; PAM type: YTN; PAM sequence: TTC
tatttaccaggagggtctct

SEQ ID NO: 346665 - DNA, 20 bp, Artificial Sequence
  Description of Artificial Sequence: Synthetic oligonucleotide
  Target: LAMA2; (+) strand; PAM type: YTN; PAM sequence: CTA
tttaccaggagggtctctac

SEQ ID NO: 346666 - DNA, 20 bp, Artificial Sequence
  Description of Artificial Sequence: Synthetic oligonucleotide
  Target: LAMA2; (+) strand; PAM type: YTN; PAM sequence: TTT
accaggagggtctctactga

SEQ ID NO: 346667 - DNA, 20 bp, Artificial Sequence
  Description of Artificial Sequence: Synthetic oligonucleotide
  Target: LAMA2; (+) strand; PAM type: YTN; PAM sequence: TTA
ccaggagggtctctactgat

SEQ ID NO: 346668 - DNA, 20 bp, Artificial Sequence
  Description of Artificial Sequence: Synthetic oligonucleotide
  Target: LAMA2; (+) strand; PAM type: YTN; PAM sequence: CTC
tactgatatggatcaatggc

SEQ ID NO: 346669 - DNA, 20 bp, Artificial Sequence
  Description of Artificial Sequence: Synthetic oligonucleotide
  Target: LAMA2; (+) strand; PAM type: YTN; PAM sequence: CTA
ctgatatggatcaatggcag

SEQ ID NO: 346670 - DNA, 20 bp, Artificial Sequence
  Description of Artificial Sequence: Synthetic oligonucleotide
  Target: LAMA2; (+) strand; PAM type: YTN; PAM sequence: CTG
atatggatcaatggcaggag

SEQ ID NO: 346671 - DNA, 20 bp, Artificial Sequence
  Description of Artificial Sequence: Synthetic oligonucleotide
  Target: LAMA2; (+) strand; PAM type: YTN; PAM sequence: TTG
ggtctggaactatcctttgg

SEQ ID NO: 346672 - DNA, 20 bp, Artificial Sequence
  Description of Artificial Sequence: Synthetic oligonucleotide
  Target: LAMA2; (+) strand; PAM type: YTN; PAM sequence: CTG
gaactatcctttggcttagt

SEQ ID NO: 346673 - DNA, 20 bp, Artificial Sequence
  Description of Artificial Sequence: Synthetic oligonucleotide
  Target: LAMA2; (+) strand; PAM type: YTN; PAM sequence: CTA
tcctttggcttagtgacatt

SEQ ID NO: 346674 - DNA, 20 bp, Artificial Sequence
  Description of Artificial Sequence: Synthetic oligonucleotide
  Target: LAMA2; (+) strand; PAM type: YTN; PAM sequence: CTT
tggcttagtgacatttgtac

SEQ ID NO: 346675 - DNA, 20 bp, Artificial Sequence
  Description of Artificial Sequence: Synthetic oligonucleotide
  Target: LAMA2; (+) strand; PAM type: YTN; PAM sequence: TTT
ggcttagtgacatttgtact

SEQ ID NO: 346676 - DNA, 20 bp, Artificial Sequence
  Description of Artificial Sequence: Synthetic oligonucleotide
  Target: LAMA2; (+) strand; PAM type: YTN; PAM sequence: TTG
gcttagtgacatttgtactc

SEQ ID NO: 346677 - DNA, 20 bp, Artificial Sequence
  Description of Artificial Sequence: Synthetic oligonucleotide
  Target: LAMA2; (+) strand; PAM type: YTN; PAM sequence: CTT
agtgacatttgtactctaat

SEQ ID NO: 346678 - DNA, 20 bp, Artificial Sequence
  Description of Artificial Sequence: Synthetic oligonucleotide
  Target: LAMA2; (+) strand; PAM type: YTN; PAM sequence: TTA
gtgacatttgtactctaatc

SEQ ID NO: 346679 - DNA, 20 bp, Artificial Sequence
  Description of Artificial Sequence: Synthetic oligonucleotide
  Target: LAMA2; (+) strand; PAM type: YTN; PAM sequence: TTT
gtactctaatctgcctcact

SEQ ID NO: 346680 - DNA, 20 bp, Artificial Sequence
  Description of Artificial Sequence: Synthetic oligonucleotide
  Target: LAMA2; (+) strand; PAM type: YTN; PAM sequence: TTG
tactctaatctgcctcactc

SEQ ID NO: 346681 - DNA, 20 bp, Artificial Sequence
  Description of Artificial Sequence: Synthetic oligonucleotide
  Target: LAMA2; (+) strand; PAM type: YTN; PAM sequence: CTC
taatctgcctcactcctgcc

SEQ ID NO: 346682 - DNA, 20 bp, Artificial Sequence
  Description of Artificial Sequence: Synthetic oligonucleotide
  Target: LAMA2; (+) strand; PAM type: YTN; PAM sequence: CTA
atctgcctcactcctgcccc

SEQ ID NO: 346683 - DNA, 20 bp, Artificial Sequence
  Description of Artificial Sequence: Synthetic oligonucleotide
  Target: LAMA2; (+) strand; PAM type: YTN; PAM sequence: CTG
cctcactcctgccccttctc

SEQ ID NO: 346684 - DNA, 20 bp, Artificial Sequence
  Description of Artificial Sequence: Synthetic oligonucleotide
  Target: LAMA2; (+) strand; PAM type: YTN; PAM sequence: CTC
actcctgccccttctcaggg

SEQ ID NO: 346685 - DNA, 20 bp, Artificial Sequence
  Description of Artificial Sequence: Synthetic oligonucleotide
  Target: LAMA2; (+) strand; PAM type: YTN; PAM sequence: CTC
ctgccccttctcaggggacc

SEQ ID NO: 346686 - DNA, 20 bp, Artificial Sequence
  Description of Artificial Sequence: Synthetic oligonucleotide
  Target: LAMA2; (+) strand; PAM type: YTN; PAM sequence: CTG
ccccttctcaggggacctgg

SEQ ID NO: 346687 - DNA, 20 bp, Artificial Sequence
  Description of Artificial Sequence: Synthetic oligonucleotide
  Target: LAMA2; (+) strand; PAM type: YTN; PAM sequence: CTT
ctcaggggacctgggcaccg

SEQ ID NO: 346688 - DNA, 20 bp, Artificial Sequence
  Description of Artificial Sequence: Synthetic oligonucleotide
  Target: LAMA2; (+) strand; PAM type: YTN; PAM sequence: TTC
tcaggggacctgggcaccgt

SEQ ID NO: 346689 - DNA, 20 bp, Artificial Sequence
  Description of Artificial Sequence: Synthetic oligonucleotide
  Target: LAMA2; (+) strand; PAM type: YTN; PAM sequence: CTC
aggggacctgggcaccgtcg

SEQ ID NO: 346690 - DNA, 20 bp, Artificial Sequence
  Description of Artificial Sequence: Synthetic oligonucleotide
  Target: LAMA2; (+) strand; PAM type: YTN; PAM sequence: CTG
ggcaccgtcggatcccatga

SEQ ID NO: 346691 - DNA, 20 bp, Artificial Sequence
  Description of Artificial Sequence: Synthetic oligonucleotide
  Target: LAMA2; (+) strand; PAM type: YTN; PAM sequence: CTA
catggtgacctagggcacgg

SEQ ID NO: 346692 - DNA, 20 bp, Artificial Sequence
  Description of Artificial Sequence: Synthetic oligonucleotide
  Target: LAMA2; (+) strand; PAM type: YTN; PAM sequence: CTA
gggcacggtaaaaagtctac

SEQ ID NO: 346693 - DNA, 20 bp, Artificial Sequence
  Description of Artificial Sequence: Synthetic oligonucleotide
  Target: LAMA2; (+) strand; PAM type: YTN; PAM sequence: CTA
ccccaggaagcctagaatgg

SEQ ID NO: 346694 - DNA, 20 bp, Artificial Sequence
  Description of Artificial Sequence: Synthetic oligonucleotide
  Target: LAMA2; (+) strand; PAM type: YTN; PAM sequence: CTA
gaatggatagaatacaaatt

SEQ ID NO: 346695 - DNA, 20 bp, Artificial Sequence
  Description of Artificial Sequence: Synthetic oligonucleotide
  Target: LAMA2; (+) strand; PAM type: YTN; PAM sequence: TTC
atccaacacaaattcatgaa

SEQ ID NO: 346696 - DNA, 20 bp, Artificial Sequence
  Description of Artificial Sequence: Synthetic oligonucleotide
  Target: LAMA2; (+) strand; PAM type: YTN; PAM sequence: TTC
atgaagaaaagccaagatct

SEQ ID NO: 346697 - DNA, 20 bp, Artificial Sequence
  Description of Artificial Sequence: Synthetic oligonucleotide
  Target: LAMA2; (+) strand; PAM type: YTN; PAM sequence: CTG
cagaaaatcaaacagtaaag

SEQ ID NO: 346698 - DNA, 20 bp, Artificial Sequence
  Description of Artificial Sequence: Synthetic oligonucleotide
  Target: LAMA2; (+) strand; PAM type: YTN; PAM sequence: CTA
ttccagaagagcaacaggag

SEQ ID NO: 346699 - DNA, 20 bp, Artificial Sequence
  Description of Artificial Sequence: Synthetic oligonucleotide
  Target: LAMA2; (+) strand; PAM type: YTN; PAM sequence: TTC
cagaagagcaacaggaggac

SEQ ID NO: 346700 - DNA, 20 bp, Artificial Sequence
  Description of Artificial Sequence: Synthetic oligonucleotide
  Target: LAMA2; (+) strand; PAM type: YTN; PAM sequence: TTA
aaatactgggtctgtcatag

SEQ ID NO: 346701 - DNA, 20 bp, Artificial Sequence
  Description of Artificial Sequence: Synthetic oligonucleotide
  Target: LAMA2; (+) strand; PAM type: YTN; PAM sequence: CTG
ggtctgtcatagacaggatt

SEQ ID NO: 346702 - DNA, 20 bp, Artificial Sequence
  Description of Artificial Sequence: Synthetic oligonucleotide
  Target: LAMA2; (+) strand; PAM type: YTN; PAM sequence: CTG
tcatagacaggattggaatg

SEQ ID NO: 346703 - DNA, 20 bp, Artificial Sequence
  Description of Artificial Sequence: Synthetic oligonucleotide
  Target: LAMA2; (+) strand; PAM type: YTN; PAM sequence: TTG
gaatggaatcccaaatcaga

SEQ ID NO: 346704 - DNA, 20 bp, Artificial Sequence
  Description of Artificial Sequence: Synthetic oligonucleotide
  Target: LAMA2; (+) strand; PAM type: YTN; PAM sequence: CTC
tcactagtggtgagctttcg

SEQ ID NO: 346705 - DNA, 20 bp, Artificial Sequence
  Description of Artificial Sequence: Synthetic oligonucleotide
  Target: LAMA2; (+) strand; PAM type: YTN; PAM sequence: CTC
actagtggtgagctttcggt

SEQ ID NO: 346706 - DNA, 20 bp, Artificial Sequence
  Description of Artificial Sequence: Synthetic oligonucleotide
  Target: LAMA2; (+) strand; PAM type: YTN; PAM sequence: CTA
gtggtgagctttcggtcact

SEQ ID NO: 346707 - DNA, 20 bp, Artificial Sequence
  Description of Artificial Sequence: Synthetic oligonucleotide
  Target: LAMA2; (+) strand; PAM type: YTN; PAM sequence: CTT
tcggtcactacaagtcttca

SEQ ID NO: 346708 - DNA, 20 bp, Artificial Sequence
  Description of Artificial Sequence: Synthetic oligonucleotide
  Target: LAMA2; (+) strand; PAM type: YTN; PAM sequence: TTT
cggtcactacaagtcttcaa

SEQ ID NO: 346709 - DNA, 20 bp, Artificial Sequence
  Description of Artificial Sequence: Synthetic oligonucleotide
  Target: LAMA2; (+) strand; PAM type: YTN; PAM sequence: TTC
ggtcactacaagtcttcaaa

SEQ ID NO: 346710 - DNA, 20 bp, Artificial Sequence
  Description of Artificial Sequence: Synthetic oligonucleotide
  Target: LAMA2; (+) strand; PAM type: YTN; PAM sequence: CTA
caagtcttcaaaaggggcct

SEQ ID NO: 346711 - DNA, 20 bp, Artificial Sequence
  Description of Artificial Sequence: Synthetic oligonucleotide
  Target: LAMA2; (+) strand; PAM type: YTN; PAM sequence: CTT
caaaaggggcctagatgacc

SEQ ID NO: 346712 - DNA, 20 bp, Artificial Sequence
  Description of Artificial Sequence: Synthetic oligonucleotide
  Target: LAMA2; (+) strand; PAM type: YTN; PAM sequence: TTC
aaaaggggcctagatgacca

SEQ ID NO: 346713 - DNA, 20 bp, Artificial Sequence
  Description of Artificial Sequence: Synthetic oligonucleotide
  Target: LAMA2; (+) strand; PAM type: YTN; PAM sequence: CTA
gatgaccagttctttttcat

SEQ ID NO: 346714 - DNA, 20 bp, Artificial Sequence
  Description of Artificial Sequence: Synthetic oligonucleotide
  Target: LAMA2; (+) strand; PAM type: YTN; PAM sequence: TTC
tttttcatccaacaaatgct

SEQ ID NO: 346715 - DNA, 20 bp, Artificial Sequence
  Description of Artificial Sequence: Synthetic oligonucleotide
  Target: LAMA2; (+) strand; PAM type: YTN; PAM sequence: CTT
tttcatccaacaaatgctta

SEQ ID NO: 346716 - DNA, 20 bp, Artificial Sequence
  Description of Artificial Sequence: Synthetic oligonucleotide
  Target: LAMA2; (+) strand; PAM type: YTN; PAM sequence: TTT
ttcatccaacaaatgcttat

SEQ ID NO: 346717 - DNA, 20 bp, Artificial Sequence
  Description of Artificial Sequence: Synthetic oligonucleotide
  Target: LAMA2; (+) strand; PAM type: YTN; PAM sequence: TTT
tcatccaacaaatgcttatt

SEQ ID NO: 346718 - DNA, 20 bp, Artificial Sequence
  Description of Artificial Sequence: Synthetic oligonucleotide
  Target: LAMA2; (+) strand; PAM type: YTN; PAM sequence: TTT
catccaacaaatgcttattg

SEQ ID NO: 346719 - DNA, 20 bp, Artificial Sequence
  Description of Artificial Sequence: Synthetic oligonucleotide
  Target: LAMA2; (+) strand; PAM type: YTN; PAM sequence: TTC
atccaacaaatgcttattga

SEQ ID NO: 346720 - DNA, 20 bp, Artificial Sequence
  Description of Artificial Sequence: Synthetic oligonucleotide
  Target: LAMA2; (+) strand; PAM type: YTN; PAM sequence: CTT
attgaacccttcctctgtgg

SEQ ID NO: 346721 - DNA, 20 bp, Artificial Sequence
  Description of Artificial Sequence: Synthetic oligonucleotide
  Target: LAMA2; (+) strand; PAM type: YTN; PAM sequence: TTA
ttgaacccttcctctgtggg

SEQ ID NO: 346722 - DNA, 20 bp, Artificial Sequence
  Description of Artificial Sequence: Synthetic oligonucleotide
  Target: LAMA2; (+) strand; PAM type: YTN; PAM sequence: TTG
aacccttcctctgtgggtag

SEQ ID NO: 346723 - DNA, 20 bp, Artificial Sequence
  Description of Artificial Sequence: Synthetic oligonucleotide
  Target: LAMA2; (+) strand; PAM type: YTN; PAM sequence: CTT
cctctgtgggtagtgatggg

SEQ ID NO: 346724 - DNA, 20 bp, Artificial Sequence
  Description of Artificial Sequence: Synthetic oligonucleotide
  Target: LAMA2; (+) strand; PAM type: YTN; PAM sequence: TTC
ctctgtgggtagtgatgggc

SEQ ID NO: 346725 - DNA, 20 bp, Artificial Sequence
  Description of Artificial Sequence: Synthetic oligonucleotide
  Target: LAMA2; (+) strand; PAM type: YTN; PAM sequence: CTC
tgtgggtagtgatgggcaca

SEQ ID NO: 346726 - DNA, 20 bp, Artificial Sequence
  Description of Artificial Sequence: Synthetic oligonucleotide
  Target: LAMA2; (+) strand; PAM type: YTN; PAM sequence: CTG
tgggtagtgatgggcacatt

SEQ ID NO: 346727 - DNA, 20 bp, Artificial Sequence
  Description of Artificial Sequence: Synthetic oligonucleotide
  Target: LAMA2; (+) strand; PAM type: YTN; PAM sequence: TTC
agtgaattcagactggaatc

SEQ ID NO: 346728 - DNA, 20 bp, Artificial Sequence
  Description of Artificial Sequence: Synthetic oligonucleotide
  Target: LAMA2; (+) strand; PAM type: YTN; PAM sequence: TTC
agactggaatcgaacacatt

SEQ ID NO: 346729 - DNA, 20 bp, Artificial Sequence
  Description of Artificial Sequence: Synthetic oligonucleotide
  Target: LAMA2; (+) strand; PAM type: YTN; PAM sequence: CTG
gaatcgaacacattgtaacc

SEQ ID NO: 346730 - DNA, 20 bp, Artificial Sequence
  Description of Artificial Sequence: Synthetic oligonucleotide
  Target: LAMA2; (+) strand; PAM type: YTN; PAM sequence: TTG
taaccattaaatgagttaat

SEQ ID NO: 346731 - DNA, 20 bp, Artificial Sequence
  Description of Artificial Sequence: Synthetic oligonucleotide
  Target: LAMA2; (+) strand; PAM type: YTN; PAM sequence: TTA
aatgagttaatcttatatga

SEQ ID NO: 346732 - DNA, 20 bp, Artificial Sequence
  Description of Artificial Sequence: Synthetic oligonucleotide
  Target: LAMA2; (+) strand; PAM type: YTN; PAM sequence: TTA
atcttatatgagttcataca

SEQ ID NO: 346733 - DNA, 20 bp, Artificial Sequence
  Description of Artificial Sequence: Synthetic oligonucleotide
  Target: LAMA2; (+) strand; PAM type: YTN; PAM sequence: CTT
atatgagttcatacatacag

SEQ ID NO: 346734 - DNA, 20 bp, Artificial Sequence
  Description of Artificial Sequence: Synthetic oligonucleotide
  Target: LAMA2; (+) strand; PAM type: YTN; PAM sequence: TTA
tatgagttcatacatacaga

SEQ ID NO: 346735 - DNA, 20 bp, Artificial Sequence
  Description of Artificial Sequence: Synthetic oligonucleotide
  Target: LAMA2; (+) strand; PAM type: YTN; PAM sequence: TTC
atacatacagatcacatgca

SEQ ID NO: 346736 - DNA, 20 bp, Artificial Sequence
  Description of Artificial Sequence: Synthetic oligonucleotide
  Target: LAMA2; (+) strand; PAM type: YTN; PAM sequence: CTC
atatccagtaagtttgcaag

SEQ ID NO: 346737 - DNA, 20 bp, Artificial Sequence
  Description of Artificial Sequence: Synthetic oligonucleotide
  Target: LAMA2; (+) strand; PAM type: YTN; PAM sequence: TTT
gcaagaataactactattgt

SEQ ID NO: 346738 - DNA, 20 bp, Artificial Sequence
  Description of Artificial Sequence: Synthetic oligonucleotide
  Target: LAMA2; (+) strand; PAM type: YTN; PAM sequence: TTG
caagaataactactattgtt

SEQ ID NO: 346739 - DNA, 20 bp, Artificial Sequence
  Description of Artificial Sequence: Synthetic oligonucleotide
  Target: LAMA2; (+) strand; PAM type: YTN; PAM sequence: CTA
ctattgtttttgtgtacaag

SEQ ID NO: 346740 - DNA, 20 bp, Artificial Sequence
  Description of Artificial Sequence: Synthetic oligonucleotide
  Target: LAMA2; (+) strand; PAM type: YTN; PAM sequence: CTA
ttgtttttgtgtacaagatc

SEQ ID NO: 346741 - DNA, 20 bp, Artificial Sequence
  Description of Artificial Sequence: Synthetic oligonucleotide
  Target: LAMA2; (+) strand; PAM type: YTN; PAM sequence: TTG
tttttgtgtacaagatcttg

SEQ ID NO: 346742 - DNA, 20 bp, Artificial Sequence
  Description of Artificial Sequence: Synthetic oligonucleotide
  Target: LAMA2; (+) strand; PAM type: YTN; PAM sequence: TTT
ttgtgtacaagatcttgtgt

SEQ ID NO: 346743 - DNA, 20 bp, Artificial Sequence
  Description of Artificial Sequence: Synthetic oligonucleotide
  Target: LAMA2; (+) strand; PAM type: YTN; PAM sequence: TTT
tgtgtacaagatcttgtgta

SEQ ID NO: 346744 - DNA, 20 bp, Artificial Sequence
  Description of Artificial Sequence: Synthetic oligonucleotide
  Target: LAMA2; (+) strand; PAM type: YTN; PAM sequence: TTT
gtgtacaagatcttgtgtat

SEQ ID NO: 346745 - DNA, 20 bp, Artificial Sequence
  Description of Artificial Sequence: Synthetic oligonucleotide
  Target: LAMA2; (+) strand; PAM type: YTN; PAM sequence: TTG
tgtacaagatcttgtgtatt

SEQ ID NO: 346746 - DNA, 20 bp, Artificial Sequence
  Description of Artificial Sequence: Synthetic oligonucleotide
  Target: LAMA2; (+) strand; PAM type: YTN; PAM sequence: CTT
gtgtattgtaatttctgaaa

SEQ ID NO: 346747 - DNA, 20 bp, Artificial Sequence
  Description of Artificial Sequence: Synthetic oligonucleotide
  Target: LAMA2; (+) strand; PAM type: YTN; PAM sequence: TTG
tgtattgtaatttctgaaat

SEQ ID NO: 346748 - DNA, 20 bp, Artificial Sequence
  Description of Artificial Sequence: Synthetic oligonucleotide
  Target: LAMA2; (+) strand; PAM type: YTN; PAM sequence: TTG
taatttctgaaatagcaatg

SEQ ID NO: 346749 - DNA, 20 bp, Artificial Sequence
  Description of Artificial Sequence: Synthetic oligonucleotide
  Target: LAMA2; (+) strand; PAM type: YTN; PAM sequence: TTT
ctgaaatagcaatgaggttg

SEQ ID NO: 346750 - DNA, 20 bp, Artificial Sequence
  Description of Artificial Sequence: Synthetic oligonucleotide
  Target: LAMA2; (+) strand; PAM type: YTN; PAM sequence: TTC
tgaaatagcaatgaggttgg

SEQ ID NO: 346751 - DNA, 20 bp, Artificial Sequence
  Description of Artificial Sequence: Synthetic oligonucleotide
  Target: LAMA2; (+) strand; PAM type: YTN; PAM sequence: CTG
aaatagcaatgaggttggaa

SEQ ID NO: 346752 - DNA, 20 bp, Artificial Sequence
  Description of Artificial Sequence: Synthetic oligonucleotide
  Target: LAMA2; (+) strand; PAM type: YTN; PAM sequence: TTG
gaatacatgactaatgattt

SEQ ID NO: 346753 - DNA, 20 bp, Artificial Sequence
  Description of Artificial Sequence: Synthetic oligonucleotide
  Target: LAMA2; (+) strand; PAM type: YTN; PAM sequence: CTA
atgattttatcctcttatga

SEQ ID NO: 346754 - DNA, 20 bp, Artificial Sequence
  Description of Artificial Sequence: Synthetic oligonucleotide
  Target: LAMA2; (+) strand; PAM type: YTN; PAM sequence: TTT
tatcctcttatgatatctct

SEQ ID NO: 346755 - DNA, 20 bp, Artificial Sequence
  Description of Artificial Sequence: Synthetic oligonucleotide
  Target: LAMA2; (+) strand; PAM type: YTN; PAM sequence: TTT
atcctcttatgatatctctg

SEQ ID NO: 346756 - DNA, 20 bp, Artificial Sequence
  Description of Artificial Sequence: Synthetic oligonucleotide
  Target: LAMA2; (+) strand; PAM type: YTN; PAM sequence: TTA
tcctcttatgatatctctgg

SEQ ID NO: 346757 - DNA, 20 bp, Artificial Sequence
  Description of Artificial Sequence: Synthetic oligonucleotide
  Target: LAMA2; (+) strand; PAM type: YTN; PAM sequence: CTC
ttatgatatctctggttggg

SEQ ID NO: 346758 - DNA, 20 bp, Artificial Sequence
  Description of Artificial Sequence: Synthetic oligonucleotide
  Target: LAMA2; (+) strand; PAM type: YTN; PAM sequence: CTT
atgatatctctggttggggc

SEQ ID NO: 346759 - DNA, 20 bp, Artificial Sequence
  Description of Artificial Sequence: Synthetic oligonucleotide
  Target: LAMA2; (+) strand; PAM type: YTN; PAM sequence: TTA
tgatatctctggttggggca

SEQ ID NO: 346760 - DNA, 20 bp, Artificial Sequence
  Description of Artificial Sequence: Synthetic oligonucleotide
  Target: LAMA2; (+) strand; PAM type: YTN; PAM sequence: CTC
tggttggggcacacccaaaa

SEQ ID NO: 346761 - DNA, 20 bp, Artificial Sequence
  Description of Artificial Sequence: Synthetic oligonucleotide
  Target: LAMA2; (+) strand; PAM type: YTN; PAM sequence: CTG
gttggggcacacccaaaaca

SEQ ID NO: 346762 - DNA, 20 bp, Artificial Sequence
  Description of Artificial Sequence: Synthetic oligonucleotide
  Target: LAMA2; (+) strand; PAM type: YTN; PAM sequence: TTG
gggcacacccaaaacaaaat

SEQ ID NO: 346763 - DNA, 20 bp, Artificial Sequence
  Description of Artificial Sequence: Synthetic oligonucleotide
  Target: LAMA2; (+) strand; PAM type: YTN; PAM sequence: TTT
ggagcaatgcaaatgttcga

SEQ ID NO: 346764 - DNA, 20 bp, Artificial Sequence
  Description of Artificial Sequence: Synthetic oligonucleotide
  Target: LAMA2; (+) strand; PAM type: YTN; PAM sequence: TTG
gagcaatgcaaatgttcgag

SEQ ID NO: 346765 - DNA, 20 bp, Artificial Sequence
  Description of Artificial Sequence: Synthetic oligonucleotide
  Target: LAMA2; (+) strand; PAM type: YTN; PAM sequence: TTC
gaggagagtgagagaacttc

SEQ ID NO: 346766 - DNA, 20 bp, Artificial Sequence
  Description of Artificial Sequence: Synthetic oligonucleotide
  Target: LAMA2; (+) strand; PAM type: YTN; PAM sequence: CTT
ccttctggtgtttttctcta

SEQ ID NO: 346767 - DNA, 20 bp, Artificial Sequence
  Description of Artificial Sequence: Synthetic oligonucleotide
  Target: LAMA2; (+) strand; PAM type: YTN; PAM sequence: TTC
cttctggtgtttttctctaa

SEQ ID NO: 346768 - DNA, 20 bp, Artificial Sequence
  Description of Artificial Sequence: Synthetic oligonucleotide
  Target: LAMA2; (+) strand; PAM type: YTN; PAM sequence: CTT
ctggtgtttttctctaatga

SEQ ID NO: 346769 - DNA, 20 bp, Artificial Sequence
  Description of Artificial Sequence: Synthetic oligonucleotide
  Target: LAMA2; (+) strand; PAM type: YTN; PAM sequence: TTC
tggtgtttttctctaatgac

SEQ ID NO: 346770 - DNA, 20 bp, Artificial Sequence
  Description of Artificial Sequence: Synthetic oligonucleotide
  Target: LAMA2; (+) strand; PAM type: YTN; PAM sequence: CTG
gtgtttttctctaatgactt

SEQ ID NO: 346771 - DNA, 20 bp, Artificial Sequence
  Description of Artificial Sequence: Synthetic oligonucleotide
  Target: LAMA2; (+) strand; PAM type: YTN; PAM sequence: TTT
ttctctaatgacttgctctg

SEQ ID NO: 346772 - DNA, 20 bp, Artificial Sequence
  Description of Artificial Sequence: Synthetic oligonucleotide
  Target: LAMA2; (+) strand; PAM type: YTN; PAM sequence: TTT
tctctaatgacttgctctga

SEQ ID NO: 346773 - DNA, 20 bp, Artificial Sequence
  Description of Artificial Sequence: Synthetic oligonucleotide
  Target: LAMA2; (+) strand; PAM type: YTN; PAM sequence: TTT
ctctaatgacttgctctgaa

SEQ ID NO: 346774 - DNA, 20 bp, Artificial Sequence
  Description of Artificial Sequence: Synthetic oligonucleotide
  Target: LAMA2; (+) strand; PAM type: YTN; PAM sequence: TTC
tctaatgacttgctctgaag

SEQ ID NO: 346775 - DNA, 20 bp, Artificial Sequence
  Description of Artificial Sequence: Synthetic oligonucleotide
  Target: LAMA2; (+) strand; PAM type: YTN; PAM sequence: CTC
taatgacttgctctgaagct

SEQ ID NO: 346776 - DNA, 20 bp, Artificial Sequence
  Description of Artificial Sequence: Synthetic oligonucleotide
  Target: LAMA2; (+) strand; PAM type: YTN; PAM sequence: CTA
atgacttgctctgaagctac

SEQ ID NO: 346777 - DNA, 20 bp, Artificial Sequence
  Description of Artificial Sequence: Synthetic oligonucleotide
  Target: LAMA2; (+) strand; PAM type: YTN; PAM sequence: CTT
gctctgaagctactcctctt

SEQ ID NO: 346778 - DNA, 20 bp, Artificial Sequence
  Description of Artificial Sequence: Synthetic oligonucleotide
  Target: LAMA2; (+) strand; PAM type: YTN; PAM sequence: TTG
ctctgaagctactcctctta

SEQ ID NO: 346779 - DNA, 20 bp, Artificial Sequence
  Description of Artificial Sequence: Synthetic oligonucleotide
  Target: LAMA2; (+) strand; PAM type: YTN; PAM sequence: CTC
tgaagctactcctcttagat

SEQ ID NO: 346780 - DNA, 20 bp, Artificial Sequence
  Description of Artificial Sequence: Synthetic oligonucleotide
  Target: LAMA2; (+) strand; PAM type: YTN; PAM sequence: CTG
aagctactcctcttagattc

SEQ ID NO: 346781 - DNA, 20 bp, Artificial Sequence
  Description of Artificial Sequence: Synthetic oligonucleotide
  Target: LAMA2; (+) strand; PAM type: YTN; PAM sequence: CTA
ctcctcttagattctttcct

SEQ ID NO: 346782 - DNA, 20 bp, Artificial Sequence
  Description of Artificial Sequence: Synthetic oligonucleotide
  Target: LAMA2; (+) strand; PAM type: YTN; PAM sequence: CTC
ctcttagattctttcctagc

SEQ ID NO: 346783 - DNA, 20 bp, Artificial Sequence
  Description of Artificial Sequence: Synthetic oligonucleotide
  Target: LAMA2; (+) strand; PAM type: YTN; PAM sequence: CTC
ttagattctttcctagctgt

SEQ ID NO: 346784 - DNA, 20 bp, Artificial Sequence
  Description of Artificial Sequence: Synthetic oligonucleotide
  Target: LAMA2; (+) strand; PAM type: YTN; PAM sequence: CTT
agattctttcctagctgtgt

SEQ ID NO: 346785 - DNA, 20 bp, Artificial Sequence
  Description of Artificial Sequence: Synthetic oligonucleotide
  Target: LAMA2; (+) strand; PAM type: YTN; PAM sequence: TTA
gattctttcctagctgtgta

SEQ ID NO: 346786 - DNA, 20 bp, Artificial Sequence
  Description of Artificial Sequence: Synthetic oligonucleotide
  Target: LAMA2; (+) strand; PAM type: YTN; PAM sequence: TTC
tttcctagctgtgtattcct

SEQ ID NO: 346787 - DNA, 20 bp, Artificial Sequence
  Description of Artificial Sequence: Synthetic oligonucleotide
  Target: LAMA2; (+) strand; PAM type: YTN; PAM sequence: CTT
tcctagctgtgtattcctat

SEQ ID NO: 346788 - DNA, 20 bp, Artificial Sequence
  Description of Artificial Sequence: Synthetic oligonucleotide
  Target: LAMA2; (+) strand; PAM type: YTN; PAM sequence: TTT
cctagctgtgtattcctata

SEQ ID NO: 346789 - DNA, 20 bp, Artificial Sequence
  Description of Artificial Sequence: Synthetic oligonucleotide
  Target: LAMA2; (+) strand; PAM type: YTN; PAM sequence: TTC
ctagctgtgtattcctatat

SEQ ID NO: 346790 - DNA, 20 bp, Artificial Sequence
  Description of Artificial Sequence: Synthetic oligonucleotide
  Target: LAMA2; (+) strand; PAM type: YTN; PAM sequence: CTA
gctgtgtattcctatatagt

SEQ ID NO: 346791 - DNA, 20 bp, Artificial Sequence
  Description of Artificial Sequence: Synthetic oligonucleotide
  Target: LAMA2; (+) strand; PAM type: YTN; PAM sequence: CTG
tgtattcctatatagtctta

SEQ ID NO: 346792 - DNA, 20 bp, Artificial Sequence
  Description of Artificial Sequence: Synthetic oligonucleotide
  Target: LAMA2; (+) strand; PAM type: YTN; PAM sequence: TTC
ctatatagtcttagcttaac

SEQ ID NO: 346793 - DNA, 20 bp, Artificial Sequence
  Description of Artificial Sequence: Synthetic oligonucleotide
  Target: LAMA2; (+) strand; PAM type: YTN; PAM sequence: CTA
tatagtcttagcttaacagc

SEQ ID NO: 346794 - DNA, 20 bp, Artificial Sequence
  Description of Artificial Sequence: Synthetic oligonucleotide
  Target: LAMA2; (+) strand; PAM type: YTN; PAM sequence: CTT
agcttaacagcacaaagatt

SEQ ID NO: 346795 - DNA, 20 bp, Artificial Sequence
  Description of Artificial Sequence: Synthetic oligonucleotide
  Target: LAMA2; (+) strand; PAM type: YTN; PAM sequence: TTA
gcttaacagcacaaagattt

SEQ ID NO: 346796 - DNA, 20 bp, Artificial Sequence
  Description of Artificial Sequence: Synthetic oligonucleotide
  Target: LAMA2; (+) strand; PAM type: YTN; PAM sequence: CTT
aacagcacaaagatttaaca

SEQ ID NO: 346797 - DNA, 20 bp, Artificial Sequence
  Description of Artificial Sequence: Synthetic oligonucleotide
  Target: LAMA2; (+) strand; PAM type: YTN; PAM sequence: TTA
acagcacaaagatttaacag

SEQ ID NO: 346798 - DNA, 20 bp, Artificial Sequence
  Description of Artificial Sequence: Synthetic oligonucleotide
  Target: LAMA2; (+) strand; PAM type: YTN; PAM sequence: TTT
aacagtggtgtctgcatttg

SEQ ID NO: 346799 - DNA, 20 bp, Artificial Sequence
  Description of Artificial Sequence: Synthetic oligonucleotide
  Target: LAMA2; (+) strand; PAM type: YTN; PAM sequence: TTA
acagtggtgtctgcatttga

SEQ ID NO: 346800 - DNA, 20 bp, Artificial Sequence
  Description of Artificial Sequence: Synthetic oligonucleotide
  Target: LAMA2; (+) strand; PAM type: YTN; PAM sequence: CTG
catttgataaaatgtaaatg

SEQ ID NO: 346801 - DNA, 20 bp, Artificial Sequence
  Description of Artificial Sequence: Synthetic oligonucleotide
  Target: LAMA2; (+) strand; PAM type: YTN; PAM sequence: TTT
gataaaatgtaaatgagaag

SEQ ID NO: 346802 - DNA, 20 bp, Artificial Sequence
  Description of Artificial Sequence: Synthetic oligonucleotide
  Target: LAMA2; (+) strand; PAM type: YTN; PAM sequence: TTG
ataaaatgtaaatgagaagc

SEQ ID NO: 346803 - DNA, 20 bp, Artificial Sequence
  Description of Artificial Sequence: Synthetic oligonucleotide
  Target: LAMA2; (+) strand; PAM type: YTN; PAM sequence: CTC
ccaaaagagattgagaagct

SEQ ID NO: 346804 - DNA, 20 bp, Artificial Sequence
  Description of Artificial Sequence: Synthetic oligonucleotide
  Target: LAMA2; (+) strand; PAM type: YTN; PAM sequence: TTG
agaagctctattttgacaac

SEQ ID NO: 346805 - DNA, 20 bp, Artificial Sequence
  Description of Artificial Sequence: Synthetic oligonucleotide
  Target: LAMA2; (+) strand; PAM type: YTN; PAM sequence: CTC
tattttgacaactcttcttt

SEQ ID NO: 346806 - DNA, 20 bp, Artificial Sequence
  Description of Artificial Sequence: Synthetic oligonucleotide
  Target: LAMA2; (+) strand; PAM type: YTN; PAM sequence: CTA
ttttgacaactcttctttta

SEQ ID NO: 346807 - DNA, 20 bp, Artificial Sequence
  Description of Artificial Sequence: Synthetic oligonucleotide
  Target: LAMA2; (+) strand; PAM type: YTN; PAM sequence: TTT
tgacaactcttcttttatct

SEQ ID NO: 346808 - DNA, 20 bp, Artificial Sequence
  Description of Artificial Sequence: Synthetic oligonucleotide
  Target: LAMA2; (+) strand; PAM type: YTN; PAM sequence: TTT
gacaactcttcttttatctg

SEQ ID NO: 346809 - DNA, 20 bp, Artificial Sequence
  Description of Artificial Sequence: Synthetic oligonucleotide
  Target: LAMA2; (+) strand; PAM type: YTN; PAM sequence: TTG
acaactcttcttttatctgt

SEQ ID NO: 346810 - DNA, 20 bp, Artificial Sequence
  Description of Artificial Sequence: Synthetic oligonucleotide
  Target: LAMA2; (+) strand; PAM type: YTN; PAM sequence: CTC
ttcttttatctgtgtaatta

SEQ ID NO: 346811 - DNA, 20 bp, Artificial Sequence
  Description of Artificial Sequence: Synthetic oligonucleotide
  Target: LAMA2; (+) strand; PAM type: YTN; PAM sequence: CTT
cttttatctgtgtaattatt

SEQ ID NO: 346812 - DNA, 20 bp, Artificial Sequence
  Description of Artificial Sequence: Synthetic oligonucleotide
  Target: LAMA2; (+) strand; PAM type: YTN; PAM sequence: TTC
ttttatctgtgtaattatta

SEQ ID NO: 346813 - DNA, 20 bp, Artificial Sequence
  Description of Artificial Sequence: Synthetic oligonucleotide
  Target: LAMA2; (+) strand; PAM type: YTN; PAM sequence: CTT
ttatctgtgtaattattata

SEQ ID NO: 346814 - DNA, 20 bp, Artificial Sequence
  Description of Artificial Sequence: Synthetic oligonucleotide
  Target: LAMA2; (+) strand; PAM type: YTN; PAM sequence: TTT
tatctgtgtaattattatat

SEQ ID NO: 346815 - DNA, 20 bp, Artificial Sequence
  Description of Artificial Sequence: Synthetic oligonucleotide
  Target: LAMA2; (+) strand; PAM type: YTN; PAM sequence: TTT
atctgtgtaattattatata

SEQ ID NO: 346816 - DNA, 20 bp, Artificial Sequence
  Description of Artificial Sequence: Synthetic oligonucleotide
  Target: LAMA2; (+) strand; PAM type: YTN; PAM sequence: TTA
tctgtgtaattattatatac

SEQ ID NO: 346817 - DNA, 20 bp, Artificial Sequence
  Description of Artificial Sequence: Synthetic oligonucleotide
  Target: LAMA2; (+) strand; PAM type: YTN; PAM sequence: CTG
tgtaattattatatacttta

SEQ ID NO: 346818 - DNA, 20 bp, Artificial Sequence
  Description of Artificial Sequence: Synthetic oligonucleotide
  Target: LAMA2; (+) strand; PAM type: YTN; PAM sequence: TTA
ttatatactttaactgaaga

SEQ ID NO: 346819 - DNA, 20 bp, Artificial Sequence
  Description of Artificial Sequence: Synthetic oligonucleotide
  Target: LAMA2; (+) strand; PAM type: YTN; PAM sequence: TTA
tatactttaactgaagaaag

SEQ ID NO: 346820 - DNA, 20 bp, Artificial Sequence
  Description of Artificial Sequence: Synthetic oligonucleotide
  Target: LAMA2; (+) strand; PAM type: YTN; PAM sequence: CTT
taactgaagaaagaaaaaca

SEQ ID NO: 346821 - DNA, 20 bp, Artificial Sequence
  Description of Artificial Sequence: Synthetic oligonucleotide
  Target: LAMA2; (+) strand; PAM type: YTN; PAM sequence: TTT
aactgaagaaagaaaaacac

SEQ ID NO: 346822 - DNA, 20 bp, Artificial Sequence
  Description of Artificial Sequence: Synthetic oligonucleotide
  Target: LAMA2; (+) strand; PAM type: YTN; PAM sequence: TTA
actgaagaaagaaaaacaca

SEQ ID NO: 346823 - DNA, 20 bp, Artificial Sequence
  Description of Artificial Sequence: Synthetic oligonucleotide
  Target: LAMA2; (+) strand; PAM type: YTN; PAM sequence: CTG
aagaaagaaaaacacaaaga

SEQ ID NO: 346824 - DNA, 20 bp, Artificial Sequence
  Description of Artificial Sequence: Synthetic oligonucleotide
  Target: LAMA2; (+) strand; PAM type: YTN; PAM sequence: TTT
caacttcgagtactttttaa

SEQ ID NO: 346825 - DNA, 20 bp, Artificial Sequence
  Description of Artificial Sequence: Synthetic oligonucleotide
  Target: LAMA2; (+) strand; PAM type: YTN; PAM sequence: TTC
aacttcgagtactttttaaa

SEQ ID NO: 346826 - DNA, 20 bp, Artificial Sequence
  Description of Artificial Sequence: Synthetic oligonucleotide
  Target: LAMA2; (+) strand; PAM type: YTN; PAM sequence: CTT
cgagtactttttaaaaatta

SEQ ID NO: 346827 - DNA, 20 bp, Artificial Sequence
  Description of Artificial Sequence: Synthetic oligonucleotide
  Target: LAMA2; (+) strand; PAM type: YTN; PAM sequence: TTC
gagtactttttaaaaattat

SEQ ID NO: 346828 - DNA, 20 bp, Artificial Sequence
  Description of Artificial Sequence: Synthetic oligonucleotide
  Target: LAMA2; (+) strand; PAM type: YTN; PAM sequence: CTT
tttaaaaattatttgaaagc

SEQ ID NO: 346829 - DNA, 20 bp, Artificial Sequence
  Description of Artificial Sequence: Synthetic oligonucleotide
  Target: LAMA2; (+) strand; PAM type: YTN; PAM sequence: TTT
ttaaaaattatttgaaagca

SEQ ID NO: 346830 - DNA, 20 bp, Artificial Sequence
  Description of Artificial Sequence: Synthetic oligonucleotide
  Target: LAMA2; (+) strand; PAM type: YTN; PAM sequence: TTT
taaaaattatttgaaagcat

SEQ ID NO: 346831 - DNA, 20 bp, Artificial Sequence
  Description of Artificial Sequence: Synthetic oligonucleotide
  Target: LAMA2; (+) strand; PAM type: YTN; PAM sequence: TTT
aaaaattatttgaaagcatt

SEQ ID NO: 346832 - DNA, 20 bp, Artificial Sequence
  Description of Artificial Sequence: Synthetic oligonucleotide
  Target: LAMA2; (+) strand; PAM type: YTN; PAM sequence: TTA
aaaattatttgaaagcattt

SEQ ID NO: 346833 - DNA, 20 bp, Artificial Sequence
  Description of Artificial Sequence: Synthetic oligonucleotide
  Target: LAMA2; (+) strand; PAM type: YTN; PAM sequence: TTA
tttgaaagcatttaaaaata

SEQ ID NO: 346834 - DNA, 20 bp, Artificial Sequence
  Description of Artificial Sequence: Synthetic oligonucleotide
  Target: LAMA2; (+) strand; PAM type: YTN; PAM sequence: TTT
gaaagcatttaaaaatagat

SEQ ID NO: 346835 - DNA, 20 bp, Artificial Sequence
  Description of Artificial Sequence: Synthetic oligonucleotide
  Target: LAMA2; (+) strand; PAM type: YTN; PAM sequence: TTG
aaagcatttaaaaatagatg

SEQ ID NO: 346836 - DNA, 20 bp, Artificial Sequence
  Description of Artificial Sequence: Synthetic oligonucleotide
  Target: LAMA2; (+) strand; PAM type: YTN; PAM sequence: TTT
aaaaatagatgtaaaatgaa

SEQ ID NO: 346837 - DNA, 20 bp, Artificial Sequence
  Description of Artificial Sequence: Synthetic oligonucleotide
  Target: LAMA2; (+) strand; PAM type: YTN; PAM sequence: TTA
aaaatagatgtaaaatgaac

SEQ ID NO: 346838 - DNA, 20 bp, Artificial Sequence
  Description of Artificial Sequence: Synthetic oligonucleotide
  Target: LAMA2; (+) strand; PAM type: YTN; PAM sequence: CTC
ctgtatgtcaaattcctttc

SEQ ID NO: 346839 - DNA, 20 bp, Artificial Sequence
  Description of Artificial Sequence: Synthetic oligonucleotide
  Target: LAMA2; (+) strand; PAM type: YTN; PAM sequence: CTG
tatgtcaaattcctttcaga

SEQ ID NO: 346840 - DNA, 20 bp, Artificial Sequence
  Description of Artificial Sequence: Synthetic oligonucleotide
  Target: LAMA2; (+) strand; PAM type: YTN; PAM sequence: TTC
ctttcagagaaaaaaaaaag

SEQ ID NO: 346841 - DNA, 20 bp, Artificial Sequence
  Description of Artificial Sequence: Synthetic oligonucleotide
  Target: LAMA2; (+) strand; PAM type: YTN; PAM sequence: CTT
tcagagaaaaaaaaaagtga

SEQ ID NO: 346842 - DNA, 20 bp, Artificial Sequence
  Description of Artificial Sequence: Synthetic oligonucleotide
  Target: LAMA2; (+) strand; PAM type: YTN; PAM sequence: TTT
cagagaaaaaaaaaagtgag

SEQ ID NO: 346843 - DNA, 20 bp, Artificial Sequence
  Description of Artificial Sequence: Synthetic oligonucleotide
  Target: LAMA2; (+) strand; PAM type: YTN; PAM sequence: TTC
agagaaaaaaaaaagtgaga

SEQ ID NO: 346844 - DNA, 20 bp, Artificial Sequence
  Description of Artificial Sequence: Synthetic oligonucleotide
  Target: LAMA2; (+) strand; PAM type: YTN; PAM sequence: TTT
gcatttagtaattttttttg

SEQ ID NO: 346845 - DNA, 20 bp, Artificial Sequence
  Description of Artificial Sequence: Synthetic oligonucleotide
  Target: LAMA2; (+) strand; PAM type: YTN; PAM sequence: TTG
catttagtaattttttttgt

SEQ ID NO: 346846 - DNA, 20 bp, Artificial Sequence
  Description of Artificial Sequence: Synthetic oligonucleotide
  Target: LAMA2; (+) strand; PAM type: YTN; PAM sequence: TTT
agtaattttttttgtttttt

SEQ ID NO: 346847 - DNA, 20 bp, Artificial Sequence
  Description of Artificial Sequence: Synthetic oligonucleotide
  Target: LAMA2; (+) strand; PAM type: YTN; PAM sequence: TTA
gtaattttttttgttttttt

SEQ ID NO: 346848 - DNA, 20 bp, Artificial Sequence
  Description of Artificial Sequence: Synthetic oligonucleotide
  Target: LAMA2; (+) strand; PAM type: YTN; PAM sequence: TTT
tttttgtttttttgaaaatt

SEQ ID NO: 346849 - DNA, 20 bp, Artificial Sequence
  Description of Artificial Sequence: Synthetic oligonucleotide
  Target: LAMA2; (+) strand; PAM type: YTN; PAM sequence: TTT
ttttgtttttttgaaaattt

SEQ ID NO: 346850 - DNA, 20 bp, Artificial Sequence
  Description of Artificial Sequence: Synthetic oligonucleotide
  Target: LAMA2; (+) strand; PAM type: YTN; PAM sequence: TTT
tttgtttttttgaaaatttc

SEQ ID NO: 346851 - DNA, 20 bp, Artificial Sequence
  Description of Artificial Sequence: Synthetic oligonucleotide
  Target: LAMA2; (+) strand; PAM type: YTN; PAM sequence: TTT
ttgtttttttgaaaatttca

SEQ ID NO: 346852 - DNA, 20 bp, Artificial Sequence
  Description of Artificial Sequence: Synthetic oligonucleotide
  Target: LAMA2; (+) strand; PAM type: YTN; PAM sequence: TTT
tgtttttttgaaaatttcag

SEQ ID NO: 346853 - DNA, 20 bp, Artificial Sequence
  Description of Artificial Sequence: Synthetic oligonucleotide
  Target: LAMA2; (+) strand; PAM type: YTN; PAM sequence: TTT
gtttttttgaaaatttcagg

SEQ ID NO: 346854 - DNA, 20 bp, Artificial Sequence
  Description of Artificial Sequence: Synthetic oligonucleotide
  Target: LAMA2; (+) strand; PAM type: YTN; PAM sequence: TTG
tttttttgaaaatttcaggc

SEQ ID NO: 346855 - DNA, 20 bp, Artificial Sequence
  Description of Artificial Sequence: Synthetic oligonucleotide
  Target: LAMA2; (+) strand; PAM type: YTN; PAM sequence: TTT
ttttgaaaatttcaggcact

SEQ ID NO: 346856 - DNA, 20 bp, Artificial Sequence
  Description of Artificial Sequence: Synthetic oligonucleotide
  Target: LAMA2; (+) strand; PAM type: YTN; PAM sequence: TTT
tttgaaaatttcaggcactt

SEQ ID NO: 346857 - DNA, 20 bp, Artificial Sequence
  Description of Artificial Sequence: Synthetic oligonucleotide
  Target: LAMA2; (+) strand; PAM type: YTN; PAM sequence: TTT
ttgaaaatttcaggcactta

SEQ ID NO: 346858 - DNA, 20 bp, Artificial Sequence
  Description of Artificial Sequence: Synthetic oligonucleotide
  Target: LAMA2; (+) strand; PAM type: YTN; PAM sequence: TTT
tgaaaatttcaggcacttag

SEQ ID NO: 346859 - DNA, 20 bp, Artificial Sequence
  Description of Artificial Sequence: Synthetic oligonucleotide
  Target: LAMA2; (+) strand; PAM type: YTN; PAM sequence: TTT
gaaaatttcaggcacttagt

SEQ ID NO: 346860 - DNA, 20 bp, Artificial Sequence
  Description of Artificial Sequence: Synthetic oligonucleotide
  Target: LAMA2; (+) strand; PAM type: YTN; PAM sequence: TTG
aaaatttcaggcacttagta

SEQ ID NO: 346861 - DNA, 20 bp, Artificial Sequence
  Description of Artificial Sequence: Synthetic oligonucleotide
  Target: LAMA2; (+) strand; PAM type: YTN; PAM sequence: TTT
caggcacttagtaatcactg

SEQ ID NO: 346862 - DNA, 20 bp, Artificial Sequence
  Description of Artificial Sequence: Synthetic oligonucleotide
  Target: LAMA2; (+) strand; PAM type: YTN; PAM sequence: TTC
aggcacttagtaatcactgt

SEQ ID NO: 346863 - DNA, 20 bp, Artificial Sequence
  Description of Artificial Sequence: Synthetic oligonucleotide
  Target: LAMA2; (+) strand; PAM type: YTN; PAM sequence: CTT
agtaatcactgttccttttg

SEQ ID NO: 346864 - DNA, 20 bp, Artificial Sequence
  Description of Artificial Sequence: Synthetic oligonucleotide
  Target: LAMA2; (+) strand; PAM type: YTN; PAM sequence: TTA
gtaatcactgttccttttgt

SEQ ID NO: 346865 - DNA, 20 bp, Artificial Sequence
  Description of Artificial Sequence: Synthetic oligonucleotide
  Target: LAMA2; (+) strand; PAM type: YTN; PAM sequence: CTG
ttccttttgtacgtcatgcc

SEQ ID NO: 346866 - DNA, 20 bp, Artificial Sequence
  Description of Artificial Sequence: Synthetic oligonucleotide
  Target: LAMA2; (+) strand; PAM type: YTN; PAM sequence: TTC
cttttgtacgtcatgcccaa

SEQ ID NO: 346867 - DNA, 20 bp, Artificial Sequence
  Description of Artificial Sequence: Synthetic oligonucleotide
  Target: LAMA2; (+) strand; PAM type: YTN; PAM sequence: CTT
ttgtacgtcatgcccaatgg

SEQ ID NO: 346868 - DNA, 20 bp, Artificial Sequence
  Description of Artificial Sequence: Synthetic oligonucleotide
  Target: LAMA2; (+) strand; PAM type: YTN; PAM sequence: TTT
tgtacgtcatgcccaatggg

SEQ ID NO: 346869 - DNA, 20 bp, Artificial Sequence
  Description of Artificial Sequence: Synthetic oligonucleotide
  Target: LAMA2; (+) strand; PAM type: YTN; PAM sequence: TTT
gtacgtcatgcccaatggga

SEQ ID NO: 346870 - DNA, 20 bp, Artificial Sequence
  Description of Artificial Sequence: Synthetic oligonucleotide
  Target: LAMA2; (+) strand; PAM type: YTN; PAM sequence: TTG
tacgtcatgcccaatgggaa

SEQ ID NO: 346871 - DNA, 20 bp, Artificial Sequence
  Description of Artificial Sequence: Synthetic oligonucleotide
  Target: LAMA2; (+) strand; PAM type: YTN; PAM sequence: CTT
tcactcaattctgtggatta

SEQ ID NO: 346872 - DNA, 20 bp, Artificial Sequence
  Description of Artificial Sequence: Synthetic oligonucleotide
  Target: LAMA2; (+) strand; PAM type: YTN; PAM sequence: TTT
cactcaattctgtggattac

SEQ ID NO: 346873 - DNA, 20 bp, Artificial Sequence
  Description of Artificial Sequence: Synthetic oligonucleotide
  Target: LAMA2; (+) strand; PAM type: YTN; PAM sequence: TTC
actcaattctgtggattaca

SEQ ID NO: 346874 - DNA, 20 bp, Artificial Sequence
  Description of Artificial Sequence: Synthetic oligonucleotide
  Target: LAMA2; (+) strand; PAM type: YTN; PAM sequence: CTC
aattctgtggattacaggtc

SEQ ID NO: 346875 - DNA, 20 bp, Artificial Sequence
  Description of Artificial Sequence: Synthetic oligonucleotide
  Target: LAMA2; (+) strand; PAM type: YTN; PAM sequence: TTC
tgtggattacaggtcaccca

SEQ ID NO: 346876 - DNA, 20 bp, Artificial Sequence
  Description of Artificial Sequence: Synthetic oligonucleotide
  Target: LAMA2; (+) strand; PAM type: YTN; PAM sequence: CTG
tggattacaggtcacccacc

SEQ ID NO: 346877 - DNA, 20 bp, Artificial Sequence
  Description of Artificial Sequence: Synthetic oligonucleotide
  Target: LAMA2; (+) strand; PAM type: YTN; PAM sequence: TTA
caggtcacccacctgggcat

SEQ ID NO: 346878 - DNA, 20 bp, Artificial Sequence
  Description of Artificial Sequence: Synthetic oligonucleotide
  Target: LAMA2; (+) strand; PAM type: YTN; PAM sequence: CTG
ggcatgtttcagatgaaact

SEQ ID NO: 346879 - DNA, 20 bp, Artificial Sequence
  Description of Artificial Sequence: Synthetic oligonucleotide
  Target: LAMA2; (+) strand; PAM type: YTN; PAM sequence: TTT
cagatgaaactaacctaagc

SEQ ID NO: 346880 - DNA, 20 bp, Artificial Sequence
  Description of Artificial Sequence: Synthetic oligonucleotide
  Target: LAMA2; (+) strand; PAM type: YTN; PAM sequence: TTC
agatgaaactaacctaagct

SEQ ID NO: 346881 - DNA, 20 bp, Artificial Sequence
  Description of Artificial Sequence: Synthetic oligonucleotide
  Target: LAMA2; (+) strand; PAM type: YTN; PAM sequence: CTA
acctaagctcatcttgagta

SEQ ID NO: 346882 - DNA, 20 bp, Artificial Sequence
  Description of Artificial Sequence: Synthetic oligonucleotide
  Target: LAMA2; (+) strand; PAM type: YTN; PAM sequence: CTA
agctcatcttgagtaagggg

SEQ ID NO: 346883 - DNA, 20 bp, Artificial Sequence
  Description of Artificial Sequence: Synthetic oligonucleotide
  Target: LAMA2; (+) strand; PAM type: YTN; PAM sequence: CTC
atcttgagtaaggggcttag

SEQ ID NO: 346884 - DNA, 20 bp, Artificial Sequence
  Description of Artificial Sequence: Synthetic oligonucleotide
  Target: LAMA2; (+) strand; PAM type: YTN; PAM sequence: CTT
gagtaaggggcttagaagta

SEQ ID NO: 346885 - DNA, 20 bp, Artificial Sequence
  Description of Artificial Sequence: Synthetic oligonucleotide
  Target: LAMA2; (+) strand; PAM type: YTN; PAM sequence: TTG
agtaaggggcttagaagtaa

SEQ ID NO: 346886 - DNA, 20 bp, Artificial Sequence
  Description of Artificial Sequence: Synthetic oligonucleotide
  Target: LAMA2; (+) strand; PAM type: YTN; PAM sequence: CTT
agaagtaaatgctttgttgg

SEQ ID NO: 346887 - DNA, 20 bp, Artificial Sequence
  Description of Artificial Sequence: Synthetic oligonucleotide
  Target: LAMA2; (+) strand; PAM type: YTN; PAM sequence: TTA
gaagtaaatgctttgttggt

SEQ ID NO: 346888 - DNA, 20 bp, Artificial Sequence
  Description of Artificial Sequence: Synthetic oligonucleotide
  Target: LAMA2; (+) strand; PAM type: YTN; PAM sequence: CTT
tgttggttgctttgagttgt

SEQ ID NO: 346889 - DNA, 20 bp, Artificial Sequence
  Description of Artificial Sequence: Synthetic oligonucleotide
  Target: LAMA2; (+) strand; PAM type: YTN; PAM sequence: TTT
gttggttgctttgagttgta

SEQ ID NO: 346890 - DNA, 20 bp, Artificial Sequence
  Description of Artificial Sequence: Synthetic oligonucleotide
  Target: LAMA2; (+) strand; PAM type: YTN; PAM sequence: TTG
ttggttgctttgagttgtac

SEQ ID NO: 346891 - DNA, 20 bp, Artificial Sequence
  Description of Artificial Sequence: Synthetic oligonucleotide
  Target: LAMA2; (+) strand; PAM type: YTN; PAM sequence: TTG
gttgctttgagttgtacaaa

SEQ ID NO: 346892 - DNA, 20 bp, Artificial Sequence
  Description of Artificial Sequence: Synthetic oligonucleotide
  Target: LAMA2; (+) strand; PAM type: YTN; PAM sequence: TTG
ctttgagttgtacaaagcag

SEQ ID NO: 346893 - DNA, 20 bp, Artificial Sequence
  Description of Artificial Sequence: Synthetic oligonucleotide
  Target: LAMA2; (+) strand; PAM type: YTN; PAM sequence: CTT
tgagttgtacaaagcaggac

SEQ ID NO: 346894 - DNA, 20 bp, Artificial Sequence
  Description of Artificial Sequence: Synthetic oligonucleotide
  Target: LAMA2; (+) strand; PAM type: YTN; PAM sequence: TTT
gagttgtacaaagcaggacg

SEQ ID NO: 346895 - DNA, 20 bp, Artificial Sequence
  Description of Artificial Sequence: Synthetic oligonucleotide
  Target: LAMA2; (+) strand; PAM type: YTN; PAM sequence: TTG
agttgtacaaagcaggacga

SEQ ID NO: 346896 - DNA, 20 bp, Artificial Sequence
  Description of Artificial Sequence: Synthetic oligonucleotide
  Target: LAMA2; (+) strand; PAM type: YTN; PAM sequence: TTG
tacaaagcaggacgaccacc

SEQ ID NO: 346897 - DNA, 20 bp, Artificial Sequence
  Description of Artificial Sequence: Synthetic oligonucleotide
  Target: LAMA2; (+) strand; PAM type: YTN; PAM sequence: CTT
tctaagaaaaagaatcatag

SEQ ID NO: 346898 - DNA, 20 bp, Artificial Sequence
  Description of Artificial Sequence: Synthetic oligonucleotide
  Target: LAMA2; (+) strand; PAM type: YTN; PAM sequence: TTT
ctaagaaaaagaatcataga

SEQ ID NO: 346899 - DNA, 20 bp, Artificial Sequence
  Description of Artificial Sequence: Synthetic oligonucleotide
  Target: LAMA2; (+) strand; PAM type: YTN; PAM sequence: TTC
taagaaaaagaatcatagag

SEQ ID NO: 346900 - DNA, 20 bp, Artificial Sequence
  Description of Artificial Sequence: Synthetic oligonucleotide
  Target: LAMA2; (+) strand; PAM type: YTN; PAM sequence: CTA
agaaaaagaatcatagagac

SEQ ID NO: 346901 - DNA, 20 bp, Artificial Sequence
  Description of Artificial Sequence: Synthetic oligonucleotide
  Target: LAMA2; (+) strand; PAM type: YTN; PAM sequence: CTT
tgataaaattggaactccta

SEQ ID NO: 346902 - DNA, 20 bp, Artificial Sequence
  Description of Artificial Sequence: Synthetic oligonucleotide
  Target: LAMA2; (+) strand; PAM type: YTN; PAM sequence: TTT
gataaaattggaactcctaa

SEQ ID NO: 346903 - DNA, 20 bp, Artificial Sequence
  Description of Artificial Sequence: Synthetic oligonucleotide
  Target: LAMA2; (+) strand; PAM type: YTN; PAM sequence: TTG
ataaaattggaactcctaaa

SEQ ID NO: 346904 - DNA, 20 bp, Artificial Sequence
  Description of Artificial Sequence: Synthetic oligonucleotide
  Target: LAMA2; (+) strand; PAM type: YTN; PAM sequence: TTG
gaactcctaaagcagctaag

SEQ ID NO: 346905 - DNA, 20 bp, Artificial Sequence
  Description of Artificial Sequence: Synthetic oligonucleotide
  Target: LAMA2; (+) strand; PAM type: YTN; PAM sequence: CTC
ctaaagcagctaaggctttg

SEQ ID NO: 346906 - DNA, 20 bp, Artificial Sequence
  Description of Artificial Sequence: Synthetic oligonucleotide
  Target: LAMA2; (+) strand; PAM type: YTN; PAM sequence: CTA
aagcagctaaggctttgctt

SEQ ID NO: 346907 - DNA, 20 bp, Artificial Sequence
  Description of Artificial Sequence: Synthetic oligonucleotide
  Target: LAMA2; (+) strand; PAM type: YTN; PAM sequence: CTA
aggctttgcttctatttttg

SEQ ID NO: 346908 - DNA, 20 bp, Artificial Sequence
  Description of Artificial Sequence: Synthetic oligonucleotide
  Target: LAMA2; (+) strand; PAM type: YTN; PAM sequence: CTT
tgcttctatttttgatcatt

SEQ ID NO: 346909 - DNA, 20 bp, Artificial Sequence
  Description of Artificial Sequence: Synthetic oligonucleotide
  Target: LAMA2; (+) strand; PAM type: YTN; PAM sequence: TTT
gcttctatttttgatcattt

SEQ ID NO: 346910 - DNA, 20 bp, Artificial Sequence
  Description of Artificial Sequence: Synthetic oligonucleotide
  Target: LAMA2; (+) strand; PAM type: YTN; PAM sequence: TTG
cttctatttttgatcatttt

SEQ ID NO: 346911 - DNA, 20 bp, Artificial Sequence
  Description of Artificial Sequence: Synthetic oligonucleotide
  Target: LAMA2; (+) strand; PAM type: YTN; PAM sequence: CTT
ctatttttgatcatttttaa

SEQ ID NO: 346912 - DNA, 20 bp, Artificial Sequence
  Description of Artificial Sequence: Synthetic oligonucleotide
  Target: LAMA2; (+) strand; PAM type: YTN; PAM sequence: TTC
tatttttgatcatttttaaa

SEQ ID NO: 346913 - DNA, 20 bp, Artificial Sequence
  Description of Artificial Sequence: Synthetic oligonucleotide
  Target: LAMA2; (+) strand; PAM type: YTN; PAM sequence: CTA
tttttgatcatttttaaaaa

SEQ ID NO: 346914 - DNA, 20 bp, Artificial Sequence
  Description of Artificial Sequence: Synthetic oligonucleotide
  Target: LAMA2; (+) strand; PAM type: YTN; PAM sequence: TTT
ttgatcatttttaaaaagtt

SEQ ID NO: 346915 - DNA, 20 bp, Artificial Sequence
  Description of Artificial Sequence: Synthetic oligonucleotide
  Target: LAMA2; (+) strand; PAM type: YTN; PAM sequence: TTT
tgatcatttttaaaaagtta

SEQ ID NO: 346916 - DNA, 20 bp, Artificial Sequence
  Description of Artificial Sequence: Synthetic oligonucleotide
  Target: LAMA2; (+) strand; PAM type: YTN; PAM sequence: TTT
gatcatttttaaaaagttag

SEQ ID NO: 346917 - DNA, 20 bp, Artificial Sequence
  Description of Artificial Sequence: Synthetic oligonucleotide
  Target: LAMA2; (+) strand; PAM type: YTN; PAM sequence: TTG
atcatttttaaaaagttagt

SEQ ID NO: 346918 - DNA, 20 bp, Artificial Sequence
  Description of Artificial Sequence: Synthetic oligonucleotide
  Target: LAMA2; (+) strand; PAM type: YTN; PAM sequence: TTT
ttaaaaagttagttcttctg

SEQ ID NO: 346919 - DNA, 20 bp, Artificial Sequence
  Description of Artificial Sequence: Synthetic oligonucleotide
  Target: LAMA2; (+) strand; PAM type: YTN; PAM sequence: TTT
taaaaagttagttcttctgg

SEQ ID NO: 346920 - DNA, 20 bp, Artificial Sequence
  Description of Artificial Sequence: Synthetic oligonucleotide
  Target: LAMA2; (+) strand; PAM type: YTN; PAM sequence: TTT
aaaaagttagttcttctggt

SEQ ID NO: 346921 - DNA, 20 bp, Artificial Sequence
  Description of Artificial Sequence: Synthetic oligonucleotide
  Target: LAMA2; (+) strand; PAM type: YTN; PAM sequence: TTA
aaaagttagttcttctggtg

SEQ ID NO: 346922 - DNA, 20 bp, Artificial Sequence
  Description of Artificial Sequence: Synthetic oligonucleotide
  Target: LAMA2; (+) strand; PAM type: YTN; PAM sequence: TTA
gttcttctggtgtttggtag

SEQ ID NO: 346923 - DNA, 20 bp, Artificial Sequence
  Description of Artificial Sequence: Synthetic oligonucleotide
  Target: LAMA2; (+) strand; PAM type: YTN; PAM sequence: TTC
ttctggtgtttggtagttcc

SEQ ID NO: 346924 - DNA, 20 bp, Artificial Sequence
  Description of Artificial Sequence: Synthetic oligonucleotide
  Target: LAMA2; (+) strand; PAM type: YTN; PAM sequence: CTT
ctggtgtttggtagttccat

SEQ ID NO: 346925 - DNA, 20 bp, Artificial Sequence
  Description of Artificial Sequence: Synthetic oligonucleotide
  Target: LAMA2; (+) strand; PAM type: YTN; PAM sequence: TTC
tggtgtttggtagttccata

SEQ ID NO: 346926 - DNA, 20 bp, Artificial Sequence
  Description of Artificial Sequence: Synthetic oligonucleotide
  Target: LAMA2; (+) strand; PAM type: YTN; PAM sequence: CTG
gtgtttggtagttccatagt

SEQ ID NO: 346927 - DNA, 20 bp, Artificial Sequence
  Description of Artificial Sequence: Synthetic oligonucleotide
  Target: LAMA2; (+) strand; PAM type: YTN; PAM sequence: TTT
ggtagttccatagtagttag

SEQ ID NO: 346928 - DNA, 20 bp, Artificial Sequence
  Description of Artificial Sequence: Synthetic oligonucleotide
  Target: LAMA2; (+) strand; PAM type: YTN; PAM sequence: TTG
gtagttccatagtagttaga

SEQ ID NO: 346929 - DNA, 20 bp, Artificial Sequence
  Description of Artificial Sequence: Synthetic oligonucleotide
  Target: LAMA2; (+) strand; PAM type: YTN; PAM sequence: TTC
catagtagttagaaagcact

SEQ ID NO: 346930 - DNA, 20 bp, Artificial Sequence
  Description of Artificial Sequence: Synthetic oligonucleotide
  Target: LAMA2; (+) strand; PAM type: YTN; PAM sequence: TTA
gaaagcactgccacatgaaa

SEQ ID NO: 346931 - DNA, 20 bp, Artificial Sequence
  Description of Artificial Sequence: Synthetic oligonucleotide
  Target: LAMA2; (+) strand; PAM type: YTN; PAM sequence: CTG
ccacatgaaatctgctattg

SEQ ID NO: 346932 - DNA, 20 bp, Artificial Sequence
  Description of Artificial Sequence: Synthetic oligonucleotide
  Target: LAMA2; (+) strand; PAM type: YTN; PAM sequence: CTG
ctattggtagaaaaagaaaa

SEQ ID NO: 346933 - DNA, 20 bp, Artificial Sequence
  Description of Artificial Sequence: Synthetic oligonucleotide
  Target: LAMA2; (+) strand; PAM type: YTN; PAM sequence: CTA
ttggtagaaaaagaaaatgt

SEQ ID NO: 346934 - DNA, 20 bp, Artificial Sequence
  Description of Artificial Sequence: Synthetic oligonucleotide
  Target: LAMA2; (+) strand; PAM type: YTN; PAM sequence: TTG
gtagaaaaagaaaatgttac

SEQ ID NO: 346935 - DNA, 20 bp, Artificial Sequence
  Description of Artificial Sequence: Synthetic oligonucleotide
  Target: LAMA2; (+) strand; PAM type: YTN; PAM sequence: TTA
cagccaactctgatacaaca

SEQ ID NO: 346936 - DNA, 20 bp, Artificial Sequence
  Description of Artificial Sequence: Synthetic oligonucleotide
  Target: LAMA2; (+) strand; PAM type: YTN; PAM sequence: CTC
tgatacaacatgagagagag

SEQ ID NO: 346937 - DNA, 20 bp, Artificial Sequence
  Description of Artificial Sequence: Synthetic oligonucleotide
  Target: LAMA2; (+) strand; PAM type: YTN; PAM sequence: CTG
atacaacatgagagagagac

SEQ ID NO: 346938 - DNA, 20 bp, Artificial Sequence
  Description of Artificial Sequence: Synthetic oligonucleotide
  Target: LAMA2; (+) strand; PAM type: YTN; PAM sequence: TTC
ttctttgaccagcaggaaaa

SEQ ID NO: 346939 - DNA, 20 bp, Artificial Sequence
  Description of Artificial Sequence: Synthetic oligonucleotide
  Target: LAMA2; (+) strand; PAM type: YTN; PAM sequence: CTT
ctttgaccagcaggaaaaaa

SEQ ID NO: 346940 - DNA, 20 bp, Artificial Sequence
  Description of Artificial Sequence: Synthetic oligonucleotide
  Target: LAMA2; (+) strand; PAM type: YTN; PAM sequence: TTC
tttgaccagcaggaaaaaaa

SEQ ID NO: 346941 - DNA, 20 bp, Artificial Sequence
  Description of Artificial Sequence: Synthetic oligonucleotide
  Target: LAMA2; (+) strand; PAM type: YTN; PAM sequence: CTT
tgaccagcaggaaaaaaaaa

SEQ ID NO: 346942 - DNA, 20 bp, Artificial Sequence
  Description of Artificial Sequence: Synthetic oligonucleotide
  Target: LAMA2; (+) strand; PAM type: YTN; PAM sequence: TTT
gaccagcaggaaaaaaaaaa

SEQ ID NO: 346943 - DNA, 20 bp, Artificial Sequence
  Description of Artificial Sequence: Synthetic oligonucleotide
  Target: LAMA2; (+) strand; PAM type: YTN; PAM sequence: TTG
accagcaggaaaaaaaaaaa

SEQ ID NO: 346944 - DNA, 20 bp, Artificial Sequence
  Description of Artificial Sequence: Synthetic oligonucleotide
  Target: LAMA2; (+) strand; PAM type: YTN; PAM sequence: CTG
cacaaaccttttaactagtt

SEQ ID NO: 346945 - DNA, 20 bp, Artificial Sequence
  Description of Artificial Sequence: Synthetic oligonucleotide
  Target: LAMA2; (+) strand; PAM type: YTN; PAM sequence: CTT
ttaactagtttcactagcag

SEQ ID NO: 346946 - DNA, 20 bp, Artificial Sequence
  Description of Artificial Sequence: Synthetic oligonucleotide
  Target: LAMA2; (+) strand; PAM type: YTN; PAM sequence: TTT
taactagtttcactagcaga

SEQ ID NO: 346947 - DNA, 20 bp, Artificial Sequence
  Description of Artificial Sequence: Synthetic oligonucleotide
  Target: LAMA2; (+) strand; PAM type: YTN; PAM sequence: TTT
aactagtttcactagcagaa

SEQ ID NO: 346948 - DNA, 20 bp, Artificial Sequence
  Description of Artificial Sequence: Synthetic oligonucleotide
  Target: LAMA2; (+) strand; PAM type: YTN; PAM sequence: TTA
actagtttcactagcagaaa

SEQ ID NO: 346949 - DNA, 20 bp, Artificial Sequence
  Description of Artificial Sequence: Synthetic oligonucleotide
  Target: LAMA2; (+) strand; PAM type: YTN; PAM sequence: CTA
gtttcactagcagaaaagaa

SEQ ID NO: 346950 - DNA, 20 bp, Artificial Sequence
  Description of Artificial Sequence: Synthetic oligonucleotide
  Target: LAMA2; (+) strand; PAM type: YTN; PAM sequence: TTT
cactagcagaaaagaaaaat

SEQ ID NO: 346951 - DNA, 20 bp, Artificial Sequence
  Description of Artificial Sequence: Synthetic oligonucleotide
  Target: LAMA2; (+) strand; PAM type: YTN; PAM sequence: TTC
actagcagaaaagaaaaata

SEQ ID NO: 346952 - DNA, 20 bp, Artificial Sequence
  Description of Artificial Sequence: Synthetic oligonucleotide
  Target: LAMA2; (+) strand; PAM type: YTN; PAM sequence: CTA
gcagaaaagaaaaataaaaa

SEQ ID NO: 346953 - DNA, 20 bp, Artificial Sequence
  Description of Artificial Sequence: Synthetic oligonucleotide
  Target: LAMA2; (+) strand; PAM type: YTN; PAM sequence: CTT
taaagaaaactgattttctt

SEQ ID NO: 346954 - DNA, 20 bp, Artificial Sequence
  Description of Artificial Sequence: Synthetic oligonucleotide
  Target: LAMA2; (+) strand; PAM type: YTN; PAM sequence: TTT
aaagaaaactgattttctta

SEQ ID NO: 346955 - DNA, 20 bp, Artificial Sequence
  Description of Artificial Sequence: Synthetic oligonucleotide
  Target: LAMA2; (+) strand; PAM type: YTN; PAM sequence: TTA
aagaaaactgattttcttat

SEQ ID NO: 346956 - DNA, 20 bp, Artificial Sequence
  Description of Artificial Sequence: Synthetic oligonucleotide
  Target: LAMA2; (+) strand; PAM type: YTN; PAM sequence: CTG
attttcttattatgctgaaa

SEQ ID NO: 346957 - DNA, 20 bp, Artificial Sequence
  Description of Artificial Sequence: Synthetic oligonucleotide
  Target: LAMA2; (+) strand; PAM type: YTN; PAM sequence: TTT
tcttattatgctgaaattta

SEQ ID NO: 346958 - DNA, 20 bp, Artificial Sequence
  Description of Artificial Sequence: Synthetic oligonucleotide
  Target: LAMA2; (+) strand; PAM type: YTN; PAM sequence: TTT
cttattatgctgaaatttat

SEQ ID NO: 346959 - DNA, 20 bp, Artificial Sequence
  Description of Artificial Sequence: Synthetic oligonucleotide
  Target: LAMA2; (+) strand; PAM type: YTN; PAM sequence: TTC
ttattatgctgaaatttatt

SEQ ID NO: 346960 - DNA, 20 bp, Artificial Sequence
  Description of Artificial Sequence: Synthetic oligonucleotide
  Target: LAMA2; (+) strand; PAM type: YTN; PAM sequence: CTT
attatgctgaaatttattaa

SEQ ID NO: 346961 - DNA, 20 bp, Artificial Sequence
  Description of Artificial Sequence: Synthetic oligonucleotide
  Target: LAMA2; (+) strand; PAM type: YTN; PAM sequence: TTA
ttatgctgaaatttattaaa

SEQ ID NO: 346962 - DNA, 20 bp, Artificial Sequence
  Description of Artificial Sequence: Synthetic oligonucleotide
  Target: LAMA2; (+) strand; PAM type: YTN; PAM sequence: TTA
tgctgaaatttattaaagac

SEQ ID NO: 346963 - DNA, 20 bp, Artificial Sequence
  Description of Artificial Sequence: Synthetic oligonucleotide
  Target: LAMA2; (+) strand; PAM type: YTN; PAM sequence: CTG
aaatttattaaagactgttg

SEQ ID NO: 346964 - DNA, 20 bp, Artificial Sequence
  Description of Artificial Sequence: Synthetic oligonucleotide
  Target: LAMA2; (+) strand; PAM type: YTN; PAM sequence: TTT
attaaagactgttgtgttga

SEQ ID NO: 346965 - DNA, 20 bp, Artificial Sequence
  Description of Artificial Sequence: Synthetic oligonucleotide
  Target: LAMA2; (+) strand; PAM type: YTN; PAM sequence: TTA
ttaaagactgttgtgttgac

SEQ ID NO: 346966 - DNA, 20 bp, Artificial Sequence
  Description of Artificial Sequence: Synthetic oligonucleotide
  Target: LAMA2; (+) strand; PAM type: YTN; PAM sequence: TTA
aagactgttgtgttgactga

SEQ ID NO: 346967 - DNA, 20 bp, Artificial Sequence
  Description of Artificial Sequence: Synthetic oligonucleotide
  Target: LAMA2; (+) strand; PAM type: YTN; PAM sequence: CTG
ttgtgttgactgaagaatat

SEQ ID NO: 346968 - DNA, 20 bp, Artificial Sequence
  Description of Artificial Sequence: Synthetic oligonucleotide
  Target: LAMA2; (+) strand; PAM type: YTN; PAM sequence: TTG
tgttgactgaagaatatgtt

SEQ ID NO: 346969 - DNA, 20 bp, Artificial Sequence
  Description of Artificial Sequence: Synthetic oligonucleotide
  Target: LAMA2; (+) strand; PAM type: YTN; PAM sequence: TTG
actgaagaatatgtttaaat

SEQ ID NO: 346970 - DNA, 20 bp, Artificial Sequence
  Description of Artificial Sequence: Synthetic oligonucleotide
  Target: LAMA2; (+) strand; PAM type: YTN; PAM sequence: CTG
aagaatatgtttaaatattt

SEQ ID NO: 346971 - DNA, 20 bp, Artificial Sequence
  Description of Artificial Sequence: Synthetic oligonucleotide
  Target: LAMA2; (+) strand; PAM type: YTN; PAM sequence: TTT
aaatattttgtggaaggcaa

SEQ ID NO: 346972 - DNA, 20 bp, Artificial Sequence
  Description of Artificial Sequence: Synthetic oligonucleotide
  Target: LAMA2; (+) strand; PAM type: YTN; PAM sequence: TTA
aatattttgtggaaggcaaa

SEQ ID NO: 346973 - DNA, 20 bp, Artificial Sequence
  Description of Artificial Sequence: Synthetic oligonucleotide
  Target: LAMA2; (+) strand; PAM type: YTN; PAM sequence: TTT
tgtggaaggcaaagctttca

SEQ ID NO: 346974 - DNA, 20 bp, Artificial Sequence
  Description of Artificial Sequence: Synthetic oligonucleotide
  Target: LAMA2; (+) strand; PAM type: YTN; PAM sequence: TTT
gtggaaggcaaagctttcat

SEQ ID NO: 346975 - DNA, 20 bp, Artificial Sequence
  Description of Artificial Sequence: Synthetic oligonucleotide
  Target: LAMA2; (+) strand; PAM type: YTN; PAM sequence: TTG
tggaaggcaaagctttcatt

SEQ ID NO: 346976 - DNA, 20 bp, Artificial Sequence
  Description of Artificial Sequence: Synthetic oligonucleotide
  Target: LAMA2; (+) strand; PAM type: YTN; PAM sequence: CTT
tcattcaggaatgacaagtg

SEQ ID NO: 346977 - DNA, 20 bp, Artificial Sequence
  Description of Artificial Sequence: Synthetic oligonucleotide
  Target: LAMA2; (+) strand; PAM type: YTN; PAM sequence: TTT
cattcaggaatgacaagtgc

SEQ ID NO: 346978 - DNA, 20 bp, Artificial Sequence
  Description of Artificial Sequence: Synthetic oligonucleotide
  Target: LAMA2; (+) strand; PAM type: YTN; PAM sequence: TTC
attcaggaatgacaagtgca

SEQ ID NO: 346979 - DNA, 20 bp, Artificial Sequence
  Description of Artificial Sequence: Synthetic oligonucleotide
  Target: LAMA2; (+) strand; PAM type: YTN; PAM sequence: TTC
aggaatgacaagtgcaagga

SEQ ID NO: 346980 - DNA, 20 bp, Artificial Sequence
  Description of Artificial Sequence: Synthetic oligonucleotide
  Target: LAMA2; (+) strand; PAM type: YTN; PAM sequence: CTG
taattctaaagaaattaaag

SEQ ID NO: 346981 - DNA, 20 bp, Artificial Sequence
  Description of Artificial Sequence: Synthetic oligonucleotide
  Target: LAMA2; (+) strand; PAM type: YTN; PAM sequence: TTC
taaagaaattaaagaaaaga

SEQ ID NO: 346982 - DNA, 20 bp, Artificial Sequence
  Description of Artificial Sequence: Synthetic oligonucleotide
  Target: LAMA2; (+) strand; PAM type: YTN; PAM sequence: CTA
aagaaattaaagaaaagaag

SEQ ID NO: 346983 - DNA, 20 bp, Artificial Sequence
  Description of Artificial Sequence: Synthetic oligonucleotide
  Target: LAMA2; (+) strand; PAM type: YTN; PAM sequence: TTA
aagaaaagaagaatggcaat

SEQ ID NO: 346984 - DNA, 20 bp, Artificial Sequence
  Description of Artificial Sequence: Synthetic oligonucleotide
  Target: LAMA2; (+) strand; PAM type: YTN; PAM sequence: TTT
aagttcagggacaattggaa

SEQ ID NO: 346985 - DNA, 20 bp, Artificial Sequence
  Description of Artificial Sequence: Synthetic oligonucleotide
  Target: LAMA2; (+) strand; PAM type: YTN; PAM sequence: TTA
agttcagggacaattggaat

SEQ ID NO: 346986 - DNA, 20 bp, Artificial Sequence
  Description of Artificial Sequence: Synthetic oligonucleotide
  Target: LAMA2; (+) strand; PAM type: YTN; PAM sequence: TTC
agggacaattggaatcaagc

SEQ ID NO: 346987 - DNA, 20 bp, Artificial Sequence
  Description of Artificial Sequence: Synthetic oligonucleotide
  Target: LAMA2; (+) strand; PAM type: YTN; PAM sequence: TTG
gaatcaagcagtaatgattt

SEQ ID NO: 346988 - DNA, 20 bp, Artificial Sequence
  Description of Artificial Sequence: Synthetic oligonucleotide
  Target: LAMA2; (+) strand; PAM type: YTN; PAM sequence: TTT
acagctttttaaaattttca

SEQ ID NO: 346989 - DNA, 20 bp, Artificial Sequence
  Description of Artificial Sequence: Synthetic oligonucleotide
  Target: LAMA2; (+) strand; PAM type: YTN; PAM sequence: TTA
cagctttttaaaattttcag

SEQ ID NO: 346990 - DNA, 20 bp, Artificial Sequence
  Description of Artificial Sequence: Synthetic oligonucleotide
  Target: LAMA2; (+) strand; PAM type: YTN; PAM sequence: CTT
tttaaaattttcaggcactt

SEQ ID NO: 346991 - DNA, 20 bp, Artificial Sequence
  Description of Artificial Sequence: Synthetic oligonucleotide
  Target: LAMA2; (+) strand; PAM type: YTN; PAM sequence: TTT
ttaaaattttcaggcactta

SEQ ID NO: 346992 - DNA, 20 bp, Artificial Sequence
  Description of Artificial Sequence: Synthetic oligonucleotide
  Target: LAMA2; (+) strand; PAM type: YTN; PAM sequence: TTT
taaaattttcaggcacttag

SEQ ID NO: 346993 - DNA, 20 bp, Artificial Sequence
  Description of Artificial Sequence: Synthetic oligonucleotide
  Target: LAMA2; (+) strand; PAM type: YTN; PAM sequence: TTT
aaaattttcaggcacttagt

SEQ ID NO: 346994 - DNA, 20 bp, Artificial Sequence
  Description of Artificial Sequence: Synthetic oligonucleotide
  Target: LAMA2; (+) strand; PAM type: YTN; PAM sequence: TTA
aaattttcaggcacttagtg

SEQ ID NO: 346995 - DNA, 20 bp, Artificial Sequence
  Description of Artificial Sequence: Synthetic oligonucleotide
  Target: LAMA2; (+) strand; PAM type: YTN; PAM sequence: TTT
tcaggcacttagtggtcagt

SEQ ID NO: 346996 - DNA, 20 bp, Artificial Sequence
  Description of Artificial Sequence: Synthetic oligonucleotide
  Target: LAMA2; (+) strand; PAM type: YTN; PAM sequence: TTT
caggcacttagtggtcagtg

SEQ ID NO: 346997 - DNA, 20 bp, Artificial Sequence
  Description of Artificial Sequence: Synthetic oligonucleotide
  Target: LAMA2; (+) strand; PAM type: YTN; PAM sequence: TTC
aggcacttagtggtcagtgt

SEQ ID NO: 346998 - DNA, 20 bp, Artificial Sequence
  Description of Artificial Sequence: Synthetic oligonucleotide
  Target: LAMA2; (+) strand; PAM type: YTN; PAM sequence: CTT
agtggtcagtgttcctttta

SEQ ID NO: 346999 - DNA, 20 bp, Artificial Sequence
  Description of Artificial Sequence: Synthetic oligonucleotide
  Target: LAMA2; (+) strand; PAM type: YTN; PAM sequence: TTA
gtggtcagtgttccttttat

SEQ ID NO: 347000 - DNA, 20 bp, Artificial Sequence
  Description of Artificial Sequence: Synthetic oligonucleotide
  Target: LAMA2; (+) strand; PAM type: YTN; PAM sequence: TTC
cttttatgcgttatgaccag

SEQ ID NO: 347001 - DNA, 20 bp, Artificial Sequence
  Description of Artificial Sequence: Synthetic oligonucleotide
  Target: LAMA2; (+) strand; PAM type: YTN; PAM sequence: CTT
ttatgcgttatgaccagtgg

SEQ ID NO: 347002 - DNA, 20 bp, Artificial Sequence
  Description of Artificial Sequence: Synthetic oligonucleotide
  Target: LAMA2; (+) strand; PAM type: YTN; PAM sequence: TTT
tatgcgttatgaccagtggg

SEQ ID NO: 347003 - DNA, 20 bp, Artificial Sequence
  Description of Artificial Sequence: Synthetic oligonucleotide
  Target: LAMA2; (+) strand; PAM type: YTN; PAM sequence: TTT
atgcgttatgaccagtggga

SEQ ID NO: 347004 - DNA, 20 bp, Artificial Sequence
  Description of Artificial Sequence: Synthetic oligonucleotide
  Target: LAMA2; (+) strand; PAM type: YTN; PAM sequence: TTA
tgcgttatgaccagtgggaa

SEQ ID NO: 347005 - DNA, 20 bp, Artificial Sequence
  Description of Artificial Sequence: Synthetic oligonucleotide
  Target: LAMA2; (+) strand; PAM type: YTN; PAM sequence: TTA
tgaccagtgggaaggatacc

SEQ ID NO: 347006 - DNA, 20 bp, Artificial Sequence
  Description of Artificial Sequence: Synthetic oligonucleotide
  Target: LAMA2; (+) strand; PAM type: YTN; PAM sequence: CTT
ccattcagttattatgggtt

SEQ ID NO: 347007 - DNA, 20 bp, Artificial Sequence
  Description of Artificial Sequence: Synthetic oligonucleotide
  Target: LAMA2; (+) strand; PAM type: YTN; PAM sequence: TTC
cattcagttattatgggtta

SEQ ID NO: 347008 - DNA, 20 bp, Artificial Sequence
  Description of Artificial Sequence: Synthetic oligonucleotide
  Target: LAMA2; (+) strand; PAM type: YTN; PAM sequence: TTC
agttattatgggttacaggt

SEQ ID NO: 347009 - DNA, 20 bp, Artificial Sequence
  Description of Artificial Sequence: Synthetic oligonucleotide
  Target: LAMA2; (+) strand; PAM type: YTN; PAM sequence: TTA
ttatgggttacaggtcaccc

SEQ ID NO: 347010 - DNA, 20 bp, Artificial Sequence
  Description of Artificial Sequence: Synthetic oligonucleotide
  Target: LAMA2; (+) strand; PAM type: YTN; PAM sequence: TTA
tgggttacaggtcacccatc

SEQ ID NO: 347011 - DNA, 20 bp, Artificial Sequence
  Description of Artificial Sequence: Synthetic oligonucleotide
  Target: LAMA2; (+) strand; PAM type: YTN; PAM sequence: TTA
caggtcacccatccgtgacc

SEQ ID NO: 347012 - DNA, 20 bp, Artificial Sequence
  Description of Artificial Sequence: Synthetic oligonucleotide
  Target: LAMA2; (+) strand; PAM type: YTN; PAM sequence: CTG
tggtcacagtgttaggtatc

SEQ ID NO: 347013 - DNA, 20 bp, Artificial Sequence
  Description of Artificial Sequence: Synthetic oligonucleotide
  Target: LAMA2; (+) strand; PAM type: YTN; PAM sequence: TTA
ggtatcgaaagcataatacc

SEQ ID NO: 347014 - DNA, 20 bp, Artificial Sequence
  Description of Artificial Sequence: Synthetic oligonucleotide
  Target: LAMA2; (+) strand; PAM type: YTN; PAM sequence: CTT
cttatctaagaaggaaagac

SEQ ID NO: 347015 - DNA, 20 bp, Artificial Sequence
  Description of Artificial Sequence: Synthetic oligonucleotide
  Target: LAMA2; (+) strand; PAM type: YTN; PAM sequence: TTC
ttatctaagaaggaaagacc

SEQ ID NO: 347016 - DNA, 20 bp, Artificial Sequence
  Description of Artificial Sequence: Synthetic oligonucleotide
  Target: LAMA2; (+) strand; PAM type: YTN; PAM sequence: CTT
atctaagaaggaaagacctg

SEQ ID NO: 347017 - DNA, 20 bp, Artificial Sequence
  Description of Artificial Sequence: Synthetic oligonucleotide
  Target: LAMA2; (+) strand; PAM type: YTN; PAM sequence: TTA
tctaagaaggaaagacctgt

SEQ ID NO: 347018 - DNA, 20 bp, Artificial Sequence
  Description of Artificial Sequence: Synthetic oligonucleotide
  Target: LAMA2; (+) strand; PAM type: YTN; PAM sequence: CTA
agaaggaaagacctgttaag

SEQ ID NO: 347019 - DNA, 20 bp, Artificial Sequence
  Description of Artificial Sequence: Synthetic oligonucleotide
  Target: LAMA2; (+) strand; PAM type: YTN; PAM sequence: CTG
ttaagtctaagcttaggggt

SEQ ID NO: 347020 - DNA, 20 bp, Artificial Sequence
  Description of Artificial Sequence: Synthetic oligonucleotide
  Target: LAMA2; (+) strand; PAM type: YTN; PAM sequence: TTA
agtctaagcttaggggtaga

SEQ ID NO: 347021 - DNA, 20 bp, Artificial Sequence
  Description of Artificial Sequence: Synthetic oligonucleotide
  Target: LAMA2; (+) strand; PAM type: YTN; PAM sequence: CTA
agcttaggggtagagttgtc

SEQ ID NO: 347022 - DNA, 20 bp, Artificial Sequence
  Description of Artificial Sequence: Synthetic oligonucleotide
  Target: LAMA2; (+) strand; PAM type: YTN; PAM sequence: CTT
aggggtagagttgtcaacga

SEQ ID NO: 347023 - DNA, 20 bp, Artificial Sequence
  Description of Artificial Sequence: Synthetic oligonucleotide
  Target: LAMA2; (+) strand; PAM type: YTN; PAM sequence: TTA
ggggtagagttgtcaacgat

SEQ ID NO: 347024 - DNA, 20 bp, Artificial Sequence
  Description of Artificial Sequence: Synthetic oligonucleotide
  Target: LAMA2; (+) strand; PAM type: YTN; PAM sequence: TTG
tcaacgatacagtcatattt

SEQ ID NO: 347025 - DNA, 20 bp, Artificial Sequence
  Description of Artificial Sequence: Synthetic oligonucleotide
  Target: LAMA2; (+) strand; PAM type: YTN; PAM sequence: TTT
gttgaacagttcaagttgcc

SEQ ID NO: 347026 - DNA, 20 bp, Artificial Sequence
  Description of Artificial Sequence: Synthetic oligonucleotide
  Target: LAMA2; (+) strand; PAM type: YTN; PAM sequence: TTG
ttgaacagttcaagttgcca

SEQ ID NO: 347027 - DNA, 20 bp, Artificial Sequence
  Description of Artificial Sequence: Synthetic oligonucleotide
  Target: LAMA2; (+) strand; PAM type: YTN; PAM sequence: TTG
aacagttcaagttgccattt

SEQ ID NO: 347028 - DNA, 20 bp, Artificial Sequence
  Description of Artificial Sequence: Synthetic oligonucleotide
  Target: LAMA2; (+) strand; PAM type: YTN; PAM sequence: TTC
aagttgccatttcttgtatt

SEQ ID NO: 347029 - DNA, 20 bp, Artificial Sequence
  Description of Artificial Sequence: Synthetic oligonucleotide
  Target: LAMA2; (+) strand; PAM type: YTN; PAM sequence: TTG
ccatttcttgtattcttgga

SEQ ID NO: 347030 - DNA, 20 bp, Artificial Sequence
  Description of Artificial Sequence: Synthetic oligonucleotide
  Target: LAMA2; (+) strand; PAM type: YTN; PAM sequence: TTT
cttgtattcttggaagaggt

SEQ ID NO: 347031 - DNA, 20 bp, Artificial Sequence
  Description of Artificial Sequence: Synthetic oligonucleotide
  Target: LAMA2; (+) strand; PAM type: YTN; PAM sequence: TTC
ttgtattcttggaagaggta

SEQ ID NO: 347032 - DNA, 20 bp, Artificial Sequence
  Description of Artificial Sequence: Synthetic oligonucleotide
  Target: LAMA2; (+) strand; PAM type: YTN; PAM sequence: CTT
gtattcttggaagaggtaag

SEQ ID NO: 347033 - DNA, 20 bp, Artificial Sequence
  Description of Artificial Sequence: Synthetic oligonucleotide
  Target: LAMA2; (+) strand; PAM type: YTN; PAM sequence: TTG
tattcttggaagaggtaagt

SEQ ID NO: 347034 - DNA, 20 bp, Artificial Sequence
  Description of Artificial Sequence: Synthetic oligonucleotide
  Target: LAMA2; (+) strand; PAM type: YTN; PAM sequence: TTC
ttggaagaggtaagttaaag

SEQ ID NO: 347035 - DNA, 20 bp, Artificial Sequence
  Description of Artificial Sequence: Synthetic oligonucleotide
  Target: LAMA2; (+) strand; PAM type: YTN; PAM sequence: CTT
ggaagaggtaagttaaagaa

SEQ ID NO: 347036 - DNA, 20 bp, Artificial Sequence
  Description of Artificial Sequence: Synthetic oligonucleotide
  Target: LAMA2; (+) strand; PAM type: YTN; PAM sequence: TTG
gaagaggtaagttaaagaag

SEQ ID NO: 347037 - DNA, 20 bp, Artificial Sequence
  Description of Artificial Sequence: Synthetic oligonucleotide
  Target: LAMA2; (+) strand; PAM type: YTN; PAM sequence: TTA
aagaaggttgtgcacagttc

SEQ ID NO: 347038 - DNA, 20 bp, Artificial Sequence
  Description of Artificial Sequence: Synthetic oligonucleotide
  Target: LAMA2; (+) strand; PAM type: YTN; PAM sequence: TTG
tgcacagttcttgacatttt

SEQ ID NO: 347039 - DNA, 20 bp, Artificial Sequence
  Description of Artificial Sequence: Synthetic oligonucleotide
  Target: LAMA2; (+) strand; PAM type: YTN; PAM sequence: TTC
ttgacattttattattacag

SEQ ID NO: 347040 - DNA, 20 bp, Artificial Sequence
  Description of Artificial Sequence: Synthetic oligonucleotide
  Target: LAMA2; (+) strand; PAM type: YTN; PAM sequence: CTT
gacattttattattacagca

SEQ ID NO: 347041 - DNA, 20 bp, Artificial Sequence
  Description of Artificial Sequence: Synthetic oligonucleotide
  Target: LAMA2; (+) strand; PAM type: YTN; PAM sequence: TTG
acattttattattacagcac

SEQ ID NO: 347042 - DNA, 20 bp, Artificial Sequence
  Description of Artificial Sequence: Synthetic oligonucleotide
  Target: LAMA2; (+) strand; PAM type: YTN; PAM sequence: TTT
tattattacagcactacctt

SEQ ID NO: 347043 - DNA, 20 bp, Artificial Sequence
  Description of Artificial Sequence: Synthetic oligonucleotide
  Target: LAMA2; (+) strand; PAM type: YTN; PAM sequence: TTT
attattacagcactaccttt

SEQ ID NO: 347044 - DNA, 20 bp, Artificial Sequence
  Description of Artificial Sequence: Synthetic oligonucleotide
  Target: LAMA2; (+) strand; PAM type: YTN; PAM sequence: TTA
ttattacagcactacctttc

SEQ ID NO: 347045 - DNA, 20 bp, Artificial Sequence
  Description of Artificial Sequence: Synthetic oligonucleotide
  Target: LAMA2; (+) strand; PAM type: YTN; PAM sequence: TTA
ttacagcactacctttcaag

SEQ ID NO: 347046 - DNA, 20 bp, Artificial Sequence
  Description of Artificial Sequence: Synthetic oligonucleotide
  Target: LAMA2; (+) strand; PAM type: YTN; PAM sequence: TTA
cagcactacctttcaagcca

SEQ ID NO: 347047 - DNA, 20 bp, Artificial Sequence
  Description of Artificial Sequence: Synthetic oligonucleotide
  Target: LAMA2; (+) strand; PAM type: YTN; PAM sequence: CTA
cctttcaagccactcagtag

SEQ ID NO: 347048 - DNA, 20 bp, Artificial Sequence
  Description of Artificial Sequence: Synthetic oligonucleotide
  Target: LAMA2; (+) strand; PAM type: YTN; PAM sequence: CTT
tcaagccactcagtagtcat

SEQ ID NO: 347049 - DNA, 20 bp, Artificial Sequence
  Description of Artificial Sequence: Synthetic oligonucleotide
  Target: LAMA2; (+) strand; PAM type: YTN; PAM sequence: TTT
caagccactcagtagtcatc

SEQ ID NO: 347050 - DNA, 20 bp, Artificial Sequence
  Description of Artificial Sequence: Synthetic oligonucleotide
  Target: LAMA2; (+) strand; PAM type: YTN; PAM sequence: TTC
aagccactcagtagtcatcg

SEQ ID NO: 347051 - DNA, 20 bp, Artificial Sequence
  Description of Artificial Sequence: Synthetic oligonucleotide
  Target: LAMA2; (+) strand; PAM type: YTN; PAM sequence: CTC
agtagtcatcggacatgtaa

SEQ ID NO: 347052 - DNA, 20 bp, Artificial Sequence
  Description of Artificial Sequence: Synthetic oligonucleotide
  Target: LAMA2; (+) strand; PAM type: YTN; PAM sequence: TTG
ttctatttggtcgtgtaaat

SEQ ID NO: 347053 - DNA, 20 bp, Artificial Sequence
  Description of Artificial Sequence: Synthetic oligonucleotide
  Target: LAMA2; (+) strand; PAM type: YTN; PAM sequence: TTC
tatttggtcgtgtaaatttc

SEQ ID NO: 347054 - DNA, 20 bp, Artificial Sequence
  Description of Artificial Sequence: Synthetic oligonucleotide
  Target: LAMA2; (+) strand; PAM type: YTN; PAM sequence: CTA
tttggtcgtgtaaatttcta

SEQ ID NO: 347055 - DNA, 20 bp, Artificial Sequence
  Description of Artificial Sequence: Synthetic oligonucleotide
  Target: LAMA2; (+) strand; PAM type: YTN; PAM sequence: TTT
ggtcgtgtaaatttctagtg

SEQ ID NO: 347056 - DNA, 20 bp, Artificial Sequence
  Description of Artificial Sequence: Synthetic oligonucleotide
  Target: LAMA2; (+) strand; PAM type: YTN; PAM sequence: TTG
gtcgtgtaaatttctagtga

SEQ ID NO: 347057 - DNA, 20 bp, Artificial Sequence
  Description of Artificial Sequence: Synthetic oligonucleotide
  Target: LAMA2; (+) strand; PAM type: YTN; PAM sequence: TTT
ctagtgacagtaggaaaaaa

SEQ ID NO: 347058 - DNA, 20 bp, Artificial Sequence
  Description of Artificial Sequence: Synthetic oligonucleotide
  Target: LAMA2; (+) strand; PAM type: YTN; PAM sequence: TTC
tagtgacagtaggaaaaaaa

SEQ ID NO: 347059 - DNA, 20 bp, Artificial Sequence
  Description of Artificial Sequence: Synthetic oligonucleotide
  Target: LAMA2; (+) strand; PAM type: YTN; PAM sequence: CTA
gtgacagtaggaaaaaaaaa

SEQ ID NO: 347060 - DNA, 20 bp, Artificial Sequence
  Description of Artificial Sequence: Synthetic oligonucleotide
  Target: LAMA2; (+) strand; PAM type: YTN; PAM sequence: CTT
tattaaagaccttccaaact

SEQ ID NO: 347061 - DNA, 20 bp, Artificial Sequence
  Description of Artificial Sequence: Synthetic oligonucleotide
  Target: LAMA2; (+) strand; PAM type: YTN; PAM sequence: TTT
attaaagaccttccaaacta

SEQ ID NO: 347062 - DNA, 20 bp, Artificial Sequence
  Description of Artificial Sequence: Synthetic oligonucleotide
  Target: LAMA2; (+) strand; PAM type: YTN; PAM sequence: TTA
ttaaagaccttccaaactaa

SEQ ID NO: 347063 - DNA, 20 bp, Artificial Sequence
  Description of Artificial Sequence: Synthetic oligonucleotide
  Target: LAMA2; (+) strand; PAM type: YTN; PAM sequence: TTA
aagaccttccaaactaattc

SEQ ID NO: 347064 - DNA, 20 bp, Artificial Sequence
  Description of Artificial Sequence: Synthetic oligonucleotide
  Target: LAMA2; (+) strand; PAM type: YTN; PAM sequence: CTT
ccaaactaattcagtgccct

SEQ ID NO: 347065 - DNA, 20 bp, Artificial Sequence
  Description of Artificial Sequence: Synthetic oligonucleotide
  Target: LAMA2; (+) strand; PAM type: YTN; PAM sequence: TTC
caaactaattcagtgcccta

SEQ ID NO: 347066 - DNA, 20 bp, Artificial Sequence
  Description of Artificial Sequence: Synthetic oligonucleotide
  Target: LAMA2; (+) strand; PAM type: YTN; PAM sequence: CTA
attcagtgccctacatgctg

SEQ ID NO: 347067 - DNA, 20 bp, Artificial Sequence
  Description of Artificial Sequence: Synthetic oligonucleotide
  Target: LAMA2; (+) strand; PAM type: YTN; PAM sequence: TTC
agtgccctacatgctgcatg

SEQ ID NO: 347068 - DNA, 20 bp, Artificial Sequence
  Description of Artificial Sequence: Synthetic oligonucleotide
  Target: LAMA2; (+) strand; PAM type: YTN; PAM sequence: CTA
catgctgcatgaaaatgagg

SEQ ID NO: 347069 - DNA, 20 bp, Artificial Sequence
  Description of Artificial Sequence: Synthetic oligonucleotide
  Target: LAMA2; (+) strand; PAM type: YTN; PAM sequence: CTG
catgaaaatgaggactttcc

SEQ ID NO: 347070 - DNA, 20 bp, Artificial Sequence
  Description of Artificial Sequence: Synthetic oligonucleotide
  Target: LAMA2; (+) strand; PAM type: YTN; PAM sequence: CTT
tccagttctgagtagaagga

SEQ ID NO: 347071 - DNA, 20 bp, Artificial Sequence
  Description of Artificial Sequence: Synthetic oligonucleotide
  Target: LAMA2; (+) strand; PAM type: YTN; PAM sequence: TTT
ccagttctgagtagaaggaa

SEQ ID NO: 347072 - DNA, 20 bp, Artificial Sequence
  Description of Artificial Sequence: Synthetic oligonucleotide
  Target: LAMA2; (+) strand; PAM type: YTN; PAM sequence: TTC
cagttctgagtagaaggaat

SEQ ID NO: 347073 - DNA, 20 bp, Artificial Sequence
  Description of Artificial Sequence: Synthetic oligonucleotide
  Target: LAMA2; (+) strand; PAM type: YTN; PAM sequence: TTC
tgagtagaaggaatattaag

SEQ ID NO: 347074 - DNA, 20 bp, Artificial Sequence
  Description of Artificial Sequence: Synthetic oligonucleotide
  Target: LAMA2; (+) strand; PAM type: YTN; PAM sequence: CTG
agtagaaggaatattaaggc

SEQ ID NO: 347075 - DNA, 20 bp, Artificial Sequence
  Description of Artificial Sequence: Synthetic oligonucleotide
  Target: LAMA2; (+) strand; PAM type: YTN; PAM sequence: TTA
aggcacctgaagggacaaat

SEQ ID NO: 347076 - DNA, 20 bp, Artificial Sequence
  Description of Artificial Sequence: Synthetic oligonucleotide
  Target: LAMA2; (+) strand; PAM type: YTN; PAM sequence: CTG
aagggacaaatccatttata

SEQ ID NO: 347077 - DNA, 20 bp, Artificial Sequence
  Description of Artificial Sequence: Synthetic oligonucleotide
  Target: LAMA2; (+) strand; PAM type: YTN; PAM sequence: TTT
ataaaattatttttcttttt

SEQ ID NO: 347078 - DNA, 20 bp, Artificial Sequence
  Description of Artificial Sequence: Synthetic oligonucleotide
  Target: LAMA2; (+) strand; PAM type: YTN; PAM sequence: TTA
taaaattatttttctttttg

SEQ ID NO: 347079 - DNA, 20 bp, Artificial Sequence
  Description of Artificial Sequence: Synthetic oligonucleotide
  Target: LAMA2; (+) strand; PAM type: YTN; PAM sequence: TTA
tttttctttttgtgataaaa

SEQ ID NO: 347080 - DNA, 20 bp, Artificial Sequence
  Description of Artificial Sequence: Synthetic oligonucleotide
  Target: LAMA2; (+) strand; PAM type: YTN; PAM sequence: TTT
ttctttttgtgataaaaata

SEQ ID NO: 347081 - DNA, 20 bp, Artificial Sequence
  Description of Artificial Sequence: Synthetic oligonucleotide
  Target: LAMA2; (+) strand; PAM type: YTN; PAM sequence: TTT
tctttttgtgataaaaatat

SEQ ID NO: 347082 - DNA, 20 bp, Artificial Sequence
  Description of Artificial Sequence: Synthetic oligonucleotide
  Target: LAMA2; (+) strand; PAM type: YTN; PAM sequence: TTT
ctttttgtgataaaaatata

SEQ ID NO: 347083 - DNA, 20 bp, Artificial Sequence
  Description of Artificial Sequence: Synthetic oligonucleotide
  Target: LAMA2; (+) strand; PAM type: YTN; PAM sequence: TTC
tttttgtgataaaaatataa

SEQ ID NO: 347084 - DNA, 20 bp, Artificial Sequence
  Description of Artificial Sequence: Synthetic oligonucleotide
  Target: LAMA2; (+) strand; PAM type: YTN; PAM sequence: CTT
tttgtgataaaaatataaat

SEQ ID NO: 347085 - DNA, 20 bp, Artificial Sequence
  Description of Artificial Sequence: Synthetic oligonucleotide
  Target: LAMA2; (+) strand; PAM type: YTN; PAM sequence: TTT
ttgtgataaaaatataaatg

SEQ ID NO: 347086 - DNA, 20 bp, Artificial Sequence
  Description of Artificial Sequence: Synthetic oligonucleotide
  Target: LAMA2; (+) strand; PAM type: YTN; PAM sequence: TTT
tgtgataaaaatataaatgg

SEQ ID NO: 347087 - DNA, 20 bp, Artificial Sequence
  Description of Artificial Sequence: Synthetic oligonucleotide
  Target: LAMA2; (+) strand; PAM type: YTN; PAM sequence: TTT
gtgataaaaatataaatggc

SEQ ID NO: 347088 - DNA, 20 bp, Artificial Sequence
  Description of Artificial Sequence: Synthetic oligonucleotide
  Target: LAMA2; (+) strand; PAM type: YTN; PAM sequence: TTG
tgataaaaatataaatggct

SEQ ID NO: 347089 - DNA, 20 bp, Artificial Sequence
  Description of Artificial Sequence: Synthetic oligonucleotide
  Target: LAMA2; (+) strand; PAM type: YTN; PAM sequence: CTC
tgctagtatactaaaaaata

SEQ ID NO: 347090 - DNA, 20 bp, Artificial Sequence
  Description of Artificial Sequence: Synthetic oligonucleotide
  Target: LAMA2; (+) strand; PAM type: YTN; PAM sequence: CTG
ctagtatactaaaaaatata

SEQ ID NO: 347091 - DNA, 20 bp, Artificial Sequence
  Description of Artificial Sequence: Synthetic oligonucleotide
  Target: LAMA2; (+) strand; PAM type: YTN; PAM sequence: CTA
gtatactaaaaaatataaat

SEQ ID NO: 347092 - DNA, 20 bp, Artificial Sequence
  Description of Artificial Sequence: Synthetic oligonucleotide
  Target: LAMA2; (+) strand; PAM type: YTN; PAM sequence: CTA
aaaaatataaatggctctac

SEQ ID NO: 347093 - DNA, 20 bp, Artificial Sequence
  Description of Artificial Sequence: Synthetic oligonucleotide
  Target: LAMA2; (+) strand; PAM type: YTN; PAM sequence: CTC
tactagtatatttaataatc

SEQ ID NO: 347094 - DNA, 20 bp, Artificial Sequence
  Description of Artificial Sequence: Synthetic oligonucleotide
  Target: LAMA2; (+) strand; PAM type: YTN; PAM sequence: CTA
ctagtatatttaataatcct

SEQ ID NO: 347095 - DNA, 20 bp, Artificial Sequence
  Description of Artificial Sequence: Synthetic oligonucleotide
  Target: LAMA2; (+) strand; PAM type: YTN; PAM sequence: CTA
gtatatttaataatccttca

SEQ ID NO: 347096 - DNA, 20 bp, Artificial Sequence
  Description of Artificial Sequence: Synthetic oligonucleotide
  Target: LAMA2; (+) strand; PAM type: YTN; PAM sequence: TTT
aataatccttcattgattta

SEQ ID NO: 347097 - DNA, 20 bp, Artificial Sequence
  Description of Artificial Sequence: Synthetic oligonucleotide
  Target: LAMA2; (+) strand; PAM type: YTN; PAM sequence: TTA
ataatccttcattgatttac

SEQ ID NO: 347098 - DNA, 20 bp, Artificial Sequence
  Description of Artificial Sequence: Synthetic oligonucleotide
  Target: LAMA2; (+) strand; PAM type: YTN; PAM sequence: CTT
cattgatttacctaaacgta

SEQ ID NO: 347099 - DNA, 20 bp, Artificial Sequence
  Description of Artificial Sequence: Synthetic oligonucleotide
  Target: LAMA2; (+) strand; PAM type: YTN; PAM sequence: TTC
attgatttacctaaacgtat

SEQ ID NO: 347100 - DNA, 20 bp, Artificial Sequence
  Description of Artificial Sequence: Synthetic oligonucleotide
  Target: LAMA2; (+) strand; PAM type: YTN; PAM sequence: TTG
atttacctaaacgtatgaag

SEQ ID NO: 347101 - DNA, 20 bp, Artificial Sequence
  Description of Artificial Sequence: Synthetic oligonucleotide
  Target: LAMA2; (+) strand; PAM type: YTN; PAM sequence: TTT
acctaaacgtatgaagatac

SEQ ID NO: 347102 - DNA, 20 bp, Artificial Sequence
  Description of Artificial Sequence: Synthetic oligonucleotide
  Target: LAMA2; (+) strand; PAM type: YTN; PAM sequence: TTA
cctaaacgtatgaagatacc

SEQ ID NO: 347103 - DNA, 20 bp, Artificial Sequence
  Description of Artificial Sequence: Synthetic oligonucleotide
  Target: LAMA2; (+) strand; PAM type: YTN; PAM sequence: CTA
aacgtatgaagatacccata

SEQ ID NO: 347104 - DNA, 20 bp, Artificial Sequence
  Description of Artificial Sequence: Synthetic oligonucleotide
  Target: LAMA2; (+) strand; PAM type: YTN; PAM sequence: TTT
ttaaaaataagttattgtag

SEQ ID NO: 347105 - DNA, 20 bp, Artificial Sequence
  Description of Artificial Sequence: Synthetic oligonucleotide
  Target: LAMA2; (+) strand; PAM type: YTN; PAM sequence: TTT
taaaaataagttattgtagc

SEQ ID NO: 347106 - DNA, 20 bp, Artificial Sequence
  Description of Artificial Sequence: Synthetic oligonucleotide
  Target: LAMA2; (+) strand; PAM type: YTN; PAM sequence: TTT
aaaaataagttattgtagct

SEQ ID NO: 347107 - DNA, 20 bp, Artificial Sequence
  Description of Artificial Sequence: Synthetic oligonucleotide
  Target: LAMA2; (+) strand; PAM type: YTN; PAM sequence: TTA
aaaataagttattgtagctc

SEQ ID NO: 347108 - DNA, 20 bp, Artificial Sequence
  Description of Artificial Sequence: Synthetic oligonucleotide
  Target: LAMA2; (+) strand; PAM type: YTN; PAM sequence: TTA
ttgtagctctaaaataattt

SEQ ID NO: 347109 - DNA, 20 bp, Artificial Sequence
  Description of Artificial Sequence: Synthetic oligonucleotide
  Target: LAMA2; (+) strand; PAM type: YTN; PAM sequence: TTG
tagctctaaaataatttatt

SEQ ID NO: 347110 - DNA, 20 bp, Artificial Sequence
  Description of Artificial Sequence: Synthetic oligonucleotide
  Target: LAMA2; (+) strand; PAM type: YTN; PAM sequence: CTC
taaaataatttattagacta

SEQ ID NO: 347111 - DNA, 20 bp, Artificial Sequence
  Description of Artificial Sequence: Synthetic oligonucleotide
  Target: LAMA2; (+) strand; PAM type: YTN; PAM sequence: CTA
aaataatttattagactaga

SEQ ID NO: 347112 - DNA, 20 bp, Artificial Sequence
  Description of Artificial Sequence: Synthetic oligonucleotide
  Target: LAMA2; (+) strand; PAM type: YTN; PAM sequence: TTT
attagactagaataaataaa

SEQ ID NO: 347113 - DNA, 20 bp, Artificial Sequence
  Description of Artificial Sequence: Synthetic oligonucleotide
  Target: LAMA2; (+) strand; PAM type: YTN; PAM sequence: TTA
ttagactagaataaataaat

SEQ ID NO: 347114 - DNA, 20 bp, Artificial Sequence
  Description of Artificial Sequence: Synthetic oligonucleotide
  Target: LAMA2; (+) strand; PAM type: YTN; PAM sequence: TTA
gactagaataaataaattta

SEQ ID NO: 347115 - DNA, 20 bp, Artificial Sequence
  Description of Artificial Sequence: Synthetic oligonucleotide
  Target: LAMA2; (+) strand; PAM type: YTN; PAM sequence: CTA
gaataaataaatttatacta

SEQ ID NO: 347116 - DNA, 20 bp, Artificial Sequence
  Description of Artificial Sequence: Synthetic oligonucleotide
  Target: LAMA2; (+) strand; PAM type: YTN; PAM sequence: TTT
atactagaatttatgatgaa

SEQ ID NO: 347117 - DNA, 20 bp, Artificial Sequence
  Description of Artificial Sequence: Synthetic oligonucleotide
  Target: LAMA2; (+) strand; PAM type: YTN; PAM sequence: TTA
tactagaatttatgatgaac

SEQ ID NO: 347118 - DNA, 20 bp, Artificial Sequence
  Description of Artificial Sequence: Synthetic oligonucleotide
  Target: LAMA2; (+) strand; PAM type: YTN; PAM sequence: CTA
gaatttatgatgaacagtca

SEQ ID NO: 347119 - DNA, 20 bp, Artificial Sequence
  Description of Artificial Sequence: Synthetic oligonucleotide
  Target: LAMA2; (+) strand; PAM type: YTN; PAM sequence: TTT
atgatgaacagtcaataaat

SEQ ID NO: 347120 - DNA, 20 bp, Artificial Sequence
  Description of Artificial Sequence: Synthetic oligonucleotide
  Target: LAMA2; (+) strand; PAM type: YTN; PAM sequence: TTA
tgatgaacagtcaataaatg

SEQ ID NO: 347121 - DNA, 20 bp, Artificial Sequence
  Description of Artificial Sequence: Synthetic oligonucleotide
  Target: LAMA2; (+) strand; PAM type: YTN; PAM sequence: TTA
aaaatataggtaaaatacag

SEQ ID NO: 347122 - DNA, 20 bp, Artificial Sequence
  Description of Artificial Sequence: Synthetic oligonucleotide
  Target: LAMA2; (+) strand; PAM type: YTN; PAM sequence: TTA
aaatatatacaaattttaag

SEQ ID NO: 347123 - DNA, 20 bp, Artificial Sequence
  Description of Artificial Sequence: Synthetic oligonucleotide
  Target: LAMA2; (+) strand; PAM type: YTN; PAM sequence: TTT
taagtgatacatgcaatgca

SEQ ID NO: 347124 - DNA, 20 bp, Artificial Sequence
  Description of Artificial Sequence: Synthetic oligonucleotide
  Target: LAMA2; (+) strand; PAM type: YTN; PAM sequence: TTT
aagtgatacatgcaatgcac

SEQ ID NO: 347125 - DNA, 20 bp, Artificial Sequence
  Description of Artificial Sequence: Synthetic oligonucleotide
  Target: LAMA2; (+) strand; PAM type: YTN; PAM sequence: TTA
agtgatacatgcaatgcaca

SEQ ID NO: 347126 - DNA, 20 bp, Artificial Sequence
  Description of Artificial Sequence: Synthetic oligonucleotide
  Target: LAMA2; (+) strand; PAM type: YTN; PAM sequence: TTG
taaatgtttgattgaggaaa

SEQ ID NO: 347127 - DNA, 20 bp, Artificial Sequence
  Description of Artificial Sequence: Synthetic oligonucleotide
  Target: LAMA2; (+) strand; PAM type: YTN; PAM sequence: TTT
gattgaggaaagagctaatt

SEQ ID NO: 347128 - DNA, 20 bp, Artificial Sequence
  Description of Artificial Sequence: Synthetic oligonucleotide
  Target: LAMA2; (+) strand; PAM type: YTN; PAM sequence: TTG
attgaggaaagagctaattc

SEQ ID NO: 347129 - DNA, 20 bp, Artificial Sequence
  Description of Artificial Sequence: Synthetic oligonucleotide
  Target: LAMA2; (+) strand; PAM type: YTN; PAM sequence: TTG
aggaaagagctaattcattg

SEQ ID NO: 347130 - DNA, 20 bp, Artificial Sequence
  Description of Artificial Sequence: Synthetic oligonucleotide
  Target: LAMA2; (+) strand; PAM type: YTN; PAM sequence: CTA
attcattggaagctctagtc

SEQ ID NO: 347131 - DNA, 20 bp, Artificial Sequence
  Description of Artificial Sequence: Synthetic oligonucleotide
  Target: LAMA2; (+) strand; PAM type: YTN; PAM sequence: TTC
attggaagctctagtccagt

SEQ ID NO: 347132 - DNA, 20 bp, Artificial Sequence
  Description of Artificial Sequence: Synthetic oligonucleotide
  Target: LAMA2; (+) strand; PAM type: YTN; PAM sequence: TTG
gaagctctagtccagtctat

SEQ ID NO: 347133 - DNA, 20 bp, Artificial Sequence
  Description of Artificial Sequence: Synthetic oligonucleotide
  Target: LAMA2; (+) strand; PAM type: YTN; PAM sequence: CTC
tagtccagtctatagtattt

SEQ ID NO: 347134 - DNA, 20 bp, Artificial Sequence
  Description of Artificial Sequence: Synthetic oligonucleotide
  Target: LAMA2; (+) strand; PAM type: YTN; PAM sequence: CTA
gtccagtctatagtatttgg

SEQ ID NO: 347135 - DNA, 20 bp, Artificial Sequence
  Description of Artificial Sequence: Synthetic oligonucleotide
  Target: LAMA2; (+) strand; PAM type: YTN; PAM sequence: CTA
tagtatttggggactgctat

SEQ ID NO: 347136 - DNA, 20 bp, Artificial Sequence
  Description of Artificial Sequence: Synthetic oligonucleotide
  Target: LAMA2; (+) strand; PAM type: YTN; PAM sequence: TTT
ggggactgctattgatatgt

SEQ ID NO: 347137 - DNA, 20 bp, Artificial Sequence
  Description of Artificial Sequence: Synthetic oligonucleotide
  Target: LAMA2; (+) strand; PAM type: YTN; PAM sequence: TTG
gggactgctattgatatgtt

SEQ ID NO: 347138 - DNA, 20 bp, Artificial Sequence
  Description of Artificial Sequence: Synthetic oligonucleotide
  Target: LAMA2; (+) strand; PAM type: YTN; PAM sequence: CTG
ctattgatatgttcattcaa

SEQ ID NO: 347139 - DNA, 20 bp, Artificial Sequence
  Description of Artificial Sequence: Synthetic oligonucleotide
  Target: LAMA2; (+) strand; PAM type: YTN; PAM sequence: CTA
ttgatatgttcattcaacaa

SEQ ID NO: 347140 - DNA, 20 bp, Artificial Sequence
  Description of Artificial Sequence: Synthetic oligonucleotide
  Target: LAMA2; (+) strand; PAM type: YTN; PAM sequence: TTG
atatgttcattcaacaaata

SEQ ID NO: 347141 - DNA, 20 bp, Artificial Sequence
  Description of Artificial Sequence: Synthetic oligonucleotide
  Target: LAMA2; (+) strand; PAM type: YTN; PAM sequence: TTC
attcaacaaataattactga

SEQ ID NO: 347142 - DNA, 20 bp, Artificial Sequence
  Description of Artificial Sequence: Synthetic oligonucleotide
  Target: LAMA2; (+) strand; PAM type: YTN; PAM sequence: TTC
aacaaataattactgataat

SEQ ID NO: 347143 - DNA, 20 bp, Artificial Sequence
  Description of Artificial Sequence: Synthetic oligonucleotide
  Target: LAMA2; (+) strand; PAM type: YTN; PAM sequence: TTA
ctgataatatagtatgtact

SEQ ID NO: 347144 - DNA, 20 bp, Artificial Sequence
  Description of Artificial Sequence: Synthetic oligonucleotide
  Target: LAMA2; (+) strand; PAM type: YTN; PAM sequence: CTG
ataatatagtatgtactgaa

SEQ ID NO: 347145 - DNA, 20 bp, Artificial Sequence
  Description of Artificial Sequence: Synthetic oligonucleotide
  Target: LAMA2; (+) strand; PAM type: YTN; PAM sequence: CTG
aaatcattatgctaaacact

SEQ ID NO: 347146 - DNA, 20 bp, Artificial Sequence
  Description of Artificial Sequence: Synthetic oligonucleotide
  Target: LAMA2; (+) strand; PAM type: YTN; PAM sequence: TTA
tgctaaacactgagggttta

SEQ ID NO: 347147 - DNA, 20 bp, Artificial Sequence
  Description of Artificial Sequence: Synthetic oligonucleotide
  Target: LAMA2; (+) strand; PAM type: YTN; PAM sequence: CTA
aacactgagggtttacaata

SEQ ID NO: 347148 - DNA, 20 bp, Artificial Sequence
  Description of Artificial Sequence: Synthetic oligonucleotide
  Target: LAMA2; (+) strand; PAM type: YTN; PAM sequence: CTG
agggtttacaataaataaga

SEQ ID NO: 347149 - DNA, 20 bp, Artificial Sequence
  Description of Artificial Sequence: Synthetic oligonucleotide
  Target: LAMA2; (+) strand; PAM type: YTN; PAM sequence: TTT
acaataaataagaaaatgta

SEQ ID NO: 347150 - DNA, 20 bp, Artificial Sequence
  Description of Artificial Sequence: Synthetic oligonucleotide
  Target: LAMA2; (+) strand; PAM type: YTN; PAM sequence: TTA
caataaataagaaaatgtat

SEQ ID NO: 347151 - DNA, 20 bp, Artificial Sequence
  Description of Artificial Sequence: Synthetic oligonucleotide
  Target: LAMA2; (+) strand; PAM type: YTN; PAM sequence: CTC
attgaacttaaatctagtag

SEQ ID NO: 347152 - DNA, 20 bp, Artificial Sequence
  Description of Artificial Sequence: Synthetic oligonucleotide
  Target: LAMA2; (+) strand; PAM type: YTN; PAM sequence: TTG
aacttaaatctagtagcaga

SEQ ID NO: 347153 - DNA, 20 bp, Artificial Sequence
  Description of Artificial Sequence: Synthetic oligonucleotide
  Target: LAMA2; (+) strand; PAM type: YTN; PAM sequence: CTT
aaatctagtagcagacacaa

SEQ ID NO: 347154 - DNA, 20 bp, Artificial Sequence
  Description of Artificial Sequence: Synthetic oligonucleotide
  Target: LAMA2; (+) strand; PAM type: YTN; PAM sequence: TTA
aatctagtagcagacacaag

SEQ ID NO: 347155 - DNA, 20 bp, Artificial Sequence
  Description of Artificial Sequence: Synthetic oligonucleotide
  Target: LAMA2; (+) strand; PAM type: YTN; PAM sequence: CTA
gtagcagacacaagcaagta

SEQ ID NO: 347156 - DNA, 20 bp, Artificial Sequence
  Description of Artificial Sequence: Synthetic oligonucleotide
  Target: LAMA2; (+) strand; PAM type: YTN; PAM sequence: TTG
gcaataaaaatagggggagt

SEQ ID NO: 347157 - DNA, 20 bp, Artificial Sequence
  Description of Artificial Sequence: Synthetic oligonucleotide
  Target: LAMA2; (+) strand; PAM type: YTN; PAM sequence: TTT
ggataaattatagaagaagc

SEQ ID NO: 347158 - DNA, 20 bp, Artificial Sequence
  Description of Artificial Sequence: Synthetic oligonucleotide
  Target: LAMA2; (+) strand; PAM type: YTN; PAM sequence: TTG
gataaattatagaagaagct

SEQ ID NO: 347159 - DNA, 20 bp, Artificial Sequence
  Description of Artificial Sequence: Synthetic oligonucleotide
  Target: LAMA2; (+) strand; PAM type: YTN; PAM sequence: TTA
tagaagaagctcctagacag

SEQ ID NO: 347160 - DNA, 20 bp, Artificial Sequence
  Description of Artificial Sequence: Synthetic oligonucleotide
  Target: LAMA2; (+) strand; PAM type: YTN; PAM sequence: CTC
ctagacagtccatggaggta

SEQ ID NO: 347161 - DNA, 20 bp, Artificial Sequence
  Description of Artificial Sequence: Synthetic oligonucleotide
  Target: LAMA2; (+) strand; PAM type: YTN; PAM sequence: CTA
gacagtccatggaggtattt

SEQ ID NO: 347162 - DNA, 20 bp, Artificial Sequence
  Description of Artificial Sequence: Synthetic oligonucleotide
  Target: LAMA2; (+) strand; PAM type: YTN; PAM sequence: TTT
gtgggaggatggaattggca

SEQ ID NO: 347163 - DNA, 20 bp, Artificial Sequence
  Description of Artificial Sequence: Synthetic oligonucleotide
  Target: LAMA2; (+) strand; PAM type: YTN; PAM sequence: TTG
tgggaggatggaattggcaa

SEQ ID NO: 347164 - DNA, 20 bp, Artificial Sequence
  Description of Artificial Sequence: Synthetic oligonucleotide
  Target: LAMA2; (+) strand; PAM type: YTN; PAM sequence: TTG
gcaacacagctgagatttta

SEQ ID NO: 347165 - DNA, 20 bp, Artificial Sequence
  Description of Artificial Sequence: Synthetic oligonucleotide
  Target: LAMA2; (+) strand; PAM type: YTN; PAM sequence: CTG
agattttaaagatatataaa

SEQ ID NO: 347166 - DNA, 20 bp, Artificial Sequence
  Description of Artificial Sequence: Synthetic oligonucleotide
  Target: LAMA2; (+) strand; PAM type: YTN; PAM sequence: TTT
taaagatatataaagtacat

SEQ ID NO: 347167 - DNA, 20 bp, Artificial Sequence
  Description of Artificial Sequence: Synthetic oligonucleotide
  Target: LAMA2; (+) strand; PAM type: YTN; PAM sequence: TTT
aaagatatataaagtacatc

SEQ ID NO: 347168 - DNA, 20 bp, Artificial Sequence
  Description of Artificial Sequence: Synthetic oligonucleotide
  Target: LAMA2; (+) strand; PAM type: YTN; PAM sequence: TTA
aagatatataaagtacatct

SEQ ID NO: 347169 - DNA, 20 bp, Artificial Sequence
  Description of Artificial Sequence: Synthetic oligonucleotide
  Target: LAMA2; (+) strand; PAM type: YTN; PAM sequence: CTG
tgtaaatggcaagcagtgag

SEQ ID NO: 347170 - DNA, 20 bp, Artificial Sequence
  Description of Artificial Sequence: Synthetic oligonucleotide
  Target: LAMA2; (+) strand; PAM type: YTN; PAM sequence: TTT
gaggaaagggcctaaagata

SEQ ID NO: 347171 - DNA, 20 bp, Artificial Sequence
  Description of Artificial Sequence: Synthetic oligonucleotide
  Target: LAMA2; (+) strand; PAM type: YTN; PAM sequence: TTG
aggaaagggcctaaagataa

SEQ ID NO: 347172 - DNA, 20 bp, Artificial Sequence
  Description of Artificial Sequence: Synthetic oligonucleotide
  Target: LAMA2; (+) strand; PAM type: YTN; PAM sequence: CTA
aagataagatagaccatgac

SEQ ID NO: 347173 - DNA, 20 bp, Artificial Sequence
  Description of Artificial Sequence: Synthetic oligonucleotide
  Target: LAMA2; (+) strand; PAM type: YTN; PAM sequence: TTC
agtgaccatctagtagatat

SEQ ID NO: 347174 - DNA, 20 bp, Artificial Sequence
  Description of Artificial Sequence: Synthetic oligonucleotide
  Target: LAMA2; (+) strand; PAM type: YTN; PAM sequence: CTA
gtagatatccaatacatata

SEQ ID NO: 347175 - DNA, 20 bp, Artificial Sequence
  Description of Artificial Sequence: Synthetic oligonucleotide
  Target: LAMA2; (+) strand; PAM type: YTN; PAM sequence: TTT
gagtgaatgagtgatagact

SEQ ID NO: 347176 - DNA, 20 bp, Artificial Sequence
  Description of Artificial Sequence: Synthetic oligonucleotide
  Target: LAMA2; (+) strand; PAM type: YTN; PAM sequence: TTG
agtgaatgagtgatagactg

SEQ ID NO: 347177 - DNA, 20 bp, Artificial Sequence
  Description of Artificial Sequence: Synthetic oligonucleotide
  Target: LAMA2; (+) strand; PAM type: YTN; PAM sequence: CTG
actatatgaatgggaaatat

SEQ ID NO: 347178 - DNA, 20 bp, Artificial Sequence
  Description of Artificial Sequence: Synthetic oligonucleotide
  Target: LAMA2; (+) strand; PAM type: YTN; PAM sequence: CTA
tatgaatgggaaatattgaa

SEQ ID NO: 347179 - DNA, 20 bp, Artificial Sequence
  Description of Artificial Sequence: Synthetic oligonucleotide
  Target: LAMA2; (+) strand; PAM type: YTN; PAM sequence: TTG
aaatataaagaggaaggcca

SEQ ID NO: 347180 - DNA, 20 bp, Artificial Sequence
  Description of Artificial Sequence: Synthetic oligonucleotide
  Target: LAMA2; (+) strand; PAM type: YTN; PAM sequence: CTC
tgaaaggtaagcatatattt

SEQ ID NO: 347181 - DNA, 20 bp, Artificial Sequence
  Description of Artificial Sequence: Synthetic oligonucleotide
  Target: LAMA2; (+) strand; PAM type: YTN; PAM sequence: CTG
aaaggtaagcatatatttta

SEQ ID NO: 347182 - DNA, 20 bp, Artificial Sequence
  Description of Artificial Sequence: Synthetic oligonucleotide
  Target: LAMA2; (+) strand; PAM type: YTN; PAM sequence: TTT
taagacttcagagtacctaa

SEQ ID NO: 347183 - DNA, 20 bp, Artificial Sequence
  Description of Artificial Sequence: Synthetic oligonucleotide
  Target: LAMA2; (+) strand; PAM type: YTN; PAM sequence: TTT
aagacttcagagtacctaat

SEQ ID NO: 347184 - DNA, 20 bp, Artificial Sequence
  Description of Artificial Sequence: Synthetic oligonucleotide
  Target: LAMA2; (+) strand; PAM type: YTN; PAM sequence: TTA
agacttcagagtacctaatt

SEQ ID NO: 347185 - DNA, 20 bp, Artificial Sequence
  Description of Artificial Sequence: Synthetic oligonucleotide
  Target: LAMA2; (+) strand; PAM type: YTN; PAM sequence: CTT
cagagtacctaattttctga

SEQ ID NO: 347186 - DNA, 20 bp, Artificial Sequence
  Description of Artificial Sequence: Synthetic oligonucleotide
  Target: LAMA2; (+) strand; PAM type: YTN; PAM sequence: TTC
agagtacctaattttctgaa

SEQ ID NO: 347187 - DNA, 20 bp, Artificial Sequence
  Description of Artificial Sequence: Synthetic oligonucleotide
  Target: LAMA2; (+) strand; PAM type: YTN; PAM sequence: CTA
attttctgaatatgcaaatg

SEQ ID NO: 347188 - DNA, 20 bp, Artificial Sequence
  Description of Artificial Sequence: Synthetic oligonucleotide
  Target: LAMA2; (+) strand; PAM type: YTN; PAM sequence: TTT
tctgaatatgcaaatgagca

SEQ ID NO: 347189 - DNA, 20 bp, Artificial Sequence
  Description of Artificial Sequence: Synthetic oligonucleotide
  Target: LAMA2; (+) strand; PAM type: YTN; PAM sequence: TTT
ctgaatatgcaaatgagcag

SEQ ID NO: 347190 - DNA, 20 bp, Artificial Sequence
  Description of Artificial Sequence: Synthetic oligonucleotide
  Target: LAMA2; (+) strand; PAM type: YTN; PAM sequence: TTC
tgaatatgcaaatgagcagt

SEQ ID NO: 347191 - DNA, 20 bp, Artificial Sequence
  Description of Artificial Sequence: Synthetic oligonucleotide
  Target: LAMA2; (+) strand; PAM type: YTN; PAM sequence: CTG
aatatgcaaatgagcagtat

SEQ ID NO: 347192 - DNA, 20 bp, Artificial Sequence
  Description of Artificial Sequence: Synthetic oligonucleotide
  Target: LAMA2; (+) strand; PAM type: YTN; PAM sequence: TTA
gaattaataaaaataaccct

SEQ ID NO: 347193 - DNA, 20 bp, Artificial Sequence
  Description of Artificial Sequence: Synthetic oligonucleotide
  Target: LAMA2; (+) strand; PAM type: YTN; PAM sequence: TTA
ataaaaataaccctaaaaat

SEQ ID NO: 347194 - DNA, 20 bp, Artificial Sequence
  Description of Artificial Sequence: Synthetic oligonucleotide
  Target: LAMA2; (+) strand; PAM type: YTN; PAM sequence: CTA
aaaatgagaactcttggttg

SEQ ID NO: 347195 - DNA, 20 bp, Artificial Sequence
  Description of Artificial Sequence: Synthetic oligonucleotide
  Target: LAMA2; (+) strand; PAM type: YTN; PAM sequence: CTC
ttggttggagaaaataacaa

SEQ ID NO: 347196 - DNA, 20 bp, Artificial Sequence
  Description of Artificial Sequence: Synthetic oligonucleotide
  Target: LAMA2; (+) strand; PAM type: YTN; PAM sequence: CTT
ggttggagaaaataacaaaa

SEQ ID NO: 347197 - DNA, 20 bp, Artificial Sequence
  Description of Artificial Sequence: Synthetic oligonucleotide
  Target: LAMA2; (+) strand; PAM type: YTN; PAM sequence: TTG
gttggagaaaataacaaaat

SEQ ID NO: 347198 - DNA, 20 bp, Artificial Sequence
  Description of Artificial Sequence: Synthetic oligonucleotide
  Target: LAMA2; (+) strand; PAM type: YTN; PAM sequence: TTG
gagaaaataacaaaatatga

SEQ ID NO: 347199 - DNA, 20 bp, Artificial Sequence
  Description of Artificial Sequence: Synthetic oligonucleotide
  Target: LAMA2; (+) strand; PAM type: YTN; PAM sequence: TTG
acagaatacttcaaaaactg

SEQ ID NO: 347200 - DNA, 20 bp, Artificial Sequence
  Description of Artificial Sequence: Synthetic oligonucleotide
  Target: LAMA2; (+) strand; PAM type: YTN; PAM sequence: CTT
caaaaactgtgcctgatata

SEQ ID NO: 347201 - DNA, 20 bp, Artificial Sequence
  Description of Artificial Sequence: Synthetic oligonucleotide
  Target: LAMA2; (+) strand; PAM type: YTN; PAM sequence: TTC
aaaaactgtgcctgatataa

SEQ ID NO: 347202 - DNA, 20 bp, Artificial Sequence
  Description of Artificial Sequence: Synthetic oligonucleotide
  Target: LAMA2; (+) strand; PAM type: YTN; PAM sequence: CTG
tgcctgatataattggaaat

SEQ ID NO: 347203 - DNA, 20 bp, Artificial Sequence
  Description of Artificial Sequence: Synthetic oligonucleotide
  Target: LAMA2; (+) strand; PAM type: YTN; PAM sequence: CTG
atataattggaaataatgcc

SEQ ID NO: 347204 - DNA, 20 bp, Artificial Sequence
  Description of Artificial Sequence: Synthetic oligonucleotide
  Target: LAMA2; (+) strand; PAM type: YTN; PAM sequence: TTG
gaaataatgcctggaaacag

SEQ ID NO: 347205 - DNA, 20 bp, Artificial Sequence
  Description of Artificial Sequence: Synthetic oligonucleotide
  Target: LAMA2; (+) strand; PAM type: YTN; PAM sequence: CTG
gaaacagattgagtccataa

SEQ ID NO: 347206 - DNA, 20 bp, Artificial Sequence
  Description of Artificial Sequence: Synthetic oligonucleotide
  Target: LAMA2; (+) strand; PAM type: YTN; PAM sequence: TTG
agtccataatcctgtatgtg

SEQ ID NO: 347207 - DNA, 20 bp, Artificial Sequence
  Description of Artificial Sequence: Synthetic oligonucleotide
  Target: LAMA2; (+) strand; PAM type: YTN; PAM sequence: CTG
tatgtgttcattaaggccag

SEQ ID NO: 347208 - DNA, 20 bp, Artificial Sequence
  Description of Artificial Sequence: Synthetic oligonucleotide
  Target: LAMA2; (+) strand; PAM type: YTN; PAM sequence: TTC
attaaggccaggaagattct

SEQ ID NO: 347209 - DNA, 20 bp, Artificial Sequence
  Description of Artificial Sequence: Synthetic oligonucleotide
  Target: LAMA2; (+) strand; PAM type: YTN; PAM sequence: TTA
aggccaggaagattcttggt

SEQ ID NO: 347210 - DNA, 20 bp, Artificial Sequence
  Description of Artificial Sequence: Synthetic oligonucleotide
  Target: LAMA2; (+) strand; PAM type: YTN; PAM sequence: TTC
ttggtaaggaaatgtctagt

SEQ ID NO: 347211 - DNA, 20 bp, Artificial Sequence
  Description of Artificial Sequence: Synthetic oligonucleotide
  Target: LAMA2; (+) strand; PAM type: YTN; PAM sequence: CTT
ggtaaggaaatgtctagtct

SEQ ID NO: 347212 - DNA, 20 bp, Artificial Sequence
  Description of Artificial Sequence: Synthetic oligonucleotide
  Target: LAMA2; (+) strand; PAM type: YTN; PAM sequence: TTG
gtaaggaaatgtctagtctg

SEQ ID NO: 347213 - DNA, 20 bp, Artificial Sequence
  Description of Artificial Sequence: Synthetic oligonucleotide
  Target: LAMA2; (+) strand; PAM type: YTN; PAM sequence: CTA
gtctgaaaggtctaaagatt

SEQ ID NO: 347214 - DNA, 20 bp, Artificial Sequence
  Description of Artificial Sequence: Synthetic oligonucleotide
  Target: LAMA2; (+) strand; PAM type: YTN; PAM sequence: CTG
aaaggtctaaagattttatt

SEQ ID NO: 347215 - DNA, 20 bp, Artificial Sequence
  Description of Artificial Sequence: Synthetic oligonucleotide
  Target: LAMA2; (+) strand; PAM type: YTN; PAM sequence: CTA
aagattttattaatctgtat

SEQ ID NO: 347216 - DNA, 20 bp, Artificial Sequence
  Description of Artificial Sequence: Synthetic oligonucleotide
  Target: LAMA2; (+) strand; PAM type: YTN; PAM sequence: TTT
tattaatctgtataataaat

SEQ ID NO: 347217 - DNA, 20 bp, Artificial Sequence
  Description of Artificial Sequence: Synthetic oligonucleotide
  Target: LAMA2; (+) strand; PAM type: YTN; PAM sequence: TTT
attaatctgtataataaatt

SEQ ID NO: 347218 - DNA, 20 bp, Artificial Sequence
  Description of Artificial Sequence: Synthetic oligonucleotide
  Target: LAMA2; (+) strand; PAM type: YTN; PAM sequence: TTA
ttaatctgtataataaatta

SEQ ID NO: 347219 - DNA, 20 bp, Artificial Sequence
  Description of Artificial Sequence: Synthetic oligonucleotide
  Target: LAMA2; (+) strand; PAM type: YTN; PAM sequence: TTA
atctgtataataaattatat

SEQ ID NO: 347220 - DNA, 20 bp, Artificial Sequence
  Description of Artificial Sequence: Synthetic oligonucleotide
  Target: LAMA2; (+) strand; PAM type: YTN; PAM sequence: CTG
tataataaattatatcttat

SEQ ID NO: 347221 - DNA, 20 bp, Artificial Sequence
  Description of Artificial Sequence: Synthetic oligonucleotide
  Target: LAMA2; (+) strand; PAM type: YTN; PAM sequence: TTA
tatcttatgaaactcttgtc

SEQ ID NO: 347222 - DNA, 20 bp, Artificial Sequence
  Description of Artificial Sequence: Synthetic oligonucleotide
  Target: LAMA2; (+) strand; PAM type: YTN; PAM sequence: CTT
atgaaactcttgtcatttat

SEQ ID NO: 347223 - DNA, 20 bp, Artificial Sequence
  Description of Artificial Sequence: Synthetic oligonucleotide
  Target: LAMA2; (+) strand; PAM type: YTN; PAM sequence: TTA
tgaaactcttgtcatttatc

SEQ ID NO: 347224 - DNA, 20 bp, Artificial Sequence
  Description of Artificial Sequence: Synthetic oligonucleotide
  Target: LAMA2; (+) strand; PAM type: YTN; PAM sequence: CTC
ttgtcatttatccagtatat

SEQ ID NO: 347225 - DNA, 20 bp, Artificial Sequence
  Description of Artificial Sequence: Synthetic oligonucleotide
  Target: LAMA2; (+) strand; PAM type: YTN; PAM sequence: CTT
gtcatttatccagtatattt

SEQ ID NO: 347226 - DNA, 20 bp, Artificial Sequence
  Description of Artificial Sequence: Synthetic oligonucleotide
  Target: LAMA2; (+) strand; PAM type: YTN; PAM sequence: TTG
tcatttatccagtatatttg

SEQ ID NO: 347227 - DNA, 20 bp, Artificial Sequence
  Description of Artificial Sequence: Synthetic oligonucleotide
  Target: LAMA2; (+) strand; PAM type: YTN; PAM sequence: TTT
atccagtatatttgaattac

SEQ ID NO: 347228 - DNA, 20 bp, Artificial Sequence
  Description of Artificial Sequence: Synthetic oligonucleotide
  Target: LAMA2; (+) strand; PAM type: YTN; PAM sequence: TTA
tccagtatatttgaattacc

SEQ ID NO: 347229 - DNA, 20 bp, Artificial Sequence
  Description of Artificial Sequence: Synthetic oligonucleotide
  Target: LAMA2; (+) strand; PAM type: YTN; PAM sequence: TTT
gaattacccgtgcattactg

SEQ ID NO: 347230 - DNA, 20 bp, Artificial Sequence
  Description of Artificial Sequence: Synthetic oligonucleotide
  Target: LAMA2; (+) strand; PAM type: YTN; PAM sequence: TTG
aattacccgtgcattactgt

SEQ ID NO: 347231 - DNA, 20 bp, Artificial Sequence
  Description of Artificial Sequence: Synthetic oligonucleotide
  Target: LAMA2; (+) strand; PAM type: YTN; PAM sequence: TTA
cccgtgcattactgtttcat

SEQ ID NO: 347232 - DNA, 20 bp, Artificial Sequence
  Description of Artificial Sequence: Synthetic oligonucleotide
  Target: LAMA2; (+) strand; PAM type: YTN; PAM sequence: TTA
ctgtttcatatattcatggt

SEQ ID NO: 347233 - DNA, 20 bp, Artificial Sequence
  Description of Artificial Sequence: Synthetic oligonucleotide
  Target: LAMA2; (+) strand; PAM type: YTN; PAM sequence: CTG
tttcatatattcatggtact

SEQ ID NO: 347234 - DNA, 20 bp, Artificial Sequence
  Description of Artificial Sequence: Synthetic oligonucleotide
  Target: LAMA2; (+) strand; PAM type: YTN; PAM sequence: TTT
catatattcatggtactttc

SEQ ID NO: 347235 - DNA, 20 bp, Artificial Sequence
  Description of Artificial Sequence: Synthetic oligonucleotide
  Target: LAMA2; (+) strand; PAM type: YTN; PAM sequence: TTC
atatattcatggtactttca

SEQ ID NO: 347236 - DNA, 20 bp, Artificial Sequence
  Description of Artificial Sequence: Synthetic oligonucleotide
  Target: LAMA2; (+) strand; PAM type: YTN; PAM sequence: TTC
atggtactttcatattttat

SEQ ID NO: 347237 - DNA, 20 bp, Artificial Sequence
  Description of Artificial Sequence: Synthetic oligonucleotide
  Target: LAMA2; (+) strand; PAM type: YTN; PAM sequence: CTT
tcatattttataacatttaa

SEQ ID NO: 347238 - DNA, 20 bp, Artificial Sequence
  Description of Artificial Sequence: Synthetic oligonucleotide
  Target: LAMA2; (+) strand; PAM type: YTN; PAM sequence: TTT
catattttataacatttaaa

SEQ ID NO: 347239 - DNA, 20 bp, Artificial Sequence
  Description of Artificial Sequence: Synthetic oligonucleotide
  Target: LAMA2; (+) strand; PAM type: YTN; PAM sequence: TTC
atattttataacatttaaaa

SEQ ID NO: 347240 - DNA, 20 bp, Artificial Sequence
  Description of Artificial Sequence: Synthetic oligonucleotide
  Target: LAMA2; (+) strand; PAM type: YTN; PAM sequence: TTT
tataacatttaaaaatattt

SEQ ID NO: 347241 - DNA, 20 bp, Artificial Sequence
  Description of Artificial Sequence: Synthetic oligonucleotide
  Target: LAMA2; (+) strand; PAM type: YTN; PAM sequence: TTT
ataacatttaaaaatatttc

SEQ ID NO: 347242 - DNA, 20 bp, Artificial Sequence
  Description of Artificial Sequence: Synthetic oligonucleotide
  Target: LAMA2; (+) strand; PAM type: YTN; PAM sequence: TTA
taacatttaaaaatatttca

SEQ ID NO: 347243 - DNA, 20 bp, Artificial Sequence
  Description of Artificial Sequence: Synthetic oligonucleotide
  Target: LAMA2; (+) strand; PAM type: YTN; PAM sequence: TTT
aaaaatatttcaatattcca

SEQ ID NO: 347244 - DNA, 20 bp, Artificial Sequence
  Description of Artificial Sequence: Synthetic oligonucleotide
  Target: LAMA2; (+) strand; PAM type: YTN; PAM sequence: TTA
aaaatatttcaatattccat

SEQ ID NO: 347245 - DNA, 20 bp, Artificial Sequence
  Description of Artificial Sequence: Synthetic oligonucleotide
  Target: LAMA2; (+) strand; PAM type: YTN; PAM sequence: TTT
caatattccattgatttgaa

SEQ ID NO: 347246 - DNA, 20 bp, Artificial Sequence
  Description of Artificial Sequence: Synthetic oligonucleotide
  Target: LAMA2; (+) strand; PAM type: YTN; PAM sequence: TTC
aatattccattgatttgaat

SEQ ID NO: 347247 - DNA, 20 bp, Artificial Sequence
  Description of Artificial Sequence: Synthetic oligonucleotide
  Target: LAMA2; (+) strand; PAM type: YTN; PAM sequence: TTC
cattgatttgaataagattc

SEQ ID NO: 347248 - DNA, 20 bp, Artificial Sequence
  Description of Artificial Sequence: Synthetic oligonucleotide
  Target: LAMA2; (+) strand; PAM type: YTN; PAM sequence: TTG
atttgaataagattctttaa

SEQ ID NO: 347249 - DNA, 20 bp, Artificial Sequence
  Description of Artificial Sequence: Synthetic oligonucleotide
  Target: LAMA2; (+) strand; PAM type: YTN; PAM sequence: TTT
gaataagattctttaaatta

SEQ ID NO: 347250 - DNA, 20 bp, Artificial Sequence
  Description of Artificial Sequence: Synthetic oligonucleotide
  Target: LAMA2; (+) strand; PAM type: YTN; PAM sequence: TTG
aataagattctttaaattac

SEQ ID NO: 347251 - DNA, 20 bp, Artificial Sequence
  Description of Artificial Sequence: Synthetic oligonucleotide
  Target: LAMA2; (+) strand; PAM type: YTN; PAM sequence: TTC
tttaaattacagtgaaagct

SEQ ID NO: 347252 - DNA, 20 bp, Artificial Sequence
  Description of Artificial Sequence: Synthetic oligonucleotide
  Target: LAMA2; (+) strand; PAM type: YTN; PAM sequence: CTT
taaattacagtgaaagcttt

SEQ ID NO: 347253 - DNA, 20 bp, Artificial Sequence
  Description of Artificial Sequence: Synthetic oligonucleotide
  Target: LAMA2; (+) strand; PAM type: YTN; PAM sequence: TTT
aaattacagtgaaagctttc

SEQ ID NO: 347254 - DNA, 20 bp, Artificial Sequence
  Description of Artificial Sequence: Synthetic oligonucleotide
  Target: LAMA2; (+) strand; PAM type: YTN; PAM sequence: TTA
aattacagtgaaagctttct

SEQ ID NO: 347255 - DNA, 20 bp, Artificial Sequence
  Description of Artificial Sequence: Synthetic oligonucleotide
  Target: LAMA2; (+) strand; PAM type: YTN; PAM sequence: TTA
cagtgaaagctttctgataa

SEQ ID NO: 347256 - DNA, 20 bp, Artificial Sequence
  Description of Artificial Sequence: Synthetic oligonucleotide
  Target: LAMA2; (+) strand; PAM type: YTN; PAM sequence: CTT
tctgataaggtatggtaaga

SEQ ID NO: 347257 - DNA, 20 bp, Artificial Sequence
  Description of Artificial Sequence: Synthetic oligonucleotide
  Target: LAMA2; (+) strand; PAM type: YTN; PAM sequence: TTT
ctgataaggtatggtaagat

SEQ ID NO: 347258 - DNA, 20 bp, Artificial Sequence
  Description of Artificial Sequence: Synthetic oligonucleotide
  Target: LAMA2; (+) strand; PAM type: YTN; PAM sequence: TTC
tgataaggtatggtaagatt

SEQ ID NO: 347259 - DNA, 20 bp, Artificial Sequence
  Description of Artificial Sequence: Synthetic oligonucleotide
  Target: LAMA2; (+) strand; PAM type: YTN; PAM sequence: CTG
ataaggtatggtaagattat

SEQ ID NO: 347260 - DNA, 20 bp, Artificial Sequence
  Description of Artificial Sequence: Synthetic oligonucleotide
  Target: LAMA2; (+) strand; PAM type: YTN; PAM sequence: TTA
tttttcagtaattatgctga

SEQ ID NO: 347261 - DNA, 20 bp, Artificial Sequence
  Description of Artificial Sequence: Synthetic oligonucleotide
  Target: LAMA2; (+) strand; PAM type: YTN; PAM sequence: TTT
ttcagtaattatgctgatac

SEQ ID NO: 347262 - DNA, 20 bp, Artificial Sequence
  Description of Artificial Sequence: Synthetic oligonucleotide
  Target: LAMA2; (+) strand; PAM type: YTN; PAM sequence: TTT
tcagtaattatgctgataca

SEQ ID NO: 347263 - DNA, 20 bp, Artificial Sequence
  Description of Artificial Sequence: Synthetic oligonucleotide
  Target: LAMA2; (+) strand; PAM type: YTN; PAM sequence: TTT
cagtaattatgctgatacat

SEQ ID NO: 347264 - DNA, 20 bp, Artificial Sequence
  Description of Artificial Sequence: Synthetic oligonucleotide
  Target: LAMA2; (+) strand; PAM type: YTN; PAM sequence: TTC
agtaattatgctgatacata

SEQ ID NO: 347265 - DNA, 20 bp, Artificial Sequence
  Description of Artificial Sequence: Synthetic oligonucleotide
  Target: LAMA2; (+) strand; PAM type: YTN; PAM sequence: TTA
tgctgatacatataataaag

SEQ ID NO: 347266 - DNA, 20 bp, Artificial Sequence
  Description of Artificial Sequence: Synthetic oligonucleotide
  Target: LAMA2; (+) strand; PAM type: YTN; PAM sequence: CTG
atacatataataaagctact

SEQ ID NO: 347267 - DNA, 20 bp, Artificial Sequence
  Description of Artificial Sequence: Synthetic oligonucleotide
  Target: LAMA2; (+) strand; PAM type: YTN; PAM sequence: CTA
ctgacaattcataaagatga

SEQ ID NO: 347268 - DNA, 20 bp, Artificial Sequence
  Description of Artificial Sequence: Synthetic oligonucleotide
  Target: LAMA2; (+) strand; PAM type: YTN; PAM sequence: CTG
acaattcataaagatgataa

SEQ ID NO: 347269 - DNA, 20 bp, Artificial Sequence
  Description of Artificial Sequence: Synthetic oligonucleotide
  Target: LAMA2; (+) strand; PAM type: YTN; PAM sequence: TTC
ataaagatgataatacactt

SEQ ID NO: 347270 - DNA, 20 bp, Artificial Sequence
  Description of Artificial Sequence: Synthetic oligonucleotide
  Target: LAMA2; (+) strand; PAM type: YTN; PAM sequence: CTT
agtacaaactgagcttcaat

SEQ ID NO: 347271 - DNA, 20 bp, Artificial Sequence
  Description of Artificial Sequence: Synthetic oligonucleotide
  Target: LAMA2; (+) strand; PAM type: YTN; PAM sequence: TTA
gtacaaactgagcttcaatg

SEQ ID NO: 347272 - DNA, 20 bp, Artificial Sequence
  Description of Artificial Sequence: Synthetic oligonucleotide
  Target: LAMA2; (+) strand; PAM type: YTN; PAM sequence: CTG
agcttcaatgggattactaa

SEQ ID NO: 347273 - DNA, 20 bp, Artificial Sequence
  Description of Artificial Sequence: Synthetic oligonucleotide
  Target: LAMA2; (+) strand; PAM type: YTN; PAM sequence: CTT
caatgggattactaaatgag

SEQ ID NO: 347274 - DNA, 20 bp, Artificial Sequence
  Description of Artificial Sequence: Synthetic oligonucleotide
  Target: LAMA2; (+) strand; PAM type: YTN; PAM sequence: TTC
aatgggattactaaatgagt

SEQ ID NO: 347275 - DNA, 20 bp, Artificial Sequence
  Description of Artificial Sequence: Synthetic oligonucleotide
  Target: LAMA2; (+) strand; PAM type: YTN; PAM sequence: TTA
ctaaatgagtatgtgaggac

SEQ ID NO: 347276 - DNA, 20 bp, Artificial Sequence
  Description of Artificial Sequence: Synthetic oligonucleotide
  Target: LAMA2; (+) strand; PAM type: YTN; PAM sequence: CTA
aatgagtatgtgaggacaga

SEQ ID NO: 347277 - DNA, 20 bp, Artificial Sequence
  Description of Artificial Sequence: Synthetic oligonucleotide
  Target: LAMA2; (+) strand; PAM type: YTN; PAM sequence: TTG
agcactgtggtgctctatta

SEQ ID NO: 347278 - DNA, 20 bp, Artificial Sequence
  Description of Artificial Sequence: Synthetic oligonucleotide
  Target: LAMA2; (+) strand; PAM type: YTN; PAM sequence: CTG
tggtgctctattatgagaaa

SEQ ID NO: 347279 - DNA, 20 bp, Artificial Sequence
  Description of Artificial Sequence: Synthetic oligonucleotide
  Target: LAMA2; (+) strand; PAM type: YTN; PAM sequence: CTC
tattatgagaaagttaggaa

SEQ ID NO: 347280 - DNA, 20 bp, Artificial Sequence
  Description of Artificial Sequence: Synthetic oligonucleotide
  Target: LAMA2; (+) strand; PAM type: YTN; PAM sequence: CTA
ttatgagaaagttaggaagg

SEQ ID NO: 347281 - DNA, 20 bp, Artificial Sequence
  Description of Artificial Sequence: Synthetic oligonucleotide
  Target: LAMA2; (+) strand; PAM type: YTN; PAM sequence: TTA
tgagaaagttaggaaggatt

SEQ ID NO: 347282 - DNA, 20 bp, Artificial Sequence
  Description of Artificial Sequence: Synthetic oligonucleotide
  Target: LAMA2; (+) strand; PAM type: YTN; PAM sequence: TTA
ggaaggattaaagttggcac

SEQ ID NO: 347283 - DNA, 20 bp, Artificial Sequence
  Description of Artificial Sequence: Synthetic oligonucleotide
  Target: LAMA2; (+) strand; PAM type: YTN; PAM sequence: TTA
aagttggcactgaaggggat

SEQ ID NO: 347284 - DNA, 20 bp, Artificial Sequence
  Description of Artificial Sequence: Synthetic oligonucleotide
  Target: LAMA2; (+) strand; PAM type: YTN; PAM sequence: TTG
gcactgaaggggattgagaa

SEQ ID NO: 347285 - DNA, 20 bp, Artificial Sequence
  Description of Artificial Sequence: Synthetic oligonucleotide
  Target: LAMA2; (+) strand; PAM type: YTN; PAM sequence: CTG
aaggggattgagaaggagta

SEQ ID NO: 347286 - DNA, 20 bp, Artificial Sequence
  Description of Artificial Sequence: Synthetic oligonucleotide
  Target: LAMA2; (+) strand; PAM type: YTN; PAM sequence: TTG
agaaggagtagctgaagcgg

SEQ ID NO: 347287 - DNA, 20 bp, Artificial Sequence
  Description of Artificial Sequence: Synthetic oligonucleotide
  Target: LAMA2; (+) strand; PAM type: YTN; PAM sequence: CTG
aagcggtagaaggaaaacaa

SEQ ID NO: 347288 - DNA, 20 bp, Artificial Sequence
  Description of Artificial Sequence: Synthetic oligonucleotide
  Target: LAMA2; (+) strand; PAM type: YTN; PAM sequence: CTG
gaagtcagtggagtaatcac

SEQ ID NO: 347289 - DNA, 20 bp, Artificial Sequence
  Description of Artificial Sequence: Synthetic oligonucleotide
  Target: LAMA2; (+) strand; PAM type: YTN; PAM sequence: CTT
gtctcaaatgctgctaatag

SEQ ID NO: 347290 - DNA, 20 bp, Artificial Sequence
  Description of Artificial Sequence: Synthetic oligonucleotide
  Target: LAMA2; (+) strand; PAM type: YTN; PAM sequence: TTG
tctcaaatgctgctaatagg

SEQ ID NO: 347291 - DNA, 20 bp, Artificial Sequence
  Description of Artificial Sequence: Synthetic oligonucleotide
  Target: LAMA2; (+) strand; PAM type: YTN; PAM sequence: CTC
aaatgctgctaataggtcaa

SEQ ID NO: 347292 - DNA, 20 bp, Artificial Sequence
  Description of Artificial Sequence: Synthetic oligonucleotide
  Target: LAMA2; (+) strand; PAM type: YTN; PAM sequence: CTG
ctaataggtcaaatatggtg

SEQ ID NO: 347293 - DNA, 20 bp, Artificial Sequence
  Description of Artificial Sequence: Synthetic oligonucleotide
  Target: LAMA2; (+) strand; PAM type: YTN; PAM sequence: CTA
ataggtcaaatatggtgaga

SEQ ID NO: 347294 - DNA, 20 bp, Artificial Sequence
  Description of Artificial Sequence: Synthetic oligonucleotide
  Target: LAMA2; (+) strand; PAM type: YTN; PAM sequence: CTG
agaactggacatttcattta

SEQ ID NO: 347295 - DNA, 20 bp, Artificial Sequence
  Description of Artificial Sequence: Synthetic oligonucleotide
  Target: LAMA2; (+) strand; PAM type: YTN; PAM sequence: CTG
gacatttcatttagtaatgt

SEQ ID NO: 347296 - DNA, 20 bp, Artificial Sequence
  Description of Artificial Sequence: Synthetic oligonucleotide
  Target: LAMA2; (+) strand; PAM type: YTN; PAM sequence: TTT
catttagtaatgtgaaggac

SEQ ID NO: 347297 - DNA, 20 bp, Artificial Sequence
  Description of Artificial Sequence: Synthetic oligonucleotide
  Target: LAMA2; (+) strand; PAM type: YTN; PAM sequence: TTC
atttagtaatgtgaaggacg

SEQ ID NO: 347298 - DNA, 20 bp, Artificial Sequence
  Description of Artificial Sequence: Synthetic oligonucleotide
  Target: LAMA2; (+) strand; PAM type: YTN; PAM sequence: TTT
agtaatgtgaaggacgttgg

SEQ ID NO: 347299 - DNA, 20 bp, Artificial Sequence
  Description of Artificial Sequence: Synthetic oligonucleotide
  Target: LAMA2; (+) strand; PAM type: YTN; PAM sequence: TTA
gtaatgtgaaggacgttggt

SEQ ID NO: 347300 - DNA, 20 bp, Artificial Sequence
  Description of Artificial Sequence: Synthetic oligonucleotide
  Target: LAMA2; (+) strand; PAM type: YTN; PAM sequence: TTG
gtgactttcccaagagcagt

SEQ ID NO: 347301 - DNA, 20 bp, Artificial Sequence
  Description of Artificial Sequence: Synthetic oligonucleotide
  Target: LAMA2; (+) strand; PAM type: YTN; PAM sequence: CTT
tcccaagagcagtttcagtg

SEQ ID NO: 347302 - DNA, 20 bp, Artificial Sequence
  Description of Artificial Sequence: Synthetic oligonucleotide
  Target: LAMA2; (+) strand; PAM type: YTN; PAM sequence: TTT
cccaagagcagtttcagtgg

SEQ ID NO: 347303 - DNA, 20 bp, Artificial Sequence
  Description of Artificial Sequence: Synthetic oligonucleotide
  Target: LAMA2; (+) strand; PAM type: YTN; PAM sequence: TTC
ccaagagcagtttcagtgga

SEQ ID NO: 347304 - DNA, 20 bp, Artificial Sequence
  Description of Artificial Sequence: Synthetic oligonucleotide
  Target: LAMA2; (+) strand; PAM type: YTN; PAM sequence: TTT
cagtggaatggaggaagacc

SEQ ID NO: 347305 - DNA, 20 bp, Artificial Sequence
  Description of Artificial Sequence: Synthetic oligonucleotide
  Target: LAMA2; (+) strand; PAM type: YTN; PAM sequence: TTC
agtggaatggaggaagacca

SEQ ID NO: 347306 - DNA, 20 bp, Artificial Sequence
  Description of Artificial Sequence: Synthetic oligonucleotide
  Target: LAMA2; (+) strand; PAM type: YTN; PAM sequence: TTG
tggaggaataaaccaaaatg

SEQ ID NO: 347307 - DNA, 20 bp, Artificial Sequence
  Description of Artificial Sequence: Synthetic oligonucleotide
  Target: LAMA2; (+) strand; PAM type: YTN; PAM sequence: CTA
tttaccatccagagccagac

SEQ ID NO: 347308 - DNA, 20 bp, Artificial Sequence
  Description of Artificial Sequence: Synthetic oligonucleotide
  Target: LAMA2; (+) strand; PAM type: YTN; PAM sequence: TTT
accatccagagccagactca

SEQ ID NO: 347309 - DNA, 20 bp, Artificial Sequence
  Description of Artificial Sequence: Synthetic oligonucleotide
  Target: LAMA2; (+) strand; PAM type: YTN; PAM sequence: TTA
ccatccagagccagactcag

SEQ ID NO: 347310 - DNA, 20 bp, Artificial Sequence
  Description of Artificial Sequence: Synthetic oligonucleotide
  Target: LAMA2; (+) strand; PAM type: YTN; PAM sequence: CTC
agagcctttactctgtgcta

SEQ ID NO: 347311 - DNA, 20 bp, Artificial Sequence
  Description of Artificial Sequence: Synthetic oligonucleotide
  Target: LAMA2; (+) strand; PAM type: YTN; PAM sequence: CTT
tactctgtgctagaaacaca

SEQ ID NO: 347312 - DNA, 20 bp, Artificial Sequence
  Description of Artificial Sequence: Synthetic oligonucleotide
  Target: LAMA2; (+) strand; PAM type: YTN; PAM sequence: TTT
actctgtgctagaaacacaa

SEQ ID NO: 347313 - DNA, 20 bp, Artificial Sequence
  Description of Artificial Sequence: Synthetic oligonucleotide
  Target: LAMA2; (+) strand; PAM type: YTN; PAM sequence: TTA
ctctgtgctagaaacacaat

SEQ ID NO: 347314 - DNA, 20 bp, Artificial Sequence
  Description of Artificial Sequence: Synthetic oligonucleotide
  Target: LAMA2; (+) strand; PAM type: YTN; PAM sequence: CTC
tgtgctagaaacacaatgac

SEQ ID NO: 347315 - DNA, 20 bp, Artificial Sequence
  Description of Artificial Sequence: Synthetic oligonucleotide
  Target: LAMA2; (+) strand; PAM type: YTN; PAM sequence: CTG
tgctagaaacacaatgacca

SEQ ID NO: 347316 - DNA, 20 bp, Artificial Sequence
  Description of Artificial Sequence: Synthetic oligonucleotide
  Target: LAMA2; (+) strand; PAM type: YTN; PAM sequence: CTA
gaaacacaatgaccaattgt

SEQ ID NO: 347317 - DNA, 20 bp, Artificial Sequence
  Description of Artificial Sequence: Synthetic oligonucleotide
  Target: LAMA2; (+) strand; PAM type: YTN; PAM sequence: TTG
ttgcattgttccctttcctt

SEQ ID NO: 347318 - DNA, 20 bp, Artificial Sequence
  Description of Artificial Sequence: Synthetic oligonucleotide
  Target: LAMA2; (+) strand; PAM type: YTN; PAM sequence: TTG
cattgttccctttccttgag

SEQ ID NO: 347319 - DNA, 20 bp, Artificial Sequence
  Description of Artificial Sequence: Synthetic oligonucleotide
  Target: LAMA2; (+) strand; PAM type: YTN; PAM sequence: TTG
ttccctttccttgagctttc

SEQ ID NO: 347320 - DNA, 20 bp, Artificial Sequence
  Description of Artificial Sequence: Synthetic oligonucleotide
  Target: LAMA2; (+) strand; PAM type: YTN; PAM sequence: TTC
cctttccttgagctttctac

SEQ ID NO: 347321 - DNA, 20 bp, Artificial Sequence
  Description of Artificial Sequence: Synthetic oligonucleotide
  Target: LAMA2; (+) strand; PAM type: YTN; PAM sequence: CTT
tccttgagctttctacagct

SEQ ID NO: 347322 - DNA, 20 bp, Artificial Sequence
  Description of Artificial Sequence: Synthetic oligonucleotide
  Target: LAMA2; (+) strand; PAM type: YTN; PAM sequence: TTT
ccttgagctttctacagctc

SEQ ID NO: 347323 - DNA, 20 bp, Artificial Sequence
  Description of Artificial Sequence: Synthetic oligonucleotide
  Target: LAMA2; (+) strand; PAM type: YTN; PAM sequence: TTC
cttgagctttctacagctca

SEQ ID NO: 347324 - DNA, 20 bp, Artificial Sequence
  Description of Artificial Sequence: Synthetic oligonucleotide
  Target: LAMA2; (+) strand; PAM type: YTN; PAM sequence: CTT
gagctttctacagctcacct

SEQ ID NO: 347325 - DNA, 20 bp, Artificial Sequence
  Description of Artificial Sequence: Synthetic oligonucleotide
  Target: LAMA2; (+) strand; PAM type: YTN; PAM sequence: TTG
agctttctacagctcacctc

SEQ ID NO: 347326 - DNA, 20 bp, Artificial Sequence
  Description of Artificial Sequence: Synthetic oligonucleotide
  Target: LAMA2; (+) strand; PAM type: YTN; PAM sequence: CTT
tctacagctcacctcgcttc

SEQ ID NO: 347327 - DNA, 20 bp, Artificial Sequence
  Description of Artificial Sequence: Synthetic oligonucleotide
  Target: LAMA2; (+) strand; PAM type: YTN; PAM sequence: TTT
ctacagctcacctcgcttct

SEQ ID NO: 347328 - DNA, 20 bp, Artificial Sequence
  Description of Artificial Sequence: Synthetic oligonucleotide
  Target: LAMA2; (+) strand; PAM type: YTN; PAM sequence: TTC
tacagctcacctcgcttctt

SEQ ID NO: 347329 - DNA, 20 bp, Artificial Sequence
  Description of Artificial Sequence: Synthetic oligonucleotide
  Target: LAMA2; (+) strand; PAM type: YTN; PAM sequence: CTA
cagctcacctcgcttcttca

SEQ ID NO: 347330 - DNA, 20 bp, Artificial Sequence
  Description of Artificial Sequence: Synthetic oligonucleotide
  Target: LAMA2; (+) strand; PAM type: YTN; PAM sequence: CTC
acctcgcttcttcaaacatg

SEQ ID NO: 347331 - DNA, 20 bp, Artificial Sequence
  Description of Artificial Sequence: Synthetic oligonucleotide
  Target: LAMA2; (+) strand; PAM type: YTN; PAM sequence: CTC
gcttcttcaaacatgtacaa

SEQ ID NO: 347332 - DNA, 20 bp, Artificial Sequence
  Description of Artificial Sequence: Synthetic oligonucleotide
  Target: LAMA2; (+) strand; PAM type: YTN; PAM sequence: CTT
cttcaaacatgtacaatcag

SEQ ID NO: 347333 - DNA, 20 bp, Artificial Sequence
  Description of Artificial Sequence: Synthetic oligonucleotide
  Target: LAMA2; (+) strand; PAM type: YTN; PAM sequence: TTC
ttcaaacatgtacaatcaga

SEQ ID NO: 347334 - DNA, 20 bp, Artificial Sequence
  Description of Artificial Sequence: Synthetic oligonucleotide
  Target: LAMA2; (+) strand; PAM type: YTN; PAM sequence: CTT
caaacatgtacaatcagacc

SEQ ID NO: 347335 - DNA, 20 bp, Artificial Sequence
  Description of Artificial Sequence: Synthetic oligonucleotide
  Target: LAMA2; (+) strand; PAM type: YTN; PAM sequence: TTC
aaacatgtacaatcagacct

SEQ ID NO: 347336 - DNA, 20 bp, Artificial Sequence
  Description of Artificial Sequence: Synthetic oligonucleotide
  Target: LAMA2; (+) strand; PAM type: YTN; PAM sequence: CTC
tgaatctgtggattccacat

SEQ ID NO: 347337 - DNA, 20 bp, Artificial Sequence
  Description of Artificial Sequence: Synthetic oligonucleotide
  Target: LAMA2; (+) strand; PAM type: YTN; PAM sequence: CTG
aatctgtggattccacatcc

SEQ ID NO: 347338 - DNA, 20 bp, Artificial Sequence
  Description of Artificial Sequence: Synthetic oligonucleotide
  Target: LAMA2; (+) strand; PAM type: YTN; PAM sequence: CTG
tggattccacatccatggat

SEQ ID NO: 347339 - DNA, 20 bp, Artificial Sequence
  Description of Artificial Sequence: Synthetic oligonucleotide
  Target: LAMA2; (+) strand; PAM type: YTN; PAM sequence: TTC
cacatccatggattcaactg

SEQ ID NO: 347340 - DNA, 20 bp, Artificial Sequence
  Description of Artificial Sequence: Synthetic oligonucleotide
  Target: LAMA2; (+) strand; PAM type: YTN; PAM sequence: TTC
aactgactgcagaagaaaaa

SEQ ID NO: 347341 - DNA, 20 bp, Artificial Sequence
  Description of Artificial Sequence: Synthetic oligonucleotide
  Target: LAMA2; (+) strand; PAM type: YTN; PAM sequence: CTG
actgcagaagaaaaatgtta

SEQ ID NO: 347342 - DNA, 20 bp, Artificial Sequence
  Description of Artificial Sequence: Synthetic oligonucleotide
  Target: LAMA2; (+) strand; PAM type: YTN; PAM sequence: CTG
cagaagaaaaatgttagaaa

SEQ ID NO: 347343 - DNA, 20 bp, Artificial Sequence
  Description of Artificial Sequence: Synthetic oligonucleotide
  Target: LAMA2; (+) strand; PAM type: YTN; PAM sequence: TTA
gaaaaaaatctgcatctgta

SEQ ID NO: 347344 - DNA, 20 bp, Artificial Sequence
  Description of Artificial Sequence: Synthetic oligonucleotide
  Target: LAMA2; (+) strand; PAM type: YTN; PAM sequence: CTG
catctgtaccgaacatgtgc

SEQ ID NO: 347345 - DNA, 20 bp, Artificial Sequence
  Description of Artificial Sequence: Synthetic oligonucleotide
  Target: LAMA2; (+) strand; PAM type: YTN; PAM sequence: CTG
taccgaacatgtgcagactt

SEQ ID NO: 347346 - DNA, 20 bp, Artificial Sequence
  Description of Artificial Sequence: Synthetic oligonucleotide
  Target: LAMA2; (+) strand; PAM type: YTN; PAM sequence: CTT
ttttcttgtcattattccct

SEQ ID NO: 347347 - DNA, 20 bp, Artificial Sequence
  Description of Artificial Sequence: Synthetic oligonucleotide
  Target: LAMA2; (+) strand; PAM type: YTN; PAM sequence: TTT
tttcttgtcattattcccta

SEQ ID NO: 347348 - DNA, 20 bp, Artificial Sequence
  Description of Artificial Sequence: Synthetic oligonucleotide
  Target: LAMA2; (+) strand; PAM type: YTN; PAM sequence: TTT
ttcttgtcattattccctaa

SEQ ID NO: 347349 - DNA, 20 bp, Artificial Sequence
  Description of Artificial Sequence: Synthetic oligonucleotide
  Target: LAMA2; (+) strand; PAM type: YTN; PAM sequence: TTT
tcttgtcattattccctaaa

SEQ ID NO: 347350 - DNA, 20 bp, Artificial Sequence
  Description of Artificial Sequence: Synthetic oligonucleotide
  Target: LAMA2; (+) strand; PAM type: YTN; PAM sequence: TTT
cttgtcattattccctaaat

SEQ ID NO: 347351 - DNA, 20 bp, Artificial Sequence
  Description of Artificial Sequence: Synthetic oligonucleotide
  Target: LAMA2; (+) strand; PAM type: YTN; PAM sequence: TTC
ttgtcattattccctaaata

SEQ ID NO: 347352 - DNA, 20 bp, Artificial Sequence
  Description of Artificial Sequence: Synthetic oligonucleotide
  Target: LAMA2; (+) strand; PAM type: YTN; PAM sequence: CTT
gtcattattccctaaataat

SEQ ID NO: 347353 - DNA, 20 bp, Artificial Sequence
  Description of Artificial Sequence: Synthetic oligonucleotide
  Target: LAMA2; (+) strand; PAM type: YTN; PAM sequence: TTG
tcattattccctaaataata

SEQ ID NO: 347354 - DNA, 20 bp, Artificial Sequence
  Description of Artificial Sequence: Synthetic oligonucleotide
  Target: LAMA2; (+) strand; PAM type: YTN; PAM sequence: TTA
ttccctaaataatatggtat

SEQ ID NO: 347355 - DNA, 20 bp, Artificial Sequence
  Description of Artificial Sequence: Synthetic oligonucleotide
  Target: LAMA2; (+) strand; PAM type: YTN; PAM sequence: TTC
cctaaataatatggtataac

SEQ ID NO: 347356 - DNA, 20 bp, Artificial Sequence
  Description of Artificial Sequence: Synthetic oligonucleotide
  Target: LAMA2; (+) strand; PAM type: YTN; PAM sequence: CTA
aataatatggtataacaact

SEQ ID NO: 347357 - DNA, 20 bp, Artificial Sequence
  Description of Artificial Sequence: Synthetic oligonucleotide
  Target: LAMA2; (+) strand; PAM type: YTN; PAM sequence: CTA
tttacatagcctttacattg

SEQ ID NO: 347358 - DNA, 20 bp, Artificial Sequence
  Description of Artificial Sequence: Synthetic oligonucleotide
  Target: LAMA2; (+) strand; PAM type: YTN; PAM sequence: TTT
acatagcctttacattgtat

SEQ ID NO: 347359 - DNA, 20 bp, Artificial Sequence
  Description of Artificial Sequence: Synthetic oligonucleotide
  Target: LAMA2; (+) strand; PAM type: YTN; PAM sequence: TTA
catagcctttacattgtatt

SEQ ID NO: 347360 - DNA, 20 bp, Artificial Sequence
  Description of Artificial Sequence: Synthetic oligonucleotide
  Target: LAMA2; (+) strand; PAM type: YTN; PAM sequence: CTT
tacattgtattgggtattta

SEQ ID NO: 347361 - DNA, 20 bp, Artificial Sequence
  Description of Artificial Sequence: Synthetic oligonucleotide
  Target: LAMA2; (+) strand; PAM type: YTN; PAM sequence: TTT
acattgtattgggtatttaa

SEQ ID NO: 347362 - DNA, 20 bp, Artificial Sequence
  Description of Artificial Sequence: Synthetic oligonucleotide
  Target: LAMA2; (+) strand; PAM type: YTN; PAM sequence: TTA
cattgtattgggtatttaaa

SEQ ID NO: 347363 - DNA, 20 bp, Artificial Sequence
  Description of Artificial Sequence: Synthetic oligonucleotide
  Target: LAMA2; (+) strand; PAM type: YTN; PAM sequence: TTG
tattgggtatttaaagtaat

SEQ ID NO: 347364 - DNA, 20 bp, Artificial Sequence
  Description of Artificial Sequence: Synthetic oligonucleotide
  Target: LAMA2; (+) strand; PAM type: YTN; PAM sequence: TTG
ggtatttaaagtaatgtaga

SEQ ID NO: 347365 - DNA, 20 bp, Artificial Sequence
  Description of Artificial Sequence: Synthetic oligonucleotide
  Target: LAMA2; (+) strand; PAM type: YTN; PAM sequence: TTT
aaagtaatgtagatgtgatt

SEQ ID NO: 347366 - DNA, 20 bp, Artificial Sequence
  Description of Artificial Sequence: Synthetic oligonucleotide
  Target: LAMA2; (+) strand; PAM type: YTN; PAM sequence: TTA
aagtaatgtagatgtgattt

SEQ ID NO: 347367 - DNA, 20 bp, Artificial Sequence
  Description of Artificial Sequence: Synthetic oligonucleotide
  Target: LAMA2; (+) strand; PAM type: YTN; PAM sequence: TTT
aaataattttgaaatatgtg

SEQ ID NO: 347368 - DNA, 20 bp, Artificial Sequence
  Description of Artificial Sequence: Synthetic oligonucleotide
  Target: LAMA2; (+) strand; PAM type: YTN; PAM sequence: TTA
aataattttgaaatatgtgt

SEQ ID NO: 347369 - DNA, 20 bp, Artificial Sequence
  Description of Artificial Sequence: Synthetic oligonucleotide
  Target: LAMA2; (+) strand; PAM type: YTN; PAM sequence: TTT
tgaaatatgtgtataggtta

SEQ ID NO: 347370 - DNA, 20 bp, Artificial Sequence
  Description of Artificial Sequence: Synthetic oligonucleotide
  Target: LAMA2; (+) strand; PAM type: YTN; PAM sequence: TTT
gaaatatgtgtataggttat

SEQ ID NO: 347371 - DNA, 20 bp, Artificial Sequence
  Description of Artificial Sequence: Synthetic oligonucleotide
  Target: LAMA2; (+) strand; PAM type: YTN; PAM sequence: TTG
aaatatgtgtataggttata

SEQ ID NO: 347372 - DNA, 20 bp, Artificial Sequence
  Description of Artificial Sequence: Synthetic oligonucleotide
  Target: LAMA2; (+) strand; PAM type: YTN; PAM sequence: TTA
tatgcacatactatgccatt

SEQ ID NO: 347373 - DNA, 20 bp, Artificial Sequence
  Description of Artificial Sequence: Synthetic oligonucleotide
  Target: LAMA2; (+) strand; PAM type: YTN; PAM sequence: CTA
tgccatttcatttcaaggac

SEQ ID NO: 347374 - DNA, 20 bp, Artificial Sequence
  Description of Artificial Sequence: Synthetic oligonucleotide
  Target: LAMA2; (+) strand; PAM type: YTN; PAM sequence: TTT
catttcaaggacttgagcat

SEQ ID NO: 347375 - DNA, 20 bp, Artificial Sequence
  Description of Artificial Sequence: Synthetic oligonucleotide
  Target: LAMA2; (+) strand; PAM type: YTN; PAM sequence: TTC
atttcaaggacttgagcatc

SEQ ID NO: 347376 - DNA, 20 bp, Artificial Sequence
  Description of Artificial Sequence: Synthetic oligonucleotide
  Target: LAMA2; (+) strand; PAM type: YTN; PAM sequence: TTT
caaggacttgagcatcctca

SEQ ID NO: 347377 - DNA, 20 bp, Artificial Sequence
  Description of Artificial Sequence: Synthetic oligonucleotide
  Target: LAMA2; (+) strand; PAM type: YTN; PAM sequence: TTC
aaggacttgagcatcctcag

SEQ ID NO: 347378 - DNA, 20 bp, Artificial Sequence
  Description of Artificial Sequence: Synthetic oligonucleotide
  Target: LAMA2; (+) strand; PAM type: YTN; PAM sequence: CTT
gagcatcctcagattttgat

SEQ ID NO: 347379 - DNA, 20 bp, Artificial Sequence
  Description of Artificial Sequence: Synthetic oligonucleotide
  Target: LAMA2; (+) strand; PAM type: YTN; PAM sequence: TTG
agcatcctcagattttgata

SEQ ID NO: 347380 - DNA, 20 bp, Artificial Sequence
  Description of Artificial Sequence: Synthetic oligonucleotide
  Target: LAMA2; (+) strand; PAM type: YTN; PAM sequence: CTC
agattttgatatccacagga

SEQ ID NO: 347381 - DNA, 20 bp, Artificial Sequence
  Description of Artificial Sequence: Synthetic oligonucleotide
  Target: LAMA2; (+) strand; PAM type: YTN; PAM sequence: TTT
tgatatccacaggaggtcct

SEQ ID NO: 347382 - DNA, 20 bp, Artificial Sequence
  Description of Artificial Sequence: Synthetic oligonucleotide
  Target: LAMA2; (+) strand; PAM type: YTN; PAM sequence: TTT
gatatccacaggaggtcctg

SEQ ID NO: 347383 - DNA, 20 bp, Artificial Sequence
  Description of Artificial Sequence: Synthetic oligonucleotide
  Target: LAMA2; (+) strand; PAM type: YTN; PAM sequence: TTG
atatccacaggaggtcctgg

SEQ ID NO: 347384 - DNA, 20 bp, Artificial Sequence
  Description of Artificial Sequence: Synthetic oligonucleotide
  Target: LAMA2; (+) strand; PAM type: YTN; PAM sequence: CTG
gaaccaatccccacaaatcc

SEQ ID NO: 347385 - DNA, 20 bp, Artificial Sequence
  Description of Artificial Sequence: Synthetic oligonucleotide
  Target: LAMA2; (+) strand; PAM type: YTN; PAM sequence: CTG
aaactataactgatgagggg

SEQ ID NO: 347386 - DNA, 20 bp, Artificial Sequence
  Description of Artificial Sequence: Synthetic oligonucleotide
  Target: LAMA2; (+) strand; PAM type: YTN; PAM sequence: CTA
taactgatgaggggtgatgg

SEQ ID NO: 347387 - DNA, 20 bp, Artificial Sequence
  Description of Artificial Sequence: Synthetic oligonucleotide
  Target: LAMA2; (+) strand; PAM type: YTN; PAM sequence: CTG
atgaggggtgatggtacttc

SEQ ID NO: 347388 - DNA, 20 bp, Artificial Sequence
  Description of Artificial Sequence: Synthetic oligonucleotide
  Target: LAMA2; (+) strand; PAM type: YTN; PAM sequence: CTT
ctttttttacacagtcaaaa

SEQ ID NO: 347389 - DNA, 20 bp, Artificial Sequence
  Description of Artificial Sequence: Synthetic oligonucleotide
  Target: LAMA2; (+) strand; PAM type: YTN; PAM sequence: TTC
tttttttacacagtcaaaat

SEQ ID NO: 347390 - DNA, 20 bp, Artificial Sequence
  Description of Artificial Sequence: Synthetic oligonucleotide
  Target: LAMA2; (+) strand; PAM type: YTN; PAM sequence: CTT
tttttacacagtcaaaataa

SEQ ID NO: 347391 - DNA, 20 bp, Artificial Sequence
  Description of Artificial Sequence: Synthetic oligonucleotide
  Target: LAMA2; (+) strand; PAM type: YTN; PAM sequence: TTT
ttttacacagtcaaaataaa

SEQ ID NO: 347392 - DNA, 20 bp, Artificial Sequence
  Description of Artificial Sequence: Synthetic oligonucleotide
  Target: LAMA2; (+) strand; PAM type: YTN; PAM sequence: TTT
tttacacagtcaaaataaaa

SEQ ID NO: 347393 - DNA, 20 bp, Artificial Sequence
  Description of Artificial Sequence: Synthetic oligonucleotide
  Target: LAMA2; (+) strand; PAM type: YTN; PAM sequence: TTT
ttacacagtcaaaataaaag

SEQ ID NO: 347394 - DNA, 20 bp, Artificial Sequence
  Description of Artificial Sequence: Synthetic oligonucleotide
  Target: LAMA2; (+) strand; PAM type: YTN; PAM sequence: TTT
tacacagtcaaaataaaaga

SEQ ID NO: 347395 - DNA, 20 bp, Artificial Sequence
  Description of Artificial Sequence: Synthetic oligonucleotide
  Target: LAMA2; (+) strand; PAM type: YTN; PAM sequence: TTT
acacagtcaaaataaaagag

SEQ ID NO: 347396 - DNA, 20 bp, Artificial Sequence
  Description of Artificial Sequence: Synthetic oligonucleotide
  Target: LAMA2; (+) strand; PAM type: YTN; PAM sequence: TTA
cacagtcaaaataaaagaga

SEQ ID NO: 347397 - DNA, 20 bp, Artificial Sequence
  Description of Artificial Sequence: Synthetic oligonucleotide
  Target: LAMA2; (+) strand; PAM type: YTN; PAM sequence: TTA
ggcttgtttttgttatttct

SEQ ID NO: 347398 - DNA, 20 bp, Artificial Sequence
  Description of Artificial Sequence: Synthetic oligonucleotide
  Target: LAMA2; (+) strand; PAM type: YTN; PAM sequence: CTT
gtttttgttatttctcccca

SEQ ID NO: 347399 - DNA, 20 bp, Artificial Sequence
  Description of Artificial Sequence: Synthetic oligonucleotide
  Target: LAMA2; (+) strand; PAM type: YTN; PAM sequence: TTG
tttttgttatttctccccaa

SEQ ID NO: 347400 - DNA, 20 bp, Artificial Sequence
  Description of Artificial Sequence: Synthetic oligonucleotide
  Target: LAMA2; (+) strand; PAM type: YTN; PAM sequence: TTT
ttgttatttctccccaaata

SEQ ID NO: 347401 - DNA, 20 bp, Artificial Sequence
  Description of Artificial Sequence: Synthetic oligonucleotide
  Target: LAMA2; (+) strand; PAM type: YTN; PAM sequence: TTT
tgttatttctccccaaataa

SEQ ID NO: 347402 - DNA, 20 bp, Artificial Sequence
  Description of Artificial Sequence: Synthetic oligonucleotide
  Target: LAMA2; (+) strand; PAM type: YTN; PAM sequence: TTT
gttatttctccccaaataat

SEQ ID NO: 347403 - DNA, 20 bp, Artificial Sequence
  Description of Artificial Sequence: Synthetic oligonucleotide
  Target: LAMA2; (+) strand; PAM type: YTN; PAM sequence: TTG
ttatttctccccaaataatg

SEQ ID NO: 347404 - DNA, 20 bp, Artificial Sequence
  Description of Artificial Sequence: Synthetic oligonucleotide
  Target: LAMA2; (+) strand; PAM type: YTN; PAM sequence: TTA
tttctccccaaataatgcca

SEQ ID NO: 347405 - DNA, 20 bp, Artificial Sequence
  Description of Artificial Sequence: Synthetic oligonucleotide
  Target: LAMA2; (+) strand; PAM type: YTN; PAM sequence: TTT
ctccccaaataatgccatat

SEQ ID NO: 347406 - DNA, 20 bp, Artificial Sequence
  Description of Artificial Sequence: Synthetic oligonucleotide
  Target: LAMA2; (+) strand; PAM type: YTN; PAM sequence: TTC
tccccaaataatgccatatt

SEQ ID NO: 347407 - DNA, 20 bp, Artificial Sequence
  Description of Artificial Sequence: Synthetic oligonucleotide
  Target: LAMA2; (+) strand; PAM type: YTN; PAM sequence: CTC
cccaaataatgccatattga

SEQ ID NO: 347408 - DNA, 20 bp, Artificial Sequence
  Description of Artificial Sequence: Synthetic oligonucleotide
  Target: LAMA2; (+) strand; PAM type: YTN; PAM sequence: TTG
agcatgactggatttaagag

SEQ ID NO: 347409 - DNA, 20 bp, Artificial Sequence
  Description of Artificial Sequence: Synthetic oligonucleotide
  Target: LAMA2; (+) strand; PAM type: YTN; PAM sequence: CTG
gatttaagaggtccccagat

SEQ ID NO: 347410 - DNA, 20 bp, Artificial Sequence
  Description of Artificial Sequence: Synthetic oligonucleotide
  Target: LAMA2; (+) strand; PAM type: YTN; PAM sequence: TTT
aagaggtccccagatgtctc

SEQ ID NO: 347411 - DNA, 20 bp, Artificial Sequence
  Description of Artificial Sequence: Synthetic oligonucleotide
  Target: LAMA2; (+) strand; PAM type: YTN; PAM sequence: TTA
agaggtccccagatgtctca

SEQ ID NO: 347412 - DNA, 20 bp, Artificial Sequence
  Description of Artificial Sequence: Synthetic oligonucleotide
  Target: LAMA2; (+) strand; PAM type: YTN; PAM sequence: CTC
agccactcatttacataaaa

SEQ ID NO: 347413 - DNA, 20 bp, Artificial Sequence
  Description of Artificial Sequence: Synthetic oligonucleotide
  Target: LAMA2; (+) strand; PAM type: YTN; PAM sequence: CTC
atttacataaaaattctttg

SEQ ID NO: 347414 - DNA, 20 bp, Artificial Sequence
  Description of Artificial Sequence: Synthetic oligonucleotide
  Target: LAMA2; (+) strand; PAM type: YTN; PAM sequence: TTT
acataaaaattctttgtcca

SEQ ID NO: 347415 - DNA, 20 bp, Artificial Sequence
  Description of Artificial Sequence: Synthetic oligonucleotide
  Target: LAMA2; (+) strand; PAM type: YTN; PAM sequence: TTA
cataaaaattctttgtccat

SEQ ID NO: 347416 - DNA, 20 bp, Artificial Sequence
  Description of Artificial Sequence: Synthetic oligonucleotide
  Target: LAMA2; (+) strand; PAM type: YTN; PAM sequence: TTC
tttgtccatatctgtacatc

SEQ ID NO: 347417 - DNA, 20 bp, Artificial Sequence
  Description of Artificial Sequence: Synthetic oligonucleotide
  Target: LAMA2; (+) strand; PAM type: YTN; PAM sequence: CTT
tgtccatatctgtacatcct

SEQ ID NO: 347418 - DNA, 20 bp, Artificial Sequence
  Description of Artificial Sequence: Synthetic oligonucleotide
  Target: LAMA2; (+) strand; PAM type: YTN; PAM sequence: TTT
gtccatatctgtacatcctt

SEQ ID NO: 347419 - DNA, 20 bp, Artificial Sequence
  Description of Artificial Sequence: Synthetic oligonucleotide
  Target: LAMA2; (+) strand; PAM type: YTN; PAM sequence: TTG
tccatatctgtacatcctta

SEQ ID NO: 347420 - DNA, 20 bp, Artificial Sequence
  Description of Artificial Sequence: Synthetic oligonucleotide
  Target: LAMA2; (+) strand; PAM type: YTN; PAM sequence: CTG
tacatccttaatctcaagct

SEQ ID NO: 347421 - DNA, 20 bp, Artificial Sequence
  Description of Artificial Sequence: Synthetic oligonucleotide
  Target: LAMA2; (+) strand; PAM type: YTN; PAM sequence: CTT
aatctcaagctacacatatg

SEQ ID NO: 347422 - DNA, 20 bp, Artificial Sequence
  Description of Artificial Sequence: Synthetic oligonucleotide
  Target: LAMA2; (+) strand; PAM type: YTN; PAM sequence: TTA
atctcaagctacacatatgg

SEQ ID NO: 347423 - DNA, 20 bp, Artificial Sequence
  Description of Artificial Sequence: Synthetic oligonucleotide
  Target: LAMA2; (+) strand; PAM type: YTN; PAM sequence: CTC
aagctacacatatggattta

SEQ ID NO: 347424 - DNA, 20 bp, Artificial Sequence
  Description of Artificial Sequence: Synthetic oligonucleotide
  Target: LAMA2; (+) strand; PAM type: YTN; PAM sequence: CTA
cacatatggatttactgttc

SEQ ID NO: 347425 - DNA, 20 bp, Artificial Sequence
  Description of Artificial Sequence: Synthetic oligonucleotide
  Target: LAMA2; (+) strand; PAM type: YTN; PAM sequence: TTT
actgttctgtctcctggtgt

SEQ ID NO: 347426 - DNA, 20 bp, Artificial Sequence
  Description of Artificial Sequence: Synthetic oligonucleotide
  Target: LAMA2; (+) strand; PAM type: YTN; PAM sequence: TTA
ctgttctgtctcctggtgtc

SEQ ID NO: 347427 - DNA, 20 bp, Artificial Sequence
  Description of Artificial Sequence: Synthetic oligonucleotide
  Target: LAMA2; (+) strand; PAM type: YTN; PAM sequence: CTG
ttctgtctcctggtgtcagc

SEQ ID NO: 347428 - DNA, 20 bp, Artificial Sequence
  Description of Artificial Sequence: Synthetic oligonucleotide
  Target: LAMA2; (+) strand; PAM type: YTN; PAM sequence: TTC
tgtctcctggtgtcagctta

SEQ ID NO: 347429 - DNA, 20 bp, Artificial Sequence
  Description of Artificial Sequence: Synthetic oligonucleotide
  Target: LAMA2; (+) strand; PAM type: YTN; PAM sequence: CTG
tctcctggtgtcagcttact

SEQ ID NO: 347430 - DNA, 20 bp, Artificial Sequence
  Description of Artificial Sequence: Synthetic oligonucleotide
  Target: LAMA2; (+) strand; PAM type: YTN; PAM sequence: CTC
ctggtgtcagcttactttca

SEQ ID NO: 347431 - DNA, 20 bp, Artificial Sequence
  Description of Artificial Sequence: Synthetic oligonucleotide
  Target: LAMA2; (+) strand; PAM type: YTN; PAM sequence: CTG
gtgtcagcttactttcaatt

SEQ ID NO: 347432 - DNA, 20 bp, Artificial Sequence
  Description of Artificial Sequence: Synthetic oligonucleotide
  Target: LAMA2; (+) strand; PAM type: YTN; PAM sequence: CTT
actttcaatttgttttacct

SEQ ID NO: 347433 - DNA, 20 bp, Artificial Sequence
  Description of Artificial Sequence: Synthetic oligonucleotide
  Target: LAMA2; (+) strand; PAM type: YTN; PAM sequence: TTA
ctttcaatttgttttacctg

SEQ ID NO: 347434 - DNA, 20 bp, Artificial Sequence
  Description of Artificial Sequence: Synthetic oligonucleotide
  Target: LAMA2; (+) strand; PAM type: YTN; PAM sequence: CTT
tcaatttgttttacctgttt

SEQ ID NO: 347435 - DNA, 20 bp, Artificial Sequence
  Description of Artificial Sequence: Synthetic oligonucleotide
  Target: LAMA2; (+) strand; PAM type: YTN; PAM sequence: TTT
caatttgttttacctgtttc

SEQ ID NO: 347436 - DNA, 20 bp, Artificial Sequence
  Description of Artificial Sequence: Synthetic oligonucleotide
  Target: LAMA2; (+) strand; PAM type: YTN; PAM sequence: TTC
aatttgttttacctgtttca

SEQ ID NO: 347437 - DNA, 20 bp, Artificial Sequence
  Description of Artificial Sequence: Synthetic oligonucleotide
  Target: LAMA2; (+) strand; PAM type: YTN; PAM sequence: TTT
gttttacctgtttcattggc

SEQ ID NO: 347438 - DNA, 20 bp, Artificial Sequence
  Description of Artificial Sequence: Synthetic oligonucleotide
  Target: LAMA2; (+) strand; PAM type: YTN; PAM sequence: TTG
ttttacctgtttcattggca

SEQ ID NO: 347439 - DNA, 20 bp, Artificial Sequence
  Description of Artificial Sequence: Synthetic oligonucleotide
  Target: LAMA2; (+) strand; PAM type: YTN; PAM sequence: TTT
tacctgtttcattggcacac

SEQ ID NO: 347440 - DNA, 20 bp, Artificial Sequence
  Description of Artificial Sequence: Synthetic oligonucleotide
  Target: LAMA2; (+) strand; PAM type: YTN; PAM sequence: TTT
acctgtttcattggcacact

SEQ ID NO: 347441 - DNA, 20 bp, Artificial Sequence
  Description of Artificial Sequence: Synthetic oligonucleotide
  Target: LAMA2; (+) strand; PAM type: YTN; PAM sequence: TTA
cctgtttcattggcacactt

SEQ ID NO: 347442 - DNA, 20 bp, Artificial Sequence
  Description of Artificial Sequence: Synthetic oligonucleotide
  Target: LAMA2; (+) strand; PAM type: YTN; PAM sequence: CTG
tttcattggcacacttgtag

SEQ ID NO: 347443 - DNA, 20 bp, Artificial Sequence
  Description of Artificial Sequence: Synthetic oligonucleotide
  Target: LAMA2; (+) strand; PAM type: YTN; PAM sequence: TTT
cattggcacacttgtagaga

SEQ ID NO: 347444 - DNA, 20 bp, Artificial Sequence
  Description of Artificial Sequence: Synthetic oligonucleotide
  Target: LAMA2; (+) strand; PAM type: YTN; PAM sequence: TTC
attggcacacttgtagagat

SEQ ID NO: 347445 - DNA, 20 bp, Artificial Sequence
  Description of Artificial Sequence: Synthetic oligonucleotide
  Target: LAMA2; (+) strand; PAM type: YTN; PAM sequence: TTG
gcacacttgtagagattgat

SEQ ID NO: 347446 - DNA, 20 bp, Artificial Sequence
  Description of Artificial Sequence: Synthetic oligonucleotide
  Target: LAMA2; (+) strand; PAM type: YTN; PAM sequence: CTT
gtagagattgataatacaaa

SEQ ID NO: 347447 - DNA, 20 bp, Artificial Sequence
  Description of Artificial Sequence: Synthetic oligonucleotide
  Target: LAMA2; (+) strand; PAM type: YTN; PAM sequence: TTG
tagagattgataatacaaaa

SEQ ID NO: 347448 - DNA, 20 bp, Artificial Sequence
  Description of Artificial Sequence: Synthetic oligonucleotide
  Target: LAMA2; (+) strand; PAM type: YTN; PAM sequence: TTG
ataatacaaaaatgttttag

SEQ ID NO: 347449 - DNA, 20 bp, Artificial Sequence
  Description of Artificial Sequence: Synthetic oligonucleotide
  Target: LAMA2; (+) strand; PAM type: YTN; PAM sequence: TTT
taggagagagcataccacac

SEQ ID NO: 347450 - DNA, 20 bp, Artificial Sequence
  Description of Artificial Sequence: Synthetic oligonucleotide
  Target: LAMA2; (+) strand; PAM type: YTN; PAM sequence: TTT
aggagagagcataccacaca

SEQ ID NO: 347451 - DNA, 20 bp, Artificial Sequence
  Description of Artificial Sequence: Synthetic oligonucleotide
  Target: LAMA2; (+) strand; PAM type: YTN; PAM sequence: TTA
ggagagagcataccacacat

SEQ ID NO: 347452 - DNA, 20 bp, Artificial Sequence
  Description of Artificial Sequence: Synthetic oligonucleotide
  Target: LAMA2; (+) strand; PAM type: YTN; PAM sequence: TTG
tcaacttcatccacttctgc

SEQ ID NO: 347453 - DNA, 20 bp, Artificial Sequence
  Description of Artificial Sequence: Synthetic oligonucleotide
  Target: LAMA2; (+) strand; PAM type: YTN; PAM sequence: CTT
catccacttctgctacttat

SEQ ID NO: 347454 - DNA, 20 bp, Artificial Sequence
  Description of Artificial Sequence: Synthetic oligonucleotide
  Target: LAMA2; (+) strand; PAM type: YTN; PAM sequence: TTC
atccacttctgctacttatt

SEQ ID NO: 347455 - DNA, 20 bp, Artificial Sequence
  Description of Artificial Sequence: Synthetic oligonucleotide
  Target: LAMA2; (+) strand; PAM type: YTN; PAM sequence: CTT
ctgctacttatttcaaagtt

SEQ ID NO: 347456 - DNA, 20 bp, Artificial Sequence
  Description of Artificial Sequence: Synthetic oligonucleotide
  Target: LAMA2; (+) strand; PAM type: YTN; PAM sequence: TTC
tgctacttatttcaaagttt

SEQ ID NO: 347457 - DNA, 20 bp, Artificial Sequence
  Description of Artificial Sequence: Synthetic oligonucleotide
  Target: LAMA2; (+) strand; PAM type: YTN; PAM sequence: CTG
ctacttatttcaaagtttct

SEQ ID NO: 347458 - DNA, 20 bp, Artificial Sequence
  Description of Artificial Sequence: Synthetic oligonucleotide
  Target: LAMA2; (+) strand; PAM type: YTN; PAM sequence: CTA
cttatttcaaagtttctgat

SEQ ID NO: 347459 - DNA, 20 bp, Artificial Sequence
  Description of Artificial Sequence: Synthetic oligonucleotide
  Target: LAMA2; (+) strand; PAM type: YTN; PAM sequence: CTT
atttcaaagtttctgatact

SEQ ID NO: 347460 - DNA, 20 bp, Artificial Sequence
  Description of Artificial Sequence: Synthetic oligonucleotide
  Target: LAMA2; (+) strand; PAM type: YTN; PAM sequence: TTA
tttcaaagtttctgatactt

SEQ ID NO: 347461 - DNA, 20 bp, Artificial Sequence
  Description of Artificial Sequence: Synthetic oligonucleotide
  Target: LAMA2; (+) strand; PAM type: YTN; PAM sequence: TTT
caaagtttctgatacttatt

SEQ ID NO: 347462 - DNA, 20 bp, Artificial Sequence
  Description of Artificial Sequence: Synthetic oligonucleotide
  Target: LAMA2; (+) strand; PAM type: YTN; PAM sequence: TTC
aaagtttctgatacttattc

SEQ ID NO: 347463 - DNA, 20 bp, Artificial Sequence
  Description of Artificial Sequence: Synthetic oligonucleotide
  Target: LAMA2; (+) strand; PAM type: YTN; PAM sequence: TTT
ctgatacttattcatgatct

SEQ ID NO: 347464 - DNA, 20 bp, Artificial Sequence
  Description of Artificial Sequence: Synthetic oligonucleotide
  Target: LAMA2; (+) strand; PAM type: YTN; PAM sequence: TTC
tgatacttattcatgatctt

SEQ ID NO: 347465 - DNA, 20 bp, Artificial Sequence
  Description of Artificial Sequence: Synthetic oligonucleotide
  Target: LAMA2; (+) strand; PAM type: YTN; PAM sequence: CTG
atacttattcatgatctttc

SEQ ID NO: 347466 - DNA, 20 bp, Artificial Sequence
  Description of Artificial Sequence: Synthetic oligonucleotide
  Target: LAMA2; (+) strand; PAM type: YTN; PAM sequence: CTT
attcatgatctttcagtagc

SEQ ID NO: 347467 - DNA, 20 bp, Artificial Sequence
  Description of Artificial Sequence: Synthetic oligonucleotide
  Target: LAMA2; (+) strand; PAM type: YTN; PAM sequence: TTA
ttcatgatctttcagtagcc

SEQ ID NO: 347468 - DNA, 20 bp, Artificial Sequence
  Description of Artificial Sequence: Synthetic oligonucleotide
  Target: LAMA2; (+) strand; PAM type: YTN; PAM sequence: TTC
atgatctttcagtagccttc

SEQ ID NO: 347469 - DNA, 20 bp, Artificial Sequence
  Description of Artificial Sequence: Synthetic oligonucleotide
  Target: LAMA2; (+) strand; PAM type: YTN; PAM sequence: CTT
tcagtagccttcattctccc

SEQ ID NO: 347470 - DNA, 20 bp, Artificial Sequence
  Description of Artificial Sequence: Synthetic oligonucleotide
  Target: LAMA2; (+) strand; PAM type: YTN; PAM sequence: TTT
cagtagccttcattctccca

SEQ ID NO: 347471 - DNA, 20 bp, Artificial Sequence
  Description of Artificial Sequence: Synthetic oligonucleotide
  Target: LAMA2; (+) strand; PAM type: YTN; PAM sequence: TTC
agtagccttcattctcccat

SEQ ID NO: 347472 - DNA, 20 bp, Artificial Sequence
  Description of Artificial Sequence: Synthetic oligonucleotide
  Target: LAMA2; (+) strand; PAM type: YTN; PAM sequence: CTT
cattctcccatccatccatt

SEQ ID NO: 347473 - DNA, 20 bp, Artificial Sequence
  Description of Artificial Sequence: Synthetic oligonucleotide
  Target: LAMA2; (+) strand; PAM type: YTN; PAM sequence: TTC
attctcccatccatccattc

SEQ ID NO: 347474 - DNA, 20 bp, Artificial Sequence
  Description of Artificial Sequence: Synthetic oligonucleotide
  Target: LAMA2; (+) strand; PAM type: YTN; PAM sequence: TTC
tcccatccatccattcactc

SEQ ID NO: 347475 - DNA, 20 bp, Artificial Sequence
  Description of Artificial Sequence: Synthetic oligonucleotide
  Target: LAMA2; (+) strand; PAM type: YTN; PAM sequence: CTC
ccatccatccattcactcaa

SEQ ID NO: 347476 - DNA, 20 bp, Artificial Sequence
  Description of Artificial Sequence: Synthetic oligonucleotide
  Target: LAMA2; (+) strand; PAM type: YTN; PAM sequence: TTC
actcaagaaacttgtattgt

SEQ ID NO: 347477 - DNA, 20 bp, Artificial Sequence
  Description of Artificial Sequence: Synthetic oligonucleotide
  Target: LAMA2; (+) strand; PAM type: YTN; PAM sequence: CTC
aagaaacttgtattgttagg

SEQ ID NO: 347478 - DNA, 20 bp, Artificial Sequence
  Description of Artificial Sequence: Synthetic oligonucleotide
  Target: LAMA2; (+) strand; PAM type: YTN; PAM sequence: CTT
gtattgttagggaatgtatt

SEQ ID NO: 347479 - DNA, 20 bp, Artificial Sequence
  Description of Artificial Sequence: Synthetic oligonucleotide
  Target: LAMA2; (+) strand; PAM type: YTN; PAM sequence: TTG
tattgttagggaatgtatta

SEQ ID NO: 347480 - DNA, 20 bp, Artificial Sequence
  Description of Artificial Sequence: Synthetic oligonucleotide
  Target: LAMA2; (+) strand; PAM type: YTN; PAM sequence: TTG
ttagggaatgtattagaatt

SEQ ID NO: 347481 - DNA, 20 bp, Artificial Sequence
  Description of Artificial Sequence: Synthetic oligonucleotide
  Target: LAMA2; (+) strand; PAM type: YTN; PAM sequence: TTA
gggaatgtattagaattata

SEQ ID NO: 347482 - DNA, 20 bp, Artificial Sequence
  Description of Artificial Sequence: Synthetic oligonucleotide
  Target: LAMA2; (+) strand; PAM type: YTN; PAM sequence: TTA
gaattatagctcttcaagct

SEQ ID NO: 347483 - DNA, 20 bp, Artificial Sequence
  Description of Artificial Sequence: Synthetic oligonucleotide
  Target: LAMA2; (+) strand; PAM type: YTN; PAM sequence: TTA
tagctcttcaagctttccaa

SEQ ID NO: 347484 - DNA, 20 bp, Artificial Sequence
  Description of Artificial Sequence: Synthetic oligonucleotide
  Target: LAMA2; (+) strand; PAM type: YTN; PAM sequence: CTC
ttcaagctttccaaaacaaa

SEQ ID NO: 347485 - DNA, 20 bp, Artificial Sequence
  Description of Artificial Sequence: Synthetic oligonucleotide
  Target: LAMA2; (+) strand; PAM type: YTN; PAM sequence: CTT
caagctttccaaaacaaatg

SEQ ID NO: 347486 - DNA, 20 bp, Artificial Sequence
  Description of Artificial Sequence: Synthetic oligonucleotide
  Target: LAMA2; (+) strand; PAM type: YTN; PAM sequence: TTC
aagctttccaaaacaaatgt

SEQ ID NO: 347487 - DNA, 20 bp, Artificial Sequence
  Description of Artificial Sequence: Synthetic oligonucleotide
  Target: LAMA2; (+) strand; PAM type: YTN; PAM sequence: CTT
tccaaaacaaatgtagcaac

SEQ ID NO: 347488 - DNA, 20 bp, Artificial Sequence
  Description of Artificial Sequence: Synthetic oligonucleotide
  Target: LAMA2; (+) strand; PAM type: YTN; PAM sequence: TTT
ccaaaacaaatgtagcaaca

SEQ ID NO: 347489 - DNA, 20 bp, Artificial Sequence
  Description of Artificial Sequence: Synthetic oligonucleotide
  Target: LAMA2; (+) strand; PAM type: YTN; PAM sequence: TTC
caaaacaaatgtagcaacat

SEQ ID NO: 347490 - DNA, 20 bp, Artificial Sequence
  Description of Artificial Sequence: Synthetic oligonucleotide
  Target: LAMA2; (+) strand; PAM type: YTN; PAM sequence: CTA
tacgagaaatctaattattt

SEQ ID NO: 347491 - DNA, 20 bp, Artificial Sequence
  Description of Artificial Sequence: Synthetic oligonucleotide
  Target: LAMA2; (+) strand; PAM type: YTN; PAM sequence: CTA
attattttaggcacaaatca

SEQ ID NO: 347492 - DNA, 20 bp, Artificial Sequence
  Description of Artificial Sequence: Synthetic oligonucleotide
  Target: LAMA2; (+) strand; PAM type: YTN; PAM sequence: TTA
ttttaggcacaaatcatttt

SEQ ID NO: 347493 - DNA, 20 bp, Artificial Sequence
  Description of Artificial Sequence: Synthetic oligonucleotide
  Target: LAMA2; (+) strand; PAM type: YTN; PAM sequence: TTT
taggcacaaatcatttttta

SEQ ID NO: 347494 - DNA, 20 bp, Artificial Sequence
  Description of Artificial Sequence: Synthetic oligonucleotide
  Target: LAMA2; (+) strand; PAM type: YTN; PAM sequence: TTT
aggcacaaatcattttttaa

SEQ ID NO: 347495 - DNA, 20 bp, Artificial Sequence
  Description of Artificial Sequence: Synthetic oligonucleotide
  Target: LAMA2; (+) strand; PAM type: YTN; PAM sequence: TTA
ggcacaaatcattttttaaa

SEQ ID NO: 347496 - DNA, 20 bp, Artificial Sequence
  Description of Artificial Sequence: Synthetic oligonucleotide
  Target: LAMA2; (+) strand; PAM type: YTN; PAM sequence: TTT
tttaaaatgtattctaaaat

SEQ ID NO: 347497 - DNA, 20 bp, Artificial Sequence
  Description of Artificial Sequence: Synthetic oligonucleotide
  Target: LAMA2; (+) strand; PAM type: YTN; PAM sequence: TTT
ttaaaatgtattctaaaata

SEQ ID NO: 347498 - DNA, 20 bp, Artificial Sequence
  Description of Artificial Sequence: Synthetic oligonucleotide
  Target: LAMA2; (+) strand; PAM type: YTN; PAM sequence: TTT
taaaatgtattctaaaataa

SEQ ID NO: 347499 - DNA, 20 bp, Artificial Sequence
  Description of Artificial Sequence: Synthetic oligonucleotide
  Target: LAMA2; (+) strand; PAM type: YTN; PAM sequence: TTT
aaaatgtattctaaaataaa

SEQ ID NO: 347500 - DNA, 20 bp, Artificial Sequence
  Description of Artificial Sequence: Synthetic oligonucleotide
  Target: LAMA2; (+) strand; PAM type: YTN; PAM sequence: TTA
aaatgtattctaaaataaaa

SEQ ID NO: 347501 - DNA, 20 bp, Artificial Sequence
  Description of Artificial Sequence: Synthetic oligonucleotide
  Target: LAMA2; (+) strand; PAM type: YTN; PAM sequence: TTC
taaaataaaaatgccattga

SEQ ID NO: 347502 - DNA, 20 bp, Artificial Sequence
  Description of Artificial Sequence: Synthetic oligonucleotide
  Target: LAMA2; (+) strand; PAM type: YTN; PAM sequence: CTA
aaataaaaatgccattgagg

SEQ ID NO: 347503 - DNA, 20 bp, Artificial Sequence
  Description of Artificial Sequence: Synthetic oligonucleotide
  Target: LAMA2; (+) strand; PAM type: YTN; PAM sequence: TTG
aggcacagaggtcttactaa

SEQ ID NO: 347504 - DNA, 20 bp, Artificial Sequence
  Description of Artificial Sequence: Synthetic oligonucleotide
  Target: LAMA2; (+) strand; PAM type: YTN; PAM sequence: CTT
actaatctgtaaagcaaaca

SEQ ID NO: 347505 - DNA, 20 bp, Artificial Sequence
  Description of Artificial Sequence: Synthetic oligonucleotide
  Target: LAMA2; (+) strand; PAM type: YTN; PAM sequence: TTA
ctaatctgtaaagcaaacat

SEQ ID NO: 347506 - DNA, 20 bp, Artificial Sequence
  Description of Artificial Sequence: Synthetic oligonucleotide
  Target: LAMA2; (+) strand; PAM type: YTN; PAM sequence: CTA
atctgtaaagcaaacatgat

SEQ ID NO: 347507 - DNA, 20 bp, Artificial Sequence
  Description of Artificial Sequence: Synthetic oligonucleotide
  Target: LAMA2; (+) strand; PAM type: YTN; PAM sequence: CTG
taaagcaaacatgatttata

SEQ ID NO: 347508 - DNA, 20 bp, Artificial Sequence
  Description of Artificial Sequence: Synthetic oligonucleotide
  Target: LAMA2; (+) strand; PAM type: YTN; PAM sequence: TTT
atatagtatgcttacattag

SEQ ID NO: 347509 - DNA, 20 bp, Artificial Sequence
  Description of Artificial Sequence: Synthetic oligonucleotide
  Target: LAMA2; (+) strand; PAM type: YTN; PAM sequence: TTA
tatagtatgcttacattagt

SEQ ID NO: 347510 - DNA, 20 bp, Artificial Sequence
  Description of Artificial Sequence: Synthetic oligonucleotide
  Target: LAMA2; (+) strand; PAM type: YTN; PAM sequence: CTT
acattagtaaatcaggatta

SEQ ID NO: 347511 - DNA, 20 bp, Artificial Sequence
  Description of Artificial Sequence: Synthetic oligonucleotide
  Target: LAMA2; (+) strand; PAM type: YTN; PAM sequence: TTA
cattagtaaatcaggattat

SEQ ID NO: 347512 - DNA, 20 bp, Artificial Sequence
  Description of Artificial Sequence: Synthetic oligonucleotide
  Target: LAMA2; (+) strand; PAM type: YTN; PAM sequence: TTA
gtaaatcaggattatttggg

SEQ ID NO: 347513 - DNA, 20 bp, Artificial Sequence
  Description of Artificial Sequence: Synthetic oligonucleotide
  Target: LAMA2; (+) strand; PAM type: YTN; PAM sequence: TTA
tttgggtgaacagagtataa

SEQ ID NO: 347514 - DNA, 20 bp, Artificial Sequence
  Description of Artificial Sequence: Synthetic oligonucleotide
  Target: LAMA2; (+) strand; PAM type: YTN; PAM sequence: TTT
gggtgaacagagtataatat

SEQ ID NO: 347515 - DNA, 20 bp, Artificial Sequence
  Description of Artificial Sequence: Synthetic oligonucleotide
  Target: LAMA2; (+) strand; PAM type: YTN; PAM sequence: TTG
ggtgaacagagtataatatt

SEQ ID NO: 347516 - DNA, 20 bp, Artificial Sequence
  Description of Artificial Sequence: Synthetic oligonucleotide
  Target: LAMA2; (+) strand; PAM type: YTN; PAM sequence: TTG
atatagttatttggttataa

SEQ ID NO: 347517 - DNA, 20 bp, Artificial Sequence
  Description of Artificial Sequence: Synthetic oligonucleotide
  Target: LAMA2; (+) strand; PAM type: YTN; PAM sequence: TTA
tttggttataaaaagagatg

SEQ ID NO: 347518 - DNA, 20 bp, Artificial Sequence
  Description of Artificial Sequence: Synthetic oligonucleotide
  Target: LAMA2; (+) strand; PAM type: YTN; PAM sequence: TTT
ggttataaaaagagatgttt

SEQ ID NO: 347519 - DNA, 20 bp, Artificial Sequence
  Description of Artificial Sequence: Synthetic oligonucleotide
  Target: LAMA2; (+) strand; PAM type: YTN; PAM sequence: TTG
gttataaaaagagatgtttc

SEQ ID NO: 347520 - DNA, 20 bp, Artificial Sequence
  Description of Artificial Sequence: Synthetic oligonucleotide
  Target: LAMA2; (+) strand; PAM type: YTN; PAM sequence: TTA
taaaaagagatgtttctgat

SEQ ID NO: 347521 - DNA, 20 bp, Artificial Sequence
  Description of Artificial Sequence: Synthetic oligonucleotide
  Target: LAMA2; (+) strand; PAM type: YTN; PAM sequence: TTT
ctgataaggtttccccccct

SEQ ID NO: 347522 - DNA, 20 bp, Artificial Sequence
  Description of Artificial Sequence: Synthetic oligonucleotide
  Target: LAMA2; (+) strand; PAM type: YTN; PAM sequence: TTC
tgataaggtttccccccctt

SEQ ID NO: 347523 - DNA, 20 bp, Artificial Sequence
  Description of Artificial Sequence: Synthetic oligonucleotide
  Target: LAMA2; (+) strand; PAM type: YTN; PAM sequence: CTG
ataaggtttcccccccttta

SEQ ID NO: 347524 - DNA, 20 bp, Artificial Sequence
  Description of Artificial Sequence: Synthetic oligonucleotide
  Target: LAMA2; (+) strand; PAM type: YTN; PAM sequence: TTT
ccccccctttatttgccttg

SEQ ID NO: 347525 - DNA, 20 bp, Artificial Sequence
  Description of Artificial Sequence: Synthetic oligonucleotide
  Target: LAMA2; (+) strand; PAM type: YTN; PAM sequence: TTC
cccccctttatttgccttgg

SEQ ID NO: 347526 - DNA, 20 bp, Artificial Sequence
  Description of Artificial Sequence: Synthetic oligonucleotide
  Target: LAMA2; (+) strand; PAM type: YTN; PAM sequence: CTT
tatttgccttggaaaacaaa

SEQ ID NO: 347527 - DNA, 20 bp, Artificial Sequence
  Description of Artificial Sequence: Synthetic oligonucleotide
  Target: LAMA2; (+) strand; PAM type: YTN; PAM sequence: TTT
atttgccttggaaaacaaat

SEQ ID NO: 347528 - DNA, 20 bp, Artificial Sequence
  Description of Artificial Sequence: Synthetic oligonucleotide
  Target: LAMA2; (+) strand; PAM type: YTN; PAM sequence: TTA
tttgccttggaaaacaaatt

SEQ ID NO: 347529 - DNA, 20 bp, Artificial Sequence
  Description of Artificial Sequence: Synthetic oligonucleotide
  Target: LAMA2; (+) strand; PAM type: YTN; PAM sequence: TTT
gccttggaaaacaaatttca

SEQ ID NO: 347530 - DNA, 20 bp, Artificial Sequence
  Description of Artificial Sequence: Synthetic oligonucleotide
  Target: LAMA2; (+) strand; PAM type: YTN; PAM sequence: TTG
ccttggaaaacaaatttcaa

SEQ ID NO: 347531 - DNA, 20 bp, Artificial Sequence
  Description of Artificial Sequence: Synthetic oligonucleotide
  Target: LAMA2; (+) strand; PAM type: YTN; PAM sequence: CTT
ggaaaacaaatttcaaagaa

SEQ ID NO: 347532 - DNA, 20 bp, Artificial Sequence
  Description of Artificial Sequence: Synthetic oligonucleotide
  Target: LAMA2; (+) strand; PAM type: YTN; PAM sequence: TTG
gaaaacaaatttcaaagaag

SEQ ID NO: 347533 - DNA, 20 bp, Artificial Sequence
  Description of Artificial Sequence: Synthetic oligonucleotide
  Target: LAMA2; (+) strand; PAM type: YTN; PAM sequence: TTT
caaagaagagtgtcatttta

SEQ ID NO: 347534 - DNA, 20 bp, Artificial Sequence
  Description of Artificial Sequence: Synthetic oligonucleotide
  Target: LAMA2; (+) strand; PAM type: YTN; PAM sequence: TTC
aaagaagagtgtcattttaa

SEQ ID NO: 347535 - DNA, 20 bp, Artificial Sequence
  Description of Artificial Sequence: Synthetic oligonucleotide
  Target: LAMA2; (+) strand; PAM type: YTN; PAM sequence: TTT
taaactctaaaaaaccagtt

SEQ ID NO: 347536 - DNA, 20 bp, Artificial Sequence
  Description of Artificial Sequence: Synthetic oligonucleotide
  Target: LAMA2; (+) strand; PAM type: YTN; PAM sequence: TTT
aaactctaaaaaaccagttg

SEQ ID NO: 347537 - DNA, 20 bp, Artificial Sequence
  Description of Artificial Sequence: Synthetic oligonucleotide
  Target: LAMA2; (+) strand; PAM type: YTN; PAM sequence: TTA
aactctaaaaaaccagttga

SEQ ID NO: 347538 - DNA, 20 bp, Artificial Sequence
  Description of Artificial Sequence: Synthetic oligonucleotide
  Target: LAMA2; (+) strand; PAM type: YTN; PAM sequence: CTC
taaaaaaccagttgataacc

SEQ ID NO: 347539 - DNA, 20 bp, Artificial Sequence
  Description of Artificial Sequence: Synthetic oligonucleotide
  Target: LAMA2; (+) strand; PAM type: YTN; PAM sequence: CTA
aaaaaccagttgataaccat

SEQ ID NO: 347540 - DNA, 20 bp, Artificial Sequence
  Description of Artificial Sequence: Synthetic oligonucleotide
  Target: LAMA2; (+) strand; PAM type: YTN; PAM sequence: TTG
ataaccatagtctgatattt

SEQ ID NO: 347541 - DNA, 20 bp, Artificial Sequence
  Description of Artificial Sequence: Synthetic oligonucleotide
  Target: LAMA2; (+) strand; PAM type: YTN; PAM sequence: CTG
atatttgcagttggaatgaa

SEQ ID NO: 347542 - DNA, 20 bp, Artificial Sequence
  Description of Artificial Sequence: Synthetic oligonucleotide
  Target: LAMA2; (+) strand; PAM type: YTN; PAM sequence: TTT
gcagttggaatgaattcctg

SEQ ID NO: 347543 - DNA, 20 bp, Artificial Sequence
  Description of Artificial Sequence: Synthetic oligonucleotide
  Target: LAMA2; (+) strand; PAM type: YTN; PAM sequence: TTG
cagttggaatgaattcctgt

SEQ ID NO: 347544 - DNA, 20 bp, Artificial Sequence
  Description of Artificial Sequence: Synthetic oligonucleotide
  Target: LAMA2; (+) strand; PAM type: YTN; PAM sequence: TTG
gaatgaattcctgtgacagc

SEQ ID NO: 347545 - DNA, 20 bp, Artificial Sequence
  Description of Artificial Sequence: Synthetic oligonucleotide
  Target: LAMA2; (+) strand; PAM type: YTN; PAM sequence: TTC
ctgtgacagcatgaacatac

SEQ ID NO: 347546 - DNA, 20 bp, Artificial Sequence
  Description of Artificial Sequence: Synthetic oligonucleotide
  Target: LAMA2; (+) strand; PAM type: YTN; PAM sequence: CTG
tgacagcatgaacatacacc

SEQ ID NO: 347547 - DNA, 20 bp, Artificial Sequence
  Description of Artificial Sequence: Synthetic oligonucleotide
  Target: LAMA2; (+) strand; PAM type: YTN; PAM sequence: CTG
taatagaaaccactttggaa

SEQ ID NO: 347548 - DNA, 20 bp, Artificial Sequence
  Description of Artificial Sequence: Synthetic oligonucleotide
  Target: LAMA2; (+) strand; PAM type: YTN; PAM sequence: CTT
tggaagacactagaggctgc

SEQ ID NO: 347549 - DNA, 20 bp, Artificial Sequence
  Description of Artificial Sequence: Synthetic oligonucleotide
  Target: LAMA2; (+) strand; PAM type: YTN; PAM sequence: TTT
ggaagacactagaggctgcc

SEQ ID NO: 347550 - DNA, 20 bp, Artificial Sequence
  Description of Artificial Sequence: Synthetic oligonucleotide
  Target: LAMA2; (+) strand; PAM type: YTN; PAM sequence: TTG
gaagacactagaggctgcca

SEQ ID NO: 347551 - DNA, 20 bp, Artificial Sequence
  Description of Artificial Sequence: Synthetic oligonucleotide
  Target: LAMA2; (+) strand; PAM type: YTN; PAM sequence: CTA
gaggctgccacagatttctc

SEQ ID NO: 347552 - DNA, 20 bp, Artificial Sequence
  Description of Artificial Sequence: Synthetic oligonucleotide
  Target: LAMA2; (+) strand; PAM type: YTN; PAM sequence: CTG
ccacagatttctcaggtcct

SEQ ID NO: 347553 - DNA, 20 bp, Artificial Sequence
  Description of Artificial Sequence: Synthetic oligonucleotide
  Target: LAMA2; (+) strand; PAM type: YTN; PAM sequence: TTT
ctcaggtcctcacagcaaga

SEQ ID NO: 347554 - DNA, 20 bp, Artificial Sequence
  Description of Artificial Sequence: Synthetic oligonucleotide
  Target: LAMA2; (+) strand; PAM type: YTN; PAM sequence: TTC
tcaggtcctcacagcaagac

SEQ ID NO: 347555 - DNA, 20 bp, Artificial Sequence
  Description of Artificial Sequence: Synthetic oligonucleotide
  Target: LAMA2; (+) strand; PAM type: YTN; PAM sequence: CTC
aggtcctcacagcaagacag

SEQ ID NO: 347556 - DNA, 20 bp, Artificial Sequence
  Description of Artificial Sequence: Synthetic oligonucleotide
  Target: LAMA2; (+) strand; PAM type: YTN; PAM sequence: CTC
acagcaagacagtggtggtc

SEQ ID NO: 347557 - DNA, 20 bp, Artificial Sequence
  Description of Artificial Sequence: Synthetic oligonucleotide
  Target: LAMA2; (+) strand; PAM type: YTN; PAM sequence: CTT
ggggatggatacatttcatc

SEQ ID NO: 347558 - DNA, 20 bp, Artificial Sequence
  Description of Artificial Sequence: Synthetic oligonucleotide
  Target: LAMA2; (+) strand; PAM type: YTN; PAM sequence: TTG
gggatggatacatttcatct

SEQ ID NO: 347559 - DNA, 20 bp, Artificial Sequence
  Description of Artificial Sequence: Synthetic oligonucleotide
  Target: LAMA2; (+) strand; PAM type: YTN; PAM sequence: TTT
catcttccttgaagacagat

SEQ ID NO: 347560 - DNA, 20 bp, Artificial Sequence
  Description of Artificial Sequence: Synthetic oligonucleotide
  Target: LAMA2; (+) strand; PAM type: YTN; PAM sequence: TTC
atcttccttgaagacagata

SEQ ID NO: 347561 - DNA, 20 bp, Artificial Sequence
  Description of Artificial Sequence: Synthetic oligonucleotide
  Target: LAMA2; (+) strand; PAM type: YTN; PAM sequence: CTT
ccttgaagacagataccacc

SEQ ID NO: 347562 - DNA, 20 bp, Artificial Sequence
  Description of Artificial Sequence: Synthetic oligonucleotide
  Target: LAMA2; (+) strand; PAM type: YTN; PAM sequence: TTC
cttgaagacagataccaccc

SEQ ID NO: 347563 - DNA, 20 bp, Artificial Sequence
  Description of Artificial Sequence: Synthetic oligonucleotide
  Target: LAMA2; (+) strand; PAM type: YTN; PAM sequence: CTT
gaagacagataccaccctct

SEQ ID NO: 347564 - DNA, 20 bp, Artificial Sequence
  Description of Artificial Sequence: Synthetic oligonucleotide
  Target: LAMA2; (+) strand; PAM type: YTN; PAM sequence: TTG
aagacagataccaccctctg

SEQ ID NO: 347565 - DNA, 20 bp, Artificial Sequence
  Description of Artificial Sequence: Synthetic oligonucleotide
  Target: LAMA2; (+) strand; PAM type: YTN; PAM sequence: CTC
tggctgtcaccccataggaa

SEQ ID NO: 347566 - DNA, 20 bp, Artificial Sequence
  Description of Artificial Sequence: Synthetic oligonucleotide
  Target: LAMA2; (+) strand; PAM type: YTN; PAM sequence: CTG
gctgtcaccccataggaaat

SEQ ID NO: 347567 - DNA, 20 bp, Artificial Sequence
  Description of Artificial Sequence: Synthetic oligonucleotide
  Target: LAMA2; (+) strand; PAM type: YTN; PAM sequence: CTG
tcaccccataggaaatcagg

SEQ ID NO: 347568 - DNA, 20 bp, Artificial Sequence
  Description of Artificial Sequence: Synthetic oligonucleotide
  Target: LAMA2; (+) strand; PAM type: YTN; PAM sequence: CTA
agctatccagtggacttgga

SEQ ID NO: 347569 - DNA, 20 bp, Artificial Sequence
  Description of Artificial Sequence: Synthetic oligonucleotide
  Target: LAMA2; (+) strand; PAM type: YTN; PAM sequence: CTA
tccagtggacttggaattac

SEQ ID NO: 347570 - DNA, 20 bp, Artificial Sequence
  Description of Artificial Sequence: Synthetic oligonucleotide
  Target: LAMA2; (+) strand; PAM type: YTN; PAM sequence: CTT
ggaattacactgtgctgtgc

SEQ ID NO: 347571 - DNA, 20 bp, Artificial Sequence
  Description of Artificial Sequence: Synthetic oligonucleotide
  Target: LAMA2; (+) strand; PAM type: YTN; PAM sequence: TTG
gaattacactgtgctgtgct

SEQ ID NO: 347572 - DNA, 20 bp, Artificial Sequence
  Description of Artificial Sequence: Synthetic oligonucleotide
  Target: LAMA2; (+) strand; PAM type: YTN; PAM sequence: TTA
cactgtgctgtgctagtgga

SEQ ID NO: 347573 - DNA, 20 bp, Artificial Sequence
  Description of Artificial Sequence: Synthetic oligonucleotide
  Target: LAMA2; (+) strand; PAM type: YTN; PAM sequence: CTG
tgctgtgctagtggaaatat

SEQ ID NO: 347574 - DNA, 20 bp, Artificial Sequence
  Description of Artificial Sequence: Synthetic oligonucleotide
  Target: LAMA2; (+) strand; PAM type: YTN; PAM sequence: CTG
tgctagtggaaatatcctat

SEQ ID NO: 347575 - DNA, 20 bp, Artificial Sequence
  Description of Artificial Sequence: Synthetic oligonucleotide
  Target: LAMA2; (+) strand; PAM type: YTN; PAM sequence: CTA
gtggaaatatcctatccaac

SEQ ID NO: 347576 - DNA, 20 bp, Artificial Sequence
  Description of Artificial Sequence: Synthetic oligonucleotide
  Target: LAMA2; (+) strand; PAM type: YTN; PAM sequence: CTA
tccaacattatgatttattt

SEQ ID NO: 347577 - DNA, 20 bp, Artificial Sequence
  Description of Artificial Sequence: Synthetic oligonucleotide
  Target: LAMA2; (+) strand; PAM type: YTN; PAM sequence: TTA
tgatttattttgaaggagaa

SEQ ID NO: 347578 - DNA, 20 bp, Artificial Sequence
  Description of Artificial Sequence: Synthetic oligonucleotide
  Target: LAMA2; (+) strand; PAM type: YTN; PAM sequence: TTT
attttgaaggagaaaggaaa

SEQ ID NO: 347579 - DNA, 20 bp, Artificial Sequence
  Description of Artificial Sequence: Synthetic oligonucleotide
  Target: LAMA2; (+) strand; PAM type: YTN; PAM sequence: TTA
ttttgaaggagaaaggaaaa

SEQ ID NO: 347580 - DNA, 20 bp, Artificial Sequence
  Description of Artificial Sequence: Synthetic oligonucleotide
  Target: LAMA2; (+) strand; PAM type: YTN; PAM sequence: TTT
tgaaggagaaaggaaaaaaa

SEQ ID NO: 347581 - DNA, 20 bp, Artificial Sequence
  Description of Artificial Sequence: Synthetic oligonucleotide
  Target: LAMA2; (+) strand; PAM type: YTN; PAM sequence: TTT
gaaggagaaaggaaaaaaaa

SEQ ID NO: 347582 - DNA, 20 bp, Artificial Sequence
  Description of Artificial Sequence: Synthetic oligonucleotide
  Target: LAMA2; (+) strand; PAM type: YTN; PAM sequence: TTG
aaggagaaaggaaaaaaaaa

SEQ ID NO: 347583 - DNA, 20 bp, Artificial Sequence
  Description of Artificial Sequence: Synthetic oligonucleotide
  Target: LAMA2; (+) strand; PAM type: YTN; PAM sequence: CTG
cacacaacatcgccaaacag

SEQ ID NO: 347584 - DNA, 20 bp, Artificial Sequence
  Description of Artificial Sequence: Synthetic oligonucleotide
  Target: LAMA2; (+) strand; PAM type: YTN; PAM sequence: CTG
gcttgttttatatcccagaa

SEQ ID NO: 347585 - DNA, 20 bp, Artificial Sequence
  Description of Artificial Sequence: Synthetic oligonucleotide
  Target: LAMA2; (+) strand; PAM type: YTN; PAM sequence: CTT
gttttatatcccagaaacag

SEQ ID NO: 347586 - DNA, 20 bp, Artificial Sequence
  Description of Artificial Sequence: Synthetic oligonucleotide
  Target: LAMA2; (+) strand; PAM type: YTN; PAM sequence: TTG
ttttatatcccagaaacagc

SEQ ID NO: 347587 - DNA, 20 bp, Artificial Sequence
  Description of Artificial Sequence: Synthetic oligonucleotide
  Target: LAMA2; (+) strand; PAM type: YTN; PAM sequence: TTT
tatatcccagaaacagcttg

SEQ ID NO: 347588 - DNA, 20 bp, Artificial Sequence
  Description of Artificial Sequence: Synthetic oligonucleotide
  Target: LAMA2; (+) strand; PAM type: YTN; PAM sequence: TTT
atatcccagaaacagcttgg

SEQ ID NO: 347589 - DNA, 20 bp, Artificial Sequence
  Description of Artificial Sequence: Synthetic oligonucleotide
  Target: LAMA2; (+) strand; PAM type: YTN; PAM sequence: TTA
tatcccagaaacagcttggg

SEQ ID NO: 347590 - DNA, 20 bp, Artificial Sequence
  Description of Artificial Sequence: Synthetic oligonucleotide
  Target: LAMA2; (+) strand; PAM type: YTN; PAM sequence: CTT
gggactaactatattcacaa

SEQ ID NO: 347591 - DNA, 20 bp, Artificial Sequence
  Description of Artificial Sequence: Synthetic oligonucleotide
  Target: LAMA2; (+) strand; PAM type: YTN; PAM sequence: TTG
ggactaactatattcacaag

SEQ ID NO: 347592 - DNA, 20 bp, Artificial Sequence
  Description of Artificial Sequence: Synthetic oligonucleotide
  Target: LAMA2; (+) strand; PAM type: YTN; PAM sequence: CTA
actatattcacaagatctct

SEQ ID NO: 347593 - DNA, 20 bp, Artificial Sequence
  Description of Artificial Sequence: Synthetic oligonucleotide
  Target: LAMA2; (+) strand; PAM type: YTN; PAM sequence: CTA
tattcacaagatctcttggc

SEQ ID NO: 347594 - DNA, 20 bp, Artificial Sequence
  Description of Artificial Sequence: Synthetic oligonucleotide
  Target: LAMA2; (+) strand; PAM type: YTN; PAM sequence: TTC
acaagatctcttggcagagt

SEQ ID NO: 347595 - DNA, 20 bp, Artificial Sequence
  Description of Artificial Sequence: Synthetic oligonucleotide
  Target: LAMA2; (+) strand; PAM type: YTN; PAM sequence: CTC
ttggcagagtagcttgatga

SEQ ID NO: 347596 - DNA, 20 bp, Artificial Sequence
  Description of Artificial Sequence: Synthetic oligonucleotide
  Target: LAMA2; (+) strand; PAM type: YTN; PAM sequence: CTT
ggcagagtagcttgatgaaa

SEQ ID NO: 347597 - DNA, 20 bp, Artificial Sequence
  Description of Artificial Sequence: Synthetic oligonucleotide
  Target: LAMA2; (+) strand; PAM type: YTN; PAM sequence: TTG
gcagagtagcttgatgaaaa

SEQ ID NO: 347598 - DNA, 20 bp, Artificial Sequence
  Description of Artificial Sequence: Synthetic oligonucleotide
  Target: LAMA2; (+) strand; PAM type: YTN; PAM sequence: CTT
gatgaaaataccaaagctgt

SEQ ID NO: 347599 - DNA, 20 bp, Artificial Sequence
  Description of Artificial Sequence: Synthetic oligonucleotide
  Target: LAMA2; (+) strand; PAM type: YTN; PAM sequence: TTG
atgaaaataccaaagctgtg

SEQ ID NO: 347600 - DNA, 20 bp, Artificial Sequence
  Description of Artificial Sequence: Synthetic oligonucleotide
  Target: LAMA2; (+) strand; PAM type: YTN; PAM sequence: CTG
tgagaagtgttcttttgctg

SEQ ID NO: 347601 - DNA, 20 bp, Artificial Sequence
  Description of Artificial Sequence: Synthetic oligonucleotide
  Target: LAMA2; (+) strand; PAM type: YTN; PAM sequence: TTC
ttttgctgaatccttcatgt

SEQ ID NO: 347602 - DNA, 20 bp, Artificial Sequence
  Description of Artificial Sequence: Synthetic oligonucleotide
  Target: LAMA2; (+) strand; PAM type: YTN; PAM sequence: CTT
ttgctgaatccttcatgtag

SEQ ID NO: 347603 - DNA, 20 bp, Artificial Sequence
  Description of Artificial Sequence: Synthetic oligonucleotide
  Target: LAMA2; (+) strand; PAM type: YTN; PAM sequence: TTT
tgctgaatccttcatgtagc

SEQ ID NO: 347604 - DNA, 20 bp, Artificial Sequence
  Description of Artificial Sequence: Synthetic oligonucleotide
  Target: LAMA2; (+) strand; PAM type: YTN; PAM sequence: TTT
gctgaatccttcatgtagct

SEQ ID NO: 347605 - DNA, 20 bp, Artificial Sequence
  Description of Artificial Sequence: Synthetic oligonucleotide
  Target: LAMA2; (+) strand; PAM type: YTN; PAM sequence: TTG
ctgaatccttcatgtagcta

SEQ ID NO: 347606 - DNA, 20 bp, Artificial Sequence
  Description of Artificial Sequence: Synthetic oligonucleotide
  Target: LAMA2; (+) strand; PAM type: YTN; PAM sequence: CTG
aatccttcatgtagctatca

SEQ ID NO: 347607 - DNA, 20 bp, Artificial Sequence
  Description of Artificial Sequence: Synthetic oligonucleotide
  Target: LAMA2; (+) strand; PAM type: YTN; PAM sequence: CTT
catgtagctatcacacggtt

SEQ ID NO: 347608 - DNA, 20 bp, Artificial Sequence
  Description of Artificial Sequence: Synthetic oligonucleotide
  Target: LAMA2; (+) strand; PAM type: YTN; PAM sequence: TTC
atgtagctatcacacggttt

SEQ ID NO: 347609 - DNA, 20 bp, Artificial Sequence
  Description of Artificial Sequence: Synthetic oligonucleotide
  Target: LAMA2; (+) strand; PAM type: YTN; PAM sequence: CTA
tcacacggtttattaaccta

SEQ ID NO: 347610 - DNA, 20 bp, Artificial Sequence
  Description of Artificial Sequence: Synthetic oligonucleotide
  Target: LAMA2; (+) strand; PAM type: YTN; PAM sequence: TTT
attaacctaaatgagaatat

SEQ ID NO: 347611 - DNA, 20 bp, Artificial Sequence
  Description of Artificial Sequence: Synthetic oligonucleotide
  Target: LAMA2; (+) strand; PAM type: YTN; PAM sequence: TTA
ttaacctaaatgagaatatg

SEQ ID NO: 347612 - DNA, 20 bp, Artificial Sequence
  Description of Artificial Sequence: Synthetic oligonucleotide
  Target: LAMA2; (+) strand; PAM type: YTN; PAM sequence: TTA
acctaaatgagaatatgtac

SEQ ID NO: 347613 - DNA, 20 bp, Artificial Sequence
  Description of Artificial Sequence: Synthetic oligonucleotide
  Target: LAMA2; (+) strand; PAM type: YTN; PAM sequence: CTA
aatgagaatatgtacacctt

SEQ ID NO: 347614 - DNA, 20 bp, Artificial Sequence
  Description of Artificial Sequence: Synthetic oligonucleotide
  Target: LAMA2; (+) strand; PAM type: YTN; PAM sequence: CTT
ttttccaaaaaggtcctttg

SEQ ID NO: 347615 - DNA, 20 bp, Artificial Sequence
  Description of Artificial Sequence: Synthetic oligonucleotide
  Target: LAMA2; (+) strand; PAM type: YTN; PAM sequence: TTT
tttccaaaaaggtcctttgt

SEQ ID NO: 347616 - DNA, 20 bp, Artificial Sequence
  Description of Artificial Sequence: Synthetic oligonucleotide
  Target: LAMA2; (+) strand; PAM type: YTN; PAM sequence: TTT
ttccaaaaaggtcctttgta

SEQ ID NO: 347617 - DNA, 20 bp, Artificial Sequence
  Description of Artificial Sequence: Synthetic oligonucleotide
  Target: LAMA2; (+) strand; PAM type: YTN; PAM sequence: TTT
tccaaaaaggtcctttgtat

SEQ ID NO: 347618 - DNA, 20 bp, Artificial Sequence
  Description of Artificial Sequence: Synthetic oligonucleotide
  Target: LAMA2; (+) strand; PAM type: YTN; PAM sequence: TTT
ccaaaaaggtcctttgtatg

SEQ ID NO: 347619 - DNA, 20 bp, Artificial Sequence
  Description of Artificial Sequence: Synthetic oligonucleotide
  Target: LAMA2; (+) strand; PAM type: YTN; PAM sequence: TTC
caaaaaggtcctttgtatgt

SEQ ID NO: 347620 - DNA, 20 bp, Artificial Sequence
  Description of Artificial Sequence: Synthetic oligonucleotide
  Target: LAMA2; (+) strand; PAM type: YTN; PAM sequence: CTT
tgtatgtttaagtgagaaac

SEQ ID NO: 347621 - DNA, 20 bp, Artificial Sequence
  Description of Artificial Sequence: Synthetic oligonucleotide
  Target: LAMA2; (+) strand; PAM type: YTN; PAM sequence: TTT
gtatgtttaagtgagaaact

SEQ ID NO: 347622 - DNA, 20 bp, Artificial Sequence
  Description of Artificial Sequence: Synthetic oligonucleotide
  Target: LAMA2; (+) strand; PAM type: YTN; PAM sequence: TTG
tatgtttaagtgagaaactt

SEQ ID NO: 347623 - DNA, 20 bp, Artificial Sequence
  Description of Artificial Sequence: Synthetic oligonucleotide
  Target: LAMA2; (+) strand; PAM type: YTN; PAM sequence: TTT
aagtgagaaacttactgatt

SEQ ID NO: 347624 - DNA, 20 bp, Artificial Sequence
  Description of Artificial Sequence: Synthetic oligonucleotide
  Target: LAMA2; (+) strand; PAM type: YTN; PAM sequence: TTA
agtgagaaacttactgattc

SEQ ID NO: 347625 - DNA, 20 bp, Artificial Sequence
  Description of Artificial Sequence: Synthetic oligonucleotide
  Target: LAMA2; (+) strand; PAM type: YTN; PAM sequence: CTT
actgattcttcatacggcac

SEQ ID NO: 347626 - DNA, 20 bp, Artificial Sequence
  Description of Artificial Sequence: Synthetic oligonucleotide
  Target: LAMA2; (+) strand; PAM type: YTN; PAM sequence: TTA
ctgattcttcatacggcaca

SEQ ID NO: 347627 - DNA, 20 bp, Artificial Sequence
  Description of Artificial Sequence: Synthetic oligonucleotide
  Target: LAMA2; (+) strand; PAM type: YTN; PAM sequence: CTG
attcttcatacggcacaaac

SEQ ID NO: 347628 - DNA, 20 bp, Artificial Sequence
  Description of Artificial Sequence: Synthetic oligonucleotide
  Target: LAMA2; (+) strand; PAM type: YTN; PAM sequence: TTC
ttcatacggcacaaacatga

SEQ ID NO: 347629 - DNA, 20 bp, Artificial Sequence
  Description of Artificial Sequence: Synthetic oligonucleotide
  Target: LAMA2; (+) strand; PAM type: YTN; PAM sequence: CTT
catacggcacaaacatgatt

SEQ ID NO: 347630 - DNA, 20 bp, Artificial Sequence
  Description of Artificial Sequence: Synthetic oligonucleotide
  Target: LAMA2; (+) strand; PAM type: YTN; PAM sequence: TTC
atacggcacaaacatgattc

SEQ ID NO: 347631 - DNA, 20 bp, Artificial Sequence
  Description of Artificial Sequence: Synthetic oligonucleotide
  Target: LAMA2; (+) strand; PAM type: YTN; PAM sequence: TTC
accacagcattcacaccaaa

SEQ ID NO: 347632 - DNA, 20 bp, Artificial Sequence
  Description of Artificial Sequence: Synthetic oligonucleotide
  Target: LAMA2; (+) strand; PAM type: YTN; PAM sequence: TTC
acaccaaataaactctaata

SEQ ID NO: 347633 - DNA, 20 bp, Artificial Sequence
  Description of Artificial Sequence: Synthetic oligonucleotide
  Target: LAMA2; (+) strand; PAM type: YTN; PAM sequence: CTC
taataatgttcagaaactat

SEQ ID NO: 347634 - DNA, 20 bp, Artificial Sequence
  Description of Artificial Sequence: Synthetic oligonucleotide
  Target: LAMA2; (+) strand; PAM type: YTN; PAM sequence: CTA
ataatgttcagaaactataa

SEQ ID NO: 347635 - DNA, 20 bp, Artificial Sequence
  Description of Artificial Sequence: Synthetic oligonucleotide
  Target: LAMA2; (+) strand; PAM type: YTN; PAM sequence: TTC
agaaactataatcctagaca

SEQ ID NO: 347636 - DNA, 20 bp, Artificial Sequence
  Description of Artificial Sequence: Synthetic oligonucleotide
  Target: LAMA2; (+) strand; PAM type: YTN; PAM sequence: CTA
taatcctagacatgtagcga

SEQ ID NO: 347637 - DNA, 20 bp, Artificial Sequence
  Description of Artificial Sequence: Synthetic oligonucleotide
  Target: LAMA2; (+) strand; PAM type: YTN; PAM sequence: CTA
gacatgtagcgatttcctcc

SEQ ID NO: 347638 - DNA, 20 bp, Artificial Sequence
  Description of Artificial Sequence: Synthetic oligonucleotide
  Target: LAMA2; (+) strand; PAM type: YTN; PAM sequence: TTT
cctcctttctttcaagtagt

SEQ ID NO: 347639 - DNA, 20 bp, Artificial Sequence
  Description of Artificial Sequence: Synthetic oligonucleotide
  Target: LAMA2; (+) strand; PAM type: YTN; PAM sequence: TTC
ctcctttctttcaagtagta

SEQ ID NO: 347640 - DNA, 20 bp, Artificial Sequence
  Description of Artificial Sequence: Synthetic oligonucleotide
  Target: LAMA2; (+) strand; PAM type: YTN; PAM sequence: CTC
ctttctttcaagtagtattt

SEQ ID NO: 347641 - DNA, 20 bp, Artificial Sequence
  Description of Artificial Sequence: Synthetic oligonucleotide
  Target: LAMA2; (+) strand; PAM type: YTN; PAM sequence: CTT
tctttcaagtagtatttttg

SEQ ID NO: 347642 - DNA, 20 bp, Artificial Sequence
  Description of Artificial Sequence: Synthetic oligonucleotide
  Target: LAMA2; (+) strand; PAM type: YTN; PAM sequence: TTT
ctttcaagtagtatttttgg

SEQ ID NO: 347643 - DNA, 20 bp, Artificial Sequence
  Description of Artificial Sequence: Synthetic oligonucleotide
  Target: LAMA2; (+) strand; PAM type: YTN; PAM sequence: TTC
tttcaagtagtatttttggg

SEQ ID NO: 347644 - DNA, 20 bp, Artificial Sequence
  Description of Artificial Sequence: Synthetic oligonucleotide
  Target: LAMA2; (+) strand; PAM type: YTN; PAM sequence: CTT
tcaagtagtatttttgggga

SEQ ID NO: 347645 - DNA, 20 bp, Artificial Sequence
  Description of Artificial Sequence: Synthetic oligonucleotide
  Target: LAMA2; (+) strand; PAM type: YTN; PAM sequence: TTT
caagtagtatttttggggac

SEQ ID NO: 347646 - DNA, 20 bp, Artificial Sequence
  Description of Artificial Sequence: Synthetic oligonucleotide
  Target: LAMA2; (+) strand; PAM type: YTN; PAM sequence: TTC
aagtagtatttttggggaca

SEQ ID NO: 347647 - DNA, 20 bp, Artificial Sequence
  Description of Artificial Sequence: Synthetic oligonucleotide
  Target: LAMA2; (+) strand; PAM type: YTN; PAM sequence: TTT
ttggggacagtcaagagaga

SEQ ID NO: 347648 - DNA, 20 bp, Artificial Sequence
  Description of Artificial Sequence: Synthetic oligonucleotide
  Target: LAMA2; (+) strand; PAM type: YTN; PAM sequence: TTT
tggggacagtcaagagagaa

SEQ ID NO: 347649 - DNA, 20 bp, Artificial Sequence
  Description of Artificial Sequence: Synthetic oligonucleotide
  Target: LAMA2; (+) strand; PAM type: YTN; PAM sequence: TTT
ggggacagtcaagagagaat

SEQ ID NO: 347650 - DNA, 20 bp, Artificial Sequence
  Description of Artificial Sequence: Synthetic oligonucleotide
  Target: LAMA2; (+) strand; PAM type: YTN; PAM sequence: TTG
gggacagtcaagagagaatt

SEQ ID NO: 347651 - DNA, 20 bp, Artificial Sequence
  Description of Artificial Sequence: Synthetic oligonucleotide
  Target: LAMA2; (+) strand; PAM type: YTN; PAM sequence: TTT
gatagaaatgtaagcctgag

SEQ ID NO: 347652 - DNA, 20 bp, Artificial Sequence
  Description of Artificial Sequence: Synthetic oligonucleotide
  Target: LAMA2; (+) strand; PAM type: YTN; PAM sequence: TTG
atagaaatgtaagcctgagt

SEQ ID NO: 347653 - DNA, 20 bp, Artificial Sequence
  Description of Artificial Sequence: Synthetic oligonucleotide
  Target: LAMA2; (+) strand; PAM type: YTN; PAM sequence: CTG
agttcaatggcactggtgac

SEQ ID NO: 347654 - DNA, 20 bp, Artificial Sequence
  Description of Artificial Sequence: Synthetic oligonucleotide
  Target: LAMA2; (+) strand; PAM type: YTN; PAM sequence: TTC
aatggcactggtgacttttt

SEQ ID NO: 347655 - DNA, 20 bp, Artificial Sequence
  Description of Artificial Sequence: Synthetic oligonucleotide
  Target: LAMA2; (+) strand; PAM type: YTN; PAM sequence: CTG
gtgacttttttaggtgccaa

SEQ ID NO: 347656 - DNA, 20 bp, Artificial Sequence
  Description of Artificial Sequence: Synthetic oligonucleotide
  Target: LAMA2; (+) strand; PAM type: YTN; PAM sequence: CTT
ttttaggtgccaaggttaat

SEQ ID NO: 347657 - DNA, 20 bp, Artificial Sequence
  Description of Artificial Sequence: Synthetic oligonucleotide
  Target: LAMA2; (+) strand; PAM type: YTN; PAM sequence: TTT
tttaggtgccaaggttaatc

SEQ ID NO: 347658 - DNA, 20 bp, Artificial Sequence
  Description of Artificial Sequence: Synthetic oligonucleotide
  Target: LAMA2; (+) strand; PAM type: YTN; PAM sequence: TTT
ttaggtgccaaggttaatct

SEQ ID NO: 347659 - DNA, 20 bp, Artificial Sequence
  Description of Artificial Sequence: Synthetic oligonucleotide
  Target: LAMA2; (+) strand; PAM type: YTN; PAM sequence: TTT
taggtgccaaggttaatctc

SEQ ID NO: 347660 - DNA, 20 bp, Artificial Sequence
  Description of Artificial Sequence: Synthetic oligonucleotide
  Target: LAMA2; (+) strand; PAM type: YTN; PAM sequence: TTT
aggtgccaaggttaatctca

SEQ ID NO: 347661 - DNA, 20 bp, Artificial Sequence
  Description of Artificial Sequence: Synthetic oligonucleotide
  Target: LAMA2; (+) strand; PAM type: YTN; PAM sequence: TTA
ggtgccaaggttaatctcag

SEQ ID NO: 347662 - DNA, 20 bp, Artificial Sequence
  Description of Artificial Sequence: Synthetic oligonucleotide
  Target: LAMA2; (+) strand; PAM type: YTN; PAM sequence: TTA
atctcagagggaaattagtt

SEQ ID NO: 347663 - DNA, 20 bp, Artificial Sequence
  Description of Artificial Sequence: Synthetic oligonucleotide
  Target: LAMA2; (+) strand; PAM type: YTN; PAM sequence: CTC
agagggaaattagttttaat

SEQ ID NO: 347664 - DNA, 20 bp, Artificial Sequence
  Description of Artificial Sequence: Synthetic oligonucleotide
  Target: LAMA2; (+) strand; PAM type: YTN; PAM sequence: TTA
gttttaatggcttcatccat

SEQ ID NO: 347665 - DNA, 20 bp, Artificial Sequence
  Description of Artificial Sequence: Synthetic oligonucleotide
  Target: LAMA2; (+) strand; PAM type: YTN; PAM sequence: TTT
taatggcttcatccatatat

SEQ ID NO: 347666 - DNA, 20 bp, Artificial Sequence
  Description of Artificial Sequence: Synthetic oligonucleotide
  Target: LAMA2; (+) strand; PAM type: YTN; PAM sequence: TTT
aatggcttcatccatatatt

SEQ ID NO: 347667 - DNA, 20 bp, Artificial Sequence
  Description of Artificial Sequence: Synthetic oligonucleotide
  Target: LAMA2; (+) strand; PAM type: YTN; PAM sequence: TTA
atggcttcatccatatattt

SEQ ID NO: 347668 - DNA, 20 bp, Artificial Sequence
  Description of Artificial Sequence: Synthetic oligonucleotide
  Target: LAMA2; (+) strand; PAM type: YTN; PAM sequence: CTT
catccatatatttatccatt

SEQ ID NO: 347669 - DNA, 20 bp, Artificial Sequence
  Description of Artificial Sequence: Synthetic oligonucleotide
  Target: LAMA2; (+) strand; PAM type: YTN; PAM sequence: TTC
atccatatatttatccattc

SEQ ID NO: 347670 - DNA, 20 bp, Artificial Sequence
  Description of Artificial Sequence: Synthetic oligonucleotide
  Target: LAMA2; (+) strand; PAM type: YTN; PAM sequence: TTT
atccattcttttaacattta

SEQ ID NO: 347671 - DNA, 20 bp, Artificial Sequence
  Description of Artificial Sequence: Synthetic oligonucleotide
  Target: LAMA2; (+) strand; PAM type: YTN; PAM sequence: TTA
tccattcttttaacatttaa

SEQ ID NO: 347672 - DNA, 20 bp, Artificial Sequence
  Description of Artificial Sequence: Synthetic oligonucleotide
  Target: LAMA2; (+) strand; PAM type: YTN; PAM sequence: TTC
ttttaacatttaactctaac

SEQ ID NO: 347673 - DNA, 20 bp, Artificial Sequence
  Description of Artificial Sequence: Synthetic oligonucleotide
  Target: LAMA2; (+) strand; PAM type: YTN; PAM sequence: CTT
ttaacatttaactctaacct

SEQ ID NO: 347674 - DNA, 20 bp, Artificial Sequence
  Description of Artificial Sequence: Synthetic oligonucleotide
  Target: LAMA2; (+) strand; PAM type: YTN; PAM sequence: TTT
taacatttaactctaacctc

SEQ ID NO: 347675 - DNA, 20 bp, Artificial Sequence
  Description of Artificial Sequence: Synthetic oligonucleotide
  Target: LAMA2; (+) strand; PAM type: YTN; PAM sequence: TTT
aacatttaactctaacctcc

SEQ ID NO: 347676 - DNA, 20 bp, Artificial Sequence
  Description of Artificial Sequence: Synthetic oligonucleotide
  Target: LAMA2; (+) strand; PAM type: YTN; PAM sequence: TTA
acatttaactctaacctcct

SEQ ID NO: 347677 - DNA, 20 bp, Artificial Sequence
  Description of Artificial Sequence: Synthetic oligonucleotide
  Target: LAMA2; (+) strand; PAM type: YTN; PAM sequence: TTT
aactctaacctccttaagcc

SEQ ID NO: 347678 - DNA, 20 bp, Artificial Sequence
  Description of Artificial Sequence: Synthetic oligonucleotide
  Target: LAMA2; (+) strand; PAM type: YTN; PAM sequence: TTA
actctaacctccttaagcca

SEQ ID NO: 347679 - DNA, 20 bp, Artificial Sequence
  Description of Artificial Sequence: Synthetic oligonucleotide
  Target: LAMA2; (+) strand; PAM type: YTN; PAM sequence: CTC
taacctccttaagccaaaaa

SEQ ID NO: 347680 - DNA, 20 bp, Artificial Sequence
  Description of Artificial Sequence: Synthetic oligonucleotide
  Target: LAMA2; (+) strand; PAM type: YTN; PAM sequence: CTA
acctccttaagccaaaaata

SEQ ID NO: 347681 - DNA, 20 bp, Artificial Sequence
  Description of Artificial Sequence: Synthetic oligonucleotide
  Target: LAMA2; (+) strand; PAM type: YTN; PAM sequence: CTC
cttaagccaaaaatataact

SEQ ID NO: 347682 - DNA, 20 bp, Artificial Sequence
  Description of Artificial Sequence: Synthetic oligonucleotide
  Target: LAMA2; (+) strand; PAM type: YTN; PAM sequence: CTT
aagccaaaaatataactcaa

SEQ ID NO: 347683 - DNA, 20 bp, Artificial Sequence
  Description of Artificial Sequence: Synthetic oligonucleotide
  Target: LAMA2; (+) strand; PAM type: YTN; PAM sequence: TTA
agccaaaaatataactcaat

SEQ ID NO: 347684 - DNA, 20 bp, Artificial Sequence
  Description of Artificial Sequence: Synthetic oligonucleotide
  Target: LAMA2; (+) strand; PAM type: YTN; PAM sequence: CTC
aattctaaacacatttctgg

SEQ ID NO: 347685 - DNA, 20 bp, Artificial Sequence
  Description of Artificial Sequence: Synthetic oligonucleotide
  Target: LAMA2; (+) strand; PAM type: YTN; PAM sequence: TTC
taaacacatttctggctcac

SEQ ID NO: 347686 - DNA, 20 bp, Artificial Sequence
  Description of Artificial Sequence: Synthetic oligonucleotide
  Target: LAMA2; (+) strand; PAM type: YTN; PAM sequence: CTA
aacacatttctggctcacct

SEQ ID NO: 347687 - DNA, 20 bp, Artificial Sequence
  Description of Artificial Sequence: Synthetic oligonucleotide
  Target: LAMA2; (+) strand; PAM type: YTN; PAM sequence: TTT
ctggctcacctgctaggtgc

SEQ ID NO: 347688 - DNA, 20 bp, Artificial Sequence
  Description of Artificial Sequence: Synthetic oligonucleotide
  Target: LAMA2; (+) strand; PAM type: YTN; PAM sequence: TTC
tggctcacctgctaggtgcc

SEQ ID NO: 347689 - DNA, 20 bp, Artificial Sequence
  Description of Artificial Sequence: Synthetic oligonucleotide
  Target: LAMA2; (+) strand; PAM type: YTN; PAM sequence: CTG
gctcacctgctaggtgccag

SEQ ID NO: 347690 - DNA, 20 bp, Artificial Sequence
  Description of Artificial Sequence: Synthetic oligonucleotide
  Target: LAMA2; (+) strand; PAM type: YTN; PAM sequence: CTC
acctgctaggtgccagaaat

SEQ ID NO: 347691 - DNA, 20 bp, Artificial Sequence
  Description of Artificial Sequence: Synthetic oligonucleotide
  Target: LAMA2; (+) strand; PAM type: YTN; PAM sequence: CTG
ctaggtgccagaaatgcgga

SEQ ID NO: 347692 - DNA, 20 bp, Artificial Sequence
  Description of Artificial Sequence: Synthetic oligonucleotide
  Target: LAMA2; (+) strand; PAM type: YTN; PAM sequence: CTA
ggtgccagaaatgcggatct

SEQ ID NO: 347693 - DNA, 20 bp, Artificial Sequence
  Description of Artificial Sequence: Synthetic oligonucleotide
  Target: LAMA2; (+) strand; PAM type: YTN; PAM sequence: CTT
gaggaatatacaagatctgc

SEQ ID NO: 347694 - DNA, 20 bp, Artificial Sequence
  Description of Artificial Sequence: Synthetic oligonucleotide
  Target: LAMA2; (+) strand; PAM type: YTN; PAM sequence: TTG
aggaatatacaagatctgct

SEQ ID NO: 347695 - DNA, 20 bp, Artificial Sequence
  Description of Artificial Sequence: Synthetic oligonucleotide
  Target: LAMA2; (+) strand; PAM type: YTN; PAM sequence: CTG
cttcactcttttagaatccc

SEQ ID NO: 347696 - DNA, 20 bp, Artificial Sequence
  Description of Artificial Sequence: Synthetic oligonucleotide
  Target: LAMA2; (+) strand; PAM type: YTN; PAM sequence: CTT
cactcttttagaatccctgc

SEQ ID NO: 347697 - DNA, 20 bp, Artificial Sequence
  Description of Artificial Sequence: Synthetic oligonucleotide
  Target: LAMA2; (+) strand; PAM type: YTN; PAM sequence: TTC
actcttttagaatccctgca

SEQ ID NO: 347698 - DNA, 20 bp, Artificial Sequence
  Description of Artificial Sequence: Synthetic oligonucleotide
  Target: LAMA2; (+) strand; PAM type: YTN; PAM sequence: CTC
ttttagaatccctgcattag

SEQ ID NO: 347699 - DNA, 20 bp, Artificial Sequence
  Description of Artificial Sequence: Synthetic oligonucleotide
  Target: LAMA2; (+) strand; PAM type: YTN; PAM sequence: CTT
ttagaatccctgcattagag

SEQ ID NO: 347700 - DNA, 20 bp, Artificial Sequence
  Description of Artificial Sequence: Synthetic oligonucleotide
  Target: LAMA2; (+) strand; PAM type: YTN; PAM sequence: TTT
tagaatccctgcattagaga

SEQ ID NO: 347701 - DNA, 20 bp, Artificial Sequence
  Description of Artificial Sequence: Synthetic oligonucleotide
  Target: LAMA2; (+) strand; PAM type: YTN; PAM sequence: TTT
agaatccctgcattagagag

SEQ ID NO: 347702 - DNA, 20 bp, Artificial Sequence
  Description of Artificial Sequence: Synthetic oligonucleotide
  Target: LAMA2; (+) strand; PAM type: YTN; PAM sequence: TTA
gaatccctgcattagagagg

SEQ ID NO: 347703 - DNA, 20 bp, Artificial Sequence
  Description of Artificial Sequence: Synthetic oligonucleotide
  Target: LAMA2; (+) strand; PAM type: YTN; PAM sequence: CTG
cattagagaggattcagtat

SEQ ID NO: 347704 - DNA, 20 bp, Artificial Sequence
  Description of Artificial Sequence: Synthetic oligonucleotide
  Target: LAMA2; (+) strand; PAM type: YTN; PAM sequence: TTA
gagaggattcagtattttca

SEQ ID NO: 347705 - DNA, 20 bp, Artificial Sequence
  Description of Artificial Sequence: Synthetic oligonucleotide
  Target: LAMA2; (+) strand; PAM type: YTN; PAM sequence: TTC
agtattttcagattcatatt

SEQ ID NO: 347706 - DNA, 20 bp, Artificial Sequence
  Description of Artificial Sequence: Synthetic oligonucleotide
  Target: LAMA2; (+) strand; PAM type: YTN; PAM sequence: TTT
tcagattcatattttagaag

SEQ ID NO: 347707 - DNA, 20 bp, Artificial Sequence
  Description of Artificial Sequence: Synthetic oligonucleotide
  Target: LAMA2; (+) strand; PAM type: YTN; PAM sequence: TTT
cagattcatattttagaaga

SEQ ID NO: 347708 - DNA, 20 bp, Artificial Sequence
  Description of Artificial Sequence: Synthetic oligonucleotide
  Target: LAMA2; (+) strand; PAM type: YTN; PAM sequence: TTC
agattcatattttagaagac

SEQ ID NO: 347709 - DNA, 20 bp, Artificial Sequence
  Description of Artificial Sequence: Synthetic oligonucleotide
  Target: LAMA2; (+) strand; PAM type: YTN; PAM sequence: TTC
atattttagaagacattgca

SEQ ID NO: 347710 - DNA, 20 bp, Artificial Sequence
  Description of Artificial Sequence: Synthetic oligonucleotide
  Target: LAMA2; (+) strand; PAM type: YTN; PAM sequence: TTT
tagaagacattgcattctat

SEQ ID NO: 347711 - DNA, 20 bp, Artificial Sequence
  Description of Artificial Sequence: Synthetic oligonucleotide
  Target: LAMA2; (+) strand; PAM type: YTN; PAM sequence: TTT
agaagacattgcattctatt

SEQ ID NO: 347712 - DNA, 20 bp, Artificial Sequence
  Description of Artificial Sequence: Synthetic oligonucleotide
  Target: LAMA2; (+) strand; PAM type: YTN; PAM sequence: TTA
gaagacattgcattctattc

SEQ ID NO: 347713 - DNA, 20 bp, Artificial Sequence
  Description of Artificial Sequence: Synthetic oligonucleotide
  Target: LAMA2; (+) strand; PAM type: YTN; PAM sequence: TTG
cattctattccttactaagc

SEQ ID NO: 347714 - DNA, 20 bp, Artificial Sequence
  Description of Artificial Sequence: Synthetic oligonucleotide
  Target: LAMA2; (+) strand; PAM type: YTN; PAM sequence: TTC
tattccttactaagcatccc

SEQ ID NO: 347715 - DNA, 20 bp, Artificial Sequence
  Description of Artificial Sequence: Synthetic oligonucleotide
  Target: LAMA2; (+) strand; PAM type: YTN; PAM sequence: CTA
ttccttactaagcatcccag

SEQ ID NO: 347716 - DNA, 20 bp, Artificial Sequence
  Description of Artificial Sequence: Synthetic oligonucleotide
  Target: LAMA2; (+) strand; PAM type: YTN; PAM sequence: TTC
cttactaagcatcccaggta

SEQ ID NO: 347717 - DNA, 20 bp, Artificial Sequence
  Description of Artificial Sequence: Synthetic oligonucleotide
  Target: LAMA2; (+) strand; PAM type: YTN; PAM sequence: CTT
actaagcatcccaggtagat

SEQ ID NO: 347718 - DNA, 20 bp, Artificial Sequence
  Description of Artificial Sequence: Synthetic oligonucleotide
  Target: LAMA2; (+) strand; PAM type: YTN; PAM sequence: TTA
ctaagcatcccaggtagatt

SEQ ID NO: 347719 - DNA, 20 bp, Artificial Sequence
  Description of Artificial Sequence: Synthetic oligonucleotide
  Target: LAMA2; (+) strand; PAM type: YTN; PAM sequence: CTA
agcatcccaggtagattcaa

SEQ ID NO: 347720 - DNA, 20 bp, Artificial Sequence
  Description of Artificial Sequence: Synthetic oligonucleotide
  Target: LAMA2; (+) strand; PAM type: YTN; PAM sequence: TTC
aattaggtggaacatattca

SEQ ID NO: 347721 - DNA, 20 bp, Artificial Sequence
  Description of Artificial Sequence: Synthetic oligonucleotide
  Target: LAMA2; (+) strand; PAM type: YTN; PAM sequence: TTA
ggtggaacatattcatattt

SEQ ID NO: 347722 - DNA, 20 bp, Artificial Sequence
  Description of Artificial Sequence: Synthetic oligonucleotide
  Target: LAMA2; (+) strand; PAM type: YTN; PAM sequence: TTC
atatttttatcatgaggcat

SEQ ID NO: 347723 - DNA, 20 bp, Artificial Sequence
  Description of Artificial Sequence: Synthetic oligonucleotide
  Target: LAMA2; (+) strand; PAM type: YTN; PAM sequence: TTT
ttatcatgaggcattttgag

SEQ ID NO: 347724 - DNA, 20 bp, Artificial Sequence
  Description of Artificial Sequence: Synthetic oligonucleotide
  Target: LAMA2; (+) strand; PAM type: YTN; PAM sequence: TTT
tatcatgaggcattttgagt

SEQ ID NO: 347725 - DNA, 20 bp, Artificial Sequence
  Description of Artificial Sequence: Synthetic oligonucleotide
  Target: LAMA2; (+) strand; PAM type: YTN; PAM sequence: TTT
atcatgaggcattttgagtc

SEQ ID NO: 347726 - DNA, 20 bp, Artificial Sequence
  Description of Artificial Sequence: Synthetic oligonucleotide
  Target: LAMA2; (+) strand; PAM type: YTN; PAM sequence: TTA
tcatgaggcattttgagtct

SEQ ID NO: 347727 - DNA, 20 bp, Artificial Sequence
  Description of Artificial Sequence: Synthetic oligonucleotide
  Target: LAMA2; (+) strand; PAM type: YTN; PAM sequence: TTT
tgagtctattctttgtgaca

SEQ ID NO: 347728 - DNA, 20 bp, Artificial Sequence
  Description of Artificial Sequence: Synthetic oligonucleotide
  Target: LAMA2; (+) strand; PAM type: YTN; PAM sequence: TTT
gagtctattctttgtgacac

SEQ ID NO: 347729 - DNA, 20 bp, Artificial Sequence
  Description of Artificial Sequence: Synthetic oligonucleotide
  Target: LAMA2; (+) strand; PAM type: YTN; PAM sequence: TTG
agtctattctttgtgacacc

SEQ ID NO: 347730 - DNA, 20 bp, Artificial Sequence
  Description of Artificial Sequence: Synthetic oligonucleotide
  Target: LAMA2; (+) strand; PAM type: YTN; PAM sequence: CTA
ttctttgtgacaccagaatt

SEQ ID NO: 347731 - DNA, 20 bp, Artificial Sequence
  Description of Artificial Sequence: Synthetic oligonucleotide
  Target: LAMA2; (+) strand; PAM type: YTN; PAM sequence: TTC
tttgtgacaccagaattagt

SEQ ID NO: 347732 - DNA, 20 bp, Artificial Sequence
  Description of Artificial Sequence: Synthetic oligonucleotide
  Target: LAMA2; (+) strand; PAM type: YTN; PAM sequence: CTT
tgtgacaccagaattagttt

SEQ ID NO: 347733 - DNA, 20 bp, Artificial Sequence
  Description of Artificial Sequence: Synthetic oligonucleotide
  Target: LAMA2; (+) strand; PAM type: YTN; PAM sequence: TTT
gtgacaccagaattagtttc

SEQ ID NO: 347734 - DNA, 20 bp, Artificial Sequence
  Description of Artificial Sequence: Synthetic oligonucleotide
  Target: LAMA2; (+) strand; PAM type: YTN; PAM sequence: TTG
tgacaccagaattagtttct

SEQ ID NO: 347735 - DNA, 20 bp, Artificial Sequence
  Description of Artificial Sequence: Synthetic oligonucleotide
  Target: LAMA2; (+) strand; PAM type: YTN; PAM sequence: TTA
gtttctcatctcagagtttg

SEQ ID NO: 347736 - DNA, 20 bp, Artificial Sequence
  Description of Artificial Sequence: Synthetic oligonucleotide
  Target: LAMA2; (+) strand; PAM type: YTN; PAM sequence: TTT
ctcatctcagagtttgctgt

SEQ ID NO: 347737 - DNA, 20 bp, Artificial Sequence
  Description of Artificial Sequence: Synthetic oligonucleotide
  Target: LAMA2; (+) strand; PAM type: YTN; PAM sequence: TTC
tcatctcagagtttgctgta

SEQ ID NO: 347738 - DNA, 20 bp, Artificial Sequence
  Description of Artificial Sequence: Synthetic oligonucleotide
  Target: LAMA2; (+) strand; PAM type: YTN; PAM sequence: CTC
atctcagagtttgctgtatt

SEQ ID NO: 347739 - DNA, 20 bp, Artificial Sequence
  Description of Artificial Sequence: Synthetic oligonucleotide
  Target: LAMA2; (+) strand; PAM type: YTN; PAM sequence: CTC
agagtttgctgtatttctct

SEQ ID NO: 347740 - DNA, 20 bp, Artificial Sequence
  Description of Artificial Sequence: Synthetic oligonucleotide
  Target: LAMA2; (+) strand; PAM type: YTN; PAM sequence: TTT
gctgtatttctctggtgact

SEQ ID NO: 347741 - DNA, 20 bp, Artificial Sequence
  Description of Artificial Sequence: Synthetic oligonucleotide
  Target: LAMA2; (+) strand; PAM type: YTN; PAM sequence: TTG
ctgtatttctctggtgactc

SEQ ID NO: 347742 - DNA, 20 bp, Artificial Sequence
  Description of Artificial Sequence: Synthetic oligonucleotide
  Target: LAMA2; (+) strand; PAM type: YTN; PAM sequence: CTG
tatttctctggtgactcaag

SEQ ID NO: 347743 - DNA, 20 bp, Artificial Sequence
  Description of Artificial Sequence: Synthetic oligonucleotide
  Target: LAMA2; (+) strand; PAM type: YTN; PAM sequence: TTT
ctctggtgactcaagtagtt

SEQ ID NO: 347744 - DNA, 20 bp, Artificial Sequence
  Description of Artificial Sequence: Synthetic oligonucleotide
  Target: LAMA2; (+) strand; PAM type: YTN; PAM sequence: TTC
tctggtgactcaagtagttt

SEQ ID NO: 347745 - DNA, 20 bp, Artificial Sequence
  Description of Artificial Sequence: Synthetic oligonucleotide
  Target: LAMA2; (+) strand; PAM type: YTN; PAM sequence: CTC
tggtgactcaagtagtttat

SEQ ID NO: 347746 - DNA, 20 bp, Artificial Sequence
  Description of Artificial Sequence: Synthetic oligonucleotide
  Target: LAMA2; (+) strand; PAM type: YTN; PAM sequence: CTG
gtgactcaagtagtttattg

SEQ ID NO: 347747 - DNA, 20 bp, Artificial Sequence
  Description of Artificial Sequence: Synthetic oligonucleotide
  Target: LAMA2; (+) strand; PAM type: YTN; PAM sequence: CTC
aagtagtttattggcagtca

SEQ ID NO: 347748 - DNA, 20 bp, Artificial Sequence
  Description of Artificial Sequence: Synthetic oligonucleotide
  Target: LAMA2; (+) strand; PAM type: YTN; PAM sequence: TTT
attggcagtcagtttgtaaa

SEQ ID NO: 347749 - DNA, 20 bp, Artificial Sequence
  Description of Artificial Sequence: Synthetic oligonucleotide
  Target: LAMA2; (+) strand; PAM type: YTN; PAM sequence: TTA
ttggcagtcagtttgtaaaa

SEQ ID NO: 347750 - DNA, 20 bp, Artificial Sequence
  Description of Artificial Sequence: Synthetic oligonucleotide
  Target: LAMA2; (+) strand; PAM type: YTN; PAM sequence: TTG
gcagtcagtttgtaaaaggc

SEQ ID NO: 347751 - DNA, 20 bp, Artificial Sequence
  Description of Artificial Sequence: Synthetic oligonucleotide
  Target: LAMA2; (+) strand; PAM type: YTN; PAM sequence: TTT
gtaaaaggctccctgggatt

SEQ ID NO: 347752 - DNA, 20 bp, Artificial Sequence
  Description of Artificial Sequence: Synthetic oligonucleotide
  Target: LAMA2; (+) strand; PAM type: YTN; PAM sequence: TTG
taaaaggctccctgggatta

SEQ ID NO: 347753 - DNA, 20 bp, Artificial Sequence
  Description of Artificial Sequence: Synthetic oligonucleotide
  Target: LAMA2; (+) strand; PAM type: YTN; PAM sequence: CTC
cctgggattatctaaatgca

SEQ ID NO: 347754 - DNA, 20 bp, Artificial Sequence
  Description of Artificial Sequence: Synthetic oligonucleotide
  Target: LAMA2; (+) strand; PAM type: YTN; PAM sequence: CTG
ggattatctaaatgcaggac

SEQ ID NO: 347755 - DNA, 20 bp, Artificial Sequence
  Description of Artificial Sequence: Synthetic oligonucleotide
  Target: LAMA2; (+) strand; PAM type: YTN; PAM sequence: TTA
tctaaatgcaggacgttagg

SEQ ID NO: 347756 - DNA, 20 bp, Artificial Sequence
  Description of Artificial Sequence: Synthetic oligonucleotide
  Target: LAMA2; (+) strand; PAM type: YTN; PAM sequence: CTA
aatgcaggacgttaggaatg

SEQ ID NO: 347757 - DNA, 20 bp, Artificial Sequence
  Description of Artificial Sequence: Synthetic oligonucleotide
  Target: LAMA2; (+) strand; PAM type: YTN; PAM sequence: TTA
ggaatggaaatatgtatcat

SEQ ID NO: 347758 - DNA, 20 bp, Artificial Sequence
  Description of Artificial Sequence: Synthetic oligonucleotide
  Target: LAMA2; (+) strand; PAM type: YTN; PAM sequence: TTG
cctctcctgtcaaaaaatgt

SEQ ID NO: 347759 - DNA, 20 bp, Artificial Sequence
  Description of Artificial Sequence: Synthetic oligonucleotide
  Target: LAMA2; (+) strand; PAM type: YTN; PAM sequence: CTC
tcctgtcaaaaaatgtaatt

SEQ ID NO: 347760 - DNA, 20 bp, Artificial Sequence
  Description of Artificial Sequence: Synthetic oligonucleotide
  Target: LAMA2; (+) strand; PAM type: YTN; PAM sequence: CTC
ctgtcaaaaaatgtaattaa

SEQ ID NO: 347761 - DNA, 20 bp, Artificial Sequence
  Description of Artificial Sequence: Synthetic oligonucleotide
  Target: LAMA2; (+) strand; PAM type: YTN; PAM sequence: CTG
tcaaaaaatgtaattaacac

SEQ ID NO: 347762 - DNA, 20 bp, Artificial Sequence
  Description of Artificial Sequence: Synthetic oligonucleotide
  Target: LAMA2; (+) strand; PAM type: YTN; PAM sequence: TTA
acacacatgatatatcatct

SEQ ID NO: 347763 - DNA, 20 bp, Artificial Sequence
  Description of Artificial Sequence: Synthetic oligonucleotide
  Target: LAMA2; (+) strand; PAM type: YTN; PAM sequence: CTT
acaaagtggatgaaaattcc

SEQ ID NO: 347764 - DNA, 20 bp, Artificial Sequence
  Description of Artificial Sequence: Synthetic oligonucleotide
  Target: LAMA2; (+) strand; PAM type: YTN; PAM sequence: TTA
caaagtggatgaaaattcca

SEQ ID NO: 347765 - DNA, 20 bp, Artificial Sequence
  Description of Artificial Sequence: Synthetic oligonucleotide
  Target: LAMA2; (+) strand; PAM type: YTN; PAM sequence: TTC
cagtgggtgaccttgagtca

SEQ ID NO: 347766 - DNA, 20 bp, Artificial Sequence
  Description of Artificial Sequence: Synthetic oligonucleotide
  Target: LAMA2; (+) strand; PAM type: YTN; PAM sequence: CTT
gagtcacagctcctcagtgc

SEQ ID NO: 347767 - DNA, 20 bp, Artificial Sequence
  Description of Artificial Sequence: Synthetic oligonucleotide
  Target: LAMA2; (+) strand; PAM type: YTN; PAM sequence: TTG
agtcacagctcctcagtgca

SEQ ID NO: 347768 - DNA, 20 bp, Artificial Sequence
  Description of Artificial Sequence: Synthetic oligonucleotide
  Target: LAMA2; (+) strand; PAM type: YTN; PAM sequence: CTC
ctcagtgcacacactgtcct

SEQ ID NO: 347769 - DNA, 20 bp, Artificial Sequence
  Description of Artificial Sequence: Synthetic oligonucleotide
  Target: LAMA2; (+) strand; PAM type: YTN; PAM sequence: CTC
agtgcacacactgtcctgta

SEQ ID NO: 347770 - DNA, 20 bp, Artificial Sequence
  Description of Artificial Sequence: Synthetic oligonucleotide
  Target: LAMA2; (+) strand; PAM type: YTN; PAM sequence: CTG
tcctgtacccaagcatctcc

SEQ ID NO: 347771 - DNA, 20 bp, Artificial Sequence
  Description of Artificial Sequence: Synthetic oligonucleotide
  Target: LAMA2; (+) strand; PAM type: YTN; PAM sequence: CTG
tacccaagcatctcccagat

SEQ ID NO: 347772 - DNA, 20 bp, Artificial Sequence
  Description of Artificial Sequence: Synthetic oligonucleotide
  Target: LAMA2; (+) strand; PAM type: YTN; PAM sequence: CTC
ccagatagcacagaactccc

SEQ ID NO: 347773 - DNA, 20 bp, Artificial Sequence
  Description of Artificial Sequence: Synthetic oligonucleotide
  Target: LAMA2; (+) strand; PAM type: YTN; PAM sequence: CTC
ccacttcctgcatccctgta

SEQ ID NO: 347774 - DNA, 20 bp, Artificial Sequence
  Description of Artificial Sequence: Synthetic oligonucleotide
  Target: LAMA2; (+) strand; PAM type: YTN; PAM sequence: CTT
cctgcatccctgtaccttta

SEQ ID NO: 347775 - DNA, 20 bp, Artificial Sequence
  Description of Artificial Sequence: Synthetic oligonucleotide
  Target: LAMA2; (+) strand; PAM type: YTN; PAM sequence: TTC
ctgcatccctgtacctttag

SEQ ID NO: 347776 - DNA, 20 bp, Artificial Sequence
  Description of Artificial Sequence: Synthetic oligonucleotide
  Target: LAMA2; (+) strand; PAM type: YTN; PAM sequence: CTG
catccctgtacctttagcac

SEQ ID NO: 347777 - DNA, 20 bp, Artificial Sequence
  Description of Artificial Sequence: Synthetic oligonucleotide
  Target: LAMA2; (+) strand; PAM type: YTN; PAM sequence: CTG
tacctttagcactgtgtgca

SEQ ID NO: 347778 - DNA, 20 bp, Artificial Sequence
  Description of Artificial Sequence: Synthetic oligonucleotide
  Target: LAMA2; (+) strand; PAM type: YTN; PAM sequence: CTT
tagcactgtgtgcatgtttg

SEQ ID NO: 347779 - DNA, 20 bp, Artificial Sequence
  Description of Artificial Sequence: Synthetic oligonucleotide
  Target: LAMA2; (+) strand; PAM type: YTN; PAM sequence: TTT
agcactgtgtgcatgtttgt

SEQ ID NO: 347780 - DNA, 20 bp, Artificial Sequence
  Description of Artificial Sequence: Synthetic oligonucleotide
  Target: LAMA2; (+) strand; PAM type: YTN; PAM sequence: TTA
gcactgtgtgcatgtttgtg

SEQ ID NO: 347781 - DNA, 20 bp, Artificial Sequence
  Description of Artificial Sequence: Synthetic oligonucleotide
  Target: LAMA2; (+) strand; PAM type: YTN; PAM sequence: CTG
tgtgcatgtttgtgtgtgta

SEQ ID NO: 347782 - DNA, 20 bp, Artificial Sequence
  Description of Artificial Sequence: Synthetic oligonucleotide
  Target: LAMA2; (+) strand; PAM type: YTN; PAM sequence: TTT
gtgtgtgtatgtgtgtgtga

SEQ ID NO: 347783 - DNA, 20 bp, Artificial Sequence
  Description of Artificial Sequence: Synthetic oligonucleotide
  Target: LAMA2; (+) strand; PAM type: YTN; PAM sequence: TTG
tgtgtgtatgtgtgtgtgag

SEQ ID NO: 347784 - DNA, 20 bp, Artificial Sequence
  Description of Artificial Sequence: Synthetic oligonucleotide
  Target: LAMA2; (+) strand; PAM type: YTN; PAM sequence: TTT
tcagttcaaaatctaccact

SEQ ID NO: 347785 - DNA, 20 bp, Artificial Sequence
  Description of Artificial Sequence: Synthetic oligonucleotide
  Target: LAMA2; (+) strand; PAM type: YTN; PAM sequence: TTT
cagttcaaaatctaccactc

SEQ ID NO: 347786 - DNA, 20 bp, Artificial Sequence
  Description of Artificial Sequence: Synthetic oligonucleotide
  Target: LAMA2; (+) strand; PAM type: YTN; PAM sequence: TTC
agttcaaaatctaccactca

SEQ ID NO: 347787 - DNA, 20 bp, Artificial Sequence
  Description of Artificial Sequence: Synthetic oligonucleotide
  Target: LAMA2; (+) strand; PAM type: YTN; PAM sequence: TTC
aaaatctaccactcaatttc

SEQ ID NO: 347788 - DNA, 20 bp, Artificial Sequence
  Description of Artificial Sequence: Synthetic oligonucleotide
  Target: LAMA2; (+) strand; PAM type: YTN; PAM sequence: CTA
ccactcaatttcactttctt

SEQ ID NO: 347789 - DNA, 20 bp, Artificial Sequence
  Description of Artificial Sequence: Synthetic oligonucleotide
  Target: LAMA2; (+) strand; PAM type: YTN; PAM sequence: CTC
aatttcactttctttaacaa

SEQ ID NO: 347790 - DNA, 20 bp, Artificial Sequence
  Description of Artificial Sequence: Synthetic oligonucleotide
  Target: LAMA2; (+) strand; PAM type: YTN; PAM sequence: TTT
cactttctttaacaattttg

SEQ ID NO: 347791 - DNA, 20 bp, Artificial Sequence
  Description of Artificial Sequence: Synthetic oligonucleotide
  Target: LAMA2; (+) strand; PAM type: YTN; PAM sequence: TTC
actttctttaacaattttgg

SEQ ID NO: 347792 - DNA, 20 bp, Artificial Sequence
  Description of Artificial Sequence: Synthetic oligonucleotide
  Target: LAMA2; (+) strand; PAM type: YTN; PAM sequence: CTT
tctttaacaattttggtttg

SEQ ID NO: 347793 - DNA, 20 bp, Artificial Sequence
  Description of Artificial Sequence: Synthetic oligonucleotide
  Target: LAMA2; (+) strand; PAM type: YTN; PAM sequence: TTT
ctttaacaattttggtttgg

SEQ ID NO: 347794 - DNA, 20 bp, Artificial Sequence
  Description of Artificial Sequence: Synthetic oligonucleotide
  Target: LAMA2; (+) strand; PAM type: YTN; PAM sequence: TTC
tttaacaattttggtttggt

SEQ ID NO: 347795 - DNA, 20 bp, Artificial Sequence
  Description of Artificial Sequence: Synthetic oligonucleotide
  Target: LAMA2; (+) strand; PAM type: YTN; PAM sequence: CTT
taacaattttggtttggttc

SEQ ID NO: 347796 - DNA, 20 bp, Artificial Sequence
  Description of Artificial Sequence: Synthetic oligonucleotide
  Target: LAMA2; (+) strand; PAM type: YTN; PAM sequence: TTT
aacaattttggtttggttca

SEQ ID NO: 347797 - DNA, 20 bp, Artificial Sequence
  Description of Artificial Sequence: Synthetic oligonucleotide
  Target: LAMA2; (+) strand; PAM type: YTN; PAM sequence: TTA
acaattttggtttggttcaa

SEQ ID NO: 347798 - DNA, 20 bp, Artificial Sequence
  Description of Artificial Sequence: Synthetic oligonucleotide
  Target: LAMA2; (+) strand; PAM type: YTN; PAM sequence: TTT
tggtttggttcaatttgttg

SEQ ID NO: 347799 - DNA, 20 bp, Artificial Sequence
  Description of Artificial Sequence: Synthetic oligonucleotide
  Target: LAMA2; (+) strand; PAM type: YTN; PAM sequence: TTT
ggtttggttcaatttgttgc

SEQ ID NO: 347800 - DNA, 20 bp, Artificial Sequence
  Description of Artificial Sequence: Synthetic oligonucleotide
  Target: LAMA2; (+) strand; PAM type: YTN; PAM sequence: TTG
gtttggttcaatttgttgca

SEQ ID NO: 347801 - DNA, 20 bp, Artificial Sequence
  Description of Artificial Sequence: Synthetic oligonucleotide
  Target: LAMA2; (+) strand; PAM type: YTN; PAM sequence: TTT
ggttcaatttgttgcatagg

SEQ ID NO: 347802 - DNA, 20 bp, Artificial Sequence
  Description of Artificial Sequence: Synthetic oligonucleotide
  Target: LAMA2; (+) strand; PAM type: YTN; PAM sequence: TTG
gttcaatttgttgcataggt

SEQ ID NO: 347803 - DNA, 20 bp, Artificial Sequence
  Description of Artificial Sequence: Synthetic oligonucleotide
  Target: LAMA2; (+) strand; PAM type: YTN; PAM sequence: TTC
aatttgttgcataggtaata

SEQ ID NO: 347804 - DNA, 20 bp, Artificial Sequence
  Description of Artificial Sequence: Synthetic oligonucleotide
  Target: LAMA2; (+) strand; PAM type: YTN; PAM sequence: TTT
gttgcataggtaataataat

SEQ ID NO: 347805 - DNA, 20 bp, Artificial Sequence
  Description of Artificial Sequence: Synthetic oligonucleotide
  Target: LAMA2; (+) strand; PAM type: YTN; PAM sequence: TTG
ttgcataggtaataataatc

SEQ ID NO: 347806 - DNA, 20 bp, Artificial Sequence
  Description of Artificial Sequence: Synthetic oligonucleotide
  Target: LAMA2; (+) strand; PAM type: YTN; PAM sequence: TTG
cataggtaataataatccat

SEQ ID NO: 347807 - DNA, 20 bp, Artificial Sequence
  Description of Artificial Sequence: Synthetic oligonucleotide
  Target: LAMA2; (+) strand; PAM type: YTN; PAM sequence: TTT
acagaatacaaaaatagtgt

SEQ ID NO: 347808 - DNA, 20 bp, Artificial Sequence
  Description of Artificial Sequence: Synthetic oligonucleotide
  Target: LAMA2; (+) strand; PAM type: YTN; PAM sequence: TTA
cagaatacaaaaatagtgta

SEQ ID NO: 347809 - DNA, 20 bp, Artificial Sequence
  Description of Artificial Sequence: Synthetic oligonucleotide
  Target: LAMA2; (+) strand; PAM type: YTN; PAM sequence: CTT
cttcctatctgtatgttgag

SEQ ID NO: 347810 - DNA, 20 bp, Artificial Sequence
  Description of Artificial Sequence: Synthetic oligonucleotide
  Target: LAMA2; (+) strand; PAM type: YTN; PAM sequence: TTC
ttcctatctgtatgttgaga

SEQ ID NO: 347811 - DNA, 20 bp, Artificial Sequence
  Description of Artificial Sequence: Synthetic oligonucleotide
  Target: LAMA2; (+) strand; PAM type: YTN; PAM sequence: CTT
cctatctgtatgttgagaga

SEQ ID NO: 347812 - DNA, 20 bp, Artificial Sequence
  Description of Artificial Sequence: Synthetic oligonucleotide
  Target: LAMA2; (+) strand; PAM type: YTN; PAM sequence: TTC
ctatctgtatgttgagagat

SEQ ID NO: 347813 - DNA, 20 bp, Artificial Sequence
  Description of Artificial Sequence: Synthetic oligonucleotide
  Target: LAMA2; (+) strand; PAM type: YTN; PAM sequence: CTA
tctgtatgttgagagattcc

SEQ ID NO: 347814 - DNA, 20 bp, Artificial Sequence
  Description of Artificial Sequence: Synthetic oligonucleotide
  Target: LAMA2; (+) strand; PAM type: YTN; PAM sequence: CTG
tatgttgagagattcctcat

SEQ ID NO: 347815 - DNA, 20 bp, Artificial Sequence
  Description of Artificial Sequence: Synthetic oligonucleotide
  Target: LAMA2; (+) strand; PAM type: YTN; PAM sequence: TTG
agagattcctcattcttttt

SEQ ID NO: 347816 - DNA, 20 bp, Artificial Sequence
  Description of Artificial Sequence: Synthetic oligonucleotide
  Target: LAMA2; (+) strand; PAM type: YTN; PAM sequence: TTC
ctcattcttttttatggttg

SEQ ID NO: 347817 - DNA, 20 bp, Artificial Sequence
  Description of Artificial Sequence: Synthetic oligonucleotide
  Target: LAMA2; (+) strand; PAM type: YTN; PAM sequence: CTC
attcttttttatggttgcag

SEQ ID NO: 347818 - DNA, 20 bp, Artificial Sequence
  Description of Artificial Sequence: Synthetic oligonucleotide
  Target: LAMA2; (+) strand; PAM type: YTN; PAM sequence: TTC
ttttttatggttgcagataa

SEQ ID NO: 347819 - DNA, 20 bp, Artificial Sequence
  Description of Artificial Sequence: Synthetic oligonucleotide
  Target: LAMA2; (+) strand; PAM type: YTN; PAM sequence: CTT
ttttatggttgcagataatt

SEQ ID NO: 347820 - DNA, 20 bp, Artificial Sequence
  Description of Artificial Sequence: Synthetic oligonucleotide
  Target: LAMA2; (+) strand; PAM type: YTN; PAM sequence: TTT
tttatggttgcagataattc

SEQ ID NO: 347821 - DNA, 20 bp, Artificial Sequence
  Description of Artificial Sequence: Synthetic oligonucleotide
  Target: LAMA2; (+) strand; PAM type: YTN; PAM sequence: TTT
ttatggttgcagataattca

SEQ ID NO: 347822 - DNA, 20 bp, Artificial Sequence
  Description of Artificial Sequence: Synthetic oligonucleotide
  Target: LAMA2; (+) strand; PAM type: YTN; PAM sequence: TTT
tatggttgcagataattcat

SEQ ID NO: 347823 - DNA, 20 bp, Artificial Sequence
  Description of Artificial Sequence: Synthetic oligonucleotide
  Target: LAMA2; (+) strand; PAM type: YTN; PAM sequence: TTT
atggttgcagataattcatt

SEQ ID NO: 347824 - DNA, 20 bp, Artificial Sequence
  Description of Artificial Sequence: Synthetic oligonucleotide
  Target: LAMA2; (+) strand; PAM type: YTN; PAM sequence: TTA
tggttgcagataattcatta

SEQ ID NO: 347825 - DNA, 20 bp, Artificial Sequence
  Description of Artificial Sequence: Synthetic oligonucleotide
  Target: LAMA2; (+) strand; PAM type: YTN; PAM sequence: TTG
cagataattcattatgcaga

SEQ ID NO: 347826 - DNA, 20 bp, Artificial Sequence
  Description of Artificial Sequence: Synthetic oligonucleotide
  Target: LAMA2; (+) strand; PAM type: YTN; PAM sequence: TTC
attatgcagatatacaattt

SEQ ID NO: 347827 - DNA, 20 bp, Artificial Sequence
  Description of Artificial Sequence: Synthetic oligonucleotide
  Target: LAMA2; (+) strand; PAM type: YTN; PAM sequence: TTA
tgcagatatacaatttattt

SEQ ID NO: 347828 - DNA, 20 bp, Artificial Sequence
  Description of Artificial Sequence: Synthetic oligonucleotide
  Target: LAMA2; (+) strand; PAM type: YTN; PAM sequence: TTT
atttaaccagtcccatattg

SEQ ID NO: 347829 - DNA, 20 bp, Artificial Sequence
  Description of Artificial Sequence: Synthetic oligonucleotide
  Target: LAMA2; (+) strand; PAM type: YTN; PAM sequence: TTA
tttaaccagtcccatattga

SEQ ID NO: 347830 - DNA, 20 bp, Artificial Sequence
  Description of Artificial Sequence: Synthetic oligonucleotide
  Target: LAMA2; (+) strand; PAM type: YTN; PAM sequence: TTT
aaccagtcccatattgatgg

SEQ ID NO: 347831 - DNA, 20 bp, Artificial Sequence
  Description of Artificial Sequence: Synthetic oligonucleotide
  Target: LAMA2; (+) strand; PAM type: YTN; PAM sequence: TTA
accagtcccatattgatgga

SEQ ID NO: 347832 - DNA, 20 bp, Artificial Sequence
  Description of Artificial Sequence: Synthetic oligonucleotide
  Target: LAMA2; (+) strand; PAM type: YTN; PAM sequence: TTG
atggatattaggttatttcc

SEQ ID NO: 347833 - DNA, 20 bp, Artificial Sequence
  Description of Artificial Sequence: Synthetic oligonucleotide
  Target: LAMA2; (+) strand; PAM type: YTN; PAM sequence: TTA
ggttatttccagtcctttga

SEQ ID NO: 347834 - DNA, 20 bp, Artificial Sequence
  Description of Artificial Sequence: Synthetic oligonucleotide
  Target: LAMA2; (+) strand; PAM type: YTN; PAM sequence: TTA
tttccagtcctttgatgtga

SEQ ID NO: 347835 - DNA, 20 bp, Artificial Sequence
  Description of Artificial Sequence: Synthetic oligonucleotide
  Target: LAMA2; (+) strand; PAM type: YTN; PAM sequence: TTT
ccagtcctttgatgtgacca

SEQ ID NO: 347836 - DNA, 20 bp, Artificial Sequence
  Description of Artificial Sequence: Synthetic oligonucleotide
  Target: LAMA2; (+) strand; PAM type: YTN; PAM sequence: TTC
cagtcctttgatgtgaccaa

SEQ ID NO: 347837 - DNA, 20 bp, Artificial Sequence
  Description of Artificial Sequence: Synthetic oligonucleotide
  Target: LAMA2; (+) strand; PAM type: YTN; PAM sequence: CTT
tgatgtgaccaaaaaagatt

SEQ ID NO: 347838 - DNA, 20 bp, Artificial Sequence
  Description of Artificial Sequence: Synthetic oligonucleotide
  Target: LAMA2; (+) strand; PAM type: YTN; PAM sequence: TTT
gatgtgaccaaaaaagatta

SEQ ID NO: 347839 - DNA, 20 bp, Artificial Sequence
  Description of Artificial Sequence: Synthetic oligonucleotide
  Target: LAMA2; (+) strand; PAM type: YTN; PAM sequence: TTG
atgtgaccaaaaaagattat

SEQ ID NO: 347840 - DNA, 20 bp, Artificial Sequence
  Description of Artificial Sequence: Synthetic oligonucleotide
  Target: LAMA2; (+) strand; PAM type: YTN; PAM sequence: TTA
taataaaaaatgctgaaaga

SEQ ID NO: 347841 - DNA, 20 bp, Artificial Sequence
  Description of Artificial Sequence: Synthetic oligonucleotide
  Target: LAMA2; (+) strand; PAM type: YTN; PAM sequence: CTG
aaagaataatattgtctttg

SEQ ID NO: 347842 - DNA, 20 bp, Artificial Sequence
  Description of Artificial Sequence: Synthetic oligonucleotide
  Target: LAMA2; (+) strand; PAM type: YTN; PAM sequence: TTG
tctttgtcagtttgggcggc

SEQ ID NO: 347843 - DNA, 20 bp, Artificial Sequence
  Description of Artificial Sequence: Synthetic oligonucleotide
  Target: LAMA2; (+) strand; PAM type: YTN; PAM sequence: CTT
tgtcagtttgggcggccata

SEQ ID NO: 347844 - DNA, 20 bp, Artificial Sequence
  Description of Artificial Sequence: Synthetic oligonucleotide
  Target: LAMA2; (+) strand; PAM type: YTN; PAM sequence: TTT
gtcagtttgggcggccataa

SEQ ID NO: 347845 - DNA, 20 bp, Artificial Sequence
  Description of Artificial Sequence: Synthetic oligonucleotide
  Target: LAMA2; (+) strand; PAM type: YTN; PAM sequence: TTG
tcagtttgggcggccataag

SEQ ID NO: 347846 - DNA, 20 bp, Artificial Sequence
  Description of Artificial Sequence: Synthetic oligonucleotide
  Target: LAMA2; (+) strand; PAM type: YTN; PAM sequence: TTT
gggcggccataagaaagttc

SEQ ID NO: 347847 - DNA, 20 bp, Artificial Sequence
  Description of Artificial Sequence: Synthetic oligonucleotide
  Target: LAMA2; (+) strand; PAM type: YTN; PAM sequence: TTG
ggcggccataagaaagttcc

SEQ ID NO: 347848 - DNA, 20 bp, Artificial Sequence
  Description of Artificial Sequence: Synthetic oligonucleotide
  Target: LAMA2; (+) strand; PAM type: YTN; PAM sequence: TTC
catagactaggtgggttgta

SEQ ID NO: 347849 - DNA, 20 bp, Artificial Sequence
  Description of Artificial Sequence: Synthetic oligonucleotide
  Target: LAMA2; (+) strand; PAM type: YTN; PAM sequence: CTA
ggtgggttgtaaacaagaga

SEQ ID NO: 347850 - DNA, 20 bp, Artificial Sequence
  Description of Artificial Sequence: Synthetic oligonucleotide
  Target: LAMA2; (+) strand; PAM type: YTN; PAM sequence: TTG
taaacaagagaaatttattt

SEQ ID NO: 347851 - DNA, 20 bp, Artificial Sequence
  Description of Artificial Sequence: Synthetic oligonucleotide
  Target: LAMA2; (+) strand; PAM type: YTN; PAM sequence: TTT
atttccccacagtactggag

SEQ ID NO: 347852 - DNA, 20 bp, Artificial Sequence
  Description of Artificial Sequence: Synthetic oligonucleotide
  Target: LAMA2; (+) strand; PAM type: YTN; PAM sequence: TTA
tttccccacagtactggagg

SEQ ID NO: 347853 - DNA, 20 bp, Artificial Sequence
  Description of Artificial Sequence: Synthetic oligonucleotide
  Target: LAMA2; (+) strand; PAM type: YTN; PAM sequence: TTT
ccccacagtactggaggctg

SEQ ID NO: 347854 - DNA, 20 bp, Artificial Sequence
  Description of Artificial Sequence: Synthetic oligonucleotide
  Target: LAMA2; (+) strand; PAM type: YTN; PAM sequence: TTC
cccacagtactggaggctga

SEQ ID NO: 347855 - DNA, 20 bp, Artificial Sequence
  Description of Artificial Sequence: Synthetic oligonucleotide
  Target: LAMA2; (+) strand; PAM type: YTN; PAM sequence: CTG
gaggctgaaaatctgagatc

SEQ ID NO: 347856 - DNA, 20 bp, Artificial Sequence
  Description of Artificial Sequence: Synthetic oligonucleotide
  Target: LAMA2; (+) strand; PAM type: YTN; PAM sequence: CTG
aaaatctgagatcagggtgt

SEQ ID NO: 347857 - DNA, 20 bp, Artificial Sequence
  Description of Artificial Sequence: Synthetic oligonucleotide
  Target: LAMA2; (+) strand; PAM type: YTN; PAM sequence: CTG
agatcagggtgtccgcatgg

SEQ ID NO: 347858 - DNA, 20 bp, Artificial Sequence
  Description of Artificial Sequence: Synthetic oligonucleotide
  Target: LAMA2; (+) strand; PAM type: YTN; PAM sequence: TTA
tgctttggtgaggactgttt

SEQ ID NO: 347859 - DNA, 20 bp, Artificial Sequence
  Description of Artificial Sequence: Synthetic oligonucleotide
  Target: LAMA2; (+) strand; PAM type: YTN; PAM sequence: CTT
tggtgaggactgtttcgggg

SEQ ID NO: 347860 - DNA, 20 bp, Artificial Sequence
  Description of Artificial Sequence: Synthetic oligonucleotide
  Target: LAMA2; (+) strand; PAM type: YTN; PAM sequence: TTT
ggtgaggactgtttcggggc

SEQ ID NO: 347861 - DNA, 20 bp, Artificial Sequence
  Description of Artificial Sequence: Synthetic oligonucleotide
  Target: LAMA2; (+) strand; PAM type: YTN; PAM sequence: TTG
gtgaggactgtttcggggct

SEQ ID NO: 347862 - DNA, 20 bp, Artificial Sequence
  Description of Artificial Sequence: Synthetic oligonucleotide
  Target: LAMA2; (+) strand; PAM type: YTN; PAM sequence: CTG
tttcggggcttgcagactgc

SEQ ID NO: 347863 - DNA, 20 bp, Artificial Sequence
  Description of Artificial Sequence: Synthetic oligonucleotide
  Target: LAMA2; (+) strand; PAM type: YTN; PAM sequence: TTT
cggggcttgcagactgctga

SEQ ID NO: 347864 - DNA, 20 bp, Artificial Sequence
  Description of Artificial Sequence: Synthetic oligonucleotide
  Target: LAMA2; (+) strand; PAM type: YTN; PAM sequence: TTC
ggggcttgcagactgctgac

SEQ ID NO: 347865 - DNA, 20 bp, Artificial Sequence
  Description of Artificial Sequence: Synthetic oligonucleotide
  Target: LAMA2; (+) strand; PAM type: YTN; PAM sequence: CTT
gcagactgctgacttcttgt

SEQ ID NO: 347866 - DNA, 20 bp, Artificial Sequence
  Description of Artificial Sequence: Synthetic oligonucleotide
  Target: LAMA2; (+) strand; PAM type: YTN; PAM sequence: TTG
cagactgctgacttcttgta

SEQ ID NO: 347867 - DNA, 20 bp, Artificial Sequence
  Description of Artificial Sequence: Synthetic oligonucleotide
  Target: LAMA2; (+) strand; PAM type: YTN; PAM sequence: CTG
ctgacttcttgtagcctcac

SEQ ID NO: 347868 - DNA, 20 bp, Artificial Sequence
  Description of Artificial Sequence: Synthetic oligonucleotide
  Target: LAMA2; (+) strand; PAM type: YTN; PAM sequence: CTG
acttcttgtagcctcacatg

SEQ ID NO: 347869 - DNA, 20 bp, Artificial Sequence
  Description of Artificial Sequence: Synthetic oligonucleotide
  Target: LAMA2; (+) strand; PAM type: YTN; PAM sequence: CTT
cttgtagcctcacatggttg

SEQ ID NO: 347870 - DNA, 20 bp, Artificial Sequence
  Description of Artificial Sequence: Synthetic oligonucleotide
  Target: LAMA2; (+) strand; PAM type: YTN; PAM sequence: TTC
ttgtagcctcacatggttga

SEQ ID NO: 347871 - DNA, 20 bp, Artificial Sequence
  Description of Artificial Sequence: Synthetic oligonucleotide
  Target: LAMA2; (+) strand; PAM type: YTN; PAM sequence: CTT
gtagcctcacatggttgaaa

SEQ ID NO: 347872 - DNA, 20 bp, Artificial Sequence
  Description of Artificial Sequence: Synthetic oligonucleotide
  Target: LAMA2; (+) strand; PAM type: YTN; PAM sequence: TTG
tagcctcacatggttgaaag

SEQ ID NO: 347873 - DNA, 20 bp, Artificial Sequence
  Description of Artificial Sequence: Synthetic oligonucleotide
  Target: LAMA2; (+) strand; PAM type: YTN; PAM sequence: CTC
acatggttgaaagagagcta

SEQ ID NO: 347874 - DNA, 20 bp, Artificial Sequence
  Description of Artificial Sequence: Synthetic oligonucleotide
  Target: LAMA2; (+) strand; PAM type: YTN; PAM sequence: TTG
aaagagagctagctagctct

SEQ ID NO: 347875 - DNA, 20 bp, Artificial Sequence
  Description of Artificial Sequence: Synthetic oligonucleotide
  Target: LAMA2; (+) strand; PAM type: YTN; PAM sequence: CTA
gctagctctctggcctcttt

SEQ ID NO: 347876 - DNA, 20 bp, Artificial Sequence
  Description of Artificial Sequence: Synthetic oligonucleotide
  Target: LAMA2; (+) strand; PAM type: YTN; PAM sequence: CTA
gctctctggcctctttttat

SEQ ID NO: 347877 - DNA, 20 bp, Artificial Sequence
  Description of Artificial Sequence: Synthetic oligonucleotide
  Target: LAMA2; (+) strand; PAM type: YTN; PAM sequence: CTC
tctggcctctttttattagg

SEQ ID NO: 347878 - DNA, 20 bp, Artificial Sequence
  Description of Artificial Sequence: Synthetic oligonucleotide
  Target: LAMA2; (+) strand; PAM type: YTN; PAM sequence: CTC
tggcctctttttattaggtc

SEQ ID NO: 347879 - DNA, 20 bp, Artificial Sequence
  Description of Artificial Sequence: Synthetic oligonucleotide
  Target: LAMA2; (+) strand; PAM type: YTN; PAM sequence: CTG
gcctctttttattaggtcac

SEQ ID NO: 347880 - DNA, 20 bp, Artificial Sequence
  Description of Artificial Sequence: Synthetic oligonucleotide
  Target: LAMA2; (+) strand; PAM type: YTN; PAM sequence: CTC
tttttattaggtcactaatc

SEQ ID NO: 347881 - DNA, 20 bp, Artificial Sequence
  Description of Artificial Sequence: Synthetic oligonucleotide
  Target: LAMA2; (+) strand; PAM type: YTN; PAM sequence: CTT
tttattaggtcactaatctc

SEQ ID NO: 347882 - DNA, 20 bp, Artificial Sequence
  Description of Artificial Sequence: Synthetic oligonucleotide
  Target: LAMA2; (+) strand; PAM type: YTN; PAM sequence: TTT
ttattaggtcactaatctca

SEQ ID NO: 347883 - DNA, 20 bp, Artificial Sequence
  Description of Artificial Sequence: Synthetic oligonucleotide
  Target: LAMA2; (+) strand; PAM type: YTN; PAM sequence: TTT
tattaggtcactaatctcat

SEQ ID NO: 347884 - DNA, 20 bp, Artificial Sequence
  Description of Artificial Sequence: Synthetic oligonucleotide
  Target: LAMA2; (+) strand; PAM type: YTN; PAM sequence: TTT
attaggtcactaatctcatt

SEQ ID NO: 347885 - DNA, 20 bp, Artificial Sequence
  Description of Artificial Sequence: Synthetic oligonucleotide
  Target: LAMA2; (+) strand; PAM type: YTN; PAM sequence: TTA
ttaggtcactaatctcattc

SEQ ID NO: 347886 - DNA, 20 bp, Artificial Sequence
  Description of Artificial Sequence: Synthetic oligonucleotide
  Target: LAMA2; (+) strand; PAM type: YTN; PAM sequence: TTA
ggtcactaatctcattcagg

SEQ ID NO: 347887 - DNA, 20 bp, Artificial Sequence
  Description of Artificial Sequence: Synthetic oligonucleotide
  Target: LAMA2; (+) strand; PAM type: YTN; PAM sequence: CTA
atctcattcaggagggctcc

SEQ ID NO: 347888 - DNA, 20 bp, Artificial Sequence
  Description of Artificial Sequence: Synthetic oligonucleotide
  Target: LAMA2; (+) strand; PAM type: YTN; PAM sequence: CTC
attcaggagggctccaccct

SEQ ID NO: 347889 - DNA, 20 bp, Artificial Sequence
  Description of Artificial Sequence: Synthetic oligonucleotide
  Target: LAMA2; (+) strand; PAM type: YTN; PAM sequence: TTC
aggagggctccaccctcagg

SEQ ID NO: 347890 - DNA, 20 bp, Artificial Sequence
  Description of Artificial Sequence: Synthetic oligonucleotide
  Target: LAMA2; (+) strand; PAM type: YTN; PAM sequence: CTC
caccctcaggatctaattac

SEQ ID NO: 347891 - DNA, 20 bp, Artificial Sequence
  Description of Artificial Sequence: Synthetic oligonucleotide
  Target: LAMA2; (+) strand; PAM type: YTN; PAM sequence: CTC
aggatctaattacctaccaa

SEQ ID NO: 347892 - DNA, 20 bp, Artificial Sequence
  Description of Artificial Sequence: Synthetic oligonucleotide
  Target: LAMA2; (+) strand; PAM type: YTN; PAM sequence: CTA
attacctaccaaacgccttg

SEQ ID NO: 347893 - DNA, 20 bp, Artificial Sequence
  Description of Artificial Sequence: Synthetic oligonucleotide
  Target: LAMA2; (+) strand; PAM type: YTN; PAM sequence: TTA
cctaccaaacgccttgcccc

SEQ ID NO: 347894 - DNA, 20 bp, Artificial Sequence
  Description of Artificial Sequence: Synthetic oligonucleotide
  Target: LAMA2; (+) strand; PAM type: YTN; PAM sequence: CTA
ccaaacgccttgcccccaaa

SEQ ID NO: 347895 - DNA, 20 bp, Artificial Sequence
  Description of Artificial Sequence: Synthetic oligonucleotide
  Target: LAMA2; (+) strand; PAM type: YTN; PAM sequence: CTT
gcccccaaatatcatcacat

SEQ ID NO: 347896 - DNA, 20 bp, Artificial Sequence
  Description of Artificial Sequence: Synthetic oligonucleotide
  Target: LAMA2; (+) strand; PAM type: YTN; PAM sequence: TTG
cccccaaatatcatcacatt

SEQ ID NO: 347897 - DNA, 20 bp, Artificial Sequence
  Description of Artificial Sequence: Synthetic oligonucleotide
  Target: LAMA2; (+) strand; PAM type: YTN; PAM sequence: TTT
gggattagggtttcaacata

SEQ ID NO: 347898 - DNA, 20 bp, Artificial Sequence
  Description of Artificial Sequence: Synthetic oligonucleotide
  Target: LAMA2; (+) strand; PAM type: YTN; PAM sequence: TTG
ggattagggtttcaacatat

SEQ ID NO: 347899 - DNA, 20 bp, Artificial Sequence
  Description of Artificial Sequence: Synthetic oligonucleotide
  Target: LAMA2; (+) strand; PAM type: YTN; PAM sequence: TTA
gggtttcaacatatgaattt

SEQ ID NO: 347900 - DNA, 20 bp, Artificial Sequence
  Description of Artificial Sequence: Synthetic oligonucleotide
  Target: LAMA2; (+) strand; PAM type: YTN; PAM sequence: TTT
caacatatgaattttagtag

SEQ ID NO: 347901 - DNA, 20 bp, Artificial Sequence
  Description of Artificial Sequence: Synthetic oligonucleotide
  Target: LAMA2; (+) strand; PAM type: YTN; PAM sequence: TTC
aacatatgaattttagtagg

SEQ ID NO: 347902 - DNA, 20 bp, Artificial Sequence
  Description of Artificial Sequence: Synthetic oligonucleotide
  Target: LAMA2; (+) strand; PAM type: YTN; PAM sequence: TTT
tagtaggggggaggcaaaca

SEQ ID NO: 347903 - DNA, 20 bp, Artificial Sequence
  Description of Artificial Sequence: Synthetic oligonucleotide
  Target: LAMA2; (+) strand; PAM type: YTN; PAM sequence: TTT
agtaggggggaggcaaacat

SEQ ID NO: 347904 - DNA, 20 bp, Artificial Sequence
  Description of Artificial Sequence: Synthetic oligonucleotide
  Target: LAMA2; (+) strand; PAM type: YTN; PAM sequence: TTA
gtaggggggaggcaaacatt

SEQ ID NO: 347905 - DNA, 20 bp, Artificial Sequence
  Description of Artificial Sequence: Synthetic oligonucleotide
  Target: LAMA2; (+) strand; PAM type: YTN; PAM sequence: TTC
agtccattagccatattcag

SEQ ID NO: 347906 - DNA, 20 bp, Artificial Sequence
  Description of Artificial Sequence: Synthetic oligonucleotide
  Target: LAMA2; (+) strand; PAM type: YTN; PAM sequence: TTA
gccatattcagttcacctgt

SEQ ID NO: 347907 - DNA, 20 bp, Artificial Sequence
  Description of Artificial Sequence: Synthetic oligonucleotide
  Target: LAMA2; (+) strand; PAM type: YTN; PAM sequence: TTC
agttcacctgtaatatagta

SEQ ID NO: 347908 - DNA, 20 bp, Artificial Sequence
  Description of Artificial Sequence: Synthetic oligonucleotide
  Target: LAMA2; (+) strand; PAM type: YTN; PAM sequence: TTC
acctgtaatatagtatctgt

SEQ ID NO: 347909 - DNA, 20 bp, Artificial Sequence
  Description of Artificial Sequence: Synthetic oligonucleotide
  Target: LAMA2; (+) strand; PAM type: YTN; PAM sequence: CTG
taatatagtatctgtattat

SEQ ID NO: 347910 - DNA, 20 bp, Artificial Sequence
  Description of Artificial Sequence: Synthetic oligonucleotide
  Target: LAMA2; (+) strand; PAM type: YTN; PAM sequence: CTG
tattattttatgtctgtaga

SEQ ID NO: 347911 - DNA, 20 bp, Artificial Sequence
  Description of Artificial Sequence: Synthetic oligonucleotide
  Target: LAMA2; (+) strand; PAM type: YTN; PAM sequence: TTA
ttttatgtctgtagaataat

SEQ ID NO: 347912 - DNA, 20 bp, Artificial Sequence
  Description of Artificial Sequence: Synthetic oligonucleotide
  Target: LAMA2; (+) strand; PAM type: YTN; PAM sequence: TTT
tatgtctgtagaataattcc

SEQ ID NO: 347913 - DNA, 20 bp, Artificial Sequence
  Description of Artificial Sequence: Synthetic oligonucleotide
  Target: LAMA2; (+) strand; PAM type: YTN; PAM sequence: TTT
atgtctgtagaataattcct

SEQ ID NO: 347914 - DNA, 20 bp, Artificial Sequence
  Description of Artificial Sequence: Synthetic oligonucleotide
  Target: LAMA2; (+) strand; PAM type: YTN; PAM sequence: TTA
tgtctgtagaataattccta

SEQ ID NO: 347915 - DNA, 20 bp, Artificial Sequence
  Description of Artificial Sequence: Synthetic oligonucleotide
  Target: LAMA2; (+) strand; PAM type: YTN; PAM sequence: CTG
tagaataattcctagaagtg

SEQ ID NO: 347916 - DNA, 20 bp, Artificial Sequence
  Description of Artificial Sequence: Synthetic oligonucleotide
  Target: LAMA2; (+) strand; PAM type: YTN; PAM sequence: TTC
ctagaagtggaattgctagc

SEQ ID NO: 347917 - DNA, 20 bp, Artificial Sequence
  Description of Artificial Sequence: Synthetic oligonucleotide
  Target: LAMA2; (+) strand; PAM type: YTN; PAM sequence: CTA
gaagtggaattgctagctca

SEQ ID NO: 347918 - DNA, 20 bp, Artificial Sequence
  Description of Artificial Sequence: Synthetic oligonucleotide
  Target: LAMA2; (+) strand; PAM type: YTN; PAM sequence: TTG
ctagctcagaattactgtgt

SEQ ID NO: 347919 - DNA, 20 bp, Artificial Sequence
  Description of Artificial Sequence: Synthetic oligonucleotide
  Target: LAMA2; (+) strand; PAM type: YTN; PAM sequence: CTA
gctcagaattactgtgtgtt

SEQ ID NO: 347920 - DNA, 20 bp, Artificial Sequence
  Description of Artificial Sequence: Synthetic oligonucleotide
  Target: LAMA2; (+) strand; PAM type: YTN; PAM sequence: CTC
agaattactgtgtgtttcta

SEQ ID NO: 347921 - DNA, 20 bp, Artificial Sequence
  Description of Artificial Sequence: Synthetic oligonucleotide
  Target: LAMA2; (+) strand; PAM type: YTN; PAM sequence: TTA
ctgtgtgtttctaattttga

SEQ ID NO: 347922 - DNA, 20 bp, Artificial Sequence
  Description of Artificial Sequence: Synthetic oligonucleotide
  Target: LAMA2; (+) strand; PAM type: YTN; PAM sequence: CTG
tgtgtttctaattttgatag

SEQ ID NO: 347923 - DNA, 20 bp, Artificial Sequence
  Description of Artificial Sequence: Synthetic oligonucleotide
  Target: LAMA2; (+) strand; PAM type: YTN; PAM sequence: TTT
ctaattttgatagttactgc

SEQ ID NO: 347924 - DNA, 20 bp, Artificial Sequence
  Description of Artificial Sequence: Synthetic oligonucleotide
  Target: LAMA2; (+) strand; PAM type: YTN; PAM sequence: TTC
taattttgatagttactgct

SEQ ID NO: 347925 - DNA, 20 bp, Artificial Sequence
  Description of Artificial Sequence: Synthetic oligonucleotide
  Target: LAMA2; (+) strand; PAM type: YTN; PAM sequence: CTA
attttgatagttactgctca

SEQ ID NO: 347926 - DNA, 20 bp, Artificial Sequence
  Description of Artificial Sequence: Synthetic oligonucleotide
  Target: LAMA2; (+) strand; PAM type: YTN; PAM sequence: TTT
tgatagttactgctcaattg

SEQ ID NO: 347927 - DNA, 20 bp, Artificial Sequence
  Description of Artificial Sequence: Synthetic oligonucleotide
  Target: LAMA2; (+) strand; PAM type: YTN; PAM sequence: TTT
gatagttactgctcaattga

SEQ ID NO: 347928 - DNA, 20 bp, Artificial Sequence
  Description of Artificial Sequence: Synthetic oligonucleotide
  Target: LAMA2; (+) strand; PAM type: YTN; PAM sequence: TTG
atagttactgctcaattgac

SEQ ID NO: 347929 - DNA, 20 bp, Artificial Sequence
  Description of Artificial Sequence: Synthetic oligonucleotide
  Target: LAMA2; (+) strand; PAM type: YTN; PAM sequence: TTA
ctgctcaattgactttcttg

SEQ ID NO: 347930 - DNA, 20 bp, Artificial Sequence
  Description of Artificial Sequence: Synthetic oligonucleotide
  Target: LAMA2; (+) strand; PAM type: YTN; PAM sequence: CTG
ctcaattgactttcttgaaa

SEQ ID NO: 347931 - DNA, 20 bp, Artificial Sequence
  Description of Artificial Sequence: Synthetic oligonucleotide
  Target: LAMA2; (+) strand; PAM type: YTN; PAM sequence: CTC
aattgactttcttgaaattt

SEQ ID NO: 347932 - DNA, 20 bp, Artificial Sequence
  Description of Artificial Sequence: Synthetic oligonucleotide
  Target: LAMA2; (+) strand; PAM type: YTN; PAM sequence: TTG
actttcttgaaatttgtatc

SEQ ID NO: 347933 - DNA, 20 bp, Artificial Sequence
  Description of Artificial Sequence: Synthetic oligonucleotide
  Target: LAMA2; (+) strand; PAM type: YTN; PAM sequence: CTT
tcttgaaatttgtatcattt

SEQ ID NO: 347934 - DNA, 20 bp, Artificial Sequence
  Description of Artificial Sequence: Synthetic oligonucleotide
  Target: LAMA2; (+) strand; PAM type: YTN; PAM sequence: TTT
cttgaaatttgtatcatttt

SEQ ID NO: 347935 - DNA, 20 bp, Artificial Sequence
  Description of Artificial Sequence: Synthetic oligonucleotide
  Target: LAMA2; (+) strand; PAM type: YTN; PAM sequence: TTC
ttgaaatttgtatcatttta

SEQ ID NO: 347936 - DNA, 20 bp, Artificial Sequence
  Description of Artificial Sequence: Synthetic oligonucleotide
  Target: LAMA2; (+) strand; PAM type: YTN; PAM sequence: CTT
gaaatttgtatcattttaca

SEQ ID NO: 347937 - DNA, 20 bp, Artificial Sequence
  Description of Artificial Sequence: Synthetic oligonucleotide
  Target: LAMA2; (+) strand; PAM type: YTN; PAM sequence: TTG
aaatttgtatcattttacag

SEQ ID NO: 347938 - DNA, 20 bp, Artificial Sequence
  Description of Artificial Sequence: Synthetic oligonucleotide
  Target: LAMA2; (+) strand; PAM type: YTN; PAM sequence: TTT
gtatcattttacagttatac

SEQ ID NO: 347939 - DNA, 20 bp, Artificial Sequence
  Description of Artificial Sequence: Synthetic oligonucleotide
  Target: LAMA2; (+) strand; PAM type: YTN; PAM sequence: TTG
tatcattttacagttatacc

SEQ ID NO: 347940 - DNA, 20 bp, Artificial Sequence
  Description of Artificial Sequence: Synthetic oligonucleotide
  Target: LAMA2; (+) strand; PAM type: YTN; PAM sequence: TTT
tacagttatacctgtaaatg

SEQ ID NO: 347941 - DNA, 20 bp, Artificial Sequence
  Description of Artificial Sequence: Synthetic oligonucleotide
  Target: LAMA2; (+) strand; PAM type: YTN; PAM sequence: TTT
acagttatacctgtaaatgt

SEQ ID NO: 347942 - DNA, 20 bp, Artificial Sequence
  Description of Artificial Sequence: Synthetic oligonucleotide
  Target: LAMA2; (+) strand; PAM type: YTN; PAM sequence: TTA
cagttatacctgtaaatgta

SEQ ID NO: 347943 - DNA, 20 bp, Artificial Sequence
  Description of Artificial Sequence: Synthetic oligonucleotide
  Target: LAMA2; (+) strand; PAM type: YTN; PAM sequence: TTA
tacctgtaaatgtaagaggt

SEQ ID NO: 347944 - DNA, 20 bp, Artificial Sequence
  Description of Artificial Sequence: Synthetic oligonucleotide
  Target: LAMA2; (+) strand; PAM type: YTN; PAM sequence: CTG
taaatgtaagaggtatgtat

SEQ ID NO: 347945 - DNA, 20 bp, Artificial Sequence
  Description of Artificial Sequence: Synthetic oligonucleotide
  Target: LAMA2; (+) strand; PAM type: YTN; PAM sequence: CTA
ctctcttagtctaaccatca

SEQ ID NO: 347946 - DNA, 20 bp, Artificial Sequence
  Description of Artificial Sequence: Synthetic oligonucleotide
  Target: LAMA2; (+) strand; PAM type: YTN; PAM sequence: CTC
tcttagtctaaccatcagag

SEQ ID NO: 347947 - DNA, 20 bp, Artificial Sequence
  Description of Artificial Sequence: Synthetic oligonucleotide
  Target: LAMA2; (+) strand; PAM type: YTN; PAM sequence: CTC
ttagtctaaccatcagagag

SEQ ID NO: 347948 - DNA, 20 bp, Artificial Sequence
  Description of Artificial Sequence: Synthetic oligonucleotide
  Target: LAMA2; (+) strand; PAM type: YTN; PAM sequence: CTT
agtctaaccatcagagagta

SEQ ID NO: 347949 - DNA, 20 bp, Artificial Sequence
  Description of Artificial Sequence: Synthetic oligonucleotide
  Target: LAMA2; (+) strand; PAM type: YTN; PAM sequence: TTA
gtctaaccatcagagagtat

SEQ ID NO: 347950 - DNA, 20 bp, Artificial Sequence
  Description of Artificial Sequence: Synthetic oligonucleotide
  Target: LAMA2; (+) strand; PAM type: YTN; PAM sequence: CTA
accatcagagagtattacca

SEQ ID NO: 347951 - DNA, 20 bp, Artificial Sequence
  Description of Artificial Sequence: Synthetic oligonucleotide
  Target: LAMA2; (+) strand; PAM type: YTN; PAM sequence: TTA
ccaatatttgtggggtttgc

SEQ ID NO: 347952 - DNA, 20 bp, Artificial Sequence
  Description of Artificial Sequence: Synthetic oligonucleotide
  Target: LAMA2; (+) strand; PAM type: YTN; PAM sequence: TTT
gtggggtttgccaacctgaa

SEQ ID NO: 347953 - DNA, 20 bp, Artificial Sequence
  Description of Artificial Sequence: Synthetic oligonucleotide
  Target: LAMA2; (+) strand; PAM type: YTN; PAM sequence: TTG
tggggtttgccaacctgaaa

SEQ ID NO: 347954 - DNA, 20 bp, Artificial Sequence
  Description of Artificial Sequence: Synthetic oligonucleotide
  Target: LAMA2; (+) strand; PAM type: YTN; PAM sequence: TTT
gccaacctgaaaaaatggga

SEQ ID NO: 347955 - DNA, 20 bp, Artificial Sequence
  Description of Artificial Sequence: Synthetic oligonucleotide
  Target: LAMA2; (+) strand; PAM type: YTN; PAM sequence: TTG
ccaacctgaaaaaatgggaa

SEQ ID NO: 347956 - DNA, 20 bp, Artificial Sequence
  Description of Artificial Sequence: Synthetic oligonucleotide
  Target: LAMA2; (+) strand; PAM type: YTN; PAM sequence: CTG
aaaaaatgggaagtttatca

SEQ ID NO: 347957 - DNA, 20 bp, Artificial Sequence
  Description of Artificial Sequence: Synthetic oligonucleotide
  Target: LAMA2; (+) strand; PAM type: YTN; PAM sequence: TTT
atcagtgtgtttttaattaa

SEQ ID NO: 347958 - DNA, 20 bp, Artificial Sequence
  Description of Artificial Sequence: Synthetic oligonucleotide
  Target: LAMA2; (+) strand; PAM type: YTN; PAM sequence: TTA
tcagtgtgtttttaattaac

SEQ ID NO: 347959 - DNA, 20 bp, Artificial Sequence
  Description of Artificial Sequence: Synthetic oligonucleotide
  Target: LAMA2; (+) strand; PAM type: YTN; PAM sequence: TTT
ttaattaacatttatcctat

SEQ ID NO: 347960 - DNA, 20 bp, Artificial Sequence
  Description of Artificial Sequence: Synthetic oligonucleotide
  Target: LAMA2; (+) strand; PAM type: YTN; PAM sequence: TTT
taattaacatttatcctatt

SEQ ID NO: 347961 - DNA, 20 bp, Artificial Sequence
  Description of Artificial Sequence: Synthetic oligonucleotide
  Target: LAMA2; (+) strand; PAM type: YTN; PAM sequence: TTT
aattaacatttatcctatta

SEQ ID NO: 347962 - DNA, 20 bp, Artificial Sequence
  Description of Artificial Sequence: Synthetic oligonucleotide
  Target: LAMA2; (+) strand; PAM type: YTN; PAM sequence: TTA
attaacatttatcctattat

SEQ ID NO: 347963 - DNA, 20 bp, Artificial Sequence
  Description of Artificial Sequence: Synthetic oligonucleotide
  Target: LAMA2; (+) strand; PAM type: YTN; PAM sequence: TTA
acatttatcctattatgagg

SEQ ID NO: 347964 - DNA, 20 bp, Artificial Sequence
  Description of Artificial Sequence: Synthetic oligonucleotide
  Target: LAMA2; (+) strand; PAM type: YTN; PAM sequence: TTT
atcctattatgagggaggat

SEQ ID NO: 347965 - DNA, 20 bp, Artificial Sequence
  Description of Artificial Sequence: Synthetic oligonucleotide
  Target: LAMA2; (+) strand; PAM type: YTN; PAM sequence: TTA
tcctattatgagggaggatc

SEQ ID NO: 347966 - DNA, 20 bp, Artificial Sequence
  Description of Artificial Sequence: Synthetic oligonucleotide
  Target: LAMA2; (+) strand; PAM type: YTN; PAM sequence: CTA
ttatgagggaggatcagtat

SEQ ID NO: 347967 - DNA, 20 bp, Artificial Sequence
  Description of Artificial Sequence: Synthetic oligonucleotide
  Target: LAMA2; (+) strand; PAM type: YTN; PAM sequence: TTA
tgagggaggatcagtatctt

SEQ ID NO: 347968 - DNA, 20 bp, Artificial Sequence
  Description of Artificial Sequence: Synthetic oligonucleotide
  Target: LAMA2; (+) strand; PAM type: YTN; PAM sequence: CTT
ataaacttttaacagtcatt

SEQ ID NO: 347969 - DNA, 20 bp, Artificial Sequence
  Description of Artificial Sequence: Synthetic oligonucleotide
  Target: LAMA2; (+) strand; PAM type: YTN; PAM sequence: TTA
taaacttttaacagtcattt

SEQ ID NO: 347970 - DNA, 20 bp, Artificial Sequence
  Description of Artificial Sequence: Synthetic oligonucleotide
  Target: LAMA2; (+) strand; PAM type: YTN; PAM sequence: CTT
ttaacagtcattttaatttt

SEQ ID NO: 347971 - DNA, 20 bp, Artificial Sequence
  Description of Artificial Sequence: Synthetic oligonucleotide
  Target: LAMA2; (+) strand; PAM type: YTN; PAM sequence: TTT
taacagtcattttaattttc

SEQ ID NO: 347972 - DNA, 20 bp, Artificial Sequence
  Description of Artificial Sequence: Synthetic oligonucleotide
  Target: LAMA2; (+) strand; PAM type: YTN; PAM sequence: TTT
aacagtcattttaattttct

SEQ ID NO: 347973 - DNA, 20 bp, Artificial Sequence
  Description of Artificial Sequence: Synthetic oligonucleotide
  Target: LAMA2; (+) strand; PAM type: YTN; PAM sequence: TTA
acagtcattttaattttctt

SEQ ID NO: 347974 - DNA, 20 bp, Artificial Sequence
  Description of Artificial Sequence: Synthetic oligonucleotide
  Target: LAMA2; (+) strand; PAM type: YTN; PAM sequence: TTT
taattttcttttctttgaat

SEQ ID NO: 347975 - DNA, 20 bp, Artificial Sequence
  Description of Artificial Sequence: Synthetic oligonucleotide
  Target: LAMA2; (+) strand; PAM type: YTN; PAM sequence: TTT
aattttcttttctttgaata

SEQ ID NO: 347976 - DNA, 20 bp, Artificial Sequence
  Description of Artificial Sequence: Synthetic oligonucleotide
  Target: LAMA2; (+) strand; PAM type: YTN; PAM sequence: TTA
attttcttttctttgaatag

SEQ ID NO: 347977 - DNA, 20 bp, Artificial Sequence
  Description of Artificial Sequence: Synthetic oligonucleotide
  Target: LAMA2; (+) strand; PAM type: YTN; PAM sequence: TTT
tcttttctttgaatagggcc

SEQ ID NO: 347978 - DNA, 20 bp, Artificial Sequence
  Description of Artificial Sequence: Synthetic oligonucleotide
  Target: LAMA2; (+) strand; PAM type: YTN; PAM sequence: TTT
cttttctttgaatagggccc

SEQ ID NO: 347979 - DNA, 20 bp, Artificial Sequence
  Description of Artificial Sequence: Synthetic oligonucleotide
  Target: LAMA2; (+) strand; PAM type: YTN; PAM sequence: TTC
ttttctttgaatagggccct

SEQ ID NO: 347980 - DNA, 20 bp, Artificial Sequence
  Description of Artificial Sequence: Synthetic oligonucleotide
  Target: LAMA2; (+) strand; PAM type: YTN; PAM sequence: CTT
ttctttgaatagggccctca

SEQ ID NO: 347981 - DNA, 20 bp, Artificial Sequence
  Description of Artificial Sequence: Synthetic oligonucleotide
  Target: LAMA2; (+) strand; PAM type: YTN; PAM sequence: TTT
tctttgaatagggccctcat

SEQ ID NO: 347982 - DNA, 20 bp, Artificial Sequence
  Description of Artificial Sequence: Synthetic oligonucleotide
  Target: LAMA2; (+) strand; PAM type: YTN; PAM sequence: TTT
ctttgaatagggccctcata

SEQ ID NO: 347983 - DNA, 20 bp, Artificial Sequence
  Description of Artificial Sequence: Synthetic oligonucleotide
  Target: LAMA2; (+) strand; PAM type: YTN; PAM sequence: TTC
tttgaatagggccctcatat

SEQ ID NO: 347984 - DNA, 20 bp, Artificial Sequence
  Description of Artificial Sequence: Synthetic oligonucleotide
  Target: LAMA2; (+) strand; PAM type: YTN; PAM sequence: CTT
tgaatagggccctcatatat

SEQ ID NO: 347985 - DNA, 20 bp, Artificial Sequence
  Description of Artificial Sequence: Synthetic oligonucleotide
  Target: LAMA2; (+) strand; PAM type: YTN; PAM sequence: TTT
gaatagggccctcatatatt

SEQ ID NO: 347986 - DNA, 20 bp, Artificial Sequence
  Description of Artificial Sequence: Synthetic oligonucleotide
  Target: LAMA2; (+) strand; PAM type: YTN; PAM sequence: TTG
aatagggccctcatatattt

SEQ ID NO: 347987 - DNA, 20 bp, Artificial Sequence
  Description of Artificial Sequence: Synthetic oligonucleotide
  Target: LAMA2; (+) strand; PAM type: YTN; PAM sequence: CTC
atatatttgtgcattttgtt

SEQ ID NO: 347988 - DNA, 20 bp, Artificial Sequence
  Description of Artificial Sequence: Synthetic oligonucleotide
  Target: LAMA2; (+) strand; PAM type: YTN; PAM sequence: TTT
gtgcattttgttatggtgtt

SEQ ID NO: 347989 - DNA, 20 bp, Artificial Sequence
  Description of Artificial Sequence: Synthetic oligonucleotide
  Target: LAMA2; (+) strand; PAM type: YTN; PAM sequence: TTG
tgcattttgttatggtgttg

SEQ ID NO: 347990 - DNA, 20 bp, Artificial Sequence
  Description of Artificial Sequence: Synthetic oligonucleotide
  Target: LAMA2; (+) strand; PAM type: YTN; PAM sequence: TTT
tgttatggtgttggtgcatt

SEQ ID NO: 347991 - DNA, 20 bp, Artificial Sequence
  Description of Artificial Sequence: Synthetic oligonucleotide
  Target: LAMA2; (+) strand; PAM type: YTN; PAM sequence: TTT
gttatggtgttggtgcattt

SEQ ID NO: 347992 - DNA, 20 bp, Artificial Sequence
  Description of Artificial Sequence: Synthetic oligonucleotide
  Target: LAMA2; (+) strand; PAM type: YTN; PAM sequence: TTG
ttatggtgttggtgcatttc

SEQ ID NO: 347993 - DNA, 20 bp, Artificial Sequence
  Description of Artificial Sequence: Synthetic oligonucleotide
  Target: LAMA2; (+) strand; PAM type: YTN; PAM sequence: TTA
tggtgttggtgcatttcttt

SEQ ID NO: 347994 - DNA, 20 bp, Artificial Sequence
  Description of Artificial Sequence: Synthetic oligonucleotide
  Target: LAMA2; (+) strand; PAM type: YTN; PAM sequence: TTG
gtgcatttctttattgattt

SEQ ID NO: 347995 - DNA, 20 bp, Artificial Sequence
  Description of Artificial Sequence: Synthetic oligonucleotide
  Target: LAMA2; (+) strand; PAM type: YTN; PAM sequence: TTT
ctttattgatttacaagagt

SEQ ID NO: 347996 - DNA, 20 bp, Artificial Sequence
  Description of Artificial Sequence: Synthetic oligonucleotide
  Target: LAMA2; (+) strand; PAM type: YTN; PAM sequence: TTC
tttattgatttacaagagtt

SEQ ID NO: 347997 - DNA, 20 bp, Artificial Sequence
  Description of Artificial Sequence: Synthetic oligonucleotide
  Target: LAMA2; (+) strand; PAM type: YTN; PAM sequence: CTT
tattgatttacaagagttct

SEQ ID NO: 347998 - DNA, 20 bp, Artificial Sequence
  Description of Artificial Sequence: Synthetic oligonucleotide
  Target: LAMA2; (+) strand; PAM type: YTN; PAM sequence: TTT
attgatttacaagagttctt

SEQ ID NO: 347999 - DNA, 20 bp, Artificial Sequence
  Description of Artificial Sequence: Synthetic oligonucleotide
  Target: LAMA2; (+) strand; PAM type: YTN; PAM sequence: TTA
ttgatttacaagagttcttt

SEQ ID NO: 348000 - DNA, 20 bp, Artificial Sequence
  Description of Artificial Sequence: Synthetic oligonucleotide
  Target: LAMA2; (+) strand; PAM type: YTN; PAM sequence: TTG
atttacaagagttctttgag

SEQ ID NO: 348001 - DNA, 20 bp, Artificial Sequence
  Description of Artificial Sequence: Synthetic oligonucleotide
  Target: LAMA2; (+) strand; PAM type: YTN; PAM sequence: TTT
acaagagttctttgagtatt

SEQ ID NO: 348002 - DNA, 20 bp, Artificial Sequence
  Description of Artificial Sequence: Synthetic oligonucleotide
  Target: LAMA2; (+) strand; PAM type: YTN; PAM sequence: TTA
caagagttctttgagtatta

SEQ ID NO: 348003 - DNA, 20 bp, Artificial Sequence
  Description of Artificial Sequence: Synthetic oligonucleotide
  Target: LAMA2; (+) strand; PAM type: YTN; PAM sequence: TTC
tttgagtattaggaacatcc

SEQ ID NO: 348004 - DNA, 20 bp, Artificial Sequence
  Description of Artificial Sequence: Synthetic oligonucleotide
  Target: LAMA2; (+) strand; PAM type: YTN; PAM sequence: CTT
tgagtattaggaacatcctt

SEQ ID NO: 348005 - DNA, 20 bp, Artificial Sequence
  Description of Artificial Sequence: Synthetic oligonucleotide
  Target: LAMA2; (+) strand; PAM type: YTN; PAM sequence: TTT
gagtattaggaacatccttc

SEQ ID NO: 348006 - DNA, 20 bp, Artificial Sequence
  Description of Artificial Sequence: Synthetic oligonucleotide
  Target: LAMA2; (+) strand; PAM type: YTN; PAM sequence: TTG
agtattaggaacatccttcc

SEQ ID NO: 348007 - DNA, 20 bp, Artificial Sequence
  Description of Artificial Sequence: Synthetic oligonucleotide
  Target: LAMA2; (+) strand; PAM type: YTN; PAM sequence: TTA
ggaacatccttcctttatcc

SEQ ID NO: 348008 - DNA, 20 bp, Artificial Sequence
  Description of Artificial Sequence: Synthetic oligonucleotide
  Target: LAMA2; (+) strand; PAM type: YTN; PAM sequence: CTT
cctttatccgtgccaacagt

SEQ ID NO: 348009 - DNA, 20 bp, Artificial Sequence
  Description of Artificial Sequence: Synthetic oligonucleotide
  Target: LAMA2; (+) strand; PAM type: YTN; PAM sequence: TTC
ctttatccgtgccaacagta

SEQ ID NO: 348010 - DNA, 20 bp, Artificial Sequence
  Description of Artificial Sequence: Synthetic oligonucleotide
  Target: LAMA2; (+) strand; PAM type: YTN; PAM sequence: CTT
tatccgtgccaacagtacct

SEQ ID NO: 348011 - DNA, 20 bp, Artificial Sequence
  Description of Artificial Sequence: Synthetic oligonucleotide
  Target: LAMA2; (+) strand; PAM type: YTN; PAM sequence: TTT
atccgtgccaacagtacctt

SEQ ID NO: 348012 - DNA, 20 bp, Artificial Sequence
  Description of Artificial Sequence: Synthetic oligonucleotide
  Target: LAMA2; (+) strand; PAM type: YTN; PAM sequence: TTA
tccgtgccaacagtaccttt

SEQ ID NO: 348013 - DNA, 20 bp, Artificial Sequence
  Description of Artificial Sequence: Synthetic oligonucleotide
  Target: LAMA2; (+) strand; PAM type: YTN; PAM sequence: CTT
ttattttgtcacacagttta

SEQ ID NO: 348014 - DNA, 20 bp, Artificial Sequence
  Description of Artificial Sequence: Synthetic oligonucleotide
  Target: LAMA2; (+) strand; PAM type: YTN; PAM sequence: TTT
tattttgtcacacagtttat

SEQ ID NO: 348015 - DNA, 20 bp, Artificial Sequence
  Description of Artificial Sequence: Synthetic oligonucleotide
  Target: LAMA2; (+) strand; PAM type: YTN; PAM sequence: TTT
attttgtcacacagtttatt

SEQ ID NO: 348016 - DNA, 20 bp, Artificial Sequence
  Description of Artificial Sequence: Synthetic oligonucleotide
  Target: LAMA2; (+) strand; PAM type: YTN; PAM sequence: TTA
ttttgtcacacagtttattc

SEQ ID NO: 348017 - DNA, 20 bp, Artificial Sequence
  Description of Artificial Sequence: Synthetic oligonucleotide
  Target: LAMA2; (+) strand; PAM type: YTN; PAM sequence: TTT
tgtcacacagtttattcttc

SEQ ID NO: 348018 - DNA, 20 bp, Artificial Sequence
  Description of Artificial Sequence: Synthetic oligonucleotide
  Target: LAMA2; (+) strand; PAM type: YTN; PAM sequence: TTT
gtcacacagtttattcttca

SEQ ID NO: 348019 - DNA, 20 bp, Artificial Sequence
  Description of Artificial Sequence: Synthetic oligonucleotide
  Target: LAMA2; (+) strand; PAM type: YTN; PAM sequence: TTG
tcacacagtttattcttcat

SEQ ID NO: 348020 - DNA, 20 bp, Artificial Sequence
  Description of Artificial Sequence: Synthetic oligonucleotide
  Target: LAMA2; (+) strand; PAM type: YTN; PAM sequence: TTT
attcttcatcagaattcttt

SEQ ID NO: 348021 - DNA, 20 bp, Artificial Sequence
  Description of Artificial Sequence: Synthetic oligonucleotide
  Target: LAMA2; (+) strand; PAM type: YTN; PAM sequence: TTA
ttcttcatcagaattctttg

SEQ ID NO: 348022 - DNA, 20 bp, Artificial Sequence
  Description of Artificial Sequence: Synthetic oligonucleotide
  Target: LAMA2; (+) strand; PAM type: YTN; PAM sequence: TTC
ttcatcagaattctttgctc

SEQ ID NO: 348023 - DNA, 20 bp, Artificial Sequence
  Description of Artificial Sequence: Synthetic oligonucleotide
  Target: LAMA2; (+) strand; PAM type: YTN; PAM sequence: CTT
catcagaattctttgctctt

SEQ ID NO: 348024 - DNA, 20 bp, Artificial Sequence
  Description of Artificial Sequence: Synthetic oligonucleotide
  Target: LAMA2; (+) strand; PAM type: YTN; PAM sequence: TTC
atcagaattctttgctcttg

SEQ ID NO: 348025 - DNA, 20 bp, Artificial Sequence
  Description of Artificial Sequence: Synthetic oligonucleotide
  Target: LAMA2; (+) strand; PAM type: YTN; PAM sequence: TTC
tttgctcttgagaagtccct

SEQ ID NO: 348026 - DNA, 20 bp, Artificial Sequence
  Description of Artificial Sequence: Synthetic oligonucleotide
  Target: LAMA2; (+) strand; PAM type: YTN; PAM sequence: CTT
tgctcttgagaagtccctgt

SEQ ID NO: 348027 - DNA, 20 bp, Artificial Sequence
  Description of Artificial Sequence: Synthetic oligonucleotide
  Target: LAMA2; (+) strand; PAM type: YTN; PAM sequence: TTT
gctcttgagaagtccctgtg

SEQ ID NO: 348028 - DNA, 20 bp, Artificial Sequence
  Description of Artificial Sequence: Synthetic oligonucleotide
  Target: LAMA2; (+) strand; PAM type: YTN; PAM sequence: TTG
ctcttgagaagtccctgtga

SEQ ID NO: 348029 - DNA, 20 bp, Artificial Sequence
  Description of Artificial Sequence: Synthetic oligonucleotide
  Target: LAMA2; (+) strand; PAM type: YTN; PAM sequence: CTC
ttgagaagtccctgtgagag

SEQ ID NO: 348030 - DNA, 20 bp, Artificial Sequence
  Description of Artificial Sequence: Synthetic oligonucleotide
  Target: LAMA2; (+) strand; PAM type: YTN; PAM sequence: CTT
gagaagtccctgtgagagcc

SEQ ID NO: 348031 - DNA, 20 bp, Artificial Sequence
  Description of Artificial Sequence: Synthetic oligonucleotide
  Target: LAMA2; (+) strand; PAM type: YTN; PAM sequence: TTG
agaagtccctgtgagagcct

SEQ ID NO: 348032 - DNA, 20 bp, Artificial Sequence
  Description of Artificial Sequence: Synthetic oligonucleotide
  Target: LAMA2; (+) strand; PAM type: YTN; PAM sequence: CTG
tgagagcctgccagccttct

SEQ ID NO: 348033 - DNA, 20 bp, Artificial Sequence
  Description of Artificial Sequence: Synthetic oligonucleotide
  Target: LAMA2; (+) strand; PAM type: YTN; PAM sequence: CTG
ccagccttctacacctttgg

SEQ ID NO: 348034 - DNA, 20 bp, Artificial Sequence
  Description of Artificial Sequence: Synthetic oligonucleotide
  Target: LAMA2; (+) strand; PAM type: YTN; PAM sequence: CTT
ctacacctttggagggcagt

SEQ ID NO: 348035 - DNA, 20 bp, Artificial Sequence
  Description of Artificial Sequence: Synthetic oligonucleotide
  Target: LAMA2; (+) strand; PAM type: YTN; PAM sequence: TTC
tacacctttggagggcagtt

SEQ ID NO: 348036 - DNA, 20 bp, Artificial Sequence
  Description of Artificial Sequence: Synthetic oligonucleotide
  Target: LAMA2; (+) strand; PAM type: YTN; PAM sequence: CTA
cacctttggagggcagtttg

SEQ ID NO: 348037 - DNA, 20 bp, Artificial Sequence
  Description of Artificial Sequence: Synthetic oligonucleotide
  Target: LAMA2; (+) strand; PAM type: YTN; PAM sequence: CTT
tggagggcagtttgttggca

SEQ ID NO: 348038 - DNA, 20 bp, Artificial Sequence
  Description of Artificial Sequence: Synthetic oligonucleotide
  Target: LAMA2; (+) strand; PAM type: YTN; PAM sequence: TTT
ggagggcagtttgttggcaa

SEQ ID NO: 348039 - DNA, 20 bp, Artificial Sequence
  Description of Artificial Sequence: Synthetic oligonucleotide
  Target: LAMA2; (+) strand; PAM type: YTN; PAM sequence: TTG
gagggcagtttgttggcaat

SEQ ID NO: 348040 - DNA, 20 bp, Artificial Sequence
  Description of Artificial Sequence: Synthetic oligonucleotide
  Target: LAMA2; (+) strand; PAM type: YTN; PAM sequence: TTT
gttggcaatttctcaatttt

SEQ ID NO: 348041 - DNA, 20 bp, Artificial Sequence
  Description of Artificial Sequence: Synthetic oligonucleotide
  Target: LAMA2; (+) strand; PAM type: YTN; PAM sequence: TTG
ttggcaatttctcaattttt

SEQ ID NO: 348042 - DNA, 20 bp, Artificial Sequence
  Description of Artificial Sequence: Synthetic oligonucleotide
  Target: LAMA2; (+) strand; PAM type: YTN; PAM sequence: TTG
gcaatttctcaatttttctt

SEQ ID NO: 348043 - DNA, 20 bp, Artificial Sequence
  Description of Artificial Sequence: Synthetic oligonucleotide
  Target: LAMA2; (+) strand; PAM type: YTN; PAM sequence: TTT
ctcaatttttctttcacata

SEQ ID NO: 348044 - DNA, 20 bp, Artificial Sequence
  Description of Artificial Sequence: Synthetic oligonucleotide
  Target: LAMA2; (+) strand; PAM type: YTN; PAM sequence: TTC
tcaatttttctttcacatag

SEQ ID NO: 348045 - DNA, 20 bp, Artificial Sequence
  Description of Artificial Sequence: Synthetic oligonucleotide
  Target: LAMA2; (+) strand; PAM type: YTN; PAM sequence: CTC
aatttttctttcacatagaa

SEQ ID NO: 348046 - DNA, 20 bp, Artificial Sequence
  Description of Artificial Sequence: Synthetic oligonucleotide
  Target: LAMA2; (+) strand; PAM type: YTN; PAM sequence: TTT
ttctttcacatagaaaatga

SEQ ID NO: 348047 - DNA, 20 bp, Artificial Sequence
  Description of Artificial Sequence: Synthetic oligonucleotide
  Target: LAMA2; (+) strand; PAM type: YTN; PAM sequence: TTT
tctttcacatagaaaatgat

SEQ ID NO: 348048 - DNA, 20 bp, Artificial Sequence
  Description of Artificial Sequence: Synthetic oligonucleotide
  Target: LAMA2; (+) strand; PAM type: YTN; PAM sequence: TTT
ctttcacatagaaaatgatc

SEQ ID NO: 348049 - DNA, 20 bp, Artificial Sequence
  Description of Artificial Sequence: Synthetic oligonucleotide
  Target: LAMA2; (+) strand; PAM type: YTN; PAM sequence: TTC
tttcacatagaaaatgatct

SEQ ID NO: 348050 - DNA, 20 bp, Artificial Sequence
  Description of Artificial Sequence: Synthetic oligonucleotide
  Target: LAMA2; (+) strand; PAM type: YTN; PAM sequence: CTT
tcacatagaaaatgatctga

SEQ ID NO: 348051 - DNA, 20 bp, Artificial Sequence
  Description of Artificial Sequence: Synthetic oligonucleotide
  Target: LAMA2; (+) strand; PAM type: YTN; PAM sequence: TTT
cacatagaaaatgatctgac

SEQ ID NO: 348052 - DNA, 20 bp, Artificial Sequence
  Description of Artificial Sequence: Synthetic oligonucleotide
  Target: LAMA2; (+) strand; PAM type: YTN; PAM sequence: TTC
acatagaaaatgatctgact

SEQ ID NO: 348053 - DNA, 20 bp, Artificial Sequence
  Description of Artificial Sequence: Synthetic oligonucleotide
  Target: LAMA2; (+) strand; PAM type: YTN; PAM sequence: CTG
actgaattttatttctcttg

SEQ ID NO: 348054 - DNA, 20 bp, Artificial Sequence
  Description of Artificial Sequence: Synthetic oligonucleotide
  Target: LAMA2; (+) strand; PAM type: YTN; PAM sequence: CTG
aattttatttctcttgatgt

SEQ ID NO: 348055 - DNA, 20 bp, Artificial Sequence
  Description of Artificial Sequence: Synthetic oligonucleotide
  Target: LAMA2; (+) strand; PAM type: YTN; PAM sequence: TTT
tatttctcttgatgtcaact

SEQ ID NO: 348056 - DNA, 20 bp, Artificial Sequence
  Description of Artificial Sequence: Synthetic oligonucleotide
  Target: LAMA2; (+) strand; PAM type: YTN; PAM sequence: TTT
atttctcttgatgtcaactg

SEQ ID NO: 348057 - DNA, 20 bp, Artificial Sequence
  Description of Artificial Sequence: Synthetic oligonucleotide
  Target: LAMA2; (+) strand; PAM type: YTN; PAM sequence: TTA
tttctcttgatgtcaactgt

SEQ ID NO: 348058 - DNA, 20 bp, Artificial Sequence
  Description of Artificial Sequence: Synthetic oligonucleotide
  Target: LAMA2; (+) strand; PAM type: YTN; PAM sequence: TTT
ctcttgatgtcaactgtgct

SEQ ID NO: 348059 - DNA, 20 bp, Artificial Sequence
  Description of Artificial Sequence: Synthetic oligonucleotide
  Target: LAMA2; (+) strand; PAM type: YTN; PAM sequence: TTC
tcttgatgtcaactgtgctg

SEQ ID NO: 348060 - DNA, 20 bp, Artificial Sequence
  Description of Artificial Sequence: Synthetic oligonucleotide
  Target: LAMA2; (+) strand; PAM type: YTN; PAM sequence: CTC
ttgatgtcaactgtgctgaa

SEQ ID NO: 348061 - DNA, 20 bp, Artificial Sequence
  Description of Artificial Sequence: Synthetic oligonucleotide
  Target: LAMA2; (+) strand; PAM type: YTN; PAM sequence: CTT
gatgtcaactgtgctgaatt

SEQ ID NO: 348062 - DNA, 20 bp, Artificial Sequence
  Description of Artificial Sequence: Synthetic oligonucleotide
  Target: LAMA2; (+) strand; PAM type: YTN; PAM sequence: TTG
atgtcaactgtgctgaatta

SEQ ID NO: 348063 - DNA, 20 bp, Artificial Sequence
  Description of Artificial Sequence: Synthetic oligonucleotide
  Target: LAMA2; (+) strand; PAM type: YTN; PAM sequence: CTG
tgctgaattattgtcttaaa

SEQ ID NO: 348064 - DNA, 20 bp, Artificial Sequence
  Description of Artificial Sequence: Synthetic oligonucleotide
  Target: LAMA2; (+) strand; PAM type: YTN; PAM sequence: CTG
aattattgtcttaaaaaatt

SEQ ID NO: 348065 - DNA, 20 bp, Artificial Sequence
  Description of Artificial Sequence: Synthetic oligonucleotide
  Target: LAMA2; (+) strand; PAM type: YTN; PAM sequence: TTA
ttgtcttaaaaaattcacca

SEQ ID NO: 348066 - DNA, 20 bp, Artificial Sequence
  Description of Artificial Sequence: Synthetic oligonucleotide
  Target: LAMA2; (+) strand; PAM type: YTN; PAM sequence: TTG
tcttaaaaaattcaccattc

SEQ ID NO: 348067 - DNA, 20 bp, Artificial Sequence
  Description of Artificial Sequence: Synthetic oligonucleotide
  Target: LAMA2; (+) strand; PAM type: YTN; PAM sequence: CTT
aaaaaattcaccattccatt

SEQ ID NO: 348068 - DNA, 20 bp, Artificial Sequence
  Description of Artificial Sequence: Synthetic oligonucleotide
  Target: LAMA2; (+) strand; PAM type: YTN; PAM sequence: TTA
aaaaattcaccattccattc

SEQ ID NO: 348069 - DNA, 20 bp, Artificial Sequence
  Description of Artificial Sequence: Synthetic oligonucleotide
  Target: LAMA2; (+) strand; PAM type: YTN; PAM sequence: TTC
accattccattcaggtttaa

SEQ ID NO: 348070 - DNA, 20 bp, Artificial Sequence
  Description of Artificial Sequence: Synthetic oligonucleotide
  Target: LAMA2; (+) strand; PAM type: YTN; PAM sequence: TTC
cattcaggtttaacatattt

SEQ ID NO: 348071 - DNA, 20 bp, Artificial Sequence
  Description of Artificial Sequence: Synthetic oligonucleotide
  Target: LAMA2; (+) strand; PAM type: YTN; PAM sequence: TTC
aggtttaacatattttttag

SEQ ID NO: 348072 - DNA, 20 bp, Artificial Sequence
  Description of Artificial Sequence: Synthetic oligonucleotide
  Target: LAMA2; (+) strand; PAM type: YTN; PAM sequence: TTT
aacatattttttagagtgtg

SEQ ID NO: 348073 - DNA, 20 bp, Artificial Sequence
  Description of Artificial Sequence: Synthetic oligonucleotide
  Target: LAMA2; (+) strand; PAM type: YTN; PAM sequence: TTA
acatattttttagagtgtga

SEQ ID NO: 348074 - DNA, 20 bp, Artificial Sequence
  Description of Artificial Sequence: Synthetic oligonucleotide
  Target: LAMA2; (+) strand; PAM type: YTN; PAM sequence: TTT
tttagagtgtgattttcata

SEQ ID NO: 348075 - DNA, 20 bp, Artificial Sequence
  Description of Artificial Sequence: Synthetic oligonucleotide
  Target: LAMA2; (+) strand; PAM type: YTN; PAM sequence: TTT
ttagagtgtgattttcatag

SEQ ID NO: 348076 - DNA, 20 bp, Artificial Sequence
  Description of Artificial Sequence: Synthetic oligonucleotide
  Target: LAMA2; (+) strand; PAM type: YTN; PAM sequence: TTT
tagagtgtgattttcatagg

SEQ ID NO: 348077 - DNA, 20 bp, Artificial Sequence
  Description of Artificial Sequence: Synthetic oligonucleotide
  Target: LAMA2; (+) strand; PAM type: YTN; PAM sequence: TTT
agagtgtgattttcataggg

SEQ ID NO: 348078 - DNA, 20 bp, Artificial Sequence
  Description of Artificial Sequence: Synthetic oligonucleotide
  Target: LAMA2; (+) strand; PAM type: YTN; PAM sequence: TTA
gagtgtgattttcatagggt

SEQ ID NO: 348079 - DNA, 20 bp, Artificial Sequence
  Description of Artificial Sequence: Synthetic oligonucleotide
  Target: LAMA2; (+) strand; PAM type: YTN; PAM sequence: TTT
tcatagggtatgttacattc

SEQ ID NO: 348080 - DNA, 20 bp, Artificial Sequence
  Description of Artificial Sequence: Synthetic oligonucleotide
  Target: LAMA2; (+) strand; PAM type: YTN; PAM sequence: TTT
catagggtatgttacattct

SEQ ID NO: 348081 - DNA, 20 bp, Artificial Sequence
  Description of Artificial Sequence: Synthetic oligonucleotide
  Target: LAMA2; (+) strand; PAM type: YTN; PAM sequence: TTC
atagggtatgttacattctt

SEQ ID NO: 348082 - DNA, 20 bp, Artificial Sequence
  Description of Artificial Sequence: Synthetic oligonucleotide
  Target: LAMA2; (+) strand; PAM type: YTN; PAM sequence: TTA
cattcttgatgaatttttat

SEQ ID NO: 348083 - DNA, 20 bp, Artificial Sequence
  Description of Artificial Sequence: Synthetic oligonucleotide
  Target: LAMA2; (+) strand; PAM type: YTN; PAM sequence: TTC
ttgatgaatttttatcttct

SEQ ID NO: 348084 - DNA, 20 bp, Artificial Sequence
  Description of Artificial Sequence: Synthetic oligonucleotide
  Target: LAMA2; (+) strand; PAM type: YTN; PAM sequence: CTT
gatgaatttttatcttcttg

SEQ ID NO: 348085 - DNA, 20 bp, Artificial Sequence
  Description of Artificial Sequence: Synthetic oligonucleotide
  Target: LAMA2; (+) strand; PAM type: YTN; PAM sequence: TTG
atgaatttttatcttcttga

SEQ ID NO: 348086 - DNA, 20 bp, Artificial Sequence
  Description of Artificial Sequence: Synthetic oligonucleotide
  Target: LAMA2; (+) strand; PAM type: YTN; PAM sequence: TTT
ttatcttcttgacctattaa

SEQ ID NO: 348087 - DNA, 20 bp, Artificial Sequence
  Description of Artificial Sequence: Synthetic oligonucleotide
  Target: LAMA2; (+) strand; PAM type: YTN; PAM sequence: TTT
tatcttcttgacctattaat

SEQ ID NO: 348088 - DNA, 20 bp, Artificial Sequence
  Description of Artificial Sequence: Synthetic oligonucleotide
  Target: LAMA2; (+) strand; PAM type: YTN; PAM sequence: TTT
atcttcttgacctattaatt

SEQ ID NO: 348089 - DNA, 20 bp, Artificial Sequence
  Description of Artificial Sequence: Synthetic oligonucleotide
  Target: LAMA2; (+) strand; PAM type: YTN; PAM sequence: TTA
tcttcttgacctattaatta

SEQ ID NO: 348090 - DNA, 20 bp, Artificial Sequence
  Description of Artificial Sequence: Synthetic oligonucleotide
  Target: LAMA2; (+) strand; PAM type: YTN; PAM sequence: CTT
cttgacctattaattactaa

SEQ ID NO: 348091 - DNA, 20 bp, Artificial Sequence
  Description of Artificial Sequence: Synthetic oligonucleotide
  Target: LAMA2; (+) strand; PAM type: YTN; PAM sequence: TTC
ttgacctattaattactaaa

SEQ ID NO: 348092 - DNA, 20 bp, Artificial Sequence
  Description of Artificial Sequence: Synthetic oligonucleotide
  Target: LAMA2; (+) strand; PAM type: YTN; PAM sequence: CTT
gacctattaattactaaaaa

SEQ ID NO: 348093 - DNA, 20 bp, Artificial Sequence
  Description of Artificial Sequence: Synthetic oligonucleotide
  Target: LAMA2; (+) strand; PAM type: YTN; PAM sequence: TTG
acctattaattactaaaaaa

SEQ ID NO: 348094 - DNA, 20 bp, Artificial Sequence
  Description of Artificial Sequence: Synthetic oligonucleotide
  Target: LAMA2; (+) strand; PAM type: YTN; PAM sequence: CTA
ttaattactaaaaaaaaaaa

SEQ ID NO: 348095 - DNA, 20 bp, Artificial Sequence
  Description of Artificial Sequence: Synthetic oligonucleotide
  Target: LAMA2; (+) strand; PAM type: YTN; PAM sequence: TTA
attactaaaaaaaaaaatac

SEQ ID NO: 348096 - DNA, 20 bp, Artificial Sequence
  Description of Artificial Sequence: Synthetic oligonucleotide
  Target: LAMA2; (+) strand; PAM type: YTN; PAM sequence: TTA
ctaaaaaaaaaaatacagat

SEQ ID NO: 348097 - DNA, 20 bp, Artificial Sequence
  Description of Artificial Sequence: Synthetic oligonucleotide
  Target: LAMA2; (+) strand; PAM type: YTN; PAM sequence: CTA
aaaaaaaaaatacagataac

SEQ ID NO: 348098 - DNA, 20 bp, Artificial Sequence
  Description of Artificial Sequence: Synthetic oligonucleotide
  Target: LAMA2; (+) strand; PAM type: YTN; PAM sequence: CTA
aaacaacctattgaaatatc

SEQ ID NO: 348099 - DNA, 20 bp, Artificial Sequence
  Description of Artificial Sequence: Synthetic oligonucleotide
  Target: LAMA2; (+) strand; PAM type: YTN; PAM sequence: CTA
ttgaaatatctcactgtgat

SEQ ID NO: 348100 - DNA, 20 bp, Artificial Sequence
  Description of Artificial Sequence: Synthetic oligonucleotide
  Target: LAMA2; (+) strand; PAM type: YTN; PAM sequence: TTG
aaatatctcactgtgatgat

SEQ ID NO: 348101 - DNA, 20 bp, Artificial Sequence
  Description of Artificial Sequence: Synthetic oligonucleotide
  Target: LAMA2; (+) strand; PAM type: YTN; PAM sequence: CTC
actgtgatgatagatttgtc

SEQ ID NO: 348102 - DNA, 20 bp, Artificial Sequence
  Description of Artificial Sequence: Synthetic oligonucleotide
  Target: LAMA2; (+) strand; PAM type: YTN; PAM sequence: CTG
tgatgatagatttgtctagt

SEQ ID NO: 348103 - DNA, 20 bp, Artificial Sequence
  Description of Artificial Sequence: Synthetic oligonucleotide
  Target: LAMA2; (+) strand; PAM type: YTN; PAM sequence: TTT
gtctagttttccttgtaatt

SEQ ID NO: 348104 - DNA, 20 bp, Artificial Sequence
  Description of Artificial Sequence: Synthetic oligonucleotide
  Target: LAMA2; (+) strand; PAM type: YTN; PAM sequence: TTG
tctagttttccttgtaattt

SEQ ID NO: 348105 - DNA, 20 bp, Artificial Sequence
  Description of Artificial Sequence: Synthetic oligonucleotide
  Target: LAMA2; (+) strand; PAM type: YTN; PAM sequence: CTA
gttttccttgtaatttttgt

SEQ ID NO: 348106 - DNA, 20 bp, Artificial Sequence
  Description of Artificial Sequence: Synthetic oligonucleotide
  Target: LAMA2; (+) strand; PAM type: YTN; PAM sequence: TTT
tccttgtaatttttgttctc

SEQ ID NO: 348107 - DNA, 20 bp, Artificial Sequence
  Description of Artificial Sequence: Synthetic oligonucleotide
  Target: LAMA2; (+) strand; PAM type: YTN; PAM sequence: TTT
ccttgtaatttttgttctcc

SEQ ID NO: 348108 - DNA, 20 bp, Artificial Sequence
  Description of Artificial Sequence: Synthetic oligonucleotide
  Target: LAMA2; (+) strand; PAM type: YTN; PAM sequence: TTC
cttgtaatttttgttctcca

SEQ ID NO: 348109 - DNA, 20 bp, Artificial Sequence
  Description of Artificial Sequence: Synthetic oligonucleotide
  Target: LAMA2; (+) strand; PAM type: YTN; PAM sequence: CTT
gtaatttttgttctccatat

SEQ ID NO: 348110 - DNA, 20 bp, Artificial Sequence
  Description of Artificial Sequence: Synthetic oligonucleotide
  Target: LAMA2; (+) strand; PAM type: YTN; PAM sequence: TTG
taatttttgttctccatatt

SEQ ID NO: 348111 - DNA, 20 bp, Artificial Sequence
  Description of Artificial Sequence: Synthetic oligonucleotide
  Target: LAMA2; (+) strand; PAM type: YTN; PAM sequence: TTT
ttgttctccatattttaagg

SEQ ID NO: 348112 - DNA, 20 bp, Artificial Sequence
  Description of Artificial Sequence: Synthetic oligonucleotide
  Target: LAMA2; (+) strand; PAM type: YTN; PAM sequence: TTT
tgttctccatattttaaggc

SEQ ID NO: 348113 - DNA, 20 bp, Artificial Sequence
  Description of Artificial Sequence: Synthetic oligonucleotide
  Target: LAMA2; (+) strand; PAM type: YTN; PAM sequence: TTT
gttctccatattttaaggct

SEQ ID NO: 348114 - DNA, 20 bp, Artificial Sequence
  Description of Artificial Sequence: Synthetic oligonucleotide
  Target: LAMA2; (+) strand; PAM type: YTN; PAM sequence: TTG
ttctccatattttaaggcta

SEQ ID NO: 348115 - DNA, 20 bp, Artificial Sequence
  Description of Artificial Sequence: Synthetic oligonucleotide
  Target: LAMA2; (+) strand; PAM type: YTN; PAM sequence: TTC
tccatattttaaggctatat

SEQ ID NO: 348116 - DNA, 20 bp, Artificial Sequence
  Description of Artificial Sequence: Synthetic oligonucleotide
  Target: LAMA2; (+) strand; PAM type: YTN; PAM sequence: CTC
catattttaaggctatataa

SEQ ID NO: 348117 - DNA, 20 bp, Artificial Sequence
  Description of Artificial Sequence: Synthetic oligonucleotide
  Target: LAMA2; (+) strand; PAM type: YTN; PAM sequence: TTT
taaggctatataatgtgatg

SEQ ID NO: 348118 - DNA, 20 bp, Artificial Sequence
  Description of Artificial Sequence: Synthetic oligonucleotide
  Target: LAMA2; (+) strand; PAM type: YTN; PAM sequence: TTT
aaggctatataatgtgatgt

SEQ ID NO: 348119 - DNA, 20 bp, Artificial Sequence
  Description of Artificial Sequence: Synthetic oligonucleotide
  Target: LAMA2; (+) strand; PAM type: YTN; PAM sequence: TTA
aggctatataatgtgatgtt

SEQ ID NO: 348120 - DNA, 20 bp, Artificial Sequence
  Description of Artificial Sequence: Synthetic oligonucleotide
  Target: LAMA2; (+) strand; PAM type: YTN; PAM sequence: CTA
tataatgtgatgttttcaag

SEQ ID NO: 348121 - DNA, 20 bp, Artificial Sequence
  Description of Artificial Sequence: Synthetic oligonucleotide
  Target: LAMA2; (+) strand; PAM type: YTN; PAM sequence: TTT
tcaagtacagaattatttta

SEQ ID NO: 348122 - DNA, 20 bp, Artificial Sequence
  Description of Artificial Sequence: Synthetic oligonucleotide
  Target: LAMA2; (+) strand; PAM type: YTN; PAM sequence: TTT
caagtacagaattattttaa

SEQ ID NO: 348123 - DNA, 20 bp, Artificial Sequence
  Description of Artificial Sequence: Synthetic oligonucleotide
  Target: LAMA2; (+) strand; PAM type: YTN; PAM sequence: TTC
aagtacagaattattttaag

SEQ ID NO: 348124 - DNA, 20 bp, Artificial Sequence
  Description of Artificial Sequence: Synthetic oligonucleotide
  Target: LAMA2; (+) strand; PAM type: YTN; PAM sequence: TTA
ttttaagttcctaatgggtt

SEQ ID NO: 348125 - DNA, 20 bp, Artificial Sequence
  Description of Artificial Sequence: Synthetic oligonucleotide
  Target: LAMA2; (+) strand; PAM type: YTN; PAM sequence: TTT
taagttcctaatgggttcct

SEQ ID NO: 348126 - DNA, 20 bp, Artificial Sequence
  Description of Artificial Sequence: Synthetic oligonucleotide
  Target: LAMA2; (+) strand; PAM type: YTN; PAM sequence: TTT
aagttcctaatgggttcctt

SEQ ID NO: 348127 - DNA, 20 bp, Artificial Sequence
  Description of Artificial Sequence: Synthetic oligonucleotide
  Target: LAMA2; (+) strand; PAM type: YTN; PAM sequence: TTA
agttcctaatgggttccttt

SEQ ID NO: 348128 - DNA, 20 bp, Artificial Sequence
  Description of Artificial Sequence: Synthetic oligonucleotide
  Target: LAMA2; (+) strand; PAM type: YTN; PAM sequence: TTC
ctaatgggttccttttttaa

SEQ ID NO: 348129 - DNA, 20 bp, Artificial Sequence
  Description of Artificial Sequence: Synthetic oligonucleotide
  Target: LAMA2; (+) strand; PAM type: YTN; PAM sequence: CTA
atgggttccttttttaatct

SEQ ID NO: 348130 - DNA, 20 bp, Artificial Sequence
  Description of Artificial Sequence: Synthetic oligonucleotide
  Target: LAMA2; (+) strand; PAM type: YTN; PAM sequence: TTC
cttttttaatctgatatttt

SEQ ID NO: 348131 - DNA, 20 bp, Artificial Sequence
  Description of Artificial Sequence: Synthetic oligonucleotide
  Target: LAMA2; (+) strand; PAM type: YTN; PAM sequence: CTT
ttttaatctgatattttata

SEQ ID NO: 348132 - DNA, 20 bp, Artificial Sequence
  Description of Artificial Sequence: Synthetic oligonucleotide
  Target: LAMA2; (+) strand; PAM type: YTN; PAM sequence: TTT
tttaatctgatattttataa

SEQ ID NO: 348133 - DNA, 20 bp, Artificial Sequence
  Description of Artificial Sequence: Synthetic oligonucleotide
  Target: LAMA2; (+) strand; PAM type: YTN; PAM sequence: TTT
ttaatctgatattttataac

SEQ ID NO: 348134 - DNA, 20 bp, Artificial Sequence
  Description of Artificial Sequence: Synthetic oligonucleotide
  Target: LAMA2; (+) strand; PAM type: YTN; PAM sequence: TTT
taatctgatattttataact

SEQ ID NO: 348135 - DNA, 20 bp, Artificial Sequence
  Description of Artificial Sequence: Synthetic oligonucleotide
  Target: LAMA2; (+) strand; PAM type: YTN; PAM sequence: TTT
aatctgatattttataactt

SEQ ID NO: 348136 - DNA, 20 bp, Artificial Sequence
  Description of Artificial Sequence: Synthetic oligonucleotide
  Target: LAMA2; (+) strand; PAM type: YTN; PAM sequence: TTA
atctgatattttataacttt

SEQ ID NO: 348137 - DNA, 20 bp, Artificial Sequence
  Description of Artificial Sequence: Synthetic oligonucleotide
  Target: LAMA2; (+) strand; PAM type: YTN; PAM sequence: CTG
atattttataactttttccc

SEQ ID NO: 348138 - DNA, 20 bp, Artificial Sequence
  Description of Artificial Sequence: Synthetic oligonucleotide
  Target: LAMA2; (+) strand; PAM type: YTN; PAM sequence: TTT
tataactttttccccaagtt

SEQ ID NO: 348139 - DNA, 20 bp, Artificial Sequence
  Description of Artificial Sequence: Synthetic oligonucleotide
  Target: LAMA2; (+) strand; PAM type: YTN; PAM sequence: TTT
ataactttttccccaagttt

SEQ ID NO: 348140 - DNA, 20 bp, Artificial Sequence
  Description of Artificial Sequence: Synthetic oligonucleotide
  Target: LAMA2; (+) strand; PAM type: YTN; PAM sequence: TTA
taactttttccccaagtttt

SEQ ID NO: 348141 - DNA, 20 bp, Artificial Sequence
  Description of Artificial Sequence: Synthetic oligonucleotide
  Target: LAMA2; (+) strand; PAM type: YTN; PAM sequence: CTT
tttccccaagttttctggtt

SEQ ID NO: 348142 - DNA, 20 bp, Artificial Sequence
  Description of Artificial Sequence: Synthetic oligonucleotide
  Target: LAMA2; (+) strand; PAM type: YTN; PAM sequence: TTT
ttccccaagttttctggttt

SEQ ID NO: 348143 - DNA, 20 bp, Artificial Sequence
  Description of Artificial Sequence: Synthetic oligonucleotide
  Target: LAMA2; (+) strand; PAM type: YTN; PAM sequence: TTT
tccccaagttttctggtttc

SEQ ID NO: 348144 - DNA, 20 bp, Artificial Sequence
  Description of Artificial Sequence: Synthetic oligonucleotide
  Target: LAMA2; (+) strand; PAM type: YTN; PAM sequence: TTT
ccccaagttttctggtttcc

SEQ ID NO: 348145 - DNA, 20 bp, Artificial Sequence
  Description of Artificial Sequence: Synthetic oligonucleotide
  Target: LAMA2; (+) strand; PAM type: YTN; PAM sequence: TTC
cccaagttttctggtttccc

SEQ ID NO: 348146 - DNA, 20 bp, Artificial Sequence
  Description of Artificial Sequence: Synthetic oligonucleotide
  Target: LAMA2; (+) strand; PAM type: YTN; PAM sequence: TTT
tctggtttcccaccataccc

SEQ ID NO: 348147 - DNA, 20 bp, Artificial Sequence
  Description of Artificial Sequence: Synthetic oligonucleotide
  Target: LAMA2; (+) strand; PAM type: YTN; PAM sequence: TTT
ctggtttcccaccatacccc

SEQ ID NO: 348148 - DNA, 20 bp, Artificial Sequence
  Description of Artificial Sequence: Synthetic oligonucleotide
  Target: LAMA2; (+) strand; PAM type: YTN; PAM sequence: TTC
tggtttcccaccatacccca

SEQ ID NO: 348149 - DNA, 20 bp, Artificial Sequence
  Description of Artificial Sequence: Synthetic oligonucleotide
  Target: LAMA2; (+) strand; PAM type: YTN; PAM sequence: CTG
gtttcccaccataccccaga

SEQ ID NO: 348150 - DNA, 20 bp, Artificial Sequence
  Description of Artificial Sequence: Synthetic oligonucleotide
  Target: LAMA2; (+) strand; PAM type: YTN; PAM sequence: TTT
cccaccataccccagattct

SEQ ID NO: 348151 - DNA, 20 bp, Artificial Sequence
  Description of Artificial Sequence: Synthetic oligonucleotide
  Target: LAMA2; (+) strand; PAM type: YTN; PAM sequence: TTC
ccaccataccccagattctt

SEQ ID NO: 348152 - DNA, 20 bp, Artificial Sequence
  Description of Artificial Sequence: Synthetic oligonucleotide
  Target: LAMA2; (+) strand; PAM type: YTN; PAM sequence: TTC
ttaagtaatttagggcacaa

SEQ ID NO: 348153 - DNA, 20 bp, Artificial Sequence
  Description of Artificial Sequence: Synthetic oligonucleotide
  Target: LAMA2; (+) strand; PAM type: YTN; PAM sequence: CTT
aagtaatttagggcacaata

SEQ ID NO: 348154 - DNA, 20 bp, Artificial Sequence
  Description of Artificial Sequence: Synthetic oligonucleotide
  Target: LAMA2; (+) strand; PAM type: YTN; PAM sequence: TTA
agtaatttagggcacaataa

SEQ ID NO: 348155 - DNA, 20 bp, Artificial Sequence
  Description of Artificial Sequence: Synthetic oligonucleotide
  Target: LAMA2; (+) strand; PAM type: YTN; PAM sequence: TTT
agggcacaataattttcaga

SEQ ID NO: 348156 - DNA, 20 bp, Artificial Sequence
  Description of Artificial Sequence: Synthetic oligonucleotide
  Target: LAMA2; (+) strand; PAM type: YTN; PAM sequence: TTA
gggcacaataattttcagag

SEQ ID NO: 348157 - DNA, 20 bp, Artificial Sequence
  Description of Artificial Sequence: Synthetic oligonucleotide
  Target: LAMA2; (+) strand; PAM type: YTN; PAM sequence: TTT
tcagagaaagaatgattaag

SEQ ID NO: 348158 - DNA, 20 bp, Artificial Sequence
  Description of Artificial Sequence: Synthetic oligonucleotide
  Target: LAMA2; (+) strand; PAM type: YTN; PAM sequence: TTT
cagagaaagaatgattaaga

SEQ ID NO: 348159 - DNA, 20 bp, Artificial Sequence
  Description of Artificial Sequence: Synthetic oligonucleotide
  Target: LAMA2; (+) strand; PAM type: YTN; PAM sequence: TTC
agagaaagaatgattaagaa

SEQ ID NO: 348160 - DNA, 20 bp, Artificial Sequence
  Description of Artificial Sequence: Synthetic oligonucleotide
  Target: LAMA2; (+) strand; PAM type: YTN; PAM sequence: TTA
agaatttatggaaatcttag

SEQ ID NO: 348161 - DNA, 20 bp, Artificial Sequence
  Description of Artificial Sequence: Synthetic oligonucleotide
  Target: LAMA2; (+) strand; PAM type: YTN; PAM sequence: TTT
atggaaatcttaggaaggtc

SEQ ID NO: 348162 - DNA, 20 bp, Artificial Sequence
  Description of Artificial Sequence: Synthetic oligonucleotide
  Target: LAMA2; (+) strand; PAM type: YTN; PAM sequence: TTA
tggaaatcttaggaaggtcg

SEQ ID NO: 348163 - DNA, 20 bp, Artificial Sequence
  Description of Artificial Sequence: Synthetic oligonucleotide
  Target: LAMA2; (+) strand; PAM type: YTN; PAM sequence: CTT
aggaaggtcgaattgacgca

SEQ ID NO: 348164 - DNA, 20 bp, Artificial Sequence
  Description of Artificial Sequence: Synthetic oligonucleotide
  Target: LAMA2; (+) strand; PAM type: YTN; PAM sequence: TTA
ggaaggtcgaattgacgcag

SEQ ID NO: 348165 - DNA, 20 bp, Artificial Sequence
  Description of Artificial Sequence: Synthetic oligonucleotide
  Target: LAMA2; (+) strand; PAM type: YTN; PAM sequence: TTG
acgcagtgccttggaagaga

SEQ ID NO: 348166 - DNA, 20 bp, Artificial Sequence
  Description of Artificial Sequence: Synthetic oligonucleotide
  Target: LAMA2; (+) strand; PAM type: YTN; PAM sequence: CTT
ggaagagagaaatataggta

SEQ ID NO: 348167 - DNA, 20 bp, Artificial Sequence
  Description of Artificial Sequence: Synthetic oligonucleotide
  Target: LAMA2; (+) strand; PAM type: YTN; PAM sequence: TTG
gaagagagaaatataggtag

SEQ ID NO: 348168 - DNA, 20 bp, Artificial Sequence
  Description of Artificial Sequence: Synthetic oligonucleotide
  Target: LAMA2; (+) strand; PAM type: YTN; PAM sequence: TTG
aagtataaggagaaatgcct

SEQ ID NO: 348169 - DNA, 20 bp, Artificial Sequence
  Description of Artificial Sequence: Synthetic oligonucleotide
  Target: LAMA2; (+) strand; PAM type: YTN; PAM sequence: CTA
tgatataaacaaacaaattg

SEQ ID NO: 348170 - DNA, 20 bp, Artificial Sequence
  Description of Artificial Sequence: Synthetic oligonucleotide
  Target: LAMA2; (+) strand; PAM type: YTN; PAM sequence: TTG
catgtacatgtattaagaag

SEQ ID NO: 348171 - DNA, 20 bp, Artificial Sequence
  Description of Artificial Sequence: Synthetic oligonucleotide
  Target: LAMA2; (+) strand; PAM type: YTN; PAM sequence: TTA
agaagactataacatatatc

SEQ ID NO: 348172 - DNA, 20 bp, Artificial Sequence
  Description of Artificial Sequence: Synthetic oligonucleotide
  Target: LAMA2; (+) strand; PAM type: YTN; PAM sequence: CTA
taacatatatcagttacttc

SEQ ID NO: 348173 - DNA, 20 bp, Artificial Sequence
  Description of Artificial Sequence: Synthetic oligonucleotide
  Target: LAMA2; (+) strand; PAM type: YTN; PAM sequence: TTA
cttcactagatgccagtgca

SEQ ID NO: 348174 - DNA, 20 bp, Artificial Sequence
  Description of Artificial Sequence: Synthetic oligonucleotide
  Target: LAMA2; (+) strand; PAM type: YTN; PAM sequence: CTT
cactagatgccagtgcatag

SEQ ID NO: 348175 - DNA, 20 bp, Artificial Sequence
  Description of Artificial Sequence: Synthetic oligonucleotide
  Target: LAMA2; (+) strand; PAM type: YTN; PAM sequence: TTC
actagatgccagtgcatagg

SEQ ID NO: 348176 - DNA, 20 bp, Artificial Sequence
  Description of Artificial Sequence: Synthetic oligonucleotide
  Target: LAMA2; (+) strand; PAM type: YTN; PAM sequence: CTA
gatgccagtgcataggcatg

SEQ ID NO: 348177 - DNA, 20 bp, Artificial Sequence
  Description of Artificial Sequence: Synthetic oligonucleotide
  Target: LAMA2; (+) strand; PAM type: YTN; PAM sequence: CTG
aatctgcgtaactaattggg

SEQ ID NO: 348178 - DNA, 20 bp, Artificial Sequence
  Description of Artificial Sequence: Synthetic oligonucleotide
  Target: LAMA2; (+) strand; PAM type: YTN; PAM sequence: CTG
cgtaactaattgggagaatg

SEQ ID NO: 348179 - DNA, 20 bp, Artificial Sequence
  Description of Artificial Sequence: Synthetic oligonucleotide
  Target: LAMA2; (+) strand; PAM type: YTN; PAM sequence: CTA
attgggagaatgggaagtta

SEQ ID NO: 348180 - DNA, 20 bp, Artificial Sequence
  Description of Artificial Sequence: Synthetic oligonucleotide
  Target: LAMA2; (+) strand; PAM type: YTN; PAM sequence: TTG
ggagaatgggaagttaactt

SEQ ID NO: 348181 - DNA, 20 bp, Artificial Sequence
  Description of Artificial Sequence: Synthetic oligonucleotide
  Target: LAMA2; (+) strand; PAM type: YTN; PAM sequence: TTA
actttatttttccaagaaaa

SEQ ID NO: 348182 - DNA, 20 bp, Artificial Sequence
  Description of Artificial Sequence: Synthetic oligonucleotide
  Target: LAMA2; (+) strand; PAM type: YTN; PAM sequence: CTT
tatttttccaagaaaaagaa

SEQ ID NO: 348183 - DNA, 20 bp, Artificial Sequence
  Description of Artificial Sequence: Synthetic oligonucleotide
  Target: LAMA2; (+) strand; PAM type: YTN; PAM sequence: TTT
atttttccaagaaaaagaaa

SEQ ID NO: 348184 - DNA, 20 bp, Artificial Sequence
  Description of Artificial Sequence: Synthetic oligonucleotide
  Target: LAMA2; (+) strand; PAM type: YTN; PAM sequence: TTA
tttttccaagaaaaagaaac

SEQ ID NO: 348185 - DNA, 20 bp, Artificial Sequence
  Description of Artificial Sequence: Synthetic oligonucleotide
  Target: LAMA2; (+) strand; PAM type: YTN; PAM sequence: TTT
ttccaagaaaaagaaacaaa

SEQ ID NO: 348186 - DNA, 20 bp, Artificial Sequence
  Description of Artificial Sequence: Synthetic oligonucleotide
  Target: LAMA2; (+) strand; PAM type: YTN; PAM sequence: TTT
tccaagaaaaagaaacaaaa

SEQ ID NO: 348187 - DNA, 20 bp, Artificial Sequence
  Description of Artificial Sequence: Synthetic oligonucleotide
  Target: LAMA2; (+) strand; PAM type: YTN; PAM sequence: TTT
ccaagaaaaagaaacaaaat

SEQ ID NO: 348188 - DNA, 20 bp, Artificial Sequence
  Description of Artificial Sequence: Synthetic oligonucleotide
  Target: LAMA2; (+) strand; PAM type: YTN; PAM sequence: TTC
caagaaaaagaaacaaaatc

SEQ ID NO: 348189 - DNA, 20 bp, Artificial Sequence
  Description of Artificial Sequence: Synthetic oligonucleotide
  Target: LAMA2; (+) strand; PAM type: YTN; PAM sequence: TTT
aaattttggaaaacataatt

SEQ ID NO: 348190 - DNA, 20 bp, Artificial Sequence
  Description of Artificial Sequence: Synthetic oligonucleotide
  Target: LAMA2; (+) strand; PAM type: YTN; PAM sequence: TTA
aattttggaaaacataattg

SEQ ID NO: 348191 - DNA, 20 bp, Artificial Sequence
  Description of Artificial Sequence: Synthetic oligonucleotide
  Target: LAMA2; (+) strand; PAM type: YTN; PAM sequence: TTT
tggaaaacataattgttaaa

SEQ ID NO: 348192 - DNA, 20 bp, Artificial Sequence
  Description of Artificial Sequence: Synthetic oligonucleotide
  Target: LAMA2; (+) strand; PAM type: YTN; PAM sequence: TTT
ggaaaacataattgttaaat

SEQ ID NO: 348193 - DNA, 20 bp, Artificial Sequence
  Description of Artificial Sequence: Synthetic oligonucleotide
  Target: LAMA2; (+) strand; PAM type: YTN; PAM sequence: TTG
gaaaacataattgttaaatt

SEQ ID NO: 348194 - DNA, 20 bp, Artificial Sequence
  Description of Artificial Sequence: Synthetic oligonucleotide
  Target: LAMA2; (+) strand; PAM type: YTN; PAM sequence: TTG
ttaaattatttttcatattg

SEQ ID NO: 348195 - DNA, 20 bp, Artificial Sequence
  Description of Artificial Sequence: Synthetic oligonucleotide
  Target: LAMA2; (+) strand; PAM type: YTN; PAM sequence: TTA
aattatttttcatattgtgt

SEQ ID NO: 348196 - DNA, 20 bp, Artificial Sequence
  Description of Artificial Sequence: Synthetic oligonucleotide
  Target: LAMA2; (+) strand; PAM type: YTN; PAM sequence: TTA
tttttcatattgtgtagatt

SEQ ID NO: 348197 - DNA, 20 bp, Artificial Sequence
  Description of Artificial Sequence: Synthetic oligonucleotide
  Target: LAMA2; (+) strand; PAM type: YTN; PAM sequence: TTT
ttcatattgtgtagattcac

SEQ ID NO: 348198 - DNA, 20 bp, Artificial Sequence
  Description of Artificial Sequence: Synthetic oligonucleotide
  Target: LAMA2; (+) strand; PAM type: YTN; PAM sequence: TTT
tcatattgtgtagattcaca

SEQ ID NO: 348199 - DNA, 20 bp, Artificial Sequence
  Description of Artificial Sequence: Synthetic oligonucleotide
  Target: LAMA2; (+) strand; PAM type: YTN; PAM sequence: TTT
catattgtgtagattcacat

SEQ ID NO: 348200 - DNA, 20 bp, Artificial Sequence
  Description of Artificial Sequence: Synthetic oligonucleotide
  Target: LAMA2; (+) strand; PAM type: YTN; PAM sequence: TTC
atattgtgtagattcacatc

SEQ ID NO: 348201 - DNA, 20 bp, Artificial Sequence
  Description of Artificial Sequence: Synthetic oligonucleotide
  Target: LAMA2; (+) strand; PAM type: YTN; PAM sequence: TTG
tgtagattcacatctcttta

SEQ ID NO: 348202 - DNA, 20 bp, Artificial Sequence
  Description of Artificial Sequence: Synthetic oligonucleotide
  Target: LAMA2; (+) strand; PAM type: YTN; PAM sequence: TTC
acatctctttaatcaatggg

SEQ ID NO: 348203 - DNA, 20 bp, Artificial Sequence
  Description of Artificial Sequence: Synthetic oligonucleotide
  Target: LAMA2; (+) strand; PAM type: YTN; PAM sequence: CTC
tttaatcaatgggagaccaa

SEQ ID NO: 348204 - DNA, 20 bp, Artificial Sequence
  Description of Artificial Sequence: Synthetic oligonucleotide
  Target: LAMA2; (+) strand; PAM type: YTN; PAM sequence: CTT
taatcaatgggagaccaagt

SEQ ID NO: 348205 - DNA, 20 bp, Artificial Sequence
  Description of Artificial Sequence: Synthetic oligonucleotide
  Target: LAMA2; (+) strand; PAM type: YTN; PAM sequence: TTT
aatcaatgggagaccaagtg

SEQ ID NO: 348206 - DNA, 20 bp, Artificial Sequence
  Description of Artificial Sequence: Synthetic oligonucleotide
  Target: LAMA2; (+) strand; PAM type: YTN; PAM sequence: TTA
atcaatgggagaccaagtgc

SEQ ID NO: 348207 - DNA, 20 bp, Artificial Sequence
  Description of Artificial Sequence: Synthetic oligonucleotide
  Target: LAMA2; (+) strand; PAM type: YTN; PAM sequence: CTT
ctccagaactgctagaattt

SEQ ID NO: 348208 - DNA, 20 bp, Artificial Sequence
  Description of Artificial Sequence: Synthetic oligonucleotide
  Target: LAMA2; (+) strand; PAM type: YTN; PAM sequence: TTC
tccagaactgctagaattta

SEQ ID NO: 348209 - DNA, 20 bp, Artificial Sequence
  Description of Artificial Sequence: Synthetic oligonucleotide
  Target: LAMA2; (+) strand; PAM type: YTN; PAM sequence: CTC
cagaactgctagaatttacc

SEQ ID NO: 348210 - DNA, 20 bp, Artificial Sequence
  Description of Artificial Sequence: Synthetic oligonucleotide
  Target: LAMA2; (+) strand; PAM type: YTN; PAM sequence: CTG
ctagaatttacctccgctcg

SEQ ID NO: 348211 - DNA, 20 bp, Artificial Sequence
  Description of Artificial Sequence: Synthetic oligonucleotide
  Target: LAMA2; (+) strand; PAM type: YTN; PAM sequence: CTA
gaatttacctccgctcgcta

SEQ ID NO: 348212 - DNA, 20 bp, Artificial Sequence
  Description of Artificial Sequence: Synthetic oligonucleotide
  Target: LAMA2; (+) strand; PAM type: YTN; PAM sequence: TTT
acctccgctcgctatattcg

SEQ ID NO: 348213 - DNA, 20 bp, Artificial Sequence
  Description of Artificial Sequence: Synthetic oligonucleotide
  Target: LAMA2; (+) strand; PAM type: YTN; PAM sequence: TTA
cctccgctcgctatattcgc

SEQ ID NO: 348214 - DNA, 20 bp, Artificial Sequence
  Description of Artificial Sequence: Synthetic oligonucleotide
  Target: LAMA2; (+) strand; PAM type: YTN; PAM sequence: CTC
cgctcgctatattcgcctga

SEQ ID NO: 348215 - DNA, 20 bp, Artificial Sequence
  Description of Artificial Sequence: Synthetic oligonucleotide
  Target: LAMA2; (+) strand; PAM type: YTN; PAM sequence: CTC
gctatattcgcctgagattt

SEQ ID NO: 348216 - DNA, 20 bp, Artificial Sequence
  Description of Artificial Sequence: Synthetic oligonucleotide
  Target: LAMA2; (+) strand; PAM type: YTN; PAM sequence: CTA
tattcgcctgagatttcaga

SEQ ID NO: 348217 - DNA, 20 bp, Artificial Sequence
  Description of Artificial Sequence: Synthetic oligonucleotide
  Target: LAMA2; (+) strand; PAM type: YTN; PAM sequence: TTC
gcctgagatttcagaggatc

SEQ ID NO: 348218 - DNA, 20 bp, Artificial Sequence
  Description of Artificial Sequence: Synthetic oligonucleotide
  Target: LAMA2; (+) strand; PAM type: YTN; PAM sequence: CTG
agatttcagaggatccgcac

SEQ ID NO: 348219 - DNA, 20 bp, Artificial Sequence
  Description of Artificial Sequence: Synthetic oligonucleotide
  Target: LAMA2; (+) strand; PAM type: YTN; PAM sequence: TTT
cagaggatccgcacactgaa

SEQ ID NO: 348220 - DNA, 20 bp, Artificial Sequence
  Description of Artificial Sequence: Synthetic oligonucleotide
  Target: LAMA2; (+) strand; PAM type: YTN; PAM sequence: TTC
agaggatccgcacactgaat

SEQ ID NO: 348221 - DNA, 20 bp, Artificial Sequence
  Description of Artificial Sequence: Synthetic oligonucleotide
  Target: LAMA2; (+) strand; PAM type: YTN; PAM sequence: CTG
aatgctgacttgatgatgtt

SEQ ID NO: 348222 - DNA, 20 bp, Artificial Sequence
  Description of Artificial Sequence: Synthetic oligonucleotide
  Target: LAMA2; (+) strand; PAM type: YTN; PAM sequence: CTG
acttgatgatgtttgctcac

SEQ ID NO: 348223 - DNA, 20 bp, Artificial Sequence
  Description of Artificial Sequence: Synthetic oligonucleotide
  Target: LAMA2; (+) strand; PAM type: YTN; PAM sequence: CTT
gatgatgtttgctcacaaag

SEQ ID NO: 348224 - DNA, 20 bp, Artificial Sequence
  Description of Artificial Sequence: Synthetic oligonucleotide
  Target: LAMA2; (+) strand; PAM type: YTN; PAM sequence: TTG
atgatgtttgctcacaaaga

SEQ ID NO: 348225 - DNA, 20 bp, Artificial Sequence
  Description of Artificial Sequence: Synthetic oligonucleotide
  Target: LAMA2; (+) strand; PAM type: YTN; PAM sequence: TTT
gctcacaaagacccaagaga

SEQ ID NO: 348226 - DNA, 20 bp, Artificial Sequence
  Description of Artificial Sequence: Synthetic oligonucleotide
  Target: LAMA2; (+) strand; PAM type: YTN; PAM sequence: TTG
ctcacaaagacccaagagaa

SEQ ID NO: 348227 - DNA, 20 bp, Artificial Sequence
  Description of Artificial Sequence: Synthetic oligonucleotide
  Target: LAMA2; (+) strand; PAM type: YTN; PAM sequence: CTC
acaaagacccaagagaaatt

SEQ ID NO: 348228 - DNA, 20 bp, Artificial Sequence
  Description of Artificial Sequence: Synthetic oligonucleotide
  Target: LAMA2; (+) strand; PAM type: YTN; PAM sequence: TTG
accccattgtcaccagaaga

SEQ ID NO: 348229 - DNA, 20 bp, Artificial Sequence
  Description of Artificial Sequence: Synthetic oligonucleotide
  Target: LAMA2; (+) strand; PAM type: YTN; PAM sequence: TTG
tcaccagaagagtaagttat

SEQ ID NO: 348230 - DNA, 20 bp, Artificial Sequence
  Description of Artificial Sequence: Synthetic oligonucleotide
  Target: LAMA2; (+) strand; PAM type: YTN; PAM sequence: TTA
tgatgaatcatattagagcc

SEQ ID NO: 348231 - DNA, 20 bp, Artificial Sequence
  Description of Artificial Sequence: Synthetic oligonucleotide
  Target: LAMA2; (+) strand; PAM type: YTN; PAM sequence: TTA
gagcctacaaatgatatccc

SEQ ID NO: 348232 - DNA, 20 bp, Artificial Sequence
  Description of Artificial Sequence: Synthetic oligonucleotide
  Target: LAMA2; (+) strand; PAM type: YTN; PAM sequence: CTA
caaatgatatcccacttatc

SEQ ID NO: 348233 - DNA, 20 bp, Artificial Sequence
  Description of Artificial Sequence: Synthetic oligonucleotide
  Target: LAMA2; (+) strand; PAM type: YTN; PAM sequence: CTT
atctttttgtctgttaaata

SEQ ID NO: 348234 - DNA, 20 bp, Artificial Sequence
  Description of Artificial Sequence: Synthetic oligonucleotide
  Target: LAMA2; (+) strand; PAM type: YTN; PAM sequence: TTA
tctttttgtctgttaaatac

SEQ ID NO: 348235 - DNA, 20 bp, Artificial Sequence
  Description of Artificial Sequence: Synthetic oligonucleotide
  Target: LAMA2; (+) strand; PAM type: YTN; PAM sequence: CTT
tttgtctgttaaatacttta

SEQ ID NO: 348236 - DNA, 20 bp, Artificial Sequence
  Description of Artificial Sequence: Synthetic oligonucleotide
  Target: LAMA2; (+) strand; PAM type: YTN; PAM sequence: TTT
ttgtctgttaaatactttaa

SEQ ID NO: 348237 - DNA, 20 bp, Artificial Sequence
  Description of Artificial Sequence: Synthetic oligonucleotide
  Target: LAMA2; (+) strand; PAM type: YTN; PAM sequence: TTT
tgtctgttaaatactttaaa

SEQ ID NO: 348238 - DNA, 20 bp, Artificial Sequence
  Description of Artificial Sequence: Synthetic oligonucleotide
  Target: LAMA2; (+) strand; PAM type: YTN; PAM sequence: TTT
gtctgttaaatactttaaaa

SEQ ID NO: 348239 - DNA, 20 bp, Artificial Sequence
  Description of Artificial Sequence: Synthetic oligonucleotide
  Target: LAMA2; (+) strand; PAM type: YTN; PAM sequence: TTG
tctgttaaatactttaaaaa

SEQ ID NO: 348240 - DNA, 20 bp, Artificial Sequence
  Description of Artificial Sequence: Synthetic oligonucleotide
  Target: LAMA2; (+) strand; PAM type: YTN; PAM sequence: CTG
ttaaatactttaaaaatgtt

SEQ ID NO: 348241 - DNA, 20 bp, Artificial Sequence
  Description of Artificial Sequence: Synthetic oligonucleotide
  Target: LAMA2; (+) strand; PAM type: YTN; PAM sequence: TTA
aatactttaaaaatgttttc

SEQ ID NO: 348242 - DNA, 20 bp, Artificial Sequence
  Description of Artificial Sequence: Synthetic oligonucleotide
  Target: LAMA2; (+) strand; PAM type: YTN; PAM sequence: CTT
taaaaatgttttcagtgatt

SEQ ID NO: 348243 - DNA, 20 bp, Artificial Sequence
  Description of Artificial Sequence: Synthetic oligonucleotide
  Target: LAMA2; (+) strand; PAM type: YTN; PAM sequence: TTT
aaaaatgttttcagtgattt

SEQ ID NO: 348244 - DNA, 20 bp, Artificial Sequence
  Description of Artificial Sequence: Synthetic oligonucleotide
  Target: LAMA2; (+) strand; PAM type: YTN; PAM sequence: TTA
aaaatgttttcagtgatttg

SEQ ID NO: 348245 - DNA, 20 bp, Artificial Sequence
  Description of Artificial Sequence: Synthetic oligonucleotide
  Target: LAMA2; (+) strand; PAM type: YTN; PAM sequence: TTT
tcagtgatttgtaggagtgg

SEQ ID NO: 348246 - DNA, 20 bp, Artificial Sequence
  Description of Artificial Sequence: Synthetic oligonucleotide
  Target: LAMA2; (+) strand; PAM type: YTN; PAM sequence: TTT
cagtgatttgtaggagtggt

SEQ ID NO: 348247 - DNA, 20 bp, Artificial Sequence
  Description of Artificial Sequence: Synthetic oligonucleotide
  Target: LAMA2; (+) strand; PAM type: YTN; PAM sequence: TTC
agtgatttgtaggagtggtt

SEQ ID NO: 348248 - DNA, 20 bp, Artificial Sequence
  Description of Artificial Sequence: Synthetic oligonucleotide
  Target: LAMA2; (+) strand; PAM type: YTN; PAM sequence: TTT
gtaggagtggttattatcaa

SEQ ID NO: 348249 - DNA, 20 bp, Artificial Sequence
  Description of Artificial Sequence: Synthetic oligonucleotide
  Target: LAMA2; (+) strand; PAM type: YTN; PAM sequence: TTG
taggagtggttattatcaaa

SEQ ID NO: 348250 - DNA, 20 bp, Artificial Sequence
  Description of Artificial Sequence: Synthetic oligonucleotide
  Target: LAMA2; (+) strand; PAM type: YTN; PAM sequence: TTA
ttatcaaatttttattttag

SEQ ID NO: 348251 - DNA, 20 bp, Artificial Sequence
  Description of Artificial Sequence: Synthetic oligonucleotide
  Target: LAMA2; (+) strand; PAM type: YTN; PAM sequence: TTA
tcaaatttttattttagaat

SEQ ID NO: 348252 - DNA, 20 bp, Artificial Sequence
  Description of Artificial Sequence: Synthetic oligonucleotide
  Target: LAMA2; (+) strand; PAM type: YTN; PAM sequence: TTT
ttattttagaattgtagatt

SEQ ID NO: 348253 - DNA, 20 bp, Artificial Sequence
  Description of Artificial Sequence: Synthetic oligonucleotide
  Target: LAMA2; (+) strand; PAM type: YTN; PAM sequence: TTT
tattttagaattgtagatta

SEQ ID NO: 348254 - DNA, 20 bp, Artificial Sequence
  Description of Artificial Sequence: Synthetic oligonucleotide
  Target: LAMA2; (+) strand; PAM type: YTN; PAM sequence: TTT
attttagaattgtagattat

SEQ ID NO: 348255 - DNA, 20 bp, Artificial Sequence
  Description of Artificial Sequence: Synthetic oligonucleotide
  Target: LAMA2; (+) strand; PAM type: YTN; PAM sequence: TTA
ttttagaattgtagattatt

SEQ ID NO: 348256 - DNA, 20 bp, Artificial Sequence
  Description of Artificial Sequence: Synthetic oligonucleotide
  Target: LAMA2; (+) strand; PAM type: YTN; PAM sequence: TTT
tagaattgtagattattatt

SEQ ID NO: 348257 - DNA, 20 bp, Artificial Sequence
  Description of Artificial Sequence: Synthetic oligonucleotide
  Target: LAMA2; (+) strand; PAM type: YTN; PAM sequence: TTT
agaattgtagattattatta

SEQ ID NO: 348258 - DNA, 20 bp, Artificial Sequence
  Description of Artificial Sequence: Synthetic oligonucleotide
  Target: LAMA2; (+) strand; PAM type: YTN; PAM sequence: TTA
gaattgtagattattattat

SEQ ID NO: 348259 - DNA, 20 bp, Artificial Sequence
  Description of Artificial Sequence: Synthetic oligonucleotide
  Target: LAMA2; (+) strand; PAM type: YTN; PAM sequence: TTG
tagattattattattattat

SEQ ID NO: 348260 - DNA, 20 bp, Artificial Sequence
  Description of Artificial Sequence: Synthetic oligonucleotide
  Target: LAMA2; (+) strand; PAM type: YTN; PAM sequence: TTA
ttattattattattatttga

SEQ ID NO: 348261 - DNA, 20 bp, Artificial Sequence
  Description of Artificial Sequence: Synthetic oligonucleotide
  Target: LAMA2; (+) strand; PAM type: YTN; PAM sequence: TTA
ttattattattatttgaaat

SEQ ID NO: 348262 - DNA, 20 bp, Artificial Sequence
  Description of Artificial Sequence: Synthetic oligonucleotide
  Target: LAMA2; (+) strand; PAM type: YTN; PAM sequence: TTA
ttattattatttgaaatttg

SEQ ID NO: 348263 - DNA, 20 bp, Artificial Sequence
  Description of Artificial Sequence: Synthetic oligonucleotide
  Target: LAMA2; (+) strand; PAM type: YTN; PAM sequence: TTA
ttattatttgaaatttgaca

SEQ ID NO: 348264 - DNA, 20 bp, Artificial Sequence
  Description of Artificial Sequence: Synthetic oligonucleotide
  Target: LAMA2; (+) strand; PAM type: YTN; PAM sequence: TTA
ttatttgaaatttgacagac

SEQ ID NO: 348265 - DNA, 20 bp, Artificial Sequence
  Description of Artificial Sequence: Synthetic oligonucleotide
  Target: LAMA2; (+) strand; PAM type: YTN; PAM sequence: TTA
tttgaaatttgacagacttt

SEQ ID NO: 348266 - DNA, 20 bp, Artificial Sequence
  Description of Artificial Sequence: Synthetic oligonucleotide
  Target: LAMA2; (+) strand; PAM type: YTN; PAM sequence: TTT
gaaatttgacagactttcct

SEQ ID NO: 348267 - DNA, 20 bp, Artificial Sequence
  Description of Artificial Sequence: Synthetic oligonucleotide
  Target: LAMA2; (+) strand; PAM type: YTN; PAM sequence: TTG
aaatttgacagactttcctt

SEQ ID NO: 348268 - DNA, 20 bp, Artificial Sequence
  Description of Artificial Sequence: Synthetic oligonucleotide
  Target: LAMA2; (+) strand; PAM type: YTN; PAM sequence: TTT
gacagactttcctttgttca

SEQ ID NO: 348269 - DNA, 20 bp, Artificial Sequence
  Description of Artificial Sequence: Synthetic oligonucleotide
  Target: LAMA2; (+) strand; PAM type: YTN; PAM sequence: TTG
acagactttcctttgttcag

SEQ ID NO: 348270 - DNA, 20 bp, Artificial Sequence
  Description of Artificial Sequence: Synthetic oligonucleotide
  Target: LAMA2; (+) strand; PAM type: YTN; PAM sequence: CTT
tcctttgttcagatccaagc

SEQ ID NO: 348271 - DNA, 20 bp, Artificial Sequence
  Description of Artificial Sequence: Synthetic oligonucleotide
  Target: LAMA2; (+) strand; PAM type: YTN; PAM sequence: TTT
cctttgttcagatccaagct

SEQ ID NO: 348272 - DNA, 20 bp, Artificial Sequence
  Description of Artificial Sequence: Synthetic oligonucleotide
  Target: LAMA2; (+) strand; PAM type: YTN; PAM sequence: TTC
ctttgttcagatccaagctg

SEQ ID NO: 348273 - DNA, 20 bp, Artificial Sequence
  Description of Artificial Sequence: Synthetic oligonucleotide
  Target: LAMA2; (+) strand; PAM type: YTN; PAM sequence: CTT
tgttcagatccaagctgtgc

SEQ ID NO: 348274 - DNA, 20 bp, Artificial Sequence
  Description of Artificial Sequence: Synthetic oligonucleotide
  Target: LAMA2; (+) strand; PAM type: YTN; PAM sequence: TTT
gttcagatccaagctgtgcc

SEQ ID NO: 348275 - DNA, 20 bp, Artificial Sequence
  Description of Artificial Sequence: Synthetic oligonucleotide
  Target: LAMA2; (+) strand; PAM type: YTN; PAM sequence: TTG
ttcagatccaagctgtgccg

SEQ ID NO: 348276 - DNA, 20 bp, Artificial Sequence
  Description of Artificial Sequence: Synthetic oligonucleotide
  Target: LAMA2; (+) strand; PAM type: YTN; PAM sequence: TTC
agatccaagctgtgccgctt

SEQ ID NO: 348277 - DNA, 20 bp, Artificial Sequence
  Description of Artificial Sequence: Synthetic oligonucleotide
  Target: LAMA2; (+) strand; PAM type: YTN; PAM sequence: CTG
tgccgcttattacatgtgta

SEQ ID NO: 348278 - DNA, 20 bp, Artificial Sequence
  Description of Artificial Sequence: Synthetic oligonucleotide
  Target: LAMA2; (+) strand; PAM type: YTN; PAM sequence: CTT
attacatgtgtaacatttat

SEQ ID NO: 348279 - DNA, 20 bp, Artificial Sequence
  Description of Artificial Sequence: Synthetic oligonucleotide
  Target: LAMA2; (+) strand; PAM type: YTN; PAM sequence: TTA
ttacatgtgtaacatttatc

SEQ ID NO: 348280 - DNA, 20 bp, Artificial Sequence
  Description of Artificial Sequence: Synthetic oligonucleotide
  Target: LAMA2; (+) strand; PAM type: YTN; PAM sequence: TTA
catgtgtaacatttatcaaa

SEQ ID NO: 348281 - DNA, 20 bp, Artificial Sequence
  Description of Artificial Sequence: Synthetic oligonucleotide
  Target: LAMA2; (+) strand; PAM type: YTN; PAM sequence: TTT
atcaaacattttagccttct

SEQ ID NO: 348282 - DNA, 20 bp, Artificial Sequence
  Description of Artificial Sequence: Synthetic oligonucleotide
  Target: LAMA2; (+) strand; PAM type: YTN; PAM sequence: TTA
tcaaacattttagccttctc

SEQ ID NO: 348283 - DNA, 20 bp, Artificial Sequence
  Description of Artificial Sequence: Synthetic oligonucleotide
  Target: LAMA2; (+) strand; PAM type: YTN; PAM sequence: TTT
tagccttctcaaactttaat

SEQ ID NO: 348284 - DNA, 20 bp, Artificial Sequence
  Description of Artificial Sequence: Synthetic oligonucleotide
  Target: LAMA2; (+) strand; PAM type: YTN; PAM sequence: TTT
agccttctcaaactttaatt

SEQ ID NO: 348285 - DNA, 20 bp, Artificial Sequence
  Description of Artificial Sequence: Synthetic oligonucleotide
  Target: LAMA2; (+) strand; PAM type: YTN; PAM sequence: TTA
gccttctcaaactttaattt

SEQ ID NO: 348286 - DNA, 20 bp, Artificial Sequence
  Description of Artificial Sequence: Synthetic oligonucleotide
  Target: LAMA2; (+) strand; PAM type: YTN; PAM sequence: CTT
ctcaaactttaatttcttct

SEQ ID NO: 348287 - DNA, 20 bp, Artificial Sequence
  Description of Artificial Sequence: Synthetic oligonucleotide
  Target: LAMA2; (+) strand; PAM type: YTN; PAM sequence: TTC
tcaaactttaatttcttctt

SEQ ID NO: 348288 - DNA, 20 bp, Artificial Sequence
  Description of Artificial Sequence: Synthetic oligonucleotide
  Target: LAMA2; (+) strand; PAM type: YTN; PAM sequence: CTC
aaactttaatttcttctttt

SEQ ID NO: 348289 - DNA, 20 bp, Artificial Sequence
  Description of Artificial Sequence: Synthetic oligonucleotide
  Target: LAMA2; (+) strand; PAM type: YTN; PAM sequence: CTT
taatttcttcttttgtaaaa

SEQ ID NO: 348290 - DNA, 20 bp, Artificial Sequence
  Description of Artificial Sequence: Synthetic oligonucleotide
  Target: LAMA2; (+) strand; PAM type: YTN; PAM sequence: TTT
aatttcttcttttgtaaaat

SEQ ID NO: 348291 - DNA, 20 bp, Artificial Sequence
  Description of Artificial Sequence: Synthetic oligonucleotide
  Target: LAMA2; (+) strand; PAM type: YTN; PAM sequence: TTA
atttcttcttttgtaaaatg

SEQ ID NO: 348292 - DNA, 20 bp, Artificial Sequence
  Description of Artificial Sequence: Synthetic oligonucleotide
  Target: LAMA2; (+) strand; PAM type: YTN; PAM sequence: TTT
cttcttttgtaaaatgagaa

SEQ ID NO: 348293 - DNA, 20 bp, Artificial Sequence
  Description of Artificial Sequence: Synthetic oligonucleotide
  Target: LAMA2; (+) strand; PAM type: YTN; PAM sequence: TTC
ttcttttgtaaaatgagaat

SEQ ID NO: 348294 - DNA, 20 bp, Artificial Sequence
  Description of Artificial Sequence: Synthetic oligonucleotide
  Target: LAMA2; (+) strand; PAM type: YTN; PAM sequence: CTT
cttttgtaaaatgagaatca

SEQ ID NO: 348295 - DNA, 20 bp, Artificial Sequence
  Description of Artificial Sequence: Synthetic oligonucleotide
  Target: LAMA2; (+) strand; PAM type: YTN; PAM sequence: TTC
ttttgtaaaatgagaatcac

SEQ ID NO: 348296 - DNA, 20 bp, Artificial Sequence
  Description of Artificial Sequence: Synthetic oligonucleotide
  Target: LAMA2; (+) strand; PAM type: YTN; PAM sequence: CTT
ttgtaaaatgagaatcacaa

SEQ ID NO: 348297 - DNA, 20 bp, Artificial Sequence
  Description of Artificial Sequence: Synthetic oligonucleotide
  Target: LAMA2; (+) strand; PAM type: YTN; PAM sequence: TTT
tgtaaaatgagaatcacaat

SEQ ID NO: 348298 - DNA, 20 bp, Artificial Sequence
  Description of Artificial Sequence: Synthetic oligonucleotide
  Target: LAMA2; (+) strand; PAM type: YTN; PAM sequence: TTT
gtaaaatgagaatcacaatg

SEQ ID NO: 348299 - DNA, 20 bp, Artificial Sequence
  Description of Artificial Sequence: Synthetic oligonucleotide
  Target: LAMA2; (+) strand; PAM type: YTN; PAM sequence: TTG
taaaatgagaatcacaatgt

SEQ ID NO: 348300 - DNA, 20 bp, Artificial Sequence
  Description of Artificial Sequence: Synthetic oligonucleotide
  Target: LAMA2; (+) strand; PAM type: YTN; PAM sequence: CTA
cttaataatcttatttttca

SEQ ID NO: 348301 - DNA, 20 bp, Artificial Sequence
  Description of Artificial Sequence: Synthetic oligonucleotide
  Target: LAMA2; (+) strand; PAM type: YTN; PAM sequence: CTT
aataatcttatttttcagaa

SEQ ID NO: 348302 - DNA, 20 bp, Artificial Sequence
  Description of Artificial Sequence: Synthetic oligonucleotide
  Target: LAMA2; (+) strand; PAM type: YTN; PAM sequence: TTA
ataatcttatttttcagaat

SEQ ID NO: 348303 - DNA, 20 bp, Artificial Sequence
  Description of Artificial Sequence: Synthetic oligonucleotide
  Target: LAMA2; (+) strand; PAM type: YTN; PAM sequence: CTT
atttttcagaataaaattag

SEQ ID NO: 348304 - DNA, 20 bp, Artificial Sequence
  Description of Artificial Sequence: Synthetic oligonucleotide
  Target: LAMA2; (+) strand; PAM type: YTN; PAM sequence: TTA
tttttcagaataaaattagc

SEQ ID NO: 348305 - DNA, 20 bp, Artificial Sequence
  Description of Artificial Sequence: Synthetic oligonucleotide
  Target: LAMA2; (+) strand; PAM type: YTN; PAM sequence: TTT
ttcagaataaaattagcctt

SEQ ID NO: 348306 - DNA, 20 bp, Artificial Sequence
  Description of Artificial Sequence: Synthetic oligonucleotide
  Target: LAMA2; (+) strand; PAM type: YTN; PAM sequence: TTT
tcagaataaaattagccttt

SEQ ID NO: 348307 - DNA, 20 bp, Artificial Sequence
  Description of Artificial Sequence: Synthetic oligonucleotide
  Target: LAMA2; (+) strand; PAM type: YTN; PAM sequence: TTT
cagaataaaattagcctttg

SEQ ID NO: 348308 - DNA, 20 bp, Artificial Sequence
  Description of Artificial Sequence: Synthetic oligonucleotide
  Target: LAMA2; (+) strand; PAM type: YTN; PAM sequence: TTC
agaataaaattagcctttgt

SEQ ID NO: 348309 - DNA, 20 bp, Artificial Sequence
  Description of Artificial Sequence: Synthetic oligonucleotide
  Target: LAMA2; (+) strand; PAM type: YTN; PAM sequence: TTA
gcctttgtcaccttagggga

SEQ ID NO: 348310 - DNA, 20 bp, Artificial Sequence
  Description of Artificial Sequence: Synthetic oligonucleotide
  Target: LAMA2; (+) strand; PAM type: YTN; PAM sequence: CTT
tgtcaccttaggggatctat

SEQ ID NO: 348311 - DNA, 20 bp, Artificial Sequence
  Description of Artificial Sequence: Synthetic oligonucleotide
  Target: LAMA2; (+) strand; PAM type: YTN; PAM sequence: TTT
gtcaccttaggggatctata

SEQ ID NO: 348312 - DNA, 20 bp, Artificial Sequence
  Description of Artificial Sequence: Synthetic oligonucleotide
  Target: LAMA2; (+) strand; PAM type: YTN; PAM sequence: TTG
tcaccttaggggatctatac

SEQ ID NO: 348313 - DNA, 20 bp, Artificial Sequence
  Description of Artificial Sequence: Synthetic oligonucleotide
  Target: LAMA2; (+) strand; PAM type: YTN; PAM sequence: CTT
aggggatctatactactatt

SEQ ID NO: 348314 - DNA, 20 bp, Artificial Sequence
  Description of Artificial Sequence: Synthetic oligonucleotide
  Target: LAMA2; (+) strand; PAM type: YTN; PAM sequence: TTA
ggggatctatactactatta

SEQ ID NO: 348315 - DNA, 20 bp, Artificial Sequence
  Description of Artificial Sequence: Synthetic oligonucleotide
  Target: LAMA2; (+) strand; PAM type: YTN; PAM sequence: CTA
tactactattataattggct

SEQ ID NO: 348316 - DNA, 20 bp, Artificial Sequence
  Description of Artificial Sequence: Synthetic oligonucleotide
  Target: LAMA2; (+) strand; PAM type: YTN; PAM sequence: CTA
ctattataattggctttggc

SEQ ID NO: 348317 - DNA, 20 bp, Artificial Sequence
  Description of Artificial Sequence: Synthetic oligonucleotide
  Target: LAMA2; (+) strand; PAM type: YTN; PAM sequence: CTA
ttataattggctttggcgag

SEQ ID NO: 348318 - DNA, 20 bp, Artificial Sequence
  Description of Artificial Sequence: Synthetic oligonucleotide
  Target: LAMA2; (+) strand; PAM type: YTN; PAM sequence: TTA
taattggctttggcgagtta

SEQ ID NO: 348319 - DNA, 20 bp, Artificial Sequence
  Description of Artificial Sequence: Synthetic oligonucleotide
  Target: LAMA2; (+) strand; PAM type: YTN; PAM sequence: TTG
gctttggcgagttactactg

SEQ ID NO: 348320 - DNA, 20 bp, Artificial Sequence
  Description of Artificial Sequence: Synthetic oligonucleotide
  Target: LAMA2; (+) strand; PAM type: YTN; PAM sequence: CTT
tggcgagttactactggaag

SEQ ID NO: 348321 - DNA, 20 bp, Artificial Sequence
  Description of Artificial Sequence: Synthetic oligonucleotide
  Target: LAMA2; (+) strand; PAM type: YTN; PAM sequence: TTT
ggcgagttactactggaagt

SEQ ID NO: 348322 - DNA, 20 bp, Artificial Sequence
  Description of Artificial Sequence: Synthetic oligonucleotide
  Target: LAMA2; (+) strand; PAM type: YTN; PAM sequence: TTG
gcgagttactactggaagtg

SEQ ID NO: 348323 - DNA, 20 bp, Artificial Sequence
  Description of Artificial Sequence: Synthetic oligonucleotide
  Target: LAMA2; (+) strand; PAM type: YTN; PAM sequence: TTA
ctactggaagtgcaggggct

SEQ ID NO: 348324 - DNA, 20 bp, Artificial Sequence
  Description of Artificial Sequence: Synthetic oligonucleotide
  Target: LAMA2; (+) strand; PAM type: YTN; PAM sequence: CTA
ctggaagtgcaggggctttg

SEQ ID NO: 348325 - DNA, 20 bp, Artificial Sequence
  Description of Artificial Sequence: Synthetic oligonucleotide
  Target: LAMA2; (+) strand; PAM type: YTN; PAM sequence: CTG
gaagtgcaggggctttgaaa

SEQ ID NO: 348326 - DNA, 20 bp, Artificial Sequence
  Description of Artificial Sequence: Synthetic oligonucleotide
  Target: LAMA2; (+) strand; PAM type: YTN; PAM sequence: CTT
tgaaacatttttttgccacc

SEQ ID NO: 348327 - DNA, 20 bp, Artificial Sequence
  Description of Artificial Sequence: Synthetic oligonucleotide
  Target: LAMA2; (+) strand; PAM type: YTN; PAM sequence: TTT
gaaacatttttttgccacca

SEQ ID NO: 348328 - DNA, 20 bp, Artificial Sequence
  Description of Artificial Sequence: Synthetic oligonucleotide
  Target: LAMA2; (+) strand; PAM type: YTN; PAM sequence: TTG
aaacatttttttgccaccac

SEQ ID NO: 348329 - DNA, 20 bp, Artificial Sequence
  Description of Artificial Sequence: Synthetic oligonucleotide
  Target: LAMA2; (+) strand; PAM type: YTN; PAM sequence: TTT
ttttgccaccactgagccag

SEQ ID NO: 348330 - DNA, 20 bp, Artificial Sequence
  Description of Artificial Sequence: Synthetic oligonucleotide
  Target: LAMA2; (+) strand; PAM type: YTN; PAM sequence: TTT
tttgccaccactgagccagt

SEQ ID NO: 348331 - DNA, 20 bp, Artificial Sequence
  Description of Artificial Sequence: Synthetic oligonucleotide
  Target: LAMA2; (+) strand; PAM type: YTN; PAM sequence: TTT
ttgccaccactgagccagta

SEQ ID NO: 348332 - DNA, 20 bp, Artificial Sequence
  Description of Artificial Sequence: Synthetic oligonucleotide
  Target: LAMA2; (+) strand; PAM type: YTN; PAM sequence: TTT
tgccaccactgagccagtat

SEQ ID NO: 348333 - DNA, 20 bp, Artificial Sequence
  Description of Artificial Sequence: Synthetic oligonucleotide
  Target: LAMA2; (+) strand; PAM type: YTN; PAM sequence: TTT
gccaccactgagccagtata

SEQ ID NO: 348334 - DNA, 20 bp, Artificial Sequence
  Description of Artificial Sequence: Synthetic oligonucleotide
  Target: LAMA2; (+) strand; PAM type: YTN; PAM sequence: TTG
ccaccactgagccagtatac

SEQ ID NO: 348335 - DNA, 20 bp, Artificial Sequence
  Description of Artificial Sequence: Synthetic oligonucleotide
  Target: LAMA2; (+) strand; PAM type: YTN; PAM sequence: CTG
agccagtatacacacatgca

SEQ ID NO: 348336 - DNA, 20 bp, Artificial Sequence
  Description of Artificial Sequence: Synthetic oligonucleotide
  Target: LAMA2; (+) strand; PAM type: YTN; PAM sequence: CTT
aaaccttaatgtgtatggga

SEQ ID NO: 348337 - DNA, 20 bp, Artificial Sequence
  Description of Artificial Sequence: Synthetic oligonucleotide
  Target: LAMA2; (+) strand; PAM type: YTN; PAM sequence: TTA
aaccttaatgtgtatgggat

SEQ ID NO: 348338 - DNA, 20 bp, Artificial Sequence
  Description of Artificial Sequence: Synthetic oligonucleotide
  Target: LAMA2; (+) strand; PAM type: YTN; PAM sequence: CTT
aatgtgtatgggattagcca

SEQ ID NO: 348339 - DNA, 20 bp, Artificial Sequence
  Description of Artificial Sequence: Synthetic oligonucleotide
  Target: LAMA2; (+) strand; PAM type: YTN; PAM sequence: TTA
atgtgtatgggattagccag

SEQ ID NO: 348340 - DNA, 20 bp, Artificial Sequence
  Description of Artificial Sequence: Synthetic oligonucleotide
  Target: LAMA2; (+) strand; PAM type: YTN; PAM sequence: TTA
gccagtgatcttgtggaaat

SEQ ID NO: 348341 - DNA, 20 bp, Artificial Sequence
  Description of Artificial Sequence: Synthetic oligonucleotide
  Target: LAMA2; (+) strand; PAM type: YTN; PAM sequence: CTT
gtggaaatataggttatgat

SEQ ID NO: 348342 - DNA, 20 bp, Artificial Sequence
  Description of Artificial Sequence: Synthetic oligonucleotide
  Target: LAMA2; (+) strand; PAM type: YTN; PAM sequence: TTG
tggaaatataggttatgatt

SEQ ID NO: 348343 - DNA, 20 bp, Artificial Sequence
  Description of Artificial Sequence: Synthetic oligonucleotide
  Target: LAMA2; (+) strand; PAM type: YTN; PAM sequence: TTA
tgattcagtagggcagagct

SEQ ID NO: 348344 - DNA, 20 bp, Artificial Sequence
  Description of Artificial Sequence: Synthetic oligonucleotide
  Target: LAMA2; (+) strand; PAM type: YTN; PAM sequence: TTC
agtagggcagagctgagacg

SEQ ID NO: 348345 - DNA, 20 bp, Artificial Sequence
  Description of Artificial Sequence: Synthetic oligonucleotide
  Target: LAMA2; (+) strand; PAM type: YTN; PAM sequence: CTG
agacgctgcacttcaaaaac

SEQ ID NO: 348346 - DNA, 20 bp, Artificial Sequence
  Description of Artificial Sequence: Synthetic oligonucleotide
  Target: LAMA2; (+) strand; PAM type: YTN; PAM sequence: CTG
cacttcaaaaactttccagg

SEQ ID NO: 348347 - DNA, 20 bp, Artificial Sequence
  Description of Artificial Sequence: Synthetic oligonucleotide
  Target: LAMA2; (+) strand; PAM type: YTN; PAM sequence: CTT
caaaaactttccaggtgatg

SEQ ID NO: 348348 - DNA, 20 bp, Artificial Sequence
  Description of Artificial Sequence: Synthetic oligonucleotide
  Target: LAMA2; (+) strand; PAM type: YTN; PAM sequence: TTC
aaaaactttccaggtgatgc

SEQ ID NO: 348349 - DNA, 20 bp, Artificial Sequence
  Description of Artificial Sequence: Synthetic oligonucleotide
  Target: LAMA2; (+) strand; PAM type: YTN; PAM sequence: CTT
tccaggtgatgctgatgttg

SEQ ID NO: 348350 - DNA, 20 bp, Artificial Sequence
  Description of Artificial Sequence: Synthetic oligonucleotide
  Target: LAMA2; (+) strand; PAM type: YTN; PAM sequence: TTT
ccaggtgatgctgatgttgc

SEQ ID NO: 348351 - DNA, 20 bp, Artificial Sequence
  Description of Artificial Sequence: Synthetic oligonucleotide
  Target: LAMA2; (+) strand; PAM type: YTN; PAM sequence: TTC
caggtgatgctgatgttgcc

SEQ ID NO: 348352 - DNA, 20 bp, Artificial Sequence
  Description of Artificial Sequence: Synthetic oligonucleotide
  Target: LAMA2; (+) strand; PAM type: YTN; PAM sequence: CTG
atgttgccggtttgtgggcc

SEQ ID NO: 348353 - DNA, 20 bp, Artificial Sequence
  Description of Artificial Sequence: Synthetic oligonucleotide
  Target: LAMA2; (+) strand; PAM type: YTN; PAM sequence: TTG
ccggtttgtgggccatcaaa

SEQ ID NO: 348354 - DNA, 20 bp, Artificial Sequence
  Description of Artificial Sequence: Synthetic oligonucleotide
  Target: LAMA2; (+) strand; PAM type: YTN; PAM sequence: TTT
gtgggccatcaaataatttg

SEQ ID NO: 348355 - DNA, 20 bp, Artificial Sequence
  Description of Artificial Sequence: Synthetic oligonucleotide
  Target: LAMA2; (+) strand; PAM type: YTN; PAM sequence: TTG
tgggccatcaaataatttgg

SEQ ID NO: 348356 - DNA, 20 bp, Artificial Sequence
  Description of Artificial Sequence: Synthetic oligonucleotide
  Target: LAMA2; (+) strand; PAM type: YTN; PAM sequence: TTT
ggttttatgcttgattaatg

SEQ ID NO: 348357 - DNA, 20 bp, Artificial Sequence
  Description of Artificial Sequence: Synthetic oligonucleotide
  Target: LAMA2; (+) strand; PAM type: YTN; PAM sequence: TTG
gttttatgcttgattaatga

SEQ ID NO: 348358 - DNA, 20 bp, Artificial Sequence
  Description of Artificial Sequence: Synthetic oligonucleotide
  Target: LAMA2; (+) strand; PAM type: YTN; PAM sequence: TTT
tatgcttgattaatgaatca

SEQ ID NO: 348359 - DNA, 20 bp, Artificial Sequence
  Description of Artificial Sequence: Synthetic oligonucleotide
  Target: LAMA2; (+) strand; PAM type: YTN; PAM sequence: TTT
atgcttgattaatgaatcac

SEQ ID NO: 348360 - DNA, 20 bp, Artificial Sequence
  Description of Artificial Sequence: Synthetic oligonucleotide
  Target: LAMA2; (+) strand; PAM type: YTN; PAM sequence: TTA
tgcttgattaatgaatcaca

SEQ ID NO: 348361 - DNA, 20 bp, Artificial Sequence
  Description of Artificial Sequence: Synthetic oligonucleotide
  Target: LAMA2; (+) strand; PAM type: YTN; PAM sequence: CTT
gattaatgaatcacaagcca

SEQ ID NO: 348362 - DNA, 20 bp, Artificial Sequence
  Description of Artificial Sequence: Synthetic oligonucleotide
  Target: LAMA2; (+) strand; PAM type: YTN; PAM sequence: TTG
attaatgaatcacaagccat

SEQ ID NO: 348363 - DNA, 20 bp, Artificial Sequence
  Description of Artificial Sequence: Synthetic oligonucleotide
  Target: LAMA2; (+) strand; PAM type: YTN; PAM sequence: TTA
atgaatcacaagccatagtt

SEQ ID NO: 348364 - DNA, 20 bp, Artificial Sequence
  Description of Artificial Sequence: Synthetic oligonucleotide
  Target: LAMA2; (+) strand; PAM type: YTN; PAM sequence: TTT
taaaaatgcagtgctatagg

SEQ ID NO: 348365 - DNA, 20 bp, Artificial Sequence
  Description of Artificial Sequence: Synthetic oligonucleotide
  Target: LAMA2; (+) strand; PAM type: YTN; PAM sequence: TTT
aaaaatgcagtgctatagga

SEQ ID NO: 348366 - DNA, 20 bp, Artificial Sequence
  Description of Artificial Sequence: Synthetic oligonucleotide
  Target: LAMA2; (+) strand; PAM type: YTN; PAM sequence: TTA
aaaatgcagtgctataggag

SEQ ID NO: 348367 - DNA, 20 bp, Artificial Sequence
  Description of Artificial Sequence: Synthetic oligonucleotide
  Target: LAMA2; (+) strand; PAM type: YTN; PAM sequence: CTA
taggagaaaactgattctac

SEQ ID NO: 348368 - DNA, 20 bp, Artificial Sequence
  Description of Artificial Sequence: Synthetic oligonucleotide
  Target: LAMA2; (+) strand; PAM type: YTN; PAM sequence: CTG
attctacatactgttttatt

SEQ ID NO: 348369 - DNA, 20 bp, Artificial Sequence
  Description of Artificial Sequence: Synthetic oligonucleotide
  Target: LAMA2; (+) strand; PAM type: YTN; PAM sequence: TTC
tacatactgttttattttcc

SEQ ID NO: 348370 - DNA, 20 bp, Artificial Sequence
  Description of Artificial Sequence: Synthetic oligonucleotide
  Target: LAMA2; (+) strand; PAM type: YTN; PAM sequence: CTA
catactgttttattttcctt

SEQ ID NO: 348371 - DNA, 20 bp, Artificial Sequence
  Description of Artificial Sequence: Synthetic oligonucleotide
  Target: LAMA2; (+) strand; PAM type: YTN; PAM sequence: CTG
ttttattttcctttacaaat

SEQ ID NO: 348372 - DNA, 20 bp, Artificial Sequence
  Description of Artificial Sequence: Synthetic oligonucleotide
  Target: LAMA2; (+) strand; PAM type: YTN; PAM sequence: TTT
tattttcctttacaaataaa

SEQ ID NO: 348373 - DNA, 20 bp, Artificial Sequence
  Description of Artificial Sequence: Synthetic oligonucleotide
  Target: LAMA2; (+) strand; PAM type: YTN; PAM sequence: TTT
attttcctttacaaataaaa

SEQ ID NO: 348374 - DNA, 20 bp, Artificial Sequence
  Description of Artificial Sequence: Synthetic oligonucleotide
  Target: LAMA2; (+) strand; PAM type: YTN; PAM sequence: TTA
ttttcctttacaaataaaat

SEQ ID NO: 348375 - DNA, 20 bp, Artificial Sequence
  Description of Artificial Sequence: Synthetic oligonucleotide
  Target: LAMA2; (+) strand; PAM type: YTN; PAM sequence: TTT
tcctttacaaataaaatatt

SEQ ID NO: 348376 - DNA, 20 bp, Artificial Sequence
  Description of Artificial Sequence: Synthetic oligonucleotide
  Target: LAMA2; (+) strand; PAM type: YTN; PAM sequence: TTT
cctttacaaataaaatatta

SEQ ID NO: 348377 - DNA, 20 bp, Artificial Sequence
  Description of Artificial Sequence: Synthetic oligonucleotide
  Target: LAMA2; (+) strand; PAM type: YTN; PAM sequence: TTC
ctttacaaataaaatattag

SEQ ID NO: 348378 - DNA, 20 bp, Artificial Sequence
  Description of Artificial Sequence: Synthetic oligonucleotide
  Target: LAMA2; (+) strand; PAM type: YTN; PAM sequence: CTT
tacaaataaaatattagggg

SEQ ID NO: 348379 - DNA, 20 bp, Artificial Sequence
  Description of Artificial Sequence: Synthetic oligonucleotide
  Target: LAMA2; (+) strand; PAM type: YTN; PAM sequence: TTT
acaaataaaatattagggga

SEQ ID NO: 348380 - DNA, 20 bp, Artificial Sequence
  Description of Artificial Sequence: Synthetic oligonucleotide
  Target: LAMA2; (+) strand; PAM type: YTN; PAM sequence: TTA
caaataaaatattaggggaa

SEQ ID NO: 348381 - DNA, 20 bp, Artificial Sequence
  Description of Artificial Sequence: Synthetic oligonucleotide
  Target: LAMA2; (+) strand; PAM type: YTN; PAM sequence: TTA
ggggaaaaagtttaaagcat

SEQ ID NO: 348382 - DNA, 20 bp, Artificial Sequence
  Description of Artificial Sequence: Synthetic oligonucleotide
  Target: LAMA2; (+) strand; PAM type: YTN; PAM sequence: TTT
aaagcatcttttcaaaagct

SEQ ID NO: 348383 - DNA, 20 bp, Artificial Sequence
  Description of Artificial Sequence: Synthetic oligonucleotide
  Target: LAMA2; (+) strand; PAM type: YTN; PAM sequence: TTA
aagcatcttttcaaaagctt

SEQ ID NO: 348384 - DNA, 20 bp, Artificial Sequence
  Description of Artificial Sequence: Synthetic oligonucleotide
  Target: LAMA2; (+) strand; PAM type: YTN; PAM sequence: CTT
ttcaaaagctttttgaacac

SEQ ID NO: 348385 - DNA, 20 bp, Artificial Sequence
  Description of Artificial Sequence: Synthetic oligonucleotide
  Target: LAMA2; (+) strand; PAM type: YTN; PAM sequence: TTT
tcaaaagctttttgaacaca

SEQ ID NO: 348386 - DNA, 20 bp, Artificial Sequence
  Description of Artificial Sequence: Synthetic oligonucleotide
  Target: LAMA2; (+) strand; PAM type: YTN; PAM sequence: TTT
caaaagctttttgaacacaa

SEQ ID NO: 348387 - DNA, 20 bp, Artificial Sequence
  Description of Artificial Sequence: Synthetic oligonucleotide
  Target: LAMA2; (+) strand; PAM type: YTN; PAM sequence: TTC
aaaagctttttgaacacaag

SEQ ID NO: 348388 - DNA, 20 bp, Artificial Sequence
  Description of Artificial Sequence: Synthetic oligonucleotide
  Target: LAMA2; (+) strand; PAM type: YTN; PAM sequence: CTT
tttgaacacaagagctaaca

SEQ ID NO: 348389 - DNA, 20 bp, Artificial Sequence
  Description of Artificial Sequence: Synthetic oligonucleotide
  Target: LAMA2; (+) strand; PAM type: YTN; PAM sequence: TTT
ttgaacacaagagctaacag

SEQ ID NO: 348390 - DNA, 20 bp, Artificial Sequence
  Description of Artificial Sequence: Synthetic oligonucleotide
  Target: LAMA2; (+) strand; PAM type: YTN; PAM sequence: TTT
tgaacacaagagctaacaga

SEQ ID NO: 348391 - DNA, 20 bp, Artificial Sequence
  Description of Artificial Sequence: Synthetic oligonucleotide
  Target: LAMA2; (+) strand; PAM type: YTN; PAM sequence: TTT
gaacacaagagctaacagaa

SEQ ID NO: 348392 - DNA, 20 bp, Artificial Sequence
  Description of Artificial Sequence: Synthetic oligonucleotide
  Target: LAMA2; (+) strand; PAM type: YTN; PAM sequence: TTG
aacacaagagctaacagaag

SEQ ID NO: 348393 - DNA, 20 bp, Artificial Sequence
  Description of Artificial Sequence: Synthetic oligonucleotide
  Target: LAMA2; (+) strand; PAM type: YTN; PAM sequence: CTA
acagaagtgctgtcttccag

SEQ ID NO: 348394 - DNA, 20 bp, Artificial Sequence
  Description of Artificial Sequence: Synthetic oligonucleotide
  Target: LAMA2; (+) strand; PAM type: YTN; PAM sequence: CTG
tcttccagtgttaaacagga

SEQ ID NO: 348395 - DNA, 20 bp, Artificial Sequence
  Description of Artificial Sequence: Synthetic oligonucleotide
  Target: LAMA2; (+) strand; PAM type: YTN; PAM sequence: CTT
ccagtgttaaacaggaattt

SEQ ID NO: 348396 - DNA, 20 bp, Artificial Sequence
  Description of Artificial Sequence: Synthetic oligonucleotide
  Target: LAMA2; (+) strand; PAM type: YTN; PAM sequence: TTC
cagtgttaaacaggaatttg

SEQ ID NO: 348397 - DNA, 20 bp, Artificial Sequence
  Description of Artificial Sequence: Synthetic oligonucleotide
  Target: LAMA2; (+) strand; PAM type: YTN; PAM sequence: TTA
aacaggaatttgtgggatta

SEQ ID NO: 348398 - DNA, 20 bp, Artificial Sequence
  Description of Artificial Sequence: Synthetic oligonucleotide
  Target: LAMA2; (+) strand; PAM type: YTN; PAM sequence: TTT
gtgggattacaagatagatg

SEQ ID NO: 348399 - DNA, 20 bp, Artificial Sequence
  Description of Artificial Sequence: Synthetic oligonucleotide
  Target: LAMA2; (+) strand; PAM type: YTN; PAM sequence: TTG
tgggattacaagatagatga

SEQ ID NO: 348400 - DNA, 20 bp, Artificial Sequence
  Description of Artificial Sequence: Synthetic oligonucleotide
  Target: LAMA2; (+) strand; PAM type: YTN; PAM sequence: TTA
caagatagatgatcaaccca

SEQ ID NO: 348401 - DNA, 20 bp, Artificial Sequence
  Description of Artificial Sequence: Synthetic oligonucleotide
  Target: LAMA2; (+) strand; PAM type: YTN; PAM sequence: TTG
ctatgagtgataaccgtgct

SEQ ID NO: 348402 - DNA, 20 bp, Artificial Sequence
  Description of Artificial Sequence: Synthetic oligonucleotide
  Target: LAMA2; (+) strand; PAM type: YTN; PAM sequence: CTA
tgagtgataaccgtgcttcc

SEQ ID NO: 348403 - DNA, 20 bp, Artificial Sequence
  Description of Artificial Sequence: Synthetic oligonucleotide
  Target: LAMA2; (+) strand; PAM type: YTN; PAM sequence: CTT
cctcctgtctaccttctacc

SEQ ID NO: 348404 - DNA, 20 bp, Artificial Sequence
  Description of Artificial Sequence: Synthetic oligonucleotide
  Target: LAMA2; (+) strand; PAM type: YTN; PAM sequence: TTC
ctcctgtctaccttctacca

SEQ ID NO: 348405 - DNA, 20 bp, Artificial Sequence
  Description of Artificial Sequence: Synthetic oligonucleotide
  Target: LAMA2; (+) strand; PAM type: YTN; PAM sequence: CTC
ctgtctaccttctaccatat

SEQ ID NO: 348406 - DNA, 20 bp, Artificial Sequence
  Description of Artificial Sequence: Synthetic oligonucleotide
  Target: LAMA2; (+) strand; PAM type: YTN; PAM sequence: CTG
tctaccttctaccatattca

SEQ ID NO: 348407 - DNA, 20 bp, Artificial Sequence
  Description of Artificial Sequence: Synthetic oligonucleotide
  Target: LAMA2; (+) strand; PAM type: YTN; PAM sequence: CTA
ccttctaccatattcactgg

SEQ ID NO: 348408 - DNA, 20 bp, Artificial Sequence
  Description of Artificial Sequence: Synthetic oligonucleotide
  Target: LAMA2; (+) strand; PAM type: YTN; PAM sequence: CTT
ctaccatattcactggttta

SEQ ID NO: 348409 - DNA, 20 bp, Artificial Sequence
  Description of Artificial Sequence: Synthetic oligonucleotide
  Target: LAMA2; (+) strand; PAM type: YTN; PAM sequence: TTC
taccatattcactggtttat

SEQ ID NO: 348410 - DNA, 20 bp, Artificial Sequence
  Description of Artificial Sequence: Synthetic oligonucleotide
  Target: LAMA2; (+) strand; PAM type: YTN; PAM sequence: CTA
ccatattcactggtttatgg

SEQ ID NO: 348411 - DNA, 20 bp, Artificial Sequence
  Description of Artificial Sequence: Synthetic oligonucleotide
  Target: LAMA2; (+) strand; PAM type: YTN; PAM sequence: TTC
actggtttatggcacctccc

SEQ ID NO: 348412 - DNA, 20 bp, Artificial Sequence
  Description of Artificial Sequence: Synthetic oligonucleotide
  Target: LAMA2; (+) strand; PAM type: YTN; PAM sequence: CTG
gtttatggcacctcccacat

SEQ ID NO: 348413 - DNA, 20 bp, Artificial Sequence
  Description of Artificial Sequence: Synthetic oligonucleotide
  Target: LAMA2; (+) strand; PAM type: YTN; PAM sequence: TTT
atggcacctcccacatatgc

SEQ ID NO: 348414 - DNA, 20 bp, Artificial Sequence
  Description of Artificial Sequence: Synthetic oligonucleotide
  Target: LAMA2; (+) strand; PAM type: YTN; PAM sequence: TTA
tggcacctcccacatatgct

SEQ ID NO: 348415 - DNA, 20 bp, Artificial Sequence
  Description of Artificial Sequence: Synthetic oligonucleotide
  Target: LAMA2; (+) strand; PAM type: YTN; PAM sequence: CTC
ccacatatgctgctacacaa

SEQ ID NO: 348416 - DNA, 20 bp, Artificial Sequence
  Description of Artificial Sequence: Synthetic oligonucleotide
  Target: LAMA2; (+) strand; PAM type: YTN; PAM sequence: CTG
ctacacaaccaaggcattat

SEQ ID NO: 348417 - DNA, 20 bp, Artificial Sequence
  Description of Artificial Sequence: Synthetic oligonucleotide
  Target: LAMA2; (+) strand; PAM type: YTN; PAM sequence: CTA
cacaaccaaggcattattac

SEQ ID NO: 348418 - DNA, 20 bp, Artificial Sequence
  Description of Artificial Sequence: Synthetic oligonucleotide
  Target: LAMA2; (+) strand; PAM type: YTN; PAM sequence: TTA
ttaccagggaagtcaattca

SEQ ID NO: 348419 - DNA, 20 bp, Artificial Sequence
  Description of Artificial Sequence: Synthetic oligonucleotide
  Target: LAMA2; (+) strand; PAM type: YTN; PAM sequence: TTA
ccagggaagtcaattcagcc

SEQ ID NO: 348420 - DNA, 20 bp, Artificial Sequence
  Description of Artificial Sequence: Synthetic oligonucleotide
  Target: LAMA2; (+) strand; PAM type: YTN; PAM sequence: TTC
agccataactctataaagta

SEQ ID NO: 348421 - DNA, 20 bp, Artificial Sequence
  Description of Artificial Sequence: Synthetic oligonucleotide
  Target: LAMA2; (+) strand; PAM type: YTN; PAM sequence: CTC
tataaagtaaactcctgtga

SEQ ID NO: 348422 - DNA, 20 bp, Artificial Sequence
  Description of Artificial Sequence: Synthetic oligonucleotide
  Target: LAMA2; (+) strand; PAM type: YTN; PAM sequence: CTA
taaagtaaactcctgtgaat

SEQ ID NO: 348423 - DNA, 20 bp, Artificial Sequence
  Description of Artificial Sequence: Synthetic oligonucleotide
  Target: LAMA2; (+) strand; PAM type: YTN; PAM sequence: CTC
ctgtgaatagagtatctact

SEQ ID NO: 348424 - DNA, 20 bp, Artificial Sequence
  Description of Artificial Sequence: Synthetic oligonucleotide
  Target: LAMA2; (+) strand; PAM type: YTN; PAM sequence: CTG
tgaatagagtatctactgta

SEQ ID NO: 348425 - DNA, 20 bp, Artificial Sequence
  Description of Artificial Sequence: Synthetic oligonucleotide
  Target: LAMA2; (+) strand; PAM type: YTN; PAM sequence: CTA
ctgtatgactagaggtatag

SEQ ID NO: 348426 - DNA, 20 bp, Artificial Sequence
  Description of Artificial Sequence: Synthetic oligonucleotide
  Target: LAMA2; (+) strand; PAM type: YTN; PAM sequence: CTG
tatgactagaggtatagcta

SEQ ID NO: 348427 - DNA, 20 bp, Artificial Sequence
  Description of Artificial Sequence: Synthetic oligonucleotide
  Target: LAMA2; (+) strand; PAM type: YTN; PAM sequence: CTA
gaggtatagctaagaaaaaa

SEQ ID NO: 348428 - DNA, 20 bp, Artificial Sequence
  Description of Artificial Sequence: Synthetic oligonucleotide
  Target: LAMA2; (+) strand; PAM type: YTN; PAM sequence: CTA
agaaaaaagactatagggag

SEQ ID NO: 348429 - DNA, 20 bp, Artificial Sequence
  Description of Artificial Sequence: Synthetic oligonucleotide
  Target: LAMA2; (+) strand; PAM type: YTN; PAM sequence: CTA
tagggagaaattaatattgt

SEQ ID NO: 348430 - DNA, 20 bp, Artificial Sequence
  Description of Artificial Sequence: Synthetic oligonucleotide
  Target: LAMA2; (+) strand; PAM type: YTN; PAM sequence: TTA
atattgtaggacaaagcatt

SEQ ID NO: 348431 - DNA, 20 bp, Artificial Sequence
  Description of Artificial Sequence: Synthetic oligonucleotide
  Target: LAMA2; (+) strand; PAM type: YTN; PAM sequence: TTG
taggacaaagcatttaattc

SEQ ID NO: 348432 - DNA, 20 bp, Artificial Sequence
  Description of Artificial Sequence: Synthetic oligonucleotide
  Target: LAMA2; (+) strand; PAM type: YTN; PAM sequence: TTT
aattctagaatgatcccact

SEQ ID NO: 348433 - DNA, 20 bp, Artificial Sequence
  Description of Artificial Sequence: Synthetic oligonucleotide
  Target: LAMA2; (+) strand; PAM type: YTN; PAM sequence: TTA
attctagaatgatcccacta

SEQ ID NO: 348434 - DNA, 20 bp, Artificial Sequence
  Description of Artificial Sequence: Synthetic oligonucleotide
  Target: LAMA2; (+) strand; PAM type: YTN; PAM sequence: TTC
tagaatgatcccactaaggt

SEQ ID NO: 348435 - DNA, 20 bp, Artificial Sequence
  Description of Artificial Sequence: Synthetic oligonucleotide
  Target: LAMA2; (+) strand; PAM type: YTN; PAM sequence: CTA
gaatgatcccactaaggtaa

SEQ ID NO: 348436 - DNA, 20 bp, Artificial Sequence
  Description of Artificial Sequence: Synthetic oligonucleotide
  Target: LAMA2; (+) strand; PAM type: YTN; PAM sequence: CTA
aggtaagaccaccgtcatcg

SEQ ID NO: 348437 - DNA, 20 bp, Artificial Sequence
  Description of Artificial Sequence: Synthetic oligonucleotide
  Target: LAMA2; (+) strand; PAM type: YTN; PAM sequence: TTG
caaaattgctgaatcactag

SEQ ID NO: 348438 - DNA, 20 bp, Artificial Sequence
  Description of Artificial Sequence: Synthetic oligonucleotide
  Target: LAMA2; (+) strand; PAM type: YTN; PAM sequence: TTG
ctgaatcactagggttaata

SEQ ID NO: 348439 - DNA, 20 bp, Artificial Sequence
  Description of Artificial Sequence: Synthetic oligonucleotide
  Target: LAMA2; (+) strand; PAM type: YTN; PAM sequence: CTG
aatcactagggttaatagtt

SEQ ID NO: 348440 - DNA, 20 bp, Artificial Sequence
  Description of Artificial Sequence: Synthetic oligonucleotide
  Target: LAMA2; (+) strand; PAM type: YTN; PAM sequence: CTA
gggttaatagttacagatcc

SEQ ID NO: 348441 - DNA, 20 bp, Artificial Sequence
  Description of Artificial Sequence: Synthetic oligonucleotide
  Target: LAMA2; (+) strand; PAM type: YTN; PAM sequence: TTA
atagttacagatcctaaata

SEQ ID NO: 348442 - DNA, 20 bp, Artificial Sequence
  Description of Artificial Sequence: Synthetic oligonucleotide
  Target: LAMA2; (+) strand; PAM type: YTN; PAM sequence: TTA
cagatcctaaatactcctca

SEQ ID NO: 348443 - DNA, 20 bp, Artificial Sequence
  Description of Artificial Sequence: Synthetic oligonucleotide
  Target: LAMA2; (+) strand; PAM type: YTN; PAM sequence: CTA
aatactcctcacatgttttc

SEQ ID NO: 348444 - DNA, 20 bp, Artificial Sequence
  Description of Artificial Sequence: Synthetic oligonucleotide
  Target: LAMA2; (+) strand; PAM type: YTN; PAM sequence: CTC
ctcacatgttttctttcctc

SEQ ID NO: 348445 - DNA, 20 bp, Artificial Sequence
  Description of Artificial Sequence: Synthetic oligonucleotide
  Target: LAMA2; (+) strand; PAM type: YTN; PAM sequence: CTC
acatgttttctttcctcgtt

SEQ ID NO: 348446 - DNA, 20 bp, Artificial Sequence
  Description of Artificial Sequence: Synthetic oligonucleotide
  Target: LAMA2; (+) strand; PAM type: YTN; PAM sequence: TTT
tctttcctcgttacttaact

SEQ ID NO: 348447 - DNA, 20 bp, Artificial Sequence
  Description of Artificial Sequence: Synthetic oligonucleotide
  Target: LAMA2; (+) strand; PAM type: YTN; PAM sequence: TTT
ctttcctcgttacttaactt

SEQ ID NO: 348448 - DNA, 20 bp, Artificial Sequence
  Description of Artificial Sequence: Synthetic oligonucleotide
  Target: LAMA2; (+) strand; PAM type: YTN; PAM sequence: TTC
tttcctcgttacttaacttc

SEQ ID NO: 348449 - DNA, 20 bp, Artificial Sequence
  Description of Artificial Sequence: Synthetic oligonucleotide
  Target: LAMA2; (+) strand; PAM type: YTN; PAM sequence: CTT
tcctcgttacttaacttccc

SEQ ID NO: 348450 - DNA, 20 bp, Artificial Sequence
  Description of Artificial Sequence: Synthetic oligonucleotide
  Target: LAMA2; (+) strand; PAM type: YTN; PAM sequence: TTT
cctcgttacttaacttccca

SEQ ID NO: 348451 - DNA, 20 bp, Artificial Sequence
  Description of Artificial Sequence: Synthetic oligonucleotide
  Target: LAMA2; (+) strand; PAM type: YTN; PAM sequence: TTC
ctcgttacttaacttcccac

SEQ ID NO: 348452 - DNA, 20 bp, Artificial Sequence
  Description of Artificial Sequence: Synthetic oligonucleotide
  Target: LAMA2; (+) strand; PAM type: YTN; PAM sequence: CTC
gttacttaacttcccacacc

SEQ ID NO: 348453 - DNA, 20 bp, Artificial Sequence
  Description of Artificial Sequence: Synthetic oligonucleotide
  Target: LAMA2; (+) strand; PAM type: YTN; PAM sequence: TTA
cttaacttcccacacccaac

SEQ ID NO: 348454 - DNA, 20 bp, Artificial Sequence
  Description of Artificial Sequence: Synthetic oligonucleotide
  Target: LAMA2; (+) strand; PAM type: YTN; PAM sequence: CTT
aacttcccacacccaacctc

SEQ ID NO: 348455 - DNA, 20 bp, Artificial Sequence
  Description of Artificial Sequence: Synthetic oligonucleotide
  Target: LAMA2; (+) strand; PAM type: YTN; PAM sequence: TTA
acttcccacacccaacctct

SEQ ID NO: 348456 - DNA, 20 bp, Artificial Sequence
  Description of Artificial Sequence: Synthetic oligonucleotide
  Target: LAMA2; (+) strand; PAM type: YTN; PAM sequence: CTT
cccacacccaacctctccat

SEQ ID NO: 348457 - DNA, 20 bp, Artificial Sequence
  Description of Artificial Sequence: Synthetic oligonucleotide
  Target: LAMA2; (+) strand; PAM type: YTN; PAM sequence: TTC
ccacacccaacctctccatc

SEQ ID NO: 348458 - DNA, 20 bp, Artificial Sequence
  Description of Artificial Sequence: Synthetic oligonucleotide
  Target: LAMA2; (+) strand; PAM type: YTN; PAM sequence: CTC
tccatcatcacaagataact

SEQ ID NO: 348459 - DNA, 20 bp, Artificial Sequence
  Description of Artificial Sequence: Synthetic oligonucleotide
  Target: LAMA2; (+) strand; PAM type: YTN; PAM sequence: CTC
catcatcacaagataacttt

SEQ ID NO: 348460 - DNA, 20 bp, Artificial Sequence
  Description of Artificial Sequence: Synthetic oligonucleotide
  Target: LAMA2; (+) strand; PAM type: YTN; PAM sequence: CTT
ttaaggctttagttagtccc

SEQ ID NO: 348461 - DNA, 20 bp, Artificial Sequence
  Description of Artificial Sequence: Synthetic oligonucleotide
  Target: LAMA2; (+) strand; PAM type: YTN; PAM sequence: TTT
taaggctttagttagtccca

SEQ ID NO: 348462 - DNA, 20 bp, Artificial Sequence
  Description of Artificial Sequence: Synthetic oligonucleotide
  Target: LAMA2; (+) strand; PAM type: YTN; PAM sequence: TTT
aaggctttagttagtcccat

SEQ ID NO: 348463 - DNA, 20 bp, Artificial Sequence
  Description of Artificial Sequence: Synthetic oligonucleotide
  Target: LAMA2; (+) strand; PAM type: YTN; PAM sequence: TTA
aggctttagttagtcccatg

SEQ ID NO: 348464 - DNA, 20 bp, Artificial Sequence
  Description of Artificial Sequence: Synthetic oligonucleotide
  Target: LAMA2; (+) strand; PAM type: YTN; PAM sequence: CTT
tagttagtcccatgcaacat

SEQ ID NO: 348465 - DNA, 20 bp, Artificial Sequence
  Description of Artificial Sequence: Synthetic oligonucleotide
  Target: LAMA2; (+) strand; PAM type: YTN; PAM sequence: TTT
agttagtcccatgcaacata

SEQ ID NO: 348466 - DNA, 20 bp, Artificial Sequence
  Description of Artificial Sequence: Synthetic oligonucleotide
  Target: LAMA2; (+) strand; PAM type: YTN; PAM sequence: TTA
gttagtcccatgcaacatat

SEQ ID NO: 348467 - DNA, 20 bp, Artificial Sequence
  Description of Artificial Sequence: Synthetic oligonucleotide
  Target: LAMA2; (+) strand; PAM type: YTN; PAM sequence: TTA
gtcccatgcaacatatgtca

SEQ ID NO: 348468 - DNA, 20 bp, Artificial Sequence
  Description of Artificial Sequence: Synthetic oligonucleotide
  Target: LAMA2; (+) strand; PAM type: YTN; PAM sequence: TTT
tagtgccctgtattttccaa

SEQ ID NO: 348469 - DNA, 20 bp, Artificial Sequence
  Description of Artificial Sequence: Synthetic oligonucleotide
  Target: LAMA2; (+) strand; PAM type: YTN; PAM sequence: TTT
agtgccctgtattttccaaa

SEQ ID NO: 348470 - DNA, 20 bp, Artificial Sequence
  Description of Artificial Sequence: Synthetic oligonucleotide
  Target: LAMA2; (+) strand; PAM type: YTN; PAM sequence: TTA
gtgccctgtattttccaaac

SEQ ID NO: 348471 - DNA, 20 bp, Artificial Sequence
  Description of Artificial Sequence: Synthetic oligonucleotide
  Target: LAMA2; (+) strand; PAM type: YTN; PAM sequence: CTG
tattttccaaacttgaaata

SEQ ID NO: 348472 - DNA, 20 bp, Artificial Sequence
  Description of Artificial Sequence: Synthetic oligonucleotide
  Target: LAMA2; (+) strand; PAM type: YTN; PAM sequence: TTT
tccaaacttgaaataatttc

SEQ ID NO: 348473 - DNA, 20 bp, Artificial Sequence
  Description of Artificial Sequence: Synthetic oligonucleotide
  Target: LAMA2; (+) strand; PAM type: YTN; PAM sequence: TTT
ccaaacttgaaataatttcc

SEQ ID NO: 348474 - DNA, 20 bp, Artificial Sequence
  Description of Artificial Sequence: Synthetic oligonucleotide
  Target: LAMA2; (+) strand; PAM type: YTN; PAM sequence: TTC
caaacttgaaataatttccc

SEQ ID NO: 348475 - DNA, 20 bp, Artificial Sequence
  Description of Artificial Sequence: Synthetic oligonucleotide
  Target: LAMA2; (+) strand; PAM type: YTN; PAM sequence: CTT
gaaataatttccccttgtat

SEQ ID NO: 348476 - DNA, 20 bp, Artificial Sequence
  Description of Artificial Sequence: Synthetic oligonucleotide
  Target: LAMA2; (+) strand; PAM type: YTN; PAM sequence: TTG
aaataatttccccttgtatt

SEQ ID NO: 348477 - DNA, 20 bp, Artificial Sequence
  Description of Artificial Sequence: Synthetic oligonucleotide
  Target: LAMA2; (+) strand; PAM type: YTN; PAM sequence: TTT
ccccttgtattatacctcaa

SEQ ID NO: 348478 - DNA, 20 bp, Artificial Sequence
  Description of Artificial Sequence: Synthetic oligonucleotide
  Target: LAMA2; (+) strand; PAM type: YTN; PAM sequence: TTC
cccttgtattatacctcaac

SEQ ID NO: 348479 - DNA, 20 bp, Artificial Sequence
  Description of Artificial Sequence: Synthetic oligonucleotide
  Target: LAMA2; (+) strand; PAM type: YTN; PAM sequence: CTT
gtattatacctcaacatatt

SEQ ID NO: 348480 - DNA, 20 bp, Artificial Sequence
  Description of Artificial Sequence: Synthetic oligonucleotide
  Target: LAMA2; (+) strand; PAM type: YTN; PAM sequence: TTG
tattatacctcaacatattg

SEQ ID NO: 348481 - DNA, 20 bp, Artificial Sequence
  Description of Artificial Sequence: Synthetic oligonucleotide
  Target: LAMA2; (+) strand; PAM type: YTN; PAM sequence: TTA
tacctcaacatattgtaaat

SEQ ID NO: 348482 - DNA, 20 bp, Artificial Sequence
  Description of Artificial Sequence: Synthetic oligonucleotide
  Target: LAMA2; (+) strand; PAM type: YTN; PAM sequence: CTC
aacatattgtaaattgtctc

SEQ ID NO: 348483 - DNA, 20 bp, Artificial Sequence
  Description of Artificial Sequence: Synthetic oligonucleotide
  Target: LAMA2; (+) strand; PAM type: YTN; PAM sequence: TTG
taaattgtctcatgcaaaac

SEQ ID NO: 348484 - DNA, 20 bp, Artificial Sequence
  Description of Artificial Sequence: Synthetic oligonucleotide
  Target: LAMA2; (+) strand; PAM type: YTN; PAM sequence: TTG
tctcatgcaaaactaatcat

SEQ ID NO: 348485 - DNA, 20 bp, Artificial Sequence
  Description of Artificial Sequence: Synthetic oligonucleotide
  Target: LAMA2; (+) strand; PAM type: YTN; PAM sequence: CTC
atgcaaaactaatcattatt

SEQ ID NO: 348486 - DNA, 20 bp, Artificial Sequence
  Description of Artificial Sequence: Synthetic oligonucleotide
  Target: LAMA2; (+) strand; PAM type: YTN; PAM sequence: CTA
atcattattttatagcaatg

SEQ ID NO: 348487 - DNA, 20 bp, Artificial Sequence
  Description of Artificial Sequence: Synthetic oligonucleotide
  Target: LAMA2; (+) strand; PAM type: YTN; PAM sequence: TTA
ttttatagcaatgtttggat

SEQ ID NO: 348488 - DNA, 20 bp, Artificial Sequence
  Description of Artificial Sequence: Synthetic oligonucleotide
  Target: LAMA2; (+) strand; PAM type: YTN; PAM sequence: TTT
tatagcaatgtttggatttt

SEQ ID NO: 348489 - DNA, 20 bp, Artificial Sequence
  Description of Artificial Sequence: Synthetic oligonucleotide
  Target: LAMA2; (+) strand; PAM type: YTN; PAM sequence: TTT
atagcaatgtttggattttt

SEQ ID NO: 348490 - DNA, 20 bp, Artificial Sequence
  Description of Artificial Sequence: Synthetic oligonucleotide
  Target: LAMA2; (+) strand; PAM type: YTN; PAM sequence: TTA
tagcaatgtttggatttttc

SEQ ID NO: 348491 - DNA, 20 bp, Artificial Sequence
  Description of Artificial Sequence: Synthetic oligonucleotide
  Target: LAMA2; (+) strand; PAM type: YTN; PAM sequence: TTT
ggatttttcacttgtttaag

SEQ ID NO: 348492 - DNA, 20 bp, Artificial Sequence
  Description of Artificial Sequence: Synthetic oligonucleotide
  Target: LAMA2; (+) strand; PAM type: YTN; PAM sequence: TTG
gatttttcacttgtttaaga

SEQ ID NO: 348493 - DNA, 20 bp, Artificial Sequence
  Description of Artificial Sequence: Synthetic oligonucleotide
  Target: LAMA2; (+) strand; PAM type: YTN; PAM sequence: TTT
ttcacttgtttaagaaaaca

SEQ ID NO: 348494 - DNA, 20 bp, Artificial Sequence
  Description of Artificial Sequence: Synthetic oligonucleotide
  Target: LAMA2; (+) strand; PAM type: YTN; PAM sequence: TTT
tcacttgtttaagaaaacat

SEQ ID NO: 348495 - DNA, 20 bp, Artificial Sequence
  Description of Artificial Sequence: Synthetic oligonucleotide
  Target: LAMA2; (+) strand; PAM type: YTN; PAM sequence: TTT
cacttgtttaagaaaacatt

SEQ ID NO: 348496 - DNA, 20 bp, Artificial Sequence
  Description of Artificial Sequence: Synthetic oligonucleotide
  Target: LAMA2; (+) strand; PAM type: YTN; PAM sequence: TTC
acttgtttaagaaaacattt

SEQ ID NO: 348497 - DNA, 20 bp, Artificial Sequence
  Description of Artificial Sequence: Synthetic oligonucleotide
  Target: LAMA2; (+) strand; PAM type: YTN; PAM sequence: CTT
gtttaagaaaacattttcaa

SEQ ID NO: 348498 - DNA, 20 bp, Artificial Sequence
  Description of Artificial Sequence: Synthetic oligonucleotide
  Target: LAMA2; (+) strand; PAM type: YTN; PAM sequence: TTG
tttaagaaaacattttcaat

SEQ ID NO: 348499 - DNA, 20 bp, Artificial Sequence
  Description of Artificial Sequence: Synthetic oligonucleotide
  Target: LAMA2; (+) strand; PAM type: YTN; PAM sequence: TTT
aagaaaacattttcaattct

SEQ ID NO: 348500 - DNA, 20 bp, Artificial Sequence
  Description of Artificial Sequence: Synthetic oligonucleotide
  Target: LAMA2; (+) strand; PAM type: YTN; PAM sequence: TTA
agaaaacattttcaattcta

SEQ ID NO: 348501 - DNA, 20 bp, Artificial Sequence
  Description of Artificial Sequence: Synthetic oligonucleotide
  Target: LAMA2; (+) strand; PAM type: YTN; PAM sequence: TTT
tcaattctaattttggcggg

SEQ ID NO: 348502 - DNA, 20 bp, Artificial Sequence
  Description of Artificial Sequence: Synthetic oligonucleotide
  Target: LAMA2; (+) strand; PAM type: YTN; PAM sequence: TTT
caattctaattttggcggga

SEQ ID NO: 348503 - DNA, 20 bp, Artificial Sequence
  Description of Artificial Sequence: Synthetic oligonucleotide
  Target: LAMA2; (+) strand; PAM type: YTN; PAM sequence: TTC
aattctaattttggcgggac

SEQ ID NO: 348504 - DNA, 20 bp, Artificial Sequence
  Description of Artificial Sequence: Synthetic oligonucleotide
  Target: LAMA2; (+) strand; PAM type: YTN; PAM sequence: TTC
taattttggcgggacttaaa

SEQ ID NO: 348505 - DNA, 20 bp, Artificial Sequence
  Description of Artificial Sequence: Synthetic oligonucleotide
  Target: LAMA2; (+) strand; PAM type: YTN; PAM sequence: CTA
attttggcgggacttaaaaa

SEQ ID NO: 348506 - DNA, 20 bp, Artificial Sequence
  Description of Artificial Sequence: Synthetic oligonucleotide
  Target: LAMA2; (+) strand; PAM type: YTN; PAM sequence: TTT
tggcgggacttaaaaatata

SEQ ID NO: 348507 - DNA, 20 bp, Artificial Sequence
  Description of Artificial Sequence: Synthetic oligonucleotide
  Target: LAMA2; (+) strand; PAM type: YTN; PAM sequence: TTT
ggcgggacttaaaaatatac

SEQ ID NO: 348508 - DNA, 20 bp, Artificial Sequence
  Description of Artificial Sequence: Synthetic oligonucleotide
  Target: LAMA2; (+) strand; PAM type: YTN; PAM sequence: TTG
gcgggacttaaaaatataca

SEQ ID NO: 348509 - DNA, 20 bp, Artificial Sequence
  Description of Artificial Sequence: Synthetic oligonucleotide
  Target: LAMA2; (+) strand; PAM type: YTN; PAM sequence: CTT
aaaaatatacaccaaggaag

SEQ ID NO: 348510 - DNA, 20 bp, Artificial Sequence
  Description of Artificial Sequence: Synthetic oligonucleotide
  Target: LAMA2; (+) strand; PAM type: YTN; PAM sequence: TTA
aaaatatacaccaaggaaga

SEQ ID NO: 348511 - DNA, 20 bp, Artificial Sequence
  Description of Artificial Sequence: Synthetic oligonucleotide
  Target: LAMA2; (+) strand; PAM type: YTN; PAM sequence: CTG
gtgtgaaattggagtgaaat

SEQ ID NO: 348512 - DNA, 20 bp, Artificial Sequence
  Description of Artificial Sequence: Synthetic oligonucleotide
  Target: LAMA2; (+) strand; PAM type: YTN; PAM sequence: TTG
gagtgaaatttaatctttct

SEQ ID NO: 348513 - DNA, 20 bp, Artificial Sequence
  Description of Artificial Sequence: Synthetic oligonucleotide
  Target: LAMA2; (+) strand; PAM type: YTN; PAM sequence: TTT
aatctttcttgacagtatgt

SEQ ID NO: 348514 - DNA, 20 bp, Artificial Sequence
  Description of Artificial Sequence: Synthetic oligonucleotide
  Target: LAMA2; (+) strand; PAM type: YTN; PAM sequence: TTA
atctttcttgacagtatgtc

SEQ ID NO: 348515 - DNA, 20 bp, Artificial Sequence
  Description of Artificial Sequence: Synthetic oligonucleotide
  Target: LAMA2; (+) strand; PAM type: YTN; PAM sequence: CTT
tcttgacagtatgtctatca

SEQ ID NO: 348516 - DNA, 20 bp, Artificial Sequence
  Description of Artificial Sequence: Synthetic oligonucleotide
  Target: LAMA2; (+) strand; PAM type: YTN; PAM sequence: TTT
cttgacagtatgtctatcag

SEQ ID NO: 348517 - DNA, 20 bp, Artificial Sequence
  Description of Artificial Sequence: Synthetic oligonucleotide
  Target: LAMA2; (+) strand; PAM type: YTN; PAM sequence: TTC
ttgacagtatgtctatcaga

SEQ ID NO: 348518 - DNA, 20 bp, Artificial Sequence
  Description of Artificial Sequence: Synthetic oligonucleotide
  Target: LAMA2; (+) strand; PAM type: YTN; PAM sequence: CTT
gacagtatgtctatcagaga

SEQ ID NO: 348519 - DNA, 20 bp, Artificial Sequence
  Description of Artificial Sequence: Synthetic oligonucleotide
  Target: LAMA2; (+) strand; PAM type: YTN; PAM sequence: TTG
acagtatgtctatcagagaa

SEQ ID NO: 348520 - DNA, 20 bp, Artificial Sequence
  Description of Artificial Sequence: Synthetic oligonucleotide
  Target: LAMA2; (+) strand; PAM type: YTN; PAM sequence: CTA
tcagagaaaaaaaatcaatg

SEQ ID NO: 348521 - DNA, 20 bp, Artificial Sequence
  Description of Artificial Sequence: Synthetic oligonucleotide
  Target: LAMA2; (+) strand; PAM type: YTN; PAM sequence: TTA
gtgttctttctatcatctct

SEQ ID NO: 348522 - DNA, 20 bp, Artificial Sequence
  Description of Artificial Sequence: Synthetic oligonucleotide
  Target: LAMA2; (+) strand; PAM type: YTN; PAM sequence: TTC
tttctatcatctcttgcagg

SEQ ID NO: 348523 - DNA, 20 bp, Artificial Sequence
  Description of Artificial Sequence: Synthetic oligonucleotide
  Target: LAMA2; (+) strand; PAM type: YTN; PAM sequence: CTT
tctatcatctcttgcaggag

SEQ ID NO: 348524 - DNA, 20 bp, Artificial Sequence
  Description of Artificial Sequence: Synthetic oligonucleotide
  Target: LAMA2; (+) strand; PAM type: YTN; PAM sequence: TTT
ctatcatctcttgcaggagg

SEQ ID NO: 348525 - DNA, 20 bp, Artificial Sequence
  Description of Artificial Sequence: Synthetic oligonucleotide
  Target: LAMA2; (+) strand; PAM type: YTN; PAM sequence: TTC
tatcatctcttgcaggaggt

SEQ ID NO: 348526 - DNA, 20 bp, Artificial Sequence
  Description of Artificial Sequence: Synthetic oligonucleotide
  Target: LAMA2; (+) strand; PAM type: YTN; PAM sequence: CTA
tcatctcttgcaggaggtag

SEQ ID NO: 348527 - DNA, 20 bp, Artificial Sequence
  Description of Artificial Sequence: Synthetic oligonucleotide
  Target: LAMA2; (+) strand; PAM type: YTN; PAM sequence: CTC
ttgcaggaggtagagtgggg

SEQ ID NO: 348528 - DNA, 20 bp, Artificial Sequence
  Description of Artificial Sequence: Synthetic oligonucleotide
  Target: LAMA2; (+) strand; PAM type: YTN; PAM sequence: CTT
gcaggaggtagagtgggggt

SEQ ID NO: 348529 - DNA, 20 bp, Artificial Sequence
  Description of Artificial Sequence: Synthetic oligonucleotide
  Target: LAMA2; (+) strand; PAM type: YTN; PAM sequence: TTG
caggaggtagagtgggggtt

SEQ ID NO: 348530 - DNA, 20 bp, Artificial Sequence
  Description of Artificial Sequence: Synthetic oligonucleotide
  Target: LAMA2; (+) strand; PAM type: YTN; PAM sequence: TTG
gggtacacatctattattta

SEQ ID NO: 348531 - DNA, 20 bp, Artificial Sequence
  Description of Artificial Sequence: Synthetic oligonucleotide
  Target: LAMA2; (+) strand; PAM type: YTN; PAM sequence: CTA
ttatttataactttatcgta

SEQ ID NO: 348532 - DNA, 20 bp, Artificial Sequence
  Description of Artificial Sequence: Synthetic oligonucleotide
  Target: LAMA2; (+) strand; PAM type: YTN; PAM sequence: TTA
tttataactttatcgtacat

SEQ ID NO: 348533 - DNA, 20 bp, Artificial Sequence
  Description of Artificial Sequence: Synthetic oligonucleotide
  Target: LAMA2; (+) strand; PAM type: YTN; PAM sequence: TTT
ataactttatcgtacatgag

SEQ ID NO: 348534 - DNA, 20 bp, Artificial Sequence
  Description of Artificial Sequence: Synthetic oligonucleotide
  Target: LAMA2; (+) strand; PAM type: YTN; PAM sequence: TTA
taactttatcgtacatgagt

SEQ ID NO: 348535 - DNA, 20 bp, Artificial Sequence
  Description of Artificial Sequence: Synthetic oligonucleotide
  Target: LAMA2; (+) strand; PAM type: YTN; PAM sequence: CTT
tatcgtacatgagtctttaa

SEQ ID NO: 348536 - DNA, 20 bp, Artificial Sequence
  Description of Artificial Sequence: Synthetic oligonucleotide
  Target: LAMA2; (+) strand; PAM type: YTN; PAM sequence: TTT
atcgtacatgagtctttaaa

SEQ ID NO: 348537 - DNA, 20 bp, Artificial Sequence
  Description of Artificial Sequence: Synthetic oligonucleotide
  Target: LAMA2; (+) strand; PAM type: YTN; PAM sequence: TTA
tcgtacatgagtctttaaaa

SEQ ID NO: 348538 - DNA, 20 bp, Artificial Sequence
  Description of Artificial Sequence: Synthetic oligonucleotide
  Target: LAMA2; (+) strand; PAM type: YTN; PAM sequence: CTT
taaaataatgcagtataagt

SEQ ID NO: 348539 - DNA, 20 bp, Artificial Sequence
  Description of Artificial Sequence: Synthetic oligonucleotide
  Target: LAMA2; (+) strand; PAM type: YTN; PAM sequence: TTT
aaaataatgcagtataagtc

SEQ ID NO: 348540 - DNA, 20 bp, Artificial Sequence
  Description of Artificial Sequence: Synthetic oligonucleotide
  Target: LAMA2; (+) strand; PAM type: YTN; PAM sequence: TTA
aaataatgcagtataagtca

SEQ ID NO: 348541 - DNA, 20 bp, Artificial Sequence
  Description of Artificial Sequence: Synthetic oligonucleotide
  Target: LAMA2; (+) strand; PAM type: YTN; PAM sequence: TTT
tttgaaagtactcaagttca

SEQ ID NO: 348542 - DNA, 20 bp, Artificial Sequence
  Description of Artificial Sequence: Synthetic oligonucleotide
  Target: LAMA2; (+) strand; PAM type: YTN; PAM sequence: TTT
ttgaaagtactcaagttcaa

SEQ ID NO: 348543 - DNA, 20 bp, Artificial Sequence
  Description of Artificial Sequence: Synthetic oligonucleotide
  Target: LAMA2; (+) strand; PAM type: YTN; PAM sequence: TTT
tgaaagtactcaagttcaat

SEQ ID NO: 348544 - DNA, 20 bp, Artificial Sequence
  Description of Artificial Sequence: Synthetic oligonucleotide
  Target: LAMA2; (+) strand; PAM type: YTN; PAM sequence: TTT
gaaagtactcaagttcaata

SEQ ID NO: 348545 - DNA, 20 bp, Artificial Sequence
  Description of Artificial Sequence: Synthetic oligonucleotide
  Target: LAMA2; (+) strand; PAM type: YTN; PAM sequence: TTG
aaagtactcaagttcaataa

SEQ ID NO: 348546 - DNA, 20 bp, Artificial Sequence
  Description of Artificial Sequence: Synthetic oligonucleotide
  Target: LAMA2; (+) strand; PAM type: YTN; PAM sequence: CTC
aagttcaataaacactcatt

SEQ ID NO: 348547 - DNA, 20 bp, Artificial Sequence
  Description of Artificial Sequence: Synthetic oligonucleotide
  Target: LAMA2; (+) strand; PAM type: YTN; PAM sequence: TTC
aataaacactcatttaaata

SEQ ID NO: 348548 - DNA, 20 bp, Artificial Sequence
  Description of Artificial Sequence: Synthetic oligonucleotide
  Target: LAMA2; (+) strand; PAM type: YTN; PAM sequence: CTC
atttaaatatataaaaataa

SEQ ID NO: 348549 - DNA, 20 bp, Artificial Sequence
  Description of Artificial Sequence: Synthetic oligonucleotide
  Target: LAMA2; (+) strand; PAM type: YTN; PAM sequence: TTT
aaatatataaaaataagata

SEQ ID NO: 348550 - DNA, 20 bp, Artificial Sequence
  Description of Artificial Sequence: Synthetic oligonucleotide
  Target: LAMA2; (+) strand; PAM type: YTN; PAM sequence: TTA
aatatataaaaataagatag

SEQ ID NO: 348551 - DNA, 20 bp, Artificial Sequence
  Description of Artificial Sequence: Synthetic oligonucleotide
  Target: LAMA2; (+) strand; PAM type: YTN; PAM sequence: TTT
cagctcttcttcatgactca

SEQ ID NO: 348552 - DNA, 20 bp, Artificial Sequence
  Description of Artificial Sequence: Synthetic oligonucleotide
  Target: LAMA2; (+) strand; PAM type: YTN; PAM sequence: TTC
agctcttcttcatgactcaa

SEQ ID NO: 348553 - DNA, 20 bp, Artificial Sequence
  Description of Artificial Sequence: Synthetic oligonucleotide
  Target: LAMA2; (+) strand; PAM type: YTN; PAM sequence: CTC
ttcttcatgactcaaaagca

SEQ ID NO: 348554 - DNA, 20 bp, Artificial Sequence
  Description of Artificial Sequence: Synthetic oligonucleotide
  Target: LAMA2; (+) strand; PAM type: YTN; PAM sequence: CTT
cttcatgactcaaaagcaaa

SEQ ID NO: 348555 - DNA, 20 bp, Artificial Sequence
  Description of Artificial Sequence: Synthetic oligonucleotide
  Target: LAMA2; (+) strand; PAM type: YTN; PAM sequence: TTC
ttcatgactcaaaagcaaag

SEQ ID NO: 348556 - DNA, 20 bp, Artificial Sequence
  Description of Artificial Sequence: Synthetic oligonucleotide
  Target: LAMA2; (+) strand; PAM type: YTN; PAM sequence: CTT
catgactcaaaagcaaagca

SEQ ID NO: 348557 - DNA, 20 bp, Artificial Sequence
  Description of Artificial Sequence: Synthetic oligonucleotide
  Target: LAMA2; (+) strand; PAM type: YTN; PAM sequence: TTC
atgactcaaaagcaaagcat

SEQ ID NO: 348558 - DNA, 20 bp, Artificial Sequence
  Description of Artificial Sequence: Synthetic oligonucleotide
  Target: LAMA2; (+) strand; PAM type: YTN; PAM sequence: CTC
aaaagcaaagcattatacat

SEQ ID NO: 348559 - DNA, 20 bp, Artificial Sequence
  Description of Artificial Sequence: Synthetic oligonucleotide
  Target: LAMA2; (+) strand; PAM type: YTN; PAM sequence: TTA
tacatttatatttaaaatag

SEQ ID NO: 348560 - DNA, 20 bp, Artificial Sequence
  Description of Artificial Sequence: Synthetic oligonucleotide
  Target: LAMA2; (+) strand; PAM type: YTN; PAM sequence: TTT
atatttaaaatagatttccc

SEQ ID NO: 348561 - DNA, 20 bp, Artificial Sequence
  Description of Artificial Sequence: Synthetic oligonucleotide
  Target: LAMA2; (+) strand; PAM type: YTN; PAM sequence: TTA
tatttaaaatagatttccca

SEQ ID NO: 348562 - DNA, 20 bp, Artificial Sequence
  Description of Artificial Sequence: Synthetic oligonucleotide
  Target: LAMA2; (+) strand; PAM type: YTN; PAM sequence: TTT
aaaatagatttcccagtttt

SEQ ID NO: 348563 - DNA, 20 bp, Artificial Sequence
  Description of Artificial Sequence: Synthetic oligonucleotide
  Target: LAMA2; (+) strand; PAM type: YTN; PAM sequence: TTA
aaatagatttcccagtttta

SEQ ID NO: 348564 - DNA, 20 bp, Artificial Sequence
  Description of Artificial Sequence: Synthetic oligonucleotide
  Target: LAMA2; (+) strand; PAM type: YTN; PAM sequence: TTT
cccagttttaaaagcattta

SEQ ID NO: 348565 - DNA, 20 bp, Artificial Sequence
  Description of Artificial Sequence: Synthetic oligonucleotide
  Target: LAMA2; (+) strand; PAM type: YTN; PAM sequence: TTC
ccagttttaaaagcatttac

SEQ ID NO: 348566 - DNA, 20 bp, Artificial Sequence
  Description of Artificial Sequence: Synthetic oligonucleotide
  Target: LAMA2; (+) strand; PAM type: YTN; PAM sequence: TTT
taaaagcatttacaaatact

SEQ ID NO: 348567 - DNA, 20 bp, Artificial Sequence
  Description of Artificial Sequence: Synthetic oligonucleotide
  Target: LAMA2; (+) strand; PAM type: YTN; PAM sequence: TTT
aaaagcatttacaaatacta

SEQ ID NO: 348568 - DNA, 20 bp, Artificial Sequence
  Description of Artificial Sequence: Synthetic oligonucleotide
  Target: LAMA2; (+) strand; PAM type: YTN; PAM sequence: TTA
aaagcatttacaaatactac

SEQ ID NO: 348569 - DNA, 20 bp, Artificial Sequence
  Description of Artificial Sequence: Synthetic oligonucleotide
  Target: LAMA2; (+) strand; PAM type: YTN; PAM sequence: TTT
acaaatactactgtatcagc

SEQ ID NO: 348570 - DNA, 20 bp, Artificial Sequence
  Description of Artificial Sequence: Synthetic oligonucleotide
  Target: LAMA2; (+) strand; PAM type: YTN; PAM sequence: TTA
caaatactactgtatcagct

SEQ ID NO: 348571 - DNA, 20 bp, Artificial Sequence
  Description of Artificial Sequence: Synthetic oligonucleotide
  Target: LAMA2; (+) strand; PAM type: YTN; PAM sequence: CTA
ctgtatcagctttttaagca

SEQ ID NO: 348572 - DNA, 20 bp, Artificial Sequence
  Description of Artificial Sequence: Synthetic oligonucleotide
  Target: LAMA2; (+) strand; PAM type: YTN; PAM sequence: CTG
tatcagctttttaagcaaat

SEQ ID NO: 348573 - DNA, 20 bp, Artificial Sequence
  Description of Artificial Sequence: Synthetic oligonucleotide
  Target: LAMA2; (+) strand; PAM type: YTN; PAM sequence: CTT
tttaagcaaatatctctatt

SEQ ID NO: 348574 - DNA, 20 bp, Artificial Sequence
  Description of Artificial Sequence: Synthetic oligonucleotide
  Target: LAMA2; (+) strand; PAM type: YTN; PAM sequence: TTT
ttaagcaaatatctctattt

SEQ ID NO: 348575 - DNA, 20 bp, Artificial Sequence
  Description of Artificial Sequence: Synthetic oligonucleotide
  Target: LAMA2; (+) strand; PAM type: YTN; PAM sequence: TTT
taagcaaatatctctatttg

SEQ ID NO: 348576 - DNA, 20 bp, Artificial Sequence
  Description of Artificial Sequence: Synthetic oligonucleotide
  Target: LAMA2; (+) strand; PAM type: YTN; PAM sequence: TTT
aagcaaatatctctatttgt

SEQ ID NO: 348577 - DNA, 20 bp, Artificial Sequence
  Description of Artificial Sequence: Synthetic oligonucleotide
  Target: LAMA2; (+) strand; PAM type: YTN; PAM sequence: TTA
agcaaatatctctatttgtg

SEQ ID NO: 348578 - DNA, 20 bp, Artificial Sequence
  Description of Artificial Sequence: Synthetic oligonucleotide
  Target: LAMA2; (+) strand; PAM type: YTN; PAM sequence: CTC
tatttgtgtctatattatta

SEQ ID NO: 348579 - DNA, 20 bp, Artificial Sequence
  Description of Artificial Sequence: Synthetic oligonucleotide
  Target: LAMA2; (+) strand; PAM type: YTN; PAM sequence: CTA
tttgtgtctatattattaag

SEQ ID NO: 348580 - DNA, 20 bp, Artificial Sequence
  Description of Artificial Sequence: Synthetic oligonucleotide
  Target: LAMA2; (+) strand; PAM type: YTN; PAM sequence: TTT
gtgtctatattattaagtga

SEQ ID NO: 348581 - DNA, 20 bp, Artificial Sequence
  Description of Artificial Sequence: Synthetic oligonucleotide
  Target: LAMA2; (+) strand; PAM type: YTN; PAM sequence: TTG
tgtctatattattaagtgat

SEQ ID NO: 348582 - DNA, 20 bp, Artificial Sequence
  Description of Artificial Sequence: Synthetic oligonucleotide
  Target: LAMA2; (+) strand; PAM type: YTN; PAM sequence: CTA
tattattaagtgatgaggtt

SEQ ID NO: 348583 - DNA, 20 bp, Artificial Sequence
  Description of Artificial Sequence: Synthetic oligonucleotide
  Target: LAMA2; (+) strand; PAM type: YTN; PAM sequence: TTA
ttaagtgatgaggttaaatg

SEQ ID NO: 348584 - DNA, 20 bp, Artificial Sequence
  Description of Artificial Sequence: Synthetic oligonucleotide
  Target: LAMA2; (+) strand; PAM type: YTN; PAM sequence: TTA
agtgatgaggttaaatggaa

SEQ ID NO: 348585 - DNA, 20 bp, Artificial Sequence
  Description of Artificial Sequence: Synthetic oligonucleotide
  Target: LAMA2; (+) strand; PAM type: YTN; PAM sequence: TTA
aatggaaaaaatatttttat

SEQ ID NO: 348586 - DNA, 20 bp, Artificial Sequence
  Description of Artificial Sequence: Synthetic oligonucleotide
  Target: LAMA2; (+) strand; PAM type: YTN; PAM sequence: TTT
ttatactatccaaactccct

SEQ ID NO: 348587 - DNA, 20 bp, Artificial Sequence
  Description of Artificial Sequence: Synthetic oligonucleotide
  Target: LAMA2; (+) strand; PAM type: YTN; PAM sequence: TTT
tatactatccaaactcccta

SEQ ID NO: 348588 - DNA, 20 bp, Artificial Sequence
  Description of Artificial Sequence: Synthetic oligonucleotide
  Target: LAMA2; (+) strand; PAM type: YTN; PAM sequence: TTT
atactatccaaactccctag

SEQ ID NO: 348589 - DNA, 20 bp, Artificial Sequence
  Description of Artificial Sequence: Synthetic oligonucleotide
  Target: LAMA2; (+) strand; PAM type: YTN; PAM sequence: TTA
tactatccaaactccctagc

SEQ ID NO: 348590 - DNA, 20 bp, Artificial Sequence
  Description of Artificial Sequence: Synthetic oligonucleotide
  Target: LAMA2; (+) strand; PAM type: YTN; PAM sequence: CTA
tccaaactccctagccagtt

SEQ ID NO: 348591 - DNA, 20 bp, Artificial Sequence
  Description of Artificial Sequence: Synthetic oligonucleotide
  Target: LAMA2; (+) strand; PAM type: YTN; PAM sequence: CTC
cctagccagttccattagtt

SEQ ID NO: 348592 - DNA, 20 bp, Artificial Sequence
  Description of Artificial Sequence: Synthetic oligonucleotide
  Target: LAMA2; (+) strand; PAM type: YTN; PAM sequence: CTA
gccagttccattagttcaag

SEQ ID NO: 348593 - DNA, 20 bp, Artificial Sequence
  Description of Artificial Sequence: Synthetic oligonucleotide
  Target: LAMA2; (+) strand; PAM type: YTN; PAM sequence: TTC
cattagttcaaggtctaggt

SEQ ID NO: 348594 - DNA, 20 bp, Artificial Sequence
  Description of Artificial Sequence: Synthetic oligonucleotide
  Target: LAMA2; (+) strand; PAM type: YTN; PAM sequence: TTA
gttcaaggtctaggtatatc

SEQ ID NO: 348595 - DNA, 20 bp, Artificial Sequence
  Description of Artificial Sequence: Synthetic oligonucleotide
  Target: LAMA2; (+) strand; PAM type: YTN; PAM sequence: TTC
aaggtctaggtatatcaaat

SEQ ID NO: 348596 - DNA, 20 bp, Artificial Sequence
  Description of Artificial Sequence: Synthetic oligonucleotide
  Target: LAMA2; (+) strand; PAM type: YTN; PAM sequence: CTA
ggtatatcaaataagataac

SEQ ID NO: 348597 - DNA, 20 bp, Artificial Sequence
  Description of Artificial Sequence: Synthetic oligonucleotide
  Target: LAMA2; (+) strand; PAM type: YTN; PAM sequence: TTT
tcaaagacactatatgtatg

SEQ ID NO: 348598 - DNA, 20 bp, Artificial Sequence
  Description of Artificial Sequence: Synthetic oligonucleotide
  Target: LAMA2; (+) strand; PAM type: YTN; PAM sequence: TTT
caaagacactatatgtatgt

SEQ ID NO: 348599 - DNA, 20 bp, Artificial Sequence
  Description of Artificial Sequence: Synthetic oligonucleotide
  Target: LAMA2; (+) strand; PAM type: YTN; PAM sequence: TTC
aaagacactatatgtatgta

SEQ ID NO: 348600 - DNA, 20 bp, Artificial Sequence
  Description of Artificial Sequence: Synthetic oligonucleotide
  Target: LAMA2; (+) strand; PAM type: YTN; PAM sequence: CTA
tatgtatgtaacaaaaacaa

SEQ ID NO: 348601 - DNA, 20 bp, Artificial Sequence
  Description of Artificial Sequence: Synthetic oligonucleotide
  Target: LAMA2; (+) strand; PAM type: YTN; PAM sequence: TTG
gaaaaaggggattcttagtc

SEQ ID NO: 348602 - DNA, 20 bp, Artificial Sequence
  Description of Artificial Sequence: Synthetic oligonucleotide
  Target: LAMA2; (+) strand; PAM type: YTN; PAM sequence: TTC
ttagtcaaggaactcagata

SEQ ID NO: 348603 - DNA, 20 bp, Artificial Sequence
  Description of Artificial Sequence: Synthetic oligonucleotide
  Target: LAMA2; (+) strand; PAM type: YTN; PAM sequence: CTT
agtcaaggaactcagatatg

SEQ ID NO: 348604 - DNA, 20 bp, Artificial Sequence
  Description of Artificial Sequence: Synthetic oligonucleotide
  Target: LAMA2; (+) strand; PAM type: YTN; PAM sequence: TTA
gtcaaggaactcagatatgt

SEQ ID NO: 348605 - DNA, 20 bp, Artificial Sequence
  Description of Artificial Sequence: Synthetic oligonucleotide
  Target: LAMA2; (+) strand; PAM type: YTN; PAM sequence: CTC
agatatgtgtccacctacat

SEQ ID NO: 348606 - DNA, 20 bp, Artificial Sequence
  Description of Artificial Sequence: Synthetic oligonucleotide
  Target: LAMA2; (+) strand; PAM type: YTN; PAM sequence: CTA
catattctagctaaatctgt

SEQ ID NO: 348607 - DNA, 20 bp, Artificial Sequence
  Description of Artificial Sequence: Synthetic oligonucleotide
  Target: LAMA2; (+) strand; PAM type: YTN; PAM sequence: TTC
tagctaaatctgtttttttt

SEQ ID NO: 348608 - DNA, 20 bp, Artificial Sequence
  Description of Artificial Sequence: Synthetic oligonucleotide
  Target: LAMA2; (+) strand; PAM type: YTN; PAM sequence: CTA
gctaaatctgttttttttgt

SEQ ID NO: 348609 - DNA, 20 bp, Artificial Sequence
  Description of Artificial Sequence: Synthetic oligonucleotide
  Target: LAMA2; (+) strand; PAM type: YTN; PAM sequence: CTA
aatctgttttttttgtgtgt

SEQ ID NO: 348610 - DNA, 20 bp, Artificial Sequence
  Description of Artificial Sequence: Synthetic oligonucleotide
  Target: LAMA2; (+) strand; PAM type: YTN; PAM sequence: CTG
ttttttttgtgtgtgtgtat

SEQ ID NO: 348611 - DNA, 20 bp, Artificial Sequence
  Description of Artificial Sequence: Synthetic oligonucleotide
  Target: LAMA2; (+) strand; PAM type: YTN; PAM sequence: TTT
tttttgtgtgtgtgtataat

SEQ ID NO: 348612 - DNA, 20 bp, Artificial Sequence
  Description of Artificial Sequence: Synthetic oligonucleotide
  Target: LAMA2; (+) strand; PAM type: YTN; PAM sequence: TTT
ttttgtgtgtgtgtataatt

SEQ ID NO: 348613 - DNA, 20 bp, Artificial Sequence
  Description of Artificial Sequence: Synthetic oligonucleotide
  Target: LAMA2; (+) strand; PAM type: YTN; PAM sequence: TTT
tttgtgtgtgtgtataattg

SEQ ID NO: 348614 - DNA, 20 bp, Artificial Sequence
  Description of Artificial Sequence: Synthetic oligonucleotide
  Target: LAMA2; (+) strand; PAM type: YTN; PAM sequence: TTT
ttgtgtgtgtgtataattgg

SEQ ID NO: 348615 - DNA, 20 bp, Artificial Sequence
  Description of Artificial Sequence: Synthetic oligonucleotide
  Target: LAMA2; (+) strand; PAM type: YTN; PAM sequence: TTT
tgtgtgtgtgtataattgga

SEQ ID NO: 348616 - DNA, 20 bp, Artificial Sequence
  Description of Artificial Sequence: Synthetic oligonucleotide
  Target: LAMA2; (+) strand; PAM type: YTN; PAM sequence: TTT
gtgtgtgtgtataattggaa

SEQ ID NO: 348617 - DNA, 20 bp, Artificial Sequence
  Description of Artificial Sequence: Synthetic oligonucleotide
  Target: LAMA2; (+) strand; PAM type: YTN; PAM sequence: TTG
tgtgtgtgtataattggaat

SEQ ID NO: 348618 - DNA, 20 bp, Artificial Sequence
  Description of Artificial Sequence: Synthetic oligonucleotide
  Target: LAMA2; (+) strand; PAM type: YTN; PAM sequence: TTG
gaataatagaactatctaac

SEQ ID NO: 348619 - DNA, 20 bp, Artificial Sequence
  Description of Artificial Sequence: Synthetic oligonucleotide
  Target: LAMA2; (+) strand; PAM type: YTN; PAM sequence: CTA
tctaacgctaagatgattat

SEQ ID NO: 348620 - DNA, 20 bp, Artificial Sequence
  Description of Artificial Sequence: Synthetic oligonucleotide
  Target: LAMA2; (+) strand; PAM type: YTN; PAM sequence: CTA
acgctaagatgattatttga

SEQ ID NO: 348621 - DNA, 20 bp, Artificial Sequence
  Description of Artificial Sequence: Synthetic oligonucleotide
  Target: LAMA2; (+) strand; PAM type: YTN; PAM sequence: CTA
agatgattatttgaatatga

SEQ ID NO: 348622 - DNA, 20 bp, Artificial Sequence
  Description of Artificial Sequence: Synthetic oligonucleotide
  Target: LAMA2; (+) strand; PAM type: YTN; PAM sequence: TTA
tttgaatatgataatgtaaa

SEQ ID NO: 348623 - DNA, 20 bp, Artificial Sequence
  Description of Artificial Sequence: Synthetic oligonucleotide
  Target: LAMA2; (+) strand; PAM type: YTN; PAM sequence: TTT
gaatatgataatgtaaagtg

SEQ ID NO: 348624 - DNA, 20 bp, Artificial Sequence
  Description of Artificial Sequence: Synthetic oligonucleotide
  Target: LAMA2; (+) strand; PAM type: YTN; PAM sequence: TTG
aatatgataatgtaaagtgc

SEQ ID NO: 348625 - DNA, 20 bp, Artificial Sequence
  Description of Artificial Sequence: Synthetic oligonucleotide
  Target: LAMA2; (+) strand; PAM type: YTN; PAM sequence: CTC
tgacaattataaaatgttat

SEQ ID NO: 348626 - DNA, 20 bp, Artificial Sequence
  Description of Artificial Sequence: Synthetic oligonucleotide
  Target: LAMA2; (+) strand; PAM type: YTN; PAM sequence: CTG
acaattataaaatgttatat

SEQ ID NO: 348627 - DNA, 20 bp, Artificial Sequence
  Description of Artificial Sequence: Synthetic oligonucleotide
  Target: LAMA2; (+) strand; PAM type: YTN; PAM sequence: TTA
taaaatgttatatacacatt

SEQ ID NO: 348628 - DNA, 20 bp, Artificial Sequence
  Description of Artificial Sequence: Synthetic oligonucleotide
  Target: LAMA2; (+) strand; PAM type: YTN; PAM sequence: TTA
tatacacattaattaaaatt

SEQ ID NO: 348629 - DNA, 20 bp, Artificial Sequence
  Description of Artificial Sequence: Synthetic oligonucleotide
  Target: LAMA2; (+) strand; PAM type: YTN; PAM sequence: TTA
attaaaattttaaaaatagt

SEQ ID NO: 348630 - DNA, 20 bp, Artificial Sequence
  Description of Artificial Sequence: Synthetic oligonucleotide
  Target: LAMA2; (+) strand; PAM type: YTN; PAM sequence: TTA
aaattttaaaaatagtctag

SEQ ID NO: 348631 - DNA, 20 bp, Artificial Sequence
  Description of Artificial Sequence: Synthetic oligonucleotide
  Target: LAMA2; (+) strand; PAM type: YTN; PAM sequence: TTT
taaaaatagtctagcctcca

SEQ ID NO: 348632 - DNA, 20 bp, Artificial Sequence
  Description of Artificial Sequence: Synthetic oligonucleotide
  Target: LAMA2; (+) strand; PAM type: YTN; PAM sequence: TTT
aaaaatagtctagcctccat

SEQ ID NO: 348633 - DNA, 20 bp, Artificial Sequence
  Description of Artificial Sequence: Synthetic oligonucleotide
  Target: LAMA2; (+) strand; PAM type: YTN; PAM sequence: TTA
aaaatagtctagcctccata

SEQ ID NO: 348634 - DNA, 20 bp, Artificial Sequence
  Description of Artificial Sequence: Synthetic oligonucleotide
  Target: LAMA2; (+) strand; PAM type: YTN; PAM sequence: CTA
gcctccataattatccttaa

SEQ ID NO: 348635 - DNA, 20 bp, Artificial Sequence
  Description of Artificial Sequence: Synthetic oligonucleotide
  Target: LAMA2; (+) strand; PAM type: YTN; PAM sequence: CTC
cataattatccttaaaaaat

SEQ ID NO: 348636 - DNA, 20 bp, Artificial Sequence
  Description of Artificial Sequence: Synthetic oligonucleotide
  Target: LAMA2; (+) strand; PAM type: YTN; PAM sequence: TTA
tccttaaaaaatagctgggt

SEQ ID NO: 348637 - DNA, 20 bp, Artificial Sequence
  Description of Artificial Sequence: Synthetic oligonucleotide
  Target: LAMA2; (+) strand; PAM type: YTN; PAM sequence: CTT
aaaaaatagctgggtagatt

SEQ ID NO: 348638 - DNA, 20 bp, Artificial Sequence
  Description of Artificial Sequence: Synthetic oligonucleotide
  Target: LAMA2; (+) strand; PAM type: YTN; PAM sequence: TTA
aaaaatagctgggtagatta

SEQ ID NO: 348639 - DNA, 20 bp, Artificial Sequence
  Description of Artificial Sequence: Synthetic oligonucleotide
  Target: LAMA2; (+) strand; PAM type: YTN; PAM sequence: CTG
ggtagattaaaataattagt

SEQ ID NO: 348640 - DNA, 20 bp, Artificial Sequence
  Description of Artificial Sequence: Synthetic oligonucleotide
  Target: LAMA2; (+) strand; PAM type: YTN; PAM sequence: TTA
aaataattagtaacatagct

SEQ ID NO: 348641 - DNA, 20 bp, Artificial Sequence
  Description of Artificial Sequence: Synthetic oligonucleotide
  Target: LAMA2; (+) strand; PAM type: YTN; PAM sequence: TTA
gtaacatagctctatgttaa

SEQ ID NO: 348642 - DNA, 20 bp, Artificial Sequence
  Description of Artificial Sequence: Synthetic oligonucleotide
  Target: LAMA2; (+) strand; PAM type: YTN; PAM sequence: CTC
tatgttaacttcatatacaa

SEQ ID NO: 348643 - DNA, 20 bp, Artificial Sequence
  Description of Artificial Sequence: Synthetic oligonucleotide
  Target: LAMA2; (+) strand; PAM type: YTN; PAM sequence: CTA
tgttaacttcatatacaaag

SEQ ID NO: 348644 - DNA, 20 bp, Artificial Sequence
  Description of Artificial Sequence: Synthetic oligonucleotide
  Target: LAMA2; (+) strand; PAM type: YTN; PAM sequence: TTA
acttcatatacaaaggtaat

SEQ ID NO: 348645 - DNA, 20 bp, Artificial Sequence
  Description of Artificial Sequence: Synthetic oligonucleotide
  Target: LAMA2; (+) strand; PAM type: YTN; PAM sequence: CTT
catatacaaaggtaattgta

SEQ ID NO: 348646 - DNA, 20 bp, Artificial Sequence
  Description of Artificial Sequence: Synthetic oligonucleotide
  Target: LAMA2; (+) strand; PAM type: YTN; PAM sequence: TTC
atatacaaaggtaattgtat

SEQ ID NO: 348647 - DNA, 20 bp, Artificial Sequence
  Description of Artificial Sequence: Synthetic oligonucleotide
  Target: LAMA2; (+) strand; PAM type: YTN; PAM sequence: TTG
tatggactatattacatagt

SEQ ID NO: 348648 - DNA, 20 bp, Artificial Sequence
  Description of Artificial Sequence: Synthetic oligonucleotide
  Target: LAMA2; (+) strand; PAM type: YTN; PAM sequence: CTA
tattacatagtaatataaaa

SEQ ID NO: 348649 - DNA, 20 bp, Artificial Sequence
  Description of Artificial Sequence: Synthetic oligonucleotide
  Target: LAMA2; (+) strand; PAM type: YTN; PAM sequence: TTA
catagtaatataaaaatgca

SEQ ID NO: 348650 - DNA, 20 bp, Artificial Sequence
  Description of Artificial Sequence: Synthetic oligonucleotide
  Target: LAMA2; (+) strand; PAM type: YTN; PAM sequence: TTC
tgcacaataaacttacagtt

SEQ ID NO: 348651 - DNA, 20 bp, Artificial Sequence
  Description of Artificial Sequence: Synthetic oligonucleotide
  Target: LAMA2; (+) strand; PAM type: YTN; PAM sequence: CTG
cacaataaacttacagttaa

SEQ ID NO: 348652 - DNA, 20 bp, Artificial Sequence
  Description of Artificial Sequence: Synthetic oligonucleotide
  Target: LAMA2; (+) strand; PAM type: YTN; PAM sequence: CTT
acagttaatgactttttaat

SEQ ID NO: 348653 - DNA, 20 bp, Artificial Sequence
  Description of Artificial Sequence: Synthetic oligonucleotide
  Target: LAMA2; (+) strand; PAM type: YTN; PAM sequence: TTA
cagttaatgactttttaatt

SEQ ID NO: 348654 - DNA, 20 bp, Artificial Sequence
  Description of Artificial Sequence: Synthetic oligonucleotide
  Target: LAMA2; (+) strand; PAM type: YTN; PAM sequence: TTA
atgactttttaattttcttc

SEQ ID NO: 348655 - DNA, 20 bp, Artificial Sequence
  Description of Artificial Sequence: Synthetic oligonucleotide
  Target: LAMA2; (+) strand; PAM type: YTN; PAM sequence: CTT
tttaattttcttcttaatat

SEQ ID NO: 348656 - DNA, 20 bp, Artificial Sequence
  Description of Artificial Sequence: Synthetic oligonucleotide
  Target: LAMA2; (+) strand; PAM type: YTN; PAM sequence: TTT
ttaattttcttcttaatatg

SEQ ID NO: 348657 - DNA, 20 bp, Artificial Sequence
  Description of Artificial Sequence: Synthetic oligonucleotide
  Target: LAMA2; (+) strand; PAM type: YTN; PAM sequence: TTT
taattttcttcttaatatgg

SEQ ID NO: 348658 - DNA, 20 bp, Artificial Sequence
  Description of Artificial Sequence: Synthetic oligonucleotide
  Target: LAMA2; (+) strand; PAM type: YTN; PAM sequence: TTT
aattttcttcttaatatggt

SEQ ID NO: 348659 - DNA, 20 bp, Artificial Sequence
  Description of Artificial Sequence: Synthetic oligonucleotide
  Target: LAMA2; (+) strand; PAM type: YTN; PAM sequence: TTA
attttcttcttaatatggtt

SEQ ID NO: 348660 - DNA, 20 bp, Artificial Sequence
  Description of Artificial Sequence: Synthetic oligonucleotide
  Target: LAMA2; (+) strand; PAM type: YTN; PAM sequence: TTT
tcttcttaatatggttaagg

SEQ ID NO: 348661 - DNA, 20 bp, Artificial Sequence
  Description of Artificial Sequence: Synthetic oligonucleotide
  Target: LAMA2; (+) strand; PAM type: YTN; PAM sequence: TTT
cttcttaatatggttaagga

SEQ ID NO: 348662 - DNA, 20 bp, Artificial Sequence
  Description of Artificial Sequence: Synthetic oligonucleotide
  Target: LAMA2; (+) strand; PAM type: YTN; PAM sequence: TTC
ttcttaatatggttaaggaa

SEQ ID NO: 348663 - DNA, 20 bp, Artificial Sequence
  Description of Artificial Sequence: Synthetic oligonucleotide
  Target: LAMA2; (+) strand; PAM type: YTN; PAM sequence: CTT
cttaatatggttaaggaata

SEQ ID NO: 348664 - DNA, 20 bp, Artificial Sequence
  Description of Artificial Sequence: Synthetic oligonucleotide
  Target: LAMA2; (+) strand; PAM type: YTN; PAM sequence: TTC
ttaatatggttaaggaatat

SEQ ID NO: 348665 - DNA, 20 bp, Artificial Sequence
  Description of Artificial Sequence: Synthetic oligonucleotide
  Target: LAMA2; (+) strand; PAM type: YTN; PAM sequence: CTT
aatatggttaaggaatatat

SEQ ID NO: 348666 - DNA, 20 bp, Artificial Sequence
  Description of Artificial Sequence: Synthetic oligonucleotide
  Target: LAMA2; (+) strand; PAM type: YTN; PAM sequence: TTA
atatggttaaggaatatatt

SEQ ID NO: 348667 - DNA, 20 bp, Artificial Sequence
  Description of Artificial Sequence: Synthetic oligonucleotide
  Target: LAMA2; (+) strand; PAM type: YTN; PAM sequence: TTA
aggaatatattgttatgagc

SEQ ID NO: 348668 - DNA, 20 bp, Artificial Sequence
  Description of Artificial Sequence: Synthetic oligonucleotide
  Target: LAMA2; (+) strand; PAM type: YTN; PAM sequence: TTG
ttatgagcacaatttctacc

SEQ ID NO: 348669 - DNA, 20 bp, Artificial Sequence
  Description of Artificial Sequence: Synthetic oligonucleotide
  Target: LAMA2; (+) strand; PAM type: YTN; PAM sequence: TTA
tgagcacaatttctacccag

SEQ ID NO: 348670 - DNA, 20 bp, Artificial Sequence
  Description of Artificial Sequence: Synthetic oligonucleotide
  Target: LAMA2; (+) strand; PAM type: YTN; PAM sequence: TTT
ctacccagattttgttggtt

SEQ ID NO: 348671 - DNA, 20 bp, Artificial Sequence
  Description of Artificial Sequence: Synthetic oligonucleotide
  Target: LAMA2; (+) strand; PAM type: YTN; PAM sequence: TTC
tacccagattttgttggttc

SEQ ID NO: 348672 - DNA, 20 bp, Artificial Sequence
  Description of Artificial Sequence: Synthetic oligonucleotide
  Target: LAMA2; (+) strand; PAM type: YTN; PAM sequence: CTA
cccagattttgttggttctt

SEQ ID NO: 348673 - DNA, 20 bp, Artificial Sequence
  Description of Artificial Sequence: Synthetic oligonucleotide
  Target: LAMA2; (+) strand; PAM type: YTN; PAM sequence: TTT
tgttggttcttttcaaatcc

SEQ ID NO: 348674 - DNA, 20 bp, Artificial Sequence
  Description of Artificial Sequence: Synthetic oligonucleotide
  Target: LAMA2; (+) strand; PAM type: YTN; PAM sequence: TTT
gttggttcttttcaaatcca

SEQ ID NO: 348675 - DNA, 20 bp, Artificial Sequence
  Description of Artificial Sequence: Synthetic oligonucleotide
  Target: LAMA2; (+) strand; PAM type: YTN; PAM sequence: TTG
ttggttcttttcaaatccat

SEQ ID NO: 348676 - DNA, 20 bp, Artificial Sequence
  Description of Artificial Sequence: Synthetic oligonucleotide
  Target: LAMA2; (+) strand; PAM type: YTN; PAM sequence: TTG
gttcttttcaaatccatcaa

SEQ ID NO: 348677 - DNA, 20 bp, Artificial Sequence
  Description of Artificial Sequence: Synthetic oligonucleotide
  Target: LAMA2; (+) strand; PAM type: YTN; PAM sequence: TTC
ttttcaaatccatcaagtaa

SEQ ID NO: 348678 - DNA, 20 bp, Artificial Sequence
  Description of Artificial Sequence: Synthetic oligonucleotide
  Target: LAMA2; (+) strand; PAM type: YTN; PAM sequence: CTT
ttcaaatccatcaagtaaaa

SEQ ID NO: 348679 - DNA, 20 bp, Artificial Sequence
  Description of Artificial Sequence: Synthetic oligonucleotide
  Target: LAMA2; (+) strand; PAM type: YTN; PAM sequence: TTT
tcaaatccatcaagtaaaac

SEQ ID NO: 348680 - DNA, 20 bp, Artificial Sequence
  Description of Artificial Sequence: Synthetic oligonucleotide
  Target: LAMA2; (+) strand; PAM type: YTN; PAM sequence: TTT
caaatccatcaagtaaaaca

SEQ ID NO: 348681 - DNA, 20 bp, Artificial Sequence
  Description of Artificial Sequence: Synthetic oligonucleotide
  Target: LAMA2; (+) strand; PAM type: YTN; PAM sequence: TTC
aaatccatcaagtaaaacag

SEQ ID NO: 348682 - DNA, 20 bp, Artificial Sequence
  Description of Artificial Sequence: Synthetic oligonucleotide
  Target: LAMA2; (+) strand; PAM type: YTN; PAM sequence: TTT
gtgaatactgcagttgctat

SEQ ID NO: 348683 - DNA, 20 bp, Artificial Sequence
  Description of Artificial Sequence: Synthetic oligonucleotide
  Target: LAMA2; (+) strand; PAM type: YTN; PAM sequence: TTG
tgaatactgcagttgctata

SEQ ID NO: 348684 - DNA, 20 bp, Artificial Sequence
  Description of Artificial Sequence: Synthetic oligonucleotide
  Target: LAMA2; (+) strand; PAM type: YTN; PAM sequence: CTG
cagttgctataatcacaata

SEQ ID NO: 348685 - DNA, 20 bp, Artificial Sequence
  Description of Artificial Sequence: Synthetic oligonucleotide
  Target: LAMA2; (+) strand; PAM type: YTN; PAM sequence: TTG
ctataatcacaataaaagag

SEQ ID NO: 348686 - DNA, 20 bp, Artificial Sequence
  Description of Artificial Sequence: Synthetic oligonucleotide
  Target: LAMA2; (+) strand; PAM type: YTN; PAM sequence: CTA
taatcacaataaaagagggt

SEQ ID NO: 348687 - DNA, 20 bp, Artificial Sequence
  Description of Artificial Sequence: Synthetic oligonucleotide
  Target: LAMA2; (+) strand; PAM type: YTN; PAM sequence: TTT
cttgcaagaaactatgtaaa

SEQ ID NO: 348688 - DNA, 20 bp, Artificial Sequence
  Description of Artificial Sequence: Synthetic oligonucleotide
  Target: LAMA2; (+) strand; PAM type: YTN; PAM sequence: TTC
ttgcaagaaactatgtaaaa

SEQ ID NO: 348689 - DNA, 20 bp, Artificial Sequence
  Description of Artificial Sequence: Synthetic oligonucleotide
  Target: LAMA2; (+) strand; PAM type: YTN; PAM sequence: CTT
gcaagaaactatgtaaaaca

SEQ ID NO: 348690 - DNA, 20 bp, Artificial Sequence
  Description of Artificial Sequence: Synthetic oligonucleotide
  Target: LAMA2; (+) strand; PAM type: YTN; PAM sequence: TTG
caagaaactatgtaaaacaa

SEQ ID NO: 348691 - DNA, 20 bp, Artificial Sequence
  Description of Artificial Sequence: Synthetic oligonucleotide
  Target: LAMA2; (+) strand; PAM type: YTN; PAM sequence: CTA
tgtaaaacaacttttatgaa

SEQ ID NO: 348692 - DNA, 20 bp, Artificial Sequence
  Description of Artificial Sequence: Synthetic oligonucleotide
  Target: LAMA2; (+) strand; PAM type: YTN; PAM sequence: CTT
ttatgaagaatagctgtcct

SEQ ID NO: 348693 - DNA, 20 bp, Artificial Sequence
  Description of Artificial Sequence: Synthetic oligonucleotide
  Target: LAMA2; (+) strand; PAM type: YTN; PAM sequence: TTT
tatgaagaatagctgtcctt

SEQ ID NO: 348694 - DNA, 20 bp, Artificial Sequence
  Description of Artificial Sequence: Synthetic oligonucleotide
  Target: LAMA2; (+) strand; PAM type: YTN; PAM sequence: TTT
atgaagaatagctgtcctta

SEQ ID NO: 348695 - DNA, 20 bp, Artificial Sequence
  Description of Artificial Sequence: Synthetic oligonucleotide
  Target: LAMA2; (+) strand; PAM type: YTN; PAM sequence: TTA
tgaagaatagctgtccttag

SEQ ID NO: 348696 - DNA, 20 bp, Artificial Sequence
  Description of Artificial Sequence: Synthetic oligonucleotide
  Target: LAMA2; (+) strand; PAM type: YTN; PAM sequence: CTG
tccttagccccagataaaaa

SEQ ID NO: 348697 - DNA, 20 bp, Artificial Sequence
  Description of Artificial Sequence: Synthetic oligonucleotide
  Target: LAMA2; (+) strand; PAM type: YTN; PAM sequence: CTT
agccccagataaaaactact

SEQ ID NO: 348698 - DNA, 20 bp, Artificial Sequence
  Description of Artificial Sequence: Synthetic oligonucleotide
  Target: LAMA2; (+) strand; PAM type: YTN; PAM sequence: TTA
gccccagataaaaactactg

SEQ ID NO: 348699 - DNA, 20 bp, Artificial Sequence
  Description of Artificial Sequence: Synthetic oligonucleotide
  Target: LAMA2; (+) strand; PAM type: YTN; PAM sequence: CTA
ctgtcagccacaggtactct

SEQ ID NO: 348700 - DNA, 20 bp, Artificial Sequence
  Description of Artificial Sequence: Synthetic oligonucleotide
  Target: LAMA2; (+) strand; PAM type: YTN; PAM sequence: CTG
tcagccacaggtactctagc

SEQ ID NO: 348701 - DNA, 20 bp, Artificial Sequence
  Description of Artificial Sequence: Synthetic oligonucleotide
  Target: LAMA2; (+) strand; PAM type: YTN; PAM sequence: CTC
tagcatggacttggtgctga

SEQ ID NO: 348702 - DNA, 20 bp, Artificial Sequence
  Description of Artificial Sequence: Synthetic oligonucleotide
  Target: LAMA2; (+) strand; PAM type: YTN; PAM sequence: CTA
gcatggacttggtgctgact

SEQ ID NO: 348703 - DNA, 20 bp, Artificial Sequence
  Description of Artificial Sequence: Synthetic oligonucleotide
  Target: LAMA2; (+) strand; PAM type: YTN; PAM sequence: CTT
ggtgctgactgggaaaaaga

SEQ ID NO: 348704 - DNA, 20 bp, Artificial Sequence
  Description of Artificial Sequence: Synthetic oligonucleotide
  Target: LAMA2; (+) strand; PAM type: YTN; PAM sequence: TTG
gtgctgactgggaaaaagat

SEQ ID NO: 348705 - DNA, 20 bp, Artificial Sequence
  Description of Artificial Sequence: Synthetic oligonucleotide
  Target: LAMA2; (+) strand; PAM type: YTN; PAM sequence: CTG
actgggaaaaagatatttct

SEQ ID NO: 348706 - DNA, 20 bp, Artificial Sequence
  Description of Artificial Sequence: Synthetic oligonucleotide
  Target: LAMA2; (+) strand; PAM type: YTN; PAM sequence: CTG
ggaaaaagatatttctaaaa

SEQ ID NO: 348707 - DNA, 20 bp, Artificial Sequence
  Description of Artificial Sequence: Synthetic oligonucleotide
  Target: LAMA2; (+) strand; PAM type: YTN; PAM sequence: TTT
ctaaaatgcccaactagctt

SEQ ID NO: 348708 - DNA, 20 bp, Artificial Sequence
  Description of Artificial Sequence: Synthetic oligonucleotide
  Target: LAMA2; (+) strand; PAM type: YTN; PAM sequence: TTC
taaaatgcccaactagctta

SEQ ID NO: 348709 - DNA, 20 bp, Artificial Sequence
  Description of Artificial Sequence: Synthetic oligonucleotide
  Target: LAMA2; (+) strand; PAM type: YTN; PAM sequence: CTA
aaatgcccaactagcttaaa

SEQ ID NO: 348710 - DNA, 20 bp, Artificial Sequence
  Description of Artificial Sequence: Synthetic oligonucleotide
  Target: LAMA2; (+) strand; PAM type: YTN; PAM sequence: CTA
gcttaaattaaaggccactc

SEQ ID NO: 348711 - DNA, 20 bp, Artificial Sequence
  Description of Artificial Sequence: Synthetic oligonucleotide
  Target: LAMA2; (+) strand; PAM type: YTN; PAM sequence: CTT
aaattaaaggccactcttcc

SEQ ID NO: 348712 - DNA, 20 bp, Artificial Sequence
  Description of Artificial Sequence: Synthetic oligonucleotide
  Target: LAMA2; (+) strand; PAM type: YTN; PAM sequence: TTA
aattaaaggccactcttcct

SEQ ID NO: 348713 - DNA, 20 bp, Artificial Sequence
  Description of Artificial Sequence: Synthetic oligonucleotide
  Target: LAMA2; (+) strand; PAM type: YTN; PAM sequence: TTA
aaggccactcttcctttggg

SEQ ID NO: 348714 - DNA, 20 bp, Artificial Sequence
  Description of Artificial Sequence: Synthetic oligonucleotide
  Target: LAMA2; (+) strand; PAM type: YTN; PAM sequence: CTC
ttcctttgggctaagatcac

SEQ ID NO: 348715 - DNA, 20 bp, Artificial Sequence
  Description of Artificial Sequence: Synthetic oligonucleotide
  Target: LAMA2; (+) strand; PAM type: YTN; PAM sequence: CTT
cctttgggctaagatcacag

SEQ ID NO: 348716 - DNA, 20 bp, Artificial Sequence
  Description of Artificial Sequence: Synthetic oligonucleotide
  Target: LAMA2; (+) strand; PAM type: YTN; PAM sequence: TTC
ctttgggctaagatcacagt

SEQ ID NO: 348717 - DNA, 20 bp, Artificial Sequence
  Description of Artificial Sequence: Synthetic oligonucleotide
  Target: LAMA2; (+) strand; PAM type: YTN; PAM sequence: CTT
tgggctaagatcacagtgct

SEQ ID NO: 348718 - DNA, 20 bp, Artificial Sequence
  Description of Artificial Sequence: Synthetic oligonucleotide
  Target: LAMA2; (+) strand; PAM type: YTN; PAM sequence: TTT
gggctaagatcacagtgcta

SEQ ID NO: 348719 - DNA, 20 bp, Artificial Sequence
  Description of Artificial Sequence: Synthetic oligonucleotide
  Target: LAMA2; (+) strand; PAM type: YTN; PAM sequence: TTG
ggctaagatcacagtgctaa

SEQ ID NO: 348720 - DNA, 20 bp, Artificial Sequence
  Description of Artificial Sequence: Synthetic oligonucleotide
  Target: LAMA2; (+) strand; PAM type: YTN; PAM sequence: CTA
agatcacagtgctaagagtt

SEQ ID NO: 348721 - DNA, 20 bp, Artificial Sequence
  Description of Artificial Sequence: Synthetic oligonucleotide
  Target: LAMA2; (+) strand; PAM type: YTN; PAM sequence: CTA
agagttactttgtcagtttt

SEQ ID NO: 348722 - DNA, 20 bp, Artificial Sequence
  Description of Artificial Sequence: Synthetic oligonucleotide
  Target: LAMA2; (+) strand; PAM type: YTN; PAM sequence: TTA
ctttgtcagttttgtgagtc

SEQ ID NO: 348723 - DNA, 20 bp, Artificial Sequence
  Description of Artificial Sequence: Synthetic oligonucleotide
  Target: LAMA2; (+) strand; PAM type: YTN; PAM sequence: CTT
tgtcagttttgtgagtcctc

SEQ ID NO: 348724 - DNA, 20 bp, Artificial Sequence
  Description of Artificial Sequence: Synthetic oligonucleotide
  Target: LAMA2; (+) strand; PAM type: YTN; PAM sequence: TTT
gtcagttttgtgagtcctca

SEQ ID NO: 348725 - DNA, 20 bp, Artificial Sequence
  Description of Artificial Sequence: Synthetic oligonucleotide
  Target: LAMA2; (+) strand; PAM type: YTN; PAM sequence: TTG
tcagttttgtgagtcctcac

SEQ ID NO: 348726 - DNA, 20 bp, Artificial Sequence
  Description of Artificial Sequence: Synthetic oligonucleotide
  Target: LAMA2; (+) strand; PAM type: YTN; PAM sequence: TTT
tgtgagtcctcacttgtcct

SEQ ID NO: 348727 - DNA, 20 bp, Artificial Sequence
  Description of Artificial Sequence: Synthetic oligonucleotide
  Target: LAMA2; (+) strand; PAM type: YTN; PAM sequence: TTT
gtgagtcctcacttgtcctc

SEQ ID NO: 348728 - DNA, 20 bp, Artificial Sequence
  Description of Artificial Sequence: Synthetic oligonucleotide
  Target: LAMA2; (+) strand; PAM type: YTN; PAM sequence: TTG
tgagtcctcacttgtcctca

SEQ ID NO: 348729 - DNA, 20 bp, Artificial Sequence
  Description of Artificial Sequence: Synthetic oligonucleotide
  Target: LAMA2; (+) strand; PAM type: YTN; PAM sequence: CTC
acttgtcctcaagaaacaca

SEQ ID NO: 348730 - DNA, 20 bp, Artificial Sequence
  Description of Artificial Sequence: Synthetic oligonucleotide
  Target: LAMA2; (+) strand; PAM type: YTN; PAM sequence: CTT
gtcctcaagaaacacaaatg

SEQ ID NO: 348731 - DNA, 20 bp, Artificial Sequence
  Description of Artificial Sequence: Synthetic oligonucleotide
  Target: LAMA2; (+) strand; PAM type: YTN; PAM sequence: TTG
tcctcaagaaacacaaatgt

SEQ ID NO: 348732 - DNA, 20 bp, Artificial Sequence
  Description of Artificial Sequence: Synthetic oligonucleotide
  Target: LAMA2; (+) strand; PAM type: YTN; PAM sequence: CTC
aagaaacacaaatgtccttc

SEQ ID NO: 348733 - DNA, 20 bp, Artificial Sequence
  Description of Artificial Sequence: Synthetic oligonucleotide
  Target: LAMA2; (+) strand; PAM type: YTN; PAM sequence: CTT
caaactaaggataaaagcag

SEQ ID NO: 348734 - DNA, 20 bp, Artificial Sequence
  Description of Artificial Sequence: Synthetic oligonucleotide
  Target: LAMA2; (+) strand; PAM type: YTN; PAM sequence: TTC
aaactaaggataaaagcaga

SEQ ID NO: 348735 - DNA, 20 bp, Artificial Sequence
  Description of Artificial Sequence: Synthetic oligonucleotide
  Target: LAMA2; (+) strand; PAM type: YTN; PAM sequence: CTA
aggataaaagcagaaaataa

SEQ ID NO: 348736 - DNA, 20 bp, Artificial Sequence
  Description of Artificial Sequence: Synthetic oligonucleotide
  Target: LAMA2; (+) strand; PAM type: YTN; PAM sequence: TTT
ttactgaatgtccccttttg

SEQ ID NO: 348737 - DNA, 20 bp, Artificial Sequence
  Description of Artificial Sequence: Synthetic oligonucleotide
  Target: LAMA2; (+) strand; PAM type: YTN; PAM sequence: TTT
tactgaatgtccccttttgt

SEQ ID NO: 348738 - DNA, 20 bp, Artificial Sequence
  Description of Artificial Sequence: Synthetic oligonucleotide
  Target: LAMA2; (+) strand; PAM type: YTN; PAM sequence: TTT
actgaatgtccccttttgtt

SEQ ID NO: 348739 - DNA, 20 bp, Artificial Sequence
  Description of Artificial Sequence: Synthetic oligonucleotide
  Target: LAMA2; (+) strand; PAM type: YTN; PAM sequence: TTA
ctgaatgtccccttttgtta

SEQ ID NO: 348740 - DNA, 20 bp, Artificial Sequence
  Description of Artificial Sequence: Synthetic oligonucleotide
  Target: LAMA2; (+) strand; PAM type: YTN; PAM sequence: CTG
aatgtccccttttgttactt

SEQ ID NO: 348741 - DNA, 20 bp, Artificial Sequence
  Description of Artificial Sequence: Synthetic oligonucleotide
  Target: LAMA2; (+) strand; PAM type: YTN; PAM sequence: CTT
ttgttactttgaccttgcag

SEQ ID NO: 348742 - DNA, 20 bp, Artificial Sequence
  Description of Artificial Sequence: Synthetic oligonucleotide
  Target: LAMA2; (+) strand; PAM type: YTN; PAM sequence: TTT
tgttactttgaccttgcagt

SEQ ID NO: 348743 - DNA, 20 bp, Artificial Sequence
  Description of Artificial Sequence: Synthetic oligonucleotide
  Target: LAMA2; (+) strand; PAM type: YTN; PAM sequence: TTT
gttactttgaccttgcagtc

SEQ ID NO: 348744 - DNA, 20 bp, Artificial Sequence
  Description of Artificial Sequence: Synthetic oligonucleotide
  Target: LAMA2; (+) strand; PAM type: YTN; PAM sequence: TTG
ttactttgaccttgcagtca

SEQ ID NO: 348745 - DNA, 20 bp, Artificial Sequence
  Description of Artificial Sequence: Synthetic oligonucleotide
  Target: LAMA2; (+) strand; PAM type: YTN; PAM sequence: TTA
ctttgaccttgcagtcatct

SEQ ID NO: 348746 - DNA, 20 bp, Artificial Sequence
  Description of Artificial Sequence: Synthetic oligonucleotide
  Target: LAMA2; (+) strand; PAM type: YTN; PAM sequence: CTT
tgaccttgcagtcatcttaa

SEQ ID NO: 348747 - DNA, 20 bp, Artificial Sequence
  Description of Artificial Sequence: Synthetic oligonucleotide
  Target: LAMA2; (+) strand; PAM type: YTN; PAM sequence: TTT
gaccttgcagtcatcttaac

SEQ ID NO: 348748 - DNA, 20 bp, Artificial Sequence
  Description of Artificial Sequence: Synthetic oligonucleotide
  Target: LAMA2; (+) strand; PAM type: YTN; PAM sequence: TTG
accttgcagtcatcttaaca

SEQ ID NO: 348749 - DNA, 20 bp, Artificial Sequence
  Description of Artificial Sequence: Synthetic oligonucleotide
  Target: LAMA2; (+) strand; PAM type: YTN; PAM sequence: CTT
gcagtcatcttaacaggatt

SEQ ID NO: 348750 - DNA, 20 bp, Artificial Sequence
  Description of Artificial Sequence: Synthetic oligonucleotide
  Target: LAMA2; (+) strand; PAM type: YTN; PAM sequence: TTG
cagtcatcttaacaggattt

SEQ ID NO: 348751 - DNA, 20 bp, Artificial Sequence
  Description of Artificial Sequence: Synthetic oligonucleotide
  Target: LAMA2; (+) strand; PAM type: YTN; PAM sequence: CTT
aacaggatttctctctggat

SEQ ID NO: 348752 - DNA, 20 bp, Artificial Sequence
  Description of Artificial Sequence: Synthetic oligonucleotide
  Target: LAMA2; (+) strand; PAM type: YTN; PAM sequence: TTA
acaggatttctctctggatt

SEQ ID NO: 348753 - DNA, 20 bp, Artificial Sequence
  Description of Artificial Sequence: Synthetic oligonucleotide
  Target: LAMA2; (+) strand; PAM type: YTN; PAM sequence: TTT
ctctctggattgctttttgc

SEQ ID NO: 348754 - DNA, 20 bp, Artificial Sequence
  Description of Artificial Sequence: Synthetic oligonucleotide
  Target: LAMA2; (+) strand; PAM type: YTN; PAM sequence: TTC
tctctggattgctttttgca

SEQ ID NO: 348755 - DNA, 20 bp, Artificial Sequence
  Description of Artificial Sequence: Synthetic oligonucleotide
  Target: LAMA2; (+) strand; PAM type: YTN; PAM sequence: CTC
tctggattgctttttgcagt

SEQ ID NO: 348756 - DNA, 20 bp, Artificial Sequence
  Description of Artificial Sequence: Synthetic oligonucleotide
  Target: LAMA2; (+) strand; PAM type: YTN; PAM sequence: CTC
tggattgctttttgcagtat

SEQ ID NO: 348757 - DNA, 20 bp, Artificial Sequence
  Description of Artificial Sequence: Synthetic oligonucleotide
  Target: LAMA2; (+) strand; PAM type: YTN; PAM sequence: CTG
gattgctttttgcagtatta

SEQ ID NO: 348758 - DNA, 20 bp, Artificial Sequence
  Description of Artificial Sequence: Synthetic oligonucleotide
  Target: LAMA2; (+) strand; PAM type: YTN; PAM sequence: TTG
ctttttgcagtattactact

SEQ ID NO: 348759 - DNA, 20 bp, Artificial Sequence
  Description of Artificial Sequence: Synthetic oligonucleotide
  Target: LAMA2; (+) strand; PAM type: YTN; PAM sequence: CTT
tttgcagtattactactcgg

SEQ ID NO: 348760 - DNA, 20 bp, Artificial Sequence
  Description of Artificial Sequence: Synthetic oligonucleotide
  Target: LAMA2; (+) strand; PAM type: YTN; PAM sequence: TTT
ttgcagtattactactcggt

SEQ ID NO: 348761 - DNA, 20 bp, Artificial Sequence
  Description of Artificial Sequence: Synthetic oligonucleotide
  Target: LAMA2; (+) strand; PAM type: YTN; PAM sequence: TTT
tgcagtattactactcggtc

SEQ ID NO: 348762 - DNA, 20 bp, Artificial Sequence
  Description of Artificial Sequence: Synthetic oligonucleotide
  Target: LAMA2; (+) strand; PAM type: YTN; PAM sequence: TTT
gcagtattactactcggtca

SEQ ID NO: 348763 - DNA, 20 bp, Artificial Sequence
  Description of Artificial Sequence: Synthetic oligonucleotide
  Target: LAMA2; (+) strand; PAM type: YTN; PAM sequence: TTG
cagtattactactcggtcaa

SEQ ID NO: 348764 - DNA, 20 bp, Artificial Sequence
  Description of Artificial Sequence: Synthetic oligonucleotide
  Target: LAMA2; (+) strand; PAM type: YTN; PAM sequence: TTA
ctactcggtcaaggatattt

SEQ ID NO: 348765 - DNA, 20 bp, Artificial Sequence
  Description of Artificial Sequence: Synthetic oligonucleotide
  Target: LAMA2; (+) strand; PAM type: YTN; PAM sequence: CTA
ctcggtcaaggatatttcag

SEQ ID NO: 348766 - DNA, 20 bp, Artificial Sequence
  Description of Artificial Sequence: Synthetic oligonucleotide
  Target: LAMA2; (+) strand; PAM type: YTN; PAM sequence: CTC
ggtcaaggatatttcagttg

SEQ ID NO: 348767 - DNA, 20 bp, Artificial Sequence
  Description of Artificial Sequence: Synthetic oligonucleotide
  Target: LAMA2; (+) strand; PAM type: YTN; PAM sequence: TTT
cagttggagggatgtgcatc

SEQ ID NO: 348768 - DNA, 20 bp, Artificial Sequence
  Description of Artificial Sequence: Synthetic oligonucleotide
  Target: LAMA2; (+) strand; PAM type: YTN; PAM sequence: TTC
agttggagggatgtgcatct

SEQ ID NO: 348769 - DNA, 20 bp, Artificial Sequence
  Description of Artificial Sequence: Synthetic oligonucleotide
  Target: LAMA2; (+) strand; PAM type: YTN; PAM sequence: TTG
gagggatgtgcatctgctat

SEQ ID NO: 348770 - DNA, 20 bp, Artificial Sequence
  Description of Artificial Sequence: Synthetic oligonucleotide
  Target: LAMA2; (+) strand; PAM type: YTN; PAM sequence: CTG
ctatggtcatgccagggctt

SEQ ID NO: 348771 - DNA, 20 bp, Artificial Sequence
  Description of Artificial Sequence: Synthetic oligonucleotide
  Target: LAMA2; (+) strand; PAM type: YTN; PAM sequence: CTA
tggtcatgccagggcttgtc

SEQ ID NO: 348772 - DNA, 20 bp, Artificial Sequence
  Description of Artificial Sequence: Synthetic oligonucleotide
  Target: LAMA2; (+) strand; PAM type: YTN; PAM sequence: CTT
gtccacttgatccagcgaca

SEQ ID NO: 348773 - DNA, 20 bp, Artificial Sequence
  Description of Artificial Sequence: Synthetic oligonucleotide
  Target: LAMA2; (+) strand; PAM type: YTN; PAM sequence: TTG
tccacttgatccagcgacaa

SEQ ID NO: 348774 - DNA, 20 bp, Artificial Sequence
  Description of Artificial Sequence: Synthetic oligonucleotide
  Target: LAMA2; (+) strand; PAM type: YTN; PAM sequence: CTT
gatccagcgacaaatgtatg

SEQ ID NO: 348775 - DNA, 20 bp, Artificial Sequence
  Description of Artificial Sequence: Synthetic oligonucleotide
  Target: LAMA2; (+) strand; PAM type: YTN; PAM sequence: TTG
atccagcgacaaatgtatgt

SEQ ID NO: 348776 - DNA, 20 bp, Artificial Sequence
  Description of Artificial Sequence: Synthetic oligonucleotide
  Target: LAMA2; (+) strand; PAM type: YTN; PAM sequence: TTT
ataggatgcttaggcaaaat

SEQ ID NO: 348777 - DNA, 20 bp, Artificial Sequence
  Description of Artificial Sequence: Synthetic oligonucleotide
  Target: LAMA2; (+) strand; PAM type: YTN; PAM sequence: TTA
taggatgcttaggcaaaatg

SEQ ID NO: 348778 - DNA, 20 bp, Artificial Sequence
  Description of Artificial Sequence: Synthetic oligonucleotide
  Target: LAMA2; (+) strand; PAM type: YTN; PAM sequence: CTT
aggcaaaatgaagccctgag

SEQ ID NO: 348779 - DNA, 20 bp, Artificial Sequence
  Description of Artificial Sequence: Synthetic oligonucleotide
  Target: LAMA2; (+) strand; PAM type: YTN; PAM sequence: TTA
ggcaaaatgaagccctgagc

SEQ ID NO: 348780 - DNA, 20 bp, Artificial Sequence
  Description of Artificial Sequence: Synthetic oligonucleotide
  Target: LAMA2; (+) strand; PAM type: YTN; PAM sequence: CTG
agctgtaaaatgtttcatga

SEQ ID NO: 348781 - DNA, 20 bp, Artificial Sequence
  Description of Artificial Sequence: Synthetic oligonucleotide
  Target: LAMA2; (+) strand; PAM type: YTN; PAM sequence: CTG
taaaatgtttcatgacagtc

SEQ ID NO: 348782 - DNA, 20 bp, Artificial Sequence
  Description of Artificial Sequence: Synthetic oligonucleotide
  Target: LAMA2; (+) strand; PAM type: YTN; PAM sequence: TTT
catgacagtctttgctgaca

SEQ ID NO: 348783 - DNA, 20 bp, Artificial Sequence
  Description of Artificial Sequence: Synthetic oligonucleotide
  Target: LAMA2; (+) strand; PAM type: YTN; PAM sequence: TTC
atgacagtctttgctgacag

SEQ ID NO: 348784 - DNA, 20 bp, Artificial Sequence
  Description of Artificial Sequence: Synthetic oligonucleotide
  Target: LAMA2; (+) strand; PAM type: YTN; PAM sequence: CTT
tgctgacagagaacgctgta

SEQ ID NO: 348785 - DNA, 20 bp, Artificial Sequence
  Description of Artificial Sequence: Synthetic oligonucleotide
  Target: LAMA2; (+) strand; PAM type: YTN; PAM sequence: TTT
gctgacagagaacgctgtaa

SEQ ID NO: 348786 - DNA, 20 bp, Artificial Sequence
  Description of Artificial Sequence: Synthetic oligonucleotide
  Target: LAMA2; (+) strand; PAM type: YTN; PAM sequence: TTG
ctgacagagaacgctgtaaa

SEQ ID NO: 348787 - DNA, 20 bp, Artificial Sequence
  Description of Artificial Sequence: Synthetic oligonucleotide
  Target: LAMA2; (+) strand; PAM type: YTN; PAM sequence: CTG
acagagaacgctgtaaatgg

SEQ ID NO: 348788 - DNA, 20 bp, Artificial Sequence
  Description of Artificial Sequence: Synthetic oligonucleotide
  Target: LAMA2; (+) strand; PAM type: YTN; PAM sequence: CTG
taaatgggagtcaggtcccc

SEQ ID NO: 348789 - DNA, 20 bp, Artificial Sequence
  Description of Artificial Sequence: Synthetic oligonucleotide
  Target: LAMA2; (+) strand; PAM type: YTN; PAM sequence: CTT
agacagtgtaacagaaatcc

SEQ ID NO: 348790 - DNA, 20 bp, Artificial Sequence
  Description of Artificial Sequence: Synthetic oligonucleotide
  Target: LAMA2; (+) strand; PAM type: YTN; PAM sequence: TTA
gacagtgtaacagaaatcca

SEQ ID NO: 348791 - DNA, 20 bp, Artificial Sequence
  Description of Artificial Sequence: Synthetic oligonucleotide
  Target: LAMA2; (+) strand; PAM type: YTN; PAM sequence: CTG
gcagttaggatgatagactt

SEQ ID NO: 348792 - DNA, 20 bp, Artificial Sequence
  Description of Artificial Sequence: Synthetic oligonucleotide
  Target: LAMA2; (+) strand; PAM type: YTN; PAM sequence: TTA
ggatgatagactttgaaatc

SEQ ID NO: 348793 - DNA, 20 bp, Artificial Sequence
  Description of Artificial Sequence: Synthetic oligonucleotide
  Target: LAMA2; (+) strand; PAM type: YTN; PAM sequence: CTT
tgaaatcagccatcacagta

SEQ ID NO: 348794 - DNA, 20 bp, Artificial Sequence
  Description of Artificial Sequence: Synthetic oligonucleotide
  Target: LAMA2; (+) strand; PAM type: YTN; PAM sequence: TTT
gaaatcagccatcacagtat

SEQ ID NO: 348795 - DNA, 20 bp, Artificial Sequence
  Description of Artificial Sequence: Synthetic oligonucleotide
  Target: LAMA2; (+) strand; PAM type: YTN; PAM sequence: TTG
aaatcagccatcacagtata

SEQ ID NO: 348796 - DNA, 20 bp, Artificial Sequence
  Description of Artificial Sequence: Synthetic oligonucleotide
  Target: LAMA2; (+) strand; PAM type: YTN; PAM sequence: TTA
gtttttcctttttttttttt

SEQ ID NO: 348797 - DNA, 20 bp, Artificial Sequence
  Description of Artificial Sequence: Synthetic oligonucleotide
  Target: LAMA2; (+) strand; PAM type: YTN; PAM sequence: TTT
ttcctttttttttttttttt

SEQ ID NO: 348798 - DNA, 20 bp, Artificial Sequence
  Description of Artificial Sequence: Synthetic oligonucleotide
  Target: LAMA2; (+) strand; PAM type: YTN; PAM sequence: TTT
tccttttttttttttttttt

SEQ ID NO: 348799 - DNA, 20 bp, Artificial Sequence
  Description of Artificial Sequence: Synthetic oligonucleotide
  Target: LAMA2; (+) strand; PAM type: YTN; PAM sequence: TTT
cctttttttttttttttttc

SEQ ID NO: 348800 - DNA, 20 bp, Artificial Sequence
  Description of Artificial Sequence: Synthetic oligonucleotide
  Target: LAMA2; (+) strand; PAM type: YTN; PAM sequence: TTC
ctttttttttttttttttca

SEQ ID NO: 348801 - DNA, 20 bp, Artificial Sequence
  Description of Artificial Sequence: Synthetic oligonucleotide
  Target: LAMA2; (+) strand; PAM type: YTN; PAM sequence: CTT
tttttttttttttttcaaaa

SEQ ID NO: 348802 - DNA, 20 bp, Artificial Sequence
  Description of Artificial Sequence: Synthetic oligonucleotide
  Target: LAMA2; (+) strand; PAM type: YTN; PAM sequence: TTT
ttttttttttttttcaaaaa

SEQ ID NO: 348803 - DNA, 20 bp, Artificial Sequence
  Description of Artificial Sequence: Synthetic oligonucleotide
  Target: LAMA2; (+) strand; PAM type: YTN; PAM sequence: TTT
tttttttttttttcaaaaag

SEQ ID NO: 348804 - DNA, 20 bp, Artificial Sequence
  Description of Artificial Sequence: Synthetic oligonucleotide
  Target: LAMA2; (+) strand; PAM type: YTN; PAM sequence: TTT
ttttttttttttcaaaaagg

SEQ ID NO: 348805 - DNA, 20 bp, Artificial Sequence
  Description of Artificial Sequence: Synthetic oligonucleotide
  Target: LAMA2; (+) strand; PAM type: YTN; PAM sequence: TTT
tttttttttttcaaaaaggc

SEQ ID NO: 348806 - DNA, 20 bp, Artificial Sequence
  Description of Artificial Sequence: Synthetic oligonucleotide
  Target: LAMA2; (+) strand; PAM type: YTN; PAM sequence: TTT
ttttttttttcaaaaaggct

SEQ ID NO: 348807 - DNA, 20 bp, Artificial Sequence
  Description of Artificial Sequence: Synthetic oligonucleotide
  Target: LAMA2; (+) strand; PAM type: YTN; PAM sequence: TTT
tttttttttcaaaaaggctc

SEQ ID NO: 348808 - DNA, 20 bp, Artificial Sequence
  Description of Artificial Sequence: Synthetic oligonucleotide
  Target: LAMA2; (+) strand; PAM type: YTN; PAM sequence: TTT
ttttttttcaaaaaggctcc

SEQ ID NO: 348809 - DNA, 20 bp, Artificial Sequence
  Description of Artificial Sequence: Synthetic oligonucleotide
  Target: LAMA2; (+) strand; PAM type: YTN; PAM sequence: TTT
tttttttcaaaaaggctcca

SEQ ID NO: 348810 - DNA, 20 bp, Artificial Sequence
  Description of Artificial Sequence: Synthetic oligonucleotide
  Target: LAMA2; (+) strand; PAM type: YTN; PAM sequence: TTT
ttttttcaaaaaggctccaa

SEQ ID NO: 348811 - DNA, 20 bp, Artificial Sequence
  Description of Artificial Sequence: Synthetic oligonucleotide
  Target: LAMA2; (+) strand; PAM type: YTN; PAM sequence: TTT
tttttcaaaaaggctccaaa

SEQ ID NO: 348812 - DNA, 20 bp, Artificial Sequence
  Description of Artificial Sequence: Synthetic oligonucleotide
  Target: LAMA2; (+) strand; PAM type: YTN; PAM sequence: TTT
ttttcaaaaaggctccaaac

SEQ ID NO: 348813 - DNA, 20 bp, Artificial Sequence
  Description of Artificial Sequence: Synthetic oligonucleotide
  Target: LAMA2; (+) strand; PAM type: YTN; PAM sequence: TTT
tttcaaaaaggctccaaact

SEQ ID NO: 348814 - DNA, 20 bp, Artificial Sequence
  Description of Artificial Sequence: Synthetic oligonucleotide
  Target: LAMA2; (+) strand; PAM type: YTN; PAM sequence: TTT
ttcaaaaaggctccaaactg

SEQ ID NO: 348815 - DNA, 20 bp, Artificial Sequence
  Description of Artificial Sequence: Synthetic oligonucleotide
  Target: LAMA2; (+) strand; PAM type: YTN; PAM sequence: TTT
tcaaaaaggctccaaactgg

SEQ ID NO: 348816 - DNA, 20 bp, Artificial Sequence
  Description of Artificial Sequence: Synthetic oligonucleotide
  Target: LAMA2; (+) strand; PAM type: YTN; PAM sequence: TTT
caaaaaggctccaaactggt

SEQ ID NO: 348817 - DNA, 20 bp, Artificial Sequence
  Description of Artificial Sequence: Synthetic oligonucleotide
  Target: LAMA2; (+) strand; PAM type: YTN; PAM sequence: TTC
aaaaaggctccaaactggtc

SEQ ID NO: 348818 - DNA, 20 bp, Artificial Sequence
  Description of Artificial Sequence: Synthetic oligonucleotide
  Target: LAMA2; (+) strand; PAM type: YTN; PAM sequence: CTC
caaactggtctattttgaaa

SEQ ID NO: 348819 - DNA, 20 bp, Artificial Sequence
  Description of Artificial Sequence: Synthetic oligonucleotide
  Target: LAMA2; (+) strand; PAM type: YTN; PAM sequence: CTG
gtctattttgaaatctctct

SEQ ID NO: 348820 - DNA, 20 bp, Artificial Sequence
  Description of Artificial Sequence: Synthetic oligonucleotide
  Target: LAMA2; (+) strand; PAM type: YTN; PAM sequence: CTA
ttttgaaatctctctagcta

SEQ ID NO: 348821 - DNA, 20 bp, Artificial Sequence
  Description of Artificial Sequence: Synthetic oligonucleotide
  Target: LAMA2; (+) strand; PAM type: YTN; PAM sequence: TTT
tgaaatctctctagctatga

SEQ ID NO: 348822 - DNA, 20 bp, Artificial Sequence
  Description of Artificial Sequence: Synthetic oligonucleotide
  Target: LAMA2; (+) strand; PAM type: YTN; PAM sequence: TTT
gaaatctctctagctatgac

SEQ ID NO: 348823 - DNA, 20 bp, Artificial Sequence
  Description of Artificial Sequence: Synthetic oligonucleotide
  Target: LAMA2; (+) strand; PAM type: YTN; PAM sequence: TTG
aaatctctctagctatgaca

SEQ ID NO: 348824 - DNA, 20 bp, Artificial Sequence
  Description of Artificial Sequence: Synthetic oligonucleotide
  Target: LAMA2; (+) strand; PAM type: YTN; PAM sequence: CTC
tctagctatgacagcctgcc

SEQ ID NO: 348825 - DNA, 20 bp, Artificial Sequence
  Description of Artificial Sequence: Synthetic oligonucleotide
  Target: LAMA2; (+) strand; PAM type: YTN; PAM sequence: CTC
tagctatgacagcctgcctc

SEQ ID NO: 348826 - DNA, 20 bp, Artificial Sequence
  Description of Artificial Sequence: Synthetic oligonucleotide
  Target: LAMA2; (+) strand; PAM type: YTN; PAM sequence: CTA
gctatgacagcctgcctcat

SEQ ID NO: 348827 - DNA, 20 bp, Artificial Sequence
  Description of Artificial Sequence: Synthetic oligonucleotide
  Target: LAMA2; (+) strand; PAM type: YTN; PAM sequence: CTA
tgacagcctgcctcatgata

SEQ ID NO: 348828 - DNA, 20 bp, Artificial Sequence
  Description of Artificial Sequence: Synthetic oligonucleotide
  Target: LAMA2; (+) strand; PAM type: YTN; PAM sequence: CTG
cctcatgatatagctttaga

SEQ ID NO: 348829 - DNA, 20 bp, Artificial Sequence
  Description of Artificial Sequence: Synthetic oligonucleotide
  Target: LAMA2; (+) strand; PAM type: YTN; PAM sequence: CTC
atgatatagctttagagaac

SEQ ID NO: 348830 - DNA, 20 bp, Artificial Sequence
  Description of Artificial Sequence: Synthetic oligonucleotide
  Target: LAMA2; (+) strand; PAM type: YTN; PAM sequence: CTT
tagagaacgcctgccatcaa

SEQ ID NO: 348831 - DNA, 20 bp, Artificial Sequence
  Description of Artificial Sequence: Synthetic oligonucleotide
  Target: LAMA2; (+) strand; PAM type: YTN; PAM sequence: TTT
agagaacgcctgccatcaat

SEQ ID NO: 348832 - DNA, 20 bp, Artificial Sequence
  Description of Artificial Sequence: Synthetic oligonucleotide
  Target: LAMA2; (+) strand; PAM type: YTN; PAM sequence: TTA
gagaacgcctgccatcaatc

SEQ ID NO: 348833 - DNA, 20 bp, Artificial Sequence
  Description of Artificial Sequence: Synthetic oligonucleotide
  Target: LAMA2; (+) strand; PAM type: YTN; PAM sequence: CTG
ccatcaatcaacctgaccat

SEQ ID NO: 348834 - DNA, 20 bp, Artificial Sequence
  Description of Artificial Sequence: Synthetic oligonucleotide
  Target: LAMA2; (+) strand; PAM type: YTN; PAM sequence: CTG
accatttcttttaaagtttc

SEQ ID NO: 348835 - DNA, 20 bp, Artificial Sequence
  Description of Artificial Sequence: Synthetic oligonucleotide
  Target: LAMA2; (+) strand; PAM type: YTN; PAM sequence: TTT
cttttaaagtttctaatcaa

SEQ ID NO: 348836 - DNA, 20 bp, Artificial Sequence
  Description of Artificial Sequence: Synthetic oligonucleotide
  Target: LAMA2; (+) strand; PAM type: YTN; PAM sequence: TTC
ttttaaagtttctaatcaaa

SEQ ID NO: 348837 - DNA, 20 bp, Artificial Sequence
  Description of Artificial Sequence: Synthetic oligonucleotide
  Target: LAMA2; (+) strand; PAM type: YTN; PAM sequence: CTT
ttaaagtttctaatcaaaaa

SEQ ID NO: 348838 - DNA, 20 bp, Artificial Sequence
  Description of Artificial Sequence: Synthetic oligonucleotide
  Target: LAMA2; (+) strand; PAM type: YTN; PAM sequence: TTT
taaagtttctaatcaaaaaa

SEQ ID NO: 348839 - DNA, 20 bp, Artificial Sequence
  Description of Artificial Sequence: Synthetic oligonucleotide
  Target: LAMA2; (+) strand; PAM type: YTN; PAM sequence: TTT
aaagtttctaatcaaaaaat

SEQ ID NO: 348840 - DNA, 20 bp, Artificial Sequence
  Description of Artificial Sequence: Synthetic oligonucleotide
  Target: LAMA2; (+) strand; PAM type: YTN; PAM sequence: TTA
aagtttctaatcaaaaaatt

SEQ ID NO: 348841 - DNA, 20 bp, Artificial Sequence
  Description of Artificial Sequence: Synthetic oligonucleotide
  Target: LAMA2; (+) strand; PAM type: YTN; PAM sequence: TTT
ctaatcaaaaaattaatgca

SEQ ID NO: 348842 - DNA, 20 bp, Artificial Sequence
  Description of Artificial Sequence: Synthetic oligonucleotide
  Target: LAMA2; (+) strand; PAM type: YTN; PAM sequence: TTC
taatcaaaaaattaatgcaa

SEQ ID NO: 348843 - DNA, 20 bp, Artificial Sequence
  Description of Artificial Sequence: Synthetic oligonucleotide
  Target: LAMA2; (+) strand; PAM type: YTN; PAM sequence: CTA
atcaaaaaattaatgcaaat

SEQ ID NO: 348844 - DNA, 20 bp, Artificial Sequence
  Description of Artificial Sequence: Synthetic oligonucleotide
  Target: LAMA2; (+) strand; PAM type: YTN; PAM sequence: TTA
atgcaaatgagtaaaaaaat

SEQ ID NO: 348845 - DNA, 20 bp, Artificial Sequence
  Description of Artificial Sequence: Synthetic oligonucleotide
  Target: LAMA2; (+) strand; PAM type: YTN; PAM sequence: CTG
atagtggcaagccggaaaat

SEQ ID NO: 348846 - DNA, 20 bp, Artificial Sequence
  Description of Artificial Sequence: Synthetic oligonucleotide
  Target: LAMA2; (+) strand; PAM type: YTN; PAM sequence: CTT
tttgatagaattttttcatt

SEQ ID NO: 348847 - DNA, 20 bp, Artificial Sequence
  Description of Artificial Sequence: Synthetic oligonucleotide
  Target: LAMA2; (+) strand; PAM type: YTN; PAM sequence: TTT
ttgatagaattttttcatta

SEQ ID NO: 348848 - DNA, 20 bp, Artificial Sequence
  Description of Artificial Sequence: Synthetic oligonucleotide
  Target: LAMA2; (+) strand; PAM type: YTN; PAM sequence: TTT
tgatagaattttttcattaa

SEQ ID NO: 348849 - DNA, 20 bp, Artificial Sequence
  Description of Artificial Sequence: Synthetic oligonucleotide
  Target: LAMA2; (+) strand; PAM type: YTN; PAM sequence: TTT
gatagaattttttcattaat

SEQ ID NO: 348850 - DNA, 20 bp, Artificial Sequence
  Description of Artificial Sequence: Synthetic oligonucleotide
  Target: LAMA2; (+) strand; PAM type: YTN; PAM sequence: TTG
atagaattttttcattaatg

SEQ ID NO: 348851 - DNA, 20 bp, Artificial Sequence
  Description of Artificial Sequence: Synthetic oligonucleotide
  Target: LAMA2; (+) strand; PAM type: YTN; PAM sequence: TTT
tttcattaatgacaatgaat

SEQ ID NO: 348852 - DNA, 20 bp, Artificial Sequence
  Description of Artificial Sequence: Synthetic oligonucleotide
  Target: LAMA2; (+) strand; PAM type: YTN; PAM sequence: TTT
ttcattaatgacaatgaatt

SEQ ID NO: 348853 - DNA, 20 bp, Artificial Sequence
  Description of Artificial Sequence: Synthetic oligonucleotide
  Target: LAMA2; (+) strand; PAM type: YTN; PAM sequence: TTT
tcattaatgacaatgaatta

SEQ ID NO: 348854 - DNA, 20 bp, Artificial Sequence
  Description of Artificial Sequence: Synthetic oligonucleotide
  Target: LAMA2; (+) strand; PAM type: YTN; PAM sequence: TTT
cattaatgacaatgaattaa

SEQ ID NO: 348855 - DNA, 20 bp, Artificial Sequence
  Description of Artificial Sequence: Synthetic oligonucleotide
  Target: LAMA2; (+) strand; PAM type: YTN; PAM sequence: TTC
attaatgacaatgaattaag

SEQ ID NO: 348856 - DNA, 20 bp, Artificial Sequence
  Description of Artificial Sequence: Synthetic oligonucleotide
  Target: LAMA2; (+) strand; PAM type: YTN; PAM sequence: TTA
atgacaatgaattaagtgaa

SEQ ID NO: 348857 - DNA, 20 bp, Artificial Sequence
  Description of Artificial Sequence: Synthetic oligonucleotide
  Target: LAMA2; (+) strand; PAM type: YTN; PAM sequence: TTA
agtgaacataacctaaagga

SEQ ID NO: 348858 - DNA, 20 bp, Artificial Sequence
  Description of Artificial Sequence: Synthetic oligonucleotide
  Target: LAMA2; (+) strand; PAM type: YTN; PAM sequence: CTA
aaggagaagatgaatgagca

SEQ ID NO: 348859 - DNA, 20 bp, Artificial Sequence
  Description of Artificial Sequence: Synthetic oligonucleotide
  Target: LAMA2; (+) strand; PAM type: YTN; PAM sequence: CTA
tttttcctgtcatagacaaa

SEQ ID NO: 348860 - DNA, 20 bp, Artificial Sequence
  Description of Artificial Sequence: Synthetic oligonucleotide
  Target: LAMA2; (+) strand; PAM type: YTN; PAM sequence: TTT
ttcctgtcatagacaaactg

SEQ ID NO: 348861 - DNA, 20 bp, Artificial Sequence
  Description of Artificial Sequence: Synthetic oligonucleotide
  Target: LAMA2; (+) strand; PAM type: YTN; PAM sequence: TTT
tcctgtcatagacaaactgg

SEQ ID NO: 348862 - DNA, 20 bp, Artificial Sequence
  Description of Artificial Sequence: Synthetic oligonucleotide
  Target: LAMA2; (+) strand; PAM type: YTN; PAM sequence: TTT
cctgtcatagacaaactggt

SEQ ID NO: 348863 - DNA, 20 bp, Artificial Sequence
  Description of Artificial Sequence: Synthetic oligonucleotide
  Target: LAMA2; (+) strand; PAM type: YTN; PAM sequence: TTC
ctgtcatagacaaactggtg

SEQ ID NO: 348864 - DNA, 20 bp, Artificial Sequence
  Description of Artificial Sequence: Synthetic oligonucleotide
  Target: LAMA2; (+) strand; PAM type: YTN; PAM sequence: CTG
tcatagacaaactggtgaaa

SEQ ID NO: 348865 - DNA, 20 bp, Artificial Sequence
  Description of Artificial Sequence: Synthetic oligonucleotide
  Target: LAMA2; (+) strand; PAM type: YTN; PAM sequence: CTG
gtgaaattcaaactcatctc

SEQ ID NO: 348866 - DNA, 20 bp, Artificial Sequence
  Description of Artificial Sequence: Synthetic oligonucleotide
  Target: LAMA2; (+) strand; PAM type: YTN; PAM sequence: TTC
aaactcatctcctgtatagt

SEQ ID NO: 348867 - DNA, 20 bp, Artificial Sequence
  Description of Artificial Sequence: Synthetic oligonucleotide
  Target: LAMA2; (+) strand; PAM type: YTN; PAM sequence: CTC
atctcctgtatagtatatgg

SEQ ID NO: 348868 - DNA, 20 bp, Artificial Sequence
  Description of Artificial Sequence: Synthetic oligonucleotide
  Target: LAMA2; (+) strand; PAM type: YTN; PAM sequence: CTC
ctgtatagtatatggaaaaa

SEQ ID NO: 348869 - DNA, 20 bp, Artificial Sequence
  Description of Artificial Sequence: Synthetic oligonucleotide
  Target: LAMA2; (+) strand; PAM type: YTN; PAM sequence: CTG
tatagtatatggaaaaatac

SEQ ID NO: 348870 - DNA, 20 bp, Artificial Sequence
  Description of Artificial Sequence: Synthetic oligonucleotide
  Target: LAMA2; (+) strand; PAM type: YTN; PAM sequence: TTG
aatagtaagatcagtgaatg

SEQ ID NO: 348871 - DNA, 20 bp, Artificial Sequence
  Description of Artificial Sequence: Synthetic oligonucleotide
  Target: LAMA2; (+) strand; PAM type: YTN; PAM sequence: TTT
tttttctcaaatattgtaat

SEQ ID NO: 348872 - DNA, 20 bp, Artificial Sequence
  Description of Artificial Sequence: Synthetic oligonucleotide
  Target: LAMA2; (+) strand; PAM type: YTN; PAM sequence: TTT
ttttctcaaatattgtaatg

SEQ ID NO: 348873 - DNA, 20 bp, Artificial Sequence
  Description of Artificial Sequence: Synthetic oligonucleotide
  Target: LAMA2; (+) strand; PAM type: YTN; PAM sequence: TTT
tttctcaaatattgtaatgc

SEQ ID NO: 348874 - DNA, 20 bp, Artificial Sequence
  Description of Artificial Sequence: Synthetic oligonucleotide
  Target: LAMA2; (+) strand; PAM type: YTN; PAM sequence: TTT
ttctcaaatattgtaatgca

SEQ ID NO: 348875 - DNA, 20 bp, Artificial Sequence
  Description of Artificial Sequence: Synthetic oligonucleotide
  Target: LAMA2; (+) strand; PAM type: YTN; PAM sequence: TTT
tctcaaatattgtaatgcaa

SEQ ID NO: 348876 - DNA, 20 bp, Artificial Sequence
  Description of Artificial Sequence: Synthetic oligonucleotide
  Target: LAMA2; (+) strand; PAM type: YTN; PAM sequence: TTT
ctcaaatattgtaatgcaaa

SEQ ID NO: 348877 - DNA, 20 bp, Artificial Sequence
  Description of Artificial Sequence: Synthetic oligonucleotide
  Target: LAMA2; (+) strand; PAM type: YTN; PAM sequence: TTC
tcaaatattgtaatgcaaat

SEQ ID NO: 348878 - DNA, 20 bp, Artificial Sequence
  Description of Artificial Sequence: Synthetic oligonucleotide
  Target: LAMA2; (+) strand; PAM type: YTN; PAM sequence: CTC
aaatattgtaatgcaaatga

SEQ ID NO: 348879 - DNA, 20 bp, Artificial Sequence
  Description of Artificial Sequence: Synthetic oligonucleotide
  Target: LAMA2; (+) strand; PAM type: YTN; PAM sequence: TTG
taatgcaaatgacattatac

SEQ ID NO: 348880 - DNA, 20 bp, Artificial Sequence
  Description of Artificial Sequence: Synthetic oligonucleotide
  Target: LAMA2; (+) strand; PAM type: YTN; PAM sequence: TTA
tactcaaagctagttttctg

SEQ ID NO: 348881 - DNA, 20 bp, Artificial Sequence
  Description of Artificial Sequence: Synthetic oligonucleotide
  Target: LAMA2; (+) strand; PAM type: YTN; PAM sequence: CTC
aaagctagttttctgatgat

SEQ ID NO: 348882 - DNA, 20 bp, Artificial Sequence
  Description of Artificial Sequence: Synthetic oligonucleotide
  Target: LAMA2; (+) strand; PAM type: YTN; PAM sequence: CTA
gttttctgatgattggatta

SEQ ID NO: 348883 - DNA, 20 bp, Artificial Sequence
  Description of Artificial Sequence: Synthetic oligonucleotide
  Target: LAMA2; (+) strand; PAM type: YTN; PAM sequence: TTT
tctgatgattggattataat

SEQ ID NO: 348884 - DNA, 20 bp, Artificial Sequence
  Description of Artificial Sequence: Synthetic oligonucleotide
  Target: LAMA2; (+) strand; PAM type: YTN; PAM sequence: TTT
ctgatgattggattataatg

SEQ ID NO: 348885 - DNA, 20 bp, Artificial Sequence
  Description of Artificial Sequence: Synthetic oligonucleotide
  Target: LAMA2; (+) strand; PAM type: YTN; PAM sequence: TTC
tgatgattggattataatgt

SEQ ID NO: 348886 - DNA, 20 bp, Artificial Sequence
  Description of Artificial Sequence: Synthetic oligonucleotide
  Target: LAMA2; (+) strand; PAM type: YTN; PAM sequence: CTG
atgattggattataatgtta

SEQ ID NO: 348887 - DNA, 20 bp, Artificial Sequence
  Description of Artificial Sequence: Synthetic oligonucleotide
  Target: LAMA2; (+) strand; PAM type: YTN; PAM sequence: TTG
gattataatgttatctccta

SEQ ID NO: 348888 - DNA, 20 bp, Artificial Sequence
  Description of Artificial Sequence: Synthetic oligonucleotide
  Target: LAMA2; (+) strand; PAM type: YTN; PAM sequence: TTA
taatgttatctcctaggaag

SEQ ID NO: 348889 - DNA, 20 bp, Artificial Sequence
  Description of Artificial Sequence: Synthetic oligonucleotide
  Target: LAMA2; (+) strand; PAM type: YTN; PAM sequence: TTA
tctcctaggaagattaaagt

SEQ ID NO: 348890 - DNA, 20 bp, Artificial Sequence
  Description of Artificial Sequence: Synthetic oligonucleotide
  Target: LAMA2; (+) strand; PAM type: YTN; PAM sequence: CTC
ctaggaagattaaagtacac

SEQ ID NO: 348891 - DNA, 20 bp, Artificial Sequence
  Description of Artificial Sequence: Synthetic oligonucleotide
  Target: LAMA2; (+) strand; PAM type: YTN; PAM sequence: CTA
ggaagattaaagtacactaa

SEQ ID NO: 348892 - DNA, 20 bp, Artificial Sequence
  Description of Artificial Sequence: Synthetic oligonucleotide
  Target: LAMA2; (+) strand; PAM type: YTN; PAM sequence: TTA
aagtacactaacatattttt

SEQ ID NO: 348893 - DNA, 20 bp, Artificial Sequence
  Description of Artificial Sequence: Synthetic oligonucleotide
  Target: LAMA2; (+) strand; PAM type: YTN; PAM sequence: CTA
acatatttttatgggcaaag

SEQ ID NO: 348894 - DNA, 20 bp, Artificial Sequence
  Description of Artificial Sequence: Synthetic oligonucleotide
  Target: LAMA2; (+) strand; PAM type: YTN; PAM sequence: TTT
ttatgggcaaagctgcagtg

SEQ ID NO: 348895 - DNA, 20 bp, Artificial Sequence
  Description of Artificial Sequence: Synthetic oligonucleotide
  Target: LAMA2; (+) strand; PAM type: YTN; PAM sequence: TTT
tatgggcaaagctgcagtgc

SEQ ID NO: 348896 - DNA, 20 bp, Artificial Sequence
  Description of Artificial Sequence: Synthetic oligonucleotide
  Target: LAMA2; (+) strand; PAM type: YTN; PAM sequence: TTT
atgggcaaagctgcagtgct

SEQ ID NO: 348897 - DNA, 20 bp, Artificial Sequence
  Description of Artificial Sequence: Synthetic oligonucleotide
  Target: LAMA2; (+) strand; PAM type: YTN; PAM sequence: TTA
tgggcaaagctgcagtgctg

SEQ ID NO: 348898 - DNA, 20 bp, Artificial Sequence
  Description of Artificial Sequence: Synthetic oligonucleotide
  Target: LAMA2; (+) strand; PAM type: YTN; PAM sequence: CTG
cagtgctgctttctgcctgg

SEQ ID NO: 348899 - DNA, 20 bp, Artificial Sequence
  Description of Artificial Sequence: Synthetic oligonucleotide
  Target: LAMA2; (+) strand; PAM type: YTN; PAM sequence: CTG
ctttctgcctggtatgggtg

SEQ ID NO: 348900 - DNA, 20 bp, Artificial Sequence
  Description of Artificial Sequence: Synthetic oligonucleotide
  Target: LAMA2; (+) strand; PAM type: YTN; PAM sequence: CTT
tctgcctggtatgggtgctt

SEQ ID NO: 348901 - DNA, 20 bp, Artificial Sequence
  Description of Artificial Sequence: Synthetic oligonucleotide
  Target: LAMA2; (+) strand; PAM type: YTN; PAM sequence: TTT
ctgcctggtatgggtgcttt

SEQ ID NO: 348902 - DNA, 20 bp, Artificial Sequence
  Description of Artificial Sequence: Synthetic oligonucleotide
  Target: LAMA2; (+) strand; PAM type: YTN; PAM sequence: TTC
tgcctggtatgggtgctttc

SEQ ID NO: 348903 - DNA, 20 bp, Artificial Sequence
  Description of Artificial Sequence: Synthetic oligonucleotide
  Target: LAMA2; (+) strand; PAM type: YTN; PAM sequence: CTG
cctggtatgggtgctttctt

SEQ ID NO: 348904 - DNA, 20 bp, Artificial Sequence
  Description of Artificial Sequence: Synthetic oligonucleotide
  Target: LAMA2; (+) strand; PAM type: YTN; PAM sequence: CTG
gtatgggtgctttcttcttt

SEQ ID NO: 348905 - DNA, 20 bp, Artificial Sequence
  Description of Artificial Sequence: Synthetic oligonucleotide
  Target: LAMA2; (+) strand; PAM type: YTN; PAM sequence: CTT
tcttcttttttttgttttcc

SEQ ID NO: 348906 - DNA, 20 bp, Artificial Sequence
  Description of Artificial Sequence: Synthetic oligonucleotide
  Target: LAMA2; (+) strand; PAM type: YTN; PAM sequence: TTT
cttcttttttttgttttcca

SEQ ID NO: 348907 - DNA, 20 bp, Artificial Sequence
  Description of Artificial Sequence: Synthetic oligonucleotide
  Target: LAMA2; (+) strand; PAM type: YTN; PAM sequence: TTC
ttcttttttttgttttccat

SEQ ID NO: 348908 - DNA, 20 bp, Artificial Sequence
  Description of Artificial Sequence: Synthetic oligonucleotide
  Target: LAMA2; (+) strand; PAM type: YTN; PAM sequence: CTT
cttttttttgttttccattt

SEQ ID NO: 348909 - DNA, 20 bp, Artificial Sequence
  Description of Artificial Sequence: Synthetic oligonucleotide
  Target: LAMA2; (+) strand; PAM type: YTN; PAM sequence: TTC
ttttttttgttttccatttt

SEQ ID NO: 348910 - DNA, 20 bp, Artificial Sequence
  Description of Artificial Sequence: Synthetic oligonucleotide
  Target: LAMA2; (+) strand; PAM type: YTN; PAM sequence: CTT
ttttttgttttccatttttt

SEQ ID NO: 348911 - DNA, 20 bp, Artificial Sequence
  Description of Artificial Sequence: Synthetic oligonucleotide
  Target: LAMA2; (+) strand; PAM type: YTN; PAM sequence: TTT
tttttgttttccatttttta

SEQ ID NO: 348912 - DNA, 20 bp, Artificial Sequence
  Description of Artificial Sequence: Synthetic oligonucleotide
  Target: LAMA2; (+) strand; PAM type: YTN; PAM sequence: TTT
ttttgttttccattttttaa

SEQ ID NO: 348913 - DNA, 20 bp, Artificial Sequence
  Description of Artificial Sequence: Synthetic oligonucleotide
  Target: LAMA2; (+) strand; PAM type: YTN; PAM sequence: TTT
tttgttttccattttttaaa

SEQ ID NO: 348914 - DNA, 20 bp, Artificial Sequence
  Description of Artificial Sequence: Synthetic oligonucleotide
  Target: LAMA2; (+) strand; PAM type: YTN; PAM sequence: TTT
ttgttttccattttttaaaa

SEQ ID NO: 348915 - DNA, 20 bp, Artificial Sequence
  Description of Artificial Sequence: Synthetic oligonucleotide
  Target: LAMA2; (+) strand; PAM type: YTN; PAM sequence: TTT
tgttttccattttttaaaat

SEQ ID NO: 348916 - DNA, 20 bp, Artificial Sequence
  Description of Artificial Sequence: Synthetic oligonucleotide
  Target: LAMA2; (+) strand; PAM type: YTN; PAM sequence: TTT
gttttccattttttaaaatt

SEQ ID NO: 348917 - DNA, 20 bp, Artificial Sequence
  Description of Artificial Sequence: Synthetic oligonucleotide
  Target: LAMA2; (+) strand; PAM type: YTN; PAM sequence: TTG
ttttccattttttaaaattt

SEQ ID NO: 348918 - DNA, 20 bp, Artificial Sequence
  Description of Artificial Sequence: Synthetic oligonucleotide
  Target: LAMA2; (+) strand; PAM type: YTN; PAM sequence: TTT
tccattttttaaaattttac

SEQ ID NO: 348919 - DNA, 20 bp, Artificial Sequence
  Description of Artificial Sequence: Synthetic oligonucleotide
  Target: LAMA2; (+) strand; PAM type: YTN; PAM sequence: TTT
ccattttttaaaattttact

SEQ ID NO: 348920 - DNA, 20 bp, Artificial Sequence
  Description of Artificial Sequence: Synthetic oligonucleotide
  Target: LAMA2; (+) strand; PAM type: YTN; PAM sequence: TTC
cattttttaaaattttactt

SEQ ID NO: 348921 - DNA, 20 bp, Artificial Sequence
  Description of Artificial Sequence: Synthetic oligonucleotide
  Target: LAMA2; (+) strand; PAM type: YTN; PAM sequence: TTT
tttaaaattttactttaaat

SEQ ID NO: 348922 - DNA, 20 bp, Artificial Sequence
  Description of Artificial Sequence: Synthetic oligonucleotide
  Target: LAMA2; (+) strand; PAM type: YTN; PAM sequence: TTT
ttaaaattttactttaaatc

SEQ ID NO: 348923 - DNA, 20 bp, Artificial Sequence
  Description of Artificial Sequence: Synthetic oligonucleotide
  Target: LAMA2; (+) strand; PAM type: YTN; PAM sequence: TTT
taaaattttactttaaatcc

SEQ ID NO: 348924 - DNA, 20 bp, Artificial Sequence
  Description of Artificial Sequence: Synthetic oligonucleotide
  Target: LAMA2; (+) strand; PAM type: YTN; PAM sequence: TTT
aaaattttactttaaatcct

SEQ ID NO: 348925 - DNA, 20 bp, Artificial Sequence
  Description of Artificial Sequence: Synthetic oligonucleotide
  Target: LAMA2; (+) strand; PAM type: YTN; PAM sequence: TTA
aaattttactttaaatcctg

SEQ ID NO: 348926 - DNA, 20 bp, Artificial Sequence
  Description of Artificial Sequence: Synthetic oligonucleotide
  Target: LAMA2; (+) strand; PAM type: YTN; PAM sequence: TTT
tactttaaatcctggatact

SEQ ID NO: 348927 - DNA, 20 bp, Artificial Sequence
  Description of Artificial Sequence: Synthetic oligonucleotide
  Target: LAMA2; (+) strand; PAM type: YTN; PAM sequence: TTT
actttaaatcctggatactc

SEQ ID NO: 348928 - DNA, 20 bp, Artificial Sequence
  Description of Artificial Sequence: Synthetic oligonucleotide
  Target: LAMA2; (+) strand; PAM type: YTN; PAM sequence: TTA
ctttaaatcctggatactcg

SEQ ID NO: 348929 - DNA, 20 bp, Artificial Sequence
  Description of Artificial Sequence: Synthetic oligonucleotide
  Target: LAMA2; (+) strand; PAM type: YTN; PAM sequence: CTT
taaatcctggatactcgtgc

SEQ ID NO: 348930 - DNA, 20 bp, Artificial Sequence
  Description of Artificial Sequence: Synthetic oligonucleotide
  Target: LAMA2; (+) strand; PAM type: YTN; PAM sequence: TTT
aaatcctggatactcgtgca

SEQ ID NO: 348931 - DNA, 20 bp, Artificial Sequence
  Description of Artificial Sequence: Synthetic oligonucleotide
  Target: LAMA2; (+) strand; PAM type: YTN; PAM sequence: TTA
aatcctggatactcgtgcac

SEQ ID NO: 348932 - DNA, 20 bp, Artificial Sequence
  Description of Artificial Sequence: Synthetic oligonucleotide
  Target: LAMA2; (+) strand; PAM type: YTN; PAM sequence: CTG
gatactcgtgcacaacatgc

SEQ ID NO: 348933 - DNA, 20 bp, Artificial Sequence
  Description of Artificial Sequence: Synthetic oligonucleotide
  Target: LAMA2; (+) strand; PAM type: YTN; PAM sequence: CTC
gtgcacaacatgcaggtttg

SEQ ID NO: 348934 - DNA, 20 bp, Artificial Sequence
  Description of Artificial Sequence: Synthetic oligonucleotide
  Target: LAMA2; (+) strand; PAM type: YTN; PAM sequence: TTT
gttacataggtaaatgtgtg

SEQ ID NO: 348935 - DNA, 20 bp, Artificial Sequence
  Description of Artificial Sequence: Synthetic oligonucleotide
  Target: LAMA2; (+) strand; PAM type: YTN; PAM sequence: TTG
ttacataggtaaatgtgtgt

SEQ ID NO: 348936 - DNA, 20 bp, Artificial Sequence
  Description of Artificial Sequence: Synthetic oligonucleotide
  Target: LAMA2; (+) strand; PAM type: YTN; PAM sequence: TTA
cataggtaaatgtgtgtcat

SEQ ID NO: 348937 - DNA, 20 bp, Artificial Sequence
  Description of Artificial Sequence: Synthetic oligonucleotide
  Target: LAMA2; (+) strand; PAM type: YTN; PAM sequence: TTT
gctgcccctatcaacccatc

SEQ ID NO: 348938 - DNA, 20 bp, Artificial Sequence
  Description of Artificial Sequence: Synthetic oligonucleotide
  Target: LAMA2; (+) strand; PAM type: YTN; PAM sequence: TTG
ctgcccctatcaacccatca

SEQ ID NO: 348939 - DNA, 20 bp, Artificial Sequence
  Description of Artificial Sequence: Synthetic oligonucleotide
  Target: LAMA2; (+) strand; PAM type: YTN; PAM sequence: CTG
cccctatcaacccatcacct

SEQ ID NO: 348940 - DNA, 20 bp, Artificial Sequence
  Description of Artificial Sequence: Synthetic oligonucleotide
  Target: LAMA2; (+) strand; PAM type: YTN; PAM sequence: CTA
tcaacccatcacctaggcat

SEQ ID NO: 348941 - DNA, 20 bp, Artificial Sequence
  Description of Artificial Sequence: Synthetic oligonucleotide
  Target: LAMA2; (+) strand; PAM type: YTN; PAM sequence: CTA
ggcataattttccacaggct

SEQ ID NO: 348942 - DNA, 20 bp, Artificial Sequence
  Description of Artificial Sequence: Synthetic oligonucleotide
  Target: LAMA2; (+) strand; PAM type: YTN; PAM sequence: TTT
tccacaggctttacagagtc

SEQ ID NO: 348943 - DNA, 20 bp, Artificial Sequence
  Description of Artificial Sequence: Synthetic oligonucleotide
  Target: LAMA2; (+) strand; PAM type: YTN; PAM sequence: TTT
ccacaggctttacagagtcc

SEQ ID NO: 348944 - DNA, 20 bp, Artificial Sequence
  Description of Artificial Sequence: Synthetic oligonucleotide
  Target: LAMA2; (+) strand; PAM type: YTN; PAM sequence: TTC
cacaggctttacagagtccc

SEQ ID NO: 348945 - DNA, 20 bp, Artificial Sequence
  Description of Artificial Sequence: Synthetic oligonucleotide
  Target: LAMA2; (+) strand; PAM type: YTN; PAM sequence: CTT
tacagagtccctttgtctca

SEQ ID NO: 348946 - DNA, 20 bp, Artificial Sequence
  Description of Artificial Sequence: Synthetic oligonucleotide
  Target: LAMA2; (+) strand; PAM type: YTN; PAM sequence: TTT
acagagtccctttgtctcac

SEQ ID NO: 348947 - DNA, 20 bp, Artificial Sequence
  Description of Artificial Sequence: Synthetic oligonucleotide
  Target: LAMA2; (+) strand; PAM type: YTN; PAM sequence: TTA
cagagtccctttgtctcact

SEQ ID NO: 348948 - DNA, 20 bp, Artificial Sequence
  Description of Artificial Sequence: Synthetic oligonucleotide
  Target: LAMA2; (+) strand; PAM type: YTN; PAM sequence: CTT
tgtctcactggctttctgca

SEQ ID NO: 348949 - DNA, 20 bp, Artificial Sequence
  Description of Artificial Sequence: Synthetic oligonucleotide
  Target: LAMA2; (+) strand; PAM type: YTN; PAM sequence: TTT
gtctcactggctttctgcat

SEQ ID NO: 348950 - DNA, 20 bp, Artificial Sequence
  Description of Artificial Sequence: Synthetic oligonucleotide
  Target: LAMA2; (+) strand; PAM type: YTN; PAM sequence: TTG
tctcactggctttctgcatt

SEQ ID NO: 348951 - DNA, 20 bp, Artificial Sequence
  Description of Artificial Sequence: Synthetic oligonucleotide
  Target: LAMA2; (+) strand; PAM type: YTN; PAM sequence: CTC
actggctttctgcattttaa

SEQ ID NO: 348952 - DNA, 20 bp, Artificial Sequence
  Description of Artificial Sequence: Synthetic oligonucleotide
  Target: LAMA2; (+) strand; PAM type: YTN; PAM sequence: CTG
gctttctgcattttaaaaat

SEQ ID NO: 348953 - DNA, 20 bp, Artificial Sequence
  Description of Artificial Sequence: Synthetic oligonucleotide
  Target: LAMA2; (+) strand; PAM type: YTN; PAM sequence: CTT
tctgcattttaaaaatccct

SEQ ID NO: 348954 - DNA, 20 bp, Artificial Sequence
  Description of Artificial Sequence: Synthetic oligonucleotide
  Target: LAMA2; (+) strand; PAM type: YTN; PAM sequence: TTT
ctgcattttaaaaatccctt

SEQ ID NO: 348955 - DNA, 20 bp, Artificial Sequence
  Description of Artificial Sequence: Synthetic oligonucleotide
  Target: LAMA2; (+) strand; PAM type: YTN; PAM sequence: TTC
tgcattttaaaaatcccttt

SEQ ID NO: 348956 - DNA, 20 bp, Artificial Sequence
  Description of Artificial Sequence: Synthetic oligonucleotide
  Target: LAMA2; (+) strand; PAM type: YTN; PAM sequence: CTG
cattttaaaaatccctttac

SEQ ID NO: 348957 - DNA, 20 bp, Artificial Sequence
  Description of Artificial Sequence: Synthetic oligonucleotide
  Target: LAMA2; (+) strand; PAM type: YTN; PAM sequence: TTT
taaaaatccctttactgtta

SEQ ID NO: 348958 - DNA, 20 bp, Artificial Sequence
  Description of Artificial Sequence: Synthetic oligonucleotide
  Target: LAMA2; (+) strand; PAM type: YTN; PAM sequence: TTT
aaaaatccctttactgttat

SEQ ID NO: 348959 - DNA, 20 bp, Artificial Sequence
  Description of Artificial Sequence: Synthetic oligonucleotide
  Target: LAMA2; (+) strand; PAM type: YTN; PAM sequence: TTA
aaaatccctttactgttatt

SEQ ID NO: 348960 - DNA, 20 bp, Artificial Sequence
  Description of Artificial Sequence: Synthetic oligonucleotide
  Target: LAMA2; (+) strand; PAM type: YTN; PAM sequence: CTT
tactgttattttatttggag

SEQ ID NO: 348961 - DNA, 20 bp, Artificial Sequence
  Description of Artificial Sequence: Synthetic oligonucleotide
  Target: LAMA2; (+) strand; PAM type: YTN; PAM sequence: TTT
actgttattttatttggagg

SEQ ID NO: 348962 - DNA, 20 bp, Artificial Sequence
  Description of Artificial Sequence: Synthetic oligonucleotide
  Target: LAMA2; (+) strand; PAM type: YTN; PAM sequence: TTA
ctgttattttatttggagga

SEQ ID NO: 348963 - DNA, 20 bp, Artificial Sequence
  Description of Artificial Sequence: Synthetic oligonucleotide
  Target: LAMA2; (+) strand; PAM type: YTN; PAM sequence: CTG
ttattttatttggaggaagt

SEQ ID NO: 348964 - DNA, 20 bp, Artificial Sequence
  Description of Artificial Sequence: Synthetic oligonucleotide
  Target: LAMA2; (+) strand; PAM type: YTN; PAM sequence: TTA
ttttatttggaggaagtgaa

SEQ ID NO: 348965 - DNA, 20 bp, Artificial Sequence
  Description of Artificial Sequence: Synthetic oligonucleotide
  Target: LAMA2; (+) strand; PAM type: YTN; PAM sequence: TTT
tatttggaggaagtgaaaaa

SEQ ID NO: 348966 - DNA, 20 bp, Artificial Sequence
  Description of Artificial Sequence: Synthetic oligonucleotide
  Target: LAMA2; (+) strand; PAM type: YTN; PAM sequence: TTT
atttggaggaagtgaaaaaa

SEQ ID NO: 348967 - DNA, 20 bp, Artificial Sequence
  Description of Artificial Sequence: Synthetic oligonucleotide
  Target: LAMA2; (+) strand; PAM type: YTN; PAM sequence: TTA
tttggaggaagtgaaaaaat

SEQ ID NO: 348968 - DNA, 20 bp, Artificial Sequence
  Description of Artificial Sequence: Synthetic oligonucleotide
  Target: LAMA2; (+) strand; PAM type: YTN; PAM sequence: TTT
ggaggaagtgaaaaaatgca

SEQ ID NO: 348969 - DNA, 20 bp, Artificial Sequence
  Description of Artificial Sequence: Synthetic oligonucleotide
  Target: LAMA2; (+) strand; PAM type: YTN; PAM sequence: TTG
gaggaagtgaaaaaatgcat

SEQ ID NO: 348970 - DNA, 20 bp, Artificial Sequence
  Description of Artificial Sequence: Synthetic oligonucleotide
  Target: LAMA2; (+) strand; PAM type: YTN; PAM sequence: CTA
cgctgccataaaaaggaatg

SEQ ID NO: 348971 - DNA, 20 bp, Artificial Sequence
  Description of Artificial Sequence: Synthetic oligonucleotide
  Target: LAMA2; (+) strand; PAM type: YTN; PAM sequence: CTG
ccataaaaaggaatgagatc

SEQ ID NO: 348972 - DNA, 20 bp, Artificial Sequence
  Description of Artificial Sequence: Synthetic oligonucleotide
  Target: LAMA2; (+) strand; PAM type: YTN; PAM sequence: CTT
tgcagggacatggatgaagc

SEQ ID NO: 348973 - DNA, 20 bp, Artificial Sequence
  Description of Artificial Sequence: Synthetic oligonucleotide
  Target: LAMA2; (+) strand; PAM type: YTN; PAM sequence: TTT
gcagggacatggatgaagct

SEQ ID NO: 348974 - DNA, 20 bp, Artificial Sequence
  Description of Artificial Sequence: Synthetic oligonucleotide
  Target: LAMA2; (+) strand; PAM type: YTN; PAM sequence: TTG
cagggacatggatgaagctg

SEQ ID NO: 348975 - DNA, 20 bp, Artificial Sequence
  Description of Artificial Sequence: Synthetic oligonucleotide
  Target: LAMA2; (+) strand; PAM type: YTN; PAM sequence: CTG
gaaaccatggtcctcaggaa

SEQ ID NO: 348976 - DNA, 20 bp, Artificial Sequence
  Description of Artificial Sequence: Synthetic oligonucleotide
  Target: LAMA2; (+) strand; PAM type: YTN; PAM sequence: CTC
aggaaactaacacaggaaca

SEQ ID NO: 348977 - DNA, 20 bp, Artificial Sequence
  Description of Artificial Sequence: Synthetic oligonucleotide
  Target: LAMA2; (+) strand; PAM type: YTN; PAM sequence: CTA
acacaggaacagaaaaccaa

SEQ ID NO: 348978 - DNA, 20 bp, Artificial Sequence
  Description of Artificial Sequence: Synthetic oligonucleotide
  Target: LAMA2; (+) strand; PAM type: YTN; PAM sequence: CTA
tatgttctcactcataaatg

SEQ ID NO: 348979 - DNA, 20 bp, Artificial Sequence
  Description of Artificial Sequence: Synthetic oligonucleotide
  Target: LAMA2; (+) strand; PAM type: YTN; PAM sequence: TTC
tcactcataaatgagagcta

SEQ ID NO: 348980 - DNA, 20 bp, Artificial Sequence
  Description of Artificial Sequence: Synthetic oligonucleotide
  Target: LAMA2; (+) strand; PAM type: YTN; PAM sequence: CTC
actcataaatgagagctaaa

SEQ ID NO: 348981 - DNA, 20 bp, Artificial Sequence
  Description of Artificial Sequence: Synthetic oligonucleotide
  Target: LAMA2; (+) strand; PAM type: YTN; PAM sequence: CTC
ataaatgagagctaaacaat

SEQ ID NO: 348982 - DNA, 20 bp, Artificial Sequence
  Description of Artificial Sequence: Synthetic oligonucleotide
  Target: LAMA2; (+) strand; PAM type: YTN; PAM sequence: CTA
aacaatgagaacacatggac

SEQ ID NO: 348983 - DNA, 20 bp, Artificial Sequence
  Description of Artificial Sequence: Synthetic oligonucleotide
  Target: LAMA2; (+) strand; PAM type: YTN; PAM sequence: CTC
aaggaggggaacaacacaca

SEQ ID NO: 348984 - DNA, 20 bp, Artificial Sequence
  Description of Artificial Sequence: Synthetic oligonucleotide
  Target: LAMA2; (+) strand; PAM type: YTN; PAM sequence: CTA
tcagatggagggaggcaaag

SEQ ID NO: 348985 - DNA, 20 bp, Artificial Sequence
  Description of Artificial Sequence: Synthetic oligonucleotide
  Target: LAMA2; (+) strand; PAM type: YTN; PAM sequence: CTA
atgcatgcagggtgctttct

SEQ ID NO: 348986 - DNA, 20 bp, Artificial Sequence
  Description of Artificial Sequence: Synthetic oligonucleotide
  Target: LAMA2; (+) strand; PAM type: YTN; PAM sequence: CTT
tctatcaggtgtacagatga

SEQ ID NO: 348987 - DNA, 20 bp, Artificial Sequence
  Description of Artificial Sequence: Synthetic oligonucleotide
  Target: LAMA2; (+) strand; PAM type: YTN; PAM sequence: TTT
ctatcaggtgtacagatgat

SEQ ID NO: 348988 - DNA, 20 bp, Artificial Sequence
  Description of Artificial Sequence: Synthetic oligonucleotide
  Target: LAMA2; (+) strand; PAM type: YTN; PAM sequence: TTC
tatcaggtgtacagatgatc

SEQ ID NO: 348989 - DNA, 20 bp, Artificial Sequence
  Description of Artificial Sequence: Synthetic oligonucleotide
  Target: LAMA2; (+) strand; PAM type: YTN; PAM sequence: CTA
tcaggtgtacagatgatcag

SEQ ID NO: 348990 - DNA, 20 bp, Artificial Sequence
  Description of Artificial Sequence: Synthetic oligonucleotide
  Target: LAMA2; (+) strand; PAM type: YTN; PAM sequence: TTT
cccaggctttaaaagtccac

SEQ ID NO: 348991 - DNA, 20 bp, Artificial Sequence
  Description of Artificial Sequence: Synthetic oligonucleotide
  Target: LAMA2; (+) strand; PAM type: YTN; PAM sequence: TTC
ccaggctttaaaagtccaca

SEQ ID NO: 348992 - DNA, 20 bp, Artificial Sequence
  Description of Artificial Sequence: Synthetic oligonucleotide
  Target: LAMA2; (+) strand; PAM type: YTN; PAM sequence: CTT
taaaagtccacaagacaggc

SEQ ID NO: 348993 - DNA, 20 bp, Artificial Sequence
  Description of Artificial Sequence: Synthetic oligonucleotide
  Target: LAMA2; (+) strand; PAM type: YTN; PAM sequence: TTT
aaaagtccacaagacaggct

SEQ ID NO: 348994 - DNA, 20 bp, Artificial Sequence
  Description of Artificial Sequence: Synthetic oligonucleotide
  Target: LAMA2; (+) strand; PAM type: YTN; PAM sequence: TTA
aaagtccacaagacaggctt

SEQ ID NO: 348995 - DNA, 20 bp, Artificial Sequence
  Description of Artificial Sequence: Synthetic oligonucleotide
  Target: LAMA2; (+) strand; PAM type: YTN; PAM sequence: CTT
ggaaggccaattccaggtgg

SEQ ID NO: 348996 - DNA, 20 bp, Artificial Sequence
  Description of Artificial Sequence: Synthetic oligonucleotide
  Target: LAMA2; (+) strand; PAM type: YTN; PAM sequence: TTG
gaaggccaattccaggtggt

SEQ ID NO: 348997 - DNA, 20 bp, Artificial Sequence
  Description of Artificial Sequence: Synthetic oligonucleotide
  Target: LAMA2; (+) strand; PAM type: YTN; PAM sequence: TTC
caggtggtaaattgagactg

SEQ ID NO: 348998 - DNA, 20 bp, Artificial Sequence
  Description of Artificial Sequence: Synthetic oligonucleotide
  Target: LAMA2; (+) strand; PAM type: YTN; PAM sequence: TTG
agactgtattcagagcatgc

SEQ ID NO: 348999 - DNA, 20 bp, Artificial Sequence
  Description of Artificial Sequence: Synthetic oligonucleotide
  Target: LAMA2; (+) strand; PAM type: YTN; PAM sequence: CTG
tattcagagcatgcacagac

SEQ ID NO: 349000 - DNA, 20 bp, Artificial Sequence
  Description of Artificial Sequence: Synthetic oligonucleotide
  Target: LAMA2; (+) strand; PAM type: YTN; PAM sequence: TTC
agagcatgcacagacaggag

SEQ ID NO: 349001 - DNA, 20 bp, Artificial Sequence
  Description of Artificial Sequence: Synthetic oligonucleotide
  Target: LAMA2; (+) strand; PAM type: YTN; PAM sequence: TTT
agtcctagagacattagatt

SEQ ID NO: 349002 - DNA, 20 bp, Artificial Sequence
  Description of Artificial Sequence: Synthetic oligonucleotide
  Target: LAMA2; (+) strand; PAM type: YTN; PAM sequence: TTA
gtcctagagacattagattt

SEQ ID NO: 349003 - DNA, 20 bp, Artificial Sequence
  Description of Artificial Sequence: Synthetic oligonucleotide
  Target: LAMA2; (+) strand; PAM type: YTN; PAM sequence: CTA
gagacattagatttctggtt

SEQ ID NO: 349004 - DNA, 20 bp, Artificial Sequence
  Description of Artificial Sequence: Synthetic oligonucleotide
  Target: LAMA2; (+) strand; PAM type: YTN; PAM sequence: TTA
gatttctggtttacctgcac

SEQ ID NO: 349005 - DNA, 20 bp, Artificial Sequence
  Description of Artificial Sequence: Synthetic oligonucleotide
  Target: LAMA2; (+) strand; PAM type: YTN; PAM sequence: TTT
ctggtttacctgcaccccta

SEQ ID NO: 349006 - DNA, 20 bp, Artificial Sequence
  Description of Artificial Sequence: Synthetic oligonucleotide
  Target: LAMA2; (+) strand; PAM type: YTN; PAM sequence: TTC
tggtttacctgcacccctag

SEQ ID NO: 349007 - DNA, 20 bp, Artificial Sequence
  Description of Artificial Sequence: Synthetic oligonucleotide
  Target: LAMA2; (+) strand; PAM type: YTN; PAM sequence: CTG
gtttacctgcacccctagag

SEQ ID NO: 349008 - DNA, 20 bp, Artificial Sequence
  Description of Artificial Sequence: Synthetic oligonucleotide
  Target: LAMA2; (+) strand; PAM type: YTN; PAM sequence: TTT
acctgcacccctagaggcct

SEQ ID NO: 349009 - DNA, 20 bp, Artificial Sequence
  Description of Artificial Sequence: Synthetic oligonucleotide
  Target: LAMA2; (+) strand; PAM type: YTN; PAM sequence: TTA
cctgcacccctagaggccta

SEQ ID NO: 349010 - DNA, 20 bp, Artificial Sequence
  Description of Artificial Sequence: Synthetic oligonucleotide
  Target: LAMA2; (+) strand; PAM type: YTN; PAM sequence: CTG
cacccctagaggcctaggaa

SEQ ID NO: 349011 - DNA, 20 bp, Artificial Sequence
  Description of Artificial Sequence: Synthetic oligonucleotide
  Target: LAMA2; (+) strand; PAM type: YTN; PAM sequence: CTA
gaggcctaggaatcaactcc

SEQ ID NO: 349012 - DNA, 20 bp, Artificial Sequence
  Description of Artificial Sequence: Synthetic oligonucleotide
  Target: LAMA2; (+) strand; PAM type: YTN; PAM sequence: CTA
ggaatcaactccctccttct

SEQ ID NO: 349013 - DNA, 20 bp, Artificial Sequence
  Description of Artificial Sequence: Synthetic oligonucleotide
  Target: LAMA2; (+) strand; PAM type: YTN; PAM sequence: CTC
cctccttcttgccatatcca

SEQ ID NO: 349014 - DNA, 20 bp, Artificial Sequence
  Description of Artificial Sequence: Synthetic oligonucleotide
  Target: LAMA2; (+) strand; PAM type: YTN; PAM sequence: CTC
cttcttgccatatccaaaaa

SEQ ID NO: 349015 - DNA, 20 bp, Artificial Sequence
  Description of Artificial Sequence: Synthetic oligonucleotide
  Target: LAMA2; (+) strand; PAM type: YTN; PAM sequence: CTT
cttgccatatccaaaaatat

SEQ ID NO: 349016 - DNA, 20 bp, Artificial Sequence
  Description of Artificial Sequence: Synthetic oligonucleotide
  Target: LAMA2; (+) strand; PAM type: YTN; PAM sequence: TTC
ttgccatatccaaaaatatt

SEQ ID NO: 349017 - DNA, 20 bp, Artificial Sequence
  Description of Artificial Sequence: Synthetic oligonucleotide
  Target: LAMA2; (+) strand; PAM type: YTN; PAM sequence: CTT
gccatatccaaaaatattaa

SEQ ID NO: 349018 - DNA, 20 bp, Artificial Sequence
  Description of Artificial Sequence: Synthetic oligonucleotide
  Target: LAMA2; (+) strand; PAM type: YTN; PAM sequence: TTG
ccatatccaaaaatattaac

SEQ ID NO: 349019 - DNA, 20 bp, Artificial Sequence
  Description of Artificial Sequence: Synthetic oligonucleotide
  Target: LAMA2; (+) strand; PAM type: YTN; PAM sequence: TTA
acaacattttgaggggagcc

SEQ ID NO: 349020 - DNA, 20 bp, Artificial Sequence
  Description of Artificial Sequence: Synthetic oligonucleotide
  Target: LAMA2; (+) strand; PAM type: YTN; PAM sequence: TTT
tgaggggagccttaaaacaa

SEQ ID NO: 349021 - DNA, 20 bp, Artificial Sequence
  Description of Artificial Sequence: Synthetic oligonucleotide
  Target: LAMA2; (+) strand; PAM type: YTN; PAM sequence: TTT
gaggggagccttaaaacaag

SEQ ID NO: 349022 - DNA, 20 bp, Artificial Sequence
  Description of Artificial Sequence: Synthetic oligonucleotide
  Target: LAMA2; (+) strand; PAM type: YTN; PAM sequence: TTG
aggggagccttaaaacaagc

SEQ ID NO: 349023 - DNA, 20 bp, Artificial Sequence
  Description of Artificial Sequence: Synthetic oligonucleotide
  Target: LAMA2; (+) strand; PAM type: YTN; PAM sequence: CTT
aaaacaagctaatcgacccc

SEQ ID NO: 349024 - DNA, 20 bp, Artificial Sequence
  Description of Artificial Sequence: Synthetic oligonucleotide
  Target: LAMA2; (+) strand; PAM type: YTN; PAM sequence: TTA
aaacaagctaatcgaccccc

SEQ ID NO: 349025 - DNA, 20 bp, Artificial Sequence
  Description of Artificial Sequence: Synthetic oligonucleotide
  Target: LAMA2; (+) strand; PAM type: YTN; PAM sequence: CTA
atcgacccccaaaaaacaca

SEQ ID NO: 349026 - DNA, 20 bp, Artificial Sequence
  Description of Artificial Sequence: Synthetic oligonucleotide
  Target: LAMA2; (+) strand; PAM type: YTN; PAM sequence: TTC
agtcttcaagaccactccca

SEQ ID NO: 349027 - DNA, 20 bp, Artificial Sequence
  Description of Artificial Sequence: Synthetic oligonucleotide
  Target: LAMA2; (+) strand; PAM type: YTN; PAM sequence: CTT
caagaccactcccagctggg

SEQ ID NO: 349028 - DNA, 20 bp, Artificial Sequence
  Description of Artificial Sequence: Synthetic oligonucleotide
  Target: LAMA2; (+) strand; PAM type: YTN; PAM sequence: TTC
aagaccactcccagctgggc

SEQ ID NO: 349029 - DNA, 20 bp, Artificial Sequence
  Description of Artificial Sequence: Synthetic oligonucleotide
  Target: LAMA2; (+) strand; PAM type: YTN; PAM sequence: CTC
ccagctgggccttcctgctt

SEQ ID NO: 349030 - DNA, 20 bp, Artificial Sequence
  Description of Artificial Sequence: Synthetic oligonucleotide
  Target: LAMA2; (+) strand; PAM type: YTN; PAM sequence: CTG
ggccttcctgctttcttctg

SEQ ID NO: 349031 - DNA, 20 bp, Artificial Sequence
  Description of Artificial Sequence: Synthetic oligonucleotide
  Target: LAMA2; (+) strand; PAM type: YTN; PAM sequence: CTT
cctgctttcttctgagccta

SEQ ID NO: 349032 - DNA, 20 bp, Artificial Sequence
  Description of Artificial Sequence: Synthetic oligonucleotide
  Target: LAMA2; (+) strand; PAM type: YTN; PAM sequence: TTC
ctgctttcttctgagcctaa

SEQ ID NO: 349033 - DNA, 20 bp, Artificial Sequence
  Description of Artificial Sequence: Synthetic oligonucleotide
  Target: LAMA2; (+) strand; PAM type: YTN; PAM sequence: CTG
ctttcttctgagcctaaacc

SEQ ID NO: 349034 - DNA, 20 bp, Artificial Sequence
  Description of Artificial Sequence: Synthetic oligonucleotide
  Target: LAMA2; (+) strand; PAM type: YTN; PAM sequence: CTT
tcttctgagcctaaacccag

SEQ ID NO: 349035 - DNA, 20 bp, Artificial Sequence
  Description of Artificial Sequence: Synthetic oligonucleotide
  Target: LAMA2; (+) strand; PAM type: YTN; PAM sequence: TTT
cttctgagcctaaacccagt

SEQ ID NO: 349036 - DNA, 20 bp, Artificial Sequence
  Description of Artificial Sequence: Synthetic oligonucleotide
  Target: LAMA2; (+) strand; PAM type: YTN; PAM sequence: TTC
ttctgagcctaaacccagtg

SEQ ID NO: 349037 - DNA, 20 bp, Artificial Sequence
  Description of Artificial Sequence: Synthetic oligonucleotide
  Target: LAMA2; (+) strand; PAM type: YTN; PAM sequence: CTT
ctgagcctaaacccagtgat

SEQ ID NO: 349038 - DNA, 20 bp, Artificial Sequence
  Description of Artificial Sequence: Synthetic oligonucleotide
  Target: LAMA2; (+) strand; PAM type: YTN; PAM sequence: TTC
tgagcctaaacccagtgatt

SEQ ID NO: 349039 - DNA, 20 bp, Artificial Sequence
  Description of Artificial Sequence: Synthetic oligonucleotide
  Target: LAMA2; (+) strand; PAM type: YTN; PAM sequence: CTG
agcctaaacccagtgattaa

SEQ ID NO: 349040 - DNA, 20 bp, Artificial Sequence
  Description of Artificial Sequence: Synthetic oligonucleotide
  Target: LAMA2; (+) strand; PAM type: YTN; PAM sequence: CTA
aacccagtgattaaagaacc

SEQ ID NO: 349041 - DNA, 20 bp, Artificial Sequence
  Description of Artificial Sequence: Synthetic oligonucleotide
  Target: LAMA2; (+) strand; PAM type: YTN; PAM sequence: TTA
aagaaccagcctggacttcc

SEQ ID NO: 349042 - DNA, 20 bp, Artificial Sequence
  Description of Artificial Sequence: Synthetic oligonucleotide
  Target: LAMA2; (+) strand; PAM type: YTN; PAM sequence: CTG
gacttccttaaggtgatgtt

SEQ ID NO: 349043 - DNA, 20 bp, Artificial Sequence
  Description of Artificial Sequence: Synthetic oligonucleotide
  Target: LAMA2; (+) strand; PAM type: YTN; PAM sequence: CTT
ccttaaggtgatgttgatca

SEQ ID NO: 349044 - DNA, 20 bp, Artificial Sequence
  Description of Artificial Sequence: Synthetic oligonucleotide
  Target: LAMA2; (+) strand; PAM type: YTN; PAM sequence: TTC
cttaaggtgatgttgatcaa

SEQ ID NO: 349045 - DNA, 20 bp, Artificial Sequence
  Description of Artificial Sequence: Synthetic oligonucleotide
  Target: LAMA2; (+) strand; PAM type: YTN; PAM sequence: CTT
aaggtgatgttgatcaaata

SEQ ID NO: 349046 - DNA, 20 bp, Artificial Sequence
  Description of Artificial Sequence: Synthetic oligonucleotide
  Target: LAMA2; (+) strand; PAM type: YTN; PAM sequence: TTA
aggtgatgttgatcaaatat

SEQ ID NO: 349047 - DNA, 20 bp, Artificial Sequence
  Description of Artificial Sequence: Synthetic oligonucleotide
  Target: LAMA2; (+) strand; PAM type: YTN; PAM sequence: TTG
atcaaatatacccacttcaa

SEQ ID NO: 349048 - DNA, 20 bp, Artificial Sequence
  Description of Artificial Sequence: Synthetic oligonucleotide
  Target: LAMA2; (+) strand; PAM type: YTN; PAM sequence: CTT
caagcctggcaccactttct

SEQ ID NO: 349049 - DNA, 20 bp, Artificial Sequence
  Description of Artificial Sequence: Synthetic oligonucleotide
  Target: LAMA2; (+) strand; PAM type: YTN; PAM sequence: TTC
aagcctggcaccactttctt

SEQ ID NO: 349050 - DNA, 20 bp, Artificial Sequence
  Description of Artificial Sequence: Synthetic oligonucleotide
  Target: LAMA2; (+) strand; PAM type: YTN; PAM sequence: CTG
gcaccactttcttcccaggc

SEQ ID NO: 349051 - DNA, 20 bp, Artificial Sequence
  Description of Artificial Sequence: Synthetic oligonucleotide
  Target: LAMA2; (+) strand; PAM type: YTN; PAM sequence: CTT
tcttcccaggctggctagtt

SEQ ID NO: 349052 - DNA, 20 bp, Artificial Sequence
  Description of Artificial Sequence: Synthetic oligonucleotide
  Target: LAMA2; (+) strand; PAM type: YTN; PAM sequence: TTT
cttcccaggctggctagttt

SEQ ID NO: 349053 - DNA, 20 bp, Artificial Sequence
  Description of Artificial Sequence: Synthetic oligonucleotide
  Target: LAMA2; (+) strand; PAM type: YTN; PAM sequence: TTC
ttcccaggctggctagtttt

SEQ ID NO: 349054 - DNA, 20 bp, Artificial Sequence
  Description of Artificial Sequence: Synthetic oligonucleotide
  Target: LAMA2; (+) strand; PAM type: YTN; PAM sequence: CTT
cccaggctggctagttttac

SEQ ID NO: 349055 - DNA, 20 bp, Artificial Sequence
  Description of Artificial Sequence: Synthetic oligonucleotide
  Target: LAMA2; (+) strand; PAM type: YTN; PAM sequence: TTC
ccaggctggctagttttaca

SEQ ID NO: 349056 - DNA, 20 bp, Artificial Sequence
  Description of Artificial Sequence: Synthetic oligonucleotide
  Target: LAMA2; (+) strand; PAM type: YTN; PAM sequence: CTG
gctagttttacattttagta

SEQ ID NO: 349057 - DNA, 20 bp, Artificial Sequence
  Description of Artificial Sequence: Synthetic oligonucleotide
  Target: LAMA2; (+) strand; PAM type: YTN; PAM sequence: CTA
gttttacattttagtacaca

SEQ ID NO: 349058 - DNA, 20 bp, Artificial Sequence
  Description of Artificial Sequence: Synthetic oligonucleotide
  Target: LAMA2; (+) strand; PAM type: YTN; PAM sequence: TTT
tacattttagtacacagtcc

SEQ ID NO: 349059 - DNA, 20 bp, Artificial Sequence
  Description of Artificial Sequence: Synthetic oligonucleotide
  Target: LAMA2; (+) strand; PAM type: YTN; PAM sequence: TTT
acattttagtacacagtcca

SEQ ID NO: 349060 - DNA, 20 bp, Artificial Sequence
  Description of Artificial Sequence: Synthetic oligonucleotide
  Target: LAMA2; (+) strand; PAM type: YTN; PAM sequence: TTA
cattttagtacacagtccag

SEQ ID NO: 349061 - DNA, 20 bp, Artificial Sequence
  Description of Artificial Sequence: Synthetic oligonucleotide
  Target: LAMA2; (+) strand; PAM type: YTN; PAM sequence: TTT
tagtacacagtccagatgtt

SEQ ID NO: 349062 - DNA, 20 bp, Artificial Sequence
  Description of Artificial Sequence: Synthetic oligonucleotide
  Target: LAMA2; (+) strand; PAM type: YTN; PAM sequence: TTT
agtacacagtccagatgttt

SEQ ID NO: 349063 - DNA, 20 bp, Artificial Sequence
  Description of Artificial Sequence: Synthetic oligonucleotide
  Target: LAMA2; (+) strand; PAM type: YTN; PAM sequence: TTA
gtacacagtccagatgtttt

SEQ ID NO: 349064 - DNA, 20 bp, Artificial Sequence
  Description of Artificial Sequence: Synthetic oligonucleotide
  Target: LAMA2; (+) strand; PAM type: YTN; PAM sequence: TTT
tctcttttcttcatagtacc

SEQ ID NO: 349065 - DNA, 20 bp, Artificial Sequence
  Description of Artificial Sequence: Synthetic oligonucleotide
  Target: LAMA2; (+) strand; PAM type: YTN; PAM sequence: TTT
ctcttttcttcatagtacct

SEQ ID NO: 349066 - DNA, 20 bp, Artificial Sequence
  Description of Artificial Sequence: Synthetic oligonucleotide
  Target: LAMA2; (+) strand; PAM type: YTN; PAM sequence: TTC
tcttttcttcatagtacctt

SEQ ID NO: 349067 - DNA, 20 bp, Artificial Sequence
  Description of Artificial Sequence: Synthetic oligonucleotide
  Target: LAMA2; (+) strand; PAM type: YTN; PAM sequence: CTC
ttttcttcatagtaccttta

SEQ ID NO: 349068 - DNA, 20 bp, Artificial Sequence
  Description of Artificial Sequence: Synthetic oligonucleotide
  Target: LAMA2; (+) strand; PAM type: YTN; PAM sequence: CTT
ttcttcatagtacctttaga

SEQ ID NO: 349069 - DNA, 20 bp, Artificial Sequence
  Description of Artificial Sequence: Synthetic oligonucleotide
  Target: LAMA2; (+) strand; PAM type: YTN; PAM sequence: TTT
tcttcatagtacctttagag

SEQ ID NO: 349070 - DNA, 20 bp, Artificial Sequence
  Description of Artificial Sequence: Synthetic oligonucleotide
  Target: LAMA2; (+) strand; PAM type: YTN; PAM sequence: TTT
cttcatagtacctttagaga

SEQ ID NO: 349071 - DNA, 20 bp, Artificial Sequence
  Description of Artificial Sequence: Synthetic oligonucleotide
  Target: LAMA2; (+) strand; PAM type: YTN; PAM sequence: TTC
ttcatagtacctttagagag

SEQ ID NO: 349072 - DNA, 20 bp, Artificial Sequence
  Description of Artificial Sequence: Synthetic oligonucleotide
  Target: LAMA2; (+) strand; PAM type: YTN; PAM sequence: CTT
catagtacctttagagagag

SEQ ID NO: 349073 - DNA, 20 bp, Artificial Sequence
  Description of Artificial Sequence: Synthetic oligonucleotide
  Target: LAMA2; (+) strand; PAM type: YTN; PAM sequence: TTC
atagtacctttagagagagg

SEQ ID NO: 349074 - DNA, 20 bp, Artificial Sequence
  Description of Artificial Sequence: Synthetic oligonucleotide
  Target: LAMA2; (+) strand; PAM type: YTN; PAM sequence: CTT
tagagagaggcttcctttat

SEQ ID NO: 349075 - DNA, 20 bp, Artificial Sequence
  Description of Artificial Sequence: Synthetic oligonucleotide
  Target: LAMA2; (+) strand; PAM type: YTN; PAM sequence: TTT
agagagaggcttcctttatg

SEQ ID NO: 349076 - DNA, 20 bp, Artificial Sequence
  Description of Artificial Sequence: Synthetic oligonucleotide
  Target: LAMA2; (+) strand; PAM type: YTN; PAM sequence: TTA
gagagaggcttcctttatgg

SEQ ID NO: 349077 - DNA, 20 bp, Artificial Sequence
  Description of Artificial Sequence: Synthetic oligonucleotide
  Target: LAMA2; (+) strand; PAM type: YTN; PAM sequence: CTT
cctttatggttctaaatgag

SEQ ID NO: 349078 - DNA, 20 bp, Artificial Sequence
  Description of Artificial Sequence: Synthetic oligonucleotide
  Target: LAMA2; (+) strand; PAM type: YTN; PAM sequence: TTC
ctttatggttctaaatgagg

SEQ ID NO: 349079 - DNA, 20 bp, Artificial Sequence
  Description of Artificial Sequence: Synthetic oligonucleotide
  Target: LAMA2; (+) strand; PAM type: YTN; PAM sequence: CTT
tatggttctaaatgaggcta

SEQ ID NO: 349080 - DNA, 20 bp, Artificial Sequence
  Description of Artificial Sequence: Synthetic oligonucleotide
  Target: LAMA2; (+) strand; PAM type: YTN; PAM sequence: TTT
atggttctaaatgaggctaa

SEQ ID NO: 349081 - DNA, 20 bp, Artificial Sequence
  Description of Artificial Sequence: Synthetic oligonucleotide
  Target: LAMA2; (+) strand; PAM type: YTN; PAM sequence: TTA
tggttctaaatgaggctaaa

SEQ ID NO: 349082 - DNA, 20 bp, Artificial Sequence
  Description of Artificial Sequence: Synthetic oligonucleotide
  Target: LAMA2; (+) strand; PAM type: YTN; PAM sequence: TTC
taaatgaggctaaaatttgt

SEQ ID NO: 349083 - DNA, 20 bp, Artificial Sequence
  Description of Artificial Sequence: Synthetic oligonucleotide
  Target: LAMA2; (+) strand; PAM type: YTN; PAM sequence: CTA
aatgaggctaaaatttgtgc

SEQ ID NO: 349084 - DNA, 20 bp, Artificial Sequence
  Description of Artificial Sequence: Synthetic oligonucleotide
  Target: LAMA2; (+) strand; PAM type: YTN; PAM sequence: CTA
aaatttgtgcttcctccctc

SEQ ID NO: 349085 - DNA, 20 bp, Artificial Sequence
  Description of Artificial Sequence: Synthetic oligonucleotide
  Target: LAMA2; (+) strand; PAM type: YTN; PAM sequence: TTT
gtgcttcctccctctttttg

SEQ ID NO: 349086 - DNA, 20 bp, Artificial Sequence
  Description of Artificial Sequence: Synthetic oligonucleotide
  Target: LAMA2; (+) strand; PAM type: YTN; PAM sequence: TTG
tgcttcctccctctttttga

SEQ ID NO: 349087 - DNA, 20 bp, Artificial Sequence
  Description of Artificial Sequence: Synthetic oligonucleotide
  Target: LAMA2; (+) strand; PAM type: YTN; PAM sequence: CTT
cctccctctttttgactaga

SEQ ID NO: 349088 - DNA, 20 bp, Artificial Sequence
  Description of Artificial Sequence: Synthetic oligonucleotide
  Target: LAMA2; (+) strand; PAM type: YTN; PAM sequence: TTC
ctccctctttttgactagaa

SEQ ID NO: 349089 - DNA, 20 bp, Artificial Sequence
  Description of Artificial Sequence: Synthetic oligonucleotide
  Target: LAMA2; (+) strand; PAM type: YTN; PAM sequence: CTC
cctctttttgactagaaatc

SEQ ID NO: 349090 - DNA, 20 bp, Artificial Sequence
  Description of Artificial Sequence: Synthetic oligonucleotide
  Target: LAMA2; (+) strand; PAM type: YTN; PAM sequence: CTC
tttttgactagaaatctcgc

SEQ ID NO: 349091 - DNA, 20 bp, Artificial Sequence
  Description of Artificial Sequence: Synthetic oligonucleotide
  Target: LAMA2; (+) strand; PAM type: YTN; PAM sequence: CTT
tttgactagaaatctcgctg

SEQ ID NO: 349092 - DNA, 20 bp, Artificial Sequence
  Description of Artificial Sequence: Synthetic oligonucleotide
  Target: LAMA2; (+) strand; PAM type: YTN; PAM sequence: TTT
ttgactagaaatctcgctgt

SEQ ID NO: 349093 - DNA, 20 bp, Artificial Sequence
  Description of Artificial Sequence: Synthetic oligonucleotide
  Target: LAMA2; (+) strand; PAM type: YTN; PAM sequence: TTT
tgactagaaatctcgctgtg

SEQ ID NO: 349094 - DNA, 20 bp, Artificial Sequence
  Description of Artificial Sequence: Synthetic oligonucleotide
  Target: LAMA2; (+) strand; PAM type: YTN; PAM sequence: TTT
gactagaaatctcgctgtga

SEQ ID NO: 349095 - DNA, 20 bp, Artificial Sequence
  Description of Artificial Sequence: Synthetic oligonucleotide
  Target: LAMA2; (+) strand; PAM type: YTN; PAM sequence: TTG
actagaaatctcgctgtgag

SEQ ID NO: 349096 - DNA, 20 bp, Artificial Sequence
  Description of Artificial Sequence: Synthetic oligonucleotide
  Target: LAMA2; (+) strand; PAM type: YTN; PAM sequence: CTA
gaaatctcgctgtgagtgtg

SEQ ID NO: 349097 - DNA, 20 bp, Artificial Sequence
  Description of Artificial Sequence: Synthetic oligonucleotide
  Target: LAMA2; (+) strand; PAM type: YTN; PAM sequence: CTC
gctgtgagtgtgagcataac

SEQ ID NO: 349098 - DNA, 20 bp, Artificial Sequence
  Description of Artificial Sequence: Synthetic oligonucleotide
  Target: LAMA2; (+) strand; PAM type: YTN; PAM sequence: CTG
tgagtgtgagcataacacat

SEQ ID NO: 349099 - DNA, 20 bp, Artificial Sequence
  Description of Artificial Sequence: Synthetic oligonucleotide
  Target: LAMA2; (+) strand; PAM type: YTN; PAM sequence: CTG
tgatcagtgctgtccaggat

SEQ ID NO: 349100 - DNA, 20 bp, Artificial Sequence
  Description of Artificial Sequence: Synthetic oligonucleotide
  Target: LAMA2; (+) strand; PAM type: YTN; PAM sequence: CTG
tccaggattccatcagaaac

SEQ ID NO: 349101 - DNA, 20 bp, Artificial Sequence
  Description of Artificial Sequence: Synthetic oligonucleotide
  Target: LAMA2; (+) strand; PAM type: YTN; PAM sequence: TTC
catcagaaaccctggagagc

SEQ ID NO: 349102 - DNA, 20 bp, Artificial Sequence
  Description of Artificial Sequence: Synthetic oligonucleotide
  Target: LAMA2; (+) strand; PAM type: YTN; PAM sequence: CTG
gagagctggaacttttctaa

SEQ ID NO: 349103 - DNA, 20 bp, Artificial Sequence
  Description of Artificial Sequence: Synthetic oligonucleotide
  Target: LAMA2; (+) strand; PAM type: YTN; PAM sequence: CTG
gaacttttctaactaaaact

SEQ ID NO: 349104 - DNA, 20 bp, Artificial Sequence
  Description of Artificial Sequence: Synthetic oligonucleotide
  Target: LAMA2; (+) strand; PAM type: YTN; PAM sequence: CTT
ttctaactaaaactgaatgt

SEQ ID NO: 349105 - DNA, 20 bp, Artificial Sequence
  Description of Artificial Sequence: Synthetic oligonucleotide
  Target: LAMA2; (+) strand; PAM type: YTN; PAM sequence: TTT
tctaactaaaactgaatgtg

SEQ ID NO: 349106 - DNA, 20 bp, Artificial Sequence
  Description of Artificial Sequence: Synthetic oligonucleotide
  Target: LAMA2; (+) strand; PAM type: YTN; PAM sequence: TTT
ctaactaaaactgaatgtga

SEQ ID NO: 349107 - DNA, 20 bp, Artificial Sequence
  Description of Artificial Sequence: Synthetic oligonucleotide
  Target: LAMA2; (+) strand; PAM type: YTN; PAM sequence: TTC
taactaaaactgaatgtgaa

SEQ ID NO: 349108 - DNA, 20 bp, Artificial Sequence
  Description of Artificial Sequence: Synthetic oligonucleotide
  Target: LAMA2; (+) strand; PAM type: YTN; PAM sequence: CTA
actaaaactgaatgtgaagg

SEQ ID NO: 349109 - DNA, 20 bp, Artificial Sequence
  Description of Artificial Sequence: Synthetic oligonucleotide
  Target: LAMA2; (+) strand; PAM type: YTN; PAM sequence: CTA
aaactgaatgtgaaggtatg

SEQ ID NO: 349110 - DNA, 20 bp, Artificial Sequence
  Description of Artificial Sequence: Synthetic oligonucleotide
  Target: LAMA2; (+) strand; PAM type: YTN; PAM sequence: CTG
aatgtgaaggtatgttcttt

SEQ ID NO: 349111 - DNA, 20 bp, Artificial Sequence
  Description of Artificial Sequence: Synthetic oligonucleotide
  Target: LAMA2; (+) strand; PAM type: YTN; PAM sequence: TTC
tttagaagccaacaaaatat

SEQ ID NO: 349112 - DNA, 20 bp, Artificial Sequence
  Description of Artificial Sequence: Synthetic oligonucleotide
  Target: LAMA2; (+) strand; PAM type: YTN; PAM sequence: CTT
tagaagccaacaaaatatgt

SEQ ID NO: 349113 - DNA, 20 bp, Artificial Sequence
  Description of Artificial Sequence: Synthetic oligonucleotide
  Target: LAMA2; (+) strand; PAM type: YTN; PAM sequence: TTT
agaagccaacaaaatatgtc

SEQ ID NO: 349114 - DNA, 20 bp, Artificial Sequence
  Description of Artificial Sequence: Synthetic oligonucleotide
  Target: LAMA2; (+) strand; PAM type: YTN; PAM sequence: TTA
gaagccaacaaaatatgtca

SEQ ID NO: 349115 - DNA, 20 bp, Artificial Sequence
  Description of Artificial Sequence: Synthetic oligonucleotide
  Target: LAMA2; (+) strand; PAM type: YTN; PAM sequence: TTC
ttcctttccaagaaaaaaag

SEQ ID NO: 349116 - DNA, 20 bp, Artificial Sequence
  Description of Artificial Sequence: Synthetic oligonucleotide
  Target: LAMA2; (+) strand; PAM type: YTN; PAM sequence: CTT
cctttccaagaaaaaaagcc

SEQ ID NO: 349117 - DNA, 20 bp, Artificial Sequence
  Description of Artificial Sequence: Synthetic oligonucleotide
  Target: LAMA2; (+) strand; PAM type: YTN; PAM sequence: TTC
ctttccaagaaaaaaagcca

SEQ ID NO: 349118 - DNA, 20 bp, Artificial Sequence
  Description of Artificial Sequence: Synthetic oligonucleotide
  Target: LAMA2; (+) strand; PAM type: YTN; PAM sequence: CTT
tccaagaaaaaaagccagta

SEQ ID NO: 349119 - DNA, 20 bp, Artificial Sequence
  Description of Artificial Sequence: Synthetic oligonucleotide
  Target: LAMA2; (+) strand; PAM type: YTN; PAM sequence: TTT
ccaagaaaaaaagccagtaa

SEQ ID NO: 349120 - DNA, 20 bp, Artificial Sequence
  Description of Artificial Sequence: Synthetic oligonucleotide
  Target: LAMA2; (+) strand; PAM type: YTN; PAM sequence: TTC
caagaaaaaaagccagtaat

SEQ ID NO: 349121 - DNA, 20 bp, Artificial Sequence
  Description of Artificial Sequence: Synthetic oligonucleotide
  Target: LAMA2; (+) strand; PAM type: YTN; PAM sequence: CTG
gttatgcaaatgtgtcaaca

SEQ ID NO: 349122 - DNA, 20 bp, Artificial Sequence
  Description of Artificial Sequence: Synthetic oligonucleotide
  Target: LAMA2; (+) strand; PAM type: YTN; PAM sequence: TTA
tgcaaatgtgtcaacaaata

SEQ ID NO: 349123 - DNA, 20 bp, Artificial Sequence
  Description of Artificial Sequence: Synthetic oligonucleotide
  Target: LAMA2; (+) strand; PAM type: YTN; PAM sequence: CTC
atttatattatcacttcgaa

SEQ ID NO: 349124 - DNA, 20 bp, Artificial Sequence
  Description of Artificial Sequence: Synthetic oligonucleotide
  Target: LAMA2; (+) strand; PAM type: YTN; PAM sequence: TTT
atattatcacttcgaagaca

SEQ ID NO: 349125 - DNA, 20 bp, Artificial Sequence
  Description of Artificial Sequence: Synthetic oligonucleotide
  Target: LAMA2; (+) strand; PAM type: YTN; PAM sequence: TTA
tattatcacttcgaagacaa

SEQ ID NO: 349126 - DNA, 20 bp, Artificial Sequence
  Description of Artificial Sequence: Synthetic oligonucleotide
  Target: LAMA2; (+) strand; PAM type: YTN; PAM sequence: TTA
tcacttcgaagacaacccat

SEQ ID NO: 349127 - DNA, 20 bp, Artificial Sequence
  Description of Artificial Sequence: Synthetic oligonucleotide
  Target: LAMA2; (+) strand; PAM type: YTN; PAM sequence: CTT
cgaagacaacccatatgtct

SEQ ID NO: 349128 - DNA, 20 bp, Artificial Sequence
  Description of Artificial Sequence: Synthetic oligonucleotide
  Target: LAMA2; (+) strand; PAM type: YTN; PAM sequence: TTC
gaagacaacccatatgtcta

SEQ ID NO: 349129 - DNA, 20 bp, Artificial Sequence
  Description of Artificial Sequence: Synthetic oligonucleotide
  Target: LAMA2; (+) strand; PAM type: YTN; PAM sequence: CTA
gcttttcctaaagggaaata

SEQ ID NO: 349130 - DNA, 20 bp, Artificial Sequence
  Description of Artificial Sequence: Synthetic oligonucleotide
  Target: LAMA2; (+) strand; PAM type: YTN; PAM sequence: CTT
ttcctaaagggaaatatcta

SEQ ID NO: 349131 - DNA, 20 bp, Artificial Sequence
  Description of Artificial Sequence: Synthetic oligonucleotide
  Target: LAMA2; (+) strand; PAM type: YTN; PAM sequence: TTT
tcctaaagggaaatatctaa

SEQ ID NO: 349132 - DNA, 20 bp, Artificial Sequence
  Description of Artificial Sequence: Synthetic oligonucleotide
  Target: LAMA2; (+) strand; PAM type: YTN; PAM sequence: TTT
cctaaagggaaatatctaag

SEQ ID NO: 349133 - DNA, 20 bp, Artificial Sequence
  Description of Artificial Sequence: Synthetic oligonucleotide
  Target: LAMA2; (+) strand; PAM type: YTN; PAM sequence: TTC
ctaaagggaaatatctaaga

SEQ ID NO: 349134 - DNA, 20 bp, Artificial Sequence
  Description of Artificial Sequence: Synthetic oligonucleotide
  Target: LAMA2; (+) strand; PAM type: YTN; PAM sequence: CTA
aagggaaatatctaagaaat

SEQ ID NO: 349135 - DNA, 20 bp, Artificial Sequence
  Description of Artificial Sequence: Synthetic oligonucleotide
  Target: LAMA2; (+) strand; PAM type: YTN; PAM sequence: CTA
agaaatgtagcagatgactt

SEQ ID NO: 349136 - DNA, 20 bp, Artificial Sequence
  Description of Artificial Sequence: Synthetic oligonucleotide
  Target: LAMA2; (+) strand; PAM type: YTN; PAM sequence: CTT
tatagcctaatagtgacaac

SEQ ID NO: 349137 - DNA, 20 bp, Artificial Sequence
  Description of Artificial Sequence: Synthetic oligonucleotide
  Target: LAMA2; (+) strand; PAM type: YTN; PAM sequence: TTT
atagcctaatagtgacaact

SEQ ID NO: 349138 - DNA, 20 bp, Artificial Sequence
  Description of Artificial Sequence: Synthetic oligonucleotide
  Target: LAMA2; (+) strand; PAM type: YTN; PAM sequence: TTA
tagcctaatagtgacaactg

SEQ ID NO: 349139 - DNA, 20 bp, Artificial Sequence
  Description of Artificial Sequence: Synthetic oligonucleotide
  Target: LAMA2; (+) strand; PAM type: YTN; PAM sequence: CTA
atagtgacaactggtctttt

SEQ ID NO: 349140 - DNA, 20 bp, Artificial Sequence
  Description of Artificial Sequence: Synthetic oligonucleotide
  Target: LAMA2; (+) strand; PAM type: YTN; PAM sequence: CTG
gtctttttaggtgacaggta

SEQ ID NO: 349141 - DNA, 20 bp, Artificial Sequence
  Description of Artificial Sequence: Synthetic oligonucleotide
  Target: LAMA2; (+) strand; PAM type: YTN; PAM sequence: CTT
tttaggtgacaggtatcatg

SEQ ID NO: 349142 - DNA, 20 bp, Artificial Sequence
  Description of Artificial Sequence: Synthetic oligonucleotide
  Target: LAMA2; (+) strand; PAM type: YTN; PAM sequence: TTT
ttaggtgacaggtatcatgg

SEQ ID NO: 349143 - DNA, 20 bp, Artificial Sequence
  Description of Artificial Sequence: Synthetic oligonucleotide
  Target: LAMA2; (+) strand; PAM type: YTN; PAM sequence: TTT
taggtgacaggtatcatgga

SEQ ID NO: 349144 - DNA, 20 bp, Artificial Sequence
  Description of Artificial Sequence: Synthetic oligonucleotide
  Target: LAMA2; (+) strand; PAM type: YTN; PAM sequence: TTT
aggtgacaggtatcatggag

SEQ ID NO: 349145 - DNA, 20 bp, Artificial Sequence
  Description of Artificial Sequence: Synthetic oligonucleotide
  Target: LAMA2; (+) strand; PAM type: YTN; PAM sequence: TTA
ggtgacaggtatcatggaga

SEQ ID NO: 349146 - DNA, 20 bp, Artificial Sequence
  Description of Artificial Sequence: Synthetic oligonucleotide
  Target: LAMA2; (+) strand; PAM type: YTN; PAM sequence: CTG
tgtttctggagattttctca

SEQ ID NO: 349147 - DNA, 20 bp, Artificial Sequence
  Description of Artificial Sequence: Synthetic oligonucleotide
  Target: LAMA2; (+) strand; PAM type: YTN; PAM sequence: TTT
ctggagattttctcaaccca

SEQ ID NO: 349148 - DNA, 20 bp, Artificial Sequence
  Description of Artificial Sequence: Synthetic oligonucleotide
  Target: LAMA2; (+) strand; PAM type: YTN; PAM sequence: TTC
tggagattttctcaacccaa

SEQ ID NO: 349149 - DNA, 20 bp, Artificial Sequence
  Description of Artificial Sequence: Synthetic oligonucleotide
  Target: LAMA2; (+) strand; PAM type: YTN; PAM sequence: CTG
gagattttctcaacccaaga

SEQ ID NO: 349150 - DNA, 20 bp, Artificial Sequence
  Description of Artificial Sequence: Synthetic oligonucleotide
  Target: LAMA2; (+) strand; PAM type: YTN; PAM sequence: TTT
tctcaacccaagaaaagacc

SEQ ID NO: 349151 - DNA, 20 bp, Artificial Sequence
  Description of Artificial Sequence: Synthetic oligonucleotide
  Target: LAMA2; (+) strand; PAM type: YTN; PAM sequence: TTT
ctcaacccaagaaaagacct

SEQ ID NO: 349152 - DNA, 20 bp, Artificial Sequence
  Description of Artificial Sequence: Synthetic oligonucleotide
  Target: LAMA2; (+) strand; PAM type: YTN; PAM sequence: TTC
tcaacccaagaaaagaccta

SEQ ID NO: 349153 - DNA, 20 bp, Artificial Sequence
  Description of Artificial Sequence: Synthetic oligonucleotide
  Target: LAMA2; (+) strand; PAM type: YTN; PAM sequence: CTC
aacccaagaaaagacctaaa

SEQ ID NO: 349154 - DNA, 20 bp, Artificial Sequence
  Description of Artificial Sequence: Synthetic oligonucleotide
  Target: LAMA2; (+) strand; PAM type: YTN; PAM sequence: CTA
aaaatagtcttgggctgaac

SEQ ID NO: 349155 - DNA, 20 bp, Artificial Sequence
  Description of Artificial Sequence: Synthetic oligonucleotide
  Target: LAMA2; (+) strand; PAM type: YTN; PAM sequence: CTT
gggctgaactgcaaacctaa

SEQ ID NO: 349156 - DNA, 20 bp, Artificial Sequence
  Description of Artificial Sequence: Synthetic oligonucleotide
  Target: LAMA2; (+) strand; PAM type: YTN; PAM sequence: TTG
ggctgaactgcaaacctaaa

SEQ ID NO: 349157 - DNA, 20 bp, Artificial Sequence
  Description of Artificial Sequence: Synthetic oligonucleotide
  Target: LAMA2; (+) strand; PAM type: YTN; PAM sequence: CTG
aactgcaaacctaaactagt

SEQ ID NO: 349158 - DNA, 20 bp, Artificial Sequence
  Description of Artificial Sequence: Synthetic oligonucleotide
  Target: LAMA2; (+) strand; PAM type: YTN; PAM sequence: CTG
caaacctaaactagtatgaa

SEQ ID NO: 349159 - DNA, 20 bp, Artificial Sequence
  Description of Artificial Sequence: Synthetic oligonucleotide
  Target: LAMA2; (+) strand; PAM type: YTN; PAM sequence: CTA
aactagtatgaagtccaatt

SEQ ID NO: 349160 - DNA, 20 bp, Artificial Sequence
  Description of Artificial Sequence: Synthetic oligonucleotide
  Target: LAMA2; (+) strand; PAM type: YTN; PAM sequence: CTA
gtatgaagtccaattcaact

SEQ ID NO: 349161 - DNA, 20 bp, Artificial Sequence
  Description of Artificial Sequence: Synthetic oligonucleotide
  Target: LAMA2; (+) strand; PAM type: YTN; PAM sequence: TTC
aactgaatgcaaatattaat

SEQ ID NO: 349162 - DNA, 20 bp, Artificial Sequence
  Description of Artificial Sequence: Synthetic oligonucleotide
  Target: LAMA2; (+) strand; PAM type: YTN; PAM sequence: CTG
aatgcaaatattaatattac

SEQ ID NO: 349163 - DNA, 20 bp, Artificial Sequence
  Description of Artificial Sequence: Synthetic oligonucleotide
  Target: LAMA2; (+) strand; PAM type: YTN; PAM sequence: TTA
atattacagtaaatcagccc

SEQ ID NO: 349164 - DNA, 20 bp, Artificial Sequence
  Description of Artificial Sequence: Synthetic oligonucleotide
  Target: LAMA2; (+) strand; PAM type: YTN; PAM sequence: TTA
cagtaaatcagccctaacca

SEQ ID NO: 349165 - DNA, 20 bp, Artificial Sequence
  Description of Artificial Sequence: Synthetic oligonucleotide
  Target: LAMA2; (+) strand; PAM type: YTN; PAM sequence: CTA
accacatttttttcagctca

SEQ ID NO: 349166 - DNA, 20 bp, Artificial Sequence
  Description of Artificial Sequence: Synthetic oligonucleotide
  Target: LAMA2; (+) strand; PAM type: YTN; PAM sequence: TTT
ttttcagctcactaagtata

SEQ ID NO: 349167 - DNA, 20 bp, Artificial Sequence
  Description of Artificial Sequence: Synthetic oligonucleotide
  Target: LAMA2; (+) strand; PAM type: YTN; PAM sequence: TTT
tttcagctcactaagtatat

SEQ ID NO: 349168 - DNA, 20 bp, Artificial Sequence
  Description of Artificial Sequence: Synthetic oligonucleotide
  Target: LAMA2; (+) strand; PAM type: YTN; PAM sequence: TTT
ttcagctcactaagtatata

SEQ ID NO: 349169 - DNA, 20 bp, Artificial Sequence
  Description of Artificial Sequence: Synthetic oligonucleotide
  Target: LAMA2; (+) strand; PAM type: YTN; PAM sequence: TTT
tcagctcactaagtatatat

SEQ ID NO: 349170 - DNA, 20 bp, Artificial Sequence
  Description of Artificial Sequence: Synthetic oligonucleotide
  Target: LAMA2; (+) strand; PAM type: YTN; PAM sequence: TTT
cagctcactaagtatatatg

SEQ ID NO: 349171 - DNA, 20 bp, Artificial Sequence
  Description of Artificial Sequence: Synthetic oligonucleotide
  Target: LAMA2; (+) strand; PAM type: YTN; PAM sequence: TTC
agctcactaagtatatatgg

SEQ ID NO: 349172 - DNA, 20 bp, Artificial Sequence
  Description of Artificial Sequence: Synthetic oligonucleotide
  Target: LAMA2; (+) strand; PAM type: YTN; PAM sequence: CTC
actaagtatatatggccttc

SEQ ID NO: 349173 - DNA, 20 bp, Artificial Sequence
  Description of Artificial Sequence: Synthetic oligonucleotide
  Target: LAMA2; (+) strand; PAM type: YTN; PAM sequence: CTA
agtatatatggccttcaaaa

SEQ ID NO: 349174 - DNA, 20 bp, Artificial Sequence
  Description of Artificial Sequence: Synthetic oligonucleotide
  Target: LAMA2; (+) strand; PAM type: YTN; PAM sequence: CTT
caaaaacagcttgatagaca

SEQ ID NO: 349175 - DNA, 20 bp, Artificial Sequence
  Description of Artificial Sequence: Synthetic oligonucleotide
  Target: LAMA2; (+) strand; PAM type: YTN; PAM sequence: TTC
aaaaacagcttgatagacat

SEQ ID NO: 349176 - DNA, 20 bp, Artificial Sequence
  Description of Artificial Sequence: Synthetic oligonucleotide
  Target: LAMA2; (+) strand; PAM type: YTN; PAM sequence: CTT
gatagacattttaaattaat

SEQ ID NO: 349177 - DNA, 20 bp, Artificial Sequence
  Description of Artificial Sequence: Synthetic oligonucleotide
  Target: LAMA2; (+) strand; PAM type: YTN; PAM sequence: TTG
atagacattttaaattaata

SEQ ID NO: 349178 - DNA, 20 bp, Artificial Sequence
  Description of Artificial Sequence: Synthetic oligonucleotide
  Target: LAMA2; (+) strand; PAM type: YTN; PAM sequence: TTT
taaattaataccaacactat

SEQ ID NO: 349179 - DNA, 20 bp, Artificial Sequence
  Description of Artificial Sequence: Synthetic oligonucleotide
  Target: LAMA2; (+) strand; PAM type: YTN; PAM sequence: TTT
aaattaataccaacactata

SEQ ID NO: 349180 - DNA, 20 bp, Artificial Sequence
  Description of Artificial Sequence: Synthetic oligonucleotide
  Target: LAMA2; (+) strand; PAM type: YTN; PAM sequence: TTA
aattaataccaacactatat

SEQ ID NO: 349181 - DNA, 20 bp, Artificial Sequence
  Description of Artificial Sequence: Synthetic oligonucleotide
  Target: LAMA2; (+) strand; PAM type: YTN; PAM sequence: TTA
ataccaacactatatatcct

SEQ ID NO: 349182 - DNA, 20 bp, Artificial Sequence
  Description of Artificial Sequence: Synthetic oligonucleotide
  Target: LAMA2; (+) strand; PAM type: YTN; PAM sequence: CTA
tatatcctttgaataacaaa

SEQ ID NO: 349183 - DNA, 20 bp, Artificial Sequence
  Description of Artificial Sequence: Synthetic oligonucleotide
  Target: LAMA2; (+) strand; PAM type: YTN; PAM sequence: CTT
tgaataacaaattaactcaa

SEQ ID NO: 349184 - DNA, 20 bp, Artificial Sequence
  Description of Artificial Sequence: Synthetic oligonucleotide
  Target: LAMA2; (+) strand; PAM type: YTN; PAM sequence: TTT
gaataacaaattaactcaac

SEQ ID NO: 349185 - DNA, 20 bp, Artificial Sequence
  Description of Artificial Sequence: Synthetic oligonucleotide
  Target: LAMA2; (+) strand; PAM type: YTN; PAM sequence: TTG
aataacaaattaactcaact

SEQ ID NO: 349186 - DNA, 20 bp, Artificial Sequence
  Description of Artificial Sequence: Synthetic oligonucleotide
  Target: LAMA2; (+) strand; PAM type: YTN; PAM sequence: TTA
actcaactcacatttatcat

SEQ ID NO: 349187 - DNA, 20 bp, Artificial Sequence
  Description of Artificial Sequence: Synthetic oligonucleotide
  Target: LAMA2; (+) strand; PAM type: YTN; PAM sequence: CTC
aactcacatttatcatgtac

SEQ ID NO: 349188 - DNA, 20 bp, Artificial Sequence
  Description of Artificial Sequence: Synthetic oligonucleotide
  Target: LAMA2; (+) strand; PAM type: YTN; PAM sequence: CTC
acatttatcatgtacaatgt

SEQ ID NO: 349189 - DNA, 20 bp, Artificial Sequence
  Description of Artificial Sequence: Synthetic oligonucleotide
  Target: LAMA2; (+) strand; PAM type: YTN; PAM sequence: TTT
atcatgtacaatgtgtcaga

SEQ ID NO: 349190 - DNA, 20 bp, Artificial Sequence
  Description of Artificial Sequence: Synthetic oligonucleotide
  Target: LAMA2; (+) strand; PAM type: YTN; PAM sequence: TTA
tcatgtacaatgtgtcagac

SEQ ID NO: 349191 - DNA, 20 bp, Artificial Sequence
  Description of Artificial Sequence: Synthetic oligonucleotide
  Target: LAMA2; (+) strand; PAM type: YTN; PAM sequence: CTT
taaaactattgaatcataac

SEQ ID NO: 349192 - DNA, 20 bp, Artificial Sequence
  Description of Artificial Sequence: Synthetic oligonucleotide
  Target: LAMA2; (+) strand; PAM type: YTN; PAM sequence: TTT
aaaactattgaatcataaca

SEQ ID NO: 349193 - DNA, 20 bp, Artificial Sequence
  Description of Artificial Sequence: Synthetic oligonucleotide
  Target: LAMA2; (+) strand; PAM type: YTN; PAM sequence: TTA
aaactattgaatcataacac

SEQ ID NO: 349194 - DNA, 20 bp, Artificial Sequence
  Description of Artificial Sequence: Synthetic oligonucleotide
  Target: LAMA2; (+) strand; PAM type: YTN; PAM sequence: CTA
ttgaatcataacacacctta

SEQ ID NO: 349195 - DNA, 20 bp, Artificial Sequence
  Description of Artificial Sequence: Synthetic oligonucleotide
  Target: LAMA2; (+) strand; PAM type: YTN; PAM sequence: TTG
aatcataacacaccttaatc

SEQ ID NO: 349196 - DNA, 20 bp, Artificial Sequence
  Description of Artificial Sequence: Synthetic oligonucleotide
  Target: LAMA2; (+) strand; PAM type: YTN; PAM sequence: CTT
aatcacaaaatgttccccac

SEQ ID NO: 349197 - DNA, 20 bp, Artificial Sequence
  Description of Artificial Sequence: Synthetic oligonucleotide
  Target: LAMA2; (+) strand; PAM type: YTN; PAM sequence: TTA
atcacaaaatgttccccacc

SEQ ID NO: 349198 - DNA, 20 bp, Artificial Sequence
  Description of Artificial Sequence: Synthetic oligonucleotide
  Target: LAMA2; (+) strand; PAM type: YTN; PAM sequence: TTC
cccacctataagatataaag

SEQ ID NO: 349199 - DNA, 20 bp, Artificial Sequence
  Description of Artificial Sequence: Synthetic oligonucleotide
  Target: LAMA2; (+) strand; PAM type: YTN; PAM sequence: CTA
taagatataaagtcggcctt

SEQ ID NO: 349200 - DNA, 20 bp, Artificial Sequence
  Description of Artificial Sequence: Synthetic oligonucleotide
  Target: LAMA2; (+) strand; PAM type: YTN; PAM sequence: CTT
ccatatccatggtttctcca

SEQ ID NO: 349201 - DNA, 20 bp, Artificial Sequence
  Description of Artificial Sequence: Synthetic oligonucleotide
  Target: LAMA2; (+) strand; PAM type: YTN; PAM sequence: TTC
catatccatggtttctccat

SEQ ID NO: 349202 - DNA, 20 bp, Artificial Sequence
  Description of Artificial Sequence: Synthetic oligonucleotide
  Target: LAMA2; (+) strand; PAM type: YTN; PAM sequence: TTT
ctccatccatgggtctaacc

SEQ ID NO: 349203 - DNA, 20 bp, Artificial Sequence
  Description of Artificial Sequence: Synthetic oligonucleotide
  Target: LAMA2; (+) strand; PAM type: YTN; PAM sequence: TTC
tccatccatgggtctaacca

SEQ ID NO: 349204 - DNA, 20 bp, Artificial Sequence
  Description of Artificial Sequence: Synthetic oligonucleotide
  Target: LAMA2; (+) strand; PAM type: YTN; PAM sequence: CTC
catccatgggtctaaccaac

SEQ ID NO: 349205 - DNA, 20 bp, Artificial Sequence
  Description of Artificial Sequence: Synthetic oligonucleotide
  Target: LAMA2; (+) strand; PAM type: YTN; PAM sequence: CTA
accaactgcagatcaaaaat

SEQ ID NO: 349206 - DNA, 20 bp, Artificial Sequence
  Description of Artificial Sequence: Synthetic oligonucleotide
  Target: LAMA2; (+) strand; PAM type: YTN; PAM sequence: CTG
cagatcaaaaatgtttgaaa

SEQ ID NO: 349207 - DNA, 20 bp, Artificial Sequence
  Description of Artificial Sequence: Synthetic oligonucleotide
  Target: LAMA2; (+) strand; PAM type: YTN; PAM sequence: TTT
gaaaaaaagttgcatctgta

SEQ ID NO: 349208 - DNA, 20 bp, Artificial Sequence
  Description of Artificial Sequence: Synthetic oligonucleotide
  Target: LAMA2; (+) strand; PAM type: YTN; PAM sequence: TTG
aaaaaaagttgcatctgtac

SEQ ID NO: 349209 - DNA, 20 bp, Artificial Sequence
  Description of Artificial Sequence: Synthetic oligonucleotide
  Target: LAMA2; (+) strand; PAM type: YTN; PAM sequence: TTG
catctgtactgaacttgtaa

SEQ ID NO: 349210 - DNA, 20 bp, Artificial Sequence
  Description of Artificial Sequence: Synthetic oligonucleotide
  Target: LAMA2; (+) strand; PAM type: YTN; PAM sequence: CTG
tactgaacttgtaaagacct

SEQ ID NO: 349211 - DNA, 20 bp, Artificial Sequence
  Description of Artificial Sequence: Synthetic oligonucleotide
  Target: LAMA2; (+) strand; PAM type: YTN; PAM sequence: CTG
aacttgtaaagacctttttc

SEQ ID NO: 349212 - DNA, 20 bp, Artificial Sequence
  Description of Artificial Sequence: Synthetic oligonucleotide
  Target: LAMA2; (+) strand; PAM type: YTN; PAM sequence: CTT
gtaaagacctttttcttatt

SEQ ID NO: 349213 - DNA, 20 bp, Artificial Sequence
  Description of Artificial Sequence: Synthetic oligonucleotide
  Target: LAMA2; (+) strand; PAM type: YTN; PAM sequence: TTG
taaagacctttttcttatta

SEQ ID NO: 349214 - DNA, 20 bp, Artificial Sequence
  Description of Artificial Sequence: Synthetic oligonucleotide
  Target: LAMA2; (+) strand; PAM type: YTN; PAM sequence: CTT
tttcttattattatttccta

SEQ ID NO: 349215 - DNA, 20 bp, Artificial Sequence
  Description of Artificial Sequence: Synthetic oligonucleotide
  Target: LAMA2; (+) strand; PAM type: YTN; PAM sequence: TTT
ttcttattattatttcctaa

SEQ ID NO: 349216 - DNA, 20 bp, Artificial Sequence
  Description of Artificial Sequence: Synthetic oligonucleotide
  Target: LAMA2; (+) strand; PAM type: YTN; PAM sequence: TTT
tcttattattatttcctaag

SEQ ID NO: 349217 - DNA, 20 bp, Artificial Sequence
  Description of Artificial Sequence: Synthetic oligonucleotide
  Target: LAMA2; (+) strand; PAM type: YTN; PAM sequence: TTT
cttattattatttcctaagc

SEQ ID NO: 349218 - DNA, 20 bp, Artificial Sequence
  Description of Artificial Sequence: Synthetic oligonucleotide
  Target: LAMA2; (+) strand; PAM type: YTN; PAM sequence: TTC
ttattattatttcctaagca

SEQ ID NO: 349219 - DNA, 20 bp, Artificial Sequence
  Description of Artificial Sequence: Synthetic oligonucleotide
  Target: LAMA2; (+) strand; PAM type: YTN; PAM sequence: CTT
attattatttcctaagcaat

SEQ ID NO: 349220 - DNA, 20 bp, Artificial Sequence
  Description of Artificial Sequence: Synthetic oligonucleotide
  Target: LAMA2; (+) strand; PAM type: YTN; PAM sequence: TTA
ttattatttcctaagcaata

SEQ ID NO: 349221 - DNA, 20 bp, Artificial Sequence
  Description of Artificial Sequence: Synthetic oligonucleotide
  Target: LAMA2; (+) strand; PAM type: YTN; PAM sequence: TTA
ttatttcctaagcaatataa

SEQ ID NO: 349222 - DNA, 20 bp, Artificial Sequence
  Description of Artificial Sequence: Synthetic oligonucleotide
  Target: LAMA2; (+) strand; PAM type: YTN; PAM sequence: TTA
tttcctaagcaatataacaa

SEQ ID NO: 349223 - DNA, 20 bp, Artificial Sequence
  Description of Artificial Sequence: Synthetic oligonucleotide
  Target: LAMA2; (+) strand; PAM type: YTN; PAM sequence: TTT
cctaagcaatataacaacta

SEQ ID NO: 349224 - DNA, 20 bp, Artificial Sequence
  Description of Artificial Sequence: Synthetic oligonucleotide
  Target: LAMA2; (+) strand; PAM type: YTN; PAM sequence: TTC
ctaagcaatataacaactat

SEQ ID NO: 349225 - DNA, 20 bp, Artificial Sequence
  Description of Artificial Sequence: Synthetic oligonucleotide
  Target: LAMA2; (+) strand; PAM type: YTN; PAM sequence: CTA
agcaatataacaactattta

SEQ ID NO: 349226 - DNA, 20 bp, Artificial Sequence
  Description of Artificial Sequence: Synthetic oligonucleotide
  Target: LAMA2; (+) strand; PAM type: YTN; PAM sequence: CTA
tttatatagcatttacattt

SEQ ID NO: 349227 - DNA, 20 bp, Artificial Sequence
  Description of Artificial Sequence: Synthetic oligonucleotide
  Target: LAMA2; (+) strand; PAM type: YTN; PAM sequence: TTT
atatagcatttacattttgt

SEQ ID NO: 349228 - DNA, 20 bp, Artificial Sequence
  Description of Artificial Sequence: Synthetic oligonucleotide
  Target: LAMA2; (+) strand; PAM type: YTN; PAM sequence: TTA
tatagcatttacattttgtt

SEQ ID NO: 349229 - DNA, 20 bp, Artificial Sequence
  Description of Artificial Sequence: Synthetic oligonucleotide
  Target: LAMA2; (+) strand; PAM type: YTN; PAM sequence: TTT
acattttgttaggtattata

SEQ ID NO: 349230 - DNA, 20 bp, Artificial Sequence
  Description of Artificial Sequence: Synthetic oligonucleotide
  Target: LAMA2; (+) strand; PAM type: YTN; PAM sequence: TTA
cattttgttaggtattataa

SEQ ID NO: 349231 - DNA, 20 bp, Artificial Sequence
  Description of Artificial Sequence: Synthetic oligonucleotide
  Target: LAMA2; (+) strand; PAM type: YTN; PAM sequence: TTT
tgttaggtattataagtaat

SEQ ID NO: 349232 - DNA, 20 bp, Artificial Sequence
  Description of Artificial Sequence: Synthetic oligonucleotide
  Target: LAMA2; (+) strand; PAM type: YTN; PAM sequence: TTT
gttaggtattataagtaatc

SEQ ID NO: 349233 - DNA, 20 bp, Artificial Sequence
  Description of Artificial Sequence: Synthetic oligonucleotide
  Target: LAMA2; (+) strand; PAM type: YTN; PAM sequence: TTG
ttaggtattataagtaatct

SEQ ID NO: 349234 - DNA, 20 bp, Artificial Sequence
  Description of Artificial Sequence: Synthetic oligonucleotide
  Target: LAMA2; (+) strand; PAM type: YTN; PAM sequence: TTA
ggtattataagtaatctaga

SEQ ID NO: 349235 - DNA, 20 bp, Artificial Sequence
  Description of Artificial Sequence: Synthetic oligonucleotide
  Target: LAMA2; (+) strand; PAM type: YTN; PAM sequence: TTA
taagtaatctagagatgatc

SEQ ID NO: 349236 - DNA, 20 bp, Artificial Sequence
  Description of Artificial Sequence: Synthetic oligonucleotide
  Target: LAMA2; (+) strand; PAM type: YTN; PAM sequence: CTA
gagatgatctaaagtgtaca

SEQ ID NO: 349237 - DNA, 20 bp, Artificial Sequence
  Description of Artificial Sequence: Synthetic oligonucleotide
  Target: LAMA2; (+) strand; PAM type: YTN; PAM sequence: CTA
aagtgtacaggaggatgtgc

SEQ ID NO: 349238 - DNA, 20 bp, Artificial Sequence
  Description of Artificial Sequence: Synthetic oligonucleotide
  Target: LAMA2; (+) strand; PAM type: YTN; PAM sequence: CTG
tatgcaagtactatgccact

SEQ ID NO: 349239 - DNA, 20 bp, Artificial Sequence
  Description of Artificial Sequence: Synthetic oligonucleotide
  Target: LAMA2; (+) strand; PAM type: YTN; PAM sequence: CTA
tgccactgtataacaggaac

SEQ ID NO: 349240 - DNA, 20 bp, Artificial Sequence
  Description of Artificial Sequence: Synthetic oligonucleotide
  Target: LAMA2; (+) strand; PAM type: YTN; PAM sequence: CTG
tataacaggaacttgagtat

SEQ ID NO: 349241 - DNA, 20 bp, Artificial Sequence
  Description of Artificial Sequence: Synthetic oligonucleotide
  Target: LAMA2; (+) strand; PAM type: YTN; PAM sequence: CTT
gagtatccttgaatcttggt

SEQ ID NO: 349242 - DNA, 20 bp, Artificial Sequence
  Description of Artificial Sequence: Synthetic oligonucleotide
  Target: LAMA2; (+) strand; PAM type: YTN; PAM sequence: TTG
agtatccttgaatcttggtg

SEQ ID NO: 349243 - DNA, 20 bp, Artificial Sequence
  Description of Artificial Sequence: Synthetic oligonucleotide
  Target: LAMA2; (+) strand; PAM type: YTN; PAM sequence: CTT
gaatcttggtgtttgaggga

SEQ ID NO: 349244 - DNA, 20 bp, Artificial Sequence
  Description of Artificial Sequence: Synthetic oligonucleotide
  Target: LAMA2; (+) strand; PAM type: YTN; PAM sequence: TTG
aatcttggtgtttgagggag

SEQ ID NO: 349245 - DNA, 20 bp, Artificial Sequence
  Description of Artificial Sequence: Synthetic oligonucleotide
  Target: LAMA2; (+) strand; PAM type: YTN; PAM sequence: CTT
ggtgtttgagggaggtcctg

SEQ ID NO: 349246 - DNA, 20 bp, Artificial Sequence
  Description of Artificial Sequence: Synthetic oligonucleotide
  Target: LAMA2; (+) strand; PAM type: YTN; PAM sequence: TTG
gtgtttgagggaggtcctgg

SEQ ID NO: 349247 - DNA, 20 bp, Artificial Sequence
  Description of Artificial Sequence: Synthetic oligonucleotide
  Target: LAMA2; (+) strand; PAM type: YTN; PAM sequence: TTT
gagggaggtcctggaaccat

SEQ ID NO: 349248 - DNA, 20 bp, Artificial Sequence
  Description of Artificial Sequence: Synthetic oligonucleotide
  Target: LAMA2; (+) strand; PAM type: YTN; PAM sequence: TTG
agggaggtcctggaaccatt

SEQ ID NO: 349249 - DNA, 20 bp, Artificial Sequence
  Description of Artificial Sequence: Synthetic oligonucleotide
  Target: LAMA2; (+) strand; PAM type: YTN; PAM sequence: CTG
gaaccattcccatggatatt

SEQ ID NO: 349250 - DNA, 20 bp, Artificial Sequence
  Description of Artificial Sequence: Synthetic oligonucleotide
  Target: LAMA2; (+) strand; PAM type: YTN; PAM sequence: TTC
ccatggatattgagggatgg

SEQ ID NO: 349251 - DNA, 20 bp, Artificial Sequence
  Description of Artificial Sequence: Synthetic oligonucleotide
  Target: LAMA2; (+) strand; PAM type: YTN; PAM sequence: TTG
agggatggctgtattttctt

SEQ ID NO: 349252 - DNA, 20 bp, Artificial Sequence
  Description of Artificial Sequence: Synthetic oligonucleotide
  Target: LAMA2; (+) strand; PAM type: YTN; PAM sequence: CTG
tattttctttttagtttgag

SEQ ID NO: 349253 - DNA, 20 bp, Artificial Sequence
  Description of Artificial Sequence: Synthetic oligonucleotide
  Target: LAMA2; (+) strand; PAM type: YTN; PAM sequence: TTT
tctttttagtttgagattct

SEQ ID NO: 349254 - DNA, 20 bp, Artificial Sequence
  Description of Artificial Sequence: Synthetic oligonucleotide
  Target: LAMA2; (+) strand; PAM type: YTN; PAM sequence: TTT
ctttttagtttgagattctg

SEQ ID NO: 349255 - DNA, 20 bp, Artificial Sequence
  Description of Artificial Sequence: Synthetic oligonucleotide
  Target: LAMA2; (+) strand; PAM type: YTN; PAM sequence: TTC
tttttagtttgagattctgc

SEQ ID NO: 349256 - DNA, 20 bp, Artificial Sequence
  Description of Artificial Sequence: Synthetic oligonucleotide
  Target: LAMA2; (+) strand; PAM type: YTN; PAM sequence: CTT
tttagtttgagattctgcat

SEQ ID NO: 349257 - DNA, 20 bp, Artificial Sequence
  Description of Artificial Sequence: Synthetic oligonucleotide
  Target: LAMA2; (+) strand; PAM type: YTN; PAM sequence: TTT
ttagtttgagattctgcata

SEQ ID NO: 349258 - DNA, 20 bp, Artificial Sequence
  Description of Artificial Sequence: Synthetic oligonucleotide
  Target: LAMA2; (+) strand; PAM type: YTN; PAM sequence: TTT
tagtttgagattctgcatat

SEQ ID NO: 349259 - DNA, 20 bp, Artificial Sequence
  Description of Artificial Sequence: Synthetic oligonucleotide
  Target: LAMA2; (+) strand; PAM type: YTN; PAM sequence: TTT
agtttgagattctgcatata

SEQ ID NO: 349260 - DNA, 20 bp, Artificial Sequence
  Description of Artificial Sequence: Synthetic oligonucleotide
  Target: LAMA2; (+) strand; PAM type: YTN; PAM sequence: TTA
gtttgagattctgcatatat

SEQ ID NO: 349261 - DNA, 20 bp, Artificial Sequence
  Description of Artificial Sequence: Synthetic oligonucleotide
  Target: LAMA2; (+) strand; PAM type: YTN; PAM sequence: TTT
gagattctgcatatatgcta

SEQ ID NO: 349262 - DNA, 20 bp, Artificial Sequence
  Description of Artificial Sequence: Synthetic oligonucleotide
  Target: LAMA2; (+) strand; PAM type: YTN; PAM sequence: TTG
agattctgcatatatgctat

SEQ ID NO: 349263 - DNA, 20 bp, Artificial Sequence
  Description of Artificial Sequence: Synthetic oligonucleotide
  Target: LAMA2; (+) strand; PAM type: YTN; PAM sequence: TTC
tgcatatatgctattagctc

SEQ ID NO: 349264 - DNA, 20 bp, Artificial Sequence
  Description of Artificial Sequence: Synthetic oligonucleotide
  Target: LAMA2; (+) strand; PAM type: YTN; PAM sequence: CTG
catatatgctattagctctc

SEQ ID NO: 349265 - DNA, 20 bp, Artificial Sequence
  Description of Artificial Sequence: Synthetic oligonucleotide
  Target: LAMA2; (+) strand; PAM type: YTN; PAM sequence: CTA
ttagctctccttattttctg

SEQ ID NO: 349266 - DNA, 20 bp, Artificial Sequence
  Description of Artificial Sequence: Synthetic oligonucleotide
  Target: LAMA2; (+) strand; PAM type: YTN; PAM sequence: TTA
gctctccttattttctgcac

SEQ ID NO: 349267 - DNA, 20 bp, Artificial Sequence
  Description of Artificial Sequence: Synthetic oligonucleotide
  Target: LAMA2; (+) strand; PAM type: YTN; PAM sequence: CTC
tccttattttctgcactcac

SEQ ID NO: 349268 - DNA, 20 bp, Artificial Sequence
  Description of Artificial Sequence: Synthetic oligonucleotide
  Target: LAMA2; (+) strand; PAM type: YTN; PAM sequence: CTC
cttattttctgcactcactt

SEQ ID NO: 349269 - DNA, 20 bp, Artificial Sequence
  Description of Artificial Sequence: Synthetic oligonucleotide
  Target: LAMA2; (+) strand; PAM type: YTN; PAM sequence: CTT
attttctgcactcacttcat

SEQ ID NO: 349270 - DNA, 20 bp, Artificial Sequence
  Description of Artificial Sequence: Synthetic oligonucleotide
  Target: LAMA2; (+) strand; PAM type: YTN; PAM sequence: TTA
ttttctgcactcacttcatt

SEQ ID NO: 349271 - DNA, 20 bp, Artificial Sequence
  Description of Artificial Sequence: Synthetic oligonucleotide
  Target: LAMA2; (+) strand; PAM type: YTN; PAM sequence: TTT
tctgcactcacttcatttgc

SEQ ID NO: 349272 - DNA, 20 bp, Artificial Sequence
  Description of Artificial Sequence: Synthetic oligonucleotide
  Target: LAMA2; (+) strand; PAM type: YTN; PAM sequence: TTT
ctgcactcacttcatttgct

SEQ ID NO: 349273 - DNA, 20 bp, Artificial Sequence
  Description of Artificial Sequence: Synthetic oligonucleotide
  Target: LAMA2; (+) strand; PAM type: YTN; PAM sequence: TTC
tgcactcacttcatttgctt

SEQ ID NO: 349274 - DNA, 20 bp, Artificial Sequence
  Description of Artificial Sequence: Synthetic oligonucleotide
  Target: LAMA2; (+) strand; PAM type: YTN; PAM sequence: CTG
cactcacttcatttgctttt

SEQ ID NO: 349275 - DNA, 20 bp, Artificial Sequence
  Description of Artificial Sequence: Synthetic oligonucleotide
  Target: LAMA2; (+) strand; PAM type: YTN; PAM sequence: CTC
acttcatttgcttttggatt

SEQ ID NO: 349276 - DNA, 20 bp, Artificial Sequence
  Description of Artificial Sequence: Synthetic oligonucleotide
  Target: LAMA2; (+) strand; PAM type: YTN; PAM sequence: CTT
catttgcttttggatttgtg

SEQ ID NO: 349277 - DNA, 20 bp, Artificial Sequence
  Description of Artificial Sequence: Synthetic oligonucleotide
  Target: LAMA2; (+) strand; PAM type: YTN; PAM sequence: TTC
atttgcttttggatttgtgt

SEQ ID NO: 349278 - DNA, 20 bp, Artificial Sequence
  Description of Artificial Sequence: Synthetic oligonucleotide
  Target: LAMA2; (+) strand; PAM type: YTN; PAM sequence: TTT
gcttttggatttgtgtctgc

SEQ ID NO: 349279 - DNA, 20 bp, Artificial Sequence
  Description of Artificial Sequence: Synthetic oligonucleotide
  Target: LAMA2; (+) strand; PAM type: YTN; PAM sequence: TTG
cttttggatttgtgtctgcc

SEQ ID NO: 349280 - DNA, 20 bp, Artificial Sequence
  Description of Artificial Sequence: Synthetic oligonucleotide
  Target: LAMA2; (+) strand; PAM type: YTN; PAM sequence: CTT
ttggatttgtgtctgcctgt

SEQ ID NO: 349281 - DNA, 20 bp, Artificial Sequence
  Description of Artificial Sequence: Synthetic oligonucleotide
  Target: LAMA2; (+) strand; PAM type: YTN; PAM sequence: TTT
tggatttgtgtctgcctgtt

SEQ ID NO: 349282 - DNA, 20 bp, Artificial Sequence
  Description of Artificial Sequence: Synthetic oligonucleotide
  Target: LAMA2; (+) strand; PAM type: YTN; PAM sequence: TTT
ggatttgtgtctgcctgttt

SEQ ID NO: 349283 - DNA, 20 bp, Artificial Sequence
  Description of Artificial Sequence: Synthetic oligonucleotide
  Target: LAMA2; (+) strand; PAM type: YTN; PAM sequence: TTG
gatttgtgtctgcctgttta

SEQ ID NO: 349284 - DNA, 20 bp, Artificial Sequence
  Description of Artificial Sequence: Synthetic oligonucleotide
  Target: LAMA2; (+) strand; PAM type: YTN; PAM sequence: TTT
gtgtctgcctgtttataaag

SEQ ID NO: 349285 - DNA, 20 bp, Artificial Sequence
  Description of Artificial Sequence: Synthetic oligonucleotide
  Target: LAMA2; (+) strand; PAM type: YTN; PAM sequence: TTG
tgtctgcctgtttataaaga

SEQ ID NO: 349286 - DNA, 20 bp, Artificial Sequence
  Description of Artificial Sequence: Synthetic oligonucleotide
  Target: LAMA2; (+) strand; PAM type: YTN; PAM sequence: CTG
cctgtttataaagatattat

SEQ ID NO: 349287 - DNA, 20 bp, Artificial Sequence
  Description of Artificial Sequence: Synthetic oligonucleotide
  Target: LAMA2; (+) strand; PAM type: YTN; PAM sequence: CTG
tttataaagatattatggat

SEQ ID NO: 349288 - DNA, 20 bp, Artificial Sequence
  Description of Artificial Sequence: Synthetic oligonucleotide
  Target: LAMA2; (+) strand; PAM type: YTN; PAM sequence: TTT
ataaagatattatggattag

SEQ ID NO: 349289 - DNA, 20 bp, Artificial Sequence
  Description of Artificial Sequence: Synthetic oligonucleotide
  Target: LAMA2; (+) strand; PAM type: YTN; PAM sequence: TTA
taaagatattatggattaga

SEQ ID NO: 349290 - DNA, 20 bp, Artificial Sequence
  Description of Artificial Sequence: Synthetic oligonucleotide
  Target: LAMA2; (+) strand; PAM type: YTN; PAM sequence: TTA
tggattagaaatctcccatt

SEQ ID NO: 349291 - DNA, 20 bp, Artificial Sequence
  Description of Artificial Sequence: Synthetic oligonucleotide
  Target: LAMA2; (+) strand; PAM type: YTN; PAM sequence: TTA
gaaatctcccattattacaa

SEQ ID NO: 349292 - DNA, 20 bp, Artificial Sequence
  Description of Artificial Sequence: Synthetic oligonucleotide
  Target: LAMA2; (+) strand; PAM type: YTN; PAM sequence: CTC
ccattattacaaaagcatat

SEQ ID NO: 349293 - DNA, 20 bp, Artificial Sequence
  Description of Artificial Sequence: Synthetic oligonucleotide
  Target: LAMA2; (+) strand; PAM type: YTN; PAM sequence: TTA
ttacaaaagcatatctggag

SEQ ID NO: 349294 - DNA, 20 bp, Artificial Sequence
  Description of Artificial Sequence: Synthetic oligonucleotide
  Target: LAMA2; (+) strand; PAM type: YTN; PAM sequence: TTA
caaaagcatatctggaggca

SEQ ID NO: 349295 - DNA, 20 bp, Artificial Sequence
  Description of Artificial Sequence: Synthetic oligonucleotide
  Target: LAMA2; (+) strand; PAM type: YTN; PAM sequence: CTG
gaggcatgagccaccattgg

SEQ ID NO: 349296 - DNA, 20 bp, Artificial Sequence
  Description of Artificial Sequence: Synthetic oligonucleotide
  Target: LAMA2; (+) strand; PAM type: YTN; PAM sequence: TTG
gatcatcactcaccatgcat

SEQ ID NO: 349297 - DNA, 20 bp, Artificial Sequence
  Description of Artificial Sequence: Synthetic oligonucleotide
  Target: LAMA2; (+) strand; PAM type: YTN; PAM sequence: CTC
accatgcatggtaggggacc

SEQ ID NO: 349298 - DNA, 20 bp, Artificial Sequence
  Description of Artificial Sequence: Synthetic oligonucleotide
  Target: LAMA2; (+) strand; PAM type: YTN; PAM sequence: TTG
gaagcccagccttttgtttc

SEQ ID NO: 349299 - DNA, 20 bp, Artificial Sequence
  Description of Artificial Sequence: Synthetic oligonucleotide
  Target: LAMA2; (+) strand; PAM type: YTN; PAM sequence: CTT
ttgtttccttcaactacttc

SEQ ID NO: 349300 - DNA, 20 bp, Artificial Sequence
  Description of Artificial Sequence: Synthetic oligonucleotide
  Target: LAMA2; (+) strand; PAM type: YTN; PAM sequence: TTT
tgtttccttcaactacttcc

SEQ ID NO: 349301 - DNA, 20 bp, Artificial Sequence
  Description of Artificial Sequence: Synthetic oligonucleotide
  Target: LAMA2; (+) strand; PAM type: YTN; PAM sequence: TTT
gtttccttcaactacttcca

SEQ ID NO: 349302 - DNA, 20 bp, Artificial Sequence
  Description of Artificial Sequence: Synthetic oligonucleotide
  Target: LAMA2; (+) strand; PAM type: YTN; PAM sequence: TTG
tttccttcaactacttccag

SEQ ID NO: 349303 - DNA, 20 bp, Artificial Sequence
  Description of Artificial Sequence: Synthetic oligonucleotide
  Target: LAMA2; (+) strand; PAM type: YTN; PAM sequence: TTT
ccttcaactacttccagcca

SEQ ID NO: 349304 - DNA, 20 bp, Artificial Sequence
  Description of Artificial Sequence: Synthetic oligonucleotide
  Target: LAMA2; (+) strand; PAM type: YTN; PAM sequence: TTC
cttcaactacttccagccat

SEQ ID NO: 349305 - DNA, 20 bp, Artificial Sequence
  Description of Artificial Sequence: Synthetic oligonucleotide
  Target: LAMA2; (+) strand; PAM type: YTN; PAM sequence: CTT
caactacttccagccatgtt

SEQ ID NO: 349306 - DNA, 20 bp, Artificial Sequence
  Description of Artificial Sequence: Synthetic oligonucleotide
  Target: LAMA2; (+) strand; PAM type: YTN; PAM sequence: TTC
aactacttccagccatgttc

SEQ ID NO: 349307 - DNA, 20 bp, Artificial Sequence
  Description of Artificial Sequence: Synthetic oligonucleotide
  Target: LAMA2; (+) strand; PAM type: YTN; PAM sequence: CTA
cttccagccatgttctggct

SEQ ID NO: 349308 - DNA, 20 bp, Artificial Sequence
  Description of Artificial Sequence: Synthetic oligonucleotide
  Target: LAMA2; (+) strand; PAM type: YTN; PAM sequence: CTT
ccagccatgttctggctaat

SEQ ID NO: 349309 - DNA, 20 bp, Artificial Sequence
  Description of Artificial Sequence: Synthetic oligonucleotide
  Target: LAMA2; (+) strand; PAM type: YTN; PAM sequence: TTC
cagccatgttctggctaatc

SEQ ID NO: 349310 - DNA, 20 bp, Artificial Sequence
  Description of Artificial Sequence: Synthetic oligonucleotide
  Target: LAMA2; (+) strand; PAM type: YTN; PAM sequence: TTC
tggctaatcccttagttctc

SEQ ID NO: 349311 - DNA, 20 bp, Artificial Sequence
  Description of Artificial Sequence: Synthetic oligonucleotide
  Target: LAMA2; (+) strand; PAM type: YTN; PAM sequence: CTG
gctaatcccttagttctcca

SEQ ID NO: 349312 - DNA, 20 bp, Artificial Sequence
  Description of Artificial Sequence: Synthetic oligonucleotide
  Target: LAMA2; (+) strand; PAM type: YTN; PAM sequence: CTA
atcccttagttctccacagc

SEQ ID NO: 349313 - DNA, 20 bp, Artificial Sequence
  Description of Artificial Sequence: Synthetic oligonucleotide
  Target: LAMA2; (+) strand; PAM type: YTN; PAM sequence: CTT
agttctccacagcttctcca

SEQ ID NO: 349314 - DNA, 20 bp, Artificial Sequence
  Description of Artificial Sequence: Synthetic oligonucleotide
  Target: LAMA2; (+) strand; PAM type: YTN; PAM sequence: TTA
gttctccacagcttctccat

SEQ ID NO: 349315 - DNA, 20 bp, Artificial Sequence
  Description of Artificial Sequence: Synthetic oligonucleotide
  Target: LAMA2; (+) strand; PAM type: YTN; PAM sequence: TTC
tccacagcttctccatagag

SEQ ID NO: 349316 - DNA, 20 bp, Artificial Sequence
  Description of Artificial Sequence: Synthetic oligonucleotide
  Target: LAMA2; (+) strand; PAM type: YTN; PAM sequence: CTC
cacagcttctccatagagaa

SEQ ID NO: 349317 - DNA, 20 bp, Artificial Sequence
  Description of Artificial Sequence: Synthetic oligonucleotide
  Target: LAMA2; (+) strand; PAM type: YTN; PAM sequence: CTT
ctccatagagaacagacatt

SEQ ID NO: 349318 - DNA, 20 bp, Artificial Sequence
  Description of Artificial Sequence: Synthetic oligonucleotide
  Target: LAMA2; (+) strand; PAM type: YTN; PAM sequence: TTC
tccatagagaacagacattt

SEQ ID NO: 349319 - DNA, 20 bp, Artificial Sequence
  Description of Artificial Sequence: Synthetic oligonucleotide
  Target: LAMA2; (+) strand; PAM type: YTN; PAM sequence: CTC
catagagaacagacatttgt

SEQ ID NO: 349320 - DNA, 20 bp, Artificial Sequence
  Description of Artificial Sequence: Synthetic oligonucleotide
  Target: LAMA2; (+) strand; PAM type: YTN; PAM sequence: TTT
gttcttaatagtgactttaa

SEQ ID NO: 349321 - DNA, 20 bp, Artificial Sequence
  Description of Artificial Sequence: Synthetic oligonucleotide
  Target: LAMA2; (+) strand; PAM type: YTN; PAM sequence: TTG
ttcttaatagtgactttaaa

SEQ ID NO: 349322 - DNA, 20 bp, Artificial Sequence
  Description of Artificial Sequence: Synthetic oligonucleotide
  Target: LAMA2; (+) strand; PAM type: YTN; PAM sequence: TTC
ttaatagtgactttaaatgt

SEQ ID NO: 349323 - DNA, 20 bp, Artificial Sequence
  Description of Artificial Sequence: Synthetic oligonucleotide
  Target: LAMA2; (+) strand; PAM type: YTN; PAM sequence: CTT
aatagtgactttaaatgtaa

SEQ ID NO: 349324 - DNA, 20 bp, Artificial Sequence
  Description of Artificial Sequence: Synthetic oligonucleotide
  Target: LAMA2; (+) strand; PAM type: YTN; PAM sequence: TTA
atagtgactttaaatgtaat

SEQ ID NO: 349325 - DNA, 20 bp, Artificial Sequence
  Description of Artificial Sequence: Synthetic oligonucleotide
  Target: LAMA2; (+) strand; PAM type: YTN; PAM sequence: CTT
taaatgtaatgccacccagg

SEQ ID NO: 349326 - DNA, 20 bp, Artificial Sequence
  Description of Artificial Sequence: Synthetic oligonucleotide
  Target: LAMA2; (+) strand; PAM type: YTN; PAM sequence: TTT
aaatgtaatgccacccaggg

SEQ ID NO: 349327 - DNA, 20 bp, Artificial Sequence
  Description of Artificial Sequence: Synthetic oligonucleotide
  Target: LAMA2; (+) strand; PAM type: YTN; PAM sequence: TTA
aatgtaatgccacccaggga

SEQ ID NO: 349328 - DNA, 20 bp, Artificial Sequence
  Description of Artificial Sequence: Synthetic oligonucleotide
  Target: LAMA2; (+) strand; PAM type: YTN; PAM sequence: TTT
gctctcgagctcctttaaat

SEQ ID NO: 349329 - DNA, 20 bp, Artificial Sequence
  Description of Artificial Sequence: Synthetic oligonucleotide
  Target: LAMA2; (+) strand; PAM type: YTN; PAM sequence: TTG
ctctcgagctcctttaaatt

SEQ ID NO: 349330 - DNA, 20 bp, Artificial Sequence
  Description of Artificial Sequence: Synthetic oligonucleotide
  Target: LAMA2; (+) strand; PAM type: YTN; PAM sequence: CTC
tcgagctcctttaaatttta

SEQ ID NO: 349331 - DNA, 20 bp, Artificial Sequence
  Description of Artificial Sequence: Synthetic oligonucleotide
  Target: LAMA2; (+) strand; PAM type: YTN; PAM sequence: CTC
gagctcctttaaattttaat

SEQ ID NO: 349332 - DNA, 20 bp, Artificial Sequence
  Description of Artificial Sequence: Synthetic oligonucleotide
  Target: LAMA2; (+) strand; PAM type: YTN; PAM sequence: CTC
ctttaaattttaattaaatt

SEQ ID NO: 349333 - DNA, 20 bp, Artificial Sequence
  Description of Artificial Sequence: Synthetic oligonucleotide
  Target: LAMA2; (+) strand; PAM type: YTN; PAM sequence: CTT
taaattttaattaaatttct

SEQ ID NO: 349334 - DNA, 20 bp, Artificial Sequence
  Description of Artificial Sequence: Synthetic oligonucleotide
  Target: LAMA2; (+) strand; PAM type: YTN; PAM sequence: TTT
aaattttaattaaatttctc

SEQ ID NO: 349335 - DNA, 20 bp, Artificial Sequence
  Description of Artificial Sequence: Synthetic oligonucleotide
  Target: LAMA2; (+) strand; PAM type: YTN; PAM sequence: TTA
aattttaattaaatttctct

SEQ ID NO: 349336 - DNA, 20 bp, Artificial Sequence
  Description of Artificial Sequence: Synthetic oligonucleotide
  Target: LAMA2; (+) strand; PAM type: YTN; PAM sequence: TTT
taattaaatttctcttctgt

SEQ ID NO: 349337 - DNA, 20 bp, Artificial Sequence
  Description of Artificial Sequence: Synthetic oligonucleotide
  Target: LAMA2; (+) strand; PAM type: YTN; PAM sequence: TTT
aattaaatttctcttctgtt

SEQ ID NO: 349338 - DNA, 20 bp, Artificial Sequence
  Description of Artificial Sequence: Synthetic oligonucleotide
  Target: LAMA2; (+) strand; PAM type: YTN; PAM sequence: TTA
attaaatttctcttctgttt

SEQ ID NO: 349339 - DNA, 20 bp, Artificial Sequence
  Description of Artificial Sequence: Synthetic oligonucleotide
  Target: LAMA2; (+) strand; PAM type: YTN; PAM sequence: TTA
aatttctcttctgtttgtag

SEQ ID NO: 349340 - DNA, 20 bp, Artificial Sequence
  Description of Artificial Sequence: Synthetic oligonucleotide
  Target: LAMA2; (+) strand; PAM type: YTN; PAM sequence: TTT
ctcttctgtttgtagaatat

SEQ ID NO: 349341 - DNA, 20 bp, Artificial Sequence
  Description of Artificial Sequence: Synthetic oligonucleotide
  Target: LAMA2; (+) strand; PAM type: YTN; PAM sequence: TTC
tcttctgtttgtagaatatc

SEQ ID NO: 349342 - DNA, 20 bp, Artificial Sequence
  Description of Artificial Sequence: Synthetic oligonucleotide
  Target: LAMA2; (+) strand; PAM type: YTN; PAM sequence: CTC
ttctgtttgtagaatatcag

SEQ ID NO: 349343 - DNA, 20 bp, Artificial Sequence
  Description of Artificial Sequence: Synthetic oligonucleotide
  Target: LAMA2; (+) strand; PAM type: YTN; PAM sequence: CTT
ctgtttgtagaatatcagta

SEQ ID NO: 349344 - DNA, 20 bp, Artificial Sequence
  Description of Artificial Sequence: Synthetic oligonucleotide
  Target: LAMA2; (+) strand; PAM type: YTN; PAM sequence: TTC
tgtttgtagaatatcagtaa

SEQ ID NO: 349345 - DNA, 20 bp, Artificial Sequence
  Description of Artificial Sequence: Synthetic oligonucleotide
  Target: LAMA2; (+) strand; PAM type: YTN; PAM sequence: CTG
tttgtagaatatcagtaatc

SEQ ID NO: 349346 - DNA, 20 bp, Artificial Sequence
  Description of Artificial Sequence: Synthetic oligonucleotide
  Target: LAMA2; (+) strand; PAM type: YTN; PAM sequence: TTT
gtagaatatcagtaatcata

SEQ ID NO: 349347 - DNA, 20 bp, Artificial Sequence
  Description of Artificial Sequence: Synthetic oligonucleotide
  Target: LAMA2; (+) strand; PAM type: YTN; PAM sequence: TTG
tagaatatcagtaatcataa

SEQ ID NO: 349348 - DNA, 20 bp, Artificial Sequence
  Description of Artificial Sequence: Synthetic oligonucleotide
  Target: LAMA2; (+) strand; PAM type: YTN; PAM sequence: CTT
gaaggtaggggtcttcctgt

SEQ ID NO: 349349 - DNA, 20 bp, Artificial Sequence
  Description of Artificial Sequence: Synthetic oligonucleotide
  Target: LAMA2; (+) strand; PAM type: YTN; PAM sequence: TTG
aaggtaggggtcttcctgtt

SEQ ID NO: 349350 - DNA, 20 bp, Artificial Sequence
  Description of Artificial Sequence: Synthetic oligonucleotide
  Target: LAMA2; (+) strand; PAM type: YTN; PAM sequence: CTT
cctgttgccactgacatgcc

SEQ ID NO: 349351 - DNA, 20 bp, Artificial Sequence
  Description of Artificial Sequence: Synthetic oligonucleotide
  Target: LAMA2; (+) strand; PAM type: YTN; PAM sequence: TTC
ctgttgccactgacatgcct

SEQ ID NO: 349352 - DNA, 20 bp, Artificial Sequence
  Description of Artificial Sequence: Synthetic oligonucleotide
  Target: LAMA2; (+) strand; PAM type: YTN; PAM sequence: CTG
ttgccactgacatgccttca

SEQ ID NO: 349353 - DNA, 20 bp, Artificial Sequence
  Description of Artificial Sequence: Synthetic oligonucleotide
  Target: LAMA2; (+) strand; PAM type: YTN; PAM sequence: TTG
ccactgacatgccttcacac

SEQ ID NO: 349354 - DNA, 20 bp, Artificial Sequence
  Description of Artificial Sequence: Synthetic oligonucleotide
  Target: LAMA2; (+) strand; PAM type: YTN; PAM sequence: CTG
acatgccttcacacagtgat

SEQ ID NO: 349355 - DNA, 20 bp, Artificial Sequence
  Description of Artificial Sequence: Synthetic oligonucleotide
  Target: LAMA2; (+) strand; PAM type: YTN; PAM sequence: CTT
cacacagtgataattgtgta

SEQ ID NO: 349356 - DNA, 20 bp, Artificial Sequence
  Description of Artificial Sequence: Synthetic oligonucleotide
  Target: LAMA2; (+) strand; PAM type: YTN; PAM sequence: TTC
acacagtgataattgtgtaa

SEQ ID NO: 349357 - DNA, 20 bp, Artificial Sequence
  Description of Artificial Sequence: Synthetic oligonucleotide
  Target: LAMA2; (+) strand; PAM type: YTN; PAM sequence: TTG
tgtaatgttaagtggctctg

SEQ ID NO: 349358 - DNA, 20 bp, Artificial Sequence
  Description of Artificial Sequence: Synthetic oligonucleotide
  Target: LAMA2; (+) strand; PAM type: YTN; PAM sequence: TTA
agtggctctgcaaaatcctt

SEQ ID NO: 349359 - DNA, 20 bp, Artificial Sequence
  Description of Artificial Sequence: Synthetic oligonucleotide
  Target: LAMA2; (+) strand; PAM type: YTN; PAM sequence: CTC
tgcaaaatcctttaccactc

SEQ ID NO: 349360 - DNA, 20 bp, Artificial Sequence
  Description of Artificial Sequence: Synthetic oligonucleotide
  Target: LAMA2; (+) strand; PAM type: YTN; PAM sequence: CTG
caaaatcctttaccactctt

SEQ ID NO: 349361 - DNA, 20 bp, Artificial Sequence
  Description of Artificial Sequence: Synthetic oligonucleotide
  Target: LAMA2; (+) strand; PAM type: YTN; PAM sequence: CTT
taccactctttacttgtgtt

SEQ ID NO: 349362 - DNA, 20 bp, Artificial Sequence
  Description of Artificial Sequence: Synthetic oligonucleotide
  Target: LAMA2; (+) strand; PAM type: YTN; PAM sequence: TTT
accactctttacttgtgttt

SEQ ID NO: 349363 - DNA, 20 bp, Artificial Sequence
  Description of Artificial Sequence: Synthetic oligonucleotide
  Target: LAMA2; (+) strand; PAM type: YTN; PAM sequence: TTA
ccactctttacttgtgtttc

SEQ ID NO: 349364 - DNA, 20 bp, Artificial Sequence
  Description of Artificial Sequence: Synthetic oligonucleotide
  Target: LAMA2; (+) strand; PAM type: YTN; PAM sequence: CTC
tttacttgtgtttctacgtt

SEQ ID NO: 349365 - DNA, 20 bp, Artificial Sequence
  Description of Artificial Sequence: Synthetic oligonucleotide
  Target: LAMA2; (+) strand; PAM type: YTN; PAM sequence: CTT
tacttgtgtttctacgttta

SEQ ID NO: 349366 - DNA, 20 bp, Artificial Sequence
  Description of Artificial Sequence: Synthetic oligonucleotide
  Target: LAMA2; (+) strand; PAM type: YTN; PAM sequence: TTT
acttgtgtttctacgtttaa

SEQ ID NO: 349367 - DNA, 20 bp, Artificial Sequence
  Description of Artificial Sequence: Synthetic oligonucleotide
  Target: LAMA2; (+) strand; PAM type: YTN; PAM sequence: TTA
cttgtgtttctacgtttaaa

SEQ ID NO: 349368 - DNA, 20 bp, Artificial Sequence
  Description of Artificial Sequence: Synthetic oligonucleotide
  Target: LAMA2; (+) strand; PAM type: YTN; PAM sequence: CTT
gtgtttctacgtttaaatac

SEQ ID NO: 349369 - DNA, 20 bp, Artificial Sequence
  Description of Artificial Sequence: Synthetic oligonucleotide
  Target: LAMA2; (+) strand; PAM type: YTN; PAM sequence: TTG
tgtttctacgtttaaataca

SEQ ID NO: 349370 - DNA, 20 bp, Artificial Sequence
  Description of Artificial Sequence: Synthetic oligonucleotide
  Target: LAMA2; (+) strand; PAM type: YTN; PAM sequence: TTT
ctacgtttaaatacaaaaca

SEQ ID NO: 349371 - DNA, 20 bp, Artificial Sequence
  Description of Artificial Sequence: Synthetic oligonucleotide
  Target: LAMA2; (+) strand; PAM type: YTN; PAM sequence: TTC
tacgtttaaatacaaaacaa

SEQ ID NO: 349372 - DNA, 20 bp, Artificial Sequence
  Description of Artificial Sequence: Synthetic oligonucleotide
  Target: LAMA2; (+) strand; PAM type: YTN; PAM sequence: CTA
cgtttaaatacaaaacaaaa

SEQ ID NO: 349373 - DNA, 20 bp, Artificial Sequence
  Description of Artificial Sequence: Synthetic oligonucleotide
  Target: LAMA2; (+) strand; PAM type: YTN; PAM sequence: TTT
aaatacaaaacaaaaacaat

SEQ ID NO: 349374 - DNA, 20 bp, Artificial Sequence
  Description of Artificial Sequence: Synthetic oligonucleotide
  Target: LAMA2; (+) strand; PAM type: YTN; PAM sequence: TTA
aatacaaaacaaaaacaatc

SEQ ID NO: 349375 - DNA, 20 bp, Artificial Sequence
  Description of Artificial Sequence: Synthetic oligonucleotide
  Target: LAMA2; (+) strand; PAM type: YTN; PAM sequence: CTT
gttagcaatagaggtagact

SEQ ID NO: 349376 - DNA, 20 bp, Artificial Sequence
  Description of Artificial Sequence: Synthetic oligonucleotide
  Target: LAMA2; (+) strand; PAM type: YTN; PAM sequence: TTG
ttagcaatagaggtagacta

SEQ ID NO: 349377 - DNA, 20 bp, Artificial Sequence
  Description of Artificial Sequence: Synthetic oligonucleotide
  Target: LAMA2; (+) strand; PAM type: YTN; PAM sequence: TTA
gcaatagaggtagactaagc

SEQ ID NO: 349378 - DNA, 20 bp, Artificial Sequence
  Description of Artificial Sequence: Synthetic oligonucleotide
  Target: LAMA2; (+) strand; PAM type: YTN; PAM sequence: CTA
agcaaggcaagacatttcaa

SEQ ID NO: 349379 - DNA, 20 bp, Artificial Sequence
  Description of Artificial Sequence: Synthetic oligonucleotide
  Target: LAMA2; (+) strand; PAM type: YTN; PAM sequence: TTT
caaactgctactgtacacat

SEQ ID NO: 349380 - DNA, 20 bp, Artificial Sequence
  Description of Artificial Sequence: Synthetic oligonucleotide
  Target: LAMA2; (+) strand; PAM type: YTN; PAM sequence: TTC
aaactgctactgtacacatt

SEQ ID NO: 349381 - DNA, 20 bp, Artificial Sequence
  Description of Artificial Sequence: Synthetic oligonucleotide
  Target: LAMA2; (+) strand; PAM type: YTN; PAM sequence: CTG
ctactgtacacatttttaaa

SEQ ID NO: 349382 - DNA, 20 bp, Artificial Sequence
  Description of Artificial Sequence: Synthetic oligonucleotide
  Target: LAMA2; (+) strand; PAM type: YTN; PAM sequence: CTA
ctgtacacatttttaaaata

SEQ ID NO: 349383 - DNA, 20 bp, Artificial Sequence
  Description of Artificial Sequence: Synthetic oligonucleotide
  Target: LAMA2; (+) strand; PAM type: YTN; PAM sequence: CTG
tacacatttttaaaatagtg

SEQ ID NO: 349384 - DNA, 20 bp, Artificial Sequence
  Description of Artificial Sequence: Synthetic oligonucleotide
  Target: LAMA2; (+) strand; PAM type: YTN; PAM sequence: TTT
ttaaaatagtggaattgtga

SEQ ID NO: 349385 - DNA, 20 bp, Artificial Sequence
  Description of Artificial Sequence: Synthetic oligonucleotide
  Target: LAMA2; (+) strand; PAM type: YTN; PAM sequence: TTT
taaaatagtggaattgtgaa

SEQ ID NO: 349386 - DNA, 20 bp, Artificial Sequence
  Description of Artificial Sequence: Synthetic oligonucleotide
  Target: LAMA2; (+) strand; PAM type: YTN; PAM sequence: TTT
aaaatagtggaattgtgaaa

SEQ ID NO: 349387 - DNA, 20 bp, Artificial Sequence
  Description of Artificial Sequence: Synthetic oligonucleotide
  Target: LAMA2; (+) strand; PAM type: YTN; PAM sequence: TTA
aaatagtggaattgtgaaac

SEQ ID NO: 349388 - DNA, 20 bp, Artificial Sequence
  Description of Artificial Sequence: Synthetic oligonucleotide
  Target: LAMA2; (+) strand; PAM type: YTN; PAM sequence: TTG
tgaaacactttttttctttc

SEQ ID NO: 349389 - DNA, 20 bp, Artificial Sequence
  Description of Artificial Sequence: Synthetic oligonucleotide
  Target: LAMA2; (+) strand; PAM type: YTN; PAM sequence: CTT
tttttctttccctgtaggga

SEQ ID NO: 349390 - DNA, 20 bp, Artificial Sequence
  Description of Artificial Sequence: Synthetic oligonucleotide
  Target: LAMA2; (+) strand; PAM type: YTN; PAM sequence: TTT
ttttctttccctgtagggaa

SEQ ID NO: 349391 - DNA, 20 bp, Artificial Sequence
  Description of Artificial Sequence: Synthetic oligonucleotide
  Target: LAMA2; (+) strand; PAM type: YTN; PAM sequence: TTT
tttctttccctgtagggaag

SEQ ID NO: 349392 - DNA, 20 bp, Artificial Sequence
  Description of Artificial Sequence: Synthetic oligonucleotide
  Target: LAMA2; (+) strand; PAM type: YTN; PAM sequence: TTT
ttctttccctgtagggaaga

SEQ ID NO: 349393 - DNA, 20 bp, Artificial Sequence
  Description of Artificial Sequence: Synthetic oligonucleotide
  Target: LAMA2; (+) strand; PAM type: YTN; PAM sequence: TTT
tctttccctgtagggaagag

SEQ ID NO: 349394 - DNA, 20 bp, Artificial Sequence
  Description of Artificial Sequence: Synthetic oligonucleotide
  Target: LAMA2; (+) strand; PAM type: YTN; PAM sequence: TTT
ctttccctgtagggaagagg

SEQ ID NO: 349395 - DNA, 20 bp, Artificial Sequence
  Description of Artificial Sequence: Synthetic oligonucleotide
  Target: LAMA2; (+) strand; PAM type: YTN; PAM sequence: TTC
tttccctgtagggaagaggg

SEQ ID NO: 349396 - DNA, 20 bp, Artificial Sequence
  Description of Artificial Sequence: Synthetic oligonucleotide
  Target: LAMA2; (+) strand; PAM type: YTN; PAM sequence: CTT
tccctgtagggaagagggga

SEQ ID NO: 349397 - DNA, 20 bp, Artificial Sequence
  Description of Artificial Sequence: Synthetic oligonucleotide
  Target: LAMA2; (+) strand; PAM type: YTN; PAM sequence: TTT
ccctgtagggaagaggggag

SEQ ID NO: 349398 - DNA, 20 bp, Artificial Sequence
  Description of Artificial Sequence: Synthetic oligonucleotide
  Target: LAMA2; (+) strand; PAM type: YTN; PAM sequence: TTC
cctgtagggaagaggggagg

SEQ ID NO: 349399 - DNA, 20 bp, Artificial Sequence
  Description of Artificial Sequence: Synthetic oligonucleotide
  Target: LAMA2; (+) strand; PAM type: YTN; PAM sequence: CTG
tagggaagaggggaggtcgt

SEQ ID NO: 349400 - DNA, 20 bp, Artificial Sequence
  Description of Artificial Sequence: Synthetic oligonucleotide
  Target: LAMA2; (+) strand; PAM type: YTN; PAM sequence: TTT
ccaaactgaaaaacaaacat

SEQ ID NO: 349401 - DNA, 20 bp, Artificial Sequence
  Description of Artificial Sequence: Synthetic oligonucleotide
  Target: LAMA2; (+) strand; PAM type: YTN; PAM sequence: TTC
caaactgaaaaacaaacatt

SEQ ID NO: 349402 - DNA, 20 bp, Artificial Sequence
  Description of Artificial Sequence: Synthetic oligonucleotide
  Target: LAMA2; (+) strand; PAM type: YTN; PAM sequence: CTG
aaaaacaaacattttaaaaa

SEQ ID NO: 349403 - DNA, 20 bp, Artificial Sequence
  Description of Artificial Sequence: Synthetic oligonucleotide
  Target: LAMA2; (+) strand; PAM type: YTN; PAM sequence: TTT
taaaaacgcagaaattcaag

SEQ ID NO: 349404 - DNA, 20 bp, Artificial Sequence
  Description of Artificial Sequence: Synthetic oligonucleotide
  Target: LAMA2; (+) strand; PAM type: YTN; PAM sequence: TTT
aaaaacgcagaaattcaaga

SEQ ID NO: 349405 - DNA, 20 bp, Artificial Sequence
  Description of Artificial Sequence: Synthetic oligonucleotide
  Target: LAMA2; (+) strand; PAM type: YTN; PAM sequence: TTA
aaaacgcagaaattcaagat

SEQ ID NO: 349406 - DNA, 20 bp, Artificial Sequence
  Description of Artificial Sequence: Synthetic oligonucleotide
  Target: LAMA2; (+) strand; PAM type: YTN; PAM sequence: TTC
aagatggggatcttagccat

SEQ ID NO: 349407 - DNA, 20 bp, Artificial Sequence
  Description of Artificial Sequence: Synthetic oligonucleotide
  Target: LAMA2; (+) strand; PAM type: YTN; PAM sequence: CTT
agccataaagccatacataa

SEQ ID NO: 349408 - DNA, 20 bp, Artificial Sequence
  Description of Artificial Sequence: Synthetic oligonucleotide
  Target: LAMA2; (+) strand; PAM type: YTN; PAM sequence: TTA
gccataaagccatacataaa

SEQ ID NO: 349409 - DNA, 20 bp, Artificial Sequence
  Description of Artificial Sequence: Synthetic oligonucleotide
  Target: LAMA2; (+) strand; PAM type: YTN; PAM sequence: CTT
tcagcaatgagtacattcct

SEQ ID NO: 349410 - DNA, 20 bp, Artificial Sequence
  Description of Artificial Sequence: Synthetic oligonucleotide
  Target: LAMA2; (+) strand; PAM type: YTN; PAM sequence: TTT
cagcaatgagtacattcctg

SEQ ID NO: 349411 - DNA, 20 bp, Artificial Sequence
  Description of Artificial Sequence: Synthetic oligonucleotide
  Target: LAMA2; (+) strand; PAM type: YTN; PAM sequence: TTC
agcaatgagtacattcctga

SEQ ID NO: 349412 - DNA, 20 bp, Artificial Sequence
  Description of Artificial Sequence: Synthetic oligonucleotide
  Target: LAMA2; (+) strand; PAM type: YTN; PAM sequence: TTC
ctgaaagcttaagtaaaaat

SEQ ID NO: 349413 - DNA, 20 bp, Artificial Sequence
  Description of Artificial Sequence: Synthetic oligonucleotide
  Target: LAMA2; (+) strand; PAM type: YTN; PAM sequence: CTG
aaagcttaagtaaaaatttt

SEQ ID NO: 349414 - DNA, 20 bp, Artificial Sequence
  Description of Artificial Sequence: Synthetic oligonucleotide
  Target: LAMA2; (+) strand; PAM type: YTN; PAM sequence: CTT
aagtaaaaattttcttttcc

SEQ ID NO: 349415 - DNA, 20 bp, Artificial Sequence
  Description of Artificial Sequence: Synthetic oligonucleotide
  Target: LAMA2; (+) strand; PAM type: YTN; PAM sequence: TTA
agtaaaaattttcttttcca

SEQ ID NO: 349416 - DNA, 20 bp, Artificial Sequence
  Description of Artificial Sequence: Synthetic oligonucleotide
  Target: LAMA2; (+) strand; PAM type: YTN; PAM sequence: TTT
tcttttccaagttgaatcat

SEQ ID NO: 349417 - DNA, 20 bp, Artificial Sequence
  Description of Artificial Sequence: Synthetic oligonucleotide
  Target: LAMA2; (+) strand; PAM type: YTN; PAM sequence: TTT
cttttccaagttgaatcata

SEQ ID NO: 349418 - DNA, 20 bp, Artificial Sequence
  Description of Artificial Sequence: Synthetic oligonucleotide
  Target: LAMA2; (+) strand; PAM type: YTN; PAM sequence: TTC
ttttccaagttgaatcatat

SEQ ID NO: 349419 - DNA, 20 bp, Artificial Sequence
  Description of Artificial Sequence: Synthetic oligonucleotide
  Target: LAMA2; (+) strand; PAM type: YTN; PAM sequence: CTT
ttccaagttgaatcatattc

SEQ ID NO: 349420 - DNA, 20 bp, Artificial Sequence
  Description of Artificial Sequence: Synthetic oligonucleotide
  Target: LAMA2; (+) strand; PAM type: YTN; PAM sequence: TTT
tccaagttgaatcatattcc

SEQ ID NO: 349421 - DNA, 20 bp, Artificial Sequence
  Description of Artificial Sequence: Synthetic oligonucleotide
  Target: LAMA2; (+) strand; PAM type: YTN; PAM sequence: TTT
ccaagttgaatcatattcca

SEQ ID NO: 349422 - DNA, 20 bp, Artificial Sequence
  Description of Artificial Sequence: Synthetic oligonucleotide
  Target: LAMA2; (+) strand; PAM type: YTN; PAM sequence: TTC
caagttgaatcatattccaa

SEQ ID NO: 349423 - DNA, 20 bp, Artificial Sequence
  Description of Artificial Sequence: Synthetic oligonucleotide
  Target: LAMA2; (+) strand; PAM type: YTN; PAM sequence: TTG
aatcatattccaatcacctt

SEQ ID NO: 349424 - DNA, 20 bp, Artificial Sequence
  Description of Artificial Sequence: Synthetic oligonucleotide
  Target: LAMA2; (+) strand; PAM type: YTN; PAM sequence: TTC
caatcaccttaatatttaga

SEQ ID NO: 349425 - DNA, 20 bp, Artificial Sequence
  Description of Artificial Sequence: Synthetic oligonucleotide
  Target: LAMA2; (+) strand; PAM type: YTN; PAM sequence: CTT
aatatttagaaaaatccttc

SEQ ID NO: 349426 - DNA, 20 bp, Artificial Sequence
  Description of Artificial Sequence: Synthetic oligonucleotide
  Target: LAMA2; (+) strand; PAM type: YTN; PAM sequence: TTA
atatttagaaaaatccttcc

SEQ ID NO: 349427 - DNA, 20 bp, Artificial Sequence
  Description of Artificial Sequence: Synthetic oligonucleotide
  Target: LAMA2; (+) strand; PAM type: YTN; PAM sequence: TTT
agaaaaatccttccatgaca

SEQ ID NO: 349428 - DNA, 20 bp, Artificial Sequence
  Description of Artificial Sequence: Synthetic oligonucleotide
  Target: LAMA2; (+) strand; PAM type: YTN; PAM sequence: TTA
gaaaaatccttccatgacat

SEQ ID NO: 349429 - DNA, 20 bp, Artificial Sequence
  Description of Artificial Sequence: Synthetic oligonucleotide
  Target: LAMA2; (+) strand; PAM type: YTN; PAM sequence: CTT
ccatgacatgacaaatccct

SEQ ID NO: 349430 - DNA, 20 bp, Artificial Sequence
  Description of Artificial Sequence: Synthetic oligonucleotide
  Target: LAMA2; (+) strand; PAM type: YTN; PAM sequence: TTC
catgacatgacaaatccctc

SEQ ID NO: 349431 - DNA, 20 bp, Artificial Sequence
  Description of Artificial Sequence: Synthetic oligonucleotide
  Target: LAMA2; (+) strand; PAM type: YTN; PAM sequence: CTC
cataaaatgaataatcacat

SEQ ID NO: 349432 - DNA, 20 bp, Artificial Sequence
  Description of Artificial Sequence: Synthetic oligonucleotide
  Target: LAMA2; (+) strand; PAM type: YTN; PAM sequence: TTC
taattcatttgagtttaatt

SEQ ID NO: 349433 - DNA, 20 bp, Artificial Sequence
  Description of Artificial Sequence: Synthetic oligonucleotide
  Target: LAMA2; (+) strand; PAM type: YTN; PAM sequence: CTA
attcatttgagtttaatttg

SEQ ID NO: 349434 - DNA, 20 bp, Artificial Sequence
  Description of Artificial Sequence: Synthetic oligonucleotide
  Target: LAMA2; (+) strand; PAM type: YTN; PAM sequence: TTC
atttgagtttaatttggatt

SEQ ID NO: 349435 - DNA, 20 bp, Artificial Sequence
  Description of Artificial Sequence: Synthetic oligonucleotide
  Target: LAMA2; (+) strand; PAM type: YTN; PAM sequence: TTT
gagtttaatttggattttca

SEQ ID NO: 349436 - DNA, 20 bp, Artificial Sequence
  Description of Artificial Sequence: Synthetic oligonucleotide
  Target: LAMA2; (+) strand; PAM type: YTN; PAM sequence: TTG
agtttaatttggattttcat

SEQ ID NO: 349437 - DNA, 20 bp, Artificial Sequence
  Description of Artificial Sequence: Synthetic oligonucleotide
  Target: LAMA2; (+) strand; PAM type: YTN; PAM sequence: TTT
aatttggattttcatcaatc

SEQ ID NO: 349438 - DNA, 20 bp, Artificial Sequence
  Description of Artificial Sequence: Synthetic oligonucleotide
  Target: LAMA2; (+) strand; PAM type: YTN; PAM sequence: TTA
atttggattttcatcaatct

SEQ ID NO: 349439 - DNA, 20 bp, Artificial Sequence
  Description of Artificial Sequence: Synthetic oligonucleotide
  Target: LAMA2; (+) strand; PAM type: YTN; PAM sequence: TTT
ggattttcatcaatctagct

SEQ ID NO: 349440 - DNA, 20 bp, Artificial Sequence
  Description of Artificial Sequence: Synthetic oligonucleotide
  Target: LAMA2; (+) strand; PAM type: YTN; PAM sequence: TTG
gattttcatcaatctagctt

SEQ ID NO: 349441 - DNA, 20 bp, Artificial Sequence
  Description of Artificial Sequence: Synthetic oligonucleotide
  Target: LAMA2; (+) strand; PAM type: YTN; PAM sequence: TTT
tcatcaatctagcttacata

SEQ ID NO: 349442 - DNA, 20 bp, Artificial Sequence
  Description of Artificial Sequence: Synthetic oligonucleotide
  Target: LAMA2; (+) strand; PAM type: YTN; PAM sequence: TTT
catcaatctagcttacataa

SEQ ID NO: 349443 - DNA, 20 bp, Artificial Sequence
  Description of Artificial Sequence: Synthetic oligonucleotide
  Target: LAMA2; (+) strand; PAM type: YTN; PAM sequence: TTC
atcaatctagcttacataag

SEQ ID NO: 349444 - DNA, 20 bp, Artificial Sequence
  Description of Artificial Sequence: Synthetic oligonucleotide
  Target: LAMA2; (+) strand; PAM type: YTN; PAM sequence: CTA
gcttacataaggcaagataa

SEQ ID NO: 349445 - DNA, 20 bp, Artificial Sequence
  Description of Artificial Sequence: Synthetic oligonucleotide
  Target: LAMA2; (+) strand; PAM type: YTN; PAM sequence: CTT
acataaggcaagataatatc

SEQ ID NO: 349446 - DNA, 20 bp, Artificial Sequence
  Description of Artificial Sequence: Synthetic oligonucleotide
  Target: LAMA2; (+) strand; PAM type: YTN; PAM sequence: TTA
cataaggcaagataatatct

SEQ ID NO: 349447 - DNA, 20 bp, Artificial Sequence
  Description of Artificial Sequence: Synthetic oligonucleotide
  Target: LAMA2; (+) strand; PAM type: YTN; PAM sequence: CTC
taaaaagcatagaatattca

SEQ ID NO: 349448 - DNA, 20 bp, Artificial Sequence
  Description of Artificial Sequence: Synthetic oligonucleotide
  Target: LAMA2; (+) strand; PAM type: YTN; PAM sequence: CTA
aaaagcatagaatattcatt

SEQ ID NO: 349449 - DNA, 20 bp, Artificial Sequence
  Description of Artificial Sequence: Synthetic oligonucleotide
  Target: LAMA2; (+) strand; PAM type: YTN; PAM sequence: TTC
attcagttgctgagccttta

SEQ ID NO: 349450 - DNA, 20 bp, Artificial Sequence
  Description of Artificial Sequence: Synthetic oligonucleotide
  Target: LAMA2; (+) strand; PAM type: YTN; PAM sequence: TTC
agttgctgagcctttactaa

SEQ ID NO: 349451 - DNA, 20 bp, Artificial Sequence
  Description of Artificial Sequence: Synthetic oligonucleotide
  Target: LAMA2; (+) strand; PAM type: YTN; PAM sequence: TTG
ctgagcctttactaaacaac

SEQ ID NO: 349452 - DNA, 20 bp, Artificial Sequence
  Description of Artificial Sequence: Synthetic oligonucleotide
  Target: LAMA2; (+) strand; PAM type: YTN; PAM sequence: CTG
agcctttactaaacaacagt

SEQ ID NO: 349453 - DNA, 20 bp, Artificial Sequence
  Description of Artificial Sequence: Synthetic oligonucleotide
  Target: LAMA2; (+) strand; PAM type: YTN; PAM sequence: CTT
tactaaacaacagtttcata

SEQ ID NO: 349454 - DNA, 20 bp, Artificial Sequence
  Description of Artificial Sequence: Synthetic oligonucleotide
  Target: LAMA2; (+) strand; PAM type: YTN; PAM sequence: TTT
actaaacaacagtttcatat

SEQ ID NO: 349455 - DNA, 20 bp, Artificial Sequence
  Description of Artificial Sequence: Synthetic oligonucleotide
  Target: LAMA2; (+) strand; PAM type: YTN; PAM sequence: TTA
ctaaacaacagtttcatatg

SEQ ID NO: 349456 - DNA, 20 bp, Artificial Sequence
  Description of Artificial Sequence: Synthetic oligonucleotide
  Target: LAMA2; (+) strand; PAM type: YTN; PAM sequence: CTA
aacaacagtttcatatgata

SEQ ID NO: 349457 - DNA, 20 bp, Artificial Sequence
  Description of Artificial Sequence: Synthetic oligonucleotide
  Target: LAMA2; (+) strand; PAM type: YTN; PAM sequence: TTT
catatgatatatcttggaca

SEQ ID NO: 349458 - DNA, 20 bp, Artificial Sequence
  Description of Artificial Sequence: Synthetic oligonucleotide
  Target: LAMA2; (+) strand; PAM type: YTN; PAM sequence: TTC
atatgatatatcttggacat

SEQ ID NO: 349459 - DNA, 20 bp, Artificial Sequence
  Description of Artificial Sequence: Synthetic oligonucleotide
  Target: LAMA2; (+) strand; PAM type: YTN; PAM sequence: CTT
ggacattctgtgaaatagta

SEQ ID NO: 349460 - DNA, 20 bp, Artificial Sequence
  Description of Artificial Sequence: Synthetic oligonucleotide
  Target: LAMA2; (+) strand; PAM type: YTN; PAM sequence: TTG
gacattctgtgaaatagtaa

SEQ ID NO: 349461 - DNA, 20 bp, Artificial Sequence
  Description of Artificial Sequence: Synthetic oligonucleotide
  Target: LAMA2; (+) strand; PAM type: YTN; PAM sequence: TTC
tgtgaaatagtaagttgctg

SEQ ID NO: 349462 - DNA, 20 bp, Artificial Sequence
  Description of Artificial Sequence: Synthetic oligonucleotide
  Target: LAMA2; (+) strand; PAM type: YTN; PAM sequence: CTG
tgaaatagtaagttgctgat

SEQ ID NO: 349463 - DNA, 20 bp, Artificial Sequence
  Description of Artificial Sequence: Synthetic oligonucleotide
  Target: LAMA2; (+) strand; PAM type: YTN; PAM sequence: TTG
ctgatgatagagaaaaaaca

SEQ ID NO: 349464 - DNA, 20 bp, Artificial Sequence
  Description of Artificial Sequence: Synthetic oligonucleotide
  Target: LAMA2; (+) strand; PAM type: YTN; PAM sequence: CTG
atgatagagaaaaaacatgg

SEQ ID NO: 349465 - DNA, 20 bp, Artificial Sequence
  Description of Artificial Sequence: Synthetic oligonucleotide
  Target: LAMA2; (+) strand; PAM type: YTN; PAM sequence: CTT
tgtgatcagttactagccat

SEQ ID NO: 349466 - DNA, 20 bp, Artificial Sequence
  Description of Artificial Sequence: Synthetic oligonucleotide
  Target: LAMA2; (+) strand; PAM type: YTN; PAM sequence: TTT
gtgatcagttactagccata

SEQ ID NO: 349467 - DNA, 20 bp, Artificial Sequence
  Description of Artificial Sequence: Synthetic oligonucleotide
  Target: LAMA2; (+) strand; PAM type: YTN; PAM sequence: TTG
tgatcagttactagccatat

SEQ ID NO: 349468 - DNA, 20 bp, Artificial Sequence
  Description of Artificial Sequence: Synthetic oligonucleotide
  Target: LAMA2; (+) strand; PAM type: YTN; PAM sequence: TTA
ctagccatattcttgaaggt

SEQ ID NO: 349469 - DNA, 20 bp, Artificial Sequence
  Description of Artificial Sequence: Synthetic oligonucleotide
  Target: LAMA2; (+) strand; PAM type: YTN; PAM sequence: CTA
gccatattcttgaaggttac

SEQ ID NO: 349470 - DNA, 20 bp, Artificial Sequence
  Description of Artificial Sequence: Synthetic oligonucleotide
  Target: LAMA2; (+) strand; PAM type: YTN; PAM sequence: TTC
ttgaaggttacagacagagc

SEQ ID NO: 349471 - DNA, 20 bp, Artificial Sequence
  Description of Artificial Sequence: Synthetic oligonucleotide
  Target: LAMA2; (+) strand; PAM type: YTN; PAM sequence: CTT
gaaggttacagacagagcgg

SEQ ID NO: 349472 - DNA, 20 bp, Artificial Sequence
  Description of Artificial Sequence: Synthetic oligonucleotide
  Target: LAMA2; (+) strand; PAM type: YTN; PAM sequence: TTG
aaggttacagacagagcggg

SEQ ID NO: 349473 - DNA, 20 bp, Artificial Sequence
  Description of Artificial Sequence: Synthetic oligonucleotide
  Target: LAMA2; (+) strand; PAM type: YTN; PAM sequence: TTA
cagacagagcggggtaggct

SEQ ID NO: 349474 - DNA, 20 bp, Artificial Sequence
  Description of Artificial Sequence: Synthetic oligonucleotide
  Target: LAMA2; (+) strand; PAM type: YTN; PAM sequence: CTG
cagcctacagacagaaagtg

SEQ ID NO: 349475 - DNA, 20 bp, Artificial Sequence
  Description of Artificial Sequence: Synthetic oligonucleotide
  Target: LAMA2; (+) strand; PAM type: YTN; PAM sequence: CTA
cagacagaaagtggggctgt

SEQ ID NO: 349476 - DNA, 20 bp, Artificial Sequence
  Description of Artificial Sequence: Synthetic oligonucleotide
  Target: LAMA2; (+) strand; PAM type: YTN; PAM sequence: CTG
taggtgtagggtcctggctg

SEQ ID NO: 349477 - DNA, 20 bp, Artificial Sequence
  Description of Artificial Sequence: Synthetic oligonucleotide
  Target: LAMA2; (+) strand; PAM type: YTN; PAM sequence: CTG
gctgcacagagtgtgtgatg

SEQ ID NO: 349478 - DNA, 20 bp, Artificial Sequence
  Description of Artificial Sequence: Synthetic oligonucleotide
  Target: LAMA2; (+) strand; PAM type: YTN; PAM sequence: CTG
cacagagtgtgtgatggacc

SEQ ID NO: 349479 - DNA, 20 bp, Artificial Sequence
  Description of Artificial Sequence: Synthetic oligonucleotide
  Target: LAMA2; (+) strand; PAM type: YTN; PAM sequence: TTT
atttggcatcagggttttac

SEQ ID NO: 349480 - DNA, 20 bp, Artificial Sequence
  Description of Artificial Sequence: Synthetic oligonucleotide
  Target: LAMA2; (+) strand; PAM type: YTN; PAM sequence: TTA
tttggcatcagggttttaca

SEQ ID NO: 349481 - DNA, 20 bp, Artificial Sequence
  Description of Artificial Sequence: Synthetic oligonucleotide
  Target: LAMA2; (+) strand; PAM type: YTN; PAM sequence: TTT
ggcatcagggttttacatat

SEQ ID NO: 349482 - DNA, 20 bp, Artificial Sequence
  Description of Artificial Sequence: Synthetic oligonucleotide
  Target: LAMA2; (+) strand; PAM type: YTN; PAM sequence: TTG
gcatcagggttttacatata

SEQ ID NO: 349483 - DNA, 20 bp, Artificial Sequence
  Description of Artificial Sequence: Synthetic oligonucleotide
  Target: LAMA2; (+) strand; PAM type: YTN; PAM sequence: TTT
tacatatagtagctcatagt

SEQ ID NO: 349484 - DNA, 20 bp, Artificial Sequence
  Description of Artificial Sequence: Synthetic oligonucleotide
  Target: LAMA2; (+) strand; PAM type: YTN; PAM sequence: TTT
acatatagtagctcatagtt

SEQ ID NO: 349485 - DNA, 20 bp, Artificial Sequence
  Description of Artificial Sequence: Synthetic oligonucleotide
  Target: LAMA2; (+) strand; PAM type: YTN; PAM sequence: TTA
catatagtagctcatagttc

SEQ ID NO: 349486 - DNA, 20 bp, Artificial Sequence
  Description of Artificial Sequence: Synthetic oligonucleotide
  Target: LAMA2; (+) strand; PAM type: YTN; PAM sequence: CTC
atagttctaaacactcttga

SEQ ID NO: 349487 - DNA, 20 bp, Artificial Sequence
  Description of Artificial Sequence: Synthetic oligonucleotide
  Target: LAMA2; (+) strand; PAM type: YTN; PAM sequence: TTC
taaacactcttgacaacacg

SEQ ID NO: 349488 - DNA, 20 bp, Artificial Sequence
  Description of Artificial Sequence: Synthetic oligonucleotide
  Target: LAMA2; (+) strand; PAM type: YTN; PAM sequence: CTA
aacactcttgacaacacgaa

SEQ ID NO: 349489 - DNA, 20 bp, Artificial Sequence
  Description of Artificial Sequence: Synthetic oligonucleotide
  Target: LAMA2; (+) strand; PAM type: YTN; PAM sequence: CTC
ttgacaacacgaattctaaa

SEQ ID NO: 349490 - DNA, 20 bp, Artificial Sequence
  Description of Artificial Sequence: Synthetic oligonucleotide
  Target: LAMA2; (+) strand; PAM type: YTN; PAM sequence: CTT
gacaacacgaattctaaata

SEQ ID NO: 349491 - DNA, 20 bp, Artificial Sequence
  Description of Artificial Sequence: Synthetic oligonucleotide
  Target: LAMA2; (+) strand; PAM type: YTN; PAM sequence: TTG
acaacacgaattctaaatag

SEQ ID NO: 349492 - DNA, 20 bp, Artificial Sequence
  Description of Artificial Sequence: Synthetic oligonucleotide
  Target: LAMA2; (+) strand; PAM type: YTN; PAM sequence: TTC
taaatagtgtgagaataagt

SEQ ID NO: 349493 - DNA, 20 bp, Artificial Sequence
  Description of Artificial Sequence: Synthetic oligonucleotide
  Target: LAMA2; (+) strand; PAM type: YTN; PAM sequence: CTA
aatagtgtgagaataagtct

SEQ ID NO: 349494 - DNA, 20 bp, Artificial Sequence
  Description of Artificial Sequence: Synthetic oligonucleotide
  Target: LAMA2; (+) strand; PAM type: YTN; PAM sequence: CTA
tgttactttatgttttcctc

SEQ ID NO: 349495 - DNA, 20 bp, Artificial Sequence
  Description of Artificial Sequence: Synthetic oligonucleotide
  Target: LAMA2; (+) strand; PAM type: YTN; PAM sequence: TTA
ctttatgttttcctctgctt

SEQ ID NO: 349496 - DNA, 20 bp, Artificial Sequence
  Description of Artificial Sequence: Synthetic oligonucleotide
  Target: LAMA2; (+) strand; PAM type: YTN; PAM sequence: CTT
tatgttttcctctgcttata

SEQ ID NO: 349497 - DNA, 20 bp, Artificial Sequence
  Description of Artificial Sequence: Synthetic oligonucleotide
  Target: LAMA2; (+) strand; PAM type: YTN; PAM sequence: TTT
atgttttcctctgcttatac

SEQ ID NO: 349498 - DNA, 20 bp, Artificial Sequence
  Description of Artificial Sequence: Synthetic oligonucleotide
  Target: LAMA2; (+) strand; PAM type: YTN; PAM sequence: TTA
tgttttcctctgcttatact

SEQ ID NO: 349499 - DNA, 20 bp, Artificial Sequence
  Description of Artificial Sequence: Synthetic oligonucleotide
  Target: LAMA2; (+) strand; PAM type: YTN; PAM sequence: TTT
tcctctgcttatactggcag

SEQ ID NO: 349500 - DNA, 20 bp, Artificial Sequence
  Description of Artificial Sequence: Synthetic oligonucleotide
  Target: LAMA2; (+) strand; PAM type: YTN; PAM sequence: TTT
cctctgcttatactggcagc

SEQ ID NO: 349501 - DNA, 20 bp, Artificial Sequence
  Description of Artificial Sequence: Synthetic oligonucleotide
  Target: LAMA2; (+) strand; PAM type: YTN; PAM sequence: TTC
ctctgcttatactggcagca

SEQ ID NO: 349502 - DNA, 20 bp, Artificial Sequence
  Description of Artificial Sequence: Synthetic oligonucleotide
  Target: LAMA2; (+) strand; PAM type: YTN; PAM sequence: CTC
tgcttatactggcagcagaa

SEQ ID NO: 349503 - DNA, 20 bp, Artificial Sequence
  Description of Artificial Sequence: Synthetic oligonucleotide
  Target: LAMA2; (+) strand; PAM type: YTN; PAM sequence: CTG
cttatactggcagcagaagt

SEQ ID NO: 349504 - DNA, 20 bp, Artificial Sequence
  Description of Artificial Sequence: Synthetic oligonucleotide
  Target: LAMA2; (+) strand; PAM type: YTN; PAM sequence: CTT
atactggcagcagaagtttt

SEQ ID NO: 349505 - DNA, 20 bp, Artificial Sequence
  Description of Artificial Sequence: Synthetic oligonucleotide
  Target: LAMA2; (+) strand; PAM type: YTN; PAM sequence: TTA
tactggcagcagaagttttg

SEQ ID NO: 349506 - DNA, 20 bp, Artificial Sequence
  Description of Artificial Sequence: Synthetic oligonucleotide
  Target: LAMA2; (+) strand; PAM type: YTN; PAM sequence: CTG
gcagcagaagttttgactgt

SEQ ID NO: 349507 - DNA, 20 bp, Artificial Sequence
  Description of Artificial Sequence: Synthetic oligonucleotide
  Target: LAMA2; (+) strand; PAM type: YTN; PAM sequence: TTT
tgactgttttttgaaataca

SEQ ID NO: 349508 - DNA, 20 bp, Artificial Sequence
  Description of Artificial Sequence: Synthetic oligonucleotide
  Target: LAMA2; (+) strand; PAM type: YTN; PAM sequence: TTT
gactgttttttgaaatacac

SEQ ID NO: 349509 - DNA, 20 bp, Artificial Sequence
  Description of Artificial Sequence: Synthetic oligonucleotide
  Target: LAMA2; (+) strand; PAM type: YTN; PAM sequence: TTG
actgttttttgaaatacact

SEQ ID NO: 349510 - DNA, 20 bp, Artificial Sequence
  Description of Artificial Sequence: Synthetic oligonucleotide
  Target: LAMA2; (+) strand; PAM type: YTN; PAM sequence: CTG
ttttttgaaatacactatta

SEQ ID NO: 349511 - DNA, 20 bp, Artificial Sequence
  Description of Artificial Sequence: Synthetic oligonucleotide
  Target: LAMA2; (+) strand; PAM type: YTN; PAM sequence: TTT
tttgaaatacactattacaa

SEQ ID NO: 349512 - DNA, 20 bp, Artificial Sequence
  Description of Artificial Sequence: Synthetic oligonucleotide
  Target: LAMA2; (+) strand; PAM type: YTN; PAM sequence: TTT
ttgaaatacactattacaac

SEQ ID NO: 349513 - DNA, 20 bp, Artificial Sequence
  Description of Artificial Sequence: Synthetic oligonucleotide
  Target: LAMA2; (+) strand; PAM type: YTN; PAM sequence: TTT
tgaaatacactattacaaca

SEQ ID NO: 349514 - DNA, 20 bp, Artificial Sequence
  Description of Artificial Sequence: Synthetic oligonucleotide
  Target: LAMA2; (+) strand; PAM type: YTN; PAM sequence: TTT
gaaatacactattacaacaa

SEQ ID NO: 349515 - DNA, 20 bp, Artificial Sequence
  Description of Artificial Sequence: Synthetic oligonucleotide
  Target: LAMA2; (+) strand; PAM type: YTN; PAM sequence: TTG
aaatacactattacaacaaa

SEQ ID NO: 349516 - DNA, 20 bp, Artificial Sequence
  Description of Artificial Sequence: Synthetic oligonucleotide
  Target: LAMA2; (+) strand; PAM type: YTN; PAM sequence: CTA
ttacaacaaagcttttaaga

SEQ ID NO: 349517 - DNA, 20 bp, Artificial Sequence
  Description of Artificial Sequence: Synthetic oligonucleotide
  Target: LAMA2; (+) strand; PAM type: YTN; PAM sequence: TTA
caacaaagcttttaagaatt

SEQ ID NO: 349518 - DNA, 20 bp, Artificial Sequence
  Description of Artificial Sequence: Synthetic oligonucleotide
  Target: LAMA2; (+) strand; PAM type: YTN; PAM sequence: CTT
ttaagaattcatagccaggt

SEQ ID NO: 349519 - DNA, 20 bp, Artificial Sequence
  Description of Artificial Sequence: Synthetic oligonucleotide
  Target: LAMA2; (+) strand; PAM type: YTN; PAM sequence: TTT
taagaattcatagccaggtc

SEQ ID NO: 349520 - DNA, 20 bp, Artificial Sequence
  Description of Artificial Sequence: Synthetic oligonucleotide
  Target: LAMA2; (+) strand; PAM type: YTN; PAM sequence: TTT
aagaattcatagccaggtcc

SEQ ID NO: 349521 - DNA, 20 bp, Artificial Sequence
  Description of Artificial Sequence: Synthetic oligonucleotide
  Target: LAMA2; (+) strand; PAM type: YTN; PAM sequence: TTA
agaattcatagccaggtcca

SEQ ID NO: 349522 - DNA, 20 bp, Artificial Sequence
  Description of Artificial Sequence: Synthetic oligonucleotide
  Target: LAMA2; (+) strand; PAM type: YTN; PAM sequence: TTC
atagccaggtccagtggcat

SEQ ID NO: 349523 - DNA, 20 bp, Artificial Sequence
  Description of Artificial Sequence: Synthetic oligonucleotide
  Target: LAMA2; (+) strand; PAM type: YTN; PAM sequence: CTC
ctataatcccagctactgga

SEQ ID NO: 349524 - DNA, 20 bp, Artificial Sequence
  Description of Artificial Sequence: Synthetic oligonucleotide
  Target: LAMA2; (+) strand; PAM type: YTN; PAM sequence: CTA
taatcccagctactggaaag

SEQ ID NO: 349525 - DNA, 20 bp, Artificial Sequence
  Description of Artificial Sequence: Synthetic oligonucleotide
  Target: LAMA2; (+) strand; PAM type: YTN; PAM sequence: CTA
ctggaaagaagctatggtgg

SEQ ID NO: 349526 - DNA, 20 bp, Artificial Sequence
  Description of Artificial Sequence: Synthetic oligonucleotide
  Target: LAMA2; (+) strand; PAM type: YTN; PAM sequence: CTG
gaaagaagctatggtgggag

SEQ ID NO: 349527 - DNA, 20 bp, Artificial Sequence
  Description of Artificial Sequence: Synthetic oligonucleotide
  Target: LAMA2; (+) strand; PAM type: YTN; PAM sequence: CTA
tggtgggaggatctcttgag

SEQ ID NO: 349528 - DNA, 20 bp, Artificial Sequence
  Description of Artificial Sequence: Synthetic oligonucleotide
  Target: LAMA2; (+) strand; PAM type: YTN; PAM sequence: CTC
ttgagcccaggagtttgagg

SEQ ID NO: 349529 - DNA, 20 bp, Artificial Sequence
  Description of Artificial Sequence: Synthetic oligonucleotide
  Target: LAMA2; (+) strand; PAM type: YTN; PAM sequence: CTT
gagcccaggagtttgaggcc

SEQ ID NO: 349530 - DNA, 20 bp, Artificial Sequence
  Description of Artificial Sequence: Synthetic oligonucleotide
  Target: LAMA2; (+) strand; PAM type: YTN; PAM sequence: TTG
agcccaggagtttgaggcca

SEQ ID NO: 349531 - DNA, 20 bp, Artificial Sequence
  Description of Artificial Sequence: Synthetic oligonucleotide
  Target: LAMA2; (+) strand; PAM type: YTN; PAM sequence: TTT
gaggccagcctgggccacat

SEQ ID NO: 349532 - DNA, 20 bp, Artificial Sequence
  Description of Artificial Sequence: Synthetic oligonucleotide
  Target: LAMA2; (+) strand; PAM type: YTN; PAM sequence: TTG
aggccagcctgggccacata

SEQ ID NO: 349533 - DNA, 20 bp, Artificial Sequence
  Description of Artificial Sequence: Synthetic oligonucleotide
  Target: LAMA2; (+) strand; PAM type: YTN; PAM sequence: CTG
ggccacatagtgagaccctg

SEQ ID NO: 349534 - DNA, 20 bp, Artificial Sequence
  Description of Artificial Sequence: Synthetic oligonucleotide
  Target: LAMA2; (+) strand; PAM type: YTN; PAM sequence: CTG
tctgtatcactccgttttca

SEQ ID NO: 349535 - DNA, 20 bp, Artificial Sequence
  Description of Artificial Sequence: Synthetic oligonucleotide
  Target: LAMA2; (+) strand; PAM type: YTN; PAM sequence: CTG
tatcactccgttttcacact

SEQ ID NO: 349536 - DNA, 20 bp, Artificial Sequence
  Description of Artificial Sequence: Synthetic oligonucleotide
  Target: LAMA2; (+) strand; PAM type: YTN; PAM sequence: CTC
cgttttcacactgctgtaaa

SEQ ID NO: 349537 - DNA, 20 bp, Artificial Sequence
  Description of Artificial Sequence: Synthetic oligonucleotide
  Target: LAMA2; (+) strand; PAM type: YTN; PAM sequence: TTT
tcacactgctgtaaagatac

SEQ ID NO: 349538 - DNA, 20 bp, Artificial Sequence
  Description of Artificial Sequence: Synthetic oligonucleotide
  Target: LAMA2; (+) strand; PAM type: YTN; PAM sequence: TTT
cacactgctgtaaagatact

SEQ ID NO: 349539 - DNA, 20 bp, Artificial Sequence
  Description of Artificial Sequence: Synthetic oligonucleotide
  Target: LAMA2; (+) strand; PAM type: YTN; PAM sequence: TTC
acactgctgtaaagatacta

SEQ ID NO: 349540 - DNA, 20 bp, Artificial Sequence
  Description of Artificial Sequence: Synthetic oligonucleotide
  Target: LAMA2; (+) strand; PAM type: YTN; PAM sequence: CTG
ctgtaaagatactacccgag

SEQ ID NO: 349541 - DNA, 20 bp, Artificial Sequence
  Description of Artificial Sequence: Synthetic oligonucleotide
  Target: LAMA2; (+) strand; PAM type: YTN; PAM sequence: CTG
taaagatactacccgagact

SEQ ID NO: 349542 - DNA, 20 bp, Artificial Sequence
  Description of Artificial Sequence: Synthetic oligonucleotide
  Target: LAMA2; (+) strand; PAM type: YTN; PAM sequence: CTA
cccgagactgggtaatttat

SEQ ID NO: 349543 - DNA, 20 bp, Artificial Sequence
  Description of Artificial Sequence: Synthetic oligonucleotide
  Target: LAMA2; (+) strand; PAM type: YTN; PAM sequence: CTG
ggtaatttataaaggaaaga

SEQ ID NO: 349544 - DNA, 20 bp, Artificial Sequence
  Description of Artificial Sequence: Synthetic oligonucleotide
  Target: LAMA2; (+) strand; PAM type: YTN; PAM sequence: TTT
ataaaggaaagaggtttagt

SEQ ID NO: 349545 - DNA, 20 bp, Artificial Sequence
  Description of Artificial Sequence: Synthetic oligonucleotide
  Target: LAMA2; (+) strand; PAM type: YTN; PAM sequence: TTA
taaaggaaagaggtttagtt

SEQ ID NO: 349546 - DNA, 20 bp, Artificial Sequence
  Description of Artificial Sequence: Synthetic oligonucleotide
  Target: LAMA2; (+) strand; PAM type: YTN; PAM sequence: TTT
agttgactcacccttctgca

SEQ ID NO: 349547 - DNA, 20 bp, Artificial Sequence
  Description of Artificial Sequence: Synthetic oligonucleotide
  Target: LAMA2; (+) strand; PAM type: YTN; PAM sequence: TTA
gttgactcacccttctgcat

SEQ ID NO: 349548 - DNA, 20 bp, Artificial Sequence
  Description of Artificial Sequence: Synthetic oligonucleotide
  Target: LAMA2; (+) strand; PAM type: YTN; PAM sequence: TTG
actcacccttctgcatggct

SEQ ID NO: 349549 - DNA, 20 bp, Artificial Sequence
  Description of Artificial Sequence: Synthetic oligonucleotide
  Target: LAMA2; (+) strand; PAM type: YTN; PAM sequence: CTC
acccttctgcatggctagga

SEQ ID NO: 349550 - DNA, 20 bp, Artificial Sequence
  Description of Artificial Sequence: Synthetic oligonucleotide
  Target: LAMA2; (+) strand; PAM type: YTN; PAM sequence: CTT
ctgcatggctaggaggcctc

SEQ ID NO: 349551 - DNA, 20 bp, Artificial Sequence
  Description of Artificial Sequence: Synthetic oligonucleotide
  Target: LAMA2; (+) strand; PAM type: YTN; PAM sequence: TTC
tgcatggctaggaggcctca

SEQ ID NO: 349552 - DNA, 20 bp, Artificial Sequence
  Description of Artificial Sequence: Synthetic oligonucleotide
  Target: LAMA2; (+) strand; PAM type: YTN; PAM sequence: CTG
catggctaggaggcctcagg

SEQ ID NO: 349553 - DNA, 20 bp, Artificial Sequence
  Description of Artificial Sequence: Synthetic oligonucleotide
  Target: LAMA2; (+) strand; PAM type: YTN; PAM sequence: CTA
ggaggcctcaggaaacttat

SEQ ID NO: 349554 - DNA, 20 bp, Artificial Sequence
  Description of Artificial Sequence: Synthetic oligonucleotide
  Target: LAMA2; (+) strand; PAM type: YTN; PAM sequence: CTC
aggaaacttatgatcaaagg

SEQ ID NO: 349555 - DNA, 20 bp, Artificial Sequence
  Description of Artificial Sequence: Synthetic oligonucleotide
  Target: LAMA2; (+) strand; PAM type: YTN; PAM sequence: CTT
atgatcaaaggggaagaggg

SEQ ID NO: 349556 - DNA, 20 bp, Artificial Sequence
  Description of Artificial Sequence: Synthetic oligonucleotide
  Target: LAMA2; (+) strand; PAM type: YTN; PAM sequence: TTA
tgatcaaaggggaagaggga

SEQ ID NO: 349557 - DNA, 20 bp, Artificial Sequence
  Description of Artificial Sequence: Synthetic oligonucleotide
  Target: LAMA2; (+) strand; PAM type: YTN; PAM sequence: CTT
acatggtacaggagagagag

SEQ ID NO: 349558 - DNA, 20 bp, Artificial Sequence
  Description of Artificial Sequence: Synthetic oligonucleotide
  Target: LAMA2; (+) strand; PAM type: YTN; PAM sequence: TTA
catggtacaggagagagagg

SEQ ID NO: 349559 - DNA, 20 bp, Artificial Sequence
  Description of Artificial Sequence: Synthetic oligonucleotide
  Target: LAMA2; (+) strand; PAM type: YTN; PAM sequence: CTT
ataaaaccatcagatcttgt

SEQ ID NO: 349560 - DNA, 20 bp, Artificial Sequence
  Description of Artificial Sequence: Synthetic oligonucleotide
  Target: LAMA2; (+) strand; PAM type: YTN; PAM sequence: TTA
taaaaccatcagatcttgta

SEQ ID NO: 349561 - DNA, 20 bp, Artificial Sequence
  Description of Artificial Sequence: Synthetic oligonucleotide
  Target: LAMA2; (+) strand; PAM type: YTN; PAM sequence: CTT
gtacgaactcactcactatc

SEQ ID NO: 349562 - DNA, 20 bp, Artificial Sequence
  Description of Artificial Sequence: Synthetic oligonucleotide
  Target: LAMA2; (+) strand; PAM type: YTN; PAM sequence: TTG
tacgaactcactcactatca

SEQ ID NO: 349563 - DNA, 20 bp, Artificial Sequence
  Description of Artificial Sequence: Synthetic oligonucleotide
  Target: LAMA2; (+) strand; PAM type: YTN; PAM sequence: CTC
actcactatcatgaggacag

SEQ ID NO: 349564 - DNA, 20 bp, Artificial Sequence
  Description of Artificial Sequence: Synthetic oligonucleotide
  Target: LAMA2; (+) strand; PAM type: YTN; PAM sequence: CTC
actatcatgaggacagcatg

SEQ ID NO: 349565 - DNA, 20 bp, Artificial Sequence
  Description of Artificial Sequence: Synthetic oligonucleotide
  Target: LAMA2; (+) strand; PAM type: YTN; PAM sequence: CTA
tcatgaggacagcatggggg

SEQ ID NO: 349566 - DNA, 20 bp, Artificial Sequence
  Description of Artificial Sequence: Synthetic oligonucleotide
  Target: LAMA2; (+) strand; PAM type: YTN; PAM sequence: CTG
cccccttgatccagtctcct

SEQ ID NO: 349567 - DNA, 20 bp, Artificial Sequence
  Description of Artificial Sequence: Synthetic oligonucleotide
  Target: LAMA2; (+) strand; PAM type: YTN; PAM sequence: CTT
gatccagtctcctccctccc

SEQ ID NO: 349568 - DNA, 20 bp, Artificial Sequence
  Description of Artificial Sequence: Synthetic oligonucleotide
  Target: LAMA2; (+) strand; PAM type: YTN; PAM sequence: TTG
atccagtctcctccctccct

SEQ ID NO: 349569 - DNA, 20 bp, Artificial Sequence
  Description of Artificial Sequence: Synthetic oligonucleotide
  Target: LAMA2; (+) strand; PAM type: YTN; PAM sequence: CTC
ctccctccctccatacgtgg

SEQ ID NO: 349570 - DNA, 20 bp, Artificial Sequence
  Description of Artificial Sequence: Synthetic oligonucleotide
  Target: LAMA2; (+) strand; PAM type: YTN; PAM sequence: CTC
cctccctccatacgtggaga

SEQ ID NO: 349571 - DNA, 20 bp, Artificial Sequence
  Description of Artificial Sequence: Synthetic oligonucleotide
  Target: LAMA2; (+) strand; PAM type: YTN; PAM sequence: CTC
cctccatacgtggagattac

SEQ ID NO: 349572 - DNA, 20 bp, Artificial Sequence
  Description of Artificial Sequence: Synthetic oligonucleotide
  Target: LAMA2; (+) strand; PAM type: YTN; PAM sequence: CTC
catacgtggagattacaatt

SEQ ID NO: 349573 - DNA, 20 bp, Artificial Sequence
  Description of Artificial Sequence: Synthetic oligonucleotide
  Target: LAMA2; (+) strand; PAM type: YTN; PAM sequence: TTA
caatttcaaatgagatttgg

SEQ ID NO: 349574 - DNA, 20 bp, Artificial Sequence
  Description of Artificial Sequence: Synthetic oligonucleotide
  Target: LAMA2; (+) strand; PAM type: YTN; PAM sequence: TTT
caaatgagatttgggtgggg

SEQ ID NO: 349575 - DNA, 20 bp, Artificial Sequence
  Description of Artificial Sequence: Synthetic oligonucleotide
  Target: LAMA2; (+) strand; PAM type: YTN; PAM sequence: TTC
aaatgagatttgggtgggga

SEQ ID NO: 349576 - DNA, 20 bp, Artificial Sequence
  Description of Artificial Sequence: Synthetic oligonucleotide
  Target: LAMA2; (+) strand; PAM type: YTN; PAM sequence: TTT
gggtggggacacagagccaa

SEQ ID NO: 349577 - DNA, 20 bp, Artificial Sequence
  Description of Artificial Sequence: Synthetic oligonucleotide
  Target: LAMA2; (+) strand; PAM type: YTN; PAM sequence: TTG
ggtggggacacagagccaaa

SEQ ID NO: 349578 - DNA, 20 bp, Artificial Sequence
  Description of Artificial Sequence: Synthetic oligonucleotide
  Target: LAMA2; (+) strand; PAM type: YTN; PAM sequence: CTG
tctttctgaagaaaaaaaag

SEQ ID NO: 349579 - DNA, 20 bp, Artificial Sequence
  Description of Artificial Sequence: Synthetic oligonucleotide
  Target: LAMA2; (+) strand; PAM type: YTN; PAM sequence: CTT
tctgaagaaaaaaaaggaat

SEQ ID NO: 349580 - DNA, 20 bp, Artificial Sequence
  Description of Artificial Sequence: Synthetic oligonucleotide
  Target: LAMA2; (+) strand; PAM type: YTN; PAM sequence: TTT
ctgaagaaaaaaaaggaatt

SEQ ID NO: 349581 - DNA, 20 bp, Artificial Sequence
  Description of Artificial Sequence: Synthetic oligonucleotide
  Target: LAMA2; (+) strand; PAM type: YTN; PAM sequence: TTC
tgaagaaaaaaaaggaattc

SEQ ID NO: 349582 - DNA, 20 bp, Artificial Sequence
  Description of Artificial Sequence: Synthetic oligonucleotide
  Target: LAMA2; (+) strand; PAM type: YTN; PAM sequence: CTG
aagaaaaaaaaggaattctt

SEQ ID NO: 349583 - DNA, 20 bp, Artificial Sequence
  Description of Artificial Sequence: Synthetic oligonucleotide
  Target: LAMA2; (+) strand; PAM type: YTN; PAM sequence: TTC
ttgtatgttgccctaaagat
